United States Patent Application Publication US 2013/0129668 A1 - sequence listing, part 26

SEQ ID NO: 431618 - DNA, 122 bp, Homo sapiens
aactggatttttttcattatacaaatgaaatatgcttgtatttatctactcagatcataccgaagaagttgtgaaaagaagtactcttttcctcaaatttcctgttaacactattcaagtat

SEQ ID NO: 431619 - DNA, 122 bp, Homo sapiens
gtggagcagcgtttcctagttctttccagaggcttccttctgcctgccttccagccacatcgcctgagattgacaacgccctacagcaagacggaaacctccctttacagcaccaccttgcg

SEQ ID NO: 431620 - DNA, 122 bp, Homo sapiens
gcactcggagccgcagccgcgcctggaagctgccggcggggaaggtgctgacccggcactcgtactcgccctcatccgcctgcactgcgttgcgcaggagcactgagccgtccagggggttg

SEQ ID NO: 431621 - DNA, 122 bp, Homo sapiens
ggcctccacgcgacggtgaagcaggaaccaggggctgccagcagagcagcccaggtgcgtcgccttagggacagagctgccaagtgccgagctggggctgccagagccgagccgggaacggc

SEQ ID NO: 431622 - DNA, 122 bp, Homo sapiens
tcgtctcctccccctcccccgtctgacgctgcctcctcgggaagggtgtttggagggcagcggccgccccaagccggagccccgcagcgcttcttatgatcagctcggtgtgtgtctcctcc

SEQ ID NO: 431623 - DNA, 122 bp, Homo sapiens
caccgtggcggcttcccggggggcgccggcgcgtcggagcgaggcaagttctcctgcccgcgcgccctcaaggtgccctcctacctcaactaccacttcctgggggagaaggactgcggcgc

SEQ ID NO: 431624 - DNA, 122 bp, Homo sapiens
tccgtggcggcagcagctgaggggctgctgtgaattatgcatgcgtcttcggcaaggcttcgtgcgacgtctcctgttggcttcccatccgtgagcctgcgtgcaggcagggcagagccgtc

SEQ ID NO: 431625 - DNA, 122 bp, Homo sapiens
agttctagggaggacaacacaatgggagaaataaaactgagctcagcagggaagccaaatcgcatagaaacagacaaattattgaagtgggctgaaatggcaggatttgaaatagtcagttg

SEQ ID NO: 431626 - DNA, 122 bp, Homo sapiens
cctacaaactacaaatcccggcaggcagcgggccgttgggcggggccttgggtgctgatccggacgcaaagattgcgccagccagggtgggatcccggtagctaggtgggggctaccctgct

SEQ ID NO: 431627 - DNA, 122 bp, Homo sapiens
cgctgggcgtcgcgttccacatgctgccggctcagctgaacaggctctgggacgtgactgcgctgggaggctggaccgagctggctcccgaggaggtccgcttaggcgcgggagggtgcgag

SEQ ID NO: 431628 - DNA, 122 bp, Homo sapiens
tcactgttttatagatgaacatgcagaggcactctatgaggagaagccccagagtgaccccgctggtaaatgagcccattctaaacctcacatctccagtggttagcatgaagcccctttca

SEQ ID NO: 431629 - DNA, 122 bp, Homo sapiens
ccagcctgccagcatatttctgtgatttattgttcaaccttttcttttgagatagggtctcgttctgttgcccaggctgaagtgcagtggcacgatcatggctcactgcaacttcgacctcc

SEQ ID NO: 431630 - DNA, 122 bp, Homo sapiens
atggccacaccccgtactcgtggccagcagttcctctttgccttatatttgtggtacgcccggccagccttcaagatgggtttgtcaattcggccacctccagccaccacacctgtagggga

SEQ ID NO: 431631 - DNA, 122 bp, Homo sapiens
ttgcttgtatttgtctcattgctctaattctccagtctcctattgccaccctcctctctccgacttgttagatgtaaacgacggtattcactgaaattagatctccttgctcaatgagtcat

SEQ ID NO: 431632 - DNA, 122 bp, Homo sapiens
gaaggattatcatgtaccactttgcatttctctgttgtattcatcattattaatatactgcgcagccggttgctatcactaagtggttcaaaatatcaacacgctataaaataaaaaaaaaa

SEQ ID NO: 431633 - DNA, 122 bp, Homo sapiens
aatgcttttcttttgagcattgccaagcactgtttctaggagcatccttcactccagccccgccgctgtccaaaagaccagggagccctggcaagggaggtttctctgttcagaagcttttt

SEQ ID NO: 431634 - DNA, 122 bp, Homo sapiens
gactgcgtcgtgggcatgcgcggtgtacgtagcggctcccgctcggcctcgtgactcccgcggagacctctcggctgtctccggtcgattccattcgtttcctgtggggggcagtaccagcc

SEQ ID NO: 431635 - DNA, 122 bp, Homo sapiens
tgaaaaggaatatactggagattctgaaggcaatgaccacactgaccacaggtgaaaccccgcaaagacggaggaacccaaagagccacgagagctgtgggtggagacggcccaggaggctg

SEQ ID NO: 431636 - DNA, 122 bp, Homo sapiens
gccagagctctccttccttttgcatttcatcaattgaatttctgtttgtcttcttgtacacgataagaaactgaaaaggggctaggtagaagtcagctcagcaccctgccagaagtaagggc

SEQ ID NO: 431637 - DNA, 122 bp, Homo sapiens
gggaactgtgtgctatgctgatttgggacaataagcgttctagtcccaccaggtggcgcccgcgttcggcattctgagaacgtttggtgtcttctggactccagaatctggacggtccgacc

SEQ ID NO: 431638 - DNA, 122 bp, Homo sapiens
agtgtaagccccttgtctagaatccaggaagcctgtgttaaagctaggctccaccgcagccggcctccgaatctggtgacagtgtgtttgcaccacctggcttccacccactctgacccttc

SEQ ID NO: 431639 - DNA, 122 bp, Homo sapiens
gctgagtgcatgtcgctgcggcattgcaggcgtgtgtgcatgttggctcttgcaacggggcgtctgccaggggttgtctcgggcaggagaaggaggccagactggcaccacttgtagtgatt

SEQ ID NO: 431640 - DNA, 122 bp, Homo sapiens
cccgtctaggaagtgaggagcgcctcttcccggccgccatcccatctaggaagtgaggagcgtctctgcccggccgcccatggtctgagatgtggggagagcctctgccccgccaccccgtc

SEQ ID NO: 431641 - DNA, 122 bp, Homo sapiens
agctgaggggagacagagccctgcctttgggccctggtctagggggcaaggaaagagtcacgcgctccccaggccagatgcacaaatcacttgagcttgggggttggagaccagcctgggaa

SEQ ID NO: 431642 - DNA, 122 bp, Homo sapiens
agggaggaaggatgtacaggctagttctctggtcctgttcgggccccaaaccggttctcccggtcccaccgcctctggccctaaggcctccaacccgcggcctgacaagccctcacatgaag

SEQ ID NO: 431643 - DNA, 122 bp, Homo sapiens
cctcacctctcgcgaggggtgcgtcccactgtctctgattagccccgaggtcagaggtaacgtttcctgggaagctaactattggctgaggccaggtgtttccggcggtggcttcagagttg

SEQ ID NO: 431644 - DNA, 122 bp, Homo sapiens
attaaataagatcattcctctgattaaaagccctctaaaagcttcatgttgtttttctatcgaggacgccaagtatgatctggccctgtctgagtctctggcagcatttgcagccactctct

SEQ ID NO: 431645 - DNA, 122 bp, Homo sapiens
gggagctggggggcggggcgggggcagtcagggaacaaacagctgcccttagaaatgacacgccctgtgggcaatggcggcgctgggacgtctgcagccgcattcactgccacagagaacgg

SEQ ID NO: 431646 - DNA, 122 bp, Homo sapiens
ctgggacatggcagagcctggactcactctcctcccatctgccccaacccacggtggaatcgtttgctgagccgctgcctctaccctgcccagtctggcccctggctcaccttccccctctg

SEQ ID NO: 431647 - DNA, 122 bp, Homo sapiens
aacagatgagtttgcggtgttcccttcccctgcaacatggctcctgctaccccattccaccgaaatgctcttgacaaaggacactaggtttttctggttttgaaatccaatggactcttttc

SEQ ID NO: 431648 - DNA, 122 bp, Homo sapiens
accccttcccgcttcccgcttctctcaaccggacactaaagggttacagggtcactgcaccggatagagacagtagaagtgggtggctggccacacatgttgtcttgtaattcacttgcacg

SEQ ID NO: 431649 - DNA, 122 bp, Homo sapiens
aggtaagggtaatattttaatagtagtcaataatctagcttaaggctgtaactcttctatcggggctaattgtatgaataggtgtcagtatgttgaagattactttcttttgtgactttctt

SEQ ID NO: 431650 - DNA, 122 bp, Homo sapiens
aactctgcaggcatggagagtttagctgtgggttagctcccacctgtgaccgatggagagcgtggtgcgggccccttcctgctgtccctctgttgtgctttaggtgagttcctgcccagggc

SEQ ID NO: 431651 - DNA, 122 bp, Homo sapiens
ggaggctgaggcaggataatcactagaacccgggagacagcagttgcagtgagcagagatcgtgccgttgcactccagcctgcacaacaagagtgaaactctgtcttaaaaaaacaaacaaa

SEQ ID NO: 431652 - DNA, 122 bp, Homo sapiens
ccgaccgacccctcgtccaccaagggagggctcagagtggagaaggcaaggtttttggtgcggggctccccagcactcagaccactagagccctcctcgtgattctgccgatacgcggctct

SEQ ID NO: 431653 - DNA, 122 bp, Homo sapiens
gggcgaggtcagggaggcgagaggccggccccttaaaggggcgatgtgccgcgggactcgcgcgtggggcccacagtggagccaccttcccaatcggaaagattagcgtgtgggaagctgta

SEQ ID NO: 431654 - DNA, 122 bp, Homo sapiens
tacaatgttagtcctccactgagaagtggggtctatgttccctccccttgaatctgggcacgggccatgactgttctgaacaacagagtttaaaggaagttatgtgattctgagggtaggtc

SEQ ID NO: 431655 - DNA, 122 bp, Homo sapiens
tgaactggggcaaggcagcctccagaaacacacctgggtctctgggcagtcatctgcaggcgattgcctccaggtgtttgccagtgggaacccattgaaagtcgatgcaatttagagcaatt

SEQ ID NO: 431656 - DNA, 122 bp, Homo sapiens
gagcgcggccctgtcctcccttctctgctcacaactgaggatgctgcacattgtggggtgcgaaagtccgcacggcctatctgtcatcccgcattatcaggaagacgcgccacttccatgcc

SEQ ID NO: 431657 - DNA, 122 bp, Homo sapiens
agcattacaatagaaaaaaaccaaagttctaggagcacaaaggaggcaatgaatacatttcgaagttttcaagtattatgaaagataatgttaacctataatggaagagcccttcagggaaa

SEQ ID NO: 431658 - DNA, 122 bp, Homo sapiens
tttcctggagagtgatcaaaaacagtcgagcctgactattcaaactcacacataccttcacgaaagcgttttctacaagccagaccatgtagtgctctgttgcttaggagctgggcagagaa

SEQ ID NO: 431659 - DNA, 122 bp, Homo sapiens
aaaaaaaaaccccaaagatcaacctatctgaattgggtaagtcaaaagcttattcctggccgggcacggtggttcatgcctgtaatcctagcactttgggaggctgaggcgggtggatcaac

SEQ ID NO: 431660 - DNA, 122 bp, Homo sapiens
agatgccggtggcgcgacttgtggttgccgaagttggatttctcgcaaaccagtaagtgccgcggcgcctcccgaagccggcgcagcgtggccatgctctcctgggttcctggtcctcccgg

SEQ ID NO: 431661 - DNA, 122 bp, Homo sapiens
cgcaggccacgtggtggcctccaggacccgagccgcgcgcttaacctctcgggctgggtccggcgggctgccccgccccggaacaagccccagccccactgtcaccgttgggggtgagctcg

SEQ ID NO: 431662 - DNA, 122 bp, Homo sapiens
acctcgtgatccacccacctcggcctccgaaagtgctgggattacaggcgtgagccaccgcgcccggccgtgcccagctaatttttaaaattttttgtagagatgagatctcactttgttgc

SEQ ID NO: 431663 - DNA, 122 bp, Homo sapiens
ggggttgcgtccaggctgcccgggctgtggcacgactcccgggtgggaggggccggtggacggcccagtggccaggcccgggtgcccccacctgtaccaggccctcccggacaccgggaaaa

SEQ ID NO: 431664 - DNA, 122 bp, Homo sapiens
ttccagacatgggagatccaacctcgttctccatccccatcctcccccatggtggaggctcgcaaggccctgaggctcgccaggatctccagatttggggaaggtgaaagccgtctttaccc

SEQ ID NO: 431665 - DNA, 122 bp, Homo sapiens
aggcggcgcctacgctgcggagccggaggagaacaagcggacgcgcacggcctacacgcgcgcacagctgctagagctggagaaggagttcctattcaacaagtacatctcacggccgcgcc

SEQ ID NO: 431666 - DNA, 122 bp, Homo sapiens
cagcctgtgcacatcacattttgtagaaaggcatccaatttgattggaaaataacccctacgctgggacttttgaggctggttcatttccatgttcaaccgtgccattgggggtcttcaagt

SEQ ID NO: 431667 - DNA, 122 bp, Homo sapiens
agtctccttgttgcctcccagagcacattcttccccatcccaccacccaggctataaatacgtagattagccaccggttgggactagccctccattaggaagaggaacagaaatgtcaccag

SEQ ID NO: 431668 - DNA, 122 bp, Homo sapiens
gtgtggaaacaactcttggtgcggcacacctattgtagagttcttgcttttccttttgatcggagaggggtagggtgcctgggaactagggctggagcagaatctctacctgaaacagtaag

SEQ ID NO: 431669 - DNA, 122 bp, Homo sapiens
aaagtgagttcctgggacaggtgcctataggatgcttggactggagtgatatgaaccccacgcccaggctttcagggttgacaccatctcggggttcaaggttcaagttcaccagtccccac

SEQ ID NO: 431670 - DNA, 122 bp, Homo sapiens
ggctgttctcaggctcctgaggggcggggccagggcctcgatgcctctgccctgcttccccgtcctcagcaggaactcatttaggaggttgaggctgggcccttcccaggagtgctgcctct

SEQ ID NO: 431671 - DNA, 122 bp, Homo sapiens
tacttgggaggctgaggcaggagaatcacttgaaccagcaagttggaggttgcagtgagccgagctcgcaccctgcactccagcctggcgacagagggagactcagtctcaaaaaacaaaca

SEQ ID NO: 431672 - DNA, 122 bp, Homo sapiens
ggcgtgggcggaggctcttaccccggaggccgagcggactgagccggggccggtccgggacgggaaattggtctttgatctgtgcctgtctctggctgatttgtacctggaccctcctcgac

SEQ ID NO: 431673 - DNA, 122 bp, Homo sapiens
aaccctcgcagtggctaagctgacggcagcaacgtgggtcctgactctggcctggcataccggctgccttccgggcccatggcttttgcaggggacctgctgccggggaaggatcctaactt

SEQ ID NO: 431674 - DNA, 122 bp, Homo sapiens
tccctttggagtgccccggggaaagccagggctgcaggcagttccagcaccaactcagaccgcatctgcccactgcctagcggggcacttctctaccaatccgaagggctgctcgcccggcc

SEQ ID NO: 431675 - DNA, 122 bp, Homo sapiens
tcacagcttgttcacgaacttcttttcaaacagcactgcaatgaattctctccaagtgtacggattaaatttctagtgattaacagatggatttataaattaaatggcacaagcatgtgata

SEQ ID NO: 431676 - DNA, 122 bp, Homo sapiens
acttcctctttttaaagtaaaggcgatctgaagaaagcataaatgcacaaaaatattgtacgatagtcaaaaataagagggcatagaagatggaataagctgaatgcctttctggatgcaat

SEQ ID NO: 431677 - DNA, 122 bp, Homo sapiens
aggctcctgagtccttcgtccccaccaccccatgcctctgacggtggaaatgccagagggcgctgctgctgcgggagcaggaagccagcctccgtcccccagcggcaaacgccgcggcctca

SEQ ID NO: 431678 - DNA, 122 bp, Homo sapiens
aatcaagccccagggctcttggccatgaggccccttggccacctcctgcggtgacggtgccggcgccatgcagagccagcataaacaagtccttgaccgagtgagagccctggccccatgag

SEQ ID NO: 431679 - DNA, 122 bp, Homo sapiens
cccgccgcgtacgcctcggccacgccagcgacctcggtgtccacgattccccggcggcggcggcgctgcccaggtcagccccgaagctgcacactcaccccgtgggcgccgggcaccgtctg

SEQ ID NO: 431680 - DNA, 122 bp, Homo sapiens
gggcaccttggtgtcgggcttggggctgctggctgacttccctctggactccatggtgggcggggcgtatgggacaggcaggtggctgcaccagaggggctcaggacagtttgtcgcccctg

SEQ ID NO: 431681 - DNA, 122 bp, Homo sapiens
ctgcactgcaggtgtgccacagagcaagactctgtgtacctttgtctgaggtaggcaacccggccacttaggcgggcagacgccctctgtgattggctgacatgattccaagcaacaggatc

SEQ ID NO: 431682 - DNA, 122 bp, Homo sapiens
tggagggaaggaatccacctgaggatgacagcgggatgtggtggaatcagtttggagaaacgctgatgaccgggatcccgactccaatcagaggaagtggaacaggggatcggtagacaact

SEQ ID NO: 431683 - DNA, 122 bp, Homo sapiens
ccctaggtccaaaaaatggtgtctatatcaagatcgtatcccgctgacacagaaggctgccgggtggggggagggcacccccaaattcaaagaaaaccctaagtgtggatgttcagaatttt

SEQ ID NO: 431684 - DNA, 122 bp, Homo sapiens
gtctttggagctgtcacctgagctgagtgggacaagagctctacagggcaggccacactgcgaaggaaggaggcaacacgggcaagggctgcctgctgcccgctggagaccgcaccatggag

SEQ ID NO: 431685 - DNA, 122 bp, Homo sapiens
actttaatttcagtaagtctgtgctttcatttttcctttttattctttcattgttttgttcgtgaccctaggaatgctggtgagtagaggcatccactcttcccttgggtcccagccctgcc

SEQ ID NO: 431686 - DNA, 122 bp, Homo sapiens
gacacagcggcgacgagggccgggtctgggagggcgtgggccagggaggggcgacggaggcggtctcccttgccggggtgctggtgacacagcggctgcacctgtcagaacacgccagggtg

SEQ ID NO: 431687 - DNA, 122 bp, Homo sapiens
ttcccactccacctcccactatctcagcgatgggcacgcgagcgccagcccgggcgaccgcgggggaagaagcggtccacgccacctcaggcccccgccccaggctctgccagctgggggtc

SEQ ID NO: 431688 - DNA, 122 bp, Homo sapiens
tccttaccacccagaacccagcagacctggcccttgagaactaaggaagcaaaaccatgtcggtcagtgaggtactgtatggagcctgaactcaagttagaatattttgtaggatttttaaa

SEQ ID NO: 431689 - DNA, 122 bp, Homo sapiens
gttcaaataaaggactaggaagcaaacacccaagcaccggggaacagaacagaaagtaagcgagcccgggacgcgaatttgagggcaggacttcgggagccagagcctggcggcgctgccgc

SEQ ID NO: 431690 - DNA, 122 bp, Homo sapiens
acagggttgttttcagaagccagccgtggggagagatggcagcggaagaagggtgactgccgtcgcgctgtgggtcccccagccccaaatctcagagccgcactcccctctcacacaaacac

SEQ ID NO: 431691 - DNA, 122 bp, Homo sapiens
gaggaaaaggacaacagcttgccgctccttgcttggatcgccagcttttattcccttatccggccccgccccctcccccacacatcctgctgattggtccactttacagagagctgattggt

SEQ ID NO: 431692 - DNA, 122 bp, Homo sapiens
agaggacggagaacgggggcggggaggggaggcgggggcaggaagcgatacaccaaatctcgagactgtaactctgtagcttatgctttgacgagagaaaaaagggcagttgggtgggagtg

SEQ ID NO: 431693 - DNA, 122 bp, Homo sapiens
gccctctgcctggcagggcatccagaggtgtccgcgctcccggagctgggcggagcggggcgcagcccacgtggttcgggcgggaggcgccgggacgtggccagttgcccgcctgccccgga

SEQ ID NO: 431694 - DNA, 122 bp, Homo sapiens
gtttggacttgcatatttgctgctaagagtttaacagcatttcccagtgccattttatcccgtcttaaagagagatgaactgcagacttaaggataatttattgctatatattagctaaaat

SEQ ID NO: 431695 - DNA, 122 bp, Homo sapiens
accagaggcccagactctggtccttgagtcaagatgcccaacccactcgcctaccaattacgtcccttcgtccagctccaagccgggcggtaatggggtccaggaaggctaaaggggacacg

SEQ ID NO: 431696 - DNA, 122 bp, Homo sapiens
gatcaccagacactaaagttcaacgatcaccagacacaggcatcgctggaatggatctcgcgtgagggtagagcacccacaccacaggtgttctcaacatggtcccaacccagcttatctcg

SEQ ID NO: 431697 - DNA, 122 bp, Homo sapiens
ctcccatttggcctcctgttcatatgaaggaaggcccaggaccatgagttctcagatccgcgggctctgagcaaaccgggtgcaccctgactcggcttcatcctctctaactccacggtggc

SEQ ID NO: 431698 - DNA, 122 bp, Homo sapiens
ctgagacggcgctgcctcctgactgccggttggaggctacaggggctctggggcaagggccgcttttaggagtttgctggtcacgaggggggacgcgacctcgtccaagatctgtctgcaag

SEQ ID NO: 431699 - DNA, 122 bp, Homo sapiens
acccccgctcctctcccccaggaggctccttgatttatggtagctttggacttgcttccccgtctgactgtccttgacttctagaatggaagaagctgagctggtgaagggaagactccagg

SEQ ID NO: 431700 - DNA, 122 bp, Homo sapiens
gcgtgtctctgcaaggagggcccacatgagttgctgacagatggcctgattaaaaaaagacgagccacggactaagccggccttacaatttgacagctcaacttaacttcctcgaaagaagc

SEQ ID NO: 431701 - DNA, 122 bp, Homo sapiens
gaaagggaaaacaaaagtgccaagtgctcttgacccagttttccaggcttcaatccagaccgcccacaaacaggtgtgtaaagaacacgtttgcatgtttcagttggagtcagcggaaaggt

SEQ ID NO: 431702 - DNA, 122 bp, Homo sapiens
ccagttttggctgacatctctacaacctgaacaattggcttaaacttcacttgggattcccggttgcttgttttagcatggcaaaatttggcgttcacagaatccttcttctggctatttct

SEQ ID NO: 431703 - DNA, 122 bp, Homo sapiens
gtcttaaccagaacagcaaaactgaatctatcggtttgaaaaaatgagagtgcaaacatgcggaggaggaagaggcaaaacaggtggataaaatgttgcactaagctacacacaatattagt

SEQ ID NO: 431704 - DNA, 122 bp, Homo sapiens
acattccttcctggccataaattggaccctcccattttcaggccctcttgtgtgagtcagcgcagaagaggagactgatacatttgcatgacaaatagagggaaatattctgtgccagtatt

SEQ ID NO: 431705 - DNA, 122 bp, Homo sapiens
agcgcacggccccgggcaggcagcgggcagcccatcccgggctcggcggccccggctctccggccctctccgcgagcccgcgctcctcccgctgtccccgggcccctccctggctgcaccgt

SEQ ID NO: 431706 - DNA, 122 bp, Homo sapiens
agggatttccaacggaggcggctcctctctcagcgtcctcgctgctgatccccttaccgacggctgaagaagcagattcatcccttcaacaaatctctgttgataggcaggaggagtaagtc

SEQ ID NO: 431707 - DNA, 122 bp, Homo sapiens
aattcagtcgcgcgcggtgcagtcgggaggtggaggcaccggctgcattgttttcgggatcgaggggtgagggcgctatggcacccggctgcaaaagtaagtctgggcccccggcttcgtta

SEQ ID NO: 431708 - DNA, 122 bp, Homo sapiens
tgctgggtggcatgaccagtcccaagagaagacccttgttcccccagcacaggggtgggccggatctcaccaggagcagcagaacgctcgccattcccgaaggaccagggccaccccatctg

SEQ ID NO: 431709 - DNA, 122 bp, Homo sapiens
caagcccacgcacaccgggagctttagctggcccgcaaacgccgcggaagccccggttcccgccacacttccctgcaggctgagggagccggctccagcctcagccatcccagggtaaggga

SEQ ID NO: 431710 - DNA, 122 bp, Homo sapiens
ttaagagtctgtggtaagctatgactgcaccactgcactccagcgggggtgaaagtgagacggtctcaattttaaaagaaaaaaagaatagggcgtttacctaacttttaactgtggaaaat

SEQ ID NO: 431711 - DNA, 122 bp, Homo sapiens
gagggtgtgacggggtctgaccctggggtgctgcctcctcagggctgcaggaggaggcgccgccgtcggggtggaggcagtagagggaagggctcagtgggtgccacagcaaggacagcctc

SEQ ID NO: 431712 - DNA, 122 bp, Homo sapiens
tgcgggactatggaccatattttgagtatcagtatcaagttgctaggacataagaggtctcggttcagctgaggcctgttggtttctactctgcctgacacattgttgacaggataacatca

SEQ ID NO: 431713 - DNA, 122 bp, Homo sapiens
tgagcaaacaattgcactacggtgccaacttgaaacgtcaagagaagcaaataactctcgcggcacctcaggcttggaatctcagaacgggggtgccttgatactcccagtgcgtgaggtca

SEQ ID NO: 431714 - DNA, 122 bp, Homo sapiens
gccgaacggcatgtgagcacattccaggaataaggaaacgagaggagtaggcatttctaccgtctaaggcactttgcatgaaatcccgtggcactggaaaagtagttcaaacaaagtaacgc

SEQ ID NO: 431715 - DNA, 122 bp, Homo sapiens
cacgctgagaggtaggtcttgggcgggaggctgcaggcctctgaccactgacccactccccggaccccgggctggcttggggtgcctttgagtgtttttacaattaaggacaaatcggtaaa

SEQ ID NO: 431716 - DNA, 122 bp, Homo sapiens
ataccagtaatctttttttcctggtcagtctggctagaagttcaatcttgttgaacttctcgaagagccagaattttatttcattgaccttctttctcttttgtttcttttttgtcttttat

SEQ ID NO: 431717 - DNA, 122 bp, Homo sapiens
gcagaaatcggtaaagactgaactttgctggcctataatcagtctctttcctgattaaagcgttccttattctgggaattggggatggagacaggggtctctataagcagctgcagtgcaag

SEQ ID NO: 431718 - DNA, 122 bp, Homo sapiens
aggccaggttttgcacagcgaggaagtgcctcttctgtacttgggccgggtgcactggcgcgtgaacccctctcggacaccggggggcaggcaccgcgtatcagaggagcagtggcctcaca

SEQ ID NO: 431719 - DNA, 122 bp, Homo sapiens
gggcagaatcctccagatggctgtggcgggcgagggtgtctggcagagcccctggtggcccggccccgtggacccacgatgcgagtgggaggtggcggagatacaggcgtaaggagccctgg

SEQ ID NO: 431720 - DNA, 122 bp, Homo sapiens
gtgagggttgttggggccctgcagtccctggggttcacctcaagtctcgagtgtcaaagccgtgaaggggagcaccagggccaagggacccagagttcacgggtccaatcacccagcaggcc

SEQ ID NO: 431721 - DNA, 122 bp, Homo sapiens
gaagggggagcaggcgtgtcacatagtgagagaggggtcaagagacagtggaggaggtgccgggctctttttaacatgtgaactaatagagtgagagctcactcattaccacggggagggca

SEQ ID NO: 431722 - DNA, 122 bp, Homo sapiens
tatatctgttcataagaacatagcacaactgcatggtaaattccatgcttaatggacattcgagggaataaagcaccttatacactatcaaattcggggcttgcttagctcaactatttaca

SEQ ID NO: 431723 - DNA, 122 bp, Homo sapiens
aaagcctcgtccctttagcccaaggcacttcgttcctcctggagtccactcggcttccagcgggttcccaggtgaactgaaatccagagctattctcatctggttgccctgggaatttcagc

SEQ ID NO: 431724 - DNA, 122 bp, Homo sapiens
gctttgaaaatatggttgtatggcaggctgcctttttaccctggcaacagtgacagccctcgtgtaggcacatgtccaaaggaggccatctccttccatttctggaatgtgaaaaatctcat

SEQ ID NO: 431725 - DNA, 122 bp, Homo sapiens
aaaccctttgaaccccgtcccgggaattcactgcttttctgcaataacaatagtaataagcgtaatgaataaatgatgtgctcgatcggttttcgcagctataaaagacccggagttgggtt

SEQ ID NO: 431726 - DNA, 122 bp, Homo sapiens
ggcagggtagtgtaatggagagagtgcgggccgagtagcagactgggccttctgcagtcacggtgtcgtcctaggctccctggagacggtggcagtggtggcaggtccggctctcccatgcc

SEQ ID NO: 431727 - DNA, 122 bp, Homo sapiens
ttaattttttgcttgtttgttaggagaaggtgggaggagggctgttggtgaccttcttctcggacgatttatccatatttcaggaagaaaggcaattagaagtagaagacagagggagaaga

SEQ ID NO: 431728 - DNA, 122 bp, Homo sapiens
cagccagagcctgtcgactgcggctgcgcaggtatgctggggcggggcttcaggtcaccccgcccatccccagcctacgcgaccattgaacagctgccgcccaacggctgggtaaatcctca

SEQ ID NO: 431729 - DNA, 122 bp, Homo sapiens
ccacttggagccccgggtcctcgcgcgctcacagcggcgacgtactggctcataaccatccgtgcatacaaccatctggagacgaacacacacacgcacacgcgcgcgcacacacacacaca

SEQ ID NO: 431730 - DNA, 122 bp, Homo sapiens
tgtgttatagtgacttaacggagggcaccgtgtgtgttatagtaacttaacggaggggaccgtatggtgctatagtgacttaacggagggcactggatggtgctatagtgacttaacggagg

SEQ ID NO: 431731 - DNA, 122 bp, Homo sapiens
gatgcttccctcaacacacaggagaagggcatgtgagttactgtgcagggggagtgaaggcgaagcccagggcctggggagctgctgcagcacagtccattactctttccccagtggccgct

SEQ ID NO: 431732 - DNA, 122 bp, Homo sapiens
aaacttcccaggcctccacaaacaagtttattgggggtccgaaggaactccccaaacctccgtgatttggcaggaggcaagataagggtaatcaccccagatctaatctggacccatttaga

SEQ ID NO: 431733 - DNA, 122 bp, Homo sapiens
cgggtctgtttggcagtcagggcgcgagctggtgagcggatgcgtgggcggagggactggcgctacccacccagcagccacccactgcaggtgagtgcccctcccagggcgaggggaggaga

SEQ ID NO: 431734 - DNA, 122 bp, Homo sapiens
tatcagagagtagggtggggcctggaagacgtgatgattcaaacggactaatgatctgggcgcatctggcagaagtctccaatgagcagtcagttaacaaccaattgaagatacactttcca

SEQ ID NO: 431735 - DNA, 122 bp, Homo sapiens
caagagtggcaagcatgtcaccaacagccccttcaagatcctggtggggccatctgagatcggggacgccagcaaggtgcgggtctggggcaaggggctttccgagggacacacattccagg

SEQ ID NO: 431736 - DNA, 122 bp, Homo sapiens
acaggcgtgagccaccccacccggccaagaatagttactctttaagatgcaatgttttgccgggtgcagtggctcacgcctgtaatcccagcactttgggagggcgaggcgggtggatcacg

SEQ ID NO: 431737 - DNA, 122 bp, Homo sapiens
ccgcctccagggttcacgccattctcctgcctcagcctcccgagtagctgggacaacaggcgcccaccaccacgcctggctattttttgtattgttttagtagagacggggtttcaccgtgt

SEQ ID NO: 431738 - DNA, 122 bp, Homo sapiens
cattcaccatttacccaatgctgatgaagcacctattgtgtcagctgctgtactacataccgagaataaataatcagaaggttaagccatggattctgctattaaggcacccacaatctagc

SEQ ID NO: 431739 - DNA, 122 bp, Homo sapiens
gctctcctctgactgccccaggcaaactctatgtctttccgtgggccgatggcgtgccagcgtgctggcatctgccactgcatgttggtatgctcttccaccagtgtattcctctcgatgtc

SEQ ID NO: 431740 - DNA, 122 bp, Homo sapiens
ctcactaaaccattaacagtctcgcatgaaatccttaaaaagaattccctgattgtcctacgtcattctggtgaatcgtgtatgtgtacttgtgggggtcagatgatgtgagaggttggagg

SEQ ID NO: 431741 - DNA, 122 bp, Homo sapiens
gtaattttttcttgctttctgaatattgaccttaagtagtccattattgactgtgaaatacgtgcacgtgaggccattcttccatgttagtagcaatttattgtgcagtacttgtacctatt

SEQ ID NO: 431742 - DNA, 122 bp, Homo sapiens
cccaccccaacctcaagccttgtcttccagaatggctccacaaagaggagagaacagagacggatcaccaccagagcctgagaagagggcctgtgaaaactgccctccttccaatcaaaaag

SEQ ID NO: 431743 - DNA, 122 bp, Homo sapiens
cccgcctggctgggggccgctgcacaccgggggtggaagtggggagccggggaccccgatcgctactcaggactccaagaggggccgggttcttctagggatgtacaaaaatctagggtgac

SEQ ID NO: 431744 - DNA, 122 bp, Homo sapiens
tacaggagggcttcagctgcgtggtcaccaaccgattcgaccagttatttgttgacgaatcggaccccttcgaggtgctgaaggcagcggagaaaaagaaaaaagaagccggcgggccggcg

SEQ ID NO: 431745 - DNA, 122 bp, Homo sapiens
cctggttccttattcccgctggctcccaccaactgaaaagcagaggtggctcgcaagcggcggggctctgccctagattgccagtaggcgctcgactcacatccagctccaccccgggagat

SEQ ID NO: 431746 - DNA, 122 bp, Homo sapiens
ccaatgaagctcagtgaccgggcctcacttgcatgggcccctgtgtgtgctgggagttgccgggagttgagtgccataggtggggcgaggaagccgagtttgcacacgagcacttctgacaa

SEQ ID NO: 431747 - DNA, 122 bp, Homo sapiens
cagagcagtcaatctgtgttgtgagccgaggcacagctgcagaagcgtgtctgaggtgtccggtggaggtggcagccgagctctgggactaatcaccgtgctggggacggcaccgcgtcagg

SEQ ID NO: 431748 - DNA, 122 bp, Homo sapiens
cagctcgggagcacatcagaggcttagaggcgagtgggaagggactcagacagtgcaggacgagaaacgcccgcggcaccaaagcccctcagagcgtcgcccccgcctctagttctagaaag

SEQ ID NO: 431749 - DNA, 122 bp, Homo sapiens
cgctgtttgtcacacaaggcctccaactgggacggcgtccaccgcgccccgccccgcccgcggcaccgtggcatcttgggacatgtagtctttggaggggcagctgcctccaccaagtctcc

SEQ ID NO: 431750 - DNA, 122 bp, Homo sapiens
gaagctggaaaatggccgtgagtcggtctcgtgtccagttagaactaactcatcagggtgcgcatctgcagtcttctgttccggcaaggagaaagcattcgtatcatttctagcttgtcaag

SEQ ID NO: 431751 - DNA, 122 bp, Homo sapiens
ccgtccctctagccatttctcaaccgtctcgaccggcgagttttcgttgaggcgagggagcgctcgctcccacaggttcgagggctgggcggagccttgggaaacgggccctggtaatctcc

SEQ ID NO: 431752 - DNA, 122 bp, Homo sapiens
ggaggctctgaggggatgcaacaaaatgatccttatgatgtccaacaaggaaatagaggacgaaggcctgtgtgttgccaggcaggcacctgggctttctggaatccaaaccacagtcttag

SEQ ID NO: 431753 - DNA, 122 bp, Homo sapiens
cggcggcagcggttcccccgctgcatgatgggagagtgtgtggagtgggcggggggtctccgcggaggaggtggaggaggcggcggcggcggcggaagagggcggagggtagtgggatgggg

SEQ ID NO: 431754 - DNA, 122 bp, Homo sapiens
taagcggatacggcagaagttttggggccagacacaagacttccaagtttgaatgggcagcgcaaaacccagacaagttttccggtagtgccgccaacccctgtcaggcacagaagacacag

SEQ ID NO: 431755 - DNA, 122 bp, Homo sapiens
ccattaaccctttcaccatgctctgattcagattccgttagtaaagtctgaaattcaggtcgcctaacgcctctggtcttaatcaaaactatccattcggatatggtatttatgatctgatt

SEQ ID NO: 431756 - DNA, 122 bp, Homo sapiens
tttacttccgctggctgagctgttgttcctgaggtcagaccccagccagtcttttgtgtacgtgcaggaccatggtggctttagtttctaccccacccttcctaggaactctacttgtggca

SEQ ID NO: 431757 - DNA, 122 bp, Homo sapiens
aacccgccgcccacccttgctctccgtggtttacccctgggctctgaggcctggtggtagcggccactgccgcggattggctgttgcggacccggggcggggcaggtgggagaggctcgttc

SEQ ID NO: 431758 - DNA, 122 bp, Homo sapiens
ttctagctgatatccaagtgtctatccaggtcccagccagtcccgagactgcggtgtggccgcctaaaacatttccaaacacaaaactcatcgtggcacttccctttcttaaaactccttaa

SEQ ID NO: 431759 - DNA, 122 bp, Homo sapiens
ttcaacctcagggatacttggcacaaaagtggacaagacgagggtcctaagtggaaacagcggggtagagtaaaactctgcctactacagcacaagactctctagccccctaactcccatcc

SEQ ID NO: 431760 - DNA, 122 bp, Homo sapiens
cccgcctcctaatctgcccgccccactggccctgggagccccttcccacaccccccaccccgctcccactgggtgcccagtaaacagagttatctcttacccacatctggacagctgtgagt

SEQ ID NO: 431761 - DNA, 122 bp, Homo sapiens
agcaactgaatgcattagctctcatgcttttcacggtatttgaagcaagtataaatggttcgtctctgtggcgccactgtcaaaataacacatacacttctttgaatgtagctccaaaatgg

SEQ ID NO: 431762 - DNA, 122 bp, Homo sapiens
tctctttgggaaaaaatagaaataaaacaatctccctccataatgtgagcaatattacctcgtgcattgtataatttgatgtaaaagaaatagttaccaatgctagcttgtgtggtcttcca

SEQ ID NO: 431763 - DNA, 122 bp, Homo sapiens
cttccagaagtgctggggcaggtgcatcccttgctgacttggggccccattgaggctctgcgtctgttcctcatgactcatgaatgtgttcctcatgactgttcctcatgactcatgttcct

SEQ ID NO: 431764 - DNA, 122 bp, Homo sapiens
cccaggattcagggccgctctctacctgtaaagcagtgtagctaaggggaagctgagccccgcaaggcgttttcaggcaggacaccccttgtcattcgaacggttctggtgtgagccagggt

SEQ ID NO: 431765 - DNA, 122 bp, Homo sapiens
cgttccagtctgctattaaaagccattatttgaagacgggtgcacaggcttccagctgcccgccagaagggtcctccgcaggacacaggttaagtaatcacttcttcgggggagactagatg

SEQ ID NO: 431766 - DNA, 122 bp, Homo sapiens
cgcaccgcggcagccccaggcggcccggggcgaggcacgcagggagggaggcacaggcggcgcgtcctcagcagcccgcccgcccgctccacctaattatcttgaaattattttgtttctta

SEQ ID NO: 431767 - DNA, 122 bp, Homo sapiens
gtctaactcctctttccgggacagctgaggccctgacacctggcagtggctgacacctcccggccggggcggctgcatccctaaacgaaaaatcgaagctgccagcagccgaggtgcagcga

SEQ ID NO: 431768 - DNA, 122 bp, Homo sapiens
gactcagaatctcttgagaagtccctaaagccaaggacgagggtcatcagggggcggcagcggcagagccctgctaatgatgggcacttggcgtaccggtcgagcaggagagggcaccttca

SEQ ID NO: 431769 - DNA, 122 bp, Homo sapiens
agctgcagtggagatggggaccgtccggaaaggggatgggctgttgggcagatggtgggacgcgtctctggcctgggagcgggctcccccgacacgccaccttccctgccagatggtgcttc

SEQ ID NO: 431770 - DNA, 122 bp, Homo sapiens
tggacagtgattcttcttctgttgtccagagaaggatgtgctgaagagttccccccaacccgaggacttgggggctttcaggcgcagagggagccttccctctcgcctgcagccttcttgca

SEQ ID NO: 431771 - DNA, 122 bp, Homo sapiens
tggccttctgctatagggttgtggaccgaccccccacccccacctcccgggattacagcccgggccaacagacccccagtatactgcaggcaaaatgaatgaatcgggactgtaattaccta

SEQ ID NO: 431772 - DNA, 122 bp, Homo sapiens
gaagggggccggcactggcaggctttggagtccgcacccgggggtaccagagtggacatccgcctgagcccagagtatccccagggggcaggagcggccccgaagtgtgtggaggaggccgc

SEQ ID NO: 431773 - DNA, 122 bp, Homo sapiens
acctcgagggaccaggagcagaactgtgagaaacggagctaggtgatgtctggtttactccggtttggggatggtatagacagctaggtgtcctgaagacagacaaagttgctcccagacct

SEQ ID NO: 431774 - DNA, 122 bp, Homo sapiens
ctccttccctggcccggtctcccggagtgccgggcttccccactccccactcccggtgtccgctggacttcatggcttcatttactctaatggactatcttagactgcaaagcgcttttcag

SEQ ID NO: 431775 - DNA, 122 bp, Homo sapiens
gcttacttggctatggggtggacccctggccaggagacagcaaactgtttcagtaatgtgcgtgtcgtgcgtgtgtgtgttctgtggtgagcaggcctatgccattaaacaaacggtgtggc

SEQ ID NO: 431776 - DNA, 122 bp, Homo sapiens
tgggccatgggggccgtgtgtctccactcccgctggtcctttccacaccctgaaccccagcgtcaccactggcatctcagccagttgtgttttctgctagctggagaggagtggggggtcct

SEQ ID NO: 431777 - DNA, 122 bp, Homo sapiens
agcgtctgcagtgtgtgtctgctggacaaagggatgattcacataccaggcgggatggagcgagatggcgcaagatttcatcacagtgctcaggatggcatgcaatttaaaacgtatgaatt

SEQ ID NO: 431778 - DNA, 122 bp, Homo sapiens
tatagctgacaggccactttaacctacatgaaccagtcttcacagcaaagagctgggacccgtgaggagagggcccgtagccacacatggagtaggcagagggtcagatgatgtgtttcaga

SEQ ID NO: 431779 - DNA, 122 bp, Homo sapiens
acgggtgggtgtgtccgtttccgcacgccagccttccagcccgggaagagcgcctgcaagcgggtactttgttcccaaagatgggttttgtctgcgggtgatttgggctctcgaagtgcaac

SEQ ID NO: 431780 - DNA, 122 bp, Homo sapiens
gttttctgaggcacccccactgactagcgtgccggaccctgcaggtgttggaacaaggttcgtggtcgcggcggcctcacgtaaaatgaatccgcggccggcgcgcggcccgcgggctccct

SEQ ID NO: 431781 - DNA, 122 bp, Homo sapiens
agaagaggggcagccctcaggtcctgacaatgcaggcctggctgaaatgcaggaaccccccgggttggacaggagcagtccccaggtccctgtgatgcaagggtgagggcagaaacctcttc

SEQ ID NO: 431782 - DNA, 122 bp, Homo sapiens
ctaacgtctgcccccgtgtagatactgagaggtggtggcagtaattgtggccttatcagccgctcagttccaggcttttgcccaggtcactgttgccccatgttcggagaacctggcccacc

SEQ ID NO: 431783 - DNA, 122 bp, Homo sapiens
cgcgcacagcaaggaccaggagcacggaggcctcttcgacagcgacactgagggcgaccccgagaaggcagagattgacctggagagcatgcatctccataagaccaacacccacgatggcg

SEQ ID NO: 431784 - DNA, 122 bp, Homo sapiens
atgacttaggatgaagcttcttcccacaccctgtcattacctaccaaggcttctgtgatgcgaatcagagctgtggggcgcagagctcctgcctggtgtagtaaatttactactcatagaga

SEQ ID NO: 431785 - DNA, 122 bp, Homo sapiens
ggggccaggcggccgcgcggggaggaggtggctggggtggcaggtgaccggaccccaacccgacctcttcccgtcgtctccaggcctgcagccgggaccgacctgcagaggtttcccccgac

SEQ ID NO: 431786 - DNA, 122 bp, Homo sapiens
tctccaaccctccaggccaaactccgagtcgttcctctggtggatggcctgctggcgtgccgatgtctgttgtgtgctcttccgccagcattctcccttcaacgtcctctggacgtccagct

SEQ ID NO: 431787 - DNA, 122 bp, Homo sapiens
gcagagtacgcacctgctgtgtgcctcagtttctccatctgcacatgggagacagcagtccgtctcccagggccaatgcagggcccgctgcaagggctgctgaggactgtaatcccagaggc

SEQ ID NO: 431788 - DNA, 122 bp, Homo sapiens
gggctgggcacggtggcttatgcgtgtaatcccagaagtaatatgtataaaggcaattggcggctggcacggtggtttatgcgtgtaatcccagaagtaatctgtataaaggcaattggcgg

SEQ ID NO: 431789 - DNA, 122 bp, Homo sapiens
agcccccggaccttcttccggacttgctgcaggacggaagccgctgaggaccaaacttcccggcggtccaaggccccgccccttcccagactggaaattccacccgcattcaacgccccggg

SEQ ID NO: 431790 - DNA, 122 bp, Homo sapiens
attaggaggaatatcaccgggtggatgcacacccactgctatcttgggagtaacgtcatacgccaccccctggagatgatattcagatcaatatcaccgggtgggtgtacacctactgcaat

SEQ ID NO: 431791 - DNA, 122 bp, Homo sapiens
tttggtgcgcacgggttccgccagacacagctaccattggctgtcagtcggatccgagaacgacgattggctttccttgaccgtccctcaagcgcctctccggagatggtctgaggtgggag

SEQ ID NO: 431792 - DNA, 122 bp, Homo sapiens
aaactgggtctgttgctagcattccagatcctctgacttgaacctttcaagctcagagaacgcaagacaatgtgataaataagcacatgctgaaagcagcatttaccagtatgctcaacaac

SEQ ID NO: 431793 - DNA, 122 bp, Homo sapiens
agtctaatgcaaccatggagactgtatgaagatgttgcttccctacctgcacctctggcccgatttacacataagcacactcacaaagatatgtctacaggctgcatggctctgttattgac

SEQ ID NO: 431794 - DNA, 122 bp, Homo sapiens
ggagcgggcggaggggacggtcaacgagggacgcccagaatcggacgcggcaggtacgggcgtggagaagaacgaaggcgaccctctccgggcagtctggagtcaggtcccagccaaggtgg

SEQ ID NO: 431795 - DNA, 122 bp, Homo sapiens
aggtatttcagtgcttaatgacagactgcctttctgttctaaatatgaaatggaacatttcgccaccatccaggcacactggagcctgaggtggacctcccgccctgcttctcccagtatgg

SEQ ID NO: 431796 - DNA, 122 bp, Homo sapiens
ccgcgcgactcgcacgagcatgtccacccgcagcgaggggccggtcactgctacggagcccgccagaaggcaaagccccagacagcaaatagggaggcggctggcacccagggaggccgagg

SEQ ID NO: 431797 - DNA, 122 bp, Homo sapiens
tcgcccagagctgtcaagtggggaccttcccggagaggagccgccgagtgcacggagctgcgggtacagccgctccgccgcggccaatggctgcgccggggggcggggccgggcggctcctc

SEQ ID NO: 431798 - DNA, 122 bp, Homo sapiens
ctggggccgaggctccgaggcgggaccaagggcgcgggtggccgacggggcctgcaagaccggccgagcacccccagccccagcccggcccggcccagcaggcccggcccagcaggcccggc

SEQ ID NO: 431799 - DNA, 122 bp, Homo sapiens
ttcccagtaacaagtgggttggaccgggggtcagtgatagaggcgtcagtggattggccacgtcatgtaaagttgacccgagagggagggcaaaagaggaaggcttggtgattcctggtaat

SEQ ID NO: 431800 - DNA, 122 bp, Homo sapiens
tttctcattttcatcactaattgactcatatttcttccccattgcaacaaaccttagctccgtattcacaagccctctgcttggagcttcattgacaaagaacagcagcatacaaaatagca

SEQ ID NO: 431801 - DNA, 122 bp, Homo sapiens
ggaaaaagtctggcctccctccatgaaaacaaccagcattcacagacatgcaaaagtgttcgacatcacatcactagcagtaaatgcactaatttccctcaatgaagtaagcaaatgttaat

SEQ ID NO: 431802 - DNA, 122 bp, Homo sapiens
agtcacaaaaagcaagctgctttcccagaccccactgctctgctaggtggaggccaagctcgtgtgtgaacccagaccgctgctctgaacttctccacaccacactgtgtagaggaaataag

SEQ ID NO: 431803 - DNA, 122 bp, Homo sapiens
atgaaccccaccagaaggaagaaactctaaacacatccaaacatcagaaggaacaaactccggacacgccgcctttaagaaccgtatcactcactgcgagggtccacggcttcattcttgaa

SEQ ID NO: 431804 - DNA, 122 bp, Homo sapiens
ataacacacaaaagatggaaagaacctagatgccactgactgaggcacggataaacaaaacggggcgtagcaaaagggaatgctattcggccgcttagagggatgacgatgccacgctacag

SEQ ID NO: 431805 - DNA, 122 bp, Homo sapiens
cagcaattcagtcacatcttaaggctccacttcttatcctagtttcacttgcactttccacgtatctgcagttaattcctccactgaagtcttgaacccctcgaagtcatccatgagtgttc

SEQ ID NO: 431806 - DNA, 122 bp, Homo sapiens
aaagtttcccatgaaaatattttattttctttgagaacaggatacacctgcagggctcctcggcccaggcggcctctccctgcccgggcgggtgccagattcctggaccaacggggccctct

SEQ ID NO: 431807 - DNA, 122 bp, Homo sapiens
gtgacgtgcatggtgaataacacacgggccagtacacagcatccactcgggagtgacgcgcgtgtgaataacacaccggccagtacacagcatccactcaggactgacgcgcgtggtgaata

SEQ ID NO: 431808 - DNA, 122 bp, Homo sapiens
caaaaaacaaacaaacaaaaaaactttaggcaaatggaatcattctcaatggttcccccccgcccccagattgaactgttatttgtagctctaattctttcattttccctgctataatatat

SEQ ID NO: 431809 - DNA, 122 bp, Homo sapiens
ccgtggaatggtctctggggtctgtgtgctgtgtgagtgctagaggtgcgtgggaaggaacgatggtggtcagctgctggcgagtgagtgtgactctccagtgtgactcagagatgcatggt

SEQ ID NO: 431810 - DNA, 122 bp, Homo sapiens
ggaggaggagggggaggagtggaggggaggagcaacaggcacaagcctgacacagcggcccgggagaagcagggagccccgcagccagcagagcagataattgcacaggaaccacgccctgc

SEQ ID NO: 431811 - DNA, 122 bp, Homo sapiens
accggggccagcacaagttctgagtgggcgtgggctcggtggccccgcactctgagtggccggctggtgccaccggccctgggcagtgaggggcttagcacccgggccagcagctgcagagg

SEQ ID NO: 431812 - DNA, 122 bp, Homo sapiens
ggggaccccactacccgactcatgaaggccaggtgggcaggccccgagagtacacacagccgacacccacccaccacacacacacagtacacaaaattgtagacagggtccacctcggcatc

SEQ ID NO: 431813 - DNA, 122 bp, Homo sapiens
cagcccggccgcgcggcggttggtgccggcgtttgctggctgtcgggtggctgggcccagcgcgcagctgcggagcgcggcgggcggccccttggagctgcccggggagctgcgggcactcg

SEQ ID NO: 431814 - DNA, 122 bp, Homo sapiens
ttttgttttgctttgtttttttagtcgaaggcgaggcgttgtttggggacagatcgcggccggctggggcctcgggcagtgacagtgaaacgaattccaaacccattctgaactcgccatgg

SEQ ID NO: 431815 - DNA, 122 bp, Homo sapiens
cgctatctgaataaacagctgtgtgagaataacttctctgagacgtggtcaacacacacgcgtcctcttgcaacagtagttaccaattaagatctttggggagtagttacacgttatctttt

SEQ ID NO: 431816 - DNA, 122 bp, Homo sapiens
gaaagcgagacagactccagtggaaggctgtggggcgggactcagggttcccggagaggccgccccagctcctgccgcagcgctgggcgccctaccacgcctgctccctagggaccccgggc

SEQ ID NO: 431817 - DNA, 122 bp, Homo sapiens
aaggtaaaggggctcagctaggaagacacagtgtattctgtctctgtggggatgtttcttcgccgggcggtacctccgaagtttctgcctcccggctgtgaggctaggaaggaagcggctgg

SEQ ID NO: 431818 - DNA, 122 bp, Homo sapiens
tggcagattctaaccaggatgggattggaagctgcagaattggggcaaaatttagaagttcgggatccgattgaaaataatgttacaatgtcaaattagttctagaccttgctaaatttcac

SEQ ID NO: 431819 - DNA, 122 bp, Homo sapiens
aagagaaaacctatttctgtccttttggagacaaaagctgtaacacaattggttaaaattcggggaatcagatcctcctgggcggtgggggaaatactgctgcaggaccgcggagccctggc

SEQ ID NO: 431820 - DNA, 122 bp, Homo sapiens
tggcagcctaaactcgcaggccagctaattggacgcaatcagaacccagcattctttcttcgtgttcctgtgcgggattggtgtgcccaggggtttggctttccaattggctaacgccgggg

SEQ ID NO: 431821 - DNA, 122 bp, Homo sapiens
actatgcagccaacaccacagcagagttcataggcatgtttatttaggacacatctcactcgtttgcttttgaaatttaactgaaagtaggtcacagtaggcaaaatattagaagaaaatat

SEQ ID NO: 431822 - DNA, 122 bp, Homo sapiens
caagactctcaccaaagcccgcttaacattttacaaacacacaaggacaagacagacagccggacaagagggctgggctggaaatgttgccctatgttggcttagctagctctggtgctgag

SEQ ID NO: 431823 - DNA, 122 bp, Homo sapiens
agtggtgtctggggacacgtctccacggcatctcagcaatgtctcctccaccggcagcatcgacatggtagactcgccccagctcgccacgctagctgacgaggtgtctgcctccctggcca

SEQ ID NO: 431824 - DNA, 122 bp, Homo sapiens
tgtgcgtttgctgggagatgcctgactgtgtgctcgtcagaggctgcctgactgtgcgttcgtcgggggctgcctgactgtgcgtttgctgggagatgcctgactgtgtgttcgtcgggggc

SEQ ID NO: 431825 - DNA, 122 bp, Homo sapiens
atgttttgaaaaagtcatctgttttgctttttttccagaagtagtaagtctgctggcctccgccatcttagtaaagtaacagtcccatgaaacaaagatgcagtcgggcactcactggagag

SEQ ID NO: 431826 - DNA, 122 bp, Homo sapiens
acgccgagcttagggcctttggccccgcccccttgccgcgtctctattgggggacacctacgaagcccgcctcctattggtcgttacacctctgtcagcaaagcccccacccaccccgcagc

SEQ ID NO: 431827 - DNA, 122 bp, Homo sapiens
cccgtgctcacctctgccgaagtccgtgcgcggcgcttcttccacaggcccgacgaaccccgcaaaatccggagcaccccagcagccggtagcttcccgggatccggcttttgtcccggccc

SEQ ID NO: 431828 - DNA, 122 bp, Homo sapiens
attgtgagaagatttggtgctgaagagaagtattgtgaaggacagctgtctctttccatacgtctgaattctaccactggcaatgaggatggcttcacaagtttcactgcttgtattttccc

SEQ ID NO: 431829 - DNA, 122 bp, Homo sapiens
aacgctgctgcagatgaacttgttcgcggactctctggccggggacatctccaactccagcgagctgctcttgggcttcaactcctcgctggcggcgctcaaccacaccctgctgcctcccg

SEQ ID NO: 431830 - DNA, 122 bp, Homo sapiens
ctctgaaacaaagaggctttttacccggaacaaggctttataaaaatgacagtggcatcgcgagtcattcagcgcctgcccggggcgatggaggcggcgaggaaatacaggatgcgggctct

SEQ ID NO: 431831 - DNA, 122 bp, Homo sapiens
gagctcgctgagatgtggaaagtcacagggttctttcccatccggcacgggcacttgacccgggtacacggaaccgccagttctaaagccaccagcggccttcccttccacggcgtgtacac

SEQ ID NO: 431832 - DNA, 122 bp, Homo sapiens
gatagtaccaaattgccctccaggaatgttatacgctcaccagaactgattataataaaacgtctacatatttgttagttttataagcaacgcgtggtgtctcgtttgggtttaaggattct

SEQ ID NO: 431833 - DNA, 122 bp, Homo sapiens
gggctcggcacacagcaggcgtctggtaagcggctgctgaaggagtgctcgctggctttacgttttttaatccccttagcccctaccttttcttaccatccaagcagcagtgagagttttgt

SEQ ID NO: 431834 - DNA, 122 bp, Homo sapiens
gtaaggctgggccgcgggcgtagggctgggctgtgggaataaggctgggctgcggggctgcgggtgtaaggctgggctgcgggcttgggcttgctttgttctgagccaggctctgtaggagg

SEQ ID NO: 431835 - DNA, 122 bp, Homo sapiens
gcaaccactaatctactttctgtctctatggatttgcctcttctggacatttcatacacacggagttacagaaaatatggcattttgtatctggcttctttcacttagcataatgttttcaa

SEQ ID NO: 431836 - DNA, 122 bp, Homo sapiens
tatagcaaagattgttcttgtgtctgtaagtacatcaacatcaggcacttctcagagtatcggaacaagaacgtggaatctgcactgttactaaactcgggtagcgaaatgcaggaggcatg

SEQ ID NO: 431837 - DNA, 122 bp, Homo sapiens
accacagtgctttcttcaaatcatatgagaaatactatgcatagcaaggagatgcagagccgccaggaaaattctgagttccagcacaattttctttggaatctaacaggaatctagcctga

SEQ ID NO: 431838 - DNA, 122 bp, Homo sapiens
agcccagtagggcgaggtctggaaaggcctcactggcctcgcagcctcaactacttgtaccggccaccgcagcggctgcggacctcccagtcgtcatggcgactgtgaaatgtggggtggag

SEQ ID NO: 431839 - DNA, 122 bp, Homo sapiens
gccccatgttaaccatcctgggggatgtcagggcggccacgctgatgcactgcggtcgggcgcagcggcacagccttcagagccgccgccgctcggttccttttcccatgatgttttggact

SEQ ID NO: 431840 - DNA, 122 bp, Homo sapiens
cgagcaggcggcttgtttattcccctggcggagccgtttccgcgtgtgccgtggggagggcgggggagcccccatctgtctgggggcgcgggagcccgacggcgcgaggggaactgggggag

SEQ ID NO: 431841 - DNA, 122 bp, Homo sapiens
gatcccccaccaaaaccctggagccatccctgagatgtgtttctttgtctttatcttctgcgtactattatgaggagagaagggtcctttgaacaaagttggcttaaagccagtttcttttc

SEQ ID NO: 431842 - DNA, 122 bp, Homo sapiens
gagtaatcatttaagagggaagagattaagtcagcagaagcccccaaatcttatttttgtcggtagctcccacccgtatgcatgaccccggcatggagcatttttcacccacgctcgctctc

SEQ ID NO: 431843 - DNA, 122 bp, Homo sapiens
tcccgcccgcgctcgggagggcgccgggggtcctgcgcctccgggaggtttgtggccgagcgcggcgcggccccgagcggccccgcagcgcccggctccccgccgctcgctctccaggcgcc

SEQ ID NO: 431844 - DNA, 122 bp, Homo sapiens
caaacattcatgattatctggaacctcagaatatggccttatttggaaatagggtctttgcggatgtaatgaattaaggatcttgaggtaaaattatcctggatttagcctgggccctgaat

SEQ ID NO: 431845 - DNA, 122 bp, Homo sapiens
ttctgaaaagcgttgccgtggttctagccttcctcgcggtggagggtgttttgctttctgcgcggtttctgtgtgggccgtgggaagcaacttgattgttatcacagttggggacacagcag

SEQ ID NO: 431846 - DNA, 122 bp, Homo sapiens
atcctgggatgccctgatatactttagtgcttgtgatatttcttccaagtcaagcgagtacggatgcggcaccacgagagtggtttgatctcccgtaaaacatacacaaatacataaatgat

SEQ ID NO: 431847 - DNA, 122 bp, Homo sapiens
ggaataagcgagctggggaggcggccgcggggctgcctgttgcccagcaacgatgccagccgcggcctgtgctcccccaaaagcccgaaagcaccgcggcaggcagccaggaaggaggatgg

SEQ ID NO: 431848 - DNA, 122 bp, Homo sapiens
ggaaggggagtggcctcacgtcaaagcagcccgaacagaagagggcagttacagcacgcgcgagaatgcctgtgtgatgccgtagaaatgcctcccagacctgacattgtgctgcaaggtga

SEQ ID NO: 431849 - DNA, 122 bp, Homo sapiens
agagttcattattaaccttgtaaatgtgtcccccaggcctggccttcgctgctatcacatcggctgacttagtaatcattggttctataataaaccgtggagacccaagtcctctttgcatt

SEQ ID NO: 431850 - DNA, 122 bp, Homo sapiens
ggagccgtgcgtgctggagatccggcgacgaccgccgcgccgcgggggctgtgcttgctgcgagctcctcttctgcaagaaatgcaggagtctgcacagccacccagcctatgtggcgcact

SEQ ID NO: 431851 - DNA, 122 bp, Homo sapiens
agtgatcctctggccttggcctcccaaaggactgagattacaggcatgaaccacaaagcccggactgaaactagtgtattgacaccatttacttcagtactggaataatgggtgatttattt

SEQ ID NO: 431852 - DNA, 122 bp, Homo sapiens
cgtcaccgttcagggcctgggagtcgctgggtctgtggccttggagtcctggttccactgcgtattaggcggccgtgggcaggtcctttcccttgcttggaacctcagttttcctgcctgta

SEQ ID NO: 431853 - DNA, 122 bp, Homo sapiens
gaggccgagctgagaggatcacttaagcccaggagttcaaaatcagcctcatcaacatagcgagatcatatccctacaaaagaatcatttaaaaattagctgggtgtggtggcacatgctca

SEQ ID NO: 431854 - DNA, 122 bp, Homo sapiens
ggaagcctcggatggcagctatgaagtcctgtgggcggtcagcgtggatccagtggccagcgttcggcaccgtctgcatctgggcccgagggaagagccgcataatctcagggtggtggctg

SEQ ID NO: 431855 - DNA, 122 bp, Homo sapiens
gcgggggaaacgtttggcagtgcgacagtaggaagtgacgttacttccctttttccggtccgccggattatgaatgacggccggcgcgagtattttccacataaggtggctgtcgtttttct

SEQ ID NO: 431856 - DNA, 122 bp, Homo sapiens
gagtaaagcttgttatggaactcaggaccttttgctggtgctctgggttcaagatccaatcgcttcatcttccagagtctcccacctggaatcagcctcttggtgacatagaaacagcaggt

SEQ ID NO: 431857 - DNA, 122 bp, Homo sapiens
gaaatgagggaagagactaatatcctttaaaaaacaaaaacagagcccgcctagctgaggcgcgcaggcagcagccgttgctgcgacgcctctggtgtactaaatctggaggggaggttggg

SEQ ID NO: 431858 - DNA, 122 bp, Homo sapiens
tcctggtgacctttctgagcccccttgctttgattttagtaatgggttagcagtgtccaccgtcaacactgttgtgaggcttgggggtcttcaaagtaaaccattttccgagtgctgggcgc

SEQ ID NO: 431859 - DNA, 122 bp, Homo sapiens
ggggaccctcgtggctcctcactgtggtgggaggccccgccagcgggtcctgtgaacaagcggaaagtgggttctgggagggaatttttagtgaaaagaagaaggtactcagagtgccaacc

SEQ ID NO: 431860 - DNA, 122 bp, Homo sapiens
gcttggaaccattataaaagtaagtgagttttcaggctctatatacattttaattcctcacgttttatattggagagttcggtacagactgtccattactgcaccaaaagaatgagtgaact

SEQ ID NO: 431861 - DNA, 122 bp, Homo sapiens
ggatttacaagtaaagctggtttctaccccgaagatcctgacagctccgcagagtgcgggcgcagggtctgacagtgccctctagaagggctctcccaccccatcccctccccttagagaca

SEQ ID NO: 431862 - DNA, 122 bp, Homo sapiens
ccgctccgagtgctgggcctgggaggccacgcccacccggaacttgccctagtccgcaagcgcagcgtgcagcctgggttcccgcccgcgcctctcccgccacacctccctgcaagctgagg

SEQ ID NO: 431863 - DNA, 122 bp, Homo sapiens
cctcactggccgggacaactggtcttatcacggaggctggggccaggcagcccttcggttcgggtgggcccatggaccccagtccaacgccgagggaataggaccatccaaaagcggaacct

SEQ ID NO: 431864 - DNA, 122 bp, Homo sapiens
acacctcttcttgcctaaataaaacaaagaaacaaagaaaacaagtgtggtgtcattacacgtctcgggagttcctcgtcactgactttatatatataaaaaaaagaatgcacatgcgggcc

SEQ ID NO: 431865 - DNA, 122 bp, Homo sapiens
gcttctccgagatgcaaaccaggccactctgaggctgcctacaaactttctgctgagtgccgacagctgcttcctgctctgcggggagttcttccagatcctgatcaaggcacagagaattg

SEQ ID NO: 431866 - DNA, 122 bp, Homo sapiens
cctgctcaggccaaggtcctctgagagttccaagcttctccactccctataaaaggccggcggaacagccagaggagcagagaggcaaagaaacattgtgaaatctccaactcttaaccttc

SEQ ID NO: 431867 - DNA, 122 bp, Homo sapiens
ggggcggggactcggcgcagccgccggggcccgggcctctgggaccgtttaccgcacgcgcgtggtcccggcagcgccggcctcctccgctcataccctgggtctcctcctttctttttctt

SEQ ID NO: 431868 - DNA, 122 bp, Homo sapiens
tgcagaacatatatgcagcccggaacattttttgggacccatggcataagtgattatgatcgataaaatccaaatattaacctgccaaaagagttattttatcttttgcagtcatttaaagg

SEQ ID NO: 431869 - DNA, 122 bp, Homo sapiens
gcagaagccatgccatccttacgctccaaacagctagatgcaggacttgcccgttcctctcgtttgtataaaaccagaagtaggtactaccagccatacgagattccagctgtcaatggcag

SEQ ID NO: 431870 - DNA, 122 bp, Homo sapiens
gccggcggaaccgggtggccatggggatgtgggcatcgctggacgctttgtgggagatgccggccgagaagcgtatcttcggggccgtgctgctcttttcctggacagtgtatctttgggag

SEQ ID NO: 431871 - DNA, 122 bp, Homo sapiens
gcgagccaccgattgtacaggtagggtgtgcacacaggtacagcggcgggcggtgggcgccgggccccggaacgtcaccggggcggggccggcgggcgtgctgacgtcgggcccgggagggg

SEQ ID NO: 431872 - DNA, 122 bp, Homo sapiens
ggcccaccgctgaaaatgcctgtggacacacaaacagtgggagttgttgggagtggttggcgccaggcaaggcaggcccctgcttctgagcaaccactgctttgcagctgttgtttccagct

SEQ ID NO: 431873 - DNA, 122 bp, Homo sapiens
ttttgaagtgaacactgaaaaagtctgtctctaaagcagcagactggtcattttcttctgcgggccagagtagcacttcaaaaattgcatgaagcaggggcatgaacatctgttgtaaaaac

SEQ ID NO: 431874 - DNA, 122 bp, Homo sapiens
taggggtaacaatctccattgagagttcttagtaccaatgggttaagaaacattattggccgagtgccatggctcatgcctgtaatcccagcacttcgggaagctgaggtgggtggatcact

SEQ ID NO: 431875 - DNA, 122 bp, Homo sapiens
acttcctcctggtgccccgcaccggccgcttctgccttctcaggcccgcggggtcaggcgcgggccggccacagggggcacttgcgctccccaaatccagatccgggagaccgtgccggaga

SEQ ID NO: 431876 - DNA, 122 bp, Homo sapiens
caatgttgctgctgttatttttgcaacaaaaataaaaataaaaagcaagcttaaccgtgccgtgttagtatgagataattttatgttcttcagttatagaactctgatatatttgagtacat

SEQ ID NO: 431877 - DNA, 122 bp, Homo sapiens
ttatagataagcaaagggagaaggatagaatgaactgtatgaatgtgttagagtcagagacggtagcatgagctcatgtttaacttaatatagataccaatgatagatacagaatcattaca

SEQ ID NO: 431878 - DNA, 122 bp, Homo sapiens
gacaaggtgctttttcacacagattctatttggtccccacaattctccctgttgtacaaacgaagatgctcagaggcccagagggtgggcaatttggagatcagaggttattgtctaggccc

SEQ ID NO: 431879 - DNA, 122 bp, Homo sapiens
ttcctgcccatggcttcgtccacggactcgacagcaccccactgtccatcacacccccaccgatgctgcttcccacagcaggactcatcccatgctcaggcagtgctcccaggagcagcggg

SEQ ID NO: 431880 - DNA, 122 bp, Homo sapiens
gaccgtgtctacgattggcctctccctgacaaggatttaattttgaatttttctttatggcgtgggagaggccacagcccggactccatcgactcccccggctcttagactagtaagtgcag

SEQ ID NO: 431881 - DNA, 122 bp, Homo sapiens
cattgttcgcaggcacaggaagccgcggctgagctgaagggctcgagaaggagcccagagcgctgcacgctgctccctctgggtagtctgaagggtcagagctggactgccctgccctatgt

SEQ ID NO: 431882 - DNA, 122 bp, Homo sapiens
gacccggcgttcgcggccgcccgctcgcccgccgcgggccgggagcgtacaggagtgtgacgcagattgtgaaaacagaagggagggagttgggtcatttccttcgctaatcatcgccccct

SEQ ID NO: 431883 - DNA, 122 bp, Homo sapiens
ccatcgtcaggaatccttcacggccgccagagggcgcaaggagctgcggctggaagtactcggagggccggcggaggaggcgcgcggagcctgtaactcgcagcgcgcgctggaggtgggcg

SEQ ID NO: 431884 - DNA, 122 bp, Homo sapiens
acggccacatcctcgcccagccccgcctccgcttagctccgccccgtcgcggctccgccccgcggtaaccacgcccacacaaccgtatccccgcccacagctggcttcgccttggccccgcc

SEQ ID NO: 431885 - DNA, 122 bp, Homo sapiens
ggaggccctacacggtgcgcgtgggctacgagaaagacaatgctccgctcttcacgcggccggtctatgaggtatctgtgagtgagaacaccccgcccagcgcctacctggccacggtggcc

SEQ ID NO: 431886 - DNA, 122 bp, Homo sapiens
cagtgtttcctgtgtaccaccatagtgaatattaactcggaaaatcctcacatttagcatcgtcaccacgcctattttggccgccaccaccaacgtccagtggcaacctcgctctcggccca

SEQ ID NO: 431887 - DNA, 122 bp, Homo sapiens
ccacaacgtcttcagctaccactgcaagggcctgcggggtgacggctgtgcagcgctgctcgcctagctgttgatcgcctggctgttgatgggctggcacccgcagagctgccctgccggcc

SEQ ID NO: 431888 - DNA, 122 bp, Homo sapiens
tctggggacacactggacgaggggccttgcatccctgcacccttggaagcagcctgtttccgacgtctaggagcactcaaggcagaagtgggtaaggtgctccggaggccctcgtggatctg

SEQ ID NO: 431889 - DNA, 122 bp, Homo sapiens
acagaaaaccaaacactgcatgttctcattcctaagtgggagtcatacaacgagaacacacggacacagggaggggaacatcacacactagggcctgttgggggatgggggaaaagcggagg

SEQ ID NO: 431890 - DNA, 122 bp, Homo sapiens
ataaaaggttccaaagaggcgacaggggctaggacagctgtcgttagttcagtgccaaggcgccaagcttgctaagtgcgggcagaagccatttaaggatttaaacccctctgggttcaaaa

SEQ ID NO: 431891 - DNA, 122 bp, Homo sapiens
atccacccgcctcggcctcccaaagtgctgggattacaggcgtgagccaccgcgcccggccgggaaaatattttaattagtagtaatttcagattgtcgtctctgtggaaaaaccaattttg

SEQ ID NO: 431892 - DNA, 122 bp, Homo sapiens
aagtgttacttcacctcgtctctttataaagtcagcacactgtgaggctgtggcattcctcgacaaatcctctttcaggaccctttcgggaatgagaagaggggagtggtgggcactgcatt

SEQ ID NO: 431893 - DNA, 122 bp, Homo sapiens
agagtgagttagttcccagtgtggcctcgtgtgtgcttttggccgcatcgtttccagtttcgccatccccaaagaggatcatctcccaggaagcttactggtccaaggaggatgagacaccc

SEQ ID NO: 431894 - DNA, 122 bp, Homo sapiens
tagaacagcaggacctgcgaaactctgaggccgctttgtgaggtcctcctctgcgcagcacgccccccacccctctcttggtgccgccgcagctactccctagggggctttgctcttggtgg

SEQ ID NO: 431895 - DNA, 122 bp, Homo sapiens
accgaggctcctctgtgacgtcagcagccggccgggacacagcgggagggcaggtgcggccgcggggcctgccgacttcacgcagggtccgtggggtccccgcggcgcgcagcggctgaagg

SEQ ID NO: 431896 - DNA, 122 bp, Homo sapiens
gcagcaatgacagcctcagtgaagtcatggcaagtagcatagccacccatgtcagaggttcgaacctgtgggggagaatcatcatcatccatgtggcctgggctccatcctaacaatcccca

SEQ ID NO: 431897 - DNA, 122 bp, Homo sapiens
agccaatcccgccaaagcccttaattgcacgcatctaagatggccgcccccgcccggtagcggggcggaaacgagcccctctagcttgctagccgagcccacactctttggcgaaggccgcc

SEQ ID NO: 431898 - DNA, 122 bp, Homo sapiens
agtctcgccgccgagctgctctcagcccacccacccccttccccccgtggcctcaggctgcgctcccgacctggcagcctcttggggggccctgtagcgggcaccccaaatgcgctgcccgg

SEQ ID NO: 431899 - DNA, 122 bp, Homo sapiens
tggggaattgaggccagaagcaggaagctgggtttcccagcctcagcttttgatggtttccgggtccccgtgggccagtgaagaagcagcccacccctgtgataaaccagtttgttaagttg

SEQ ID NO: 431900 - DNA, 122 bp, Homo sapiens
ccccggctgtcccggacgcgtggtcggctgtcgccataggaacggctggtgcccagacggcgcctgcccaggctgggaaggggcggtgaaggcagctcagacctccaagaaccctggagccc

SEQ ID NO: 431901 - DNA, 122 bp, Homo sapiens
gtgagcaggttcaggagggcgagaaaggttaggccgagcggaaccgcgcggccagcgttacgcagggtgccctggacacccctaggcgcccacctggacttgttcccacctcctctcgcccc

SEQ ID NO: 431902 - DNA, 122 bp, Homo sapiens
tcaccggaagctgcacgctcggggaagcgcggaggcgggggtgctgcgcgcttgggagcacgtgggggaacacgcagggactgccggcgcgaatggcttcgaacgcatgcgccccacccgac

SEQ ID NO: 431903 - DNA, 122 bp, Homo sapiens
ccccaacacacagtaggacctggctggctagcagaggaaagcacgctgggccgaggccaacggcagaatgcggaccgtggtggagggtggcggccaggggttgtcccgcttctccccctact

SEQ ID NO: 431904 - DNA, 122 bp, Homo sapiens
tgttattactgtggtgaatttccccaattattgccaaaatctgttcattgtgcctgaggtcggagtggatcatatacttgttccatgaagccttcatttggtgatttaaaagatatgcttct

SEQ ID NO: 431905 - DNA, 122 bp, Homo sapiens
cgctcccgctctccctctccttgctagctccggctgccaccgccgccaccgcagcccgcgcgccctggggcagcctggactcccggcagagctccttcggccgtggccctgcgcgctccgcc

SEQ ID NO: 431906 - DNA, 122 bp, Homo sapiens
cttggtgacggtggttgggctcggggtgtcccggtgtgccctgcgccgaagaagagcgggcgacaaaggtgcgggatggcatggattctgcaactctccccagcctccactgcgtttcgaag

SEQ ID NO: 431907 - DNA, 122 bp, Homo sapiens
caaagtgctgggattacaggcgtgagccaccgtgcccggcctgaactctttttctattctcgaaattgtgagatcctctgacaaattctgctaacagttccaaggtttaaaactggggaagt

SEQ ID NO: 431908 - DNA, 122 bp, Homo sapiens
tgagcaggcggctggggagatggagctgagttagaaccaggtctcccggctccaagactgcgctcccagctcgacagcatccagcctccagcccaggtggcggggtcggggagccggctgtc

SEQ ID NO: 431909 - DNA, 122 bp, Homo sapiens
ttctcaggttctgctggtgaaccaaggtcgctgagtaccatcttcattggcactgtagcccgtttgacccaaggctagaatccagcccgggcggggacaatgctttctggctggcacccaaa

SEQ ID NO: 431910 - DNA, 122 bp, Homo sapiens
ttagagggagtgcggggatcccttccatgttaccgtgaagttctcatactgttgagcgaacgtgggagtcagggtggagaaagcgtggcctggccggcagggcaccgcacactgtgccgctg

SEQ ID NO: 431911 - DNA, 122 bp, Homo sapiens
gcggcctcgaccgactaggacgccccgtgcgccgcccgcgggccgccgcctccctgggcgcgcggggccagcatggagctcttccaagccaaggaccactacatcctgcagcagggcgagcg

SEQ ID NO: 431912 - DNA, 122 bp, Homo sapiens
ctggatcccttcctccacacccctacccacaatgcgcgcgaacaccctaatcctggcaagcgcgagggtctgtggaaggccgacaatcatccctgatttggagaaacagaattggggctgaa

SEQ ID NO: 431913 - DNA, 122 bp, Homo sapiens
tgtaaactgcatatgttatgtacataaagcggtaaatgttcactcccttcttcctcattacgcccgatgactttacatttgggctgctgtcccctatgccagaaattcacatttgcatgcaa

SEQ ID NO: 431914 - DNA, 122 bp, Homo sapiens
gcccgggcagtaacagaagccgtagctcgccgcatcgtctccagtgtccggcctccgggccgagcccctggccctggcaccctgttcctgctgggcaagggctcgcctcggctggcccagca

SEQ ID NO: 431915 - DNA, 122 bp, Homo sapiens
caaacacggccacgctgccctccatccagggtcctgtccagtgctgtgctaagcacttcacgtggtgacagctagctgcacaccaggcacggtcaggtgcttagcgtttattaagtcgttca

SEQ ID NO: 431916 - DNA, 122 bp, Homo sapiens
accctagccttccagcaatcgggattcaagctggacttcccataaccagcaacagtgtaacgtgaagacactcctagactcaggtttccctcaacccttctcccgcttgtccgcacacgggg

SEQ ID NO: 431917 - DNA, 122 bp, Homo sapiens
agacgtcagtcagcctctactgtacacggctcacactgggcgccaaggacgtgtagctcacggtcatggccctgacctcgagtggctcagactcggtgggaatgaagacaaacacacagctt

SEQ ID NO: 431918 - DNA, 122 bp, Homo sapiens
gggctccaaggccagagcgagtccccggggcgaggaccctccccctctccagggcgcggacgcccccagagcacaggctcccctacctcaccagccccgccagggcatgcgcccctgccgcc

SEQ ID NO: 431919 - DNA, 122 bp, Homo sapiens
actacacatctgttcctgcattcactcaacaaacatcgaagtgcctggcattggtctgcacggcataaacagaacagaagggctgcctcccagtcccaccccttccacgcattcacttcctc

SEQ ID NO: 431920 - DNA, 122 bp, Homo sapiens
aagttgcagtgagccgagatcgcgccactgcactccagcctgggcgacagagcgagactccgtctcaaaaaaaggaaaaaaataaacttggtattatgtccattttgaggtgaggaaactga

SEQ ID NO: 431921 - DNA, 122 bp, Homo sapiens
cggagttccgctacctggtggtttctctggggtctgtggggggccggggccgctggggaccgggggcgcctcctgcagccactggagcacagggatccccggcagggtctgcgccaggagaa

SEQ ID NO: 431922 - DNA, 122 bp, Homo sapiens
caatagcggccgggcatgggaagccgagcgccgcccactaatctatattaaagcttctggcgccgcgtgagtcccccactggctgctctgaaaagccatctttgcattgttcctcatccgcc

SEQ ID NO: 431923 - DNA, 122 bp, Homo sapiens
gtgtctgatctgatctgccccaagccctgttccatcctgtggggcgggatatggctggcccgaactcgaagtcccacctgggactggcactgggcctccttcctagagagtctgttacctgg

SEQ ID NO: 431924 - DNA, 122 bp, Homo sapiens
cttaaataggttattcctacttctagtattttagagcacacagtgatttgcacaccacaccgtctcatctgcagcagtgtagtttggtggccgtgatcacactaatcaagagcaatggcagc

SEQ ID NO: 431925 - DNA, 122 bp, Homo sapiens
ctcctgctcctgactcaccgccgttcgctctcgccgaggaacaagtcggtcaggaagccacgcagtaaccatggcttttaaggatactggaaaaacacccgtggagccggaggtggcaattc

SEQ ID NO: 431926 - DNA, 122 bp, Homo sapiens
gacaggtgtctcctggccgagctcgtgcggggccctgggaggctctcagtacacgggaaccgtgggtcccgcccgccttcccgcaccaggccccaagccccaagccccaagctctcggggcc

SEQ ID NO: 431927 - DNA, 122 bp, Homo sapiens
ctagtctaagttaggcgctgctcctctggtgtaattccacagcacccttgtggtcttcgccgtggagtgctggcactgtgttgtcattcacagtttgactttttgtcttcctcagtagacca

SEQ ID NO: 431928 - DNA, 122 bp, Homo sapiens
cgtcctcataagggattgaacttgcatccactcctctccggccggcttggtcgctggctgcgctccacccgattctcgggatcattggaccgtttgcgcgaaaccagagtggccgattaagg

SEQ ID NO: 431929 - DNA, 122 bp, Homo sapiens
aactatttagggaaccacaggctgtgcagtcaagaatgtggagtgtggagaataaagggccgtgagagctatctaggagccaaagcatggagaaccctaactgtccacagatatgtctaaag

SEQ ID NO: 431930 - DNA, 122 bp, Homo sapiens
aaggaaggagttcatttgttggtttatccagctgctcccgctttgcttatggaagcgctccgttttctaggggtcttagaagctgtagcagtggtagaaagccccttttttgtggactatta

SEQ ID NO: 431931 - DNA, 122 bp, Homo sapiens
tgagagggaggctccccatctcagccagccacatccacaaggtgtgtgtaagggtgcaggcgccggccggttaggccaaggctctactgtctgttgcccctccaggagaacttccaaggagg

SEQ ID NO: 431932 - DNA, 122 bp, Homo sapiens
ataacctaagatgtccacaatattgttttaacgtggcacttagccacatttcaggtgctccgtagacacgtgctggtagctgctgtagtggatggctgtggcctagaggcagagctggacaa

SEQ ID NO: 431933 - DNA, 122 bp, Homo sapiens
gacttagttaagctcctgtagcaagttatgggaaaagccaggcctggaaccccagtctctcgactcccgcagtccacttctctcccctgctgcctcccacgcctgagcagctggggaagacc

SEQ ID NO: 431934 - DNA, 122 bp, Homo sapiens
cacctctctagcgctgtgtcatgaggctctagcattgtggtctccccagactgtcagctccgtctcctcaactcagcaatctcccaggctctgcctggagtccccctcactgcatcatagcc

SEQ ID NO: 431935 - DNA, 122 bp, Homo sapiens
gccctgcgctccttccgctggcaggtgggcggcggggctagcggagaggtccgcggggctcgcgggagtccaggggcagacgggatgggtctccgtgctgaagcccccggcgctcccgccac

SEQ ID NO: 431936 - DNA, 122 bp, Homo sapiens
tacagagcctatgttagtagattggacagctttccaaggaaatgatgtgcacacagcaatcgagcaccttggatcatctgacaattctaattttaaactttagttcccttgatccttacgtg

SEQ ID NO: 431937 - DNA, 122 bp, Homo sapiens
acgggaaaacagcctgggacgcgttggcgtgtcatacaatcacacttctaatgtccgtagcgtgcccagggccaggagttccagatggtttctcagtctccctccagaacctctgtgggggc

SEQ ID NO: 431938 - DNA, 122 bp, Homo sapiens
tggagctccaccgtctcggtcgccatcttgttacccctcactccactaggcccccacccgcggcctccgcctccaggagctcccgccttaggcgtagagatgcaaggctgaccaatcgttgt

SEQ ID NO: 431939 - DNA, 122 bp, Homo sapiens
aatagcaacaaacaaaatgttaaaccagctacaggttgagtgtcccttatctgaaatgctcggaaccagaagcgtttggaaccagaagtgtttcggatttcagattttcagattaaggatgc

SEQ ID NO: 431940 - DNA, 122 bp, Homo sapiens
gggtaacagacggcacctggaaaatcgggtcactcccaccctaatactgcgcttttccaacggtcttagcaaacggcacaccaggagaatatatcctgcgcctcgctcggagggtcccacgc

SEQ ID NO: 431941 - DNA, 122 bp, Homo sapiens
ttctgttagttcctggaaagggggagttagaagtcctcagagatcagggcttcactcttgcggttgaaagtggaagatgggagaaactaagagacccatgtgatgtcacagcttctcctgtg

SEQ ID NO: 431942 - DNA, 122 bp, Homo sapiens
tgtttgtttgtttgttttttgataggatctcagtttgtcatccagtctggagtgtagcggcgggatctcagctcactgcagcctcaacctctgggactcaagccatccccctgcctcagcct

SEQ ID NO: 431943 - DNA, 122 bp, Homo sapiens
aagccgccgtgggacacgctcaagtctggggaaccccatgagcaggaagtggacaatggacgccccttgtgctgccttcaacttttccgccagtttgacgtttcagaacacaacactgagaa

SEQ ID NO: 431944 - DNA, 122 bp, Homo sapiens
ggccattggccctcatcggtggatctgcgtttcctcgggcctacactgtctaggattgtgcggggctggtgagagaacaagatctcttctgtgttcaaggcagacttcctgccccctgcacc

SEQ ID NO: 431945 - DNA, 122 bp, Homo sapiens
ctccaaatgtaggaaccacggatccggctgagacagctgaagtttgcttctggctcctctcgcctccccctttggtggggttaaatgaaatattagttctggttgctagtgcagatctggac

SEQ ID NO: 431946 - DNA, 122 bp, Homo sapiens
actacccggttactgatgtatctggcacccagacaatttccaactcaatgcttttttcaccggtctatttggtgtattcaatgaacatttattgaacaacaaactacatgtgtggggcactg

SEQ ID NO: 431947 - DNA, 122 bp, Homo sapiens
ggaaagcggggaaaacatgaccttggaatccaaagggagtttcctgaagacggtgacggccgaagtgcaaccctccaaaagcccctccgctttcctaagactttgacatgggccattcatca

SEQ ID NO: 431948 - DNA, 122 bp, Homo sapiens
taaatgaatgactcaatgatgaccagagggatggtattttaccaaatgctggttttgtcccgctttgtgggctgcagggggtctatgtgccagggctaaaatacttagtcactaccccaaat

SEQ ID NO: 431949 - DNA, 122 bp, Homo sapiens
aggtgtgtccagcccagcctgagaagtctcctcggaaacttcagtcgactctggagagggcgggagagatgcccaaccccttaaaggagaatacacacaattctggaaaagtggagaggaaa

SEQ ID NO: 431950 - DNA, 122 bp, Homo sapiens
agcaccaatggcttctcctatactattgctcaagtccaccataaaagcagtgtttaaaaacgaagggagaggaagacaaaagagaggaaagcggagagagaaacgggaggagacggagagaa

SEQ ID NO: 431951 - DNA, 122 bp, Homo sapiens
ttgagttgccgcaagaggtacagtcacactgcccagaggattactagaaatgacaggcctcgccctcctggcacagacctggcaccaataactggcaggtttctggggccagctgcagaggg

SEQ ID NO: 431952 - DNA, 122 bp, Homo sapiens
tcttctggcatcggtttcagtaacgcgagtgtttccagtaagttgatttggggcaggctccgtagctgtcggtgtccatccgtcacgcctgaactccgcaggccctggcaattcttaatgtt

SEQ ID NO: 431953 - DNA, 122 bp, Homo sapiens
tctccatcttcagctagagggaggctggggatcccagctctttagaagccggcccgtggacgcccagagaatcccttcggagaccaggtcagggtcactgagcttgcccagcagggcgccgc

SEQ ID NO: 431954 - DNA, 122 bp, Homo sapiens
tggctgatttgctagtcccttgtaatttgtctgaaaaactcccacagtagggcaggacaacgggggaggaacccgggcatctgccagccggttctcctcggtctcagagctgcttctgcggc

SEQ ID NO: 431955 - DNA, 122 bp, Homo sapiens
aaacagggatttatagcgtaacgcaatttcagcatttctttactctttttttttttgagacggagtcttgctgtcacccagcctggactgactgcagtggcgcgatctcggctcactgcaag

SEQ ID NO: 431956 - DNA, 122 bp, Homo sapiens
cgtttactacggcgcccggtcgcctagcagcggggcgcgttgccgcggcgacaggccggccgtgtttggcattgtttgcgaggccccgccccgcggccgccaaccacccatggcttcctgac

SEQ ID NO: 431957 - DNA, 122 bp, Homo sapiens
gcgcgggggtggagctgagctgaagtcactggcggagcgggcgcgggcgctggcgggcgacgcgggagggagggcaggcgctgccgggactccgggcgccgcgtcccgcggccgagctgcgc

SEQ ID NO: 431958 - DNA, 122 bp, Homo sapiens
acaaagaagtagagtgaccgatgatgtgaaaaacacaacccggtgagcccggccgcacgacgcttcacaggaaaacacaacccggtgagcccggccgcacaacgcttcagagcctcattacc

SEQ ID NO: 431959 - DNA, 122 bp, Homo sapiens
ctgcctgcagcggaagctgccggactaacactccgcgggtgtttccatggagaccgaggccgagcctgcgcggcctcacggcgttgccatggagacaactccggggctggggctccgaagtc

SEQ ID NO: 431960 - DNA, 122 bp, Homo sapiens
tcctctggctaagaaaacaatcagctttcccagagccaccgctgtctggacgctagatggcgccgctgagctccccccaccccccgcctttcccccacccccccgcctcctccccaccaccc

SEQ ID NO: 431961 - DNA, 122 bp, Homo sapiens
taaataactgataaggcttaatatggtaccattgccaggaactttagtcttttcatagatcgcaacatatttaaagccaatggaatatatcacggcattttgaacatcactgaacagtactc

SEQ ID NO: 431962 - DNA, 122 bp, Homo sapiens
agatgcgaggaaagccgtttcctggaacatcggaattctaaccccagggtgaaggactcacgacaggcgaggggcagacatgctgaattccacgggcgaactggagttttcgaacgaagaag

SEQ ID NO: 431963 - DNA, 122 bp, Homo sapiens
gagaaaggtgacatcatcgtagctgggaggtttccgaaggcttcaccaatgggagaccggcgaggtgcttgccttctgcagctcttggccaatactaacaaagcaaaagggggcccgggttg

SEQ ID NO: 431964 - DNA, 122 bp, Homo sapiens
tcaggcgtggctctcaggatctcaggccccaaaggcggtgtatggattggggaggcccagcgctgggcattccccatctttgcagggtttctcttctccctctcccaacctgtgtcgggtcc

SEQ ID NO: 431965 - DNA, 122 bp, Homo sapiens
attgcagggcctcgggagaggccacctcccaatagctgagatcgataattggggtgattacgtctgggtcgacgtgccggggtaatagcgactgactgtcgcgcctcggggagaggttaatg

SEQ ID NO: 431966 - DNA, 122 bp, Homo sapiens
tctccacccatccccttctctcattggccagacctggtgggcgggggagtttccattggccggggggcggtgtctgtccctggccggggtgggggcggggcctccgccgctctgagcttgcc

SEQ ID NO: 431967 - DNA, 122 bp, Homo sapiens
cgggatgggtcgcggccacccgtctcagtacctgcctttcttagggttgtgggggtggggcgctttgagaaaagccagaattcaggctctttatgggaaattacaaattagaaaacaaacag

SEQ ID NO: 431968 - DNA, 122 bp, Homo sapiens
agaagatgtcacacatgacggtcgggcagctcaccccagactcagtgatggcgtggaagacgcggtccacatactgccgtaggttctcctgcaacgggacacggcactgggacccactcccg

SEQ ID NO: 431969 - DNA, 122 bp, Homo sapiens
gggcgcggccggacgggagttccccggagaaggatcctgcagcccgagtcccggtgagtgcgagaggacccgcgccccctgtcacccctcacttctcctgagtcccaagtaaggaacggagc

SEQ ID NO: 431970 - DNA, 122 bp, Homo sapiens
cacacattatgtgtggcatcctgtcacccgcggtgacagcccaggcagggatgggaaagccgttgggggctcctcattcaggcactgcagcctgacgtgctgatgttggccttgtccctgct

SEQ ID NO: 431971 - DNA, 122 bp, Homo sapiens
tctacttcatataaatagtctcatactagaaattccatggaattcaagccaatccttactcgcattccttcttacgaagtatacgaactgaacaaatttccttgcgtagcaaaggtgacata

SEQ ID NO: 431972 - DNA, 122 bp, Homo sapiens
cgtgcaggatttcactcgtccatttagtgtaataagatggagagacgacagatggaggttcgattcgctactccgtcatttactggcccggccaggtgctgtcaggagggttaattcatgtc

SEQ ID NO: 431973 - DNA, 122 bp, Homo sapiens
ggccaagaaaatatctgaaggccagattccaggcctggggccaagttctcaaagtgcccccggcagtcactctcctcctcatttgccagccctgtccttctccgtgatgccagcttgtggca

SEQ ID NO: 431974 - DNA, 122 bp, Homo sapiens
cgagtttgcagtcactccaacacatacacaaagaataaagaatataacctaggaaagatccgagaaaacaaaatgtgattaacagtagagggaaacatagaattttcaccaggatggcagtc

SEQ ID NO: 431975 - DNA, 122 bp, Homo sapiens
ggtcatggggtcctcggcgacgcggagtgaccatcccgtcacttttttctcggccgtggccgaagtaattaggccgttcagtagctggtctcagttccagttctttgaaccagtccaggaaa

SEQ ID NO: 431976 - DNA, 122 bp, Homo sapiens
cgaaaaccaaaaatcctggattttatgttttgaaacgtcttccaatgcacagcaatatagcgagtaagccacagaagggacctggatagccagaccatctctggtctggtccagcgcacacc

SEQ ID NO: 431977 - DNA, 122 bp, Homo sapiens
gccaaagaggcccccgggcacggcatcgctgcagcgggcgcagtaccagttgggggagggcggcagcgtccgcggctcctgccccataactacaagccgtcagagacaagagaagctgccac

SEQ ID NO: 431978 - DNA, 122 bp, Homo sapiens
ccgcgccgctcgcccttctctagtggcgccagcggctctcagatcggcctcgcccctttccggactcctggctactcattggctaccgctcgtatgacaggatgtcgccattggccgagacc

SEQ ID NO: 431979 - DNA, 122 bp, Homo sapiens
ggacagccgagaagccgagccacacccaggagggttgtttcacagcgtgtgccgcaggggcgcaggggccgcgctctttcctcacatgtgggagaagcggaggagccgccagggctggggcc

SEQ ID NO: 431980 - DNA, 122 bp, Homo sapiens
gcaactccacaaccagtacggccccatgaatatgaacatgggtatgaacatggcagcagccgcggcccaccaccaccaccaccaccaccaccaccccggtgcctttttccgctatatgcggc

SEQ ID NO: 431981 - DNA, 122 bp, Homo sapiens
gctccgcgccaatgggcggtattgttgatcacgagtctccgcccccttcgccttgaggggcggggccggccactcccggagaggggactacgtttcccggcgcgccgcgcggccggagcgaa

SEQ ID NO: 431982 - DNA, 122 bp, Homo sapiens
ggcgggagcggggcgcgaaggtctgggggtgccccgaggacgcgccgcgtagtgagcctccgggcccaaggtttgactggctttgacctcatgccggttctgggatgtgattttactttctc

SEQ ID NO: 431983 - DNA, 122 bp, Homo sapiens
attgttgaatgaatgaatgaatgcatgaagaaatggataactatgaagcaccgtccaaggcggaaaaaacccgccctaaaccgcaccccaagcaaattgcacacacggctttcccggagtgg

SEQ ID NO: 431984 - DNA, 122 bp, Homo sapiens
tcgcgcggaaggagggcggagcctctattgtgccggggcggcggagatgcagccagtgaccgcgcggaggaggaggacctggaagcgcacagggctcgggcggaggggtacccggcggaccc

SEQ ID NO: 431985 - DNA, 122 bp, Homo sapiens
tctctttcctttcgtggctctagcagtaagcttgcagctcccatgttccccaggaggcagcggagttgctcacaaaaagacgaccccctccccatagttgttttctgcccacgttggcagca

SEQ ID NO: 431986 - DNA, 122 bp, Homo sapiens
gggctccccctctccttttggccagccacagagtccagcggatctcccggccagggatgtcgtgggagaatcaggaagtcgaagccacacagccgagaaggggcagctggcgtctcggaggc

SEQ ID NO: 431987 - DNA, 122 bp, Homo sapiens
acagcttctctttgcggatagtaagagtacccaccttatggggctgtggtgaagattaaacgagttaaaagagactgaaaatgtaagacaatgccgggcacataatgagggttactaataag

SEQ ID NO: 431988 - DNA, 122 bp, Homo sapiens
actacaactcccaccatttagaagagggccaacttgcagatcagaccaccaagcttcaggcgaaaagctgtcacaaagctggagggctttagtcctaggagaactgcacactgacccctctg

SEQ ID NO: 431989 - DNA, 122 bp, Homo sapiens
aaattcctgcaataaatgaaaaaaataaacacagagctgagagtataattcaactagcctcgctcccaaatgaagctgattccagatagaaagcagattttcatatttactgtatgtgacag

SEQ ID NO: 431990 - DNA, 122 bp, Homo sapiens
ggctcagcgcgctcctgccatgggggcgggggtggcaggagagaatggggctcaggccgccgcatgaggcctcacctgcacgtgtctgcatccttcagtggtggagtggaccacgaccagca

SEQ ID NO: 431991 - DNA, 122 bp, Homo sapiens
cactccgcccccgaggcgggtcgggggaaatagccacccccgagactttcggaacccgggcgtcagggctgccagcgcgttcccagaaccctggcgtccacccccaccctgtcctgtcacca

SEQ ID NO: 431992 - DNA, 122 bp, Homo sapiens
gggctcaggccccggcaggtatccgggatggtccctctccctaacccgggcaaggagcatcggtgaccgctgcaagccctcggcagcatcccagcttggcagcccctccccctggcctcccc

SEQ ID NO: 431993 - DNA, 122 bp, Homo sapiens
gtttttctttttgcttattcacatcaaactattgcgctggcccaagcctgcagtttcatgcggacaaagcaggtctctctccaagccctgggggctgggggtgaagcaactgctactcactc

SEQ ID NO: 431994 - DNA, 122 bp, Homo sapiens
tgtatgactttgtcaccaaatgctgtcttctctttctccaatcaagaaataataatccctcgagtttacaaaacacttccaagtctgttgtctcatctgattctcccagtagcccattacag

SEQ ID NO: 431995 - DNA, 122 bp, Homo sapiens
ctagactgcagaggaagatgtgggggtctcctcacaagaccctgactacccactttggcccgactgtgtggagctcgatgaggacaaagagactgaattcatttaaaacccaccagattctg

SEQ ID NO: 431996 - DNA, 122 bp, Homo sapiens
gcctctggggcggagcggccaccatcttggaacgggaggcggagcagagtcgactgggagcgaccgagcgggccgccgccgccgccatgaaccccgaatagtgagtgagccccgcccgcgcc

SEQ ID NO: 431997 - DNA, 122 bp, Homo sapiens
gctggatgttctcaggtgtgaatgtcctcctccccctctgggccctttatataccctggccgggtgcaggtgacccttttcgtttaccttttggccaattaagtagaattttgttttgacta

SEQ ID NO: 431998 - DNA, 122 bp, Homo sapiens
gagccaccagggacggggtgagttattcacaggtgaatgagctaggacgaggcaacagcacgcaggccacgcctcgccaacccatgggtcctcaacaggattttggtgacacgcaacacccc

SEQ ID NO: 431999 - DNA, 122 bp, Homo sapiens
gtatgtattgaagattgagtaaatacatttaaaattcttagaacagtatgtggcacatagcgttccagaatgccacattattgttagtgacagaaataatctcggctgggcgcggtggctca

SEQ ID NO: 432000 - DNA, 122 bp, Homo sapiens
ctcatgcttctacaggctttacaggaaatgtggtgctggcatccacttctggtgaggcctcggagcttttactcatggcgggaggtgaaacaggaggaggcacgtcatggggcaagaatgag

SEQ ID NO: 432001 - DNA, 122 bp, Homo sapiens
cagcctgaacggccccgactcagcctcacgctctctgacttccccgctcgcccctgaccccgacttcacttagggcggtcgcgtagatatgaactctacagcagccactctgctcagcgcat

SEQ ID NO: 432002 - DNA, 122 bp, Homo sapiens
gcgggcgggaaccggggctgcttgccggccagcgcgagttctgggtgggtgtgggctcggcgggccccacactctgagcggccggccggctctgccggccctgggcaatgaggggcttagca

SEQ ID NO: 432003 - DNA, 122 bp, Homo sapiens
tcctcaccacacaggctcgagcgtttccaggtcaagggtaacggagcgtggaccaagtcccgcgtctcctcccgggtgcggggggccccctcagtgaggggggacagccagagaagctcggg

SEQ ID NO: 432004 - DNA, 122 bp, Homo sapiens
cggggtaaagcgagctctggagatcgcatagagaaactgtagtgtcctgggtccgagcgacgcccgcttcccgcaaccgggagagccgattccggccgctgccctcggggggctccgcatac

SEQ ID NO: 432005 - DNA, 122 bp, Homo sapiens
tccggctctgcgctcggctgcctgacttcttcctgctgctgcttttcaggggtgagtttgcgcgtttccgctgttgggagactagggtctgggggcgacggaagcagagcgggccgaagctg

SEQ ID NO: 432006 - DNA, 122 bp, Homo sapiens
ggggacttagctcgcgccccaagacctgggcttgcagcgccgccaacaggcccggggacacgaggcgctccaggccggggtcttcccggctgctggcccctctcgctccccacccgctggcg

SEQ ID NO: 432007 - DNA, 122 bp, Homo sapiens
tctgggctcggagcttctccgctaatctctgggcatttatggccgtagaggcagcggcagcggcacaaaatggctttgagacgagagtgaagagactcccgcaaccttggccgtttccccgg

SEQ ID NO: 432008 - DNA, 122 bp, Homo sapiens
ggcccgagtcgagcctctcttgattaataaatgaatatggctcgttttgttttaagtgtgcgtggatgtatacgttgtattgttttgcaattcaacaccgcaaagatctgggaaaagttctt

SEQ ID NO: 432009 - DNA, 122 bp, Homo sapiens
cctcgtggccttaggagggctgggagctagcgctgtggcgttagggcctggcaactgccccgtgagcatgaatatcacgacagtaagcgttacccgttaacacaagtcaaacggtgtcgagt

SEQ ID NO: 432010 - DNA, 122 bp, Homo sapiens
ccatgtcgcagagtgctacgtagaggaacaggccggtggccactgccaggatccaggcctcgctctcctcgctgactccaaccgcgagtgccacgtagagaccagcgaaggccgtgagcgcg

SEQ ID NO: 432011 - DNA, 122 bp, Homo sapiens
cttccgctggcggtgccgaggcagggtcgcaggttcacctgggttttccgttgacagcctcgccacacacatttggctctgccaaatgctctgccattaatttatgatttaaagtaattaac

SEQ ID NO: 432012 - DNA, 122 bp, Homo sapiens
acctcgggctccagttcccgtcgcgatcctagcagcaggtcagggactcggcggaaatgacgtcctctccgggcagaagaagccggccacgtcgcagattataagggcggagctgacgtcgc

SEQ ID NO: 432013 - DNA, 122 bp, Homo sapiens
ccgcgggggaaccgctgggagccctgcccccggcctgcggcggccctagacgctgcaccgcgtcgccccacggcgcccgaagagcccccagaaacacgatggtttctgctcgaggatcacat

SEQ ID NO: 432014 - DNA, 122 bp, Homo sapiens
gagtttgtgatgatgctctcccgccactgaggctccaggagggaatatctgttgcccctgcggccccagacaccagccagacccaggctgcaggcctcccccaggagcctccaggatggaga

SEQ ID NO: 432015 - DNA, 122 bp, Homo sapiens
ggcatgtcccctggcactggatctgcctgggcagttcttacctggtgctatccctatcgtcgtcctgggggccatgccctagcaggaattttcgaggctgggaccttctctccagctccttg

SEQ ID NO: 432016 - DNA, 122 bp, Homo sapiens
ctctatggttacaaataatgacgatccgagaatcgttagggccgattcaatgcgagcctccgagagagggggaaaaaaggagaagggggagaaacagagagaaggttggctttggcctctga

SEQ ID NO: 432017 - DNA, 122 bp, Homo sapiens
gggtgtgacctgtgtgcgggttttgcaggtctggaggcggctggtggaaatccaattccccgcggagcatggctggaaggagtcgttgctgggagacatggaatggaggctcacaaaggtac

SEQ ID NO: 432018 - DNA, 122 bp, Homo sapiens
tggcatgacgacaccgacatgcaggaaaaaagaccatgtctgccgtcagggcccatgtgtcgtaagcactgggccaagtatttctccatgagaaccctgtgaggcaggtactgctacctatt

SEQ ID NO: 432019 - DNA, 122 bp, Homo sapiens
gcgtggtcttctgcagtgggggcttggctggtgagtggagactctgcgtgactctgggggcgtggccgagaatgggtgtagctctgtactagggcgtggtcatgcgtaggggtttgggtgag

SEQ ID NO: 432020 - DNA, 122 bp, Homo sapiens
catgtgccaccacgcccggcagaaaacagactcttcacagccatctaaaatcacgaaaaccgccgagtgcaaaagaggctgttactcggaattcggcatgaatgtggcctgtccacacgctg

SEQ ID NO: 432021 - DNA, 122 bp, Homo sapiens
agtgctatgtgaccccactgtaggttcagcaccttggtttccttatctgaaatacttattcggtagttttaggacataagatcaagggttcagcacaacggcttgagacacatacgcgaccc

SEQ ID NO: 432022 - DNA, 122 bp, Homo sapiens
tcaccttctttgcctccatcgactgctaccttctggccatcatggcctatgaccgctacacggccgtgtgccagcccctgctttatgtcaccatcataaccgagaaggcccgctggggccta

SEQ ID NO: 432023 - DNA, 122 bp, Homo sapiens
agtttacccaacaatcttttccgttttgtgcccttaacgcacttggacctccgggggaaccggctgaaacttctgccctacgtggggctcttgcagcacatggataaagttgtggagctaca

SEQ ID NO: 432024 - DNA, 122 bp, Homo sapiens
ccgggagcggcagccggtgcctcctcgcgcggtgctgccgctgccgccgccgccgcccggcgagcccagcgcgcccccaggcacctgcggccccagatacagcaacctgaccaaagccgccc

SEQ ID NO: 432025 - DNA, 122 bp, Homo sapiens
aaaacactgtagtccccaaagtgtctactgaaaactgtcatcagtggccattgcttctctcgtctttgtcacagtgaagtaatacttttttttagtggagtttcagagggagagacatagat

SEQ ID NO: 432026 - DNA, 122 bp, Homo sapiens
agcccctttggcagcaccgcctcttaacacagtcaactacaactcccggagtgctccgcgcgcgcctgcctggtagagcccagcttgcgctgggcagcatcctggccgctgggtggcgtccg

SEQ ID NO: 432027 - DNA, 122 bp, Homo sapiens
ccacctggtggcagggtggaggagtcagtggctgtggcgagccaaggtgaaagcccttcccggggagaacggctagcaatggctgcgccccaagccagctggcaggtcctgcaaagaccatc

SEQ ID NO: 432028 - DNA, 122 bp, Homo sapiens
cattgggatggccctggtgggcatcatgctggtctgcggcattggaaacttcatctttatcgctgccctggtccgctacaagaaactgcgcaacctcaccaacctgctcatcgccaacctgg

SEQ ID NO: 432029 - DNA, 122 bp, Homo sapiens
agccccaggctttggagcagggtgcctgtgtttctcgcggaagcttcccacaagcaaaaacgtgtctgcagggtagtgtggaggtccgaagggactcagggggactttgcagcaggcagagg

SEQ ID NO: 432030 - DNA, 122 bp, Homo sapiens
gccaatttttatagcgaaatacaaagttatcccaacacaattactcctaatagagttcaccgaggccccaaaagctcttttttaaaaatcatcataagatttcaacattcaagaattaaact

SEQ ID NO: 432031 - DNA, 122 bp, Homo sapiens
taacaactttcacagttacaagaaaaacaaacatatttcttttgacctactattcataaacgtcatgtcagatgcataaatattatgcctctgtggtaacaatgaggggtattctggcattc

SEQ ID NO: 432032 - DNA, 122 bp, Homo sapiens
tttccttattagcagcagtccagcttcccctgcaggtgctgtggccgcgttgcgcctcggcgggagcctcctggagaggctctctggcagagccccagggatgcagcgacccagccaaggtc

SEQ ID NO: 432033 - DNA, 122 bp, Homo sapiens
gttcagttggaggagatgcgatctggtacagagggggtggggagaactcagcagtgtcaccgtgatgtctgcatttggtaaccttccaaatccaagagtgtctgttcctagagtggatttat

SEQ ID NO: 432034 - DNA, 122 bp, Homo sapiens
catagatgcccaggccaaactccttgcccccacggatgttgaagcccaggcagaagtcgtcggaggttgtgtataggtggacgatgcgccggacaccatcttctgagctggtgtcggagggt

SEQ ID NO: 432035 - DNA, 122 bp, Homo sapiens
gtggccagcgcttgccaatcagaggaggccagggctgtcccctagcgggcggtgaccaatcgccggggccggccagagcgcgcttccttagtaggtggatggtggtcggagcgccgactccc

SEQ ID NO: 432036 - DNA, 122 bp, Homo sapiens
cccaacctgggcgttccagagccacatgtcatacacaagaaatggatttctgtctccagccgctggcttcccctagttatagagaatacaaattgcaaaacgatgcaatgataagatgaccc

SEQ ID NO: 432037 - DNA, 122 bp, Homo sapiens
tgggagcctctcatctgggcttctccagaaggcgcagaaatgtgtctgtcacctacacaacgctgtggtgtgcttgtatctttacaaactcttatgtatgaccttttaaaactccgtttatt

SEQ ID NO: 432038 - DNA, 122 bp, Homo sapiens
ccaccatgacgccctgcaggggacgacccgtcagcctcgccggcgacaccgaacccaccccgcaacgcagaacccaggagccccgcggcgccatccactcacctggtgtctggggcgcccga

SEQ ID NO: 432039 - DNA, 122 bp, Homo sapiens
cagacacacaccggagaagcaggcagacactgtgtccactctaacaggctgacagacagtcgtgcacgcaccaacacacgctcagatggccccacacaccccaacaccctctcacagtaaca

SEQ ID NO: 432040 - DNA, 122 bp, Homo sapiens
ctgcagcaaaacaagatcctacctttctctctgcggctcccagaatgatgcaattgacaacgtttttaagacacagcagaaggcttagttttgatcacttttatagagaggtctggtacttc

SEQ ID NO: 432041 - DNA, 122 bp, Homo sapiens
cgaggggaggggcgaggggcgaggctccgggcggccggagaaaacctgtttgttctcctgcgggcggagcccagtccgcgcctcctcgcctccctgcgcgctccccgctgtgcaccgcgccc

SEQ ID NO: 432042 - DNA, 122 bp, Homo sapiens
ccctcctgcccctgtactaaccctgaagctgctcgataagcgtccatgccatccgagagccgctggcatcaaacaccacatggccctgagggaaggaacatgtggagcaaggcaaaggagac

SEQ ID NO: 432043 - DNA, 122 bp, Homo sapiens
ttttattgggaaaatttcagtccatcttctttgccgttagtatgacttggatggaaaagacggggaagggctgtgtagatggctccctgtcatggttgcccatggctaatcaatatgtcttg

SEQ ID NO: 432044 - DNA, 122 bp, Homo sapiens
cggtttgctcatctgctagacggggggtttctgtgagtcccaggaccgccacagggatcacgagaagtactgaatgtccaggtaattttgtaaactagaaagtcccgcgcagcctgagggcc

SEQ ID NO: 432045 - DNA, 122 bp, Homo sapiens
atttaagagcctggactagtactgattgacagggaaacattttcaagccattaatttgaccggatataacacgatataagggaagggagatgaatgggataacattttaagcttatgaatgg

SEQ ID NO: 432046 - DNA, 122 bp, Homo sapiens
aggaaccacgggatcatggatgtggagaccgtcctgaccaggaccgttgtgggatgttctcgttctcattcactccctgtgaacctcctgcggggagggtcccgtctgagagacagagcttc

SEQ ID NO: 432047 - DNA, 122 bp, Homo sapiens
tggctgaatgtgaaaggggagccagcacttgacacagccaagcaggaggaagaaaggtggcgcagaggtgccacacacttttgaacaaccagatcccataataactcagtatcaccagaaca

SEQ ID NO: 432048 - DNA, 122 bp, Homo sapiens
ggcgccggcggcgagagcagggattgtcagcaactcgggctgcagaagcagcagcaacggcggcggcggcagtggtagccgcctccagggcaccggaaccctgatcccggagctgctgaaaa

SEQ ID NO: 432049 - DNA, 122 bp, Homo sapiens
acacgttttttaaaaactgcggacaggccgaaagaggaggagccgccacaaagcccgccacgtcttcctaaattggtttaccgcctgaaggcattggtgccccatcccgggtacttaaatgg

SEQ ID NO: 432050 - DNA, 122 bp, Homo sapiens
gaaatagcctattctttagagagtagtgtttagtttagtctcctgtttatgctggatgtccgcccatgtgtcctgctcggtttttaattctttgtgactgattttgaggtagcccatctcaa

SEQ ID NO: 432051 - DNA, 122 bp, Homo sapiens
gtgatcatccagcatgatgcagcgtgaggacagctgagcagggaccgggacagccctcaccgcatgcgtgtggagtgtccggtggtgctcgggccgccgcagtgcagcgactgcccggccct

SEQ ID NO: 432052 - DNA, 122 bp, Homo sapiens
aggtgagcccctccgggacccagaaccctaaaactgctcagagagtttgctgtggagccgcgctgtgccgagcctctcccggtgctgtcccaagcctctccccacgagtctgtgggtgcagc

SEQ ID NO: 432053 - DNA, 122 bp, Homo sapiens
atggtcactcaggtagaagaagtgaggctacaagagccctttttttaaaaaaaggaaaaacgtgtatgtgtatgaaatacacaggtgtataatataaaggaaaaaaggcatctatttccttt

SEQ ID NO: 432054 - DNA, 122 bp, Homo sapiens
cgactgagaaaggggtctcacctggtctaggttccccgggtaaggagtcccgggcgaggacgggggtcccggccgcgggcggaggcggcagcggcgactgctcccggcaccagggaagcggc

SEQ ID NO: 432055 - DNA, 122 bp, Homo sapiens
gcccgcgaccccgacagcgcgcggaggccccgcccctctagggcccgctcctcccctgcccggcctctgattggctgcccggcgcgtcagtcggtacccatccccgccctacgcctcccccg

SEQ ID NO: 432056 - DNA, 122 bp, Homo sapiens
aaatagcctagggcagggatttgatttcagttgccccatgcataaaatatgggtaacacccgcactacttgccccacagaattatttttttcttttttaaggcagaaatgtgtatcaagtaa

SEQ ID NO: 432057 - DNA, 122 bp, Homo sapiens
ataaattacccagtctcagatatgtctttatgagcagtgtgaaaacagactaatacataacgtgtcccttcccctcccctacccctgggccacactagcctcccagtggttctttgaatgag

SEQ ID NO: 432058 - DNA, 122 bp, Homo sapiens
gcaggatcaatacacaacagctttcaggtgtccggacttgtgttgtcaacacaagaaggtcgaggataacaatgcctgagggcaaacatcaaaccctacctactggggcagcaggctggggg

SEQ ID NO: 432059 - DNA, 122 bp, Homo sapiens
gccgccactcaactctgctccagcccaggtttcggggagccgggatccacttgggcaggccgggagcctcagactccagacttttcatggtgcgctccttcctgcttactcaggaggaaggc

SEQ ID NO: 432060 - DNA, 122 bp, Homo sapiens
actaagttcaagaggatgctggggccatgatgatcttgggatgtgctgtttctccagcagcgtccagcaagcagctggggaggtcgtggggaagccgtgcagaggctgctgccgtaaatccc

SEQ ID NO: 432061 - DNA, 122 bp, Homo sapiens
gatcgtaagagcgtcaagttcgtggagacaagactccgggatctccctgacacaccaaggcgtttcaccttctacccttgcgtcctggctactgagggtttcacctcaggtcgacactactg

SEQ ID NO: 432062 - DNA, 122 bp, Homo sapiens
tcgccctccaactggtttgcacacttgtccagggagggttcaagaagagtttacaagctgcgtgatgggaagaggctgcgtgatgggaagaggcaagctaactaaccctcgcgggtgtggac

SEQ ID NO: 432063 - DNA, 122 bp, Homo sapiens
aataaaagatttctttgacaagacatgaaaaatcaccttgtggcagctggcatgtgatgccgtttctggggagacactagcaaagttgatctgacaagtaaagaggagagatgatggttgta

SEQ ID NO: 432064 - DNA, 122 bp, Homo sapiens
aacccagtcttgtggagctactacttggtagttaaacattgtttcatggtgaaggtagagcgagttcatttacctgccttagattagaaacgctggcactgcagtttcccccaggactaatt

SEQ ID NO: 432065 - DNA, 122 bp, Homo sapiens
gaggttttacttattcttacagtgcttctggataccagctgactacaggggtacctgccccgccatcatgcagtcatcattacagtaattcccacaacatcttcaggttcaagtggctgcag

SEQ ID NO: 432066 - DNA, 122 bp, Homo sapiens
gccgctcccctctcctcgccccgccaccgggacggagagcgcccgccgctgcatttccggcgacacctcgcagtcattcctgcggcttgcgcgcccttgtagacagccggggccttcgtgag

SEQ ID NO: 432067 - DNA, 122 bp, Homo sapiens
tcagagagtgaggtttctgaagaggctggatgcaggatgactctactcagaatttacaggcgagggcggccgggccgagggttgtatggaggcctgggattcgaactcaggactgtggcgcg

SEQ ID NO: 432068 - DNA, 122 bp, Homo sapiens
gccactgtgcgcagccagaaatgcacacgtttaccaaaccctcccggtgattctaggagccgtattcgggaccgccagcccgcattcccgtggactctctaggagccgtattcgggaccgcc

SEQ ID NO: 432069 - DNA, 122 bp, Homo sapiens
ccacctgggctcggctgctaagagctgtgagaggcttgttcagcctgggaggactcagggcggctgggatgagtcgtgtggaagggcggtcagagtgcgatggtcctaacccgaggcaccag

SEQ ID NO: 432070 - DNA, 122 bp, Homo sapiens
catatgcaggctatttctaggattgcttgtcaacacactttctattcctgcgtttgtcatcgtttgcatatctttagtcttcttaggtgcttagcaggagtttccaagaacattctttttaa

SEQ ID NO: 432071 - DNA, 122 bp, Homo sapiens
gaggctaaagaagccgagagagaagtaaaatttgctgcataagtagggtgagcaggcggccgtgggtgccctgttaaagaagtatggacatatgcatacttccagaagtatattaacatgca

SEQ ID NO: 432072 - DNA, 122 bp, Homo sapiens
agccctgatgaaagcagatggctgcagagaccctttgccctctgggacagctgcttgattcgccggggggaggtgctggcactgacggacatgctttgtgtttacggatttgggtcctggaa

SEQ ID NO: 432073 - DNA, 122 bp, Homo sapiens
ttcaaaaaatgacaaatggcgaaaatggaatccctgtgattgtagggcagaaacctgcagcgacatggcaaaatccaggacacctgaatgcggggcacatgtcacacgcagccccccacggt

SEQ ID NO: 432074 - DNA, 122 bp, Homo sapiens
cgtgagtagcacccgagattcagatcatctgttctgccagctgctgttccttaggaaaagcgtttgaattcttgctgctcttcagcgctcatgcggctctgtgttagctcacccttcccttt

SEQ ID NO: 432075 - DNA, 122 bp, Homo sapiens
tgaggaccaggggccagctcagcagagccgggccttcagtggccgtcactcaacagcactcgtgggtacccagatgtctgagggtagaaacagcacgcccagactcagtcagggtgcaagtg

SEQ ID NO: 432076 - DNA, 122 bp, Homo sapiens
cgtattttcggacattatgtgttgggactgtctcaagggtccgtgagcgagattctggcccggcccaagccatggaataaactgactgttcgtggcaaggagccatttcacaagatgaaaca

SEQ ID NO: 432077 - DNA, 122 bp, Homo sapiens
ggtgtttccccggtggggcgtgcactttccctgggtggtggagggggcgtgggctctccccgggtggtggggggacgtgggatctccccagttggtggtgggggaggggtcgtgggctctcc

SEQ ID NO: 432078 - DNA, 122 bp, Homo sapiens
gggggaggtgaggtggtgcttgaccttggagggtctcggaggtcggaggtctgtctaagacgtccattctgcaggcatttatgatttgcttactgtttgtcaggctctgtttcttgcggggg

SEQ ID NO: 432079 - DNA, 122 bp, Homo sapiens
tcttttttctatttcacttggatttcttcagaatgccttgtaaagtgccacatacacacacgtctctctgtaaatgtcaatacaataagcataagagtttacataactgagaaactgactca

SEQ ID NO: 432080 - DNA, 122 bp, Homo sapiens
ggctttaggaaagagtcacaaatatttaaaagaatggctttgtcattttaagtatacggtcggggaaaagtgtgctttaattaaatatacatcataccagtgatgctggcaaggttgaaagt

SEQ ID NO: 432081 - DNA, 122 bp, Homo sapiens
gccctccgccctcactctgctaattctgggtcccaggagtggccccctggatcttcttcccggaccctccctcgggtctcccgggcgctccgcctccccggggctggctctccctcccctcc

SEQ ID NO: 432082 - DNA, 122 bp, Homo sapiens
agaggctcagaaacctgcccaaaatgagctggagcatcagcaggggttccaaatggcaggcgtcctctcccctctgtcccacaaagaacagtccgtcccctgggctgggagctgggcccgga

SEQ ID NO: 432083 - DNA, 122 bp, Homo sapiens
agaaggttcaaggcgacgtgcacccaggttagaaagcgcggaggaccccgtggtctggggcggagctggagctgagcaccaggcttcccgaactggctcaggcttccgagggagcagaggga

SEQ ID NO: 432084 - DNA, 122 bp, Homo sapiens
agaccagcctgggcaacccagcaacactccatctctacagaagttgtaaaattagctgggcgtgatggggcgcatctgtagtcctagctacttatcctagccttggcgagaggatcacttga

SEQ ID NO: 432085 - DNA, 122 bp, Homo sapiens
tggacggagccatgtcgtcagcgcccagtggagttctgactgtaaaggaacacaccggtacgccctccttgtgaaggatgctatcccttccccaccaccggtgattttgtctctgggataaa

SEQ ID NO: 432086 - DNA, 122 bp, Homo sapiens
gtgatagatcttttcagatccatcactggaagaaaaaccctggtgataacgattatctcccgctcgcgctatctcgccatcgccccaattcatctccctctggctctagccccttggggaga

SEQ ID NO: 432087 - DNA, 122 bp, Homo sapiens
tacatctaatgtgtacattctcatatatattataattataatggaattataaatagtccacgataatataatatatgcatgacgtttccaggcatcaagaagatttacagctataaagccag

SEQ ID NO: 432088 - DNA, 122 bp, Homo sapiens
gacagtgctgtggcagtagagtgtgacgaacaagttctgggagaatttgaagagttctcccgaaggatctatgcactgaatgaaaacgtatccagcttccgccggccgcgcaggagttccga

SEQ ID NO: 432089 - DNA, 122 bp, Homo sapiens
gtcagttgattttcagtgaaccttcagaaggcaaagagggaggcttgcccttggcccctacgatacaagtttcctggcttggttgttgtactatatggttttataaaatgcaaccatggaga

SEQ ID NO: 432090 - DNA, 122 bp, Homo sapiens
gtgggagcagcgaggagggcagctccaagagctcggggtcatcccctgggccgtgccttccgggtctaggcccctgattctcctcaggctctcttggcccccagctggtggatagtcgaagt

SEQ ID NO: 432091 - DNA, 122 bp, Homo sapiens
cgccgagacatttctgagcatgaggacgagctacagcagctcctggggtggggctgcctgcgggatggcgggagaggatgccctggagaaccgtcctcccagtgtggaaggcccttttccct

SEQ ID NO: 432092 - DNA, 122 bp, Homo sapiens
agcttcccctccatgccttttagctttttggtttctattcacagtcacttttccccccaacgtccttatttctgagcttcttttactgtagtaccgtcaaaacagttgagagagaaatgatg

SEQ ID NO: 432093 - DNA, 122 bp, Homo sapiens
ggacgggaagccacacagcgtatgagccgttcatgaaaccgccagacagttgaggctgcccggggctggggaggggtccgcactggctgacaggtgctgtgcagggcactaagtggggccct

SEQ ID NO: 432094 - DNA, 122 bp, Homo sapiens
ctatttcccataaaaactcttacagatagaaaactagcagtgactggtcgcggtggctcacgcctgtaatcccaacactttgggaggccgaggtgggcagattacttgaggtcaggagttag

SEQ ID NO: 432095 - DNA, 122 bp, Homo sapiens
atggtaaagtgcatcaaaaccagccaagagcctaattggcaaagattatacccaatgtagcgtgaggggcaggctcattactctgatttgttgtcaatgttaaaagagtagatttttttcat

SEQ ID NO: 432096 - DNA, 122 bp, Homo sapiens
ctggtctcaagcgacccaccggccttggcctcctaaagtgttggggtgagccaccatgcccggcctagcattgtctttaagaagtcatttgctggtcaaatgcagctttgactggtcatttc

SEQ ID NO: 432097 - DNA, 122 bp, Homo sapiens
tccacttccccaaccccattccagttgtccagcctttccagatcaaaccactgtacatgtcgcatatattattgatgtccgatgtctccctgaaacacataaaaccaagttgtggcctgatc

SEQ ID NO: 432098 - DNA, 122 bp, Homo sapiens
ctgctccatttacgggagtggccactacatcacctttgatgggaagtactacgactttgacggacactgctcctacgtggctgttcaggtgtggtcacgggcactgcctggtcgggctgctt

SEQ ID NO: 432099 - DNA, 122 bp, Homo sapiens
tcagtaaaccacccacgcgtgggtgaagaattacagggaacgctttatgcactctggccccgtttcgacttccatacagtaacctgagaccacacttgttttcctgcaccaagatagaaaaa

SEQ ID NO: 432100 - DNA, 122 bp, Homo sapiens
cctcatcatcttcatagtccaagagctcattgtccacatcgttctctgccataactgggccggcaggggaagaagggaagggggatctggatgggttctcgcaaaataggtgaaaacaaggg

SEQ ID NO: 432101 - DNA, 122 bp, Homo sapiens
gggtgggttttctttgttgttccacgacctgcatcgctggagactacgaggctggcttagcgtatacttccacacaactttttcagtaaaagatgccactcttgtccagcagggctttcctg

SEQ ID NO: 432102 - DNA, 122 bp, Homo sapiens
gcgggcgccacggtggctcccaggtcagtgtccgaaaggcgggagtaggatgcgttctttcgaacgcctcgggttccgtcagttaccgtgcctgtgcagtgcgtctttggcgcccggttcaa

SEQ ID NO: 432103 - DNA, 122 bp, Homo sapiens
ataattgggaccgtgtgtattaaactggggctgacatcagctgaccctggttttgccttccggaatagtatgagccaaatctactccatttttttcagctgagctcttcaaagatttttgag

SEQ ID NO: 432104 - DNA, 122 bp, Homo sapiens
cctttcattatctgagacaacatatcaagtgagcagcagtacaaaggatgcatgtgatttcgaaatgccacaattgagccaactgcagttgcacgcgtacgtagtatagagaggtgtgatca

SEQ ID NO: 432105 - DNA, 122 bp, Homo sapiens
gtgaatatagaaacaagaacacaaacggcgttccagaaataacacacagaagccacggcccggagaggtgggcggggggcccgggacgcttcaggtgggggcggggaggggccgcgcggcgc

SEQ ID NO: 432106 - DNA, 122 bp, Homo sapiens
atggggccggccaccacgtgctctctgagttctctttccaagtacagatccctccggagacggaacattgttccgcctttaattcttcccaggagctgcggaggaaggcgtgagaaccggag

SEQ ID NO: 432107 - DNA, 122 bp, Homo sapiens
gatccctggtgatgcccccagggagctgggctgtcactctccagccacatactgtgacatcgctgtgacattgtggcagcagccagtgggaagtgtgtggggatgcaggggtcttcctccct

SEQ ID NO: 432108 - DNA, 122 bp, Homo sapiens
gtgggtgaggctgcggtggtggctgctgcccagggtgggaggctcaggggaggcgcttggcgacaggagcaggaagtgatgaggtggggagctcagccgagggctgcacaaagaccttcctg

SEQ ID NO: 432109 - DNA, 122 bp, Homo sapiens
tctgcaaaccttgtgactactcatttggagttattgtgcttccctctttttccctagtgccgctttcttagcacttagcactgtccagaacacacttgttcccaaatggcctctgcccagac

SEQ ID NO: 432110 - DNA, 122 bp, Homo sapiens
ccagttttacggtccctctggccagtacacccatgaatttgatggagatgagcagttctacgtggacctggagaggaaggagactgcctggcggtggcctgagttcagcaaatttggaggtt

SEQ ID NO: 432111 - DNA, 122 bp, Homo sapiens
aaggcagagacaacccgacatccaccaagagacgaatgaggagacaaagcgtgccctgtccgcacgatggaacacatggccatcaaaaggcatgaggctctgacacgggctatgacgtgggt

SEQ ID NO: 432112 - DNA, 122 bp, Homo sapiens
ggggggcggtggctcacgcctgtaatcccagcactttgagaggccgaggcgggcggatcacggggtcaggagaacgagaccatcctggctaccatcctggctaacacggtgaaacctcgtct

SEQ ID NO: 432113 - DNA, 122 bp, Homo sapiens
ggtttccatatgctgcttatgacacaccacagagctgactttcttggcattacaaaccttcgtggtatttccatttagctagacactcccttggcatctcaatttaccccaggtctaatcta

SEQ ID NO: 432114 - DNA, 122 bp, Homo sapiens
cctttgcattttcccgctttcccctgccctgctcagccctaaacccgcaccggcctacagcgcctccaccctgctttccgtgtgagccccgcccttccggaccctgcatttcacccccaccc

SEQ ID NO: 432115 - DNA, 122 bp, Homo sapiens
taaacaaagaacttcaccttataaggttttagggggcattaaatattttagagcagtagccggtacacaatatttgctaatatgttaggtaatgtgaaggataacagaaaggaaaccctggt

SEQ ID NO: 432116 - DNA, 122 bp, Homo sapiens
acaggccagctgatcccagaagccatgtatgtaatgactagcaggagctcaggtaatagtcgcacataatttccacctgtgggcctcttcttgccatgattttcaactcctctccatccctc

SEQ ID NO: 432117 - DNA, 122 bp, Homo sapiens
ggaaaatgggtgcggcagacgtcccgctctcctgggctgctgaggggcctcagtgagaagcggccctgaccctggtccaggacccgggcgcacggctgggcaggcggctgccacggtcactg

SEQ ID NO: 432118 - DNA, 122 bp, Homo sapiens
cgccaacgcgggttcccggcgtctccaaagctaccgctgccggaagagcgcggcgcccgacggagccgtgtggaggccaaaactcctcccggaagccgctactggccccgcttgccaggccc

SEQ ID NO: 432119 - DNA, 122 bp, Homo sapiens
cggataaatcgaaagagtaagggacctctgcctgtccgtccctcccctggcctagcccctcgacctcaccactagttctggggctgcctccctgcagcaaactgtgccagggcagaagttta

SEQ ID NO: 432120 - DNA, 122 bp, Homo sapiens
aaattagggcattaaaaaaatatgcaaatcctgcgcgaagaggagcgggtgcattcctggcgcgatcgccttttattgaagcttttaattaaaggggccagttggcgagcccctgaaacaac

SEQ ID NO: 432121 - DNA, 122 bp, Homo sapiens
tgcccctcccagcaggagccaattcgccaatcacagccctccttttcctgacgtcattggcgcgtgccccggtttcaaaagctcgggggcgggcttctgagttcgcgcatgcgcctctgtgc

SEQ ID NO: 432122 - DNA, 122 bp, Homo sapiens
gcccccggcagctctcaccttaagctgcctggctgaggtcagcagtaagttacctggcagcgtccgggggcctgcagccgaggacagggctggaactacacttcccagtgtgccaggcgggg

SEQ ID NO: 432123 - DNA, 122 bp, Homo sapiens
gggagcaaacgaacgaggggggagtgggccagggaaccccctccgcttccgggtagttggcgtcacttccgggcgagccccccaatcgcacggcgcccgcagctccccagccctaccctccc

SEQ ID NO: 432124 - DNA, 122 bp, Homo sapiens
taggaccataagaaatcggcgtgtcgtggcgagcgccctctttcggcggaggggagaaagcgcagaagggctggaggacttatttgcaagtgttaaactgctaattaaaacaatagcgataa

SEQ ID NO: 432125 - DNA, 122 bp, Homo sapiens
atgctcctccaactctcatgtctctaggctcggtgtttcctccgtctgggctgggtatcccgtggggtcgtagtggtgggtgtgagggggtaggtggagggagggggagctgagggcccaga

SEQ ID NO: 432126 - DNA, 122 bp, Homo sapiens
tgtcgagaaacttgaggctgcggcagtcctggaagatgcgcacgggcacaaactggatggcgttggcccgcatatgcagcgtggtgagcttccgcagcccgtggaagaggtcgggcgcgagc

SEQ ID NO: 432127 - DNA, 122 bp, Homo sapiens
acctcccgggtgtggcgggtctggggcccggggtctccggccagagcagctgtggagccacgtgcaacacgcgcgttgccctcagcccgggcggggaccggacgcatccggagctgcgggga

SEQ ID NO: 432128 - DNA, 122 bp, Homo sapiens
tgagctccacttgtaatcagaatgccggaagggatggcagaaatctcctcccccaactcccgccatggagggagctaggtcatatgaaggaaggcaaccaccaatgacacccagctagctaa

SEQ ID NO: 432129 - DNA, 122 bp, Homo sapiens
acggtggtgtggatgctccatctcttgactgggacccacagagctctccgtagcttccctcgccgcagctctcccagcctctccctctggatccacaggatcagcggccccagccctccgcc

SEQ ID NO: 432130 - DNA, 122 bp, Homo sapiens
catccgcagccgcaaagtggggctcatgaaccgcgccgtgcaactgctcatcctggcctacgtcatcgggtgagcgtggggccgcgcggggggcgcggcgggtgctgccctcgcgtccgcgc

SEQ ID NO: 432131 - DNA, 122 bp, Homo sapiens
tacttaacaacaaaatcagttgatcccattgttgcagctcagaattctgtttcagtatatcgcagctgagtaaggaagctaaggcgctggagtggtattaatgcatcacccatggatatgtc

SEQ ID NO: 432132 - DNA, 122 bp, Homo sapiens
tcctgaagttgccgggttctgatctccgcgactacgagccaccggagagagagcagcccacgggcacacaggcagacctgtcctcgacatcacaagggcgccacttttggggagactcaccc

SEQ ID NO: 432133 - DNA, 122 bp, Homo sapiens
ggtcctgcccgcgaagccaggactttgtcacgagctttgcccggacgcagcagccggaagcggttgggaggattgattcttgatattgatgccacccagagaggacaaaggtggaaagacac

SEQ ID NO: 432134 - DNA, 122 bp, Homo sapiens
cagcgcacttggctggggcgagaggcgagaggggtgggcggactgcttggttggcgttggcgctctgcagtgcagtggagtgttagcccagctccctatatggtcggggattagcttggcgc

SEQ ID NO: 432135 - DNA, 122 bp, Homo sapiens
agctggtcattttcctcaaaataaagcaaaataattagacttatacatgatgtttagccacgcatagttatatgatagcttttcctttgtgccttgctaacatttttaatatttcagggcac

SEQ ID NO: 432136 - DNA, 122 bp, Homo sapiens
cttcctggccccgctaccctgcacggagctgtccctgggccagcacccgcttcgggccaccgcagacgaagaccggcagatggccatcctgctgctggtgcacagctcctgggacaaggtga

SEQ ID NO: 432137 - DNA, 122 bp, Homo sapiens
gttggggaaaggcggcctccaagatacctgggggcctgagaactgactgccctcccaaaccgggcctgctgtcctgtgacccctcagacgtggccctccaccatcctagtcgtctcccacga

SEQ ID NO: 432138 - DNA, 122 bp, Homo sapiens
gggtcctgtctcctcacacaggacaaggaggtcatgagacctgtgtctgcccctcctgggcgggagctctgtcacatcacctgtctccctctctgccatcagggcaaagtctggctccccgt

SEQ ID NO: 432139 - DNA, 122 bp, Homo sapiens
ttgttctattcaggccttcaacttactgggtgaggaccatccacatcaaggagggctgtccgctttaccgggtctacggattcaaatgctaatgtcatccagaaacaccctcacagggacac

SEQ ID NO: 432140 - DNA, 122 bp, Homo sapiens
catgcgcctcctgaccctgcttgccagcagccggccagctcttcctgtctgggttgggtccgtgtgtgtacgtctgggaaggcggatcccaccagggcccacgagcacccctcccatgatgc

SEQ ID NO: 432141 - DNA, 122 bp, Homo sapiens
cgggaaggagaagccgtttaccgcctggtccttactgccatggatggcggcgaccctgtccgctcaagcgtcgcccaaattctggtaacagttctagatgtgaatgacaacactccaatgtt

SEQ ID NO: 432142 - DNA, 122 bp, Homo sapiens
cctggcctcccggcgccaactggctctcacacctgcccgtcaaagacgttcttccgggggcgttgggaagaacacactcggtcctgcaaatcaaatcaccccggtttgggtgggactgcact

SEQ ID NO: 432143 - DNA, 122 bp, Homo sapiens
acgcccctccccgggcctggacgtgcctgaggcccgtctccctcgcaggccggcccttcccgctggccctactgggctgggctccctccaatatcaccttcgcgctcctcttcggccgccga

SEQ ID NO: 432144 - DNA, 122 bp, Homo sapiens
gggaacaagttcttgggctctgcactaggttgcttacaaggaagtataatgaggatgagtcgcaggagactgaggcattcaagtggccatagggacctggaactgataagagaagttatggc

SEQ ID NO: 432145 - DNA, 122 bp, Homo sapiens
gagaggcactgacttgggtagaagcaggagtctttagctctcccccttctctgtactcttcgtggtgtgatagctaattagtgcccttcgtgcttaagggcaatgctctggaagaaaacctg

SEQ ID NO: 432146 - DNA, 122 bp, Homo sapiens
cagctgtcgcggggcctaaagctctctcaggcccccgcgacacaggcgtcgctgaggagacgtgggaacagcccctgggccccaccacggccccattttaaagaaagttaaagacaaaagag

SEQ ID NO: 432147 - DNA, 122 bp, Homo sapiens
cgaccttacaggctcaagcgatcctcttgcctcagcctcccgtgtagcgtggactacaggcgagcaccaccatgcccagccgatgttttaatttttggtagacatgaggcctccctctgtct

SEQ ID NO: 432148 - DNA, 122 bp, Homo sapiens
gcgtcccagtctgtgttgcagcagcattctcatcgggggtgcgcacaccatcgttactgtcgggcagtaactgccgcttgccttgccgcagtaggagggaaatctcaccttccttccacata

SEQ ID NO: 432149 - DNA, 122 bp, Homo sapiens
cttatttccggctactgatcgtcaaatgcagtttttattcccacttcccctctccatccccgacccgagctgacgttcgaccagcaaaccacagccaacgcccgcaacacagttcagttaag

SEQ ID NO: 432150 - DNA, 122 bp, Homo sapiens
gctctgccagagataacatttcctgtgtgaccttgggcaattttacagctttctgagctacgatttcctagttggtaaaataaaaggactggattggctgctctttaactttttctggcttc

SEQ ID NO: 432151 - DNA, 122 bp, Homo sapiens
tgttgggcttctcgggaagccaaatggtatcgcacgtgttaaaggcgggtgtctggaagccgaaagtcctgactaactgagaatgttgactaatccggatagcattgagaagaggaaatgga

SEQ ID NO: 432152 - DNA, 122 bp, Homo sapiens
atttcttttttccacaggtaattttggagaaaataattaccaattaactgataataagcacgctgtcctctgctgtaaaaagtctgaatagatactgtgtatgtttttatgtccatgaactt

SEQ ID NO: 432153 - DNA, 122 bp, Homo sapiens
ggtgtgcgctgcgccggggccgccgcacggccccgcgggcgccgcctccaacttctacagcgcggtgggccgcaatggcatcttgccacagggcttcgaccagttctacgaggcagcgcccg

SEQ ID NO: 432154 - DNA, 122 bp, Homo sapiens
tcctaagtgcatgtgggaacccgattccctttggtaggtgcagtgaaacgttcatccgtccggtccacagaaacgcttgttcggctccctgacgattgctgagttgtctgtgtattgtccgg

SEQ ID NO: 432155 - DNA, 122 bp, Homo sapiens
aaataacttatgttccaaagccagaatatttttacaatgaagttatctgggccatttcaccggcagaataaaaaaaaaaaaaacctgacctcaagatgaaattttcaacaatattcatattc

SEQ ID NO: 432156 - DNA, 122 bp, Homo sapiens
gtttctaccggtacattcagggcaactaccgtctggcagttctcgcgtcctcgcccagtgcgggaagcaagcctgggccaggcaataaatccagcaagccgagtcctctaagaacaaggcgc

SEQ ID NO: 432157 - DNA, 122 bp, Homo sapiens
gagggagaaaggcatgtttatggaagtgtaccagcaggactgtgggcattctctgacacacggggtggagggccaggctcattctccatagaaagagaagcactggcccccactcaggcaga

SEQ ID NO: 432158 - DNA, 122 bp, Homo sapiens
gtgtgtcttcagtgctttctctaaaaacgttcctttatagctttgtacttttttttttagcgttgccattgaaagttaaaatgtttgcatggtttaccctctgagttatgtttcttctagtg

SEQ ID NO: 432159 - DNA, 122 bp, Homo sapiens
gagagaggccgcggggctcccgctcctcagcccggagcgcagttggccccgggttcggagcgccgcagcacggattccggcacctggcttgagttttccgcgaccaaagttcaccttgttcg

SEQ ID NO: 432160 - DNA, 122 bp, Homo sapiens
aaacacgcgggtggtgcagcctaaacgcggcccagctgcgctccctcccccgccgaagctcgaataaatctctggccttcaattattcagcgagattaatattaatgcagctccctgggggc

SEQ ID NO: 432161 - DNA, 122 bp, Homo sapiens
gctgaaggcgttggggctcctgcagttctggggcagccacaggcgcccagggtttcgtgccgatcagcccaggacggtcttcccggtgcagtttctgatgcggggagggcagtgctgccttc

SEQ ID NO: 432162 - DNA, 122 bp, Homo sapiens
cgctggcgcatgcgcacaaaaagcgccggcaattggggtcgcagctggagatgctgcggccggcagggctctggcgcttatgtcggcgaccttgggcggcgagggtcccagcggagaatctt

SEQ ID NO: 432163 - DNA, 122 bp, Homo sapiens
cttatttaacaaaaattcctaatatgatacaattttattaactttagtcctcattttgcacgtttgctctctagaccaggggtcccaaactccccagcatggactggtactggtccgtggcc

SEQ ID NO: 432164 - DNA, 122 bp, Homo sapiens
tctttttcaacttgccaggggaacagccccagagtgggcagatgccgcgcccgcataaagcggcaggggccaggaggaaagggcggcagaatggacgccacggacggtaagctgccgcccat

SEQ ID NO: 432165 - DNA, 122 bp, Homo sapiens
ccccatctcatgtaggaatgccgtgtccccagggtgagccctcaggtgagcctccgcggccgcgtggaaggggcgagaagggcgctgcccgggtgctgtcggcgaccagcccggctccatct

SEQ ID NO: 432166 - DNA, 122 bp, Homo sapiens
tgaagcggctagaattccaggtgctggctggggcgcccatggggggtggggcctgagagccgactgaggccttgtggactgcagtgggccctccggtccctctaaacccccaggcctcctct

SEQ ID NO: 432167 - DNA, 122 bp, Homo sapiens
ctcagccgcctacttctgcagtagtaaggtctgctctgttggtacaacatacaacacaaccgcccgccgttagccactttttttatagggtacatcataaatcacctgagattttagtctgt

SEQ ID NO: 432168 - DNA, 122 bp, Homo sapiens
gcccgtccctcggatactctgattggccagcctctctcagctcgtcagtttattggccagcgccgctaggccgctatcgagcagggtccgagggctgtgtcagaaggctgggcagccatggc

SEQ ID NO: 432169 - DNA, 122 bp, Homo sapiens
cttccgtcggcagaggggtttatgcctccacagcgtgtgctgtcagcttggctaaacaatcgcttttcatatacagccagaacaatgggcaatacagtttggttactatctttatcaagcca

SEQ ID NO: 432170 - DNA, 122 bp, Homo sapiens
gtcccaggctccggcctccacttccgcctttcagccgctccggatccggatctccacctccgccccgcccctcaatactcccaggtgattgacagtgcggagaccaatgggaggcactcttg

SEQ ID NO: 432171 - DNA, 122 bp, Homo sapiens
ttaaaaagccttcaaaagcagcaagtggctccgggtgtgatacttcaagattagcaagatcgtgtttgaatgcactccctgcccatataaacaagcctgaagtctgttccacgctcccaata

SEQ ID NO: 432172 - DNA, 122 bp, Homo sapiens
gtgagtgtaagtgagggagtgtgtgtgtgtgaggacgtgtgagagcatgtgcgcatgtgccgaaggtgccagctcaggacaaccaagcattacgtgttcaggaattttgcaagctggttgtt

SEQ ID NO: 432173 - DNA, 122 bp, Homo sapiens
ccaggagcccctgcaccaaggcctgggcccgcttagctgcagtggggagcctaggaggcccggactgcccgcggagaacaggagcagcacccgcaggcgggagggaggggcccggcctcggc

SEQ ID NO: 432174 - DNA, 122 bp, Homo sapiens
ctcccgccggcggattattacacgcttgggttttgggctcagcacccccacccataaacccgccgggctttttgttgcgcctgcgccttcccgcgaatattgaacttcggagtcctagcggt

SEQ ID NO: 432175 - DNA, 122 bp, Homo sapiens
caggcccaaggctaggagttggggtttcgggcctgaattggggcccggagcacccctttacgtggcgccccgggtcccgtccgaccctggggagacgcgggtggctgggatggcaggatgag

SEQ ID NO: 432176 - DNA, 122 bp, Homo sapiens
gagtgacgctggaggtatcggcccagcgatgctggagtggtcgggtcggaggcccagcagcgtctggggaggggcgtgggggaggcgtgtccaaggccggctggccccgccccgccccgccg

SEQ ID NO: 432177 - DNA, 122 bp, Homo sapiens
acagcggcagaaggaagggggcgcggggcggagtcacgctgagtgacaggaatgtgcagacgttgaattaaaagcagcttggcacaaacagaatccggctacggaaaattcaaaatgtattt

SEQ ID NO: 432178 - DNA, 122 bp, Homo sapiens
tgccagccgacagccgcgccagggccgctccgggtaccagggtcggatcgggtgacgtcgcgaacttgcgcctggccgccaagccggcctccaggctgaagaaggacccgccccggccttga

SEQ ID NO: 432179 - DNA, 122 bp, Homo sapiens
cggtcgcaggccagcgtgagttccaggagggcatgggatctgtgggccctgcacttggagcggcagaccggaaacactggccccgggcagtgagcggcttagcacctgggccagcagctgca

SEQ ID NO: 432180 - DNA, 122 bp, Homo sapiens
gggttgagatagagtttcaaagtatgtggtttctaaatggtggacattctgagggttcatcgctcactgtgatctggaggttgggtaaatttgagagacatatttatagacagaaaagggct

SEQ ID NO: 432181 - DNA, 122 bp, Homo sapiens
ccaagtggaagaactatggactccgtatttttggtttcatccacccggcgagggacggtacgggggtgagggtgccccgggggaggggtgccgtgaggctccacccccctgagcctagtctt

SEQ ID NO: 432182 - DNA, 122 bp, Homo sapiens
actgtaatctgaattcaatttttctacaacacacccccagacaaaaaaaacttggccagccgcggtggcttgcgcctgtaatctttgggaggccgaggcgggcggatcacaaggtcaggaaa

SEQ ID NO: 432183 - DNA, 122 bp, Homo sapiens
ggtcccagcgcacggtgaggaggtggaagctctggctctgagccgccagccgctggggcacgggaaaagcgccagttccctccaagcacaggtgaagcaggaaaccgcggtgactgtcggcg

SEQ ID NO: 432184 - DNA, 122 bp, Homo sapiens
aggtctgacctgggaaactaaaagcatcttcatggagcaagggtgctcctccagtgggggcgctcagtgagttctgcggtatgggtgacagtattcttgtgtggacagtattcatgtggtga

SEQ ID NO: 432185 - DNA, 122 bp, Homo sapiens
acgccccctccagtgtgaaaggctgcgtttccggcccgtggggctccaatcaaaatgggacgcctgctggcggtaacgacaggccggggccccgccccccgaagtagggcgtgtggcgtcac

SEQ ID NO: 432186 - DNA, 122 bp, Homo sapiens
cgcctcacatggcgcattacccagcgactccgcttacccacacgtccccgccccctcagccggacaggaagaggaaatgacgatacctcgggcgctcgaaactccacctctcacgccttccc

SEQ ID NO: 432187 - DNA, 122 bp, Homo sapiens
ggataaaatgacacactctctggaattcatgtcggataccgagggcacagcgggaggtggcgaaggttgtggctgtaacaggattggtgtcgcgtcggtccctgatgaggccggacccgggt

SEQ ID NO: 432188 - DNA, 122 bp, Homo sapiens
gcataatgatgcacttcctgagggcccgcatgtggtaaacacaatcatggtgttgttattcgtggttttccatcagcgactgcctgccccggggacctgacacagccttggtccccgccttc

SEQ ID NO: 432189 - DNA, 122 bp, Homo sapiens
ttttactggaggagaaagtggggcacagagaaattcagttattggtccgaggtcacacagcgtgtgagtcgggaaggaaggggcagctggaatttgaacctggcagtctggcttccctctgg

SEQ ID NO: 432190 - DNA, 122 bp, Homo sapiens
agaaaagaaagagctgggggaataggatgagctagtgtaactaaccatagctcttttctccggtaaggctgggacaaatcgacctcggtcttgccaagcatatttgttagtgatgctggggg

SEQ ID NO: 432191 - DNA, 122 bp, Homo sapiens
atgtgatattacaggaagatgtgtctgtaaatcaggcttcgtagggaaacagtgcaacctcggcaggcaggtgcaccaacaggaggagcagccgcggagagcgcaacgggtgctgggttctc

SEQ ID NO: 432192 - DNA, 122 bp, Homo sapiens
gtgccccagcatgggacagcccgggagatgagtgtgccaggcactgcggcccctgcacttcgggaagcctgccttaccccaccctgagcctccgggcgtatccgcttccccctggggtggct

SEQ ID NO: 432193 - DNA, 122 bp, Homo sapiens
tgaatcagctgtccgggggaggcagcgcagcgcggcgcgcgggagctgggtgcaggaatgcgcctggagccgcgcggcccgggagggcgcgagacgtctccgcccgcctggtcgccccgcgg

SEQ ID NO: 432194 - DNA, 122 bp, Homo sapiens
cgccgcccccccaggctgagccacgttgagtaaatgcatgtgcacggtcaggtcagaccccgggatcgggtgaaactccgttcacatttgcatacaggcggagtctcacaatgaaagcccat

SEQ ID NO: 432195 - DNA, 122 bp, Homo sapiens
agcgtgcgcgcgccggggtgtgcgcccgcgagtgtggggggcgtgggcgagcgcgctccccgctccccagccgagagcccgagacccagccccgcagccggctcctgtgtgtcggcgccgca

SEQ ID NO: 432196 - DNA, 122 bp, Homo sapiens
gaaaagctttcaagcaggagcaaaaggaagtaaagtacacttggaagagggccaagccggcgacttgagagatctagtgcactctttgacttttgacttggggttttatgcattggtgttct

SEQ ID NO: 432197 - DNA, 122 bp, Homo sapiens
agcttgcccagctcccgtgcagggtccaccagcccctgaagctgcaggtggatggagcagcgatcagaagccagagccacagcgcaaccctggggggcgggagcccccagggccagaacagc

SEQ ID NO: 432198 - DNA, 122 bp, Homo sapiens
atgctggtagggccagagacagaggcttaacaccctgctggggaacccggtcagaactcccgaggcaggagaggttctgctccactggatgtttgtcttggtgtttttggatgtgctgatca

SEQ ID NO: 432199 - DNA, 122 bp, Homo sapiens
gcactgcacatacaataggaccatgtgactaagagactattatgcagccatttaaagtgacggtctttaaatgatataacaacatggaaaaatactaaggatttatcaagtggggaagaaag

SEQ ID NO: 432200 - DNA, 122 bp, Homo sapiens
aggcgtcggcgagaggcgggccctggcgctcagcccgaggccgggcgaaggcgggggccgcggccgcttccttggcctccgagtgcctggcgggcctccaggccccagacacacccctctcg

SEQ ID NO: 432201 - DNA, 122 bp, Homo sapiens
gcagaaatgctcacaggggaaaagaagatgttcttatctggggtctccacagtgaacctccggtacagattgaatgcaaagtcagcattaatggatgacatcttgtagagagtggcatttgg

SEQ ID NO: 432202 - DNA, 122 bp, Homo sapiens
gttacccagagggtgcgaggtcgagtaccttccctgtcccatcgcaaacccaaagatccccgttcctggagattctgattgaggtaaactaacaaaacatgtattgtgccagagagtggtaa

SEQ ID NO: 432203 - DNA, 122 bp, Homo sapiens
ccttggccagaggggcggggcgtaggctgggggcggggccggagagtgggcggggcctggcgcgtgggcggggctccgggcgggccggccgccgagggtggggccgaggaggaggaggagga

SEQ ID NO: 432204 - DNA, 122 bp, Homo sapiens
tatatgtttgacatattaaaggagacttctatcagctgctcagtaaccattccagaaaaacgccttaaaagaactcaagcaaaatcacagcccctcatctgcagtgctgtttctaatttgaa

SEQ ID NO: 432205 - DNA, 122 bp, Homo sapiens
gatgaattcctaatatgaatcatcagagtcgcttagattttcgaaacactgtttcatgagcgattgtctaccaatctcacactctttgaacgcaccactctaggccctgcgattgagctgcc

SEQ ID NO: 432206 - DNA, 122 bp, Homo sapiens
caggaaaaatacaaacaagaaaaaggatcagatggtaaaggtttttcaggtaaagcaactcgctgggatgaactggtcaataaataaaattatttgcagaatggaattctgttttcagatca

SEQ ID NO: 432207 - DNA, 122 bp, Homo sapiens
atacctgcatcctagaggacagtgccccaacccccgcagggtgtcgtccctaacaggaaccgtaggtaagcctttaataagccacttttatcaggccagctgtttctgggtgctgtgctata

SEQ ID NO: 432208 - DNA, 122 bp, Homo sapiens
gagactctgttctagtacctttcatgaggttgtcaccaagaatttcctcattcacagtgacggaagctgaattcagacaagagtgtcccccaccccccacgtacacactctcagctcctaga

SEQ ID NO: 432209 - DNA, 122 bp, Homo sapiens
tgcgctcccccagggggccaggcgcctggaaggcgtaaagcaggtcgagtgagcggccgtcgtagaaggccacgcggccccgctcccagtccaggtccacgcgaatgcgccgcggcgggggc

SEQ ID NO: 432210 - DNA, 122 bp, Homo sapiens
tcccctgctgtcttcactctgaccatgatgagctgcaccaggctttctaaatatctgaaacgctctacgccatccctgctttctttgtttggcctcagcgtggtgatctgggcttcctcaga

SEQ ID NO: 432211 - DNA, 122 bp, Homo sapiens
atcaagagcatcataacctgatggaaaacaatgccccctggttcaaatggacaactgaagcggtgtctccagctgtctgaaagcgagatagtttgccagtggccaaggagcaaggattgtca

SEQ ID NO: 432212 - DNA, 122 bp, Homo sapiens
ctcctttctcaattgttaataaaatgacatacttccatatcagctgatcaacagccactacgtcaagctgtcccctacttcttccaccctgggaacactgggcctccccaaggcctccagga

SEQ ID NO: 432213 - DNA, 122 bp, Homo sapiens
ggtctccatgctgagaaaggcggtgttggctggagcaggaccagcttgagccaccccccacgccttttaaagcccctttgtcttgtccccagagctggcagctgaatgagctcactgtgcta

SEQ ID NO: 432214 - DNA, 122 bp, Homo sapiens
ctacaacgcgaccttgattgcctgttgcagcagctgaagggcgcacccccgtgcccctcccgccgctgtgctgcggtggcccacgctctctggactggccgcctacccttgccttggcgacc

SEQ ID NO: 432215 - DNA, 122 bp, Homo sapiens
agaacgggcggggaaggtttcagatgcaatggcttcttattccttcttttgactgacccgcgccttctccgcctccctttctcctcgcgtcacccgcaccagcggctgggatgcggcgcgcg

SEQ ID NO: 432216 - DNA, 122 bp, Homo sapiens
cgtttcaaaattttgcacggccagggtgacaaaaagaggatttaagagccacaagcggtccgcacatgacccagacttcgttcctgtgcggtaacgtagggagagaaggaaagggtgtgggg

SEQ ID NO: 432217 - DNA, 122 bp, Homo sapiens
cctgaagtcacaagatcagaggtcctgcggcagtttaaataacaatagcaacaactgctacgactacttctcccattattcagcacaactgcagctgggggatttaggttcatggtctgcag

SEQ ID NO: 432218 - DNA, 122 bp, Homo sapiens
ggggctgatgtggggcaaagagggaatggggccgccgggcctggatggtcgtcttgacggcgtcattgtcgccccttgtaggaaatccgccaaccggcccctagcctttcgccctcatcttc

SEQ ID NO: 432219 - DNA, 122 bp, Homo sapiens
aaatttgatacaagatctgtctctatgtgatgagccctttgaatattactcagtacatcacggtgaggggtgggtggcctcgtgtctttaggactcttccagtggcatgtgagcaatagcat

SEQ ID NO: 432220 - DNA, 122 bp, Homo sapiens
cacaaggatcctctgaaaccctctctgtgccccaagtacagatgccattacttctgctttcgtatctcctcaggcaaaagtggagggtgccttatgggccctcctcataggttgtctctgca

SEQ ID NO: 432221 - DNA, 122 bp, Homo sapiens
ggggacgtggaataaagaaagctcctgggtgccggctatgagaagtcaggtgtgcgtaggcgtggacagagtgccgatgtgggagtctggacacctggattttctggtcggggctctgtgtc

SEQ ID NO: 432222 - DNA, 122 bp, Homo sapiens
ttagacgtagatgaaagtttttgctcgttgtcttgaagaaaagtgtagttggaagcaacacgtggagaaggaattcacatctgctcagtgatcatcatgcaggcactatgatgagcacttta

SEQ ID NO: 432223 - DNA, 122 bp, Homo sapiens
tggggacacgaacgatccagtcacagggatggcctctgaggaagacactgacagcgacgccgccatccagggctccctgggtggggtgcgggcgctgggaatcttgatcagccccacctgca

SEQ ID NO: 432224 - DNA, 122 bp, Homo sapiens
atcatcgactcgctgccaccggaacacgcgctcccgaaaaactgcaccccgactagccctcggctactccaggtgacaaacggacaaaaacaaatcctaaagcctcgcgggaaaaagacctg

SEQ ID NO: 432225 - DNA, 122 bp, Homo sapiens
gcctcccctctgccctccctcgacgggcccagccccgccccgcccggccggttccctccgcggggccccggccactccttgtgcaagcgcaggcctccaaagggtttgggcttcttgcccaa

SEQ ID NO: 432226 - DNA, 122 bp, Homo sapiens
agcgtgccagcttcccagccgccccaccctcccgtgggcccggccccggagcctggcaggcgggcggcacccccactataggtgccaagcccgggaactggagcaaagggcgggaggggccg

SEQ ID NO: 432227 - DNA, 122 bp, Homo sapiens
gatctgtgaaggatcaaatgaacatccaaaatcaggggggccccaggactaggtagattccggatccctctcccccaggcagatgcatcaagccagtagcaggtcaatcagcagaggtgtct

SEQ ID NO: 432228 - DNA, 122 bp, Homo sapiens
cccccgcagaggagtaccagtgctccggggtcctcgagaccgacttcgccgagctctgcacgcggtggggctacacggacttccccaaagttgtcaaccggccccgcccccacccgcccttc

SEQ ID NO: 432229 - DNA, 122 bp, Homo sapiens
agggtgaccaactcatcctggtttgcctgggactttttaggttttatactgaaagttccacgtctcaggaaacccattagacccagggggaccctactcatctgtgagaggaagataatact

SEQ ID NO: 432230 - DNA, 122 bp, Homo sapiens
ctcggtttctcggctgctgggtcggtcccgcccacagctggggcggcctatgtcgagtggcgcccatggagaagagggctcagctcgcatgtggaagaccctcaccttcttcgtcgcgctcc

SEQ ID NO: 432231 - DNA, 122 bp, Homo sapiens
cgtgcctcagccctctcagcgtacagcatgagctggctgaagcagccccaaaaggggcagcgtgtgagcagcaccgaacccaactgcatgatcagctgcaacatccaccgtctcgaacctat

SEQ ID NO: 432232 - DNA, 122 bp, Homo sapiens
agatacgactcctccggggagaatttccccctgcctggtccccttccctagagagcccttcgccaaccctgggaaagccccaaacgacagctcccgagcgccacccggaccagactccagga

SEQ ID NO: 432233 - DNA, 122 bp, Homo sapiens
ctagttgggagcggagcctgcctgtcattggtcaccagagccaatggaaaggggctgccgcgcggccgtaaagagtttgtagaggcagttcgggtgcggtacgttgcattccggtaccggac

SEQ ID NO: 432234 - DNA, 122 bp, Homo sapiens
aagcagtttttttcatctgagccatttgggcaatgattctggtagttgcagcgatcagaacgaggataacagacaccatttcgggaacatggaaattcttccttctggcacatggtacaatt

SEQ ID NO: 432235 - DNA, 122 bp, Homo sapiens
aaatcctagagggaggaaggcggggaagccaatactacttgctatttccactgcaatgaacgtctctgtgtcatcaaaataagaacttcaaccccaaggttgaaacagccaagcagaatttg

SEQ ID NO: 432236 - DNA, 122 bp, Homo sapiens
aacttacaacaggtttgtttccttcttttatggtgatccagtcttccccgttggagctaacgtcgatcttgtaagtcttgacataatatttcttcttggtttcttttgaaatggcgccctgt

SEQ ID NO: 432237 - DNA, 122 bp, Homo sapiens
gattatgagtcagcctttcatgatcaagcaacatagggcaagcatatgtcatcttactggcgagggggccagaaatagcttctgcctgactgaggagtgcaaaagctgaaccagcatgtgga

SEQ ID NO: 432238 - DNA, 122 bp, Homo sapiens
caaaggctccgaggcccagatgagcagggcgattttaaatgtcagatcctgccggccatccgcgaccgtcacctgtgcgtcttcagctcctcaggctcctccgcttgtctcagttacaactg

SEQ ID NO: 432239 - DNA, 122 bp, Homo sapiens
tgttataaaattcatgttagtctcttacttctgggaggttcttcattctgataatataggcgatccactagcaatatcgctggtgatgaggagaccgtaggagacaaagggataaaacctga

SEQ ID NO: 432240 - DNA, 122 bp, Homo sapiens
ggtccaaatcactgcttttcagttgcctgcaggcatagatgagatggccacaagtttctacgtactctcccaccaataccagcagttcaatcagccaccaaaagcctgcctgtccaagttga

SEQ ID NO: 432241 - DNA, 122 bp, Homo sapiens
ggaatagtggagtaattccaagacccagcacttccaccgcagccattaccgcagaggcaacgtgtaggccatgcttacagggtcttggactctgtcttttacatttcacaaatgttcttaga

SEQ ID NO: 432242 - DNA, 122 bp, Homo sapiens
ctcaaactcctgagctcaagtgatctacccaagttggcctcccaaactgctgggccactgcgcctggcaccattcactttcctttaaccatttgattttctttataaccatcacttagatat

SEQ ID NO: 432243 - DNA, 122 bp, Homo sapiens
attaactatctgtatccaagtcattctaccagtctctgctttgggaaggaatctacactacgatacttgatacactatgatacttgctgatcatatatatatatatatatatatatatatat

SEQ ID NO: 432244 - DNA, 122 bp, Homo sapiens
gctgtctgtgggtacagccagaactcccatacgcgggcgctgaagtgccaaaccttcgtgcgtgttctctagtaattaggtgcattgttttgaaggaataaagaatggctactccataggca

SEQ ID NO: 432245 - DNA, 122 bp, Homo sapiens
tcagtctaatccgtgtgcacatttgggacccaaagtcagccaagttcgttttcttgcaggcggttgtccggaatgccagtggctcctgggcagatgtgcaccccagattcagcctttgtgat

SEQ ID NO: 432246 - DNA, 122 bp, Homo sapiens
acgcatgaacatcaagcccaagaaggcctggaccaagcagaatacactttgaggctcccacgaccctagtagtcctaaaggcctaagcatagacagcatggtttgacaataaataatttgag

SEQ ID NO: 432247 - DNA, 122 bp, Homo sapiens
tcgccgccgttggggctggaagttcccgccaggtccgtgccgggcgagagagatgctgcccggcccgcctcggctttgaggcgagagaagtgtcccagacccatttcgccttgctgacggcg

SEQ ID NO: 432248 - DNA, 122 bp, Homo sapiens
cctctccctctctgtccagcaaaaccttcctcttcgaatgtccatacccttctcagaacacggctttctgaaacattagcaaatacttctaataaaccaatcaagccactcctgagagtgga

SEQ ID NO: 432249 - DNA, 122 bp, Homo sapiens
cgccaccatagaggaagtcgtagaggtgttgtccttcaggatccccttgaggggccgttgcgaggccgtggaggccgccattgccgggtgctccgcctgtcggctcagggtcgctgcttggc

SEQ ID NO: 432250 - DNA, 122 bp, Homo sapiens
ttggataaaatacaatttgtggtcataaaacagcaaccactttactatgttcatggataacgtaaatcaagaatttggacagaacatagtgggaataggtgacttctatgcttcatgatgtc

SEQ ID NO: 432251 - DNA, 122 bp, Homo sapiens
atggatggtggaaatatttgcagtgtgtctttctggagtatgggcttcatgcttagaacacgacctgcctacccctagagtgcattcctgaatataatgccaaccacatttgagttgtagtt

SEQ ID NO: 432252 - DNA, 122 bp, Homo sapiens
gtgggaaggatggagctgctggttacagcctcgcgtcgggcttagcccatgaggctgtcccgaatgactgacggcagagaagtttgaacagaaagagcagtggccccatcggcccagaatct

SEQ ID NO: 432253 - DNA, 122 bp, Homo sapiens
tgagggtcccactggtacttgagatttgttatcagagctaccccctcatgttgtagcttccgtcatttgtcctctgcccccactggcagtaccaagggactagactaggataagtaactggt

SEQ ID NO: 432254 - DNA, 122 bp, Homo sapiens
aagccgctgctggctgcaacctccgtcccgcagtccaattagcagccgcgacccggcgcccgcccacgccgcgtcacgagtcagccaaagatggctgcgcccaggtaatttgagcaaaggcc

SEQ ID NO: 432255 - DNA, 122 bp, Homo sapiens
gcacgggcacagctttatgagatgccaccccacttcagaccttgctctcccaagttcttccggcgtcgtgctcatgtggccccggctcaggcctccctgggggacagggcaggccttggtgg

SEQ ID NO: 432256 - DNA, 122 bp, Homo sapiens
ctaggaagaactatccttcctgcccacccccttccattctaaccagggaaagcttcccttcggccagcccacccctgcctgtgccagcgccccctggtgtctcccttagagcccttgccagt

SEQ ID NO: 432257 - DNA, 122 bp, Homo sapiens
acatggtctcatatctctggtcaaaatcctggctctgttccttcctggttctaaacccctcggcaggcttcctagtccccctaagactcagtttatgcatctataaaatggggctaggaata

SEQ ID NO: 432258 - DNA, 122 bp, Homo sapiens
ccctcgctttgcgtgcgtgtttgcgtacagcggaggtggcggcgcgggcaggtcggagctcggagctgctgttctggttctcttgtggccgccgtcgctgtccggctgccttgggctgccga

SEQ ID NO: 432259 - DNA, 122 bp, Homo sapiens
aaataagtcatgaaaacacaagaatgatttagacgtaaggccaggagtgagaagtgttaccggtggagggtgtccaggtccaagaattggacaaagcgcacaaacaaagcaaagacagaatg

SEQ ID NO: 432260 - DNA, 122 bp, Homo sapiens
ggccgtgagctggctggtggccttggcctgtggccagtggtgccagggcggccctggggtcgtgtgggggagccatgttgggcagtggaggtgctgtcagggcctgcagtacagtgcagcct

SEQ ID NO: 432261 - DNA, 122 bp, Homo sapiens
tgggaaaaggaaagaaaagtccagggagcgcctgagcgggaatcggcagcgtttgggtagcggttgtcattgcttactgctctagcgggggccagaactggggtcagtttgatcggcaaagt

SEQ ID NO: 432262 - DNA, 122 bp, Homo sapiens
aaagcccgaagctaggaactcgtccaccgtcagctccgccaggcgcctcctgcggcgccgcgctcctgccatgataccagcctgcagcttgcggcccacttccggccccagaatgccgcgcg

SEQ ID NO: 432263 - DNA, 122 bp, Homo sapiens
cacttcagtggaggaacaaattaagtttataaatgcttctttcttcatcttggaggatcccggttactggtggaatctgccagctggaactgtggagacgcacatttggtcaggcagcgttc

SEQ ID NO: 432264 - DNA, 122 bp, Homo sapiens
ccggccagcggcgggctgggcataagcagagagtcccttcccctccagtgcgtccagggccggctgcgtgcgtgtcgcggggaaagagcctggaggaggaaggcccttccctggggagggtc

SEQ ID NO: 432265 - DNA, 122 bp, Homo sapiens
aagagattgtaaagtggagtgctttggaaaacatctaccgcgggagtccgtgcagccagccgtcacctgctcctaaggcgaacaactttattgttaagccaccccccaactagttcgccctg

SEQ ID NO: 432266 - DNA, 122 bp, Homo sapiens
tcttttcttccttctttgtgaagaccgtgtggacccaccaaatcttggtgaacatggaaccgtagcccagactaaagcccaggcccaggagccagaggcgggcctagaaaggaagagagggc

SEQ ID NO: 432267 - DNA, 122 bp, Homo sapiens
ccttctccacctccttcttccagattcctctccaggcactgatagaatagaccgaaagaacgacgggtttgacttgtttagcaaatgcttttgatacccctgaaacacagagaaacgtgtgc

SEQ ID NO: 432268 - DNA, 122 bp, Homo sapiens
ccggctgggtcttttgtggctccggtcaccgcgagtggcagagtgtgggtgcttaagtaccgggcagaaagaaacaacttggttcgagtttcgtttgtacgagctgaagtgaccttgggcaa

SEQ ID NO: 432269 - DNA, 122 bp, Homo sapiens
tgaagagcttctagaatcatagctagattagcaattttaagtaaatttgaatttgggcttcgttgaatagatgttggcttgatgatagttttagggtaacaataagaacaatatagtttttg

SEQ ID NO: 432270 - DNA, 122 bp, Homo sapiens
gatggtgaggacaaggtccccacttccaggcaatttgaactgagtccctcacttcaagtccgtcacctctcttctcacctctttggaaatgcagagcataccctgctgtctttatcctccta

SEQ ID NO: 432271 - DNA, 122 bp, Homo sapiens
gtgcactcaaataaaaaggtcagagcagagacggacggcggcctgagagggcagcagattcgcgctaacagagcaggtcaagcagggcctcctcgccttgctcttccgcttcagcatatacg

SEQ ID NO: 432272 - DNA, 122 bp, Homo sapiens
gcgctcgcgcgtcccccgcccgctaatgttttggccgcttcaagatggcggtgcaggagtcggcggctcagttgtccatgaccctgaaggtccaggagtacccgaccctcaaggtgggcgcc

SEQ ID NO: 432273 - DNA, 122 bp, Homo sapiens
agcggggtgcgcgttctgatctgtttcatagaatctgacacgtaccctttcccaccccagcgtctctgaattgggatgcatctgacagcaagtgtggcatccgggctgcagttgccgttgtc

SEQ ID NO: 432274 - DNA, 122 bp, Homo sapiens
caagcagatccctgtctaattcactggtgaacattgaagtccccagtaaaacttgtgcttcgatttagaacagtcgtaactaccaactgtaaacactccttatttgccagtcattctaaatg

SEQ ID NO: 432275 - DNA, 122 bp, Homo sapiens
agggtccgagagagcaactgcggggtccaagtcccatctgggactgccagaggcaggaggcgggtcccgctcagcatcccctctaggccagggtgccccttggtcggtgggtgacgggtcgg

SEQ ID NO: 432276 - DNA, 122 bp, Homo sapiens
caaagctccccaacttccacctccgcagagctatgacgtcatggcaggcacgccagaggccgaaggatgcaaaagtggttttctgctttcgatgatgcaatcattcagcgacagtggcgggc

SEQ ID NO: 432277 - DNA, 122 bp, Homo sapiens
agctgctgggtagcaatgttcctggaaagtgatcagggccattttataaggcaagaagctcgggacttcatcatgccctgtggtgataacaattcatcatcaaagatcatgcagccgtgaga

SEQ ID NO: 432278 - DNA, 122 bp, Homo sapiens
cagccttaacatcaggcaataactccaaaaccaaatcatgtctggtgcctttaatgatcccgaccagaaccagaagtctactgaagatttaggtaggatcagttttggggaattaggggagc

SEQ ID NO: 432279 - DNA, 122 bp, Homo sapiens
agttcatgaggatggagccatagtaaatgtgattgtgcccttataaaaggctccagagaacggccttgtctctttaaccatggcagggcacagcaagaagtttccatctataaactagaaaa

SEQ ID NO: 432280 - DNA, 122 bp, Homo sapiens
caccgcgcgcagcccggcaagcaacgcgcgcagccccggttcccgcccgcgcggagcccacgcccacccggaactcattctgtctggcaagcgccgcgcgcatcctcggttcccgccgcgcc

SEQ ID NO: 432281 - DNA, 122 bp, Homo sapiens
tttgtgtgtgtccgtgcgctgcgctctcgcgtgacgtgacgggactccgtgtgtcatttccgcacaaggacacaggagcccccgctgcagtggaaccacaacccctccgcccccacccccgg

SEQ ID NO: 432282 - DNA, 122 bp, Homo sapiens
tcattatggaaagatgatgatttcagcccacattcagtgtatgtttctaaataacacaatcgacaggactgtctgttcagtacaatggaggacagctttttcagggcaaatgggatttcttg

SEQ ID NO: 432283 - DNA, 122 bp, Homo sapiens
ggggagaggtgtccctacacgggtgggactggaaagaaccccgtccccttccctgccgtccggaccttccagtgtctcctggccccttccgaggaaaaccagaagaggaaaggagctggact

SEQ ID NO: 432284 - DNA, 122 bp, Homo sapiens
cccctccccgccggccgggccgccccccacccccgcccattggctacgggactcagcccgcgcccggaataggtgaggcgggcccttaattgatcccggaccccgcccccttccgggggccc

SEQ ID NO: 432285 - DNA, 122 bp, Homo sapiens
aaaacccaatctgcagtctgacgcagttgcctagcaaccgggtggccggagcattgctttcgcgcagcgcttgggaggatccgcggccgccacctgctcgcccacaaactctagtgtccttg

SEQ ID NO: 432286 - DNA, 122 bp, Homo sapiens
gtgcacatgccgaaaataggtgagtgatgggccaggcagcgttgctgtttgcatcttccccgtcgtcatggacagcggtcaaggccgtctccccttctccgtcgtcagggacagcggtcaag

SEQ ID NO: 432287 - DNA, 122 bp, Homo sapiens
aggttcttggagtgttgaacaaagaattgaacaaaacgcacaaacaaagcaacaaaagaacgaagcaacaaaagcacagatttattgaagtgaaagtagcctccacagagtaggagcaagct

SEQ ID NO: 432288 - DNA, 122 bp, Homo sapiens
cgggaggccaacgggggtggctgtcagtagcctgtgtcgtcaggggccttcaccacttgccgcgcacagctgggctcccggggaaactgccacggaaaggccaccacattaactgccgtctc

SEQ ID NO: 432289 - DNA, 122 bp, Homo sapiens
ggccaggcgctctggaatagcgatggggggacacggcctccaactttctgcagagaccatcgggcagctccgggcctaagcagcgacctcaccgaaggttcctgggaacctttgccaaaatc

SEQ ID NO: 432290 - DNA, 122 bp, Homo sapiens
tggctgtgacacgcgggccagctgttgtgagaggtggagcgcggcgggcgttttccaggacggaggctgagggcaggttgacgggcctgtggagaatgtgtgctgcttcctgcaggcgacca

SEQ ID NO: 432291 - DNA, 122 bp, Homo sapiens
gaggacccagctaagcctggccttctggcccacagaagccttgagataataggcggatgtcgttttaggacacccaatttgcggtacgtagggaactaacacgcggggctctggcgggcctg

SEQ ID NO: 432292 - DNA, 122 bp, Homo sapiens
atgtcccgaggctggccctgagccctggctgccccccacctgcggtttccctttctctcacgacagagaccgtccgcgccatgacccacgtcatcaaccaggggatggccatgtactggggc

SEQ ID NO: 432293 - DNA, 122 bp, Homo sapiens
tttcatcatcccaaactaaatctctgaaacgtatgaaacagtaagtccccattctcccctcggcacctccaagcccctggtaatcactattctaccttcggtgtctatgaatttaactattc

SEQ ID NO: 432294 - DNA, 122 bp, Homo sapiens
caaaatgaaacaaaaaggcagacagctgtgtggattttcccttcagagtaagccaagtgacggaaaggcctgcccgccccgctggggacaacagcgccagcacccgcgccgtcgggtcgggt

SEQ ID NO: 432295 - DNA, 122 bp, Homo sapiens
cttctcgggcagcactggccggaaggccacctggaccaggcacctctgaggagagaccagcgtgggcacaggggttgccacttccctccacctccccggagcccctgcgggcactctaccgt

SEQ ID NO: 432296 - DNA, 122 bp, Homo sapiens
aaacacagcagcgctccgtgacgtcacttccgcctccagcctcaaacctggaggagcgctcgggaactgcaacctcagccgagctgaacaacctcaggcagagagattctggtttactcccc

SEQ ID NO: 432297 - DNA, 122 bp, Homo sapiens
ccagagagggaatagaagtttccatcctgtgcacccagtggttgagcaagaaggatgtgacgggacccaggaaggcagcagaagccagcaccaacagagtcagcatcctggcactgcagcgc

SEQ ID NO: 432298 - DNA, 122 bp, Homo sapiens
gtttccacttagaagcacacagttactcatcctgggaagagcatggttctgagaagacagcgcacaggtggtggtagtatgttagtattttataagtggctcaaggttgtaagttctgcttt

SEQ ID NO: 432299 - DNA, 122 bp, Homo sapiens
actgcatctttcattaccaccatctgtgttgtatatagcattttaagattaataaccaggcggggttttgtttgtttctttgtttatagggaattcagaccaagataggttttctcatttct

SEQ ID NO: 432300 - DNA, 122 bp, Homo sapiens
gggctcactcggtgatggtggggcgcgtggccacgtacacaaacaccacgatcaagagcacgaccacggccagcgtgggcagcaccactgtagtgatctgctgccgggcctcctgcatggct

SEQ ID NO: 432301 - DNA, 122 bp, Homo sapiens
gcaacgggactccctcccctccccctagccagggcgccctccgcccgcgcctctccgccccgaccccagatttgctccgctgcgctccccagacacacccagtctgcgacactctcgggtta

SEQ ID NO: 432302 - DNA, 122 bp, Homo sapiens
cctcaagtgatccacctgccttggactcccaaagtgctgggatataggtgtgagccactgcgcccagcctcctgctattctttgaacataccaagcccagtcctgcgtcagggcccttggat

SEQ ID NO: 432303 - DNA, 122 bp, Homo sapiens
ccccgggctcgggggccagtcagtctcatgaggacggggtgggtctgacttgtggcatcgcggcctctccatcggtgctgctgggcctgtgagccaatgggtgggcagcaccacccaccgcc

SEQ ID NO: 432304 - DNA, 122 bp, Homo sapiens
gccttctgagccgagatgtggctacgggggtctcacatagggcccccaactcaggatgagcgcagaggccttgacggggctgggaggtgtttgcctccgagaagggacaggtgatccggagc

SEQ ID NO: 432305 - DNA, 122 bp, Homo sapiens
gcgtacgcgcgtctctcgaagccgggacccgcgcggggaggctgcactggctggaaacagcgcctgggcgctcccgcggctcccacctcagagatgtccccaggtgccccacgccccccgcg

SEQ ID NO: 432306 - DNA, 122 bp, Homo sapiens
gtctggcactgcttcttgaaaacgcagctctcatctggttcctggaaggtcatactggttcgcgcagggctcgggacggggcgcttggcttctgaggcacccgcgctggctcctcacccggt

SEQ ID NO: 432307 - DNA, 122 bp, Homo sapiens
gctcgccgcctcggtcctgaggagggcagtgacgggtacggccgctcactcccagctcggcgctaacacggttaacctccagctcttacagctgccgtcgctccgcctctgccagttcaatg

SEQ ID NO: 432308 - DNA, 122 bp, Homo sapiens
cagcctcagggctgggcaggggctatttttagcctgggcactgagctaattttaactcaccgactggggacctgggggcgggctgttggtttgtgggggcaggcagtccaggaaagctgggc

SEQ ID NO: 432309 - DNA, 122 bp, Homo sapiens
acccacagccgcggaatcccctttactgttcccggaggagctgcgaggtggaactggccgcgcggtgggggctttccccggccccgggacgagcactcagcgtcccctccccgcgacgctcc

SEQ ID NO: 432310 - DNA, 122 bp, Homo sapiens
tccttcatgatgatcaagtacatgcacgaccactacctggacaagtatgagtggttcatgcgcgccgacgacgatgtctacatcaaaggtgacctccctgcgccggctttccagcctgccag

SEQ ID NO: 432311 - DNA, 122 bp, Homo sapiens
gcccgggattggccgccgccccgccagccggtgacgcgaggcgggcgggcccctttgtgacgtcacaatcagctgtttgaacgttccaatttgtgccgtgagccccgccgcagcggccgcac

SEQ ID NO: 432312 - DNA, 122 bp, Homo sapiens
tgacctcacctgtgtgctggagtggctggagcggaggcaggggaagaagaaacaagctcccgaggtgggtaccatccaagagaaatggcaggaagactttactcaaggtagttgcagtaggg

SEQ ID NO: 432313 - DNA, 122 bp, Homo sapiens
cccttaaccccacatcttcctataccaccatcccacagcaaaacttctcagaatattgtccgcacatgttgcctatgcttcctcaattcctattcacttttttagcccacttcagtttgctt

SEQ ID NO: 432314 - DNA, 122 bp, Homo sapiens
aaccgggaaaaatgaggcacacgacagcggctccgggacgaagagacccgaggaaaagaccgccgtggaacttccagtttccgggcccgccacctagtgtgccccaaatccgcacgcccatc

SEQ ID NO: 432315 - DNA, 122 bp, Homo sapiens
gtcctatacctacaacatcaagcagacggtggaagacgagaaactgaggggcaagattagcgagcaggacaaaaacaagatcctcgacaagtgtcaggaggtgatcaactggctcgaccgaa

SEQ ID NO: 432316 - DNA, 122 bp, Homo sapiens
tgtcctccgcactgcaccccctgcggaagccattagaggttacctataggtcatttagggcgccaacgctgccagagcacaaccccctccacggcccccacacccacaaaagaaagtttagc

SEQ ID NO: 432317 - DNA, 122 bp, Homo sapiens
cgcgccgcccgggctccctcgggctctcatttaccccggccgctggcagcgggacccaggcgccttgccgcctcgctgcggccgcttggtccccacgccgccccctccgcaggcgacgaggc

SEQ ID NO: 432318 - DNA, 122 bp, Homo sapiens
acatgctgtctcacttatgctaaggctcactctcattttatcatctgtaacgtcagggtgcgccttataatcaacaggccacaaagaaagtcacaagccatactcacaagaactaggaagtt

SEQ ID NO: 432319 - DNA, 122 bp, Homo sapiens
gggcatttcttggagggctgggggaccacagtcaagttgaggtgatccccgctccggggacggagtaaggcaaggaggcgggatcggaatgttggaggcagaaccgcaagctcccagggcca

SEQ ID NO: 432320 - DNA, 122 bp, Homo sapiens
aacagctcagtgactggattgagaagcagctccaaagcactttccaaggtgaaacttgcacgaaaaaaaggtcatggtcactgtttggttgtctgtcgctggtctgatccactacagctttc

SEQ ID NO: 432321 - DNA, 122 bp, Homo sapiens
ttacaaaatgcaagaaataaagcacaatcgtcaagtgctgaaggcccacagcttccccttcgtgtccacggatctagtgctgaaagacaaaccctttgactccgccggggcagttggtccag

SEQ ID NO: 432322 - DNA, 122 bp, Homo sapiens
tgccgcgctatgtcctcctgctgggccggctgcggggcagcctccagctcggacagcttgcggttggcatccttaacggacagctccccactctgctcggcatctgtgatggtggcctccag

SEQ ID NO: 432323 - DNA, 122 bp, Homo sapiens
agaacatggcccggaggttcacagcctgggagacagacacagcaggcagcacagggcttgcgggggcgccagcaacccttacagcccaggagaccggtctctctagggggctgcaaagggag

SEQ ID NO: 432324 - DNA, 122 bp, Homo sapiens
aaacaaggcgatgatttaaatgggtttgcattagggtgaaatatggtccgaaaacaggctcgtaaaagtgccaggctcctaggagagctggttaggagaatggaataggaaagatgagacga

SEQ ID NO: 432325 - DNA, 122 bp, Homo sapiens
tgtgtgcttctcctgctactgcactgaggagaggctggtaggtggatgtggacagcaaagcggaaacctccagcaggcactatctaggcagaagctcaacaagtgtagtgattctttcttct

SEQ ID NO: 432326 - DNA, 122 bp, Homo sapiens
ggccaggaaatgctgacgaataaacagccattgtttactgagccgttgctgcatgccgggcgcatagccaggccttcacacacaacaacaatggcatttgctaggtgctgggcacattctga

SEQ ID NO: 432327 - DNA, 122 bp, Homo sapiens
ggctgctgcgggctcccacactgaagcaactggaggcccagcggcaggaggcaaatgcagcgcggccccagtgccccgtgggcctcagcactctggccttccccagcccagcccgtggccgc

SEQ ID NO: 432328 - DNA, 122 bp, Homo sapiens
gaagttcgcggccaaagaactgagtaggagtgccaaaaaatgcgataaggaggaaaaggccgaaaaggccaaaattaaaaaggccattcagaagggcaacatggaagttgcgaggatacacg

SEQ ID NO: 432329 - DNA, 122 bp, Homo sapiens
gcttttgtctccgtttttgttgcgttcaatcagatcaacaagtgttggctaagtgttgagcgtggtttcctgtgggattgtgtaaggctctgtaggacaataaacgtgttgggggcactgag

SEQ ID NO: 432330 - DNA, 122 bp, Homo sapiens
tatagcttccattcggctacggagcaagaggatttgctttcagacatccagcaggcgatccgcctgcagcagcagcagcagcagcagctccagctccagctccagcaacagcagcagcagca

SEQ ID NO: 432331 - DNA, 122 bp, Homo sapiens
aggaaggaaccctctgaaagggttccctacacacatcaaatttagaggtgtagaagagttcgacaaagagaggaactgaatccctcttgactctcaaatgccatagagggcttgaggccttt

SEQ ID NO: 432332 - DNA, 122 bp, Homo sapiens
gcccacctggtgagtcatgggccactctcttctgaggctggcggcctggcccgcccttcccgtcggtacccaggagggagcacagcctgcaatggccgccttatctcaccctcgcccatggc

SEQ ID NO: 432333 - DNA, 122 bp, Homo sapiens
cccccgaggcaggcgttgggtcttctgtggagtccccagagacctgcaaccttctgaacacgcatcctcccctttccgccgaggactctgtcctgcagccgagccagggcgaatgcacggag

SEQ ID NO: 432334 - DNA, 122 bp, Homo sapiens
gcgctgagctcagcacggaggctgttgtgcggtacctacagcaggtgaatgggcggctgccgaccgccccgagccacgcccccaggccaggctcctgaaggaaaggtgcgagccggctcata

SEQ ID NO: 432335 - DNA, 122 bp, Homo sapiens
ctcgcgtcggaacctgcagacacttgtggaggagtcggcagagcaggcacagcggtgcgacgagatgctgcttctcagagatgctgtccaacctgcactggcttgggaacgagaagacactc

SEQ ID NO: 432336 - DNA, 122 bp, Homo sapiens
tatccatccagatgaaaggctaggcagtttgttactttctcagcccaagctaagttttaccgtctcagcaagaacgactcagtctctcaaatcatagctaattctcctctgagggccttgct

SEQ ID NO: 432337 - DNA, 122 bp, Homo sapiens
gccgcaagtggttccttaacagaccgcaacgggtggcggagagatctgggtgacctgactcgggcgtccatcccccggcctgggctgcgggacacgctggtaaccaacaggccaatgcaggt

SEQ ID NO: 432338 - DNA, 122 bp, Homo sapiens
tgactcagtgaccatctacaacaaatcagcaagaagcagggctcgcagctgaccaatggccgcccgccgggggtgggctgtcccggcccttttccaggcccaactgggtttgttaaagcgac

SEQ ID NO: 432339 - DNA, 122 bp, Homo sapiens
gcgggagggaaacccgggacttgtatgggtggaggcggccctcccctggccttgcagagccgggtgcggtagaattgggtctgggggatcagactcacgctctgcgaacccccaggtctgcg

SEQ ID NO: 432340 - DNA, 122 bp, Homo sapiens
gtgtgatgtgtggttgtgtgtgacacaccgttgtgtgtagcatgtgttctggcaggcggtcgtgtgtggcttccttcgccgagcacagtgctttcacgatgcccccgtgttggcgcgtgcct

SEQ ID NO: 432341 - DNA, 122 bp, Homo sapiens
tttctctttcttttgcctattaaacctctgctcctaaacccacttatgtgtctgtgtcctcgatttccttggtgtgagatgtcgaaccttgtatatttactccagacaaggacgtcacttca

SEQ ID NO: 432342 - DNA, 122 bp, Homo sapiens
tcacctcacggggaggcggggctgtgggaaccgcagtgcagcgcagaggggcggggcctgcggcgcgagacctggtgcgggaggcccgggcagggagaagtgtgcggggccgggacaagccg

SEQ ID NO: 432343 - DNA, 122 bp, Homo sapiens
gcaacactgttggttggcaggtaacaaggtcttcccctgccccctcctggactgagcagccgcttagagctagcttgagagcacgtggggcctctcctcatacaaacctaggtgggagcagg

SEQ ID NO: 432344 - DNA, 122 bp, Homo sapiens
gagcagcaggggggctaaagggtctgggaggcagaactgaggggcctgggactcactgggcgtcctcgccctccagcaggcagcggtaggtggcgatctcctgctccagccgtgtcttcatg

SEQ ID NO: 432345 - DNA, 122 bp, Homo sapiens
aaagagtgaacttgttccagaactaaaacaaggctctaccaggaagctctgtcaaaataacgcaaactattttctccagtggcaaaacttttagcccaaagagctagaactagctaccaaga

SEQ ID NO: 432346 - DNA, 122 bp, Homo sapiens
gcatctggctctccgttccctcctctgagttgaatgaagtctagatttttaggccttcctcgacttttactgttagaaggttctgatgagggacagcctggaacattcctgctctcatctag

SEQ ID NO: 432347 - DNA, 122 bp, Homo sapiens
caggactattgttgctttaagcccccaccttgagcattcagagaagagagattactaagacgaagttgcagatgtctctttaaaaaaggagagaggattcctcgagccacgccctcttctca

SEQ ID NO: 432348 - DNA, 122 bp, Homo sapiens
agtagctgctgctgtcacagctcccgggtcccggcccgctgctgtcgggtcagaggcccccgggtcccagcccactgctctcgggtcagaggcggcaggaagagcctctcctgacacactct

SEQ ID NO: 432349 - DNA, 122 bp, Homo sapiens
acttctctcccttcaatgtccaggccaccagcatgacttctgcatgtgtgtagcagcctccgcgcaggacgtaaagatgcaaatctagtcgtaggctctctgaaaggaaaattttggggacc

SEQ ID NO: 432350 - DNA, 122 bp, Homo sapiens
tcgctgacttttctttgcaccatgtcaaccgaaagaaccaagaaataagttggagaactccggttaaaaggcaacttgagagggattctgaatacttttattgagccgtttccaacggagga

SEQ ID NO: 432351 - DNA, 122 bp, Homo sapiens
agaaatacaactctgagctccgtaagcctcaggatgccctccttggagtccacacacccccgcctgggcctctgcaggcagcctttacaaaggacttcaccactgccagatgcagaggactg

SEQ ID NO: 432352 - DNA, 122 bp, Homo sapiens
agttgtggtgggtttccgggtgtcagcagcgcccctgattttgttgccctttggtggccccgggtctcccaggtgttggccgggctcctacggaggctgcctgcggcctgccctgcccccac

SEQ ID NO: 432353 - DNA, 122 bp, Homo sapiens
ctcggagtctcaggccgcattccggggccaagcagggtcctgggcccaggacggaggtgccggcaagagcgggcctgggtggacgggcacgagaggaagtgcgagtccaaacagagcccagg

SEQ ID NO: 432354 - DNA, 122 bp, Homo sapiens
ggatggccaaacggtcctccagcatccagagtgaggagagattccacctgagcagctcctcgagctctgcctccagcacgcctcggccccgcaggcaggtcacaccctactaaggctttctc

SEQ ID NO: 432355 - DNA, 122 bp, Homo sapiens
gcggccgccggcccgcagtcccccgcaggtgccgcccaggactagctgcccggcggaggccgagcacgcttggcggcagctgagcctccaccccaagccccagccggaggggcgcgtcccct

SEQ ID NO: 432356 - DNA, 122 bp, Homo sapiens
aagaagaaccagggaacgctgttggggaacccatgcaatgaaatgtgaagggaaagagggcgggcagacgtccccaaacccgctcagcaaagacaagcttcgggcaaattcactcacgttga

SEQ ID NO: 432357 - DNA, 122 bp, Homo sapiens
gcggtggaggccgcgcagtgcgcttccaattgggactgagcaaatggaggaaaaggaaaccgcctttcagttcaaccgactcactgcatgatatattggcctttctgggtctttggtggcta

SEQ ID NO: 432358 - DNA, 122 bp, Homo sapiens
ccccttccaaaagagaattatcaggtccaaactgtcaatagtgctgaggttgagaaatcacgatctagaagtacaggctttgcttgtagcccttgatctgcaagaatcctactttacagtaa

SEQ ID NO: 432359 - DNA, 122 bp, Homo sapiens
actaacttcttttattgtaaaattaaaaatgattctttaaaaaaataacccacggccggacgcggtggctcacacctgtaatcccagcactttgcgaggccaaggtgggcgaatcacgaggt

SEQ ID NO: 432360 - DNA, 122 bp, Homo sapiens
gtcactgacattccagaggcccaagattgtgggttgatgctgctggtgtctctgtgatcacgaactcctgatcttgcctccatctgcactaacctcaaggagttcaagacagatgagaacag

SEQ ID NO: 432361 - DNA, 122 bp, Homo sapiens
gccgctgctccttctcctcctcctccgggagaaaccgttgttcccgctgctggcgctcctcggccctcagctgcctctcccgctgctcccgcaatgggggcctggccgacagcctctgacgg

SEQ ID NO: 432362 - DNA, 122 bp, Homo sapiens
acttttcctgactgtccttaggggaggaccagggatgtgtggggaggagcagttcagtgacgcccagaactgactgaacaccccaggaatgatcagggaatgaacgtattctttcttttttg

SEQ ID NO: 432363 - DNA, 122 bp, Homo sapiens
taagccgagaaaagtggcctcctggaggtccctcaggacggcagggagcatgcctctgggcggccgagcgtccctgaccccgcagaagctgtggctgggaaccgcaaagccaggtatgtggt

SEQ ID NO: 432364 - DNA, 122 bp, Homo sapiens
ggaggaagcgaattagctgacgtagtctccagccagaggctcggctagctccgtgagaagcgatccccgtgggatcttaagaacaccctcgaggccgggcgtggtggcacgcccctgtaatc

SEQ ID NO: 432365 - DNA, 122 bp, Homo sapiens
tcgtgaggcccgacggggcgggggccacctcttcaatggtcaggggcttcttcagctctgcgcaaatcgcagcgcggtagtgccggccgctgccctgtccggctctcctgcaacacaaaaca

SEQ ID NO: 432366 - DNA, 122 bp, Homo sapiens
ggagacatgattgggggtgctgtgtgcagggaaggggcctggagaagccgcaggtttggacgtggattttgaggcgcctgccttttgggactccgcgtgcttccagcccctgcagctcattg

SEQ ID NO: 432367 - DNA, 122 bp, Homo sapiens
aaggtccgcagggctggccaatggcaataggccagcatcagagaagagtgatgttggaaccgcaaaataaaatgagaaataaaagagcctgcaaagccttacaagaactgggcatggagact

SEQ ID NO: 432368 - DNA, 122 bp, Homo sapiens
tccacaatgggagcatcaccctttcaccctgatggaagtggaggcatggtctagctgcttcgctgagttggctagtgctttcaccttgatcctgttgtgagggtgttttatgtctctgtttt

SEQ ID NO: 432369 - DNA, 122 bp, Homo sapiens
gactcattttaatcttctgcctaccttttattcctcctcagaggtaggaaaccttcaaatcgttaactaataaatattggatcgctcttaatgtaaaatggaaaaagttttctgaacattaa

SEQ ID NO: 432370 - DNA, 122 bp, Homo sapiens
tggccaacacagtaaagcagccatctctttagtgtggtaaaattacaaaaattagccgggcgtggtggtggcgctcctgtaatcccagctactcaggaggctgaggctgaagaatcgcttga

SEQ ID NO: 432371 - DNA, 122 bp, Homo sapiens
gatgcgccgtggccttgccctggcagttcctcacaggtgggggtgccctgtcgaaggccacgggcccctggctgctgggagtgactccgcggctgaggtttggattcggggagagcagttgc

SEQ ID NO: 432372 - DNA, 122 bp, Homo sapiens
gatgctcaatctaaatgaaactcgacgctctggatagagccaaggaaggctcctgctattcgggggtcctcgagggagccattaaaacctcggcttcctcatttgaggaaacagcctgagcc

SEQ ID NO: 432373 - DNA, 122 bp, Homo sapiens
atttttaagcgagttggttttttcccctttgatttttgatcttcgcgacagttcctcccacgcatattatcgttgttgccgtcgttttctctccccgcgtggctccttgacctgcgagggag

SEQ ID NO: 432374 - DNA, 122 bp, Homo sapiens
cagaaaattctaagaaatccgcaaaagtattagagccggtaaacaacttcagcaagattgcggaatacaagatcaacatttaaaaatccattgtatttctataaaatagcaatgaataatct

SEQ ID NO: 432375 - DNA, 122 bp, Homo sapiens
ggggaggtgacttgatgtcatcctgagcagctgggcggcgggtgccggtgcgcacggagccgagccggggctcccgttgcgctgcaccgcgttgggtcggagtcccaggacttcagcggaga

SEQ ID NO: 432376 - DNA, 122 bp, Homo sapiens
acagttatggttagtatggtcttctctacaccaccactggtttcaataaagttcttctttcgtaacacatatgccctgctgccagtttcaaattgaccaacgtttataagcaaggaaaaacg

SEQ ID NO: 432377 - DNA, 122 bp, Homo sapiens
agcacttgggacccgctgcacatatccagagcagggaaagctgtggctttctcgggggagcgagtgtctaggggaagggtgtggcaggcccacgggatgccatgccctagaacaacggcctg

SEQ ID NO: 432378 - DNA, 122 bp, Homo sapiens
tgacgaagaaaggctggtggccgtgtctaaaggtctaacacatcacaggaaaatggctcccgtgggcctcctaacacacggagcacactcctcgcctctctggctggaccgacccacggctg

SEQ ID NO: 432379 - DNA, 122 bp, Homo sapiens
gaacccgcgggcggaggcctggggctcttggggtgggggcgcgcggcggcgcctgcagggcgaggggcgggggaggcaggacgtcccgagccatgcttggtcgtccagctcttctaagcctc

SEQ ID NO: 432380 - DNA, 122 bp, Homo sapiens
tagcagttgttattgacaattaataggggcttcaaaggcagtcatgtttggaaggggcagcggcttccctaagacccctcagctgctgctcaggtgcagctgctctgtatgccaagcacggc

SEQ ID NO: 432381 - DNA, 122 bp, Homo sapiens
ctgataacaaatagacctgggtttcctagtatcgcgtccttggtatttcactcctctcatcgtctcatcactttcatttcccctcatcacctgacattgacacaaatgtcctgatgcagtag

SEQ ID NO: 432382 - DNA, 122 bp, Homo sapiens
cctgacttcctggagcccacagttaagatgggcccagataagctctaatatggaatgccacgtagatgcaaaaacacaggagagtcgagtctagtcatgaaaggttggcaaaggtgtcctgg

SEQ ID NO: 432383 - DNA, 122 bp, Homo sapiens
aagtctctgaaacccaacctacggaggcccctccctgtcatctcctggtgcatggaacagcgactttgccatcactgaggttccgggcacagaacctgcctcagtccagcgtccctatccgc

SEQ ID NO: 432384 - DNA, 122 bp, Homo sapiens
ccctgcctcttccatccgaaaaccagttacctgagagctgttccaagttataggtggtgccggagaactttgctgcccggcgctgctcccgggacgtggggcgtgagcgctgcacccttact

SEQ ID NO: 432385 - DNA, 122 bp, Homo sapiens
aattctgcccatcgaaatgaacttcatgaatggggcaggctggctgcaccgggacggaatcgtccacccgacccgaatgaattggcaggagccgcggccacatttaaagggccagagcgcgc

SEQ ID NO: 432386 - DNA, 122 bp, Homo sapiens
gcgagagccggctgtaggcggctccttcctgtgcaaacttttctgtcctcttcctcctcccgccctccgcaccggctcctcggcgcccggcgtccacctccccgcccttctcgctgcctccg

SEQ ID NO: 432387 - DNA, 122 bp, Homo sapiens
gaactccggcgcacatcttgccccaggggggacagtatcgtcttgcagtcgttgccacaacgctacgctggtgcccggtaacgacactctccgcgccacacccagcgccagcctcttggatc

SEQ ID NO: 432388 - DNA, 122 bp, Homo sapiens
gaaagctctgcagccatggccacagccagagatgcagcacagagcctccaggtgaggacacgctgcccctaccctgacacgtgcacccagcaccggacccaccaccagagggcactcctgct

SEQ ID NO: 432389 - DNA, 122 bp, Homo sapiens
caaatcataacagtgtgattgtggttgaactgttcggggacaggagctgccggggagccacgattgaaagaagactcgcccgctgcccttcctccatgacaatgcgctggaaaatctccgcg

SEQ ID NO: 432390 - DNA, 122 bp, Homo sapiens
gcggcacctctggagcacctagccgcgctgttctcggaggtgagggtgggttagtgtccccgcgcggctaaagctgggtgggggaggggaggaggagccttaagggacggaggcggggccag

SEQ ID NO: 432391 - DNA, 122 bp, Homo sapiens
tgcaacactgggtgattctttaaattgccaggatacaccccaaacctaattaacagcattcgcttgctgcctccgtgcactggcatcctaatgaaagctggctttggtccagattcggagcc

SEQ ID NO: 432392 - DNA, 122 bp, Homo sapiens
ataatgaatggcccatccctgcaatactcagagggagcttacattgcacttttgagcagccggttagtaatgtacagtggatagagcctttctttcaaatcccagggcagtgggtccttcaa

SEQ ID NO: 432393 - DNA, 122 bp, Homo sapiens
ttacagtgcgagatgacattgatgacatcaacaccaatatgtaccaaccactatcatatccgttaagctttcaagtgtctctcaccggatttcttatgttagaaattgtgttgggacttggc

SEQ ID NO: 432394 - DNA, 122 bp, Homo sapiens
gtggactccagctatgacgcctggttgtcgcaacagctgcatctgtcagctggcagcacccgttccacgtggggctctgcacgggcgagatcagcacgacgagtaccctggacgaggcgaaa

SEQ ID NO: 432395 - DNA, 122 bp, Homo sapiens
ctgaagccacctgtccacttttccaggtgagagtcctcactggtttatctggccaccaaacgctcacggcacagacccaacacttccatgacccacacacagggctctgctctggacccatg

SEQ ID NO: 432396 - DNA, 122 bp, Homo sapiens
tcaaacagaaccgccctggccagccccagcagtcgcagcccgggggcaagcggaagacagcggccctggaaaacctgaggccgctgccggcacctgccagcatcacccttgtttccctctgc

SEQ ID NO: 432397 - DNA, 122 bp, Homo sapiens
agaaaacacatttgccttcccaggcccgtgggaggagtgctgtgaggctgagacacagcccggcttgctgacggcacaaatgccggtgcgccctcggcacagtttgtttgcttcatcgggcg

SEQ ID NO: 432398 - DNA, 122 bp, Homo sapiens
cgaccaggcgtcggcccctccgcctccgcctggccctgtgctccccggggcccagcgccccgaacacaaccccagggactcacggcatttgatgtggcccccagcggcccgcagctccagcc

SEQ ID NO: 432399 - DNA, 122 bp, Homo sapiens
tctttgatgattgggtagcggcaaacttcaaagccataaatcttccctctgactggctggcggcccagcaaagtccttatcaaattcttggaggtgatcctgaagcgctcagaccgcgcgcg

SEQ ID NO: 432400 - DNA, 122 bp, Homo sapiens
ccgcgagccggagaaggcacaggcctgtcccgggtcccggcaggtcagtgtgaaggtgggcgctgccggcggaaccacggaaggggtggaggtggctggcagtaggagtagggaggggcgga

SEQ ID NO: 432401 - DNA, 122 bp, Homo sapiens
ccggcgggcgctcctccgcggaaaagccccgcagtatccagagctctccgaacacagcggcgaagcagcctttcctaggcccacacccccagctcgggagggagactccatcctactccacc

SEQ ID NO: 432402 - DNA, 122 bp, Homo sapiens
gaaaagggggatgaggagccgaccccgcgccaacagcggcggggtggacctggactccagcggggagtttgccagcatcgagaagatgctggccaccacagacaccaacaagttcagtccgt

SEQ ID NO: 432403 - DNA, 122 bp, Homo sapiens
gtggccttgcctcttggcttcccagcaatgtggcctggggcagctggcttatcctctcctcgcctctgtttactcgcctgtgagatggctgaggatgacaaggcgaggattaaggcgcgtac

SEQ ID NO: 432404 - DNA, 122 bp, Homo sapiens
tgcagcagaaatgcagttgctgttgccttgccaggccttgcgggaatttctttaaaacatcgccccccacccattatttatgtattcgtgggagggtggttttgtaaccagttcagaagagt

SEQ ID NO: 432405 - DNA, 122 bp, Homo sapiens
gcctttgcaaagaagcagggcaggccttaagtgcagtggatttcccatctcagggaagtgcgtggagttggggggctgggggatggtcccaaccagctcagatccaccagaagcatttcttt

SEQ ID NO: 432406 - DNA, 122 bp, Homo sapiens
cggggcttaccgtgggggtggggcttacctgctagactcatgtagattggctggcgggagcggaagtgattcagagcgcccccagagcagttctgctcttcgcactgcagtacgcagtcgcg

SEQ ID NO: 432407 - DNA, 122 bp, Homo sapiens
aggcgaggcggtgaagagggagaaaaatctcccccacctaaggcaaaggcgatgcccgcccgcccccaccccgcgcccgcccgcccgctgggtcacatgacacggccaagatggccgaccgg

SEQ ID NO: 432408 - DNA, 122 bp, Homo sapiens
ggggcggcgcgggggaagctcggcgtggggtgggggctcaaggcgggcgctgaatggcggcgcggggtggggcgacgggcgtgggggccgggcccgggggcagggagccctccccaggggga

SEQ ID NO: 432409 - DNA, 122 bp, Homo sapiens
ggaagacagagtatttggttcggtggaaaggctatgacagcgaggacgacacttgggagccggaacagcacctcgtgaactgtgaggaatacatccacgacttcaacagacgccacacggag

SEQ ID NO: 432410 - DNA, 122 bp, Homo sapiens
ctgaaaaattcagacccagcacagtgtttatgttggtcaaaaatagaaaactatgtctgccgcggccgaggcaggaggacccttcaggccaagagcagcctagcaacatggcgcaaccccat

SEQ ID NO: 432411 - DNA, 122 bp, Homo sapiens
ctccgtcccgttctttgatcacaaaacatgcagtgtgaaatcacacggggtgttgtacgccggggttgctaccacctacttgagcattcagcgcttaggaccacgggaaaccaaaccaggag

SEQ ID NO: 432412 - DNA, 122 bp, Homo sapiens
gcagggtgaggagaagctgtaactgccagagcctgagaatcgccccttctcaggacatggcgtactccctgcgctcgcctgcacactgcagggtcagctgactgccgtccctccacttacaa

SEQ ID NO: 432413 - DNA, 122 bp, Homo sapiens
gccaaccagaccttggctcgatacaggaagacggtgcatgagctggatgacgctgaggaccgggctggcatggcagagactgccctaaacaagctgcgcaccagacaccgcgtggccggcaa

SEQ ID NO: 432414 - DNA, 122 bp, Homo sapiens
ctatgtacacacaacatgctcaaaagatgatctgaggcaacaattatcactctctatgatcgatgaggttacagctggttagtggtgaaatcgggttcaaaaccagtctgatacatgattat

SEQ ID NO: 432415 - DNA, 122 bp, Homo sapiens
tgcggagctggctgtgggtgtctgttggaggtgactcctaaggacccctgtggctgttcccgccttctccccctcctctcagccttggatgttcaactgggccttgcggggcagaggctgag

SEQ ID NO: 432416 - DNA, 122 bp, Homo sapiens
ctggcattcaggacctcagttactgactcgctggcctcatgctgttgtttccatcacagccgtctcccgggtcacactcggctctacccgggaagaagacggccctgcaggcggcgctcctg

SEQ ID NO: 432417 - DNA, 122 bp, Homo sapiens
agttagcttggtgtgttgtaatggcagctttgctatttttttgtactctttctctttcttcgtttcacaaagaaggttgacaagctacttacctttctatgaatgcttttctttaaaactat

SEQ ID NO: 432418 - DNA, 122 bp, Homo sapiens
ccgggatccccacggcgccgcccgccccgccctacccgcggggatccggcgctaacgggacggctcccgcctgccattggctgtgagttctgccagtcttccagagaccccgcccctcgccg

SEQ ID NO: 432419 - DNA, 122 bp, Homo sapiens
ctcctcggcctcccaaagtgctggaattacaggcatgagccactgcgcccggcccagagacgacatttctgccaggtggagcgacagacatagttacatggagaagatgatgatgatgatga

SEQ ID NO: 432420 - DNA, 122 bp, Homo sapiens
cagccaggaggatagggtccagccaagagaatgtagggtgggaggagagatcagtcacagcgaactgctctggctgatctgatttcacttgaagtcaacacgttatgtacttaggcctccgc

SEQ ID NO: 432421 - DNA, 122 bp, Homo sapiens
gcgaggcccgggcgagctcgggcgggaccggaggctgcgaaggctgccgggagcgggactcgcagctcctggatatgccagcgttcctggaagactcctgggtcctgacgaaagacaagttg

SEQ ID NO: 432422 - DNA, 122 bp, Homo sapiens
gagcaaatgcggaatgaattttgctgtcacgacagcagttgcaccaccgacctaatgagtcggtgctcatgagccgactgctcgtgagtgctggtaacatgagtgaacagtgtcctgttacg

SEQ ID NO: 432423 - DNA, 122 bp, Homo sapiens
aattggggatgcaaggggtccccgccctggtgcttaccttctttgcggcttacaccaccccggtggctagatcctggagataaacacttgcatttcccaaagttaacccagtataccaaccc

SEQ ID NO: 432424 - DNA, 122 bp, Homo sapiens
taaaaatcgctgtggcacctcacatacggacggctcagtccagccacggtttccagctcacgggccggcacagggtctgctccaccttccagtccacaggaccacacagctgcagggacgca

SEQ ID NO: 432425 - DNA, 122 bp, Homo sapiens
ctcagctaggcgcggggttcaccaggtctcactggaggctgagaaaaatacagagcttcccggaagcaggaacaacactgggaggcctgaccttgctcaaggccctttgacctgactcacca

SEQ ID NO: 432426 - DNA, 122 bp, Homo sapiens
tatatgtacgagccgcttcacaatgccacagagtgtttaaatctgcccacaattcacatccgaatatatacaggcacatgtttacacagccaaatctgccactctatattggaatgaaggct

SEQ ID NO: 432427 - DNA, 122 bp, Homo sapiens
cactctatcctcaggcttctggggcctaactccagtgaagcccttcttggatccatggctcgcatggcagggatgggagccacagtgactcccttggggtgcagttgtgaggacaagtggca

SEQ ID NO: 432428 - DNA, 122 bp, Homo sapiens
cgacattcttcctaatatccacattgggagacgatgatattacgcccaataccacaggtgcggtacacccgtcctgtgatattgttcgtaatatcccagggaagagaggatgatatgacacc

SEQ ID NO: 432429 - DNA, 122 bp, Homo sapiens
cccgtattctccctatgtgtctcgactcggagacatcgcacctgcgcagatgctgacagacgcccatagatggcagcagccctctgaagcaacagcggaggtaacgtgggcgttcgccttag

SEQ ID NO: 432430 - DNA, 122 bp, Homo sapiens
acttagtaacaggacacgctaccaacaccacccttactcaacaatacccgggaaacatcgcgcgctggccagccgcggagacacagttcccaagcaacgcataaactgaagaacttcctctc

SEQ ID NO: 432431 - DNA, 122 bp, Homo sapiens
caggcgcttcccaccagctacagtcggagatttggagcgcttgtgtctgaggctcaatcccgtcaggtgccgcgcaactcagcggcgcattctctttggacccgaggcaccaccatactttc

SEQ ID NO: 432432 - DNA, 122 bp, Homo sapiens
ggtgcgggatataatctcgtggtgcaccgtttttaaagcccgtcggaaaagtgcagtattcgggtgggagtgacccgattttccaggtgccgtctgtcacccctttctttgactcagaaagg

SEQ ID NO: 432433 - DNA, 122 bp, Homo sapiens
ggtgaccgaaggcacctggaaactcaggccactcccacccgaatactgcgtttttccgaccggcttaaaaaacggcgcaccacgagattataacccgcacctggcttggagggtcctacgcc

SEQ ID NO: 432434 - DNA, 122 bp, Homo sapiens
tcatctttacaagagaaatacactaagactggtacccagtttttactagttttacctgtacgtactagaaatccagttaagttacttaccttcttaattttttggaaaatgtcatgaattgc

SEQ ID NO: 432435 - DNA, 122 bp, Homo sapiens
ctgaacaggacttggaggtaattgacacatccctgaggaaaagtaagtttggatagagaccgaaattcctttcaacaaccactattctcggtagcacaagttggtggacagttcccaatctt

SEQ ID NO: 432436 - DNA, 122 bp, Homo sapiens
agcaacttgctgagcaggggacgttgactgaaggccaactgtgcacctggcagagacacacgaggagcttgttttctcctcctgccaggccctcgcaggtgatcgggtctcctcactttatg

SEQ ID NO: 432437 - DNA, 122 bp, Homo sapiens
gctttactggacacattgggccagggaaagtgtcacaatacttagtccatatcctcctgccgcctttcaagtttcttctctcttttacccactccttctctgagtgccaaaactccaatttt

SEQ ID NO: 432438 - DNA, 122 bp, Homo sapiens
atcactgttgtgtcagtatctaataatcctgtgatcaaggaattgcagaatcagcctgtgcgaatagttctcattgagggtgacctcacagagaattaccgccacctgggatttaataagtc

SEQ ID NO: 432439 - DNA, 122 bp, Homo sapiens
catgtgcgtatctagacccttcagcttccacgtatcaggcgatgcagccccctacagggacggtgacactgtttgctctcactccgcagcgtgccagatacaaacccccgcaagggccacag

SEQ ID NO: 432440 - DNA, 122 bp, Homo sapiens
ttgtgcgaaacggaccccagaggcctggaaaggcgcgtccccagcctccagggtttcctgcgcagccctgggcatctcggaagggggcgaccccagcatgtcccaacttcccgccagcagcg

SEQ ID NO: 432441 - DNA, 122 bp, Homo sapiens
tcagactttattagcattttttgaatttgtattagtagtacctgaatggtaaaatgctaacggatgaacacttagctattttccacagattttgcttttgggctctccttgtacaggagcaa

SEQ ID NO: 432442 - DNA, 122 bp, Homo sapiens
tctggcagcagcggccggggctggccacctctacccagcacgccgggcagggcgcatgcgcgcttattaatattcatgagagggcgtgctcaccctgggcacgcccctccccttcacgttgc

SEQ ID NO: 432443 - DNA, 122 bp, Homo sapiens
taaggtccgtgtctagacggcattctctttgtgtgcggatgtcccgtcgtcctggcatcacgtcaccttgcttcgctactttgggaaccatcagctgcctctgtgggggtcgggggagggct

SEQ ID NO: 432444 - DNA, 122 bp, Homo sapiens
tgggcagtaaggcgctgttctgggagggttctggcagagagggtgtctttgggtcttgggcggtgggcacctgagtgccagtcccaggctgaacgccatggcccctaggtgtgcagaggcag

SEQ ID NO: 432445 - DNA, 122 bp, Homo sapiens
taggagtgaggaattaggatttccaccatattctggcatttttatgaagaaaaactttaccgtaaaacattgacagaaacattgctggactcaagctctctggtttggattctaagtttttg

SEQ ID NO: 432446 - DNA, 122 bp, Homo sapiens
gccggccacgcggctgcgcttcaccaagtgcttcagtttcgccagcgtggaggccgagaacgcgtacctgtgccagcgcgcgcgcttcttcgcagagaacgagggcctagacgactacatgg

SEQ ID NO: 432447 - DNA, 122 bp, Homo sapiens
cagagagctggctggctgccagcatttcctggctaccctctgctcccctaatcagacaaccgagggagtgtcagggctggaaaggaactgtgagatcatctactccagtgtcttttgtccag

SEQ ID NO: 432448 - DNA, 122 bp, Homo sapiens
tttaatccacaatcttggccctccattttttagggtttaggtgagtgtggcgggctctgccggagcgtgtacaccaatgtgatggattccacaggagtgtgtacgcgggcgtggcgggctct

SEQ ID NO: 432449 - DNA, 122 bp, Homo sapiens
tctggaagtcggccggtttttactgaaacctcccagatactttgtggtgtctctgcccaccgcagtcgggagcagggccggtgtgtgctcctggtctggtacaaaatgaaaaacctcaaagc

SEQ ID NO: 432450 - DNA, 122 bp, Homo sapiens
gcgcgcgagtcggaggccgcggctgaccctgctccggtgccgccaggtaccgcatcagcccggacagcatcatcctgtaccggcagagcatcggcacagtgcccaccgtggacctggcctcg

SEQ ID NO: 432451 - DNA, 122 bp, Homo sapiens
gaggtcagctagagctaaaaatggcacgatgaggcagggcctgaggtcagctgtgaggaccgcctgtgattctgcagaaggcctggccagtggaggaacctacctgagtgggggcagggctg

SEQ ID NO: 432452 - DNA, 122 bp, Homo sapiens
ggatacactgaccctttgctcaggggatgtttccacaacatccttggataaccctgtccccgatctgtttggttctaactccataaatgatggggttgagcatgggaggtatcagtagatag

SEQ ID NO: 432453 - DNA, 122 bp, Homo sapiens
ttgtatgaatggattttaaaaacaggatctggcagcagccaatgggaggccccaacagctcgtgctggcgcacacagcgggaggggagggagcccaggatgtgcacgcaccctctccctcat

SEQ ID NO: 432454 - DNA, 122 bp, Homo sapiens
atggcacagggaataaggaatgcctacaacatatgaagcatcggcaataaatggtcaaatcggtattttggaaagatactctggcttcagggctgtattagtctgttcacacactgctatga

SEQ ID NO: 432455 - DNA, 122 bp, Homo sapiens
tgtcccttcccagcacgccctgcagggctgtgcgttctggtgtcgggttagactagcaggcggggcgggggggttggggcggcggggcgggggagactagggcttatatcagcccagatcca

SEQ ID NO: 432456 - DNA, 122 bp, Homo sapiens
agcagaactggatttatgtccttttacatttttccactcttgctattactcaggagtaagcgccaagcaatttgggtaacttaaaaaataaatatttgcgggagggagggtggactgatggg

SEQ ID NO: 432457 - DNA, 122 bp, Homo sapiens
gccgagcccttggccaggtggggaccggcgcggatatgcctccgctgggcctgcaggcggcgagacttacttgggtagcgatagtagaattcgttctccatgtcgctcaagttcttgtgcgt

SEQ ID NO: 432458 - DNA, 122 bp, Homo sapiens
caggaggagggcccaggtggggtggagggggggcgccccaagatttcagggtgaggaccgcggagggtcctggacccgcagtcgcctaactcctgccctgcgtctccagtgcttgaagtcgg

SEQ ID NO: 432459 - DNA, 122 bp, Homo sapiens
atggagcttttttcctgggtcccgagccacatcctgacaggccactgtggccctattgcacgcctggtgaggcggtgcatcagcttggattttctaacaggttcttttccagaacttttgct

SEQ ID NO: 432460 - DNA, 122 bp, Homo sapiens
aatcccacaaggataaactcagtcactgaggagctgtttctcagagtcattctctcttggcgagctgtctggggaagcagagggcaaaacacaaagagtcatgacaggcacaagcatggcta

SEQ ID NO: 432461 - DNA, 122 bp, Homo sapiens
tgcctaggggtttgtctgcctcctgccactattaaaagtactaaatcagtgcatctagcccgagggctgcccctagtccagccagcagaggtttttgttttgttttgtttttcttttaatta

SEQ ID NO: 432462 - DNA, 122 bp, Homo sapiens
tttgagattatccctctgttaagattgttttccttggcaatgcctgagcgtaaaggaaagcgtctcgatgctggtgagtggccggccagagcttttcacacaggaggacagagttggctctt

SEQ ID NO: 432463 - DNA, 122 bp, Homo sapiens
aggatattgtttgtgtctaattcctaaaaggcacaactatgacttggacaaatgttttgacggaactgtgtccaagcagtcggcacagtgtcaggattgaactttagacatcttttggtttt

SEQ ID NO: 432464 - DNA, 122 bp, Homo sapiens
tctcacgatcagggagaaaaccatggctggaaagagctctaaaaatcacgctccctgccacgctccacagacgaggccttggccaggggctcttgcagggaggcagccttcccaatgtacat

SEQ ID NO: 432465 - DNA, 122 bp, Homo sapiens
cagacggcttccagtaagcagcggctgcacttgaatgtcagcaagggtcttagggagacccgaagcaatccagtcacaggggagcccaaggcaggcacgcagatgtgaggtcggatcctctt

SEQ ID NO: 432466 - DNA, 122 bp, Homo sapiens
gattcatcgctccattcacgcccaggcagggaataccgacattaaggcactccgggaagacgcgcagggctcccgggaacagtatcaggcgaaagcatcacgtaccagttttcctgcatcca

SEQ ID NO: 432467 - DNA, 122 bp, Homo sapiens
tgtcaacggccttgcttcgctgagcatggaaaagcacgtgtcaggcagagcaggattactcggcacaagagaggccaggctggggtgggaagaatggagagacagtgcctgccagtgacagg

SEQ ID NO: 432468 - DNA, 122 bp, Homo sapiens
aagatggtgagaaagtgttttcattaaaatatgttttcaaaaccattttcaggccgggcacggtggctcacctgtaatcccagcactttgggaggccaaggcgggcagatcacctgaggtca

SEQ ID NO: 432469 - DNA, 122 bp, Homo sapiens
tgtgttggccgggctggtctccagctcctaaccgcgagtgatccgccagcctcggcctcccgaggtgccgggatggcagacggggtcttgctcactcagtgctcaatcttgcccaggctgga

SEQ ID NO: 432470 - DNA, 122 bp, Homo sapiens
aaccgtggatccgtccggctgagggtgcgtggatcagactgggctgagcaggcaagtcatcgtcgggtcacagcgaggcgacccaggagcgaacttccagggcagcctcccttttgttggcg

SEQ ID NO: 432471 - DNA, 122 bp, Homo sapiens
gcctcggagggagtccgcggagcgggacgcctgctgcttggacctcggcgtgagacttcgcgggacgcagacaacttgaatgcgtgtgtcagacccgcgaccactacaagacaacgtccaga

SEQ ID NO: 432472 - DNA, 122 bp, Homo sapiens
tcgggggtgggaggcgagaggaagaagaggtggggctgggggcggggccggagcctggggcggggcttcggccttgccacctggcctcttggggtttcttcattcatgctctaaacttcttc

SEQ ID NO: 432473 - DNA, 122 bp, Homo sapiens
tcgcagaggccaaggggagacctgggcagaccctgcagacaggctgaaccccgaccccagcgctccgcagagcccgggatgcgagagggagggggaccccggggcaggggagcacgggctgg

SEQ ID NO: 432474 - DNA, 122 bp, Homo sapiens
tgtttcccttagtgcgggagaagcgcacatcagtgacgtcacggacgcgccgcgacctcgcgtacggtggctggcgaggctcagtacggtgtgtggagctggagcaccgtgaggaagaagcg

SEQ ID NO: 432475 - DNA, 122 bp, Homo sapiens
taagaaggttattgatctaaagatggaaacaaatctgattttctgaaatgctattcaactcgtgccctgacaaacgtaaagtgtcagtgtaatagcagcagtgttttgaaaaaaatcacatg

SEQ ID NO: 432476 - DNA, 122 bp, Homo sapiens
caatgaagcagctgctgacccagctctagttttcgggaagtcagatgaccttttccctcccgcggctctctacctctcgccgcccctagggaggacaccatgggcccactgatggttctttt

SEQ ID NO: 432477 - DNA, 122 bp, Homo sapiens
taatcccggctctgcacacttctgtgactcagtttacctgtaacttgggataatacacatcgcctcccatggctgtggcaagcatgcatctgatttcatttaaacccctaaacccactgcct

SEQ ID NO: 432478 - DNA, 122 bp, Homo sapiens
tttatggcccggattgggtgctgcaagaggcttgggccgctctaagtgttagcagaggcccggaggaaaagaagaggcccaagctttaaaacactcccttcctccgccccctcccttttgtc

SEQ ID NO: 432479 - DNA, 122 bp, Homo sapiens
atcagggtggaagcgtcctccagtcacgtctgggggccctgggatgggggtagaggagcccggagccaccagcccagccagacatgctgtcgtctctgttgcaggagccgccctgcctggag

SEQ ID NO: 432480 - DNA, 122 bp, Homo sapiens
gatatagccgtgacctaaacacagaaatctaccctggcggagctgatcttctagttgtggcggtgaggagatagacagtaaagactaaagaaaccaataagtaggtggtgtcatttctgagg

SEQ ID NO: 432481 - DNA, 122 bp, Homo sapiens
gcattacgggtggtgagatcagacttcgcttctgtgtaaagaaaaccccattatccagcccgttgcttgccactgtgagtcgctgggaaggaccaattcagagaaaaggcaaaccgtgctct

SEQ ID NO: 432482 - DNA, 122 bp, Homo sapiens
ctctagttctgtgctgcccctcacctccatgtttgatgaagatgaacatgccctcaagatcgcctcactcttcacaaagtgccctgatgagtcatgcagaaggagggtgttctagaggcctt

SEQ ID NO: 432483 - DNA, 122 bp, Homo sapiens
gcggcttctcccctcctgctcgcgtgcagccgccgtgaccttagacctggccggcgtccacgggcataccatgcgggcaccaggcaggccgtgagctgcccttggtccagcagccgggcctc

SEQ ID NO: 432484 - DNA, 122 bp, Homo sapiens
gcggccacagcggaacggcttctctccgctgtgtgtctgcatgtgccgcttcaggtggctcgagtagtgggacacgaaggtgcagaggcggcatgagtacagtagccgtgggggcagcaggg

SEQ ID NO: 432485 - DNA, 122 bp, Homo sapiens
tagccacagtgggggctggggcttcctctgtccctttctcctgattacatgtgggagtcacgtcctcaccttcaagcagacctaaagccccgtgttcccagggctggtgctctagctaggga

SEQ ID NO: 432486 - DNA, 122 bp, Homo sapiens
gttgaggaaaacactggaggcggcggcagttgtcatagaaggtgtaggtccaggccaggacgcgggccaggagccaggagcctccaaccagcagcagaagcagccacggggatgctgccacg

SEQ ID NO: 432487 - DNA, 122 bp, Homo sapiens
gcctctctgggaatctcaaacctgtgactcagtgggagaggggatggggctggaaccaggcgggtgggagataggaactggggaaggaccaccaacagcatgcaagagacgccccggccacg

SEQ ID NO: 432488 - DNA, 122 bp, Homo sapiens
agcccacagaccagctgtagcaaattgaggtattagtgaaacgtgaccgctggctgcctgcggtgtgccaagctaacccaaaactcaaaatcccccgccactggaccacccagaagggggcg

SEQ ID NO: 432489 - DNA, 122 bp, Homo sapiens
gacctcgggcaagtctccgcccttctcttggcctcagtttctccttccgtaggatgggggcggtgggctaggtggtgttgggatttagctgggttatgtgggacagggcctcctgatgggaa

SEQ ID NO: 432490 - DNA, 122 bp, Homo sapiens
caacagggtgatctagtgcatgttaactatgcacgaactgaagacttctttaaattggaacgggacatgaaaatcaattgctctgggaaaattgtaattgccagatataggaaagttttcag

SEQ ID NO: 432491 - DNA, 122 bp, Homo sapiens
gggtcctgagatgactcttggctggggctgcctagtgctacctgctggccagggtggtggcgcccagccacatctgcatctgcactttctcctccacagggaagcagtgccagcatgtggat

SEQ ID NO: 432492 - DNA, 122 bp, Homo sapiens
ggtcgggtcactctcgatcccagtccccagtgaaaaccgtaggtcgccatcacctaactacgcgtgcaataaagtcttctgcctgctgcttacagcccgagagcccttttccgagagaacaa

SEQ ID NO: 432493 - DNA, 122 bp, Homo sapiens
acagccacgcggtgagtcccaaatgcacctccatgagccaaagatgccatatttgtatgacgttctggaaaaggcaaaatcaccagacagaaagcatgctggggtggccagggaggggagtc

SEQ ID NO: 432494 - DNA, 122 bp, Homo sapiens
tttcattttcctatttgcattctggaaaacaactagaataaacttagcaagtactaccaacggatttataggtatattttttttttttttgaaaaccactctagagtagattttcaggtata

SEQ ID NO: 432495 - DNA, 122 bp, Homo sapiens
tccaagagcaccaggagattccaatgtggaatgtgcagcaaagtttggaagctgctggcacggtgtgcaaaggcaaatgttaggagctctactgattacagaattcatgctcataaatatgt

SEQ ID NO: 432496 - DNA, 122 bp, Homo sapiens
ccccgtgtcccatgttcccggggccctcaccacctgtgctccggctcagacccaggagcacggcaggtggaggaacatcagcaggggagactgatattccagactcttccactcgctgttca

SEQ ID NO: 432497 - DNA, 122 bp, Homo sapiens
ggagagaatgagaagaggaacaggtatgcgctggggaagatggggcagctgggacacacacggtgagttggtggatttcatttattggtttttgacaatttctttctggttctttttttaac

SEQ ID NO: 432498 - DNA, 122 bp, Homo sapiens
actccgggagctggggcggtcgctggtacccacggggagcaggggagccttcctaggggccgcggcaccgtgccgcaggtcgaggttgacccggccgggctggtgggagccctcggcggctt

SEQ ID NO: 432499 - DNA, 122 bp, Homo sapiens
tcctgcccttagtcaccctcatcattccagagccccagtggaaacttctttcagattctgcggggactgagagaaggaggttagggggcagagctgatccaaaacaggtgtaggaagaggct

SEQ ID NO: 432500 - DNA, 122 bp, Homo sapiens
ccccccgcccccgtcccccgccccgccgtccctggcccctgcagtccctggcccgcgctgcggacctccggctctggcttcccccgggtccccgcggcccccgtccccccgcgtccccgcgt

SEQ ID NO: 432501 - DNA, 122 bp, Homo sapiens
ggagtttgttggggtcaagaaatgtaactttaaatgctcctattgcaagattgggtttgtcgatacacaggcaattctttgggtgttccagtcctatggggtgagaaagaatgaatatatat

SEQ ID NO: 432502 - DNA, 122 bp, Homo sapiens
tttgtgctcaggcgccatgccaggcgcttgcagataatttttattcgttaattctcacatcgccctatgacaccgctatgataattcttaattaacagataaggaaactgaggtgtggagag

SEQ ID NO: 432503 - DNA, 122 bp, Homo sapiens
gttcagagccgtgccaatggcgtcaagtacccggagctggtactggagcactccctagatcgcgaggaagaggccattcaccacctggtcctcaccgcctccgacgggggtgaccctctccg

SEQ ID NO: 432504 - DNA, 122 bp, Homo sapiens
atgtaattattaataggcctcctttcacagccaagtgttttggatgagaaatcatgtggtcgccctatttacaaagaatatttgtaatcaaacttatcataagctttccaaaacaatgaaaa

SEQ ID NO: 432505 - DNA, 122 bp, Homo sapiens
tttttgagttgttaggtggacgcccgctctttcttgcattctttgtttctctcccacccccgaatgggatgtggcagtgaaaagccagcggagactccttttaggattctttatcattgagg

SEQ ID NO: 432506 - DNA, 122 bp, Homo sapiens
aacaaaacaaaacaaaagttctgcctttcaaagacaaggatggttgtgaggatggcaatgcgacatgaagaaagcaagtgagctttgccagacacgttaagacaccacgaaggggggagaag

SEQ ID NO: 432507 - DNA, 122 bp, Homo sapiens
aacaccaaaagttgacacaggtccctcactgacggcagaaatatgactcaatgatatttacgcaagtcctgacttgtcaaagcatgcttaatgttaaaataagaacgtgaactaacattatt

SEQ ID NO: 432508 - DNA, 122 bp, Homo sapiens
ctaaactacaacttcaaaacttaaattgttcctatggatgcaaatgcttaagaaattggtcgtaaaataatctctctttaaaatataaaccttagcattttataatgacaacaaaccatgtt

SEQ ID NO: 432509 - DNA, 122 bp, Homo sapiens
gaggagaaagtgtagcaatgtcaattcgtgttgaacaatttccaccaacttacttataggcggaccttgccaagtatatctgtgaaaatcaagattcgatctccagtaaactgaaggaatgc

SEQ ID NO: 432510 - DNA, 122 bp, Homo sapiens
cctgaagacaatcccctcttctctaagaatgcagctaggagcacagatggtgggggccttcggtacctcctccttctgccacattgcagagggttgattgctttaatttgcagagagctttg

SEQ ID NO: 432511 - DNA, 122 bp, Homo sapiens
gactgtgaccagctctgagcagagagatggattccatgacctcaactggtcccttttgttcggagactcgtgactggacttcattcatccactcattcattcattcactcagcagacactta

SEQ ID NO: 432512 - DNA, 122 bp, Homo sapiens
acctctaaacgaaccccagaatggcggccgcccgctcgggtggagtcttttatacccggacgccgcccaacgcgcccaaacgtgctagtgaaacgcccttgtcgcgagacattatacgcgag

SEQ ID NO: 432513 - DNA, 122 bp, Homo sapiens
tttctcgggcaaaggcctctatagacctggggtagtggggggcgcggccctaggtgcgcgcgcagcccccgcggcttcaagagccagcctcgggagggggttggggagtgtggggcggtggg

SEQ ID NO: 432514 - DNA, 122 bp, Homo sapiens
gggaaggggcggtgcgggaggcggggtgtggggcggtagtgtgggccctgttcctgcccgcgcggtgttccgcattctgcaagcctccggagcgcacgtcggcagtcggctccctcgttgac

SEQ ID NO: 432515 - DNA, 122 bp, Homo sapiens
ttcaaggggcacagagggacagagggacagaaggctgaagactggctggctggggtgcagcgatgctacagaacgccccatgggacttggcatgaataggaagcgtggccaggtcagtgggc

SEQ ID NO: 432516 - DNA, 122 bp, Homo sapiens
tggataaagattgcagtaattagaaaggcataaaagggcaaagtcagttgtcaagaactacgaggaaagcaacttcagttaaggcacaaaatgtgaatgatttttgtggttggtgtggccca

SEQ ID NO: 432517 - DNA, 122 bp, Homo sapiens
actcaagccagctggtttgtggcagccacagggcgctagtttaaatgtcctgaagggggccgggcgcagtggctcacgcctgtaatcccagcactttaggaggccgaggcgggtggatcacc

SEQ ID NO: 432518 - DNA, 122 bp, Homo sapiens
gggcttatgggaagtacagagcctgtctacctatgtcccattggccagaactcagacacacggccacacctacctgcaagggtgactgggaaatgtagtccagccatgtgccagacaacaca

SEQ ID NO: 432519 - DNA, 122 bp, Homo sapiens
ggaccagcccctcctctcctgcagcctgaggcagcggaaggggccaaggaagctgggcagcgcggccgagaacccggggccctcacctacccgagctacctccgagcttggcgcgagccgga

SEQ ID NO: 432520 - DNA, 122 bp, Homo sapiens
gaagtttcctgcccgtgtgcactaaagtgctccgtgtgcctgcgccccgggacccacctgcggaggcctggagaggcccagccagcccagtctcctctgcacctgaggaaaggaagcggctg

SEQ ID NO: 432521 - DNA, 122 bp, Homo sapiens
caacccgggaatctccgcaccaccccccaagaggaagcagcgtctgacgtcttccggaaacgagctccactggccttatgggaaatgtggtctccgacggatggcctacacccgggaggagt

SEQ ID NO: 432522 - DNA, 122 bp, Homo sapiens
tgggagggctggaccagtcctgaaagcccccggtggtggtgccatgtctgcccaccagcccgcctgtcgcttggcaccagtggagtcttcgcttgcaaagcgggattagacatcaaagccct

SEQ ID NO: 432523 - DNA, 122 bp, Homo sapiens
agtatatctctcaccatatttccccaccaccaatattcagactcatcaagagtgcaaaaacgaaataatctgcagtcttaaagtctctgcttctcctttgttctacactgttttaaaaagtc

SEQ ID NO: 432524 - DNA, 122 bp, Homo sapiens
gtcaaggtcaccttccctctccagtagcagcaggactgagtgattccatctatttggagtcgcggaagcggtgaattggaggggaggagctgacccaggtcaacagccccgaagccccctcc

SEQ ID NO: 432525 - DNA, 122 bp, Homo sapiens
agcagagcgagtgtgctgggcattggttagatgggctccgtttctggagagccctggcaccggtgatcgccgctagcttttttttcagccgagcaccctgtccttgaggccgagcccatccg

SEQ ID NO: 432526 - DNA, 122 bp, Homo sapiens
ccactcaccagctgtgtgatcttggacatatataaactctctggaattcagtcccctccccgcccaaaagcgagcaaatgatctctaagctccttaccaccccaattttgcattcgagatac

SEQ ID NO: 432527 - DNA, 122 bp, Homo sapiens
gagagcttagaatgccgtggatatcatggaaatggcactgacagggagagcttagaacgccgtgcatatcatggaaatggcaccgatggggagagtttagaacaccatggatatcatggaaa

SEQ ID NO: 432528 - DNA, 122 bp, Homo sapiens
aggaaagttgtgcggagagttggtacctgcgctgagctccaggctggcgctgtcgctacccgtgccgccggtgccggcggccgccgccgcgcctgggccatacctgacgacagcggcgaacg

SEQ ID NO: 432529 - DNA, 122 bp, Homo sapiens
ccacttgctgtcctggactcgcgccgtgatgggcagtctgaggaaacattatccttgagccgggggagcccatcccttttctttctttaaggggtgtggtggtggggagaataaggattcaa

SEQ ID NO: 432530 - DNA, 122 bp, Homo sapiens
gggaagggcagccagatcttgtcgcccatccctgctggggcgatcccgggctgaaagaggcgtcaggtactgttgtctccgctccgcgtttcctctctggactcctcgtggttgacagggaa

SEQ ID NO: 432531 - DNA, 122 bp, Homo sapiens
atgtccagctcgatggccagggccctggtgctcctccagagcatggccagccgggacgcccggtgcccagaatggaaaccgcaccaaaagccacgcacgctcagcaagtcggtccagaccat

SEQ ID NO: 432532 - DNA, 122 bp, Homo sapiens
aattaggagtccgtttatttagccggcggccaagagacggctaacgctcaaagttctccccgcccccgaagaaggggctagattttcttttatactttggtttagaaaggggagggggggtc

SEQ ID NO: 432533 - DNA, 122 bp, Homo sapiens
tacactgacgacgagaagcagcgccggccacagctctctcccctggcgcagccccactcccgcctctgcagcccgccattcattcagggcccggtcacccagagtcacagctcacaggtcac

SEQ ID NO: 432534 - DNA, 122 bp, Homo sapiens
tttagatgcgtccaagactcactaccatacgtgcattctttaaattctttaaagagagggcgtgacattagcatgaataaaatgcagtggctgtcacggcaagaatgaagaaatgtgtgtgt

SEQ ID NO: 432535 - DNA, 122 bp, Homo sapiens
cctggccctgcgtcaggcacattgtaggtgttgaaaatgcacctgaggaattctgagttgcgcggaactgtgtattccgagcacaacgcgtcgttaaaaaccaaacaaagcagaacaaactt

SEQ ID NO: 432536 - DNA, 122 bp, Homo sapiens
cttccacgcctgacctctcccagccccaaattctactgcccaagataattggagctgggccggagcccaatgctgcttcagccccaaaaccaaaaccacactggcttgagtaagagaggcct

SEQ ID NO: 432537 - DNA, 122 bp, Homo sapiens
tgcatccgtcatcacaatccggccactgttgaatttcactacctgctgaaatgcgggccgcgcacgcctccaaagaggtgtccctgagactctacgcagccaggctctcgtggtctggggct

SEQ ID NO: 432538 - DNA, 122 bp, Homo sapiens
atgtcatagttgctcatgctacctagtggattttcactgattgaaacctaagaagggacacgtaatgcatgtgttgagataaggcctttgagtaaagtacaaggttttatgatggatttatt

SEQ ID NO: 432539 - DNA, 122 bp, Homo sapiens
ctggttgctgtgccagatgtgccggagaggagtcttgggtccctgcaatgtggatttccccgggcttgttccttggctgcaggcttgcctagtgaccctgtttttctgaacacttcaaataa

SEQ ID NO: 432540 - DNA, 122 bp, Homo sapiens
gagattgggggagctggggctgagcctgggggcgccgctgcctctgttcctttaagtagccgctgtttagcattcctgccgccgccgctgccgctgccgctgcctgcctctgcgcgctgatt

SEQ ID NO: 432541 - DNA, 122 bp, Homo sapiens
ggattggcggctgggagctctcgggctggggcgttgtatttattaatttatattccgcggcgccccgcgcgggcggctcctttgtgtccagccgccgccaccggagctcccggggcctccgc

SEQ ID NO: 432542 - DNA, 122 bp, Homo sapiens
ccaggtccgtgggagagtcgtgccaggcgcttgccgtgtttggtgacaaccaagaaagagcggctgtgacaaagtcaatacttctccaccctcgggtccccgcccatccctttctggaatca

SEQ ID NO: 432543 - DNA, 122 bp, Homo sapiens
gccgcgagcaaacgctccgacgtctgtggtgacgtctcgtattgatttagggacacggggcggctgtggctgtggcccacggctcgtggggagcccgagtctgtgcgcagggaacgccgctg

SEQ ID NO: 432544 - DNA, 122 bp, Homo sapiens
caggccatccacaccatcgagttctgcctgggctgcgtctccaacaccgcctcctacctgcgcctgtgggccctgagcctggcccacgcccgtgagtgacctggccaccgacggctggcccc

SEQ ID NO: 432545 - DNA, 122 bp, Homo sapiens
aaaggcagggattctatagtgaatcctgcaagcctgcttggggccgacttcctggagcagcggctgcaagcagcgcagagcccagctgtccttggcaaacaccccacagaggaggcgagggc

SEQ ID NO: 432546 - DNA, 122 bp, Homo sapiens
aaacggagacaggtccgttcctgaacgttgattggctccgcgtctttgcagcttggcgctcggcattatgggtaatgtagttctcagaagcccagggttccggtgccctccctgagattcac

SEQ ID NO: 432547 - DNA, 122 bp, Homo sapiens
tgttgtgacatacaaactgcaggcaagaaaaacctgtcagattgccagcatctacttccacgttaactgaagatgcttcaagtcttacatccagacaactcacccaactgccctccagactc

SEQ ID NO: 432548 - DNA, 122 bp, Homo sapiens
ctccgtacacagcgttttcctgataccttgaatgtcattggaacttcacagaggagccaacggaagagcgtgggagaggggatgcaccgtgtctgggtctcagcaggctcatgtgttggccc

SEQ ID NO: 432549 - DNA, 122 bp, Homo sapiens
cctccagaacagggggccccagggtgtggctgccctgccggcacctggctccgggtaagtcgagtcaccacacgtcactgtatggcgtcaccggcgcacgtcactacggatgagaaggtcct

SEQ ID NO: 432550 - DNA, 122 bp, Homo sapiens
aaagccacctgggttgacaccttcctacttatccactagatgtcatcagaggtgctgttccgtggttctgcattaacccctgcctcatgtctgtaacatgtgacagtaattccagctcggtc

SEQ ID NO: 432551 - DNA, 122 bp, Homo sapiens
ttcggagcccacctgtgagcaatgccaaatgatgtctttgcaataaacgggaggcctcagcggcgagctgagggctgagttagtggaggaggtgaaatcaggaaggcttcttgtaggaggca

SEQ ID NO: 432552 - DNA, 122 bp, Homo sapiens
catcttcagaaagtatacaacacctctggaattctcagaaaacaagatacattagctgggcgcggtagctcacgcctgtaataatcccagcactttggaaggccaaggtgggcggatcacct

SEQ ID NO: 432553 - DNA, 122 bp, Homo sapiens
aatgtttagctcaataagcagttacaaagctgagttaagaaggacaagttcttagtctggcgcccagagaaaatcaagtgacacaaatgagaagctggcaggtgggatgagaaattattctg

SEQ ID NO: 432554 - DNA, 122 bp, Homo sapiens
gacgtgtaagtggctactcctctggcagcatcccacggcgggggccctcgcgtggacacccgcccctgccagctcagggctcggatgccactggttccaccctgcatggcggctttcaaccc

SEQ ID NO: 432555 - DNA, 122 bp, Homo sapiens
tgagccaccgcgcctggccaatgactagagtaggttactatttatttagcacctactatacgttccaggcactgtgcttggcactggggatggaaagacaaataagatctatgccccatagg

SEQ ID NO: 432556 - DNA, 122 bp, Homo sapiens
cagcacgactcacagcaccatggaggtttcctccacctgcgggacacagcaggatggagacggttgggcggcctcccttcctgggacactccatggccagcccctcagggactacttgaaga

SEQ ID NO: 432557 - DNA, 122 bp, Homo sapiens
cctctattgctcggcactccaaccctgtctatgtttaagcagagatgtccagagagcagccgctctcaacatctaccgtatcccaccgtctagcaggaagcccgctctctgtccaactccgc

SEQ ID NO: 432558 - DNA, 122 bp, Homo sapiens
gaaccccacattttcatttcaaatggggccccacccatcgcgtcatgggcccctctagggcgagacgccaggcctccccgccagcgggctggaagcatcaggcctgcctgctcggagggaga

SEQ ID NO: 432559 - DNA, 122 bp, Homo sapiens
aaaataactctctgctgcctactcctaaacgcagccggcaaaaatgagacgtcaactaagcgccgtttcagtcccagagccaggtcgtccatgggggttttcaagcgttttctcgatgactg

SEQ ID NO: 432560 - DNA, 122 bp, Homo sapiens
cggccgcgttttcctggggaagcggcgggcggggtggagcagccagctgggtccggggagcgccgccgccgcctcgatggggtgagtgcgcggcacggagttgggaggctcccggcgcgggg

SEQ ID NO: 432561 - DNA, 122 bp, Homo sapiens
tctgtgcccggactcggggggtgttctgacaattgaacctgtgaggtgcagcacactgcccgctgggagcagagaggaagccaggcaagggtcagggagggagggactttgaaaggggacat

SEQ ID NO: 432562 - DNA, 122 bp, Homo sapiens
ataataaaagattgggatggggactgccagagattcatgctctatgcagatgacacacctcgttttaactgttttttgtaccctatgtagataaggtaccccctccccactagctcatttat

SEQ ID NO: 432563 - DNA, 122 bp, Homo sapiens
caaggaccgaagtcccgctgcgggcagttgctggcttaggcttggcaccagcccagcccacggcgctgggacactcctgctgccgcctcccagagcagctgtttcagactctcctccacagc

SEQ ID NO: 432564 - DNA, 122 bp, Homo sapiens
ggtggagtggggatggcggcgctggatttctgagcagttcttagacttcttaggagcccacgcagccgctctttggtggatgtctgaagctgtaaattcactgtcccagtggctgggaacct

SEQ ID NO: 432565 - DNA, 122 bp, Homo sapiens
gtgccctattagatgctacctttccttgcgaccccgatgactgccagcagggctcgctgccgtcaatgagacgggatgcctggttcacggaggacgacacattcaggctcttcaccatgcgg

SEQ ID NO: 432566 - DNA, 122 bp, Homo sapiens
cacctctgggtttatggctgattttctctcagcttggaaaggctattcctcctccaggcccgcgtgtttgcaagacttattccttcatcccgtgtgtatgcgctcaaaggtcttctttgaga

SEQ ID NO: 432567 - DNA, 122 bp, Homo sapiens
tggaggactgtgctctgatgccaggaagcgattccgtcatgcttatctggaaggttccgtcgtgcttatctggaaggttccgtcgtgcttatctggaaggttccgtcgtgcttatctagaag

SEQ ID NO: 432568 - DNA, 122 bp, Homo sapiens
accgtgtccacaggcgcccactggtgtggcgtcctgagagtgcgtgcgtgagcgagcgagcggcttatcctagactgaagacccagggaaacagatctgtgtggaggatgtttctgttttca

SEQ ID NO: 432569 - DNA, 122 bp, Homo sapiens
cactgggaggcctgttgtgagtggtggtactggagctcagggtgcccccagttcctcttccggcccaggtggtcttcaccaggcctacagcagggggttgagggcaagcacccccttcctga

SEQ ID NO: 432570 - DNA, 122 bp, Homo sapiens
gcgagctggggactaggctgtggaacacgatgatgacgagccaatcagggtagaactgcacgtgctccgggttcatactggagctgggagcgaaacgggagccgggcgagctgggagaacgt

SEQ ID NO: 432571 - DNA, 122 bp, Homo sapiens
acaagtggggcctgctgctgaccgtgtgcggtgtggtgctgatggactttagcgccgactcggcggacaaccccagccacgcctacatgatggacgtgtgcagccccgcagaccaggaccga

SEQ ID NO: 432572 - DNA, 122 bp, Homo sapiens
accactgaggccgtcctgctggggcgagggcttcagcgtgtgaattctggggcaggggcacggtgacgtgcttgagggaaagagcaggcgcccttccccccaccgaccccgaccccgcctgg

SEQ ID NO: 432573 - DNA, 122 bp, Homo sapiens
cggagcatttaaagcaaacccccttacccaaaatgggggcagggtggttagggaagatgtcgtggtggaggtgtcatctgtactaggtggaaacctgtgtaggattcagccagtttcaaagg

SEQ ID NO: 432574 - DNA, 122 bp, Homo sapiens
gggggctgtgctgtctaggcacagtttgcctaagaagagcagaatgctgacctgaaactgcgcttttgggaggtatggagcctcacggattggtggatttttgagatgtgggtagatgacac

SEQ ID NO: 432575 - DNA, 122 bp, Homo sapiens
cagtctcctggaggggtctcaaggactatgccgagtgaacactgccagactcaaagggctcgactgtacgactccacataggtgacattctggggtggagacactgtgtctggacacaaatg

SEQ ID NO: 432576 - DNA, 122 bp, Homo sapiens
gcccgcgcgaggtgggtgtcgccacactttagggtctcgaggagcgggctggggccagaccggtgggcgtggtcagaaggcttcaaacgggcgaggccagtcttgctgggggcgtgtgaggg

SEQ ID NO: 432577 - DNA, 122 bp, Homo sapiens
tttttttttttttttaagagtggaaaggatgttttactctgctgactgtaatggctctcacgcagttcctaatgggcactgtggaaccactcagcatagacaggcataggcaggaaggtagc

SEQ ID NO: 432578 - DNA, 122 bp, Homo sapiens
gaagttcctcatccaaaacacagtagaggccaccgctgtcagggacatttctgaagcaagcgtcttcaccgcctatatacttccgaagttgtatgtaaagctacattattgtgtgagttgtg

SEQ ID NO: 432579 - DNA, 122 bp, Homo sapiens
aattccgtggggcagccggcacaatgccagcccagagcacagaacacggcatggggctggcgtgcaggaaaaccaggcacccctgccggcccctctgggctttctgcatcttttaagcagct

SEQ ID NO: 432580 - DNA, 122 bp, Homo sapiens
tcaactcttcgaacgtcttctaagcaacatatatgcctgtcactagaaggcatacacagtcgcataggtatagctaaggagaacatcggctcgttcatgaaaagctgtagctgacctccggg

SEQ ID NO: 432581 - DNA, 122 bp, Homo sapiens
ttcccagagccacggccccctccccagcaccaagaacctttctgaggaaatcaaagtgaacgcaactgttaccaagtcactactaaaatatttaccagcctggcgaagtgccgaaggtgctt

SEQ ID NO: 432582 - DNA, 122 bp, Homo sapiens
gagacgcatttccagttctcaactacgagccacgagtttgcagatggggctgctcggcggcgcctgtggctgagggagagcagcggcggcggggagcgaccgggagcggcggcagcggcggc

SEQ ID NO: 432583 - DNA, 122 bp, Homo sapiens
tttattgggtcattaacaacggctcggactgccgctgcgccccccctttcatgtctgccgcgcctcccgccattatctgcctccgccgcgcggcgtaattcgatgccaatcaggttggggcg

SEQ ID NO: 432584 - DNA, 122 bp, Homo sapiens
attacaggcgtgagccaccacacctggccagcctggcacaatttactgagcacccacccccgtgcagagcaatgcgagaggtggatccctgaaataatctaggaaatttcaaaagattccat

SEQ ID NO: 432585 - DNA, 122 bp, Homo sapiens
ttaggcaggggactgggtggccgggggcctgtcaggacggggcaggagtatgttagactgcggactagattgctggtggcatgttaggccagggactaggtggcccgggggtgtgtcgggcc

SEQ ID NO: 432586 - DNA, 122 bp, Homo sapiens
ggtgtggcgggcggcgtggttaggcacatgtacttttccctgtttctactttctattctccgtgtttttatcacacctgctccccagattcccaccccctcaatgttcctctcacacgaaac

SEQ ID NO: 432587 - DNA, 122 bp, Homo sapiens
gctctggatggcattgggacagtggttagcactacaggtttgggctgcagtggcggcttccgggtgggcagggctttgcctgaaggaaggtgagagaaaagaacaagaaatgtcaggaccaa

SEQ ID NO: 432588 - DNA, 122 bp, Homo sapiens
caaataattatacagctaccaagtatcaaacaccttctccatgccaggcactaggctgcacgctggttatttaatctgtgtgccaggactatgaggttggtagtattgcctccattttataa

SEQ ID NO: 432589 - DNA, 122 bp, Homo sapiens
cctctcaaatgtcctgccctgctatcaaactcctgttcatcctttcagccccagattagtcgttccccctaactcctctcaggcagtgaagtatccacacagcatttatgtacccacttctg

SEQ ID NO: 432590 - DNA, 122 bp, Homo sapiens
agcccgggagcccggggccggccctggtgcggggtgcggggccgggagggcaggtgcgcgcgcagcgagcccctcccccgcgcccccaaagctcgggggcaccccgaccctccccacgcgcc

SEQ ID NO: 432591 - DNA, 122 bp, Homo sapiens
aaagaaaaaggtcctgagaggggctgaagttcttacaggaagttagtgggggaggtaggacgacaaccctatttcctgagtgtctggcccaaccttgtcaaccacacgcaaatacggcagca

SEQ ID NO: 432592 - DNA, 122 bp, Homo sapiens
cagagcgttgctaaattaacaggccggcccgggcttcactgcccggagagtgaagctcgccgccttccaatttagccgccgccccttctaagttcttgggaagggatggcgctccggccact

SEQ ID NO: 432593 - DNA, 122 bp, Homo sapiens
agccgagtcccaggtcacccggtggttggtgggcagcaccttgcaatggatgagccactgcgcgcactgcttccacggctccatgcccgacggctccgggacgcggctgggccggggcgggc

SEQ ID NO: 432594 - DNA, 122 bp, Homo sapiens
tcttatcagatgttcaccttctgttacgtaaaaccaatgtaggatttttattctcagtcacgttgcagagcagggagccccagctggcagtgctccacctgggtcccactcggccatgctgg

SEQ ID NO: 432595 - DNA, 122 bp, Homo sapiens
gtttgagaactccaagtacagagattcagagtcaaacgttgctcacatctgtcggagtagcgtttgggtcctcaagagttctaaagccagaaatctagaagctgaggatcacacatgttatg

SEQ ID NO: 432596 - DNA, 122 bp, Homo sapiens
gaagaccatgtgaagacagaggcagagattggagtgatgcagccacaagccaaggaacaccgaggtttgccaggagccaccagaagctaggaggaggaaaggaagcctccggaggaaacacg

SEQ ID NO: 432597 - DNA, 122 bp, Homo sapiens
gactgcagcaggggtctaatggtctgggctcttggggcctggccatcaccttcctgcagccgcccagctctgtgctgtaacagtggagccatggtcagtgtaggaacagccagctcctggag

SEQ ID NO: 432598 - DNA, 122 bp, Homo sapiens
atcagccaggctcgggatgctgcttgagcaaaggcacagagccgtgcccatcagtggttgcgagtagtcaagagggaggcctgctagggctctttttgccactggccaaggagctttggctc

SEQ ID NO: 432599 - DNA, 122 bp, Homo sapiens
ttccagcctctgcgccctgggctaagtaaggcagccaaaagttgtggacacttagggtgccgcgcggggggtgtgtgtcggtgtctgtctgtccatccccgcccttccaccccctccctcgc

SEQ ID NO: 432600 - DNA, 122 bp, Homo sapiens
agcatcctgatctttggaggtagccctgatccagcccaggagtcccgcctgatgatgtcccgacccacatctcagctgagggtttggaaatggtcccaggagccacagtgtatggagtgggt

SEQ ID NO: 432601 - DNA, 122 bp, Homo sapiens
ccatccgtttcagcacagagtatagaagagatgcttagaacaacagaaggaagagacatgcggggaagataattagtggtaaacagagaataaattctctctcagtagtgtgtacttgacgt

SEQ ID NO: 432602 - DNA, 122 bp, Homo sapiens
atccgcctgcctcggcctcccaaagtgctgagattaaaggcgtgagccactgcgtccagccgatagacacgtttaagtcttgactatatttttacactggggtcttgttctgggtgcctaga

SEQ ID NO: 432603 - DNA, 122 bp, Homo sapiens
ctgcctctgttcctttaagtagccgctgtttagcattcctgccgccgccgctgccgctgccgctgcctgcctctgcgcgctgattggctggaatcaactgagaagggagccagggagagatg

SEQ ID NO: 432604 - DNA, 122 bp, Homo sapiens
cccggcctggccctgcacctgggcacaattcctagggtcccataatcctgctcggagtcccgtcgccagcctccctggcctctctttggatgccccctctctgcactgcatctgcagtctca

SEQ ID NO: 432605 - DNA, 122 bp, Homo sapiens
aggggagaggccaggtgcgacccgggcaggtgaggagcacgggcccggagggaggacttacgagaatggaaaggaaagcagcccgtcttcagtgggacagtgggagcattaagatgtcagag

SEQ ID NO: 432606 - DNA, 122 bp, Homo sapiens
acattcatgtctagggacgcagggtgcagaagcgagactcgagagtccaccggccaggggcgtctgtccacgggtctgcacgggagcgcaccgccgctcggcccgggggcgtccgtggcgct

SEQ ID NO: 432607 - DNA, 122 bp, Homo sapiens
gaaatgtcagatatcctccgggagctgctctgtgtctctgagaaggctgctaacattgcccgggcgtgcagacagcaggaagccctcttccagctgctgatcgaagaaaagaaagagggaga

SEQ ID NO: 432608 - DNA, 122 bp, Homo sapiens
ggaggcagagcttcccggtatcgccgagcgggccctgagggctgaggctgggcacccctgcgcacccctgctgagtgcccggccaccagaaagacagatcccccacctttccttctccctga

SEQ ID NO: 432609 - DNA, 122 bp, Homo sapiens
gaacaaagaaaatgagcaggaaatcaaagaggaaggaggcagagtaaggagaaggaagtacgaatcataaggagaggcgggtgtcagcagccatcgactttgctcacctttcctccttgttc

SEQ ID NO: 432610 - DNA, 122 bp, Homo sapiens
gcaggagcccaggcagtacctgcagcgtccgggcaccagagccaccttggaacaggaacgcgtctccggccgcggggctgcggctccgccaaactttggggcgggcggggcgggctggggcg

SEQ ID NO: 432611 - DNA, 122 bp, Homo sapiens
aggtgggccaaaggtttgtcatgggctttcttaccacaacagcctggatttgattccactcgagagccccaccacccccaccccaacccgccagtcttttttttttttttttttttaagaaa

SEQ ID NO: 432612 - DNA, 122 bp, Homo sapiens
ccaggatattagttcaaaataatctactgtccacatttaaaattaacaccactatattcccgaactaatttcacaccctcttaaaaacaaagattctattaattggctcaaaatttgctttc

SEQ ID NO: 432613 - DNA, 122 bp, Homo sapiens
caaccctttgtcgatctgatgtgggaagacctgctgccaggggaatgaatgccatcattccgaaaaccgtgtattcagagggaggtggaaggtcgcacagccactagcattcattaggagct

SEQ ID NO: 432614 - DNA, 122 bp, Homo sapiens
cctgcccgcctcctagcccctagccagaggcagctgtgtggctccgtggctgggctggggcgctgcggctctgcgcacgataagccagggagctccttccttagcactactggctccaggag

SEQ ID NO: 432615 - DNA, 122 bp, Homo sapiens
cctgttcacgaattcttatgcaaatgaggtgattaataaaatagtgtgtaggactggtggcgattctagatgacgtcatatacacgtttgtccaatccaaagaagcatgtttcataacagcg

SEQ ID NO: 432616 - DNA, 122 bp, Homo sapiens
aactttacagagaattcgccacaattttggaaaaccacatcaactaccttactttgctggcggtatgtttgttgcttatacaactaatgctttgtcagcaatgaagcacatcatctgaatat

SEQ ID NO: 432617 - DNA, 122 bp, Homo sapiens
gttgatgggtatcaatgtgtgtgcctgccttagctggtatgtatgtttctgagtgtgtgtcgggggtacctctagactctgcaggcagattttcctggcaaaaatcccgaaaagaaggctgt

SEQ ID NO: 432618 - DNA, 122 bp, Homo sapiens
ccctccgagcagctgtgctcgggtcccctccgtgtcacctggagacccccgagtgactcccgacctgcgtcctcggtgtgtgcccagcactcagaggggcatccttgggtttgggggacttg

SEQ ID NO: 432619 - DNA, 122 bp, Homo sapiens
agggaagggtggtgctctggggccaggaaggccggcctggcaccccggtcgacgaccaagcgggtggtggggactactctttctacctggctgatgagccagccaccatcatgccgccgtcc

SEQ ID NO: 432620 - DNA, 122 bp, Homo sapiens
ttcagaaaggatctggggtgactctgctacatcagctacgtcccagggtcagagagaacccgggccaggcaagcggcgcacctgctgcaggttgttctggaagttgaggaaggccaggtctc

SEQ ID NO: 432621 - DNA, 122 bp, Homo sapiens
cttctgtaattgtcccacagttcttagatattctgttccatttttctcattctttttttgcgtttccgtgcaggaagtttgtattgacatatcttcaaggtcactgattttttcttcatttc

SEQ ID NO: 432622 - DNA, 122 bp, Homo sapiens
gctcgcagagaatgttatcttcacagcaacttagcaagccccacagaacaaaagttaaagcgtgattgcactataccttgccccgggttactcaggcgcctgtctcccattttggacatgca

SEQ ID NO: 432623 - DNA, 122 bp, Homo sapiens
cgaggttaccaggcggaaaaggggcgcccagcggccccgccgcctccacagtaccgcacacgcagcggccacccctccacgcggtcccccacacacagatcgctccccacgcacagcactgg

SEQ ID NO: 432624 - DNA, 122 bp, Homo sapiens
gctggcctgatgttatcctcgaaggggcgtcacgctggcgcagtgctgcagacgtctccacgagctcccacatcacagtgtggcaacctgaccaggggctcttggactctgccagacactca

SEQ ID NO: 432625 - DNA, 122 bp, Homo sapiens
ttgagttggatgggcctgtgctcgaggctttgcctgctcttctgtcacgaaggatgtttacggggaagccaggactgaccctatggagacaccaggctggcttccacctcttgttgggagga

SEQ ID NO: 432626 - DNA, 122 bp, Homo sapiens
ggaggcgacttactgaagcgttgtcatttccctgtatccaattacaaccctgccctccagcgcttagcaaggtggcttaaaaatagtttctatccctgcaaagagcgtttgtctgtatctcc

SEQ ID NO: 432627 - DNA, 122 bp, Homo sapiens
agcccttatgtgttgtactccgcgggcgcaggctgagagccgtctgcacctttgttactgcggcccgacgccctcttgccagggccacagcagcatcccccgggtcaccgagccggggcttt

SEQ ID NO: 432628 - DNA, 122 bp, Homo sapiens
aaggccacttcttgccacttcctgcccgcctccagcccgcccctaacaagctagcgcatgcgctgtaggactatttgcgcgccgttccccccggtgagcctgcacaccgtgcttccggcgcg

SEQ ID NO: 432629 - DNA, 122 bp, Homo sapiens
ctggactctccctaagatatttggaaacctgtgttctgagttcttccttttccccgggctcgggtggctgaaggccttggctcttgggaatggtctcgcgtccttcaccagaactgacggga

SEQ ID NO: 432630 - DNA, 122 bp, Homo sapiens
cctcctgagaacagcagaatgccagtttcccctgtcaacccacctctcccagcccttctgcggagccctgccaaggactagtcccagcctgctcctccattggccatctgaacaactcccag

SEQ ID NO: 432631 - DNA, 122 bp, Homo sapiens
accgaacaaaaggcgaagagacctgacagccaagccacgcccctcgccacctcgaagctccgcccctgggggagacgcccaccctctggtgcgagctcactggctatctcgcctgactgtcc

SEQ ID NO: 432632 - DNA, 122 bp, Homo sapiens
ttgaaacctaatgtctagctgagcatggtgacatacagctgtaatccttgctacttgggacgctgtggcaggagaattgcttgagcctcggagctatagtgattcatgatcatgccactgca

SEQ ID NO: 432633 - DNA, 122 bp, Homo sapiens
gcgggccggggcggggcctcgctttccaggcaagcgcaggtccaggcggtgcagcttgggcggcccaacggatcgtgccgcggcggccgagcgcaggtgaccggcaggagggggcgcggggg

SEQ ID NO: 432634 - DNA, 122 bp, Homo sapiens
ttcccaaagattatcatttacttcctgccaggaccagcctggcttccttcgtaccgaatacgctaagagccccatttcctatgttccagatgacatcacaactcactcactaggttattacc

SEQ ID NO: 432635 - DNA, 122 bp, Homo sapiens
tggtcgcgcatcgcctttatataggcatgggtcagagtgggtggggcttcttcttgattacgttggtactttattctaatcacactaaatctcatcttccaccagactccagcttcggaatg

SEQ ID NO: 432636 - DNA, 122 bp, Homo sapiens
ctcatgagatgaatgagattggagtggttcaaataaaggtgacagctcccttcacttcttcgttgactattttatcagtccttccacattgcctcagtttccccacctctaacagtaatcaa

SEQ ID NO: 432637 - DNA, 122 bp, Homo sapiens
ttagagccagaaaaaagaagcctgccatcgcatcccatcgcctgtcgtgtgaatcatccacgtggatcactgatgcgactcgagggcacggaagggcccgggtgggactgcactcacgtggg

SEQ ID NO: 432638 - DNA, 122 bp, Homo sapiens
tcagtcccggcgagtccgttccccggagtggagctacaagtcccaaagggtcttcctcagcgcgaaatcgttcccagatatttgagttaagttgtttgactccagctgtcccctttcagctc

SEQ ID NO: 432639 - DNA, 122 bp, Homo sapiens
gcggggattcgcgctgccaatgaggccccggtgtgggccgagcaaggcggggggacgggccggagcggaggctttgctgtggcagctgctggagcggcggccgcctcgggagccggaggaga

SEQ ID NO: 432640 - DNA, 122 bp, Homo sapiens
ttccctccccagcacttatctctcttctaccgaactgcaggcggtgatttcacccaagaacgtgagagttctcctagatcgggaagagatttttgcacaactcaccaacatacgctccctgc

SEQ ID NO: 432641 - DNA, 122 bp, Homo sapiens
cctaaaagggagtagtatccaaggcgagcatgcctggggactcctgagaaacagctgaagcggcctctcctgtgctgcagccagtgttcctctgtggatagcctaggcaggcagaggtggac

SEQ ID NO: 432642 - DNA, 122 bp, Homo sapiens
gcaggcggagcggcagccccagtagcacgaggaggtgttgcagcagtggcagatgtgcatcgagctgctctcgccgggctcgctgccgtcgccgccgccgccgcagccgcctcccccgggct

SEQ ID NO: 432643 - DNA, 122 bp, Homo sapiens
cccctgggtacttggtttccccgcatggttccggaagagcgcggcgcagctggctgtgagcgcagggctatcccggcggccgcttcggcagccagggcggcgcggaggggcagggccagagg

SEQ ID NO: 432644 - DNA, 122 bp, Homo sapiens
gagaggctgtagcctctatattgctcctattcctgagtctcctcaggtttctcaagatatcggatgcctcctatctctaatttcctcaggatcagtggcctgagctttggctatgagcctaa

SEQ ID NO: 432645 - DNA, 122 bp, Homo sapiens
agcgtcttcgctgttgcccttagggacggctgtgggcctgctgggggtgggggcccgaagcgccagagatggctgctcagcgagggatgcccagctccgccgtgagggtcctggaagaggcg

SEQ ID NO: 432646 - DNA, 122 bp, Homo sapiens
caaacctgtgtgcagcctgagaggggagggctgtgtggccagcaagcaaccaaccacactcgcatgtgttttgttcctgagagtggtgcaaaaggattgccttcgactctgcagggctgaag

SEQ ID NO: 432647 - DNA, 122 bp, Homo sapiens
gcggcccgtgcaagggttgctggcatcagggacactttggggggttctggggaaagaggacgaaatgagcatagggaaatcagtccatactgtcctccctaagagaccctcagtttgcctgc

SEQ ID NO: 432648 - DNA, 122 bp, Homo sapiens
tccaaggaaaacaggcagtgggaaggaagttcccgcagcctgtgagcccagcccgatgcacggaacccaaaagacagagacttcatggggaaacaactttaggtgtcattggttacttggaa

SEQ ID NO: 432649 - DNA, 122 bp, Homo sapiens
gcactcctcagcccttgggcggttgatgggaccaggtgctgtggagcagggggcggtgctcgtcggggacgctggggccgcgcaggagccgacggcggccgggggaagctcaggcatggcgg

SEQ ID NO: 432650 - DNA, 122 bp, Homo sapiens
cttctgtttacttgataggcacaggccagacagaacacactaaaaatcaagatggagcaccgcactgtgcaaatgcacctcgtctcaaaagcacagatgggctttatgttcagagaggcagg

SEQ ID NO: 432651 - DNA, 122 bp, Homo sapiens
aaatttctacgaggtgaatgcagtccaggtggactctggttctgctgtgaacgtgacacacgctgtaataacgcaggcgggacaggcagtcagggacggccgttctcctatcatgaacatca

SEQ ID NO: 432652 - DNA, 122 bp, Homo sapiens
aaagagttcagttagaggactgatcctgaacatttcagtgaatttcagtaagctcaaccccgtgagaaaacactcaaacagaataagccacccacagatgagtctaaaacaaaatataaaca

SEQ ID NO: 432653 - DNA, 122 bp, Homo sapiens
agggcgccttttggggatgggaagccaccactgccgcgactgcggccagactccgggagacgctgaggtccggcccttaagccggccgactccgcgcgtcacgggctccgccccgggaccgc

SEQ ID NO: 432654 - DNA, 122 bp, Homo sapiens
cagtgcacggggcctgggtggggggtgcgggtgtgggtggggacctgcggccttcgagtccgcggccttcgagtcctggggcggcggcggcggctgcaggcacgggcacgggcacggggcgg

SEQ ID NO: 432655 - DNA, 122 bp, Homo sapiens
tcaaatgagattccacttcttgtgtgattgaaattatcgtctttgagaggctgagtctctcgatacctctgtttaatgaagatttggagggctctggggccacatggacagacaaggctcct

SEQ ID NO: 432656 - DNA, 122 bp, Homo sapiens
tcctgccacacgctgccttcagttaagggccacatttgtgaattcactctgcacggtcaccgtcgcacagcccattttatttgcacgtcagtgctgctgcttctcggagaagccatttgatc

SEQ ID NO: 432657 - DNA, 122 bp, Homo sapiens
caacaacaaactgaaattttcatttgagggggttgttttttaaagtcaaccccgaccgggcgcagtggctcacgcctgtaatgtcagcaccttgggaggccgaagtgtctggatcacctgag

SEQ ID NO: 432658 - DNA, 122 bp, Homo sapiens
gaagaaaaactaaagcaacaacagcaggagtctgcacgcagggaaaacatccttgtaatgcgactagcaaccaaggaacaagagatgcaagagtgtactgtaagtatttcaagttatataaa

SEQ ID NO: 432659 - DNA, 122 bp, Homo sapiens
cgaggacaaagcaggatctcggaaaataagatcacatccccaaacaactaaaaggacaaccgagacaaggttgcagactcccacgcctctgcccgactcccgggcttgcgcgcgcggctgca

SEQ ID NO: 432660 - DNA, 122 bp, Homo sapiens
gagggaagataagtaagccaagagtcaatatagcacagtattaatgaaatctcctgcattcgtcttctcttcctcaaatgtagaagcttctgcagctctaacctagggctttaggctactgc

SEQ ID NO: 432661 - DNA, 122 bp, Homo sapiens
tccaaaacactccgcttagatactgataaggcgccaactgcagcctggagaacccctatgcgccatcttggcttcccgcaggcctctgcgccgagcgcctgcgcaagcgcgacgtcttagct

SEQ ID NO: 432662 - DNA, 122 bp, Homo sapiens
agagcatgtagttatgctgtctctctgtcatctacttgacattctatagaagtgaacactcgaaagaactggtcaacaaagatgaaagtgcagcaaagcaatgaaaaatgataacactggaa

SEQ ID NO: 432663 - DNA, 122 bp, Homo sapiens
aatagtaaacctccgtgttcctattgcctggtagccctgcacccactgagtcaatgacatcgatgcctctggggagggcggctacagcctagaacaaagaagtcaattgagttgctgaatgg

SEQ ID NO: 432664 - DNA, 122 bp, Homo sapiens
ttttctcacccttcaaagtgcctgtgagcctaatctctcctggctatgtgacaaggaccccgtttttagctgaactaaggagaaagtcctacaacataactagatgaggttacggcaggcac

SEQ ID NO: 432665 - DNA, 122 bp, Homo sapiens
gagatagtggctctcagcttgctgagcaagtcctttcccaaaaaggtcaagggacagtcacgcatgtaccaaaactgatgaatgactgaatgtcctcctacagtacaagtccaagacaagca

SEQ ID NO: 432666 - DNA, 122 bp, Homo sapiens
gaatcccccgagctgccaagtttggggcttaattttcacgccgagtgtataggcagtccccgtctcgggccctttgtaatcgaggagagaatttgtctttgaattcactttttcttacctat

SEQ ID NO: 432667 - DNA, 122 bp, Homo sapiens
ccggctgagtctcctccccaccttccccaccctccccaccctccccataagcgcccctcccgggttcccaaagcagagggcgtgggggaaaagaaaaaagatcctctctcgctaatctccgc

SEQ ID NO: 432668 - DNA, 122 bp, Homo sapiens
agtctaaataaatcccctttcaggatttgatatagtgtgtacttccaacaaccatcctggcgtagttggggattgttttacaataagtaaacattgctaataactgtgttacaagatcatta

SEQ ID NO: 432669 - DNA, 122 bp, Homo sapiens
ggagggatggcaaagctgccacgcgcacgggggtgcaggctgcgggactgcgatcgctgccggataggaccaggtagtgtgcacacctccgtccttaggaaggaacccagcggcagattctg

SEQ ID NO: 432670 - DNA, 122 bp, Homo sapiens
ccgggcaggcgcggagaccggcgtgggacagccacctggagcgcagctgccaggtagggacggcgcccgccacccaggcgctgggcagagcgggtggcggtagcggctgacctggtttcttg

SEQ ID NO: 432671 - DNA, 122 bp, Homo sapiens
cgcctccagactgttccggctccgccgcctgaaattacctgctctgggggaggcgcggcgcgcggcctcatgacggaactacaactcccatgaggcgctgggcccacgcaggcgcggcgcgg

SEQ ID NO: 432672 - DNA, 122 bp, Homo sapiens
cgaacccaccaaaaagcctcgcatcaacagctttgaggagcatgtggcctccacctcggccgccctgcccagctgcctgcccccggaggtgcccacgcagctgcctggacaagtcagtgcac

SEQ ID NO: 432673 - DNA, 122 bp, Homo sapiens
cttcctcctcgccgcatccctgagggaagcgccgcctctgctcccgggttctccgcccgccgactccttcctggccggaccccgctgcgctccaccccagtggctggaggagcagctctcca

SEQ ID NO: 432674 - DNA, 122 bp, Homo sapiens
tttaaggaaacttttggcagatgtggacgtcgtaacatctgggcagtgttaacagaatcccggaggccgggacagaccaggagccactcgttctaggaatgttaaagtagaaggttttttcc

SEQ ID NO: 432675 - DNA, 122 bp, Homo sapiens
ccaagatcgaccccgaggctgcgggacctgcagagatcctcgacccgggagagccccaggcgcctttacctggtttcatcttcagttgaggccaaaatctccgcaggttgctaggggccggg

SEQ ID NO: 432676 - DNA, 122 bp, Homo sapiens
gtagctctgtctaaacaggccttaagtatgctaagagtcgtcggctggcaatcggtgcaacgtggggtaacacaccgtaagtgccactttctccccatccattcattcattcataagcctaa

SEQ ID NO: 432677 - DNA, 122 bp, Homo sapiens
gggtggggcgatctcacattttaagcaagacgcccgctgccttaccaaaatagccctctccgccaaaggaggggcagcctttcacgctcagcttctttcatgtcagcccgagcctttgcagc

SEQ ID NO: 432678 - DNA, 122 bp, Homo sapiens
aacatattgcaaaaataattctgcatcttacatttatcacagaagtaaaccacagatagccgctgttagattttttgcttattccctccatcttttcatctgtatattgatacaaaactata

SEQ ID NO: 432679 - DNA, 122 bp, Homo sapiens
catgtgctacttacatttactctctgagctcgggagagggccggccccggcccggggcggcgggaaggagaggcagcccagtcccagctgtgggctcttctcggcctccttatacaccacct

SEQ ID NO: 432680 - DNA, 122 bp, Homo sapiens
caatcctgcctgtccatctcaatgacatctactatccctgatcaacacggcaccttaaggcgcccttcacagtgaaagcaacttatttccaaagcaggcattttgccttccattgctcctcc

SEQ ID NO: 432681 - DNA, 122 bp, Homo sapiens
ctcccttccctcacccatatacctatgccgtcttactgggagcaaacacttctttagctccgcaaagcgattgcactttctcttccaagtcggcagacggcgcgcgagcagcgtaggcactg

SEQ ID NO: 432682 - DNA, 122 bp, Homo sapiens
tttactctataatggagacatttttaatgaatacattaaaacaagcaggattcggccgggcgcggtggctcacgcctgtaatcccaacactttgggaggctgcggcgggcggatcacctgag

SEQ ID NO: 432683 - DNA, 122 bp, Homo sapiens
aacaggctaaccctttgtgactgagaagaggacatcccacacttcagaggcaggagggatcgaactggtctccagcaaggcctatgacccttgctgagcttgctgagctgcagacttgggca

SEQ ID NO: 432684 - DNA, 122 bp, Homo sapiens
tgagtaggaggagtagatgagtgttagtgcacaaatgttggcacaggtcactgtaaatagcgtaaaccattcatgcaaggtgatagtaggaaaggcagagtgtatgtgctcagatgcctgta

SEQ ID NO: 432685 - DNA, 122 bp, Homo sapiens
ccagggtggacaatggtgttgacttcattactagataaaaatccatgttattttgtttctcgcattgaaaggctgcttggctaaggttctgtgaagatccgatgacatttccaacactttgc

SEQ ID NO: 432686 - DNA, 122 bp, Homo sapiens
ggctgcgcctggtggccgtgcgccctggctggagcggcgcgctgcgcttcggcttcaccgcgcacgatccgtcgctcatgagcgcccaggacatccccaagtacgcctgcccggacctggtc

SEQ ID NO: 432687 - DNA, 122 bp, Homo sapiens
ttttgttgttgttgtttttaagttcagccctgtgctgtgtaaatctacagtgtacttagacgggcttgtgtattttttcactcatcagcactgcccacattatgggaaagagataaggcttg

SEQ ID NO: 432688 - DNA, 122 bp, Homo sapiens
tcccctgacgacgccctcggccccgcagcccgggcgcccgcgccaccctgtcctgctctgcgcccgcctgtccagccccactcaccgcctgccccgcagaatgctgggcaccggggacgcca

SEQ ID NO: 432689 - DNA, 122 bp, Homo sapiens
gcggcgggggcggggcttgtgggaacggcccaccgcagggttggccaccttgagaagctgcgaagatggcggagtaaggcgtgccgctgcaaactggcctctgggccgggggcgagcagccc

SEQ ID NO: 432690 - DNA, 122 bp, Homo sapiens
caatatggcctgtagattgtaaaatattatactttatagaaaaagtctgctgatcactcacggagaagctgttcacctttgggttcactgagaaagtcaaacctgtagatttataaatatga

SEQ ID NO: 432691 - DNA, 122 bp, Homo sapiens
aaggtatttactttatcaagatgtgtttcatttgtgttctgagtaccagtgaggggataccgtggtacagtgttttgaattgtgtactaatatcattaaagcatgggattttagtggctttt

SEQ ID NO: 432692 - DNA, 122 bp, Homo sapiens
ttcccactatgttatgctaaaacaatttaccatgcctttggaatgtcatgggcaacagtccggtgaaatcttttcccaattaggtagctgccaccttatcactaaaactatttctgttctgt

SEQ ID NO: 432693 - DNA, 122 bp, Homo sapiens
tcccctgggacatgccgttctcttctttgtactcatctgtttggtatgtgaggggttttgcgttttgtcttctgctctgtaatttaaagggataaaacgctcacatttaacttaagccaaaa

SEQ ID NO: 432694 - DNA, 122 bp, Homo sapiens
ctctgcttcttagggtggagttagaggactccccgccctccttgcctgcgaaggaggaggcgtggccacacagataaagctggtctgaaaagagcatggctttatttgttctggggccaggt

SEQ ID NO: 432695 - DNA, 122 bp, Homo sapiens
tcctaaccatagagagcaaaagaaaaactagagcggcagtacggctctatccgctctagccggctcgccgtctcagtcccgtgatctcgttcctgaccttttcgatgttcagtaggctggtc

SEQ ID NO: 432696 - DNA, 122 bp, Homo sapiens
tgccaaggagcctgctggtgggcactgacccctcccgtggggttcgtaggagcgcttcagcgaatcgaccgccatggggccctccaggcgtcccccagagcctgagaaagcgcctcccgctg

SEQ ID NO: 432697 - DNA, 122 bp, Homo sapiens
gggcgtgggagttgcgctcgctctcctttcccggcgtcccgtggagaccgggaggctcagcgcctctcccagctctcagcgccgccctcccagaccccagagacgtcggtcagggcgcggcg

SEQ ID NO: 432698 - DNA, 122 bp, Homo sapiens
actagaggggaacgtgaggagagctgcggaaagagatccagcctggctccctcctttccccgccctaagtcagcctcttcacccagtgagcacaaaactgtattgcccagactcccgggccc

SEQ ID NO: 432699 - DNA, 122 bp, Homo sapiens
gttcatcttgtctctatcgttcaagccattcttcctgagcaaaaggatctgctgcactttcgccacattacccgcgctggcagctttgtggatcttgccgagatctcggtctcggacgtggt

SEQ ID NO: 432700 - DNA, 122 bp, Homo sapiens
tcagttgaaaagcctaaactgcctctcgggaggttgggcgcggcgaactactttcagcggcgcacggagacggcgtctacgtgaggggtgataagtgacgcaacactcgttgcataaatttg

SEQ ID NO: 432701 - DNA, 122 bp, Homo sapiens
gtctgaaaattgtagtgtccgttttctctttagccataaagttttgcttaaatgctgagtcgcgttttaatgctctactagatgtacatataagaatactaaatggagggaaagtaatttct

SEQ ID NO: 432702 - DNA, 122 bp, Homo sapiens
cccccaggaaggagcgacgttccctaggcgccgggtccggacagcgccgcgcagcccccgcgcaccccgcgccccccgcgccccccgggcccgccccgtatccctgaccgcgtcccctggag

SEQ ID NO: 432703 - DNA, 122 bp, Homo sapiens
tttctgctttggatcaggagatgagaaaataacacagcactgcagccaaaagcctgacctcgcaatgtctgtttcccatgtgtcaccacaccaaagtccactgtaaaatgtacttattccta

SEQ ID NO: 432704 - DNA, 122 bp, Homo sapiens
aaatttttttccataaatgaacaataaaactcaataaaaagctaagcaacccagactggccgtggtggcttatgcctgtaatcccagcactttgggaagccgaggtgggcagatcacttgaa

SEQ ID NO: 432705 - DNA, 122 bp, Homo sapiens
ccaggcggcgggatcccacacagttgaggagagggagccgaggccgtgacttagggctggcgacgattaaaccaagtaacgagacaccgggcagatgtgttttcattgccctgtaagataaa

SEQ ID NO: 432706 - DNA, 122 bp, Homo sapiens
tttttttcacagagtatattggattgagatccaaaacttattggcaagccatcaaagttccgcttgaactaaaagaggaaaacctgttttctgaaatgtgaactttaattacataaaatgga

SEQ ID NO: 432707 - DNA, 122 bp, Homo sapiens
ctccagagtctgtggcagttcgaagctgcggaagtggccctgagagcacagctggggaaccgggacatgcatgtacccaaaactaacatggcaacgactgagtaacgcggggcacgcaactt

SEQ ID NO: 432708 - DNA, 122 bp, Homo sapiens
gcggctcccggcgccggggtggggttaggggctgcaggggtgagcacagcctcgggctgccgcactcacgcgcgctctgctcggccgcctgcagcagggccgagagccccaggagcctcgcg

SEQ ID NO: 432709 - DNA, 122 bp, Homo sapiens
cgggcgcctctcggccaggtacgcggccggctgggataggggtcgcgggcgggctttggtcgcgcagcagccggtcctccccggaggtaggcgggcgcgggccctgttgggtctttgggacg

SEQ ID NO: 432710 - DNA, 122 bp, Homo sapiens
cctgtcttcgcttcaccgccttgacagctttgcagagtgctgctcaggtattctgcaagacgcccctcaattggtgtgtgtgtgatgttctctctgattacattggaactgtgcgtttgcgg

SEQ ID NO: 432711 - DNA, 122 bp, Homo sapiens
ctccctgaaccccagggagaaccgtgagaagatggcagaagtcatgttcgagaacttcggcgtgcccgctttctacctgtcggaccaggcggtgctggctctctacgcctctgcctgtgtca

SEQ ID NO: 432712 - DNA, 122 bp, Homo sapiens
cggggacgcccgctggtgggaagggtgtgcgcgcgtcggaggccgcggctgaccctgctccggcgctgccaggtacggcatcagcccggacagcatcatcctgtaccggcagagcatcggca

SEQ ID NO: 432713 - DNA, 122 bp, Homo sapiens
tgccccaaatccttagtgtttgcagcttgcaatatgcataacaaggaaggggttggggggcgttccacaccatcccaacacaaaggcaaggtcaagctaattatgtccagtctcactttggt

SEQ ID NO: 432714 - DNA, 122 bp, Homo sapiens
accccagcctctttcagcaagcaggtctgcacctggccctgggtctcccagtgggtgccccgggaagaagctctcctcatccctctccacttcccattggccaagccctctcctggtcaaga

SEQ ID NO: 432715 - DNA, 122 bp, Homo sapiens
ggtcattcttgggtttgttttgctcctgtctgattttctagggtcatttgcgtcccttctcgggaacggggactcgccatgcgcacactgacagctggctttgcacctgctaaggcgctgga

SEQ ID NO: 432716 - DNA, 122 bp, Homo sapiens
aagcactgctgatacttaaatgacgattgaaggattgtacgcctgtatgctgagctacaacgatgacatacgatcccagttttacatttacgtcttcatcaatttgagcagtcgttatgttt

SEQ ID NO: 432717 - DNA, 122 bp, Homo sapiens
agaggggcggcttccggtttaggacagcgcggctgcgcacggcgtgtggtcttattggctcgaaccgcctcgtgcgatgcgcgtcacggcgacgtgcggtcgtgggggcggggagacgcggc

SEQ ID NO: 432718 - DNA, 122 bp, Homo sapiens
cgggctcgtcggacggagaaggccgtaggggagtggagcggcgcccccccccacaccctccgcccttgctcttcgtctgcgaggaagcccggcagtcgcccatccattcaagcagtgcgggc

SEQ ID NO: 432719 - DNA, 122 bp, Homo sapiens
actgtatttgcactgatatataagactcccaggacgtgggataaactcatctatcctttacgggtaagtgtcaaagttaacttgcttcatagaattaaatgtgttttcattagaggtgtttg

SEQ ID NO: 432720 - DNA, 122 bp, Homo sapiens
ttcagaatgttgatctagttgttgattttctggccagaataagagggaagctagaaaatacggttctgaaaactgataagtcagtcctattggttgcaagacttctcgaagctgatctttta

SEQ ID NO: 432721 - DNA, 122 bp, Homo sapiens
tgactcctgaacccggccgcagaacaagtccgggcatatgtggagatcgggtcccggtcccggctcgtcaagccccagctttatggtggctcctcagcctcccactacgtgggtagaaagtt

SEQ ID NO: 432722 - DNA, 122 bp, Homo sapiens
gctgagggggcttccctgccgtgacctttcctgcgacttgaacctaggctccctcctcctcggtcgggcagatctttcagaagcaggagcccaggatcatgtctggttttgttttccgaggg

SEQ ID NO: 432723 - DNA, 122 bp, Homo sapiens
tggtggaattactctattattattgatacagaaaaacagtaacttgatgggactggtaaccgggctattattgtaaaaatgctttgccttttcagacaaagtggtggagtacagaaataatt

SEQ ID NO: 432724 - DNA, 122 bp, Homo sapiens
gacatgtggtgccgagttcagagaaaggactgaagacctgtaagcccaacacttctgctccggggtggtctacactgaccctgagcaggtgttaaggatggaggaccccctcacccgcccac

SEQ ID NO: 432725 - DNA, 122 bp, Homo sapiens
gtaagctcacagtttcgtgagccaagagcgaggatctgaagtcatcactaggcatctcttcgaggatctctacaggcctggagcagtctgtctgtcataatccataatctgcttctatatta

SEQ ID NO: 432726 - DNA, 122 bp, Homo sapiens
gagaacacttccatatataaagaagccttatgacctgcctgcaactgcagattttgcaaacgtgatcttactttttctctcttttgggatatgctcccctttaaactgaagctcaacctcct

SEQ ID NO: 432727 - DNA, 122 bp, Homo sapiens
gaaccctgtgccaatggggcaagtggacgtcagctactaccctataccattgtcccacaacgcacataggccagcacagtgtaccacagctccaagctgatctacattaagaggaagagaag

SEQ ID NO: 432728 - DNA, 122 bp, Homo sapiens
ggactctaacaatggatagtaggggaagtggcaggtgagagtaaaatgtgtgtttattctcgtgaggaagaagaattatagatacccaagctaaaggaaaggaaaacagtttcccaagagct

SEQ ID NO: 432729 - DNA, 122 bp, Homo sapiens
ctcagcatacattctttgagcacctattgtgtgccaagccctgttctaggcactgggaatcggaggtgaaagacagacagaagtcccttcctccaggaggtctagagagaagagcagacaat

SEQ ID NO: 432730 - DNA, 122 bp, Homo sapiens
ttaatttaccaaaccaccaaactcgccccatattgtaagaaaagaatacagatgttttgtcgttacagactcctcctgatggtttcccaagtttgactctccattgccgattccctgccaca

SEQ ID NO: 432731 - DNA, 122 bp, Homo sapiens
tttcaatgtagtattagtaccttatatatgtagaattctggttgcctgatttgtatgcagcggaggccagaataatttttccactagaaagatatgggcaccttgaagtgatgatctacaac

SEQ ID NO: 432732 - DNA, 122 bp, Homo sapiens
aatcttcaagttaacacttttaaggaaacattactgggtataaaattatctctagtaagtcgtatgcgccttttctctgagctcactgtatcacactaaccagcagagggtgcacaataaag

SEQ ID NO: 432733 - DNA, 122 bp, Homo sapiens
ttggcctacggagctggggcggatgacccccaaatagccctggcagattccccctagacccgcccgcaccatggtcaggcatgcccctcctcatcgctgggcacagcccagagggtataaac

SEQ ID NO: 432734 - DNA, 122 bp, Homo sapiens
cggccccggcctgtgggaggagaaggctcaggcaggctcgggctgcaggagattccacaccgagtcagagccggaggctttgggaagctggaaccagaccttacaaaaagcaggcagagctg

SEQ ID NO: 432735 - DNA, 122 bp, Homo sapiens
ccgagacccggcggtaggagcggccacagtggctcaggggcctgtccatggtcatgtacccgtagaactcaccgccgccgccgccgtctcgggccgggggcgtctccgcgatggactcgggc

SEQ ID NO: 432736 - DNA, 122 bp, Homo sapiens
atgaacagagtaacaggactatatttctgaaaaaggatgaacttactggaaacaggattgcgtatgtatcgagactatgggagttagttaggagactactgggaaacttctagtaatctaag

SEQ ID NO: 432737 - DNA, 122 bp, Homo sapiens
tctgccacattctttcttcagtaataaaccagcagcttagcaaacttgagggcaaacacacgtccagagtcccgagctgctgccgtctaaaacgcagggctgctacgctgccatggctgggt

SEQ ID NO: 432738 - DNA, 122 bp, Homo sapiens
ctcaggtcgggccaccagcagggagatgttggtgttctcttcctggctcaggatggccaccgcctcttcccggttctggacgtctacaccgttaatctgaggcaggcaggatacaatcaaca

SEQ ID NO: 432739 - DNA, 122 bp, Homo sapiens
atcatcacctacagttttattgggcagcgctgccctggtctttattttcccttgttggaacgctcttccacgctgctcccacaccatgtcccctatcaccattattatcctcatttcatctg

SEQ ID NO: 432740 - DNA, 122 bp, Homo sapiens
aaggttgccattttaaccatttccaagtgtacagttctgtggcattaagtacattcacaccgtttgcgaccatcaccgccacgtcacggtcagtttatgttatcttgattaggtgccagtcc

SEQ ID NO: 432741 - DNA, 122 bp, Homo sapiens
ctacctccagacaggcaaacgaatcctactaccctttcccttccttctagtgacactttgcgtgggcaggtacagtgtgtgaggcctcaccaagtgaaaaaaggagggaatggagtaaaggt

SEQ ID NO: 432742 - DNA, 122 bp, Homo sapiens
ggaggggaggtatcaggttttcagatgaagctgtttccaacccttcctttccctccttcgcggcacagtcttgaggccctgaggactgggatctgcgacacccagtggacaaaagtcggccg

SEQ ID NO: 432743 - DNA, 122 bp, Homo sapiens
tctctccgcgggagccctcttcctctccttctcccctggctccggccagacaagacctcgcggcaccacctcagtcggacaggaccacgagtgtgattcctgaagctgggacaccttatcct

SEQ ID NO: 432744 - DNA, 122 bp, Homo sapiens
cgtgcctgatcttgtctgatctcggaagctaagcaggttcaggccttgttagtacttggacgggagaaaggagaaaaagaaggacatggatgggaaggtaggacccagcttcaaccccacca

SEQ ID NO: 432745 - DNA, 122 bp, Homo sapiens
ttctctggaataaccctgattaatacactaatcattctaattctgtctcagttgtaaggtcgacagcttattcattattttgagagcattcattttcaaggtaaaaagacagagatgatccc

SEQ ID NO: 432746 - DNA, 122 bp, Homo sapiens
ggacgaggcggaggctgaggaaggcagcggggagacccaggctgcagcaacaaagggcagcgagcgattggccgggctgcaggcgaggttagccggggacccgggtggccggaggcagcggc

SEQ ID NO: 432747 - DNA, 122 bp, Homo sapiens
cgctgcgacgcctccgcctgagccccgcccatgacggtgggcgcctgcgcctacgcgcgccgggaagcagaaggtgatctctgccttcgagacacggagtgtgctgcctcagtctgtgatcc

SEQ ID NO: 432748 - DNA, 122 bp, Homo sapiens
ggaccaggatcagtttccaagatgaatttgcatatcgttattattcagcatctgttgctacgtgcccttgtgtttgtcgtggctggatttcctctagagatgagtaatgagggtattaactc

SEQ ID NO: 432749 - DNA, 122 bp, Homo sapiens
agcgccggaggaggagaggcagcggcttagtcggtgccaggtcccaaagacgcagctgcgcgggtgtgccgggaggagccccggaatccacaggctgcgaggtgggcagcacagggggcctc

SEQ ID NO: 432750 - DNA, 122 bp, Homo sapiens
gtggtgagccacagtccgtggcattttgatcaggtgctcccaatgattcctacgctctaacgggtttgggaggcaagggtgggggtaagctcgagagcccagagacatcccgtccagcggga

SEQ ID NO: 432751 - DNA, 122 bp, Homo sapiens
ggaggaacccgaggcacagcacacagcaggtgaggggcgtggtactccggtaccctcagtcggccgaccatagagcttgtagacctccaggactcctagagagcttccggaagtgcctttgg

SEQ ID NO: 432752 - DNA, 122 bp, Homo sapiens
tcctaaactacaggtccctgtcattgggccttgagcaggccatgctgtccccttgttccccggatcccatgaaggaggctttttactcatgtgagccttttctgctatgtttcaggttgagc

SEQ ID NO: 432753 - DNA, 122 bp, Homo sapiens
tcctgaattagtcagagacaccaggaccatcagatgaggaattggcccaagattcattgccgtggcaacagctacttgacttagcctctgacttaatgtcttggcaggtgggcaaaccagag

SEQ ID NO: 432754 - DNA, 122 bp, Homo sapiens
tcagtttatccaggaagttagcacgatggcccagcaaggaacagcagtggtgtggaaaaacggagggcgaggcccgaaggaagcgaggaagtgaagcccggcaggagtgctgggttgtggtg

SEQ ID NO: 432755 - DNA, 122 bp, Homo sapiens
aaagagggaggtggcgcggggacaggcagcggcaaagaccctggccccacaccgggattccgcagcatcttcctgcagctgctcacagtggggtgagagctgagtccccccgggcggggctc

SEQ ID NO: 432756 - DNA, 122 bp, Homo sapiens
actctacaacagccatcagttgatctttcccttacacatccctccaggaagtgaaatatccgaaatgagtcatactcaggagtcggagctatacttccactgtagtttttttggataaccaa

SEQ ID NO: 432757 - DNA, 122 bp, Homo sapiens
aagcctcgcacctggcggccccgcccccggccctggccaggaccctgagtctgcgcgccccgccgccctgtctgcggtccagctggttgccatctctgccgcttcccgcgacctcaagagag

SEQ ID NO: 432758 - DNA, 122 bp, Homo sapiens
attcaactgatagcagccgcctcttctggggagagcagatctttcagaaagcactggctgcgctgctaatcaaacgcaacattgttctcagcaaggaggaagaatggaaaggtttgtttcag

SEQ ID NO: 432759 - DNA, 122 bp, Homo sapiens
cattaggtttgctgcctaaccaagttacccctttttgcagcatgaggtcatggtgacccccggggagacgggctggggaatctattataggacagctccttgttctgggacatgaatttgat

SEQ ID NO: 432760 - DNA, 122 bp, Homo sapiens
ttaggacagaagggattgaatgcagggcttcggttgccgacagcagaagggtggaggagccgaacagtgtggctgctctggtaggtgatctattgaaatgttcctgctggtgaagagccgcc

SEQ ID NO: 432761 - DNA, 122 bp, Homo sapiens
gtgctgactaacaaggcatttaggtgtgcagcatcctagagtgctccagggcagtgtcagcgttctcgggagtaaaaggtgccacttggtagcaatgatattccagaattaaatgggttttt

SEQ ID NO: 432762 - DNA, 122 bp, Homo sapiens
tttcctctgcgggctctctgcttcctccgcgccccgcgtccccggcgggcgggagcgccacggtgcgtttacctgactgtggggtcccatcatgctgctaggattgtgaggtggaggctgtg

SEQ ID NO: 432763 - DNA, 122 bp, Homo sapiens
tcaggaatgccgctgcccccactctccgggtcctgcagatttgcaggcgttcccacgcaacgtcttcctgccagccacgcaaaacaggggcttcttaacacacaaaaggggaaaatgagaaa

SEQ ID NO: 432764 - DNA, 122 bp, Homo sapiens
ggcttttcttcctccctttcccggggcccaggcgccggcattagcatactgcgccccgcgcgcctgctgcagggggccccccgctgtgtgccagcctgcgcaatctgcaggcgccatcaatt

SEQ ID NO: 432765 - DNA, 122 bp, Homo sapiens
accacatggagaagtatccccaggaagctctgggcctgcggagggaggcggtgcgggcgacgctgaaacccagcagctgcgccgcctgaggcggaggtgagaagcgccctggctgggcctcc

SEQ ID NO: 432766 - DNA, 122 bp, Homo sapiens
cattctctctttgcctctctctatatgtctttaatggtctctggttctccccgggtgtctcgccctctttgtctctccttttcttttgtgccctctctctgcctctttccacgtctgtctcc

SEQ ID NO: 432767 - DNA, 122 bp, Homo sapiens
atatccctggagttgcagatgtcatagtacagaagatgctgtggggccttcccctcctggcgtaggtaccagtggatgtagaaggcattttctacaggaagatcacaggtgattacagcaga

SEQ ID NO: 432768 - DNA, 122 bp, Homo sapiens
gagcccgaggctctgcgggagaccgggggaggctgggccgcgtgggcttcccgctccctgcgccctggcctcccgcgccgtgcgccgccgcacgtagccccagactcctccccttcctcgcc

SEQ ID NO: 432769 - DNA, 122 bp, Homo sapiens
ataaacaacaaaaaaagctactcacggttgtgttgtgggtggctgggcactgggagctgccgggggctgaggagtcccagttgttttctgtcctctcccaggacctggccgtgggtgccact

SEQ ID NO: 432770 - DNA, 122 bp, Homo sapiens
tgaagcacatagtcaaagctcagcatataggacttttctccaagagagacctggactctacgtgatctgaggccagagcccagcatggtgcattttgcctggcagaatatgtgttccataag

SEQ ID NO: 432771 - DNA, 122 bp, Homo sapiens
gttatggttatttgtaggtatatgaacccagtatgtgtattagatactaatatgcatattcgatactaaagtacaaagccttactaattctaagccagctacgttctgtgatctattgtcct

SEQ ID NO: 432772 - DNA, 122 bp, Homo sapiens
cccaggacgggtttcaccggagcgggaggctgcctctccccttcaccgcccagaaggatacgaacagcaacacgcataatagtaaaataagagcaggggctgcgcgcgagctgagccacctc

SEQ ID NO: 432773 - DNA, 122 bp, Homo sapiens
ctgaggcctcctcaccaggagttcgcaggccagaggaagacacagtgttgtctggcaggacggggtagggggagccatagtggggctggaggctccacgcagtccactctccagggttcctg

SEQ ID NO: 432774 - DNA, 122 bp, Homo sapiens
cgcccccgccgccgccgccaccgcttgcggcccccgtcgccgccagtgccgcgcgctcctcgtccagcagcagcaccagctccttgagctccaggttctcgcgcagcagggcctcctggcgc

SEQ ID NO: 432775 - DNA, 122 bp, Homo sapiens
gggggcggcggcctggccgaaagcggggctgcgggcccggaggcattgtcggggcgtgggcgggggcgggagggttcgaggccggccggtgggcgtgggcgggagctggctggggtgtgccc

SEQ ID NO: 432776 - DNA, 122 bp, Homo sapiens
catgaaataagacaccaggaactccaaaagcagctcccccagcagaccagaacagactcccggcactcaaagattcaacccaatgcccctgagactgaagcagacacagtgagtgagtgcct

SEQ ID NO: 432777 - DNA, 122 bp, Homo sapiens
acatgcttcctttcctgctcccgctggctgccaccaccccaggacctgggcagcgcttgccgagctgctaaccacactccgggctgtcccagctgcaatgagctctagaggctgtgggtggc

SEQ ID NO: 432778 - DNA, 122 bp, Homo sapiens
gcgtgagctcatgcactcctgcccccaggcttaccagccccaccctgcatgccacatcagcgccctcttccaggaatggccaagagcccaggtcctgaagtcagaacttgggttccaatcct

SEQ ID NO: 432779 - DNA, 122 bp, Homo sapiens
ctatagtttttttcacatttgagggcaatgaaatcatagtcttgaaaaccaaggaccaggcgatagccttttcaccctgtgactagacaggtccctgagggcacggctgatgtggccaatct

SEQ ID NO: 432780 - DNA, 122 bp, Homo sapiens
gcttgctccccagaggctgatgggcaggactgcaggttcagtcagtccaacagggggcagcgttgactccatcatccagcatggagaaggcatgccatcggtgttcaataaatgcatgtaga

SEQ ID NO: 432781 - DNA, 122 bp, Homo sapiens
ggctgcgaattactcagttaggcgagtttaatgacctttttgacagagacaaagcggtgccgatacagtagataaataaacggatctgtcaccgggcagcggctaggctgtgtgtgaattta

SEQ ID NO: 432782 - DNA, 122 bp, Homo sapiens
ccgaagcgctggtcaaagaggcgtccgggcgccgaaagtccgggcaacggggccgaggcgcggcgcagccaagacggctgcacaggcacagggatctccatcctgctcctccgcgttgcagt

SEQ ID NO: 432783 - DNA, 122 bp, Homo sapiens
tgcgctgctacgggggacgccatcttaaacaggaaactcggcacggggcagtagggcgggcgcgggcaggggaaggaggcggaggaggagcagcgggaggaggggtcagaggagaagcgggc

SEQ ID NO: 432784 - DNA, 122 bp, Homo sapiens
ttctcctgccatcctctcaacagctctgtggggtggggtcctcccccatacctgatgcaccgaccacacagtggaaagtgacaaagccagcgccttgccccaggtttgtctgatcccagaac

SEQ ID NO: 432785 - DNA, 122 bp, Homo sapiens
ttctgggcgcgccatcgctcccgccacctgcactaggactttgcaggaacgcgcctcctacgcgctgcctaggaggaccagacgcgagacaagcgctcagcaagcagctacgtgcaggcaga

SEQ ID NO: 432786 - DNA, 122 bp, Homo sapiens
aatttggcttgaagtagtaatagtatgaagtcaaatttatagtcataataaacttgtctacgctggatattttcatttctgaatgcaatatgcatggggcaaccggcccccaggcagtcact

SEQ ID NO: 432787 - DNA, 122 bp, Homo sapiens
tgagtgatggagagcgggcgtgagcgttggagagcgggcgtgagtgatggagagcaccctcgtctgagctcacggacaccgcctgagtgaaccggtgctatctttggcacttttcacgaagc

SEQ ID NO: 432788 - DNA, 122 bp, Homo sapiens
gtgcagcctgcttgggctcagcgtcccctcttctgagaagcagcccggccccatcctgagcgcccctgggcccacaatccctcctcacgtgtgtggggctggccgttgatgtcgcctgggct

SEQ ID NO: 432789 - DNA, 122 bp, Homo sapiens
ggaacatgaactgccgtaccaccatgatcgcgcacatctcggccgcggtcgggagctacgcggagaccctgtccaccatccagattgcatcgagagtcttgaggatgaagaaaaagaagacg

SEQ ID NO: 432790 - DNA, 122 bp, Homo sapiens
ggtgggcctggaagcgctggctgttaacagacacctgagcaggccatttgctgtcctctccggattgacaggagtcaaaacatgagatcggcttagcttcagtttcgtcatggattaaccac

SEQ ID NO: 432791 - DNA, 122 bp, Homo sapiens
aatgattcacagagctgtgcaaccagcaccacaatccagttgttgaagacttccatcacccgccttaaatgtcgcacgtccatttgtataaatggagacagatgaacaaaagcctacgctgg

SEQ ID NO: 432792 - DNA, 122 bp, Homo sapiens
caacaagagacggtgacgtatcctcttaccatccctaagatgggtgagagtcaaagctgccggccccctgataggagccatagcctttggtagaaaaagtcagctacttccaaactacagcc

SEQ ID NO: 432793 - DNA, 122 bp, Homo sapiens
acaaagcatctttctgactgcccacctcctgccccacacagtttgaaaggctgatagtttcgagattctgaatgaggcttctgcagaggccttcttgtgctccacaagaagggctgggcaag

SEQ ID NO: 432794 - DNA, 122 bp, Homo sapiens
agaagagaggatggcacacagctgtgtgtgagcgcctgggtcgtcccaagacagtctctacgtggtcctgaccctaaagggcaaagggaagaaaactgacctacaggataggccactgccca

SEQ ID NO: 432795 - DNA, 122 bp, Homo sapiens
ggaagctgacccgacaaatttgagaaaaccaagtcccagagaggataaatgacttgcccacggtcacgtaacttgatgatgccaagctgatttcctgcctcgaaagccacttttcattatta

SEQ ID NO: 432796 - DNA, 122 bp, Homo sapiens
caaatcccagagatacccagagagggaagactttcctctgcagatggtggaagatgctggcgcccaggccatcctatgtcatctgtatccagacacagattccagatccctgttcatgcctc

SEQ ID NO: 432797 - DNA, 122 bp, Homo sapiens
ggagggtggagcggagaagcctggtcgacgtggatggactcggtgggccggcgcggggcccgttaggcatctttaataagtttcaccgggagccgggtggccgggatggagacggctaagcc

SEQ ID NO: 432798 - DNA, 122 bp, Homo sapiens
actttctttaatgctttcattttattttcgctgactgcagtccgggagaatgcgctcggtcggagaatctttcggggcgcggttgacagttctttttccaagaggggtccttcacatttatc

SEQ ID NO: 432799 - DNA, 122 bp, Homo sapiens
agaagagagtaaatgctgaggatggcacatgagccagagacccccagacccctgcacacacgcccagtccatctgaccccagtacacctacatccagcgcagcctggcccctctgacccctg

SEQ ID NO: 432800 - DNA, 122 bp, Homo sapiens
tgcccgcctgcggggtgtggagtggggagaacagccccgcctgaatccagtccgactacccgcccctactgatttgcctgggacgccgccggcccacatggccccacccacgcctctgtccc

SEQ ID NO: 432801 - DNA, 122 bp, Homo sapiens
caggctgaaataataaagctccataaattgtatgaaagtgaaaagctccgttgcctccatcgctgaagcccctcgcatgcacctgccaaatcacttcccttatttttcctccagtgtaaccg

SEQ ID NO: 432802 - DNA, 122 bp, Homo sapiens
aatcaatgtgtgaatgttgatgttttaatatttttattgacttatcctgtgactgacttacgttacatattgtgtgattatgaccgtgtgcatgttgccagactccatccatgcattgctga

SEQ ID NO: 432803 - DNA, 122 bp, Homo sapiens
tcgtgagtgtgccaagccaggagggcatcctggaggaggcacgccagccaaatgggagaccgggccgcgggggcgcgaggggggaggactgggcggggaactcgggtgactcacgtcggtcc

SEQ ID NO: 432804 - DNA, 122 bp, Homo sapiens
gtggcatattattccatctactggctgggacatggtatatataattatttgcctattaatcggttctgaatatttgtattctgactcttggctaagctggcttctgtcttttctaactactg

SEQ ID NO: 432805 - DNA, 122 bp, Homo sapiens
cttaagagatctcaggatgtctatcttctggtgatttcacaagcagtcaaaaagaatgaacgccagcaataaacaacaataagaactttagcaatataatattgtgagaaaaacaaattcca

SEQ ID NO: 432806 - DNA, 122 bp, Homo sapiens
gcccaggccggctccgcgggaactctctccctcagacaggccaaaaaccagtagcgaggtcgtggtgatgctctttttaactcctttgcccaataaggggggtggctgcctggagccccgta

SEQ ID NO: 432807 - DNA, 122 bp, Homo sapiens
gcctgctccccgtcccacccctccctgagcacgccaccccgccctctccctctctgagagcgagatacccggccagacaccctcacctgcggtgcccagctgcccaggctgaggcaagagaa

SEQ ID NO: 432808 - DNA, 122 bp, Homo sapiens
aagggacagtcctgaaactccttctatttgtgtagtgctttaaggtaaaagcacaaagcacgtgtatcaatagtctctctttaaatctttgcggtaataagatagctgacagtatcgttaag

SEQ ID NO: 432809 - DNA, 122 bp, Homo sapiens
ggagaaggaaatgattagcatgcacaaaaaattccgcccagctgccaatatggcaccgttcggtgactaacatcccaaaactctcagtaaaggtcaaccttccaggaagttctgagaaatgc

SEQ ID NO: 432810 - DNA, 122 bp, Homo sapiens
actgcccgaaatggagtcgggcccggttctcctgagctgagcaggccaaagcagggagtccgtgagtggaccgggcatagccagagcgacgccgcagcaccccagccgcagggtcagcccca

SEQ ID NO: 432811 - DNA, 122 bp, Homo sapiens
tgtcagaagcgggattctgccgcccaatagcggtgcgccagtgggtaggtctagcagtggcgcagcaatagagcgctccggagcgtctcattggctggatcaaacccaagcgagccattgat

SEQ ID NO: 432812 - DNA, 122 bp, Homo sapiens
cacccactgctccctaacttctctcacaggcccccaacggcttcctcctgcgctggcgcacgctcaggtcttacccgccagcaggtggcgaaacacgattttctgtcctctgcggctgagcc

SEQ ID NO: 432813 - DNA, 122 bp, Homo sapiens
actgcctaccacgcggggcgtttgaacacgaatttggaggtccttgtttgtccttgaacgcggcagggagtggaggaaggcgccgggaggaggcacaaaatcgctttgtgcgacagcgcccg

SEQ ID NO: 432814 - DNA, 122 bp, Homo sapiens
gctagcagcagccctggagccgccggcccagccctgaagccgctccggctgtcgccacagcgagaggaaacctgaacgctctgctcctccacagcgagtccctgcaggtggggacaccgccc

SEQ ID NO: 432815 - DNA, 122 bp, Homo sapiens
gaagcgaggtttggaagtagacgtgtgtgtgcttgttttattctgcgccgcacagcaacccgaactttcgtttggtagcacttgaaagagttttctccctttgtttgcgagattctgaacag

SEQ ID NO: 432816 - DNA, 122 bp, Homo sapiens
aggttctcagattctggttttctcagacccgcaccttggatctgctattactgctgtggtcggttgttcccttgaagggtggttcaggctgttataatggtggtcaagggctagcagtggga

SEQ ID NO: 432817 - DNA, 122 bp, Homo sapiens
gcgcagtgctctggctcagctccctacagtagcgacctccaccgcagattctcatctcctcgctaccgtaagagagatgtaaagaatcagacgggttacgcgctcaggcaccctcatgaagc

SEQ ID NO: 432818 - DNA, 122 bp, Homo sapiens
ggcgggaccccctcgtctgagtctgcgcattgagagcggaggcgggtccaggcgcgggctcgcgcgcccgggcgggtcctcgcgggggcggagtctgcgctctggttcgggctgcggctgcg

SEQ ID NO: 432819 - DNA, 122 bp, Homo sapiens
gtctcgatcatttgcatatgcaaaggataaccttaagcttgagtttgatatttcacgttgcggctcacaaatgaactgctttttattcaaagaaccatgctgtctgttttcgcgtgggtggg

SEQ ID NO: 432820 - DNA, 122 bp, Homo sapiens
actcaaagcactctgattaatctcggaaaacgagctgccttccccactgggtatgccttccgccttggcagcctaattcctgatgccagagcctgatcttagggattttttatctttttttt

SEQ ID NO: 432821 - DNA, 122 bp, Homo sapiens
gcaggaaaaacttggcaaacaggcacgggtcagacaatgcttagggcttgctcaaggactcgtgaccagttactgatctatgcagatcttctgattgcaaactgatagctggattgtaactt

SEQ ID NO: 432822 - DNA, 122 bp, Homo sapiens
gatggtgaagcgcatggacgcactggccaggctggagaacagcagtgagctgcaccgggccggcggcgacctgcactttcccgcagacaggtgaggggacgtggggaggaggcacacggagc

SEQ ID NO: 432823 - DNA, 122 bp, Homo sapiens
cggcatcctcaatggatgtgaaaatggtcgctgtgtgagggtccaggaaggttacacctgcgattgctttgatgggtatcacttggatacggccaagatgacctgtgtcggtaagaatgacg

SEQ ID NO: 432824 - DNA, 122 bp, Homo sapiens
gagacgggaaaaaacgagaagtcctgaggaacatagattcccctcccccgtacattttcccggatggaagcccgaagtttgagggagaaacttgtgaggaaataaaggaagttaggctgagg

SEQ ID NO: 432825 - DNA, 122 bp, Homo sapiens
ggcgttagccatcgccagcttcgtggctgcggtgaaatttcacgacctgacggaacgaatcgccaactttcaggagaagctcttccagtttgtggtggtggaagaacagtatgaagagtcgt

SEQ ID NO: 432826 - DNA, 122 bp, Homo sapiens
aacttaacccagtgcagttcttataataaacacttaaacagggccaggcactgcagttcacgcctgtaatcccagcactttgggaagctgaggcaggcggatcacctgagctcaggagtttg

SEQ ID NO: 432827 - DNA, 122 bp, Homo sapiens
caggcccttgtggcaaggaggccaaggtgccgggggacccggggacccgggtcgggcgcgcgttacctcctccgcgctgcagcagcgagctcgggttcgcctgctggtctgagagcgtaccc

SEQ ID NO: 432828 - DNA, 122 bp, Homo sapiens
ccggggtgcgcggctggggacctgagggcgaggagcgaggacacacaccgaggactcttgcgagggatctcggggcccagctcggcctccctcctagcgctgggggcctgcccggaacccga

SEQ ID NO: 432829 - DNA, 122 bp, Homo sapiens
gccgactcccaggactttgtttcttggacttcaccaccgccgcctccccagcacagctcccgcagcccgcacccgcccacagggtctccgcgaccctagagcttagggaagaattgccgagg

SEQ ID NO: 432830 - DNA, 122 bp, Homo sapiens
tcagggagtaaactgttggaagacagcctctacagcagcagaaacagctcttggcactgtcgcagagaagggagcagccagagtcagcgacagattgaacacaggagagagggaaggaggga

SEQ ID NO: 432831 - DNA, 122 bp, Homo sapiens
gcgagggcgagaaagggggcgagcaaaggggagaggggccagccaggcgacacccacctccgacatacccgcctaaagaactccggtgcacatggtgcgatgaaatatgtttggaaggatgc

SEQ ID NO: 432832 - DNA, 122 bp, Homo sapiens
ataataccctatgtgtgaacacatacttcagattatctctggatctgtccatccttatatcgatgcaaagctaaacatgagttcacactgatgtctctgattctcatctagtaccacagggt

SEQ ID NO: 432833 - DNA, 122 bp, Homo sapiens
catgagtcggtttcttggaaaaccatctggaatgaacacccataggagcatcagcgaaaacgacagggcctcggctgattcacaggttctcgcacagctcagcagagctgccaagctgggca

SEQ ID NO: 432834 - DNA, 122 bp, Homo sapiens
agggcagcaactccattagaacgtggatgttgataggaagcgtactttgaatggcctgcccggtcttgcctggaatctcaggtgtgatttttattggaagtgacaacaggtaaggtgcagga

SEQ ID NO: 432835 - DNA, 122 bp, Homo sapiens
gccccaatccccaccccccacaccaacacaaactacatcttcttttggagggaagaggaacgggagtgtttaggcctgcatgcttcaacccgagtcccacatttctgatcccataatagtca

SEQ ID NO: 432836 - DNA, 122 bp, Homo sapiens
cagggaccctggggagcatacatatcctcaacccctaagcaccctacccagcagtgacagcggctcattccagccttttcacacagcaacagcaaggagtccttgtctgggattttaaaatc

SEQ ID NO: 432837 - DNA, 122 bp, Homo sapiens
gacggcgggatggcgcagggacttgaggcttgagatcccgtccttcagctcaggtcccgtcgcgcttttaccccttcccggtgacctcaacccctttataccgaccccacctctttggagcc

SEQ ID NO: 432838 - DNA, 122 bp, Homo sapiens
tttttgtataaaccgacgaacagctgatgaccgcatgaatgctcacacaaggggaaagggcgccaagccaaggagccggcgtcatccgacgtaacttccgccctttaacgctcctgcggacg

SEQ ID NO: 432839 - DNA, 122 bp, Homo sapiens
actcttacaaggaatttctcatccctgcagtcggcttggccagcagcagccgcggggctgcgccagtgcccgcctctggccaggggttcccgcgcctcgagcagcgccctgggcccttctac

SEQ ID NO: 432840 - DNA, 122 bp, Homo sapiens
gagctactggccaaggccaaatgaaacctcgtgctcctctgctgtggggcggcccggcctcggggctcagaggcgctctgtctacagctgggaagactcgcaggccccaagctcctggccag

SEQ ID NO: 432841 - DNA, 122 bp, Homo sapiens
cccgacgcacggcaagcatttaatctacaagcagggtgccagggagggaggggagcgggccgagccccaaaatagggagtttgcatttaccacgacgcctcgcccgtagtctggcgcctcct

SEQ ID NO: 432842 - DNA, 122 bp, Homo sapiens
gagctgatcagatgctgcaggaatctgagatgcaccaacaggcagcccaactcctcatcacgtcttctcactcgagctagaaataatggtgagtcattctgggcagaagggcagactctggg

SEQ ID NO: 432843 - DNA, 122 bp, Homo sapiens
gcgctcgcactcctcagcccttgggcggtcgatgggactgggagccctggagcagtgggccgcgctccttgagaggctcgggctgcatgggagcccatggaggcgggggaaggctcaggcat

SEQ ID NO: 432844 - DNA, 122 bp, Homo sapiens
gtttgtgtcggcagtgtgagccataggtctcctatattgcactgtaaataaacaatatgtcgctagcattagactcaccatgatggatggtatacctttctcaaccctcaattgtctcatta

SEQ ID NO: 432845 - DNA, 122 bp, Homo sapiens
gaaggctgcttccagtagcctccagggtatccatccctacttcccaccttgacccggagccgatcgagcacgcctctgacatctgcgcaggctgctgtgcctctagcttcctgctctctgac

SEQ ID NO: 432846 - DNA, 122 bp, Homo sapiens
ccagttgggatggaggaaggagagaggagttgtccagaggcagccggaagtgaggccaggcgctaacccaggagcagggcatgccagcctggagtctccctggctgtggcgctgcagtgcgc

SEQ ID NO: 432847 - DNA, 122 bp, Homo sapiens
aagaactctttaatccctgcgttttgtagcgctcgttctctgtaaggtttgcttagtatccgtttcatttcgacttcttttctcgctgtttttctgtcggaattacgatttgttttgtttct

SEQ ID NO: 432848 - DNA, 122 bp, Homo sapiens
gatgtcctcacaaagatctgaatacaaatgctcacccaagttttattcataatagccaaacgcaggaaacagcctaaacatccatcagtagaattggtaaacagttatatactcatataatg

SEQ ID NO: 432849 - DNA, 122 bp, Homo sapiens
ggaacctgggccctctggaaaccccggcaaggtgggctacccagggcccagcggccccctcggagcccgtggcatcccgggaattaaaggcaccaagggcagcccaggaaacatcaaggacc

SEQ ID NO: 432850 - DNA, 122 bp, Homo sapiens
cagccactcaatgcagtatttagactccaggcccccaggccaaagacaaatttccacctccgtgcttctcaaatgtttttatctgaggactccttcatactcttaaaggtcactgagggcca

SEQ ID NO: 432851 - DNA, 122 bp, Homo sapiens
aaaacacgccccccaacccctcccctctgccccgtactcccccaccccgacaatcccccccgcaactttcgaagctctgagcctcggacgccagcctcaggacagcggccagcctgccttcg

SEQ ID NO: 432852 - DNA, 122 bp, Homo sapiens
gtggcctccggcttcctgctttgggatgcctcggaatcgagccggacccgcctttttctgcgctcttcctccacatctgtaggcccaaacggccactgccggagccaggtggagccaggatt

SEQ ID NO: 432853 - DNA, 122 bp, Homo sapiens
gagcatgcacttgaactccatctccttggtgcacatctccagggtgtcctgtggggcacacgctccggtcaggtattagggagagggagaagtttacacagaaatgcccctgagggtgacca

SEQ ID NO: 432854 - DNA, 122 bp, Homo sapiens
ccccctgcccccgaacaagcttgtgagtgcagtgtcacatcccatcgggatggaaatggacggtcgggttaaaagggacgcatgtgtagaccctgcctctgtgcatcaggcctcttttgaga

SEQ ID NO: 432855 - DNA, 122 bp, Homo sapiens
tatattttgcatgaaaagtaagaggtagcataagggtatttaccatacagtgagatggaccgtgtggctataatttatctcacattggcccagtggggaaatgaagcatcctattagcattg

SEQ ID NO: 432856 - DNA, 122 bp, Homo sapiens
agtactgaatgcttcctctactacaccacttcctcccacccaacccaaactcacagacatcggaatgaaggagaatcagggcatcctccactgtacaaggccaacagtaaatggtttaacca

SEQ ID NO: 432857 - DNA, 122 bp, Homo sapiens
gagaagcacatcagcggaggaacacactcaactggctggacgtggagagcaatgcaccatcgtggtgagaggtgacaacatgctagcagccctcacagcctttgctcgctctccgcgcctcc

SEQ ID NO: 432858 - DNA, 122 bp, Homo sapiens
gtaaatcacagagatagattcatacacgagatagtcttgtttgcctatcagatccattcccgttttaccctgctctgtgccccaggtggctcatctcaatggaccacattacccaggagtcc

SEQ ID NO: 432859 - DNA, 122 bp, Homo sapiens
caagaacaatccctctgcctgatgaggacatcaacccattcttgggggtcagctgcagtacggacagctgtgttacctgcatacgtcctagtgttctgtccatggcaccatggctgaagagt

SEQ ID NO: 432860 - DNA, 122 bp, Homo sapiens
gagctatagggtcactggggccaggactcttttcctacatatgcagcgcagtgacttgtacgtatttggcaaataatttagggaatgtgaacttgattttcctcacatttctcaatcttggt

SEQ ID NO: 432861 - DNA, 122 bp, Homo sapiens
gtcctgagcctccctgtgacgctctggccttctctgtacctcagagtgcagaaccacagacggcttcggctgtgcctagggcaacagccaacctaggagccagcgggctttcggggaaaaaa

SEQ ID NO: 432862 - DNA, 122 bp, Homo sapiens
tttggggagcccactgtgggggatcttgggcatggcaggctgcatgtcggagccttgccccgcggggaggcagctgaggccccgcgagaatttgagcgcggcgtgggcgggtctgcagtgct

SEQ ID NO: 432863 - DNA, 122 bp, Homo sapiens
ctcggccggaagtgtctccggccttttcggaagtcactttcacctaaccttacagactaccgctccgccggaagtgacgcagggcagcggcgtcgcgggggcggggctcgggaaagacccgt

SEQ ID NO: 432864 - DNA, 122 bp, Homo sapiens
cacctacaatgcaggaatctgcaggaattcttagggggcctgagccctggggtattggaccgattgtatgggcaccctgccacatgtctggctgtcttcaggtgagaagccccttcatggca

SEQ ID NO: 432865 - DNA, 122 bp, Homo sapiens
cgagtagcctcccgcagcccacacctgccctggcagttcgcaccctagcagctccagcttcggctgctgcagaagcccgcacttccagtcccggccaatgccagctgcagtggcgcaccctg

SEQ ID NO: 432866 - DNA, 122 bp, Homo sapiens
ccacaggacaccgctggactccccgggcgagcgctgcccaggccggggggaggtggcgagcgctgctctgggacctgccgccccgccagtcgcattcgctttcgcttttgctttggcccccg

SEQ ID NO: 432867 - DNA, 122 bp, Homo sapiens
ggagtcatagccagtggatccgctggtgctgaacgaatggaagcgcggggcgggcctgcgcgcgcggccgccctgcccacgatgctgtcgcccccgcgacctgtagggccttcgctggcccc

SEQ ID NO: 432868 - DNA, 122 bp, Homo sapiens
ctctcctccccacagggagtcccagttccccaaatgccaaagcagccagggactgagatccgcccttcaaacccactcttcttctctctcccgtctctctgtgtctttcctctttcctctgc

SEQ ID NO: 432869 - DNA, 122 bp, Homo sapiens
aatctctttcttctctgtgcccccaagtggcagtgctgctcctgtcccattgcaagacgtcgagacaggctggtaaggccagctctgaagctgggctctgacgtccaaggcgccaaggaggc

SEQ ID NO: 432870 - DNA, 122 bp, Homo sapiens
ttcgttgttactgccacaatgtccaccaggtggtgctgttccacttctaaccgaatgaatcgcaaccgagtagggaactttatgcatgattcataagtaggcgcggcccgcttgcatccggg

SEQ ID NO: 432871 - DNA, 122 bp, Homo sapiens
gccccagccctacctgagcgctccaggtgagaaccttggatcgcgcgcgcagggtgggggcgccgtccgggccaagcctggctgtcgcgcggcttctctctgagtggtcggcgaggctgctg

SEQ ID NO: 432872 - DNA, 122 bp, Homo sapiens
cttcctccggccgaccgacaccagctgcagagaaagctgctcagaaccactgtgacccagcgtctaaaatccactcattcattcattcatccattcattcctgccacagttccatgactttt

SEQ ID NO: 432873 - DNA, 122 bp, Homo sapiens
cttggagggcgggacacggctctggagatgagggagaggacgggccgtgccgaccggcaccgcggtgttcctgagcagtggcaccgtggctgttgctgaattttattattgttaattaattt

SEQ ID NO: 432874 - DNA, 122 bp, Homo sapiens
gccaccgagccaggagagtgatcaagaaccagcgcactgtggcctgatgctgtaaccaggcggggacccgggcggtggctactgcacggaggccgactccgggtcggctagggcagggttgg

SEQ ID NO: 432875 - DNA, 122 bp, Homo sapiens
cactctccctttcaccatgtgtatcttctccagcgcaaacagaccccagcacccgaagcgcgactgacggtcccaaaggctccacatacccagcagattggctcctcgctccttccgaagac

SEQ ID NO: 432876 - DNA, 122 bp, Homo sapiens
atggacttcttaatgctatatgtcacaaacctgtatgcatgtaagaatcttttatttcctcgtattccagtgttttaaacatcctgtcacccatcagggacttgtccttcatatgtatttct

SEQ ID NO: 432877 - DNA, 122 bp, Homo sapiens
ggtacatggtgctcccggcttaactgcaccctgcatggctccaagggctggccaggctttcgtgtcgcaggttcccgctaagtgcaggattcagatcttaccatggttctttttaatagtga

SEQ ID NO: 432878 - DNA, 122 bp, Homo sapiens
gacggtgacgcccgagaggagaagccggctgattccagtctgggaccgaggggggtggaacgaggcctcagaacagcctcgttttcacgctgcccatgtcacacacgagcatggaaacgtac

SEQ ID NO: 432879 - DNA, 122 bp, Homo sapiens
tccccttgggctctcactgcagcccatatgtctgtcattgtcagacctcttcacctcaaccgcctccttcttcctcccttccctaacgtacaaggaacctgaaaatcatattaatttaagat

SEQ ID NO: 432880 - DNA, 122 bp, Homo sapiens
ggacaagtccataggccagagtcatccagcccagatgactcactctcacctgccctctcccgctcccctgacccgttgttttgaggcttttatgtgtataactcatagaactgcacagcttg

SEQ ID NO: 432881 - DNA, 122 bp, Homo sapiens
aggagggtgagcacgtcctcagagggcagacccagcgaggcgtcgtggcagctgcggccgcggagacgccggctccgcctcttgcacacgccccctcgcctgaggccccgccccgcccgcga

SEQ ID NO: 432882 - DNA, 122 bp, Homo sapiens
taccccatgatagactacaagacaggaagctccgtatgacacagggacattgggtggtcacggcaagcagtaaccacatcagtgattggaattcctggcacagtcaggcttaggaaatatta

SEQ ID NO: 432883 - DNA, 122 bp, Homo sapiens
cgcggcgcgcccagtaccagcggctggggcccgtacgacccccgaccccggcctgtggcgcgtcccctcacccggagtccccagcccaacttggcgaccacagtggcagtgctcacgctccc

SEQ ID NO: 432884 - DNA, 122 bp, Homo sapiens
gtgcctgccacgtgacctctctgtaccccagttcctgtcaaaaaagaggagagggctctgcgatgtgagatgtgtggcccatcaggggctctgaggctgcttgccctcccgtgtggacagga

SEQ ID NO: 432885 - DNA, 122 bp, Homo sapiens
cctgctggcatggctgggcatccccaacgtcctgctggaggttgtgccagacgtaccccccgagtactactcctgccggttcagagtgaacaagctgccacggtaaggcaggggccctgcca

SEQ ID NO: 432886 - DNA, 122 bp, Homo sapiens
gaaaggcgaggacaagctgaggcgaagccggtgggggcgggaggcgctccccgggaacaccgtggggctgcgaatgatggagttgtcgtgtagagaggagggtgctgcctcgagagaggagg

SEQ ID NO: 432887 - DNA, 122 bp, Homo sapiens
gttttaaaggaaacgaaccatcattggcccacataaccgtgaggtaatgtgagcttcagacgtggctggatctagagcccaaatgatgtgaccaggacgtagtttctgtccttctctcctcc

SEQ ID NO: 432888 - DNA, 122 bp, Homo sapiens
ccgcggacgccccaacctccccggccgaatggatggtggtgcgcgcgcgtcctactccggcggtgccggccttttctgttgccaaaactagacccaaacctctgcatgggattcgtctttgg

SEQ ID NO: 432889 - DNA, 122 bp, Homo sapiens
gtgaaggacacttggaaagttaccaggccatttctctcctgggcgcccgcggccctagaacgccggcctcaccggcagacgcgcgccctcctcccagatgcgcaggtgaccccggcgggcgg

SEQ ID NO: 432890 - DNA, 122 bp, Homo sapiens
tttggatttcctagttacttaggagtcagtctggatagctctctctctctttagctcactcgctggttctgtcttctctatcagaatagaggctgccagaccagctgagcattgtctgtgtt

SEQ ID NO: 432891 - DNA, 122 bp, Homo sapiens
ttatatacaagggactgtgccctggggccctgaggggctgcttttggctgttatctatcacgacaggctccagctgtgcatctctacctccagctgggcccgagatacaccgcctctccagc

SEQ ID NO: 432892 - DNA, 122 bp, Homo sapiens
ggctccccggggcgtcgggatgctgggtggggggccccactgtcaagaaccagtttagtgcgactgggaaatctggacacttgctggttctagggagaggaaggtggaattaggaattccct

SEQ ID NO: 432893 - DNA, 122 bp, Homo sapiens
ctggagtatgtcactggttttaagactaggttgaaaaaggcagatgggtccctttctgtacgaaactgagatttttactgacatgcagatgtgctttagagttaatgtttctacaaaaagtt

SEQ ID NO: 432894 - DNA, 122 bp, Homo sapiens
gatgccaatcaaagcatcaacttcaaattgtgtctgaaagccccgccgccgagcggagggcggccgccgcagtcggcgcgcgattgcggatccgggcgcagccgggagccgggcgcctgcga

SEQ ID NO: 432895 - DNA, 122 bp, Homo sapiens
tgcggggctctacttttctcactatgcgggttgggggagtgaggggtgcagaggcccacacggctggtccaagggctggcaacccaatccagaaagagaaaaccttcagaacatgcatggca

SEQ ID NO: 432896 - DNA, 122 bp, Homo sapiens
ccagatcctcccaagctgaggctaacctgcccttcacttcctacattattgctacatctacgcagcttctgactttccaaagtttcctttccttttctagtcccaaacttatctctcaggtt

SEQ ID NO: 432897 - DNA, 122 bp, Homo sapiens
catcctcctctcccaaacccagtgtggacaccagctggaggcgctcaatgttctccaccacgttagccagctgccagttgggccggaagctcccaggacggaagggttctttgcagagtggg

SEQ ID NO: 432898 - DNA, 122 bp, Homo sapiens
ccccccgtttccctttgtttcattgacttttgtgaatggaaccccagggctgggcacgcccgccaatccggagagtcgtccggcctggccggggggcggagtttcccagccgcgggggccaa

SEQ ID NO: 432899 - DNA, 122 bp, Homo sapiens
caagcacgatgccactgcctcatcatccagtgctgctgccactgtgagggccatgagcagcgtgggcatccagaccatcagtgactgctccgtgcagacggagcctgaccagctgcccaggg

SEQ ID NO: 432900 - DNA, 122 bp, Homo sapiens
atgtctgactcctgcataccaaggtgttctgtatcaagggctttaaaacaatgcctgtagcgtaattaacctctcacaaagatgcttatctaacctccccagcagtcatgggtttcagcaag

SEQ ID NO: 432901 - DNA, 122 bp, Homo sapiens
gtgctaattattaggactaatttatttaattagaattttggtttctcacgattattattgcggtaatgtgggtttttctgtggacatgagccaagtgaatgtaatctccaagagtgtcatgc

SEQ ID NO: 432902 - DNA, 122 bp, Homo sapiens
tttaatacccttattaaagaaaccggatgtgaggcggcgcagcggcggtcaggtgagcgacgcgggagcggtcagcaggtggcgaacccacggccaggcttccgtggcaagcagccctagag

SEQ ID NO: 432903 - DNA, 122 bp, Homo sapiens
tccttgcttaacacatcactgtgcacgtacactagtgcacctaccagataattgcctagccgaggcatggtagtaaaatctatgggtctgcatatggggctggtagacactgtcaaaatgtt

SEQ ID NO: 432904 - DNA, 122 bp, Homo sapiens
cgccccttctcctccccaccccttcggcgcgcgccttcccgccccccgcgccgccccagccgcgagcgccctggacacccactccgcagccaggctccggagcccgcccccacccacccgcc

SEQ ID NO: 432905 - DNA, 122 bp, Homo sapiens
acggcgcccggcctcgccgctccggtcgcgccgtcccccgcagccgtccccacccctcttcggccccacctcgctgaccggatcccgtccggcttcccgtccgaacgccccgagtctcactt

SEQ ID NO: 432906 - DNA, 122 bp, Homo sapiens
ttccacctgctcggcctctggaaggtgccccgggctttcaggaggagggaggtggagctgcggggcagggctgacaccagctgcaatatggcgtccagggtgagtacccagtgaggctgtgg

SEQ ID NO: 432907 - DNA, 122 bp, Homo sapiens
gattgccacatcagtcttccccctcctcctgctcgccttctggccccgaggctccttcgccgggttttacaaggagccccaacttggaagcaatatttgtaatagccccggacgtcctcaag

SEQ ID NO: 432908 - DNA, 122 bp, Homo sapiens
ttcacaactcccaagagagctgcagcaggcccagcagagcccactcctgccccttccccccggctgaggtcgcaggcccacgaaggtcgtcattacggatttattaaccccctttccctggc

SEQ ID NO: 432909 - DNA, 122 bp, Homo sapiens
ggcgccttgctaacctgggtttgcactgtgtctgctccctcgttgctatcaaggggattccgtttcatctgacagttctactgttttgaagccaatcttttggatcaactaaaggtaccccc

SEQ ID NO: 432910 - DNA, 122 bp, Homo sapiens
tgtgtgtacagccactgcgacattgccgctggtatcttcctctccctcccaggatagaagcgacaatgtcacaacagggtgtacatcccctgcgatattgggggtgatatcttcctctcccc

SEQ ID NO: 432911 - DNA, 122 bp, Homo sapiens
atatgacttttcttaaggaagtcgccaaaactatgtaacttcaggctgtgcagagttgaccgcggccaggtgttcctgcccctgcaggtctctcctgggggagcctcagatggtccggcagt

SEQ ID NO: 432912 - DNA, 122 bp, Homo sapiens
tagaccctaacatggagccatctggcaaaaaagggatgctttctgcagtctcagccccaccgtcacagagcaggacaaggaaaagtaggcttagagctgagagacaatggcttcataactgg

SEQ ID NO: 432913 - DNA, 122 bp, Homo sapiens
gccacgtctgggaagtgaggagcccctccgcctggcagccgccccatccgggaagtgaggcgtgtctccacccagcagccgccctgtccaggaggtgggggtcagcccctgcccggccagct

SEQ ID NO: 432914 - DNA, 122 bp, Homo sapiens
gagaccgtgcgagcccccggccagcccagccaagcagcaacacaatagcacccctcgctgcgagcgctgggccgcacttccccctcggatgtataatagcaccaaccggatatttttagatg

SEQ ID NO: 432915 - DNA, 122 bp, Homo sapiens
acttctgtttagtgatactgtaggagaagcaaactaaattcatgtgttcaatctgccacacgtaggatccagacagcctcattttacgaattttctacagtcaataaaaatgcttcactttt

SEQ ID NO: 432916 - DNA, 122 bp, Homo sapiens
acagagggggaactcaaggccttcatgacagcgcccggcggcaagaagacgcccgccatgcgcaaggtgctctacccctgccgcttctgcaaccaggtgtttgccttctcgggggtcttgcg

SEQ ID NO: 432917 - DNA, 122 bp, Homo sapiens
ctcaacttcctcagggcaaaagcactgcagtctgaggtgaatctggccgctggggaggggcggtagtcggccccagcagcagaggaagcaacgctcagctccctcctccacccaccccgtac

SEQ ID NO: 432918 - DNA, 122 bp, Homo sapiens
attttggtttcatgcggccatgccaagtgcagacagaggccccagctgcactttcagtcacgtgacctggtgactcaggccctttctggttcctgcttgtcagggtatgggaaaggtgagaa

SEQ ID NO: 432919 - DNA, 122 bp, Homo sapiens
cggagcctggggctggcggctttggaactgctcaggaggcggccaggctccctccagggtcgccccgagcggccgagctgtcctttccctgggcttcccggaactgagttccaggagagggg

SEQ ID NO: 432920 - DNA, 122 bp, Homo sapiens
taatgaaaaagcactttggaaaatactgcagagagtaactgatgctttgagttttacaagcgtgtaatacacacatttttcctcttaagtcctgatgccattctagcacaccccaaagacac

SEQ ID NO: 432921 - DNA, 122 bp, Homo sapiens
gacagtgcgcccggcgcctgagttaccatgcggccgttactagggcaatttgcaaaggcccgcctagaccggctttccattggtggaagcgggaacacctccgctctccataggctcacggc

SEQ ID NO: 432922 - DNA, 122 bp, Homo sapiens
aaataaataaataaaaaataaagagcagtttttagaataaaatctagagccaacttgaggcgacagtatagactcttttgtagattgctcacagcaggtgcccttaagaccctgggtctgtg

SEQ ID NO: 432923 - DNA, 122 bp, Homo sapiens
tccggatgcccgcgagacaggacggtgttacccgctggacaaaggggccgagggctgctccgcgggagcccaggagcctcccagggccagccgtgcagaaaaagccagccagaggctggcag

SEQ ID NO: 432924 - DNA, 122 bp, Homo sapiens
cagacggcgagattagcgcagggatgtaagaaacaagaccaaagaagactccgcggcagacggcacactaggccttcataggggcgtgcgctggacaggacctcgccagttaccgaaagaat

SEQ ID NO: 432925 - DNA, 122 bp, Homo sapiens
ccaggccctattctcctgcctcactttcattaagacaggtatagccagcaaggtggcttacgcctgtaatcccagcactttgggaggccaaggcgggcagatcacctgaggtcgggagtttg

SEQ ID NO: 432926 - DNA, 122 bp, Homo sapiens
atgatcccacagacaaacccaaatgtgatgaggcaataaaacatggcaataacatgtcatcgccagactactcacagctgattagcaaaagcagctaacctcatcctggctgtgacctccat

SEQ ID NO: 432927 - DNA, 122 bp, Homo sapiens
gcacactttgccggggcaggtccgcgccagcgccgtcgccagaagagcctcacaaagacgcggctgccaccgtttggcgtctttgaagactgttcagcaggtctgaggatgagctgctctga

SEQ ID NO: 432928 - DNA, 122 bp, Homo sapiens
acacctagagacacatgtacacgcatgggcgcacgtgcgtctagacacacagcagcagaacgatggtggaattcggatccaggaatgtcggcgcatgctctgtgcaacctgggataccaggg

SEQ ID NO: 432929 - DNA, 122 bp, Homo sapiens
aaggtgtgtgcccattttccggagtgcagccaacacaggggagcagtgatgagtgctcaccgtctctcttggccttactgacctccagcaccctatctgaaaatagcagcccacataggaac

SEQ ID NO: 432930 - DNA, 122 bp, Homo sapiens
gtcgattcttggggagaagcgctgcggaaaggggcgactccgatgcagatggccctgtcccggcgccccaggtcgtcgcgcgcgcagctgcggtagtcactgcgcctccccgcccccactcc

SEQ ID NO: 432931 - DNA, 122 bp, Homo sapiens
tgcgcagggctggacctgggctggatccttaggctccgaagagatgggccccatccttgtcgtcgtcgcgggcgccgtcagaggggcggcggcagcggccggcgctggcagtggctgggcgc

SEQ ID NO: 432932 - DNA, 122 bp, Homo sapiens
aaagctgtcaggtccctggacatgcccaggggatgctgcctgctttaccaatgaagaatccgaggctcaggaaggtcaccaggaagtcacggacaggactgggattcagagccagggctgcc

SEQ ID NO: 432933 - DNA, 122 bp, Homo sapiens
gcaaagtgccttttagcttgcgcgcctgcctctgagggccggggcgagagagacggctggcgtcggctgcaacggctgcaacgagtctgaaggcgctggcaagaaaatcccaaggaaagctc

SEQ ID NO: 432934 - DNA, 122 bp, Homo sapiens
gactcattttaatgctgacacacagagtaacaatcccatggcccagcactacgtcaactccggctcttcccaaagctggggcttgctctaggttctgcccttgcaaagataaacccttactc

SEQ ID NO: 432935 - DNA, 122 bp, Homo sapiens
acaagggagttgggagaggagagagggactgccgaatcgattgcaacttctgcaaagtctcgtacaatccaaagcacgcaaggcaaaaccagagcgaatctgagaaccagccagcccgggtt

SEQ ID NO: 432936 - DNA, 122 bp, Homo sapiens
gatacaagacaaaggggcagtgtaaggaatgtgagccatctccaacggtaggtaaggtctcgtgggtcacgtgtccactggacggggggcccttccctgcctggcagccgaggcagagagag

SEQ ID NO: 432937 - DNA, 122 bp, Homo sapiens
agatccaacccagtccaaatctgctgtggctgtatagtgtgggacactggctcagctggccggatctggtgttaaatccctgctctctgcactggcttatccttcccaaatactccatgttt

SEQ ID NO: 432938 - DNA, 122 bp, Homo sapiens
ccgcgagaggcggccggggtgggtcctggagttttgttctcaggttggcgtggccgcccgcgcggagccttctgcttggttatatttgcgttcctcgggccggccccgcgtgctgagtggtg

SEQ ID NO: 432939 - DNA, 122 bp, Homo sapiens
aggcctggccgctcccgtgcggagagaccatctcttcagggcaatgtccaggccgagcagcgtctccccgcggcagccggctcctggcggtggcggaggcggcggcccctcgccttgtggcc

SEQ ID NO: 432940 - DNA, 122 bp, Homo sapiens
cgggacccgggacccagcttggcgacggcgatctcgacgcgggcccccaggatctcccggcgccccacctctggagcagcccctgccgccagcgtcaggtccaccccggaatcccagggact

SEQ ID NO: 432941 - DNA, 122 bp, Homo sapiens
aatttgcttccctaggctccgcctcccgacgcgtcagcggctgtgcggccggccgcaaagcgccagcactgtcgtaaatactacccacgaccggcggcgccggattccttgcttggcggcag

SEQ ID NO: 432942 - DNA, 122 bp, Homo sapiens
ggggttcctcccggaagaggtgacacctcagttagctcttgaaggagtggacctccaccccggggaagtagcctgggaaggatgtactgaacagagtggacaaacagtacctgccaaggcca

SEQ ID NO: 432943 - DNA, 122 bp, Homo sapiens
ctggtaatttaatttcagcaagacataactatctcaccctttatttccctttagaatgagcgccttggttaatcacataatggacaattgtagctgctaaactcatatccctgtcttttgta

SEQ ID NO: 432944 - DNA, 122 bp, Homo sapiens
gcagctgaatttccttcctcagagcccgcatctgcctaggggctgggaaatgagtactttcgtggctcttagcccagaagaggcagggtggagaaggaaaaggtggcagggtggctgaccct

SEQ ID NO: 432945 - DNA, 122 bp, Homo sapiens
tagattagatggcaatgggctagggagcgtggtgggatcttgtggccattgagaaatccccgggtggtaagacagccaaaataacttttcagaacatttcagaaatgtgttcttaaattgtt

SEQ ID NO: 432946 - DNA, 122 bp, Homo sapiens
ctcactcccacaccccaactcctcctcacagggtcgagcccgctctcatttgcacctccgcgcgaatttggaacggatttatgaatcgtcctcactgcggtgctgtcttctcctgggaagga

SEQ ID NO: 432947 - DNA, 122 bp, Homo sapiens
gcttttcgcctgcaggacagaggggcctggagtggcctggccctgccgtgggcagcatggcgtgggcatgcaggtgaggcctgcctgaggtgcccaaccccctttctgccagctggggcttc

SEQ ID NO: 432948 - DNA, 122 bp, Homo sapiens
cagctgcagccactgacaactctgccacccctagcagcatagccacagcatacttgtacacgccttgaggacagacttccccagcccaccccaaacaccgctccagctacctgagcacactg

SEQ ID NO: 432949 - DNA, 122 bp, Homo sapiens
gctgggacaagacactgtactgccctctgctgggaaggggttttaataaacagaccctggcgcttgtgatgtaaatccccttgtggagtatttgccctctgtgtggctgtggcagtggacat

SEQ ID NO: 432950 - DNA, 122 bp, Homo sapiens
tcaccgctcactgacagccagcacgtccaggacgttggagaagaggatgtgcgcctcggacgggtgcaggatcttccttatccgctcgttctccatgaagtgggacacgagcaggttcagac

SEQ ID NO: 432951 - DNA, 122 bp, Homo sapiens
atatagaaaggctgagtattcagataatcatgaggctcaagttgaatttttttttttaatcgggggaaaccaaaatatatttggcaaaaaggaaattgtgggtatcttttattttccactgt

SEQ ID NO: 432952 - DNA, 122 bp, Homo sapiens
gaacaagagaatgaagggagcagggaacaagcagctctccaaaatgttgtgaagttttaacgaggctgagcttctgtttcatataagatgataaaagtactgtgttaggagaagaaacaggc

SEQ ID NO: 432953 - DNA, 122 bp, Homo sapiens
gccagccggtggagttgttactcgtaccacgcggttgcttggcaacgccgccggaagtgacgccagccgtagccgaggaacaagggaggtgctgcagttggcggtcgggctagagaagagag

SEQ ID NO: 432954 - DNA, 122 bp, Homo sapiens
tctttgtaaacatcaacgttgtaagtgcaataaatcactggaaacaagaggcacctctcgcggtggagaacaggaacggctttcgcaagcactatcggaaagaagcagcgacatcaataaag

SEQ ID NO: 432955 - DNA, 122 bp, Homo sapiens
gccggtcggagcggcgtcaggccctggtgggagacgcatccgacctggaggagcaggccccgctcgggaggcgaaagagcggagggtccagcgcctcccgcggctcgaggcccggaggagcc

SEQ ID NO: 432956 - DNA, 122 bp, Homo sapiens
agctccgagatcagcaaccctagctgtcttgttctcctctgctggctccccagatcccatcgtagcacaggacatcgtactcaaaggtgctttatagatatttgttgaattggtgaaccatg

SEQ ID NO: 432957 - DNA, 122 bp, Homo sapiens
ggagaagcagtgtcacctttccaaaatttaactttccagcaacttcaggaattcagcagtcgtgtagagagagggatgcctgcagttcgatttttgtcccttcccaccacccttttcacctg

SEQ ID NO: 432958 - DNA, 122 bp, Homo sapiens
ttggtgcttggcacatcataaacaactccataaatgctcgcttttactgtcgtggatacacggaggtgggagacccaattgggttcccgcccatgttattggcccccacggctatatggtct

SEQ ID NO: 432959 - DNA, 122 bp, Homo sapiens
cgggcccaaagcacaatcacaaagtgcgggacctttgggcggtgctgggcggcctggccccgcagccactgggccggttggtcccgcaggactctgctccgtggagcttttgtccttgggcc

SEQ ID NO: 432960 - DNA, 122 bp, Homo sapiens
agagctgggctctgggccggagctccacaggggcaggggctctgcctgtccctcatgcagcgccctcggcgcccaggacgagtgagcaatggacgcagatatggcccgccctgacccacact

SEQ ID NO: 432961 - DNA, 122 bp, Homo sapiens
cgccgtcgtcccccaccccccgaccaccgcacctacacgccggcccggactcgggcttcacgcagggaaggatacttaaagccagcattttggattggtagtcaaaggctaccacctcgccc

SEQ ID NO: 432962 - DNA, 122 bp, Homo sapiens
gataagtgcctgcaggtctcattgttgttcacacccatcagaagtgcaatcaggacccctcgggccttgttcacctcacacatcacgaagttgattttggcaacggaaggatgtgcatcctc

SEQ ID NO: 432963 - DNA, 122 bp, Homo sapiens
ggagcctggagagaaggcgctgggctgcgagggcgcgagggcgcgagggcagggggcaaccggaccccgcccgcacccatggcgcccgtcgccgtctgggccgcgctggccgtcggactgga

SEQ ID NO: 432964 - DNA, 122 bp, Homo sapiens
ggggaggggtgcagcgcggagctacgggtcgccccgaggctcagccgtggggaccgcggacgcgcttagcctaggtctggcctcattcatttcactcgcgcgggcttctgggccaggcggcc

SEQ ID NO: 432965 - DNA, 122 bp, Homo sapiens
tgctaaacgtactgcagtgtgctataattaaatatgaaaacctaaatttatctctatgttcggttgtcattaatttaacagggagtgcacatgttctaatctaatggttgattttttttctc

SEQ ID NO: 432966 - DNA, 122 bp, Homo sapiens
tcagagcaggccagcacagctccttggagcaggaagacccttctggcagacgccaggccgcggcgtcttgctgcctctgggcaggagactgaagttaaaaacagacttgcaaggctcggcca

SEQ ID NO: 432967 - DNA, 122 bp, Homo sapiens
tgaccttgtgatccgcctgcctcggcctcccaaagtgctgggattataggcgtgagccaccgcacccagctgagtctgtattttattaactgcaatggcatctatatatatttggaaaatac

SEQ ID NO: 432968 - DNA, 122 bp, Homo sapiens
tgtggatgcacattatgagacattttcattgcaaatttgtttgcaacagaaccctgtcaacgcccacactacaagggaattttgtgacatgctggtctgatgctcctctgagccccagaagc

SEQ ID NO: 432969 - DNA, 122 bp, Homo sapiens
ggggagctgggagcaccgggtccacccactacacagcggctcatccagcaccgaagggctcgccccacccctgggggcagccaggccctgctgcccggtcaaggggccctgctgtgactggg

SEQ ID NO: 432970 - DNA, 122 bp, Homo sapiens
gggccctccaccccgccaccttgagtggtggaaggagcgtgttgggggaggtttctcagccgctatgctggttaaggagggatgcaaaattgtgttacctgccctacgctgttgcctataac

SEQ ID NO: 432971 - DNA, 122 bp, Homo sapiens
ccttgggttacccctacctaaccaacagcaaggaagaaaaaatttcaaattcatgagttacggtctagtcctctagaggctaaaggaggcacagggtaggatggaagattttcttccataat

SEQ ID NO: 432972 - DNA, 122 bp, Homo sapiens
ttccccgccctaagtcagcctcttcacccagtgagcacaaaactgtattgcccagactcccgggccccgaacgccatacctggcttccgcttccggtggcttctcgttgtgccccgcccgca

SEQ ID NO: 432973 - DNA, 122 bp, Homo sapiens
tttagggagctcagtatgctgcatctctagccattgtattacctagcaatgaccttaaagcgaactactatgcagagaatgtggccttaaggtgccctaagggtctctgagcaggttacaga

SEQ ID NO: 432974 - DNA, 122 bp, Homo sapiens
ctctgcgggagtccatgcagcagcaccaggaggaccccaagcgcacagttccttgaggaccggactcgatttcctcgcatcccttcctacaggggtcccagcctggccgcaggacacggcac

SEQ ID NO: 432975 - DNA, 122 bp, Homo sapiens
aagacacggagacctgccatcatggccaacgaccccatgaagagggaacggtggtccatgcgcgggacccagcctgtaatcaagcccagcaggctccggcctgccgcaccaaggagcccgcc

SEQ ID NO: 432976 - DNA, 122 bp, Homo sapiens
cctttcattgactgcagtgacgtagatagcgaatacgaccttcttagagaacaagcgtcccgatcccggtcccgatcccggtcccggtcccaaacaaatgacaattatgagggtgatctgac

SEQ ID NO: 432977 - DNA, 122 bp, Homo sapiens
ccggggagctgctgactgagccccgggtccagggtgggagttacgggggcaaggccccaccgtgcaccggggacaccagcgcatttctcgactccgaagccctgtgcggagtctcctggaac

SEQ ID NO: 432978 - DNA, 122 bp, Homo sapiens
cagaggccagtgggaggggcgcggggggcccccggagcgagcatgtgacccgaggccgcgcgctcggaaccagccccggcccgacgcccttggctggcacctgcttctcccccaccggcgtc

SEQ ID NO: 432979 - DNA, 122 bp, Homo sapiens
ctggggcgttccagggggtccgcaggtcaactctaagtttcaataaaaatggggcacacgcgcacaccaccctgcgctagggagctggggcggggctgcgggtagcacacactttctcgctg

SEQ ID NO: 432980 - DNA, 122 bp, Homo sapiens
cggcctccgttgttcattgcctctttccaccaagtctgagggatgagcttgggccgacttcgtctctgtcttctccgagacatggccgtcgcttttttttcattgtcattattaatgatttg

SEQ ID NO: 432981 - DNA, 122 bp, Homo sapiens
gagggcgcggtgggacccgtcgcagggccagctgctccggcaggtgcccccaaagggtcccgcaggtgatcctcggggactgagcgcccatcgcccttcctacgcactcagatccgccgagc

SEQ ID NO: 432982 - DNA, 122 bp, Homo sapiens
cctgcgattacaggcgcgtgctgccacgcctgactggttttcgtacttttttggtggagacggggtttcgctgtgttggccgggctggtctccagctcctaaccgcgagtgatccgccagcc

SEQ ID NO: 432983 - DNA, 122 bp, Homo sapiens
ctcaaaaaaaaaaacaactatataccccctaggtgtatctttaaagtttttcatcattagcgtagtagtagcaaattatgaaactttcagcataaatactgacatttaaaattaaagctgtt

SEQ ID NO: 432984 - DNA, 122 bp, Homo sapiens
gccgtcagagaacttgaaagccttttgtctcagagaatttattgtcctgacagcagaggccgatggtgggatcgactggcccttaatttacaccagcacttgaagcgcctggaaccggtact

SEQ ID NO: 432985 - DNA, 122 bp, Homo sapiens
tccatccagttagcgacgcgccccccgaccgggcgggtggccgggcttgggcctcagctccgaataatgagaacaattgtctccccgcctggcatagccctccgccgctcctccgggttcgc

SEQ ID NO: 432986 - DNA, 122 bp, Homo sapiens
gtcaagtggaggcggagagagactcgagaggcctggaacaacgtcacagtgtggggctctcgctacgtggtggggcagaccccagtctacgtgccctatgagatccgagtccaggctgaaaa

SEQ ID NO: 432987 - DNA, 122 bp, Homo sapiens
ggtcgagggtaaagcaactgcactgggcactcagtgaatgcgagcttccctccagcctggcggtggggcataaactccgctccatcttcttgggcaggtttagagcaagggattcggaaatg

SEQ ID NO: 432988 - DNA, 122 bp, Homo sapiens
cgggggcagcgccggcggctgctaggctgactccgccctgccggggcaagccagggagagcgggacctcgcacgcgggctctgccaccgcctgaggtcatacccaggcactgggtgttggcg

SEQ ID NO: 432989 - DNA, 122 bp, Homo sapiens
cggcaggcctgtgggctgcgaggaggagctttgcctagcttgcaggcagcgcagggcagacggcggcaggagaagcaagatgaatgcaggctcagatcctgtggtcatcgtctcggcggcgc

SEQ ID NO: 432990 - DNA, 122 bp, Homo sapiens
ctactgcctttggaggaaagaggagcccggagacccgagcccagaaactggggcactgcccggctcctgggaggccacagaacagtggcggcccctgcaccccaggcctgcccaggcctctc

SEQ ID NO: 432991 - DNA, 122 bp, Homo sapiens
cccactctgccgcacccaaactctgcagacccccagcttccctgggcggccgcgacctcccgcctccccgtctgccgctgagggcccgcggcgtacacaataggcttcccagaagggttaag

SEQ ID NO: 432992 - DNA, 122 bp, Homo sapiens
tggtagacgacttcagcctctgtcctttaattttaaagtttatgccccacttgtacccctcgtcttttggtgatttagagattttcaaagcctgctctgacacagactcttccttggattgc

SEQ ID NO: 432993 - DNA, 122 bp, Homo sapiens
cctcctgtcagtgggtaatgaaggcagcttcagagcagacaaatagatccaggtaggaggcgagaagagacaagtgaggaggaaggctccggtcctttgcccgctccgagccagttctgctc

SEQ ID NO: 432994 - DNA, 122 bp, Homo sapiens
ctacttcacaaattcaaactcattttaaggttaataaaccaacacagaaatcctaaatttcgaatataatttcctgaaacaatgaaagtattgtaggaatatgacaaaattaaaggggtaac

SEQ ID NO: 432995 - DNA, 122 bp, Homo sapiens
aaacatactgactccatttagtgaaaataaaaggggatagaacagaaagaggagatcatgcgtatcttaaaataacaacagccatatgacagtttcaggcctgtgtttggagagaatttgca

SEQ ID NO: 432996 - DNA, 122 bp, Homo sapiens
tctgctggacggaggacagccgccccggccacaggttctcggcgtgcatggtggcgtgcccgctgaagcagtgatcttcatagttgagcgtcgactccatctggtctcgctccctgtggctc

SEQ ID NO: 432997 - DNA, 122 bp, Homo sapiens
gtggaagacatttcaaaagaatgaatggtaaactcatgtgaccagcagggaggacaacatcgaagaaactttcctgcctaaagtcagcctctgtccagagctagtacatggaaggagatact

SEQ ID NO: 432998 - DNA, 122 bp, Homo sapiens
gggcagccagagcttcacatctacctccagccgggacccgcccccgagccgcggggcccacgcccagagccctccgccgtccccagcgcagtgcagcagagcgcgatccagtctggggccgg

SEQ ID NO: 432999 - DNA, 122 bp, Homo sapiens
tgcacggcagccgtgggactggcacaggctcctcggcagcattatgggcagctggtagagcggccacttctgagagccggatgggccttccgaggtcgggccgtgccccgctgggcagcgca

SEQ ID NO: 433000 - DNA, 122 bp, Homo sapiens
tgcatacattatgcaaataggtagaactgcccgaagaatgcctacgctgcgtggtgcggacgaaacgcttcccggggcctttggattggtctgtctagccacctcatttgcatgacgtaata

SEQ ID NO: 433001 - DNA, 122 bp, Homo sapiens
ggcagtcagggctgggcagacgaacgtccatgctgcacaggggcatgcagcccaccgccccgtccaggcacgtgcactggtacttgcagctgctctggaaggactctccgctgcggtacacc

SEQ ID NO: 433002 - DNA, 122 bp, Homo sapiens
ttccccaagcacaggaagactactccaaagataaggagcagccacaaacccgccagacgccggcaacctgacttctgagtgtttcccggcaccgtgaacacaatagacgacacgtgatacgg

SEQ ID NO: 433003 - DNA, 122 bp, Homo sapiens
cggttcgtcccgccttcttccggctctgctctaagggcgggattatccgggtcctggaaacgtcgcggagcttgtttgctgtgcggcgtagcggcccctctctcagacagtcgtctgtgcgc

SEQ ID NO: 433004 - DNA, 122 bp, Homo sapiens
agcaagaccacgaatgcaccgagaggaatgaacaactctggacacaccatctttaagaaccgtaatactcaccgcaagggtctgcaacttcattcttgaagtcagtgaggccaagaacccat

SEQ ID NO: 433005 - DNA, 122 bp, Homo sapiens
ctcattagtgaacaggttggggagtggcagggttatggagaggaggaggcgttccattcccgtagctattctgtatcaaccgctggggtcagaggctctcagctggagtccacccacagaca

SEQ ID NO: 433006 - DNA, 122 bp, Homo sapiens
agggtggaggatggaggcggggaggagatgtaagaataaatggaaaataaaacaaacaatcgttgtattaccacttcctctggggctgggtcatggtttttaacggtgtgcagcgggcacat

SEQ ID NO: 433007 - DNA, 122 bp, Homo sapiens
ccaagtcagcgcattgaaagccgcagacctagtgtctccaggctcccccttccaaacgggcgcggaccttctttcatagcctgtagcggggagccgcgtctccccactgcctccccactccc

SEQ ID NO: 433008 - DNA, 122 bp, Homo sapiens
gcaagtccactggtcctgctcttccggatttattcttcccgccaataggagcacttaccacgttccaagcatcgtcctaggcactgaggatacagcagtgaataaaactgagtgctgggtag

SEQ ID NO: 433009 - DNA, 122 bp, Homo sapiens
ctgcggaaagagcgcggtgagcgctctgaggagttggcttcgtctgcgctgtagactctacggtgtagagtgtggcgctcttgagcgagtgtgctcgagaccagctgtcgtttcctttgctt

SEQ ID NO: 433010 - DNA, 122 bp, Homo sapiens
tccccgctccctcccctagagatgggtgcagaaaccaccgctcaatattcaacgccccctcgttgattcagcaggccccaggccgaaagccaggcaccaggcagagacatcacaaagattgg

SEQ ID NO: 433011 - DNA, 122 bp, Homo sapiens
aggatgtgggtggggccagataagagaataaaagcaggctgcccgagctagcattggcaacgggcttgggtccccttgtgcactgtggaaggtttgttcttttgttgtttgcaataaatctt

SEQ ID NO: 433012 - DNA, 122 bp, Homo sapiens
aaggttcacagtggaacaaatgttagaataaacagcatctcagttgggtagggtggctcacgcctgtaatcccagcactttgggaggccaaggcgggcagattagttgaggtcaggagttaa

SEQ ID NO: 433013 - DNA, 122 bp, Homo sapiens
gccctataatgttgtaggatgcagtgatgaatcttgcttaatcccatctttccccttccccgcccatcctcctgattgcttcccaaaatgaaaatgtggtcatgtcctatcccagctgcaaa

SEQ ID NO: 433014 - DNA, 122 bp, Homo sapiens
gaaaaaccctcccatcagaccagcaattggctcgacgcttgagcccggatgtacggcacgcgtcgcgacctaacccggaaacactgcctcccgaaaaaaaggtaaactctagactgcggaaa

SEQ ID NO: 433015 - DNA, 122 bp, Homo sapiens
ccttagctgcaaaagctccgggcggccaggcagagtgctggcctcggtgggctcacagggcggagaagggggtcgggctgcaggaggaggcgcctggacctccggagcagagtcgggtagcg

SEQ ID NO: 433016 - DNA, 122 bp, Homo sapiens
atcaagtttcgtccttgcatttctagtttaggcgtttctactagaaacgaatgtgtggtgcgttttggttgggcattacttgcaggtgtcttgccgcttaagtttcctggactgagacgttg

SEQ ID NO: 433017 - DNA, 122 bp, Homo sapiens
gcgcccgcgaatggagggcgcgaggctcagggctgtttctccgcggatggcctcgtgggccggctgaggtgcacatgcgcgctggtgcctaacggctctgctgggctaggtgctcctccgag

SEQ ID NO: 433018 - DNA, 122 bp, Homo sapiens
cgttgccgccagcccagtggggagtgaattagcgccctccttcgtcctcggcccttccgacggcacgaggaactcctgtcctgccccacagaccttcggcctccgccgagtgcggtactgga

SEQ ID NO: 433019 - DNA, 122 bp, Homo sapiens
acttgctgcaaatttagaaagaagcacttcctgtccacaatgaaatagaattacacatggcgtaatatgatagaactttctttcctgaatccccatttttaaactcatgtaacgttgagtta

SEQ ID NO: 433020 - DNA, 122 bp, Homo sapiens
tccgggagggtttgggggcacgagtactcggcgcagccggctgctgggttggcatgaccacggatccgccggcaggcgcgaggcgagccagggatccgcgtggggacgcactgcgcggcgga

SEQ ID NO: 433021 - DNA, 122 bp, Homo sapiens
cctttgtgaagagaaaacccttatctaggacatccacagggtagaggttgggtgtgtgtacgggagtgtctgaggcccagtgtgttttttagggttaccccatgtaaagcacttaccgctgt

SEQ ID NO: 433022 - DNA, 122 bp, Homo sapiens
aggcacattgtcaaatacggggtgcgcaaacctcggtgcaaggcaaaaggcgtgtttttacgctgctaagcagaggaggaaactgaggctcaagaggaggaagagaacttgcccaggtcaca

SEQ ID NO: 433023 - DNA, 122 bp, Homo sapiens
cgcttcatccccacagtggagttctttgttgtgaggggagggaatgcaaggagtcatcagcgggggtggcccttggccacttttcagcacctacacagtgcctggcacatagtaggtgccca

SEQ ID NO: 433024 - DNA, 122 bp, Homo sapiens
aaaaaaagccagtgtagtgctggcagtcattaaagatttgctgaattactgacctcttatcgcccacatgccctggggaatctgttagcagtccaccacctcttgtcactaatcaagatgcc

SEQ ID NO: 433025 - DNA, 122 bp, Homo sapiens
aggtctggatcttcttcacaaccacggccctggtggagctggtgcggctgaaggagctggcgcccatgccagagccaaagctggagcccagaccgtagctgaggccggggctcgtgaggccc

SEQ ID NO: 433026 - DNA, 122 bp, Homo sapiens
acacagaggttggtagagccggagggctcgggagagagcgcagtgctgagagggaaggaacgccggaccggctgggtgaggagcccccagaagccgctcttaccgttttatgaaaagataat

SEQ ID NO: 433027 - DNA, 122 bp, Homo sapiens
attttgaaggggacacaaatgttcagatagcagcaactcccaagtccgtatctctcacctcgacctgagctctagactcatacagtcacttgcctacttggcatcttcacctggatgactaa

SEQ ID NO: 433028 - DNA, 122 bp, Homo sapiens
ctcctctggtccaggctgcactgttgaagggatggctcagagctccctgcaggccattgccgtggcagggttgatgtggtcagctctaggtggggtgtggaagaggcctatggttggccacg

SEQ ID NO: 433029 - DNA, 122 bp, Homo sapiens
ccccacccgaccccacccgaccccacccgacccaggccggttccggtcacgccggaagcacgtggccccccaccctgcggcgttgcccgggagaccagggttgtttaccagcaggacagagc

SEQ ID NO: 433030 - DNA, 122 bp, Homo sapiens
accctggccgcatgctaacattcatggaggcagacatgtgtacccagaatcagagggagccggttatcctcagttggagatcccaaaagacttctgcatacagttcctttcgttggatggta

SEQ ID NO: 433031 - DNA, 122 bp, Homo sapiens
tgccctggacaatgaacatcaatgggaagaggatggttctggcttccagctgagggccagcggctggctctgaccctgagctgcccacccccgcaggctgcacaggctcactcactcaccct

SEQ ID NO: 433032 - DNA, 122 bp, Homo sapiens
gaggaatgagcaggttcggggttttaacctacagggcgaccccaaaacccgacagcggagcgtgggaacctgtggcccgcgaggcgcaggcttgaacccgaaagacggagactcacccgaga

SEQ ID NO: 433033 - DNA, 122 bp, Homo sapiens
aagcgtctcggcccttcagctcccctcccaaagatttccagcttgcatatctatctcttacgagccagtaacatttattgaactgccatcttccagccacagtgcaagattctagacacaca

SEQ ID NO: 433034 - DNA, 122 bp, Homo sapiens
tgattatttaacgggtacggagttttaattgggaaagatgacaaagttctggagatgaatcgtgatgatggttacacagcgatgtggctgtacttaatgccactgaagtgtacactttaaaa

SEQ ID NO: 433035 - DNA, 122 bp, Homo sapiens
tagctagatcttggtcacatgagccccaggaggggaccagctgagcattccgatgccaagcggctggtggggcttgagtttcctccaggcctgaaagactggccctctcaaatcacatgcag

SEQ ID NO: 433036 - DNA, 122 bp, Homo sapiens
attgtggagccatcccagaatgaggagtcttaagatggattattgtgctgcttgctcaagcgtgtgcttgactcctggaacctgcctgctccctctcccagaccagctagtttggggctggg

SEQ ID NO: 433037 - DNA, 122 bp, Homo sapiens
ccaccagagcctgggctcagagcgcgtctccccagggctcgagcccttggagggcagcagcgtggccacccctgggccacctgtcgagagggcttcctgctacaactccgcgttgggctgct

SEQ ID NO: 433038 - DNA, 122 bp, Homo sapiens
gcggaacctccggcagctaaggcagccaccctgcctgccatagacaaatggcgactagagcgtcgccactcggggcgtcatcagcctggagatggcgcaagagtgccatctgatgctgggcg

SEQ ID NO: 433039 - DNA, 122 bp, Homo sapiens
gtgaaaaagcaagcagagggagaacaacagaagtacgtccaccataacttggagaatgaccgaattctgttgagggggcttcccaaatgaaaagcctgacttcagttactgggtgggaacag

SEQ ID NO: 433040 - DNA, 122 bp, Homo sapiens
gcggcgcagctagagagaagaacctcggcagacatgccgcccagaggcagctaaggggcccgtgggcagggcctgcgctccggctgcgatgcaggccggctagaggccggcgccgaggaccc

SEQ ID NO: 433041 - DNA, 122 bp, Homo sapiens
aactgccgcagccgggtttgcgaaggatgcgggttttacttagtctcgctgagcctgttccggagcagcgaaaaccatcaggaaagggcgagagaaggaggaaggggattgaatcagcaact

SEQ ID NO: 433042 - DNA, 122 bp, Homo sapiens
ttcaagtttcatcttttgtcactttgattacaatggcagcaatatcctaagaggtttccccgttgcaagtcttacttccttaagtccattctccatgctgcacgctgcaggctcagagcatc

SEQ ID NO: 433043 - DNA, 122 bp, Homo sapiens
tggaaatggaaaagggagatcctcttctcccaaacacacacccacactggggaaactgaacgtctgtttgagggagaagtttccaaacttacctagagctgagtcaatctagagagcctagt

SEQ ID NO: 433044 - DNA, 122 bp, Homo sapiens
tcagtaagtagcagctgctactatttatttcagttacttgtattaagtttggctctctaacgagactccttgaggacaggaaatgtgagtccgtcacaatgctctccagggacctctcatgt

SEQ ID NO: 433045 - DNA, 122 bp, Homo sapiens
ctcctcctacccccttataaactgagttcccacagcgctgctattgcaattaactggctacgctcgggatgcaaccccgggtttccttcctgttctatcccctggcttggatgtcggtgcca

SEQ ID NO: 433046 - DNA, 122 bp, Homo sapiens
tagaatttgaagctggagccccctcattttccaggtaataaaagcaagccttggaaaagtcgaatggcttggcagaagcaccgagaacctcttggtgttttttctgtgtcaccgctctgggt

SEQ ID NO: 433047 - DNA, 122 bp, Homo sapiens
ggaggcttaggaatttggggaagtctggctttgggtctttgcccgagtcgtctggcttgtcgtctggcttgtctggtttgtcgtctgaaaaacaacagaatctcagaggtgattctcagcaa

SEQ ID NO: 433048 - DNA, 122 bp, Homo sapiens
cgcttttagctacagtgagagagattcgagctggacaccaagacctgacaccaggggtaacgactgcgtggcgcaaggagagctctctctcctgcccagagacacaccaggctgtgaaattt

SEQ ID NO: 433049 - DNA, 122 bp, Homo sapiens
agtagtgccacttgtggaagactacgtgcctgtcggaattaggaaccgcacctccccttccgctaagcggtgggaggccaggcgggtgacgcggagcagtggagccatgcagcctgttttac

SEQ ID NO: 433050 - DNA, 122 bp, Homo sapiens
agagctcctccatcccggactccagaccccgcaccctggaccctggcagcggaggggctgcgaaacttacaatctgcgccagagcgagcactaccacctggaggagaacaaggaggctgcgg

SEQ ID NO: 433051 - DNA, 122 bp, Homo sapiens
gcggcttccgccacgtccgtccctcctacatcctcatccctctccaccgaccgcgactggcgcccgcctctacgacccggctgccccgcccagctctgacagcacctgcgaaccgccctgac

SEQ ID NO: 433052 - DNA, 122 bp, Homo sapiens
ggttacatccgctgagaagagggagccggccttgctgtccaggagcgcagcccgccctcccgctggggatcacctccctggttctcctgggcccactctgtggtgattgttgcgctcggcct

SEQ ID NO: 433053 - DNA, 122 bp, Homo sapiens
acagtttagtgccaggacttggccccgcctcccctctcgcccgtcttttctcttttatcccgaaaccagtcgccctaaacacccacagtgtctgcccagttggtgttcagtaaaatggtgca

SEQ ID NO: 433054 - DNA, 122 bp, Homo sapiens
atcggggttctcttccactgcagcggccacccaataactcgttttaaagactgcctcttgcggctgcactagcaaatcgccaaaccccgcatgccccacggccgctgctgagactctgcagc

SEQ ID NO: 433055 - DNA, 122 bp, Homo sapiens
tgggtctgctgaaatctcttttgctttagggaaggtgcctttgcctgtttctgccctaagcggagctgtggatgaggaggggcgctaatgatgaaacagtccgggtgggcttggcaggggga

SEQ ID NO: 433056 - DNA, 122 bp, Homo sapiens
caccaccagcgttgctctgtcatgtgaatgagttttttttaccagcatgccttcctcttccgaaggccttccccatctagggttttttctccccatgacacctcagtgtcgtaggtagcgga

SEQ ID NO: 433057 - DNA, 122 bp, Homo sapiens
ttgaatagactttgcgctaggcaaagacaggttaatcgagggccgcatcgcgaaaacaagcgagtgttgtatgtttgcactgaatccaaatgtctgcattttcctaactaaatcaaagggag

SEQ ID NO: 433058 - DNA, 122 bp, Homo sapiens
aaaacagcaggcggactcccctactggagagaagccggggaagtgcaatggtaagagaagcggcggccacacctgctgctgtgaggatctgagcagggttggttttctgtttgtgcgcgcgc

SEQ ID NO: 433059 - DNA, 122 bp, Homo sapiens
ccccttacactagtgaggactccttcggcctcttgtgtttccttccttttgtgaccattacgccccctccctgtttcttatcaccagcccatcagcccactgactcccatatggtagaaaag

SEQ ID NO: 433060 - DNA, 122 bp, Homo sapiens
gaggcggggccagtgccgccgggcaccgtcgcaaaagacccgcgcgcttgcgctcgccgccgaccctcgctcggcgcccacagcagcccgcatggagtaatcgccaaatggcgacagaccct

SEQ ID NO: 433061 - DNA, 122 bp, Homo sapiens
aaggtttaatacctttaaaaaatccattttacaagatgagatggatccagatgtggaccacggctcaccacaggatgactcccgccagcattccctgcagactctcaaagggcatccatgca

SEQ ID NO: 433062 - DNA, 122 bp, Homo sapiens
cgagaaggagaagagtgccctagcccgggagcgcagcctcaagaagcgccagtcgctgcccgcctccccacgtgcccgcctctctgccagcaccgcctctgagctcaggtgggcgcgggcgg

SEQ ID NO: 433063 - DNA, 122 bp, Homo sapiens
ataaagcagggcctaggaagcctggccccatatttgtaagcaaatagttggtatttcttgcgagcttctattttaagccaaggtattgttgatcctgtgataaggacttagcaaaacaactt

SEQ ID NO: 433064 - DNA, 122 bp, Homo sapiens
caggcccggcccggcccggggcgcggggcgggggcaccgcggaagggtccccgtcctccacgctcgcgggagccgcccctggcctccctaccatgccgttccgcaggtcccagcggctgcgg

SEQ ID NO: 433065 - DNA, 122 bp, Homo sapiens
ttctatctgcgaagactccaggctcagagcgctactcacctgtctccagggcgacggcagcggccataacaggcaaagacagcgaatcgccacctgcctaacagaggaaaagcccggagggg

SEQ ID NO: 433066 - DNA, 122 bp, Homo sapiens
tctttgaaatgcctgagtgggatttaaactgaaattcgagtgtcctttgtatttaaaacccggatatttttctttcacggttgacatttttcatgtaccgcaaaaatccgagactcctattt

SEQ ID NO: 433067 - DNA, 122 bp, Homo sapiens
ataagtaactgggcagttattcaagtggggtgtttttagtgccatggaaacagacagagtcggtgttttccaagggaaagtgttttaaatccagagtcctgcctaatctggatataaatatg

SEQ ID NO: 433068 - DNA, 122 bp, Homo sapiens
tccaccttgccataggctgttagtccaaaggcaacttacgccagcttgcagccagatggccgggggagccactgtgccttacgccctaactactgtaaaggctgcatgtggattcaggaaga

SEQ ID NO: 433069 - DNA, 122 bp, Homo sapiens
gctgacctttcggctgaataggtcaaactcccactgagcgttaatcctcagccctcctcacgtgagtgcctcccctgaggtgaggagcactggttaggaatatgactgggagggcctggtgt

SEQ ID NO: 433070 - DNA, 122 bp, Homo sapiens
ttcagcatccttaaagctttattgaaacacagccatgctaatttgtttacgtattgtctacgagcgcttttgtgctgccatagcagagtgtagtagttataacagagaccacatgtggtgca

SEQ ID NO: 433071 - DNA, 122 bp, Homo sapiens
gggcagcggcatgaaggatgtggagtccggccggggcagggtgctgctgaactcggcagccgccaggggcgacggcctgctactgctgggcacccgcgcggccacgctcggtggcggcggcg

SEQ ID NO: 433072 - DNA, 122 bp, Homo sapiens
ccccgcaggaagaacaaacaattccagacgcgcgaccttagagacctgtaacacttagcgcgaaggtctgtaggttcattccggagccagtgagaccatgaacctctaggaagaaaaaactc

SEQ ID NO: 433073 - DNA, 122 bp, Homo sapiens
cttgggacctccccttccctgtttgcgacctctacaccctggccacacttggagcaccgccgcacagtctgtgggcgacccctcgccacctctattgctcggcactccaaccctgtctatgt

SEQ ID NO: 433074 - DNA, 122 bp, Homo sapiens
gggagtagctgagggggcagactagggagtagggctggcaggggagggggcagacagcctcgcctcgcacccttcatccctggctgccggtcccatccttggagggactaagctgggggtgg

SEQ ID NO: 433075 - DNA, 122 bp, Homo sapiens
ttcggttggtgcgctctaccgtccatcagtgacattgcacagacctattggtcaaatcaacgtcgctctagacgcctctggttgattggttaatagtgctgtcggtccccaatgttccaagc

SEQ ID NO: 433076 - DNA, 122 bp, Homo sapiens
ggggcatgagagctcccaaggtcctgaggtgtcctgtctctgatggtgcgggtgcaggtgcgggcgcattcgcctggtgagaatctagcagctgagacggctgtgatgtgtacccttttctc

SEQ ID NO: 433077 - DNA, 122 bp, Homo sapiens
gcggccacactgctctttcttggaagccctgtaactttgcgtgccctgctccatccagttcgctcccaggaccccgggcagcggcgggtgctggaccgggctgcccggcagcgtcgcatcaa

SEQ ID NO: 433078 - DNA, 122 bp, Homo sapiens
gacttcaggtgatcacctgcctcggcctcccaaagtgctgggattacagtcgtgagccaccgcgccccggcctcatgttgcactgaattttctgttaaccttgctgtttccctgctgttaga

SEQ ID NO: 433079 - DNA, 122 bp, Homo sapiens
gagaggccggtgatgggcccggagatgccttggggggcaccggagcccatgccgccctcccggcagtggcttcttccgattgcctcctcagcaaatgttctcatgtcaccaggtgcgcctat

SEQ ID NO: 433080 - DNA, 122 bp, Homo sapiens
gtgcggagaccacaggactggcgcgatagaaaggggtctcgtgctggtggtcagggacagcgcctcggtggccccaagacccatgaattgtctctggaactgcaggaacagctccgggtcgt

SEQ ID NO: 433081 - DNA, 122 bp, Homo sapiens
aagaatttaatttaaaagtatgtttttatgactctctccattactcatccctaaacatgccggccagtagagcattttgaaaggatcacacacctaatgagttttaggatgacagttcaggg

SEQ ID NO: 433082 - DNA, 122 bp, Homo sapiens
ggtcgagatgcagaagttcctcggctcttacttcatcacctgggacgaagacatgtttgacgaggagactggcgaggggcctctggtgaacacgtcggacctcaatgaagagctgggacagg

SEQ ID NO: 433083 - DNA, 122 bp, Homo sapiens
ccccaggctcttcctgggggtgcctgctaacaaggcactgccctggatggactcaaatcacgtcttcgccaggaccctggcttggggaggccctcccctccagcaccctggcttacccggct

SEQ ID NO: 433084 - DNA, 122 bp, Homo sapiens
cttgtgtgtgtttatagcttttgtttcgcggggttgtggtgaggaaggggtgatggcatgcggagttctttatcttcagtgagaatgtgcctgcccgcctgagagccagcttccgcgttgga

SEQ ID NO: 433085 - DNA, 122 bp, Homo sapiens
gcccatgttgctaacaggttccagctgcaaagtctgctgtacagccagccctggactcgtcgctggcccggccatctcccctgcccactgcggagaggtttctgctgtcgtggtggccggca

SEQ ID NO: 433086 - DNA, 122 bp, Homo sapiens
caaaagcatttctccctgttacctcaattctgggacccaatccggatcgaaagagtggggcgagtgctattgattgacgtgcattccaaccaacctacgacgcaaggagagcgcgcgcgagc

SEQ ID NO: 433087 - DNA, 122 bp, Homo sapiens
gaacgaggaaactccagacggcctccgggcaggccccttaccagcctggggcgtcttcctcgataatggaactgagaatcagtccctacctgcccggcaagaagacgggaaaaacctccaac

SEQ ID NO: 433088 - DNA, 122 bp, Homo sapiens
tgcaaggacagtactccttgatgccctgaaacctccgctcctactaactgtccttggacacgtcggcatacagagaatcaatcgtactctcagcagtggtttctgcagcaactctgggtcat

SEQ ID NO: 433089 - DNA, 122 bp, Homo sapiens
cccgccgccccgcgggttggggcgcgacccgggttctcttgccactcacaaaaccagctacgaccggcccccaaccgcgagagctttctgggctgcgatctctgcccctgaccctcgctggt

SEQ ID NO: 433090 - DNA, 122 bp, Homo sapiens
accctctctgggcttcaggttagactggaggatcactcagacccttccagcattcagattcgatcacatctagtctcacagttttgggaagctcaccaggacctgaagctttgtgcctctga

SEQ ID NO: 433091 - DNA, 122 bp, Homo sapiens
gtcccgttggggagcccttgtgcctgctaggatatttagcagatgccaggcggccagaaacgtcctcacttttctccctcggccctctggggaaccgccgtgagcgtttcccacggacacaa

SEQ ID NO: 433092 - DNA, 122 bp, Homo sapiens
taagcagctcaccatccaggtgctgctggacaggtagggtaagcccaagggtgcagtgagcgggctgtcaggggggtgggcattacagccttgggtggggtcttatggtcactgctcctgac

SEQ ID NO: 433093 - DNA, 122 bp, Homo sapiens
cctccttacccattgcaacatacctcacagcttcaacactacagcattctctgtggtaatcgttctctccctgtttcttttccactacgttacatgagtgcctctcaggggagcagggggac

SEQ ID NO: 433094 - DNA, 122 bp, Homo sapiens
aactaattcaatgagtcctttagcggcacaggctcagatcgcggaacacaccagcggactcgccgtagccagatgaagccggccatggcggcctcgatcccgcagctctgcgggcagctctg

SEQ ID NO: 433095 - DNA, 122 bp, Homo sapiens
cttccccagggagagccatgagactcaactgggcctgtagctactggttctgcttccaggcgctcctaaggggtcaggaaagagaatgagaaggcatggatgttgccaggtctcatccccct

SEQ ID NO: 433096 - DNA, 122 bp, Homo sapiens
gcggaacttggctgtcacaggtagagagtccctctcaagggggcatctggcatgggtgtccgcctggctgcctgtcttccggcctccacctcgtggtgtgggagctgctgccttggccggcc

SEQ ID NO: 433097 - DNA, 122 bp, Homo sapiens
acagcaactcctaagcaagcccaaatgctgagctcagagccagtagacttggagggcatgcgacttactgagacaccagacaggggagctaagggagtgcttgtgacacccctaccccaacc

SEQ ID NO: 433098 - DNA, 122 bp, Homo sapiens
gcagaagtccttctgtctgctttctgtacccacagcatctacgtggtgcagaggggccctcgctgagcccctgcacactggtcagcatccctggcctccagatcacggctcgctcagggacc

SEQ ID NO: 433099 - DNA, 122 bp, Homo sapiens
gaagtgggaggatcacttgagctcaggaggtcaaggctgcgtgagctgcgactgcatcaccgcactccagcctgggcaacaaagtgagaccctgtctcaaaaaacaaaaaaaaaaaaaagaa

SEQ ID NO: 433100 - DNA, 122 bp, Homo sapiens
atggtgtggaggaagaacccaagactggggttggacagcaggattccagccctgttctgccgccagtcgatgaccagtcagtcacctatcccctctcgcagaaaggaagattcggctcttgg

SEQ ID NO: 433101 - DNA, 122 bp, Homo sapiens
gcaggagagagaagccgtggctgcggaagaaataaaccatttcatggtgcagctccccagcgagccgctcccgtgagccggccacaacatgaaccgtggccaggattacggccccacctggc

SEQ ID NO: 433102 - DNA, 122 bp, Homo sapiens
tagaaaatacttgtgatgctggaaacattaaacttgaattagaaaagaaatataggtttccgagatggactccttttggatacagatacttacttttagaaatacctcttgtgaatggcctg

SEQ ID NO: 433103 - DNA, 122 bp, Homo sapiens
gtgacacaaaaagaaggggatagtgtagcttgtcctttttggatgaccatcacacacacacgatgtggctagtttcataagaactggctcagtcagcttggtacattactatccagtaatgt

SEQ ID NO: 433104 - DNA, 122 bp, Homo sapiens
cttaagagactgaattgtgctgtgtcttgagagatcctgtcctcttgccttctaagtgcccggtggaggcatcgggctagcacaaacctcttgagggtcccaatatggtagagaggggctgg

SEQ ID NO: 433105 - DNA, 122 bp, Homo sapiens
ttttttctttaggcggagtttcactcttgttgcctaggttggaatgcaatggcatgatctcggctcactacaacctccgcctcctggattcaagcaattctcctgcctcagccttccaagta

SEQ ID NO: 433106 - DNA, 122 bp, Homo sapiens
ctcacctcttgggcctctgggatccctgcgggcaaggagcagcctgagcaccgggagccacggagagggtggggcaggactggagtgggtgtgggcggggcaaggtctggtgggtgtggcat

SEQ ID NO: 433107 - DNA, 122 bp, Homo sapiens
tggaattttgatcttgttctgagctagctgtgtgcagtaaggcactcttgttttgttgggcggcaagctgcagctcccagtcagccctgcgatcacgagggtaaacaaccttcaggtcaagt

SEQ ID NO: 433108 - DNA, 122 bp, Homo sapiens
actgctcccgtcacctgggtgtggcagcgggggccaccctggcactgctgtctttcctcacgcctctggccttcctgctgctgcccccactgctgtggcgggaggagctggagccttgcggg

SEQ ID NO: 433109 - DNA, 122 bp, Homo sapiens
cagggtgctggaggggcaggtgtccacagggtggtcgttttggtctctcctggacttgcacgcgtgtagtgcagactggctgccggcaaagccctgagccacattcatctgggccttgttag

SEQ ID NO: 433110 - DNA, 122 bp, Homo sapiens
tccttcgcgtcccggcggcgcggcgggaggggccggcgtgacgcagcggttgctacgggccgcccttataaataaccgggctcaggagaaactttagcgagtcagagccgcgcacgggactg

SEQ ID NO: 433111 - DNA, 122 bp, Homo sapiens
caatgacttgatacaaggtcaccttctacttagttaactgtccttgaggagtaaggagagcgcaggggcaggagagatgtctgatcctgtctccagcaactgatagacccaggttagaagtt

SEQ ID NO: 433112 - DNA, 122 bp, Homo sapiens
cgcccagagccctcttgttggccggtggctaaggagccaggtggataacttctgcggattcggctttcaggctgctggagctctccccagcccgaggccttagcccagcgcaatcccttgtc

SEQ ID NO: 433113 - DNA, 122 bp, Homo sapiens
gccaccctcactgccctaacacctgctgtgataatgaggtaaggccccttggcgcctggacgtgtcaaatgcttggccttagtgtgtggccgtggtgcctccaagcactgcggggccccagg

SEQ ID NO: 433114 - DNA, 122 bp, Homo sapiens
gaatcaagggctgaggcaggtggtcacaggaggcccggcttcagtgcacaccacacccaccgaacttacgtcgaagggcagcacctccacagacgtgttgaagagcttgtcctccgggtgct

SEQ ID NO: 433115 - DNA, 122 bp, Homo sapiens
agcctgtgggccctgaccctggtgccaagagcgcacccagtcccagggaccgcgcctctccgctgcctggactttccgccaattccagccaaggtccaggtgctttctaactgtgggaccct

SEQ ID NO: 433116 - DNA, 122 bp, Homo sapiens
aaaggggtacgagagaaagtggaggaagggagtgattgagtcgttacctgctaattctgccgggtggaaggggactcctattattctgagcaagtagcctctttaactgtgagagctggacg

SEQ ID NO: 433117 - DNA, 122 bp, Homo sapiens
ctgcgtcatgacataccaggggcagggaggactctgggactgtctcccaaatgggggtggcgccagctgagtcatgggtcacttagtaggaaggcaccctgagatacagacagggtgctgtg

SEQ ID NO: 433118 - DNA, 122 bp, Homo sapiens
ttcaagaaatacaaatgccctttctcgtgagtagagactgccatgcaggggggtgggtagcgggacagattctccaggggtgctgctggggagggtgggacagatgtcaggcctgagggcag

SEQ ID NO: 433119 - DNA, 122 bp, Homo sapiens
acgcaaggcggcgcagcgggaggggtccgcggaagccccgcccacctgcccctcccaccccgaagctcgcccggccccgccccctgccccgccccgtcacaaggccccgctgcgtcttccga

SEQ ID NO: 433120 - DNA, 122 bp, Homo sapiens
tgggcatctctgcggaggtctgtgccagcgacccgcctcaggtgagctgggccttgggggcgctgcctgccagcccacgccctgcccctaggtcccctgggaggagcactcggcttggctgg

SEQ ID NO: 433121 - DNA, 122 bp, Homo sapiens
ccagcccgaggagaacactgtggagacagaggaacccctgagcgcccgcaggtaggggttcgccgagctggggctgcctgtgcgttaggggccccggtccctgggctgaggctgcagcgggt

SEQ ID NO: 433122 - DNA, 122 bp, Homo sapiens
gattgtccggatgtgatttaatgagcagtttatctaaccaattgtcatggatctgatatccggcccttaaagcggaatttctccacccactcttaactgtccgggactacattacccagaat

SEQ ID NO: 433123 - DNA, 122 bp, Homo sapiens
acaggtcagcggggcaggggcgggtgcagcattgcggggggccgggcggggcgtgggaggcgatgagatgggagaagtccagacgcgtccctccaacgagggcctctgcatggctggggatg

SEQ ID NO: 433124 - DNA, 122 bp, Homo sapiens
tgtatagaggatgagaggaaggtacggtgaaggagcttagggaagacttccgggaggtgacggtgtctaagccgagtcttgggaaacaagcaagagtaagataaactaaaatagaaaaatag

SEQ ID NO: 433125 - DNA, 122 bp, Homo sapiens
ggcagtattcctcctgtaattaaaaggttgcatttcaaagacacttttaatgaccccaaccgttgttgccagaaagaaaatgctacagaagacgtgactgacagattgcagggagagtgttc

SEQ ID NO: 433126 - DNA, 122 bp, Homo sapiens
aaaggaacactggaactggccggtcgcacctctctggcgggagcagggtttgtgcagacccgcggcagtgtccaagtgtgttacaatgctccgttagctctgccatccaggagggggtgtct

SEQ ID NO: 433127 - DNA, 122 bp, Homo sapiens
catgcgctgcttttatttatggccagagatatcatagcagttgggagaactcgaggcttgcgagccacctccagggtgtctcctccctgtgtctgcgtgtgatccctgcctgcggtagttag

SEQ ID NO: 433128 - DNA, 122 bp, Homo sapiens
tacgcaggaaacggcagctgttctcctccactagctctgagtggggccacaggaccactacgcttgccggacacaaggccccacaggtggaaggtgagtgacttgcacccaggcacttggcc

SEQ ID NO: 433129 - DNA, 122 bp, Homo sapiens
gccacgcccgcccaggtggcctgcagttggcgtggtggccgctggtcagcactgttgccccgcgcacgagccggcctgcgggactcgcaggctgcaaataggaagcggggtcgccctgcccc

SEQ ID NO: 433130 - DNA, 122 bp, Homo sapiens
agaacagaggagggtgtgcccagcaacgagagagaacgctggcaacggcgacctttgtcacgctggatggttctgcctctccccgctcatccacctgacgccgttcagacctgtatccccac

SEQ ID NO: 433131 - DNA, 122 bp, Homo sapiens
tgaatgccgcggcgctctgagcccgcttagctcatccccagcccggcgctccgcccttcgcggcacccccgcccgcccgcccaggcctgccgtctcagtcagacgggactccccctcccctc

SEQ ID NO: 433132 - DNA, 122 bp, Homo sapiens
ggggatcctctcacacatccctaccatgagctcagagaagcctccatgtcaggacacagccggaaactgcagggggcacgtgaaggcaaagacaggaagaagaggacaggaaggagaggtga

SEQ ID NO: 433133 - DNA, 122 bp, Homo sapiens
aaattaaatgagcgcatcaccgaacagcgaaggaaaggaaaaggaaaaccaagccagccacggaaataatccaaaaaaagccggtgatagcaacgaagccaacaggacacacggaaggcgct

SEQ ID NO: 433134 - DNA, 122 bp, Homo sapiens
ctccttcgtgtttgtatctgacttggttgatctgtgaaaggatgcgatctggacatctggcgtgtccccacaactcacctctgattctccaaagtgggcgttgtttcccaccgaagcgcttg

SEQ ID NO: 433135 - DNA, 122 bp, Homo sapiens
agagctgctctcctctcacgcattccccggatccgcgcggagcaggctgctggccagccccgggcccgcgccaagcagagcctcaggtgcggttcccccacaagcaagtggcgcgggcggcg

SEQ ID NO: 433136 - DNA, 122 bp, Homo sapiens
gtgcacatacactcccctctatacttagcgacatggaattgcacaggtgtgaattcaagacgattactattcctagcctttgttaacattttaaagagttaaaagttgctagtaaggatgtc

SEQ ID NO: 433137 - DNA, 122 bp, Homo sapiens
ctttggttgggttgcgggcccaggccgcgccgccggggtcgggaggcgtggcaggtggcccgacagccttctttgacctctgggaaagctgacttattcctatggctttgcttctagggctt

SEQ ID NO: 433138 - DNA, 122 bp, Homo sapiens
agacagcttaacttatgagtgaatcttgtccctgatggtagagacagtgtcttctcctcacgcttacgatggtgccttctgggagaacctccttgatttccagcctgaatcctccctgccct

SEQ ID NO: 433139 - DNA, 122 bp, Homo sapiens
cgggtgccctgtgccaggcaagcccatcctgggtgacacccggccaccttgaccggccaccggtgggtgcgctctctgccctccgtgtgtctgtcccgtgttctcatcaagtcctccgttgt

SEQ ID NO: 433140 - DNA, 122 bp, Homo sapiens
agagatggggagggtgaggccaggtgtgggcaggagggggtggaccgggagcttctgcagcgccagccctccgcggggacgtgtgttacactgcctgacatgggcaggaccctggagctgca

SEQ ID NO: 433141 - DNA, 122 bp, Homo sapiens
gcgtcggggctgcgccgtacaacttccggctgtaaagatggcggcttcctagtgagtcggcggctgatttagaaggaggttcaggctacggtgagccgaaggtgggtggtgaaagcgtgtgg

SEQ ID NO: 433142 - DNA, 122 bp, Homo sapiens
gactgcccgagggcaaggagagcaggtgcacggtgcgggactggtgggcagatccgcctgcggccctcgcacgggatccactaggcgaagccagctgggttcctacgtagggtggggacttg

SEQ ID NO: 433143 - DNA, 122 bp, Homo sapiens
ctccccctcctcccgcctcagttcccagctcctgtcccccgccacctcgaggctgagcgccgcccaggtgaccagaagggagagggggaggtctctaattgaaatgccctccgcgctgccca

SEQ ID NO: 433144 - DNA, 122 bp, Homo sapiens
ataactagtttattaacttatatatacatatattgtctactaagtaatgtctttgttgcacgtattttccagacaatgtcactttattattcaagttatactgcttggcagtgatgaccctg

SEQ ID NO: 433145 - DNA, 122 bp, Homo sapiens
aacaccctccttgaacatgtaacccacccccgacttcagtattttccttcactcttaggccgctctgttttttctatggcatttttttgctttctgtatgcggtttttattttttatgattg

SEQ ID NO: 433146 - DNA, 122 bp, Homo sapiens
gcgccgtttccgggctctggaagccgagctgccgaggcgtaagctgggaggtggacatgacgggggagtggggaagggcaggcggcgggacggccacacagcggaatattatgcaacttata

SEQ ID NO: 433147 - DNA, 122 bp, Homo sapiens
tgtactagtggattcccaccttactgctcttaggtttgttaattccacgtattcccacttcggctgcttcctgctgtgatgaatgtctaggttacttcagagttctttttctgctctttcaa

SEQ ID NO: 433148 - DNA, 122 bp, Homo sapiens
ctcaggtgatccgcctgccttagcttcccaaagtgctgggattacaggcgtgagccactgcgcccggcttcattgttattatgtaatgattcagcagttattatcaactggggttggaatca

SEQ ID NO: 433149 - DNA, 122 bp, Homo sapiens
gcgtgcacacaggcgagaaacccttcccctgccccttcccgggctgtggcaaagtcttcgcgcgctccgagaacctcaagatccacaaaaggacccacacaggtaaccgcgggctgggacag

SEQ ID NO: 433150 - DNA, 122 bp, Homo sapiens
gggggcggtgggcggagactcagagaaatgcctgaggactggggctggcgggaacgcacccggcctcggaaatggggtgaagaagcatcgctgataccatgcagggacctgaggacagagcg

SEQ ID NO: 433151 - DNA, 122 bp, Homo sapiens
aacgttccgctgagagcagggtgggggcagccccagttaggggtagcccacggccccagccgggggtctccgggattgcgcgggcggaggtgggcggccctgcgggttctcgggttctcggg

SEQ ID NO: 433152 - DNA, 122 bp, Homo sapiens
catttcccagcagccagagccgaagtgtgcagcggcaccggggaaaggttccgaatcttccgtgccgagaagacctatgcagtgaaggccggacggtggtattttgaatttgagacggtcac

SEQ ID NO: 433153 - DNA, 122 bp, Homo sapiens
ttttccaagtacatatggctgaactaaccaactgaagtttttacaaagtgaaatcatttccgaggtgatgttaaattattgattagtaaatttcatctgaattataaattctgataattatg

SEQ ID NO: 433154 - DNA, 122 bp, Homo sapiens
aagaaggaaatgttaacaaagagagtgctcttgaagaaattaattttcaccactcatcaccgggtgaaaatagaaacttcttaaaagacaatttcacatataaattattccagctgtttttc

SEQ ID NO: 433155 - DNA, 122 bp, Homo sapiens
tgagaggagtaaggtgtacttccttgtcaagcatgactccgagcggcacttcttccacaccgcgcagctgcctgtgcctggcaggggcctcctgcggccggaacgtcccctgcatccccaac

SEQ ID NO: 433156 - DNA, 122 bp, Homo sapiens
gcatccaaggctgcatctccggttcctgctagcctttcatcttgctcaggtggggactcgcgtgcatctcaggcccaaggtcctcccgtcctgcttgttcatggagtgtggaactctcatga

SEQ ID NO: 433157 - DNA, 122 bp, Homo sapiens
ggcgggggccagcgctggtgttgagtagtggaccccagggggatgactaagccttgcctgcgagcagactcgagcatgccaagttatgagacgatgataactctgccccgagcctctggggt

SEQ ID NO: 433158 - DNA, 122 bp, Homo sapiens
atcagaagacttggagtaatactcggtctcacattccaactacctgtgtatccttgggcacgtcacttaacttctctcagcctggttctcttctgcaaaatgcgacaggaatacagtgagga

SEQ ID NO: 433159 - DNA, 122 bp, Homo sapiens
tggggcagagactataagatttcctaccaataactaaacataagagtggaaccttaaacacgaggggtctgtgagggaatccaaaacttcccctcttgaaaaagcagcctctaagggggcaa

SEQ ID NO: 433160 - DNA, 122 bp, Homo sapiens
aggaatggggatggcaggctcctgttagtacagaccatgcaggctggacagtgtgatccccgttagtaacaacctctgccagctccgcccctgcagacggctacttaatttcacaaaccctt

SEQ ID NO: 433161 - DNA, 122 bp, Homo sapiens
taagaaaaaaatgactaacatatcatttttccctctctccccagggagtacatgttgtgccggggcaggactgggtacaacttcttgccaaaccttagggcttgtggctgggttgctgtgtt

SEQ ID NO: 433162 - DNA, 122 bp, Homo sapiens
ccgctaagcatggctgaaaccaggtttcatgtcaaaggcaggaaacaatagtcacctttacgtagttcagaaactgaagtgaaacttatagccaagtttccaaggcctgtggttactggtct

SEQ ID NO: 433163 - DNA, 122 bp, Homo sapiens
ctaagcatcagggccaccttcgaggttgagcagccggcctccctgaagcatgggaaattccgagtcttgtgggtctgcagattccacactgaaatgggaggaggaagaaatggggctggacc

SEQ ID NO: 433164 - DNA, 122 bp, Homo sapiens
tccgcggagaaagggaaatggggcaagatggctggagaaatccgaacgcgcccgggggcgcggcggcggtggcgcaggcggggcagggcgggcggcggccctggttgcggcaccttagcgcg

SEQ ID NO: 433165 - DNA, 122 bp, Homo sapiens
ccggccccctgtgaggagctctgttcccgcgctctcatataagcgccggcacacagtaggcgctcaaggcctgcagaatgagtgagcaaatatagctcagacacctactgaatgaaagtcgg

SEQ ID NO: 433166 - DNA, 122 bp, Homo sapiens
tttattgaaaaacgccccagaggaagtactgggaactgcaccggcaacagcagcctgacccgcagaagtttctttggccagggccagcacaggtttgacctggtggctccgacggcggagcg

SEQ ID NO: 433167 - DNA, 122 bp, Homo sapiens
ggggacgaacgggtggcttttcttcttgcggtgagcggctaggaccgccccggagcagggcggcgggaggggtggacgagggaggaaggcggagtagagggcggggaaagaagggcgggagc

SEQ ID NO: 433168 - DNA, 122 bp, Homo sapiens
ccattctctcctgtgtctttcagtgagctcttcggcccaagtggtccccccggccttaagcggcataggtgagtgcatcctgttttgatcatgggccatgagtgttgcagcatggggtcccc

SEQ ID NO: 433169 - DNA, 122 bp, Homo sapiens
gcaaaagaaaagatattcaacactgtatatcattagagaatagcaaattaaagccaggtgcggtggctcacgcctgtaatcccagcactttgggaggctgaggcaggtgtgtcatgagatca

SEQ ID NO: 433170 - DNA, 122 bp, Homo sapiens
aacagacttcgtaggggagggcttggcaccctgcgcgctgcagccggccagcgcgagccccggcccagggactatctgcagcctcctacccagggccagacattttcacactggagatcccg

SEQ ID NO: 433171 - DNA, 122 bp, Homo sapiens
gagtacacttgggccaaatctatgcattgtaaccctgaaaacacacttccaaaccaagtacggcaggtgctcctagttggggtggttacagaagatttttaaggacaaaatgaagagacata

SEQ ID NO: 433172 - DNA, 122 bp, Homo sapiens
gatactatagctatctaactggataccaccggtaataaattacccaaagctaagatttcacgctttttaaagcccatattaataatgcctgtctggtcataagtcacactaccaaaaggctt

SEQ ID NO: 433173 - DNA, 122 bp, Homo sapiens
ctctgaggaacatgggcggcttgggctgggccacatttctcctgtgaggctcggtacggccgagtggcactccctgaggtgggtcgggcaggtattcagagttctctccagaggctgcctgt

SEQ ID NO: 433174 - DNA, 122 bp, Homo sapiens
ggggagggcagaggtgtgagggatgcgggggtggctcgcagccgttcgcgggcaggcgggcggagcgcgggaagcgcggtgcgggcgttccatggcgcacccagacgctctccctcctccgc

SEQ ID NO: 433175 - DNA, 122 bp, Homo sapiens
ggagtagggagggggagcggatcctggggcggggccgactttccccggccaggaccactccggctccctctggttgcaaaatctgaccttggagtcggacccccaggatgtgcttttagaga

SEQ ID NO: 433176 - DNA, 122 bp, Homo sapiens
caggcgcaaggcgcgcccccttccctcacccgcaggcgccgggtccgcggacgcccaccccggcccgccccgcccgccgcctggtgcccgctcaaggtcactgctgacaaggcgcctgcctc

SEQ ID NO: 433177 - DNA, 122 bp, Homo sapiens
ttggacagaggctgaaaagaaagaagggacttagctcaccaccagactcctcagcactcacgggagaagagcactaaggacaaaggggcacttaacacgtgtaaaagggcaatggctcctaa

SEQ ID NO: 433178 - DNA, 122 bp, Homo sapiens
cgggctcttgcttgccctttgtcctgtcccttgattcctgcctggaatatagatgtgatgcgtggaggtgcagcagccacctttccacatgagggctgaagccaaggtcaatgacagcacac

SEQ ID NO: 433179 - DNA, 122 bp, Homo sapiens
cactgtttcagaaagctcctgacacagcacacagcaggttcaggagctgcctgtgtggcccgagccgctcttgtacgtccctgtgcctcactcctcctgatgtaaaaccaagatcgcacaga

SEQ ID NO: 433180 - DNA, 122 bp, Homo sapiens
caggcaaccgatttctacttcttgtttttgtttgcatgcctttacaaggctctcggagatcggagatcgaagagaaggtaaatccaccaaagccaccccctggcactgccacgatagccacc

SEQ ID NO: 433181 - DNA, 122 bp, Homo sapiens
gccctgcccatagcaggggacaggggagagcggatactgccttcctgctgtgggctgatgcggtaagtgccacagcaccctccaccagcccagccgtggaaccaagcctcctgttcccaggt

SEQ ID NO: 433182 - DNA, 122 bp, Homo sapiens
cagacagtcaggctctaaactccctgtttctccactctcagtggcctctggcatccctaacgtggacagacagggaccttctcaggaaacctggccagacggactcagtttgggagattctc

SEQ ID NO: 433183 - DNA, 122 bp, Homo sapiens
aaggcaaaactgtggtgaccaggaacaagcatgattgccaggggttggtggtggggaaagcgtgtgactaccatggggtagtatgaggtgatttttgaggagatgaaactgttctgtatcct

SEQ ID NO: 433184 - DNA, 122 bp, Homo sapiens
agcctctgacaaagcgcgttcgcactgttacccctttgagcctcacaactgcctgtggaacggagatcatgatccccgttgtacagatgagacccttgagccctggagacccaaagtcgacc

SEQ ID NO: 433185 - DNA, 122 bp, Homo sapiens
tgggtctctcttggccaaagagcccagggatgcctctaactccttttctaaagccggccacggaggccccgccctctgcagggaggctccggatcatgccccctgctcctcccactactgct

SEQ ID NO: 433186 - DNA, 122 bp, Homo sapiens
tttcggtacttcctcctggttccctttttgttagttgccgattgtgttttgctttagcatcgctttgcattggagttcattccatgccccatcttagcttcggaaaccctcactgccttctc

SEQ ID NO: 433187 - DNA, 122 bp, Homo sapiens
tctgtgatcctgttggcatcacatattcttggcttctggaacagcaggctccaaggtactcggacccataatggtctccctcccttcctccttgttctgttcagagcactaaagccctttaa

SEQ ID NO: 433188 - DNA, 122 bp, Homo sapiens
tgggcgtcccaggcagacccaggggccgcatgcagcagggcctgaggagggaggtgtggacggaggaggcccgctgccattcttggtatggttctcactccaggagcacagctgcatctggt

SEQ ID NO: 433189 - DNA, 122 bp, Homo sapiens
tctacggagaaatcgggcctcgcgagaagcgcaacatcttggacaaggacctggcgtgagcggggtcgctacgccccgacctgcaggggccacgctcattccccagcgcgcgcgcgctttcc

SEQ ID NO: 433190 - DNA, 122 bp, Homo sapiens
cactactggctccattttgcagataaggaaactaagtcagaaaggtgaaatgacttcccccgttgggacaactattgtaaaaagaatcagccctcaaggacaggatgttcgcattaggggga

SEQ ID NO: 433191 - DNA, 122 bp, Homo sapiens
gccaggtctggtggcacacatctgtaatcctacctactcgggaggctgaggcaggagaatcgcttgaatctggaaattggaggtttcaatgagctaacattgccactgcactgcagcctggg

SEQ ID NO: 433192 - DNA, 122 bp, Homo sapiens
cctgggggcagccagccagccagctcaaaaaatgctccaataacaaacaaaaaatgtgtgcgcgctcgcttgctttctctctcccagacacacacacacacacacacacacttgctttcaca

SEQ ID NO: 433193 - DNA, 122 bp, Homo sapiens
acttctaaagggaggggaagggccctatgattgggctgtgacgcgtgagcgcattaatgacgtcactgcggctcgggagagcgcgccatgaggtcataagagcctttttcctccaggaagag

SEQ ID NO: 433194 - DNA, 122 bp, Homo sapiens
gattccagtcagaataagggcataggtgtagaattagtaagacaggacttaacatgtccacggagctgcaagcgtcacccagcccaggatgaacccctcagctgccacaggaaagtttccag

SEQ ID NO: 433195 - DNA, 122 bp, Homo sapiens
aaaaagaagaaacttataacctcagaaatttaaacaaaaacacacccactgaaagcacgtcgacagcatggcagatgcttaacactagagtattgaaatggggaaagtaatagttgcaagtc

SEQ ID NO: 433196 - DNA, 122 bp, Homo sapiens
aaattttaccctgatctgaatctcctctattttgccttaatgtttattttccctttaagacgttaggcaggtaacatggccagacacggtggctcacgtctgtagtcccagcactttgaaag

SEQ ID NO: 433197 - DNA, 122 bp, Homo sapiens
tcaagggaacttgtctgtcagttctgttgcctcgtagcccccttagcaacctgttcaccacgttggtagtcacatagcagccctcacctcactccagtagctcctctgttgtgtggcccctc

SEQ ID NO: 433198 - DNA, 122 bp, Homo sapiens
ataaaccaggacgtcccagcaaactggatggatggtcactctctttcaagccaataactccgactctgtgtgcccaaatacagcaggcattggtcacaccttgcctgctcctgctgcctcct

SEQ ID NO: 433199 - DNA, 122 bp, Homo sapiens
ccacaaagagccaggagaggggtggacgcggaaagcggtcccctctgaacctggggcgctcgataaagctgattttcagaccccaaaagggctagtgggtttggtcactcctccagtgactt

SEQ ID NO: 433200 - DNA, 122 bp, Homo sapiens
ctataaaatggagccagtgacaccaatctctcatggattaagtgtgaggatgaatcatgtcgttataactgatggagtggtggttataagggtgtatacatttgtcaaaaaccatcaaactg

SEQ ID NO: 433201 - DNA, 122 bp, Homo sapiens
cttcgctgtaaaaaagcaaacagctcactgccttcccgggtgagggcttcagtggctgcccggtcaactcgcatcaccaaacaaaacgacttttgttcctccctctcaggtcctcccaccca

SEQ ID NO: 433202 - DNA, 122 bp, Homo sapiens
ccgggcccttttccgccacccaccctgtccatttgctgccccacttccgctcccgcctcccgctgtgtccctgaccatccgccaccggagacgtcacagctaaagccacgcctgtctgagtg

SEQ ID NO: 433203 - DNA, 122 bp, Homo sapiens
ggcgttactcctgcaacccctgggctgcaatcttgtgtcaagtgaaatggctgctgagatcgtgcaggaggattccagcctccaccagctccagcacctgggagctgaagcacggctcccag

SEQ ID NO: 433204 - DNA, 122 bp, Homo sapiens
cgaggtttaaatgacacagtatatgtcggctggttgtgagagcactcaatgaacagaagccgactttgtcaccaacgtcatttccattgtcatcagcaccgtgcacttaatcgcagcgtaag

SEQ ID NO: 433205 - DNA, 122 bp, Homo sapiens
cagcccccccacccagagcccggtcccttgggggcctcaagctggggtgggatgaggaggcgctctgctggcagtgctgaggacgggtactccagctccaggcctggagaggcttcccagca

SEQ ID NO: 433206 - DNA, 122 bp, Homo sapiens
tttaatctttcttccaagaccgtttctcatggacttttctgtgtgtctgttgggggctgacggacttcgacgcgccagtcgcttgtgcttggggccctttgggtactaacagccacactgct

SEQ ID NO: 433207 - DNA, 122 bp, Homo sapiens
ccagggctgggaacacaacccaaggtgatgtcgtgtacacaaaggatgagaacaggagctcgtcagatccacttttgggtctggccaaatgggcttcagtgccctcctgtataaagtggggg

SEQ ID NO: 433208 - DNA, 122 bp, Homo sapiens
tttgcgaggggggcggagggtaggagcccagcccaggggcgtggcggtccggggtctgtgcgctgccttccgggactggtagttctctctgggctcctcgcagctcggcgcgtcgagagcga

SEQ ID NO: 433209 - DNA, 122 bp, Homo sapiens
cgatcaggccccagccttttccaatctctcggaaacagatcaagctataagcaattcaatcgttgctaaagagacacgccggaagccgccgctggtctccgggctcccggccacgcaattca

SEQ ID NO: 433210 - DNA, 122 bp, Homo sapiens
caagctagtaggatgattgtcagctggtgacttcaattcactcagctgcaacgtggttttcgcaggtgccacacaaggaaggaaattgaagtaattcattccttccacctgctcccaaggaa

SEQ ID NO: 433211 - DNA, 122 bp, Homo sapiens
tctggcgcagcacctcattgaagaagtggtacagggtcaggtcgggcgagaacacgaccacgacgcgcgctgtgctctgctgcagcttgtccacaatggtcaccaggcgctggcgctcctct

SEQ ID NO: 433212 - DNA, 122 bp, Homo sapiens
gcccctaccgtggcgttggagcagttgagcaggctgatcgcgagcaggaacacccagcggcgcgcgtaggtgcggtggccccgctgcgcgcacagggcccggggctcggccaaccccgtctc

SEQ ID NO: 433213 - DNA, 122 bp, Homo sapiens
tcggccgcccaggccatagagttcacaaactctgatttatcactgaggtgacttgtcccgcgcagccctaggcgagttgccaagctgcccgccctgaccgcgcccccaggccgggggtctcc

SEQ ID NO: 433214 - DNA, 122 bp, Homo sapiens
ccccactgcgtgtgtctgtccgaccccacagcttctctcctttcttgagcctcactccaccgcgatacgtggtctgtccaaggtccagtcagtgaaatcagtgtccaggtgactgtgtattt

SEQ ID NO: 433215 - DNA, 122 bp, Homo sapiens
aaaaatccttccctaaacacatttctccccatttccgaaaacttcagaagttaatgagatcgacctttgaaagaaatgtgtaagctgtaaagcattatgcaaaagttagtaattacataagg

SEQ ID NO: 433216 - DNA, 122 bp, Homo sapiens
acttgctacaacacagagtgaactattgctccacttcaccaataaatacccaaattgctacgcatggtttcaaggtccttaaagatgtggcccaaacatacctttttttttttttttctttt

SEQ ID NO: 433217 - DNA, 122 bp, Homo sapiens
gaatgggatggaggagggagaggatacaggggtgaatcacagggcaggctagctaggaggcgagaacagccagcagtctggatgagcacttcagccctcatcacacttgtgccagccctggc

SEQ ID NO: 433218 - DNA, 122 bp, Homo sapiens
tttaaccattattcagggtggtcttttgtttttaaatctttttttaactaataagatttacggtgtgtattttatacagaaatgcattataaatgtttttaattgtgttctgttttttgcag

SEQ ID NO: 433219 - DNA, 122 bp, Homo sapiens
ttcacagagtgcaattaagtgtttggaaggttctgtgccgtgtgctctgatttacggccgcgttcctgggacgcccctttagccgggcgaacgtggagggggccaggcccggccgtgcgcac

SEQ ID NO: 433220 - DNA, 122 bp, Homo sapiens
tcacacgggctcaaaccgaggtcgatttccgaacgctcactttggagcaggatgcgagcccgggccacgattgggtcaggttgcgccgctcgcgtggccgcgggaatccccgaccggcccct

SEQ ID NO: 433221 - DNA, 122 bp, Homo sapiens
acacattttgcagagtttgcagatgaaaaggcatctcatggatagggcatctttcagggccgaacggctgcaaagattcggggttgggagttgcaactgtgtggggttccgatgcgctaatg

SEQ ID NO: 433222 - DNA, 122 bp, Homo sapiens
gcggcggggaggggggagggtctggtccaggcaggtaaaggcagcttcttaggcagccagcgagttggcaggtgggttgggactcgcttgtcaactcattaattttaagcagtcagtttggg

SEQ ID NO: 433223 - DNA, 122 bp, Homo sapiens
ggagaaggttctggctgtgtcttggctatctcctgcctctccctctgtggggaatgtgttcgaggatcacagctacagcttttcggataccctttcctttgtgaagcatgtgagaaccaaca

SEQ ID NO: 433224 - DNA, 122 bp, Homo sapiens
tgttgcgggccattttgcagccagagaagcaaatgcgcaaatgcgcccagccagtcagcacggacttcaagaaccaacttcattccttgcaaggtgctttagttctggccgttagggcggca

SEQ ID NO: 433225 - DNA, 122 bp, Homo sapiens
gcacggtgagcagctgccttctgcagatggaacgcctcacctgggacgcctcacctgggacgcctcacctgggacgcaggcgttcctgttcctagtcacgccctgagccctggattcctgcc

SEQ ID NO: 433226 - DNA, 122 bp, Homo sapiens
cttagacccaccagctctgagggaatcttcgcgacctgcgcaggcggtcgctctgataaccgcatcccggtttccgggacgacagcggaagtcacttctcacacgcctttcttattggatac

SEQ ID NO: 433227 - DNA, 122 bp, Homo sapiens
aaacacaagaagcacaaagaacaccgggaaattcatcacaaaaagatctttgcctaggcacgttgtcatcaggttatccaaagttaaggcgaagaaaagaatcttaggagctgtgagacaca

SEQ ID NO: 433228 - DNA, 122 bp, Homo sapiens
tgcgcttgtaggcaatgaggacgatgatgacgatgatgaggaggaggctgccgccggccgcgatgctgacgatggctggcagggtcagcaagctgtctgagatgacactcaccgagccaggc

SEQ ID NO: 433229 - DNA, 122 bp, Homo sapiens
tcccgaggagtcgctgcctggagacactcccgcccggactgcttctcgggccccattaaacggctctgaaatgaactgtgaagttaccatttgtgggcggagagcgctggggccctgcggac

SEQ ID NO: 433230 - DNA, 122 bp, Homo sapiens
gacttctatttctcattcgaggcggggtatgggggggccctcgacctcgggtccttcatacgcccacccaggcccctcccgacacctcggccacctcagcgctgagttctccgcgcaagcgc

SEQ ID NO: 433231 - DNA, 122 bp, Homo sapiens
aggtcgtccaaggatgaggagcagaaaatcttcccactggttgccttccgcctctctcctcggggcttctccaccagccgcctctgccgctgataattgaattgtgagcagcagaggggctg

SEQ ID NO: 433232 - DNA, 122 bp, Homo sapiens
ggtcatgctggtgacagaggtgatcgcctactcccactgctgcatgaacccggtgatctacgcctttgttggagagaggttccggaagtacctgcgccacttcttccacaggcacttgctca

SEQ ID NO: 433233 - DNA, 122 bp, Homo sapiens
ccttacctcgtccatcttcgaggtttctccctcgctattggcttgtggccccgcctgtcgcgtcccttgctcgtacttgttggtgacagcgcccaaagagactcgcctttctccagaggatt

SEQ ID NO: 433234 - DNA, 122 bp, Homo sapiens
agcgggaaggcgcctctcctcccactcaggaagttccagcgccacggggatctgtgcggtcggacgtgcaactgccagcagcttgtggttctcagcagtgccactgtctccaccagcatcgg

SEQ ID NO: 433235 - DNA, 122 bp, Homo sapiens
cagggcagagaaagcaaacattcacggccaggataggcagccggtgccgcggccagctcacgattacctttgagtcaaaaaactagatttagactgcgttcttgtaactaaatgcccggggc

SEQ ID NO: 433236 - DNA, 122 bp, Homo sapiens
cctgctggacccaggtgaggcctgccacctagtggacccagggaggagcatcaggaagggcggccccggcctgtgggaggagaaggctcaggcaggctcgggctgcaggagattccacaccg

SEQ ID NO: 433237 - DNA, 122 bp, Homo sapiens
gcctgctgtgaaacactggttgactttactctgtatgataactagatcttacctgaatgtcgatatgtatttatgtggttccaaatgctggagaaaaaactcactaagtgggtaaagggaga

SEQ ID NO: 433238 - DNA, 122 bp, Homo sapiens
gcacccacagggaggagtaaacaaatccagccgagctgtcttaagagctgtaacactcaccgccaaagtctgcagcttcacgccagcagccagtgagaccacgaacccaccagaaggaagaa

SEQ ID NO: 433239 - DNA, 122 bp, Homo sapiens
ttcaccatgtcgaggatgctagtctccaactcctaaccttatcaggtgatccgcacccctcgcctcccaaagcgctgggattacaggcctgagccacctcgctctgctggccaaataaactt

SEQ ID NO: 433240 - DNA, 122 bp, Homo sapiens
gcactaaattaaaatttcaagatcatttgtttgaaaaactgggtttgagcattgaatagacgtggcaagcagatcgctgaaatgaaaatactaagaatgctctgccagcagaactccaactc

SEQ ID NO: 433241 - DNA, 122 bp, Homo sapiens
agctcacagcacctgcagcaacttcccctcgggctctctacatttcagagagttcagcgacgtcagccctttgcaggaaaaatgaggtaaggcagctttaaagaggtaaagcccacggtctc

SEQ ID NO: 433242 - DNA, 122 bp, Homo sapiens
ctgggaaggacgcaccaaagccgggagctctgccctgcagggagttgccccaaccctttccggaactcagtctttagaaaagaaacgccaggttcaagaattgcaaaccagcctgtgcttgg

SEQ ID NO: 433243 - DNA, 122 bp, Homo sapiens
cttccgcactcggatctttagctcccggggtagacgccgccaatctgggaatagtgggaacgtaaatgtcaataggaccctgcctggggtctccagtgaatactgactggttttaaaggggg

SEQ ID NO: 433244 - DNA, 122 bp, Homo sapiens
gagggggttctcaccggggtcgaggcacctgatcctccggcaccggcgtccagatggactcgggggacttctgctctcggaagcggccttcaaacacagctgccacctgtgtcaggtcaaag

SEQ ID NO: 433245 - DNA, 122 bp, Homo sapiens
gcctgcccttgccactccacggggtctttggggatgaactgagctacaatggcgagggagcgggtgggatactaactggcccttcccctagataggaggccatcaagtgcagagccagagac

SEQ ID NO: 433246 - DNA, 122 bp, Homo sapiens
tcgtctggtagaactcatcttcctcctctgcctccaaaagcccagaaagccggttcccagcggtcttccggggtgcccggcccccagccaaactcataccgcctaccgagactgcgccgcca

SEQ ID NO: 433247 - DNA, 122 bp, Homo sapiens
ctgcggcccttggccttccagggtcctggccaggcaggggtcaggcaccccatactcttccgtgtggcacaggtgtccacccacccccactggccacagacaccattctccccctgggagca

SEQ ID NO: 433248 - DNA, 122 bp, Homo sapiens
catttctccatggaccccttggaaatcaccacgctccaggttagggagcaggttggtccgcgcctggtctgtgtcctgcgccccatttcaccctcccgctgcacccctgcttctcatttttc

SEQ ID NO: 433249 - DNA, 122 bp, Homo sapiens
aagaaaacacctgcacacgcagaaatttttaaaaacccctgtaagcaaaaccacaagctccgaaggtaaagccggaggagctgtccctgagtcgcgcccgggagcccctccgctgtcagtag

SEQ ID NO: 433250 - DNA, 122 bp, Homo sapiens
gttttgtgcatctcctctttcctggttcctggatgctccgtgtgtttgggagaggatccccggcgagttcatgatgcccactgctgcagaggccagtgtgcaccggccttgcctcctcgtgt

SEQ ID NO: 433251 - DNA, 122 bp, Homo sapiens
aagtgtactcaaggctctctgctctggtggctgcagcagcagcagcatatgaattccttgcgcacataccaggagaaaggtagtcccagtggggagtgacaaagcttaattcctcttggctg

SEQ ID NO: 433252 - DNA, 122 bp, Homo sapiens
gtcccaccaggacctgtgatcacagggacttggatgtcacctagggtggtccctacacatcgaagtccttccggtatgaagagacaaattttcagtcccctgtatcttttgccctccttcca

SEQ ID NO: 433253 - DNA, 122 bp, Homo sapiens
ggcctcattataccttagacttaaggagagatgagaaagaaagaggaatcaagatcacatcgagattttcttgcttgaacaactgggtaatagttggtggtgtttactcagatgaggagata

SEQ ID NO: 433254 - DNA, 122 bp, Homo sapiens
ctctactggaaagacaacggtggcggcggcggggagctgctggggggcgcggagagaccgcggccatctggggccgggaaggagaaagccaggcagagtctgatggagtctgcctccggcct

SEQ ID NO: 433255 - DNA, 122 bp, Homo sapiens
ggtcctgttgcctgcaggaaggaggcatgtactgctgaggaactgccagcaggaaggtctcggtatccacaatggcctggcaaccctcagagcacaagccagtggcctggttaccgatggca

SEQ ID NO: 433256 - DNA, 122 bp, Homo sapiens
ggtgacctcagggctcaggaatgcagcctgcaaagttatctttacggaaaacttctctcccggctcccagcagagatcttaacctgcctgactcagctattggggcctctgggtgctcatca

SEQ ID NO: 433257 - DNA, 122 bp, Homo sapiens
ctacattccacaggaagtactggcttgcacccaggccatgccgggcagcggatggggacacggactggctgtgacccaggtcctgccttggaggagcacccagtccagtaggacccttcctg

SEQ ID NO: 433258 - DNA, 122 bp, Homo sapiens
tcccattcccgctttctttttccctgaccgaagtcccagtagagtatccagcaattagcacgcgaggagggggtggaaggcggcggcggcggcaggggtgggggcggcgagaccccggctct

SEQ ID NO: 433259 - DNA, 122 bp, Homo sapiens
ttactccaaatatcgaactgagtgtacatcccttctgtgatgttgttgctaatatccaggcggggagaggacacctgcgcatcagcggggggtgcccatgcccctgcgatgtagctcctaat

SEQ ID NO: 433260 - DNA, 122 bp, Homo sapiens
gggagtaggcacagggccctacaattgtaggagaactccaggctccccgcttggctgagccgatcctccacccccagcccatcagcagaggcccacctgcccctctcatctcatctcctggg

SEQ ID NO: 433261 - DNA, 122 bp, Homo sapiens
tccctgagccgcgtgggtgaaggctggggacacgtggtatctgcaggatctaggtgtgagcgtctgtgcattttcacggcactcctggcaggacagagctccaccctctgccagtcctcccc

SEQ ID NO: 433262 - DNA, 122 bp, Homo sapiens
ggtttagtctccgggactgcttgggaggacacctggaatgccgaaggcaggactacacaccgggcgaatccaccagcgccaccaagcccttgaaaacccgaggccgccgcgcgactccattt

SEQ ID NO: 433263 - DNA, 122 bp, Homo sapiens
accatgagctgggaggttatgctggtgcggttgagaaccacacactccagctgtacctgccgggtctccagaaccgacaggttcccctgggcttggctgagcctcaggcggctgtctggaac

SEQ ID NO: 433264 - DNA, 122 bp, Homo sapiens
tgggtaagggcgccggaggcgttgccactccccatccccgtgaaggcttccggagggaggcgcgcccttcagaggaccatggctagttgtaaaatgtgttcgaagggaggtgggagaaggtt

SEQ ID NO: 433265 - DNA, 122 bp, Homo sapiens
ggttcctctgttgcagcgcagccgtgtgtgctgtggagccgaggccgtcctgcaggaagccgcgtgactcccgcctcctccctgtgctctctggctctggactgtgactgcgcctggattct

SEQ ID NO: 433266 - DNA, 122 bp, Homo sapiens
gtggctcacgcctgtcatcccagcactttgggaggccaaggagggcggatcacctgaagtcgggagttcgagacgagcctgagcccgaccaacatggagaaaccccatatctactaaaaaaa

SEQ ID NO: 433267 - DNA, 122 bp, Homo sapiens
cctccagggggagccgcacatggagcctgtgccgccgccggccggttgtggcctggaccccgctcccgggttagcccaggaggaattccccctgcaagtccgaagacttttcctcctctgag

SEQ ID NO: 433268 - DNA, 122 bp, Homo sapiens
cacacttgacggaggagttcccttccacccatgcgtgctgcatcacctgcgggagggaagcgaacgatgccagggaaaatggcagaaccatgtccccggggccctgggctggaggagaagga

SEQ ID NO: 433269 - DNA, 122 bp, Homo sapiens
tcccagggcgggacgatcattggcagtgcgcggtgccaggccttccgcacgcgggaaggccgcctgaaggctgcttgcaacctgctgcagcgaggcatcaccaacctgtgtgtgatcggcgg

SEQ ID NO: 433270 - DNA, 122 bp, Homo sapiens
cgtgctgcacacggtgtgagcgttggaaacacactcatcacaagggcagcctgtcacaatcgcgcgatcattcaccacacacctccacacagacgcaagcgcacgctttcaatctcacctcc

SEQ ID NO: 433271 - DNA, 122 bp, Homo sapiens
ctgcccggcactgtttagtcgcaggggctgcggggtggcagcctcagagccctgtccttccgcagccgtgggccccgcagggaccagccaagcagggcaaccaaaagctggaaccagcagcg

SEQ ID NO: 433272 - DNA, 122 bp, Homo sapiens
ggttttgctcacagaccagagaccgggccagagcaccatctgcccatgtggctgtcaggccggggccagcaggtccctcctagaggggtcctgacctaacagtggggctgtctaggtgccac

SEQ ID NO: 433273 - DNA, 122 bp, Homo sapiens
tcctggagtatttggcctgaaattgggaatttgggaattgctgctctagagcgctccctgcggagtcggccgcccgcctctcccccaggtctctcccgacgtccccacgcggggcgcaaccg

SEQ ID NO: 433274 - DNA, 122 bp, Homo sapiens
gttccgccgccatgtgccaccgctcctccggtccgagattatgtaacgaagcccggcgcccgcgagcctgccgtacccgccaccgccagcgctcgccccctcgagccccatccgttggcccc

SEQ ID NO: 433275 - DNA, 122 bp, Homo sapiens
ccctgggctggcagccggcggcccgccccggcccttcctcccccaccctccgcggcgccgcgtttgtcttcgcgcttccactccccgggcgcgcctctggcctcggctctgcgcgcctcctt

SEQ ID NO: 433276 - DNA, 122 bp, Homo sapiens
gcatgctccctgtatctgcgcctgtgttcacatttctccttttaaaaagactccagttgccgagctcagtggctcacgcctgtaatcccagcactttgggaggccgagatgggcggattatg

SEQ ID NO: 433277 - DNA, 122 bp, Homo sapiens
tccggggagctgccctcctggcgtgcgcgggccatggcgctccctggggcctgcgggacacgggaggaggagcaggtcagcagggaagtaccagggcccactgtacctccagcctacccggg

SEQ ID NO: 433278 - DNA, 122 bp, Homo sapiens
ggaaggtgggcgctgcttccctcgcggggcagatggtctcggccgtcactctgctgtccccgtcctggctgtgagctcagcctcagtgtccccacctgtgaaatggggagacccccaatcct

SEQ ID NO: 433279 - DNA, 122 bp, Homo sapiens
gcttttcttcaggtccacagagaacagctgttcctcatcaaattcatgggtgaactggcccgaggcgccgtaagactggtagaaggcgggtccgtaggagcccatgtggtcagctgtgtttg

SEQ ID NO: 433280 - DNA, 122 bp, Homo sapiens
cccctctggagtcggcgctccaggctgctgcccggccggtggccaaggccccagcaccaccgtccctcctgcagggcatccagcacctacccttccactgggcggctcctggttctggtccc

SEQ ID NO: 433281 - DNA, 122 bp, Homo sapiens
ttattgttttttgttttgttttgttttgaaattactgtatacctctcagggcgtcgattacgaaactcaggcccagaaagcacaaggggtgtcgttaatcgttagacaattaagtaaataat

SEQ ID NO: 433282 - DNA, 122 bp, Homo sapiens
gaggagaggggcaggagtcacggccaggcgggccctcaggcgggaaggaatgtgcgcctgcgattccgggacgtcctgcaccagcccaggagaacccgcaagccagcggcgcctgtttctct

SEQ ID NO: 433283 - DNA, 122 bp, Homo sapiens
gccttcgcccaccccccaccccggctgatggatcctctgaccctgcgtcctgtcccgaaacgcacctctcccttggaagctatccccagagagagcaggagccactgtggccccatggttcg

SEQ ID NO: 433284 - DNA, 122 bp, Homo sapiens
gccccaggagccaaatccccacatggaaacccttagtaggtagcctggccaagtgggtagcgggaaatcagtgatggtaggccctgggacttctctctagtcccctccccaccctttttttt

SEQ ID NO: 433285 - DNA, 122 bp, Homo sapiens
cagctcccaacggctgggtgcctgagccaagcagctcccaacggctgcgtgccccgaggccgggcagacgcaggtgtcccaggaccaaaatagcagtcagatgatcataaggccccgtggca

SEQ ID NO: 433286 - DNA, 122 bp, Homo sapiens
caaggatgtgatgtgaattcagcaagccactcagctccagggctcctggcctcccagaagcgccggctcttaacagaatggctctatctccttccccacccacctccccagccccaacggag

SEQ ID NO: 433287 - DNA, 122 bp, Homo sapiens
gagcacgagcttcctcccccgcctctcccaagccttggctcctgctaccctgagaactgccggaagggcaaaagcgcgtccagaatttctttcagtgccccacccgtgtttgctttctccag

SEQ ID NO: 433288 - DNA, 122 bp, Homo sapiens
gctgggattacaggcgcctgccaccacgcccagctaattttttgtacctttagtagagaccgggtttcaccatgttggccaaactggtctcgaagccctgacctcgtgatctgcctgcctcg

SEQ ID NO: 433289 - DNA, 122 bp, Homo sapiens
gaaatggaagaggcagaacaacacttgaagccttgcaacctcaccttagttctgctaccccgagacacccctccatcacagccgagggcccagggcctgctgttggggtgccaattctcatt

SEQ ID NO: 433290 - DNA, 122 bp, Homo sapiens
ggtggtcccagagcagtaggaacacttggtgacaacacggaccttcctactgagaaatgtcgacagtgcatctcccaggaggcctaaacctcatcatcttacacttgttcttattctgaaca

SEQ ID NO: 433291 - DNA, 122 bp, Homo sapiens
ctccgctctcacctgtaacccggacgtttccaagtccgaggctgaaccggggctgcccagcgggtgggaacgacctcccaggaaagccagatgcaagaagagcaggagcaggagcgcccggg

SEQ ID NO: 433292 - DNA, 122 bp, Homo sapiens
aaaggacactattaatccagtgaaaaggcaacccaggaaatggagaaaatattttcaaatcgcatatctgataaggagttaatatccagattatataaagaatacctggctgggtgcagtgg

SEQ ID NO: 433293 - DNA, 122 bp, Homo sapiens
ccagattggcccaggcattgaggttgcccgggtgctcgtgggccacctcgaggaagcactcgcgggcctcgtccagctcctccaggtagaatgcgaaagcgcccaggaggtgacgcacagcg

SEQ ID NO: 433294 - DNA, 122 bp, Homo sapiens
tgaaaaaacaaaccatctctagtattcgctgtaattaccagaaattaactccttagaaaccggcttattatcccaatgtttattttttttaaatgactgaaaatatgcactttaaaaacagg

SEQ ID NO: 433295 - DNA, 122 bp, Homo sapiens
caatctctcatcaggtgtctctggagctgggggcactgtgcatcagccaggtttcattgtcgtggaaaccaattaccgactgtatgcctacacgggtgaggcgggacagagggcccctggaa

SEQ ID NO: 433296 - DNA, 122 bp, Homo sapiens
cgttccccaagttctcccaagggcgagaaggagaagagcaggctgcgccagggttcctggcgggcgtttctgaaaagcaaagatgccggaagccccaaaaagcccaccctagtgagtctgcc

SEQ ID NO: 433297 - DNA, 122 bp, Homo sapiens
accaaagggaagatgtaaaatatcagggaaggctggccaatgggtatcacccttatcccacgtttcccactttcagtgcagatgttcttttttccaagcaactttacatcaaaagcccagta

SEQ ID NO: 433298 - DNA, 122 bp, Homo sapiens
ggaagttacgccagccccacgggccggcagatagcagcccagcctgggtcccccacccttcggttactgaattaacagagggtgacattatcagacctgcagagccacatgagatcttccga

SEQ ID NO: 433299 - DNA, 122 bp, Homo sapiens
ctggccctcgggttcatggaatggcctaactggaaccaacgcttacggagcaagggtatgcgagagcggttcttcctatacaggaagtggaagatgttttgtttggagtcctcgtcgtcctc

SEQ ID NO: 433300 - DNA, 122 bp, Homo sapiens
agcctttacttctgagtggtctcagccttcagcacccagtaaccacacagcagtgcatggcgacttgattttcccgcctaaatcttaaccaagtttccaaggccatcgtggtcacttgtgtg

SEQ ID NO: 433301 - DNA, 122 bp, Homo sapiens
cagcaatacagtcatccaggttctcctcacagcttgtgccgccccagccactcacacacacgcagtgaaagctaccagcagagttctggcaggtgcccccgtttctgcagtgagggggaccc

SEQ ID NO: 433302 - DNA, 122 bp, Homo sapiens
cgcggtgacacggtgttccctgggctcggcgggacagataacatgaatgtgccctttaaacgtcccaagttgcagggacagcccccggcccagcctcgctcccggaagcgccttcgcccccg

SEQ ID NO: 433303 - DNA, 122 bp, Homo sapiens
cagcctcagaagctgccggtctgtgtgttctgtgggagtgttacaagtgttggaagtctgcgtgtgtgtgtgtgtgtatgtgcctgtaagtgtagtcgacttaaaggaatgtggctaatgca

SEQ ID NO: 433304 - DNA, 122 bp, Homo sapiens
atagctgctcctccccgggcaccagcagccactccatggatgatgatgactgcttctccgcgggccacagctccacctccataggctgctcgctcgtggacgtggacgattcttccagactt

SEQ ID NO: 433305 - DNA, 122 bp, Homo sapiens
aagctcaaagcccgccggcttctgcagcttctggagcttctgggagccaagagtgtcagccggaaggatcccgcacacggcgcttagttctggaactggatacccgggggaggatgcgggat

SEQ ID NO: 433306 - DNA, 122 bp, Homo sapiens
gatgaggaagccgaggcttggccacgcccgggcacttgtcccaggtcccacactacagctcggcgggattcaaagcccggtttggaaggaaaagattccagccgcactgcccacaccaactg

SEQ ID NO: 433307 - DNA, 122 bp, Homo sapiens
tgattcacggtgggtggcgcctcttcagtgtgagatcttgcttggatggccttctggacacgctagcaacgtcattgaagggacgatggtgccatctgctctccagggtagctgaggggatg

SEQ ID NO: 433308 - DNA, 122 bp, Homo sapiens
ttgaaaaagagtgcgagactcggccaatggccgcgaagaggggcgggtcttggcgggaggcgcgcgcggctcagagggttggcgaaccggtcgcgcgcgcggcgccgtgggttggtggcgcg

SEQ ID NO: 433309 - DNA, 122 bp, Homo sapiens
cctaagaccttgggaggaaaactcagagagggtcttcgttgctcagtcagtcaagttcctcggagatctgcctctgcctcacctaccccagggaacttccaaggaaggagcctgagccactg

SEQ ID NO: 433310 - DNA, 122 bp, Homo sapiens
atctcacacgtttgtaggggcactcccagatgcctgtctcacgctggcacagtccccggacggcaggtcagcaacagtcacatctcacatcgcacagccaggcatacaggcaaagggcctag

SEQ ID NO: 433311 - DNA, 122 bp, Homo sapiens
agagggcgtgaactctgtcgaccagtcagagtgacacaccaaagcttctgaaccaatcagcggggcggtcctgcggcagccttccaaagcggagcagagaggggctgaatagagccaatgag

SEQ ID NO: 433312 - DNA, 122 bp, Homo sapiens
ttaaatatcctgatctctgggaactttgtcctcactttagcttcctgcagtactttgcagcgctctggacagggagttggaaaacttgggcttcccttaacattgtctccccagagtctagc

SEQ ID NO: 433313 - DNA, 122 bp, Homo sapiens
acaattcaccctcatctgctttctctagtcccctgtacttcttagtctctccgctcaccccgactgcaacgtctggaaatccctccaaagccagcagccccggagggctcgggtccctggta

SEQ ID NO: 433314 - DNA, 122 bp, Homo sapiens
acagacacaaccttatgtcctgcttccaaaacataaataatggttgtaaagcgtcccacacgttgacccaaagtctcctttgaaacaggaaattgagacacgccggttgtgaaacctactga

SEQ ID NO: 433315 - DNA, 122 bp, Homo sapiens
gtggcgttgttcctcctcacactgatcctctcaggttaggtgaccgtgcgctaagtccatcgtgcagtcgacgtgaattgggtgggcagcctcaccttcggccgctttataaaccacaattc

SEQ ID NO: 433316 - DNA, 122 bp, Homo sapiens
tcaaatgaattagatgtggcctatgctttgcagaggatggacctcacctactccgcacaccgtgaaaaaactggaaatgggcattgtagtctttaattaataaaaacaccaaaaatgtgtat

SEQ ID NO: 433317 - DNA, 122 bp, Homo sapiens
gctcctcttgggtgagtagaggggtgggggcgtggtggggggacgccacccagccaccggcgacagggagccccgagcctgcgccttcgtctcagacgaaggagccagctggcaccgggcgc

SEQ ID NO: 433318 - DNA, 122 bp, Homo sapiens
ctagctaacacctagttgagtactcagtgtctatgggcattggccgaggctatacatacacgattttctttagtcctcataccgtcctcatggggtaggtattattatcataacccccttgc

SEQ ID NO: 433319 - DNA, 122 bp, Homo sapiens
ccagctctcagtggagaagagacccacagtgggtagctgccttccacaggcaggttgccccgatgtctctgcagccttcagcagagagacccagagtgggtagctcctatctgcaggcaggt

SEQ ID NO: 433320 - DNA, 122 bp, Homo sapiens
gctgggatgacaggctgagccacctcaccggcctcttatgtgccttttaatctgcaggttcgccctccctctctctttctgtggtttgtttttgtttttttttttctttttttcttttgtat

SEQ ID NO: 433321 - DNA, 122 bp, Homo sapiens
ccgagggctccgacaggctggtggccagggctgaccagccagagtttcatctaaaagcctcgatggctatttttgggacaaatgacccaccacttccaatgacttgctccgaaatggcatct

SEQ ID NO: 433322 - DNA, 122 bp, Homo sapiens
tgtgaggggtgggaagcacagtcgaatcagcaggtgagttcccatgcctctttgccctgccgtcacaccatcgaaaaaatataaatcttcagattgaattcagtcaaacttctggtcaaaaa

SEQ ID NO: 433323 - DNA, 122 bp, Homo sapiens
ctttacacaaatgagtctgcccacaagagccctcacggggaatgtgtgaaaggcgactgtcgaccccagcgtttctttcttaggaattccttcagaccacctttaatttgtctgctgtgtag

SEQ ID NO: 433324 - DNA, 122 bp, Homo sapiens
tggctctgaatgtccttgcgcaggttatttaatctttctgtgcctcagccttctcatatgcgaaatgggaagagcaatgcattctctggtggatctgggttgtgtggggcctgaagctctta

SEQ ID NO: 433325 - DNA, 122 bp, Homo sapiens
ggatgatcttggggttttgtttttttctaagacagggtgtctgtagcccaggctcgagtgcggtggcacttccaacctagatctcttgggctcaacaagtagccctctttttcggacagagt

SEQ ID NO: 433326 - DNA, 122 bp, Homo sapiens
aaacagttgtgtcatttctaacttgcactataagaagcaacgatttgctactcactgttccgagttcttagcacggattaactcacgcatcacgatcttcaggattcaaacacaggcaggca

SEQ ID NO: 433327 - DNA, 122 bp, Homo sapiens
caagactttggctaattttaagcttcccttgcagtctaaatattgtagttcctattttcccgaagaggaaatcgaggctcagagatgttaacttgactcaaaccaatgcaatttgtgtgtgc

SEQ ID NO: 433328 - DNA, 122 bp, Homo sapiens
ggttgtaattcacatggaaacaagttgactttatattgtttctctgggtcagtaaaagtacgtcaccttttagaggctgatagttttagtgtgttgatatgttaccaggggtttgccgctta

SEQ ID NO: 433329 - DNA, 122 bp, Homo sapiens
cgggaagtcggcgctgctggagcgcgcgctggcgcggccgcgcaccgaggtgagcctgagcgccttcgcactgctgttctccgagctggtacagcactgccagagccgcgtcttctccgtgg

SEQ ID NO: 433330 - DNA, 122 bp, Homo sapiens
acgaaattccccgagcactgtccatggtatgtggtttcccggttgcttattgggtggtcccgagagccttccttttttccttcctgaggcgtgccaagtcccctctcctcttctctgggtgg

SEQ ID NO: 433331 - DNA, 122 bp, Homo sapiens
ccgcgcgcgataggatgggcggacggtgaagagaactagggtggaagggccggacaggggcgacctcagtgacggaaccggacacagacgcagatctggcagctgagcgacaggcttcggag

SEQ ID NO: 433332 - DNA, 122 bp, Homo sapiens
accaatacggactgagggtttaaagaagatggtgtccgccgcaggaccgctctatcttctcgggtgaactctatggcagagcataggcattcgatttagagaagtgaagccgagatgggtgg

SEQ ID NO: 433333 - DNA, 122 bp, Homo sapiens
cgtcaactcacttgaccctcggggcgaccccacgagactggcaccattattgccccccgtcggtgggtccaaaaactcacacccactgaagttaagagacttgtctgagttcatactgctcg

SEQ ID NO: 433334 - DNA, 122 bp, Homo sapiens
agaggccggcgggtggcggcgatggagaggacagatccggctcccagaggaggtcgtgagcgcggggcctgcgccggccggaggagggacccggggggctgcaatatggctgctcgggcgcc

SEQ ID NO: 433335 - DNA, 122 bp, Homo sapiens
tcatttatataaatgtggatatccccagagaatcactagtgtagatgatcttatatgtttcgttcaactctgagaaactatgaatccataaggtgtggttgattgcagaaggacaatgatct

SEQ ID NO: 433336 - DNA, 122 bp, Homo sapiens
atcttgaggctgagccttgctgagggcactgaagctccggggagtttatagctggaggctcgggcccgccccgaggggagagggagggggagagaattcctttgctcaaacacaagcctggg

SEQ ID NO: 433337 - DNA, 122 bp, Homo sapiens
cagaacaacaaccacccctgcccctgaagccttccctgaaaggcttcaagcacaagagctcgttttttaaaaatccaagaagagctgaatatgagcagatgaaagcagctataataaaatga

SEQ ID NO: 433338 - DNA, 122 bp, Homo sapiens
cttccttccttctatgacttatctcagaatgacgttacaattgttattgtgtttgagtgccgacgctgaggcattggctagaaacttctataattaggtgttttctgacactagacaaaatt

SEQ ID NO: 433339 - DNA, 122 bp, Homo sapiens
tgtgggtgggcagtaaagccagctgtcagggttgcaggcccggacttggtcctggattgtcgcctgtggatcagtttggcctcacacattctggaaaggcagaacatttttttgctatacaa

SEQ ID NO: 433340 - DNA, 122 bp, Homo sapiens
tatccagaaagcattcccagatggactttatcccattctgcattaatctttctatctactcgacatgcgcagatcaggatgtgagcttcataccacgaatgtagtatgtgtatgtgcttgtc

SEQ ID NO: 433341 - DNA, 122 bp, Homo sapiens
aatgaaagagaaaagaaaataccaaagttcatctcaaggatccttagcaataactacacacgttaaaacaaagccacagccaattgtaaagagtcatgtgacagagaggaccaggatctcat

SEQ ID NO: 433342 - DNA, 122 bp, Homo sapiens
aggggaaggcaggggttagaagtgcctggaactctgtaccttaaagtgagaggccgctgccgggggagaagggctgggccattcggggaagtctccgggccttatctgagccagcaaaccct

SEQ ID NO: 433343 - DNA, 122 bp, Homo sapiens
tccagggggcaggggaggtggcctggaacctaaggcatggtctttttggtttctaatcctcgattactgtttttctgccaactgctttccttgcagggagcaggagatttttcttcaagtgg

SEQ ID NO: 433344 - DNA, 122 bp, Homo sapiens
cagcgtttctgattggtcgctggacgcgcgggatgcgagtccccattggctaggccagggcgcctgcgcggcggggttctcggtcgccagccattcctgaggaggactgccggtcgttcgga

SEQ ID NO: 433345 - DNA, 122 bp, Homo sapiens
gacagcctgtgctcttctgagtcagaccagctgcttctcagcagggaccacagcatttcccgtggctcagctcaggacagtagccggggcgcttctccgggagtgttcctgggagggcttgg

SEQ ID NO: 433346 - DNA, 122 bp, Homo sapiens
gactgggagtgctgagtgaagttcactgaaattttatgaaattcagaaaaagaaagaagtcgtttcagttgggagtggctgaaaggatgtttgaactaggacatgaaatacacaaagggatt

SEQ ID NO: 433347 - DNA, 122 bp, Homo sapiens
ggcgctcggcgttgactgccgccggctgctttgcctggaagaagaggagccaagcaaatccggccggtgttaaatttcaccgctcactgacttgcaatgacatcaccaaacactgcgcacac

SEQ ID NO: 433348 - DNA, 122 bp, Homo sapiens
tcatgtgacaattttcccaggatcatttcaattttctgcgatcagagagaatgccagccacggccctatggaccagggacaagatagcacacctgagcagaaagaaagaggaccactagcct

SEQ ID NO: 433349 - DNA, 122 bp, Homo sapiens
ggctgaaaaccaaagagaggacatgtctaggaagaaaggagagaatgggaattaggagatcgagagggggaagactgagttgaaaacgctaagctctccagtactgagaaaacaagttttca

SEQ ID NO: 433350 - DNA, 122 bp, Homo sapiens
agcggtgcgccggcacgcagacagctctgctgctatccctgatggccagggctctctttccgttctccttccacacaccccctttccctgggctgttattatttttttttcctccttcaaaa

SEQ ID NO: 433351 - DNA, 122 bp, Homo sapiens
gggtggcagaggggggaaggttaagcggggctgctggcttggggaatttggggccgtccgcggggctctcctcgggctccaagctttcaccccagaaaacagccctgaaccccaaatttgct

SEQ ID NO: 433352 - DNA, 122 bp, Homo sapiens
gggtctcacacaggtgtcccagaccagcgtggggatgcccaggtggccaggcccagcctgcggccgctgaagttacacctgccgggtgagtagggctgccgggaccccaccttgagtgggag

SEQ ID NO: 433353 - DNA, 122 bp, Homo sapiens
gcggtctgggatttgggttcactttcttcactggttctcttggcacccgctcaaattctgcggtcttgtcgggggcccaggtcgggctctgcactgtggcctcctgcccatctggccaaggc

SEQ ID NO: 433354 - DNA, 122 bp, Homo sapiens
ggtgatccgcccaccttggccacccaaagtgttgggattacagcagtgagcaaccgcgcccggcctcaaatgtcactttctcagcaaaccctttcctggcgtgttccctgccttctcgtgtt

SEQ ID NO: 433355 - DNA, 122 bp, Homo sapiens
gtggcgggcgcctgtagtctcagctactcgggaggtcgaggcaggagaatgccgtgaacccgggaggcggagcttgcagtgagccgagatcaggccaccgcacttcagcctgggcgacagag

SEQ ID NO: 433356 - DNA, 122 bp, Homo sapiens
accccacaactagttatgtagaagaccaggaagacagtgactccagcgaggaggacagctcgcacacactctcccactcaaaaagtgaatccagagaggagcaagcagacagcgaatccagt

SEQ ID NO: 433357 - DNA, 122 bp, Homo sapiens
gtaaacgttttttgaaacgatgatgagcaaaaaacgcctgatccagtctatggcgcgtttcggtgggaagatgaacacgccttcccagcagagtaaaacgtgattacaccaaggaccggtac

SEQ ID NO: 433358 - DNA, 122 bp, Homo sapiens
ccgtccattgttctcggtgccccacgggcttgagccggggtgaatctggaggggccgggccgagcccgggggcgctttcgcacgcgaagcaaccgctagagcaggacctggtctcccgagag

SEQ ID NO: 433359 - DNA, 122 bp, Homo sapiens
actcccactccgactctgaaggaaaatccgaagatgaaactaaactccaaggctgcaacccgcggcggccgtgcaagcggccccagcgcaggtcgccgggtgggcgggccagaggccggcgg

SEQ ID NO: 433360 - DNA, 122 bp, Homo sapiens
gtggagggtcacacataacctttgtgccctcccaacaaaagcaacataggctcaagttcccggccactaaattgagtggcactcaccttggaggcaagaaaaggaagaagcccggagatcat

SEQ ID NO: 433361 - DNA, 122 bp, Homo sapiens
cagcctcagaccctcatgtatcctcttatgtggccacacacacacaggtacacttggaggcgggctgcccctgcccagcctggcagaaggaattgtgtggtcacaattagagactgttcccc

SEQ ID NO: 433362 - DNA, 122 bp, Homo sapiens
cccgattggagcttattaatatgaagtagggctttacatatgcagtcccaccggcccagccgcgcagccgattggggggcctctgcccaatcaggagggaggcgacgggaggctgcacggag

SEQ ID NO: 433363 - DNA, 122 bp, Homo sapiens
tattgtttttgttgtcccaggcaggggcaccatgtgtcacacaggtcactccggatcagacgccgttctgtgtcagtggtcaggggctgatcaaccctggaccctgtgggctataaccatgc

SEQ ID NO: 433364 - DNA, 122 bp, Homo sapiens
taacaaggagggagcacgttcttccacctgggcaacacgctgttcttcttgctatccttccgtggctattgtaaagcatttagagacagtaataaggaggcagcacgttcttccaccttctg

SEQ ID NO: 433365 - DNA, 122 bp, Homo sapiens
gggtttcaccatgttggaaaggatggtctctatctcctgaccttatgatctgccccccttcgcctcctaaagtgctgggattacaggtgtcagccaccgcgcccagcctccagctgctttta

SEQ ID NO: 433366 - DNA, 122 bp, Homo sapiens
ctggtagcacatttctggccaagtcctctaacatgcccctcaaaacatgtaagtccaaggcggcttcagaggacaggcaacaaaacagacagtgtgtcctgacagctctgctgacaaaggtg

SEQ ID NO: 433367 - DNA, 122 bp, Homo sapiens
cgggcgcgcgcggggcacgccggaagttgaagtctccgtccagctctcgcttcgcagaggcgctgactccagagacagacttcctggctgcaaactcccagctccgccacgaggaaacagcg

SEQ ID NO: 433368 - DNA, 122 bp, Homo sapiens
ggagctggaggctgttggcagagttggcagacccctgtggaggaggaaaggccgggggagcggggaagttttccactggagtgtggtgctgagaaagtttcagcaaagccattggggagcca

SEQ ID NO: 433369 - DNA, 122 bp, Homo sapiens
cagcatgtggagaggcctgttctagacactggagaggccacgtggaagagagcacggcaccggataaacatgcagccaactgctagacctggggcgagacacgcagccttcctcgctgcctc

SEQ ID NO: 433370 - DNA, 122 bp, Homo sapiens
atctccctatttctgttcatagttttctagtcacttagaatcaaaattatagccttgtatcgaaataaatccccacaagacacctgctagttacaaagggaaaaaaatagcaactttacaga

SEQ ID NO: 433371 - DNA, 122 bp, Homo sapiens
tgtggaaagccacgggcctgcagcaacctccaaggtaacagccgctgccaccatcgccagcgcatggctgccatgttgaattgattcggcaggcggtgcaagagaaaccggccaatgagagg

SEQ ID NO: 433372 - DNA, 122 bp, Homo sapiens
ggatggtcggagctggggagaactcagttggcaatatttgcaaccccgtcccacaccctgcgaccaggaagggtcaatctgagcatctccttgaagcccccaggcccaggttctctggttgc

SEQ ID NO: 433373 - DNA, 122 bp, Homo sapiens
ccgggtgagtgcggggccggagcctggaagcagtcttggccctgccctgggttctaggcccggagacggggtggtgcggcggctgggaaatgggggtacaacccagagtgaggggcctcgag

SEQ ID NO: 433374 - DNA, 122 bp, Homo sapiens
cgtccccaggcctgcgcaccgccccgacccgaccccagcctaccccggcctctccgcgggcgcgccacaagcctacgcagccctggcgactccttcggcccgcggcccagcacgcgcaccat

SEQ ID NO: 433375 - DNA, 122 bp, Homo sapiens
aagctcaagcccaataggaagtcagcgactccatctcagtccccagcacctgaggcagcacggccacgggacgcctgccgggtgcccacagagccaggctgcaggagtgagtggtcccgagt

SEQ ID NO: 433376 - DNA, 122 bp, Homo sapiens
ttcagcactcaccgaatttattattcctccaggtgacgcccaggttccagggcctcccaccggtgtgcacgcttccgagatcagcagaaactatgtcgtcctcagctgggagccacccactc

SEQ ID NO: 433377 - DNA, 122 bp, Homo sapiens
taaagttcaaacttcttagcttagagagacattcatgatgtttccatttcttctctgtctcgtccatacccattcccctgtgagtgtcctttgcttcagatacacagagctacttacaacca

SEQ ID NO: 433378 - DNA, 122 bp, Homo sapiens
gccgtctccctccgctcctcagcttggctacttggtgctcggaccccgcatcctagtcctcgtccttgtgggacagaggccaaccttgctgtcgaggccccaatatgtcaccacaaacactc

SEQ ID NO: 433379 - DNA, 122 bp, Homo sapiens
ctgtgctggtactggccgcgtccacccaggctgggcgctcttctctttcccacgtcatcacggcgttttactcaactacaggtcggcctcactgaaataacgtggaacaggtgatggcgaca

SEQ ID NO: 433380 - DNA, 122 bp, Homo sapiens
cgcctagaaacacctcccagctgccgcctacttgcccaggctcaccctgccctacacgggcgcaccgcctcagggcttcctgaaacagcctcacttaccagcgcggccaggatatcagcttc

SEQ ID NO: 433381 - DNA, 122 bp, Homo sapiens
ggagacagaacagatggacctgttgggtgggccatggagctaaactccagactggggtgacgcccgtgagaaaccccaagaccgtgagtgccatgtataaagccagctgtggagcaaggaca

SEQ ID NO: 433382 - DNA, 122 bp, Homo sapiens
gtggcatgtcacggacttgccgtctgggcactgtgtggccggcagggtcagctggctgctcgtggtgtacaggtccccggaggcatcctggctaggtgggaagtttctggcggtcacgttct

SEQ ID NO: 433383 - DNA, 122 bp, Homo sapiens
tgtgggtcgcgatgttgtgattttaaacagtcccttaccatgagaatcattgttgcagcccgatccttccatacctcaacctatttatcatgcaaagaccatcccccacctccaacccttat

SEQ ID NO: 433384 - DNA, 122 bp, Homo sapiens
gttacgcattgactcagttccgtggcttacagtgcaaacacagagaccttgtcccatgcccgtgggctcatggtcaaggacactttgcatcatttgacctcggaaacaggagaaacggaagc

SEQ ID NO: 433385 - DNA, 122 bp, Homo sapiens
gtaagtcgtacaaaaggtccggggaggcgtacctgggcggcgagaggcgagagaactccgcgcgggctttccagtgcccaggcccctgccggctccgaagccgaaatcccttcttccacttc

SEQ ID NO: 433386 - DNA, 122 bp, Homo sapiens
ggcccgcgacaacaagaagacccgcatcatcccgcgtcatctccaactggccatccgcaacgacgaggagctcaacaagctgctgggcaaagtcaccatcgcacagggcggtgtcctgccca

SEQ ID NO: 433387 - DNA, 122 bp, Homo sapiens
cgaaacagcccctgctggctctggcgtctttccgggccggggtgcccctctgccatgttccgtggacagcgaacacccgggccggagccattacctactgtgaaggccagcgcagggggcac

SEQ ID NO: 433388 - DNA, 122 bp, Homo sapiens
agggattaggttacccaggttgttcatggagttcccgctgtacggcctataactggatggcgcaattttcccacctgaaactcttagtgcagggcctaacaggccttcttagctagagtcgc

SEQ ID NO: 433389 - DNA, 122 bp, Homo sapiens
ccggagggaggcggggagggtcgcaagcgcgccgccggcgtccaatcaggacctgcgttccgggagccaatagcagcttcgagagccgctcacctagagcggactacacttcccgtcacgcc

SEQ ID NO: 433390 - DNA, 122 bp, Homo sapiens
tttacctgatggaacactattcagccataaaaaagaataaaattctatcttttgtggcaacgtggatgagcctggatgacattatgttaagtgaagtaagtcaggcacaagaaaataaatac

SEQ ID NO: 433391 - DNA, 122 bp, Homo sapiens
acttcggcaagagcagtgttttgtggtcctttgacgattgtagccacatcctctcttccccggctctataatagccctaaaacccagcagccttgcaatcttggcagccacgaaaaccagca

SEQ ID NO: 433392 - DNA, 122 bp, Homo sapiens
ctccccatttccgagtctcagtctctggcttcctaagtcttgctcttcctctgggtctcccgcgcagggcttcgcggccccgcccctctgcccctcccatctcggccctcgccccttctctg

SEQ ID NO: 433393 - DNA, 122 bp, Homo sapiens
ctgagggctgtgctgtgaggtgggtccgggagcagctcggtccggagagtggagcgcgatcgttccctctgcaggcctcaatcgaggggcaaggctgatgctccgggccagctggggtctct

SEQ ID NO: 433394 - DNA, 122 bp, Homo sapiens
gtcgaaggttctccagaggccgaacagcccaaacatcctggccggctcagagggtgctggcgagggacctgcaagatggagacagacatggtcctcaggagtcttttgtgcccccgctgggg

SEQ ID NO: 433395 - DNA, 122 bp, Homo sapiens
tccacgtggaggaaggacgccctaccttccagaagcctagatgaagggcagatggggcttcgcatggccaggcctcagatcggcttcccccagcccctccagggaagaggcaggcggctccc

SEQ ID NO: 433396 - DNA, 122 bp, Homo sapiens
gcccaactcttggcggagcgcggctcccggctccggctcctgtgcagccgcaggccccggcgctgcccagtagacagactaagcaggactctcttaatgtcccttaagtcttttggttcttg

SEQ ID NO: 433397 - DNA, 122 bp, Homo sapiens
agtatcgtaaagagtttcaagatggggccctgggagcattgaactccaagcacaggccctcgcaggggtcccactgcaggaagccggccctgctgctgaccctgcccacctccctcagctcc

SEQ ID NO: 433398 - DNA, 122 bp, Homo sapiens
agggtctttatgttgaaaataaacgcagagtgaactttccccagaatgctttcactagcccgcactcccagtattttagtcagtaaacgttggctggattgtgagcaaatgaccatctgcag

SEQ ID NO: 433399 - DNA, 122 bp, Homo sapiens
tacaagagatattgctagtaaacctaaacagaaagacagaaaactgagcagtggttctaccgtaagcagaccagaaagctctataaagcctgaaagtcagatttcttatgagtcagcaagta

SEQ ID NO: 433400 - DNA, 122 bp, Homo sapiens
tcctgttggaaatgcacggaggagcagtgaaacaccagaagccccatcctctctcctgcccgtgccctcatgcccagccagctgaatattcctgtggcttccactcctgcactgtcccctca

SEQ ID NO: 433401 - DNA, 122 bp, Homo sapiens
tgtggtcatgaggagacctcaccaccagtcggtcaaatctgtagaacacaatgtgttgtgcgcatcctcggatattgtgtgttcctctgccatgactacctagtccaagagtaaatcccacc

SEQ ID NO: 433402 - DNA, 122 bp, Homo sapiens
agtgaacgtccgtctgagaaaacctctttctcgctggtatctcggcacggtttggagacgcgtccgcggacagttcccgaatactcgcaggcggctttggctgcccagcctcgggctgagat

SEQ ID NO: 433403 - DNA, 122 bp, Homo sapiens
tagcccaccccttactccgccgtggggcggagccgcgccacagctgacccaatgagaaaccgtcgtttcccagagtgacgtgtacgcagagcaatcatggagtccagcccagccgggggcgg

SEQ ID NO: 433404 - DNA, 122 bp, Homo sapiens
gtttcagcgcccggaaggggctgggccacagctggtgcttgtggaagtgctgtgcgtgggcgcgcggcggcctctcatccagccccggcagctcgttgtcctggaggggcccagtggcctgc

SEQ ID NO: 433405 - DNA, 122 bp, Homo sapiens
aagaatgataaactacaaaggccggaaatgcgtcaccgcggcccgctctccgcgaaacagcggttccggctgtgttccttctaggaaggccggaggtttccacacctctgtggtcgtcactc

SEQ ID NO: 433406 - DNA, 122 bp, Homo sapiens
ccccggccttgggggttcttgcactccccctctgccgccctcgtcccatccgccaggtcccggcccctcacctgcagcccccggccccgctagcagcagcagcaggggcagcgcccgcacgg

SEQ ID NO: 433407 - DNA, 122 bp, Homo sapiens
acgtctgtccacatttctaggttgtctttgggtttccttagcttagggataatggtctttcgttttgatgtttcttcttaatttcattcttaaagctccagggatgcccacatgtcactccc

SEQ ID NO: 433408 - DNA, 122 bp, Homo sapiens
ctgggtgcggtgcatgggggtgggaaatcctgggcttgcaggcggagctggtgctgagaacgtcctctcgggctcctggcttcagggcccagcactggacccttcctgacggtgcagaggag

SEQ ID NO: 433409 - DNA, 122 bp, Homo sapiens
gtcacatggcaaagggggctaagcatgctaatgttctagcttggatctgtctgaaaaagccgacaattcccctcccatgataacccattaatctattaaccttttagtcctttatgatgggg

SEQ ID NO: 433410 - DNA, 122 bp, Homo sapiens
cacaagatgagcacgcgtgccgaggcgctgggcggcggctgtgtgagttggtggcccagacgaacagcttgtgcgagactctgggcatttcggtttctagatacaagatttgcttaaatgtc

SEQ ID NO: 433411 - DNA, 122 bp, Homo sapiens
ttagagaatgaatgcattactagtatttcccactcccctggattaccatgactttttatccgtttcttatcacattcagcctgtctcatagttatttgtgtctgaggtttattttcccctgc

SEQ ID NO: 433412 - DNA, 122 bp, Homo sapiens
actgaattaagactgaaagcctggaaacttccagcttctctcttgctattcctttctccccgtagattgcccctggctcctgggagaggaattcagattaaatctcatgtcttcggtgtgga

SEQ ID NO: 433413 - DNA, 122 bp, Homo sapiens
gcgttagctgtctcttggttgccagctaatagaggactcctaattcatctcaaagtgtggcgtttttctaactcgctcaggtacaacatccccacatgccctgcccccgctttgtatgcaca

SEQ ID NO: 433414 - DNA, 122 bp, Homo sapiens
tatccagtgatttaattaatctcaccagctgtctggctgtcccacaggacctgccttctccgctgttggcgttagaaaacgattccctttgcctttcctcgctctggcctccgcgtggagcc

SEQ ID NO: 433415 - DNA, 122 bp, Homo sapiens
gtatttctcgcttaaggcgttacccttgtggtagtgggcgcatggacgtttacagttgggcggggcaggatttaaattccgccagtggtggaccagtattggtgataggagagatctgggaa

SEQ ID NO: 433416 - DNA, 122 bp, Homo sapiens
cagcctgaagcatacccggcaggggctgtccccaggcccaacaagcaaagggcccagtagcgagggccactggagcccatctccggggggctgggcaggaagtagggtggggtttggggtag

SEQ ID NO: 433417 - DNA, 122 bp, Homo sapiens
aggggccgtccatgccaaggcccaggtccggaacgagggtgccctgcggatcttcaccaacgttgctgccaaaaccgtcagataggagtgagttctggctgctcttgtggcaggtgaaggga

SEQ ID NO: 433418 - DNA, 122 bp, Homo sapiens
gcggccccatttctcactcccattgggcgtcgcgtttctagagaagccaatcagtgtcgccgcagttcccaggttctaaagtcccacgcaccccgcgggactcatatttttcccagacgcgg

SEQ ID NO: 433419 - DNA, 122 bp, Homo sapiens
aggcgctgctccgcgtcgccgtacgcctcccggtccccgtgacgcagcccgcggtccggccggcggtgttcagagcccgagcacaaactacttcccgggtgccagaccgccccgaggtcgcc

SEQ ID NO: 433420 - DNA, 122 bp, Homo sapiens
ggtccggatgatcgcaggtgcctgtcgggtcactagtgtgaacgctgcgcgtagtctgggcgggattgggccggttcagtgggcaggttgactcagcttttcctcttgagctggtcaagttc

SEQ ID NO: 433421 - DNA, 122 bp, Homo sapiens
tgcttcgctcttgcctacttcccctacttcatcacctacaagtgcagcggcctgtgagtgcgggaagggcgcggggcggagagggcgcggggcccgggccgaccctcacctcccgcttctcc

SEQ ID NO: 433422 - DNA, 122 bp, Homo sapiens
gtgtcaggcgcttggtcccatcagctgggagcagcacatcaggggccaggccatccgcatcggcggccactgtgggctgccccaggaaagggtagggcctcccgtagtgtggtggcagggct

SEQ ID NO: 433423 - DNA, 122 bp, Homo sapiens
gcttccgcgctcttcacctggtgtgtacagggcatttggggcctttagagggcgcacttgcggccagcaggctgaagaggctgccgcggagaaggctggggagcggagctgagctgagctgg

SEQ ID NO: 433424 - DNA, 122 bp, Homo sapiens
atggcctccctcctaaatatacgattctttggcatattggaattggtcagcctcaaagaccggctggctacatcgtcgcacgagacagtcccgcttattcctctgcacggactcggagacgg

SEQ ID NO: 433425 - DNA, 122 bp, Homo sapiens
tcactagagagtgccagacagtgggcgcaggtcagtgcgtgcagcgcaccgtgcatgagccgaagcagggcgaggcattgcctcactcgggaagcacaaggggtcagggagttccctttcct

SEQ ID NO: 433426 - DNA, 122 bp, Homo sapiens
ggcaccaaatcggagcgcggcgtgcgggaggccccagagcaggactggaaatgtcctggccgcgccgcctcctgctcagatacctgttcccggccctcctgcttcacggtgagttcccgagg

SEQ ID NO: 433427 - DNA, 122 bp, Homo sapiens
aatggactctgatgaagatgacgattattgaactacaagtgctcacagactagaacttaacggaacaagtctaggacagaagttaagatctgattatttactttgtttattgtctatatgcc

SEQ ID NO: 433428 - DNA, 122 bp, Homo sapiens
attatataaagcagctacaggaccagctggcttgagagccctggtacctcgggcctccaccgcaccaccctcaggtcccggcccagccaagagcgcttgggggaggggggcgggcaagtggc

SEQ ID NO: 433429 - DNA, 122 bp, Homo sapiens
gaggggacagagacgtggccacagcacctggctcgtccggaaccgggatcaaagtgggatcgggtcgaggggaccggggtacaagggcgaggctggtcactaggcctgaaggagaaggcagg

SEQ ID NO: 433430 - DNA, 122 bp, Homo sapiens
gcccgggtgggtggtccggccccgagccctcctgactctctcgccaatgcccagaggcgccgcagcgattccagggaggccgcgctctcgccccaaggcaaccagaagcccacgtgccagga

SEQ ID NO: 433431 - DNA, 122 bp, Homo sapiens
cccagccatgtggaactgtgaacggggaacaacagttcttttgggtggggaatgagaatacgaaatgtgttaaatgtggagcattttgaatttgcagtagggtagaaaaaaacaaaagaaat

SEQ ID NO: 433432 - DNA, 122 bp, Homo sapiens
ctccagcaccctggggcaaggcgtcgctggagcgtgactcagccgtgcccagcatggcggcgcccttctctgcccagggattctcacccacacccactgccctccgctcaacatccttccca

SEQ ID NO: 433433 - DNA, 122 bp, Homo sapiens
gtggttagacaatcgcaaaaaagacccagctcattagagatgggcaaaccttgaaagagtcggttctgagagggcccctgaagtttggctccttccctgaaattaataacctgtacatgtgg

SEQ ID NO: 433434 - DNA, 122 bp, Homo sapiens
tatcttggccactagcacggtgatgagtagccaggcgtgtccctcgagtcaccctaacagcgggagctgctccgcgccatgctaaagccactccaggacagcaggacgggccgatgggggtc

SEQ ID NO: 433435 - DNA, 122 bp, Homo sapiens
ttcagggccagcggcccctccctgcccctccagtgagtccatggccctgaactccttccccgctccctgcgatgggaggcttgtggcctagatctggggaaaagccccagagcctgaggcag

SEQ ID NO: 433436 - DNA, 122 bp, Homo sapiens
actgttggggggcgtggaagaggctctgcctgcgcaactggagggggtccctgcggatgccgcagtcctgaggctcccagcaggggctgcgcagtggacaggccaaccattgtctctccccc

SEQ ID NO: 433437 - DNA, 122 bp, Homo sapiens
ctgccagctggcggatcatctgcagcgacttctcacgctcatccagccccagcatccggacgtgggccacaagccaagccacagcacacaccgccagactgcataccttccctttgatgtta

SEQ ID NO: 433438 - DNA, 122 bp, Homo sapiens
tgcggcggggcccggggagggggcggccatctcgctcccgtcggcggaacagctcggctgcgggccgggctgcgttccgtcgcctctgcattgtgtttctgttttgcttcggggcgggccag

SEQ ID NO: 433439 - DNA, 122 bp, Homo sapiens
aaaaggcaagagaactacgatacccacaattcaggctcctcacccgaaaccagaagagggcgtatggctagagtttcaccctaagaagaaaggggaagcaggtggaaaagcaattaaaaaaa

SEQ ID NO: 433440 - DNA, 122 bp, Homo sapiens
cgacgatcttgcaagatcggttgtctgatgagcgggcacacccagcacactttgaacaaccgatttatcccgtggtgcgcaggtccctccccgggttcctcacagggtgagtactatggggt

SEQ ID NO: 433441 - DNA, 122 bp, Homo sapiens
agaggtggaggttgcagtgagccaatatcgcaccatcgcactccagcctcagtgatagagcgagactccatctcaaaaaataagattctcataaggaacacacaacctagacccctcatatg

SEQ ID NO: 433442 - DNA, 122 bp, Homo sapiens
taacctccctactcagtcagtgctggcacagttgtaacggaggcctgcgttagtgagacccggcctgccgcaggttcccactttgtgacccagctgctaggatacgctatggtcacccatga

SEQ ID NO: 433443 - DNA, 122 bp, Homo sapiens
tgttccgaggcgagcggctgctgtttgcgcagctaagtggcgtctgtgtacccagcggggcgcagcggtcgcgcgcttatctcccgcaaacaccgcgcccggatccgccggaaccacggccg

SEQ ID NO: 433444 - DNA, 122 bp, Homo sapiens
ccagcactctgcccacagctacctactgcctcagcccctcaagtcccatccctgtttcctcggttcagtgaggtcactgggttccctttaggtcctttgcctgccacctggcctacagctca

SEQ ID NO: 433445 - DNA, 122 bp, Homo sapiens
ggacctacaaagtttaatttctttattactattgttgcttatgaggaagacttaagtagtcgggatctgaaagccagttgcaaaacaatgcaccacacgcctcagtgtggcggtccctaggt

SEQ ID NO: 433446 - DNA, 122 bp, Homo sapiens
gtgcctcagtttcctcaccagtacgctaggagagaccagcgtagccagccacagcggggtcgtgaggattaagtgaggggacagcagtgtctggcacggtgggtgctgagtaaattcatgga

SEQ ID NO: 433447 - DNA, 122 bp, Homo sapiens
gacttacaggaggagcaccaatccgggaatgagacctttaaaaaggtttgacctcttttccggcgaatgatcacttcattaaccctagaacaatttgactttcaaaaggaacaaaataaatt

SEQ ID NO: 433448 - DNA, 122 bp, Homo sapiens
agtgccagggccttgttcccatgtattcagtcccacctacatgcttccacttcagcctaccgcccccaccaacgaggtctctctcacccttccattaagccaagttcatcccttccttcaaa

SEQ ID NO: 433449 - DNA, 122 bp, Homo sapiens
acacaaagcacccttttgcagagctctagagacaaggcatgggcactgagtggcatccagcgccggttagtaagtgacaggaactggacttcacgcgttgtgtccaaatgcccctttcaccc

SEQ ID NO: 433450 - DNA, 122 bp, Homo sapiens
agccccaccccgtgatacctcggtaagcagcacatcttatttgggagataaatgtttttgcgcagccacaactagaaagaaaatagggcgcctgtttaaagcaaatgaaaataggcagaatt

SEQ ID NO: 433451 - DNA, 122 bp, Homo sapiens
cgggctgctgtgcgctttagcggttcttggcgtcgcgttggtgtaggcctagtgcgcctgcgcgggttttatactctgctatatgtgtgtccgctgcttttaggcaaccagccgctgcccct

SEQ ID NO: 433452 - DNA, 122 bp, Homo sapiens
caggtactccttaaagaacactaatttcattatatactactcgttgtacagcagcattcccgttttcacagtgcctatttaaaatgagagttgaagtaaatgacatgctggttgatttttat

SEQ ID NO: 433453 - DNA, 122 bp, Homo sapiens
aattttggaccacacagtaagaaagctgagctcactagtcacagccagcctcttgaaatgcgagatttataacatgcaaaagccgtttccaaagcttcacatttgcatttcctactttgttg

SEQ ID NO: 433454 - DNA, 122 bp, Homo sapiens
gtcatgggttggttttttttctttccaagttagttaaataaataagcaattatgacgcagcgccacatggccaacagcttttagcttataaacatagagtttgaaaagcagtacttagaggc

SEQ ID NO: 433455 - DNA, 122 bp, Homo sapiens
ggtgaagagactagatttagcacatttgcaggaagcatcactgggccactgtatacacaccgacccccaatcacaatatccagtaagattcagaaacccaaggtggaagctcccaagcttaa

SEQ ID NO: 433456 - DNA, 122 bp, Homo sapiens
acacagtgttgggacaagctggaactaaacaacccctctgtggaattaatcatattactgcgtagagcattagacaactgttccattcaaatgttactgatgtcatgtgcaaaatggttgat

SEQ ID NO: 433457 - DNA, 122 bp, Homo sapiens
cagtagtgctcccccgcccagtctcgctgggtctggcgagccaagcccctcgggcgctggcgaggtcctcagccatctgcccctcgagagccaagcgcggacggtagccacccagttcatcc

SEQ ID NO: 433458 - DNA, 122 bp, Homo sapiens
ttgagtgcttactattgatattggtgggctcggagaggtccccaaatgccagtgggacatcgaccccagttagtgttcaggcttttgacaccactgtgggaacgaattccgggctgagtcaa

SEQ ID NO: 433459 - DNA, 122 bp, Homo sapiens
cagcccccggcgggctggaggctcggcgggcgggcgggccggggcctctctgggagccgccgcccagatccccaggtccccggccagcgcccggcactgcgggactcaccgcgggcctgcgg

SEQ ID NO: 433460 - DNA, 122 bp, Homo sapiens
aattaaaaatacttctatcttttgtttaggttatgccaaggtctagagtggatgacctcccggattggtgtgagataacttttttgcttgaaagagactgctctatttattctgtgacatga

SEQ ID NO: 433461 - DNA, 122 bp, Homo sapiens
cttcatgtcactctggagtgcgcctcgaccaggctgacgagagcctgaagacgggctgcacgctcgtccccaaccctgcaggcacctgtgcgagtgagaacgtgagggctgtgtgcgagagc

SEQ ID NO: 433462 - DNA, 122 bp, Homo sapiens
gagggcggagggtcccggacgcggcgcccccaaagggcccctgggtatcagtctagtagccgaagtatcccttagccctccgcagccgagctgggcatcgtgctaataaactgccatttacc

SEQ ID NO: 433463 - DNA, 122 bp, Homo sapiens
ccagcactgcccttttcccaacgctcccatcccgccacgcctcccaacatacccccaccccgacttcccgctcaactcccgctccagccagtcccaggagccacatgcgcatgcgccctccc

SEQ ID NO: 433464 - DNA, 122 bp, Homo sapiens
aggggcgccaggacgtgggcgtgcaggacgccagagctgggtcagagctcgagccagcggcgcccggagagattcggagatgcaggcggctcggatggccgcgagcttggggcggcagctgc

SEQ ID NO: 433465 - DNA, 122 bp, Homo sapiens
cactcccagatgtggttggccgccagcctcaggcgggaactgcaacaggagcctctttcacgaacctggaaacacaaattggccccaggtccaactaccctgggcattagctgaaagagggt

SEQ ID NO: 433466 - DNA, 122 bp, Homo sapiens
ttcccgggttcaagtgattctcctgcctcagcctcttgagtagctgggattacaggcatgcgccaccgcgcctggcccataggcattaatttttacatgatacaggtaaggaaactaaaagt

SEQ ID NO: 433467 - DNA, 122 bp, Homo sapiens
acccacacctgtggccttgaaaggagcccctaccaaatcctcagccggaggcagtgaaagcgaccgtcgttcaaccaaatctgtatttcacccagaaaaggtgaaatcggtgccagcgttgt

SEQ ID NO: 433468 - DNA, 122 bp, Homo sapiens
tacgtaaacacgcagtttcccgagctcgacaatcggctagccactcctgatagcgttcggcgctcgcctctcggcccttgctcctgcgtactacggcttcttccagtcacctcggcccggat

SEQ ID NO: 433469 - DNA, 122 bp, Homo sapiens
aaactcacgccgccgcaggagggccctgtgggatgctctgtgcagagctgttgtgcggaccgggagacgggaaagcctggtggctgcaggagggcaccgtgcagaagtatccagtaaaccac

SEQ ID NO: 433470 - DNA, 122 bp, Homo sapiens
ctggtgtggcatgctctgttttgccgtgactgcggctacatggcttggcctgttgggtggcggtggttgtgtggggctggctatgggactgcgattttgcacatgggtagaacctatgtggg

SEQ ID NO: 433471 - DNA, 122 bp, Homo sapiens
actgcgtgaggagggctttggagggtttgctcagcccagccgtgagggaagtctgctctccggttctcacggctctggtgtcctgtgggccacattccatgacggcagcatgcagcatttct

SEQ ID NO: 433472 - DNA, 122 bp, Homo sapiens
ctcgcccggacacgccctcaccggggcacaccctcacccagacacgccctcacccagacacgccctcacctgggcacatcctcaccggggcacaccctcacccagacacaccctcacccggg

SEQ ID NO: 433473 - DNA, 122 bp, Homo sapiens
ataaacggtagaatatttcctcaagtcaacaccaaaaagggatgttataataaagcaggtcggacaacagtctcacattactgaataacgatactgatctgatgttgatgattgcttcttta

SEQ ID NO: 433474 - DNA, 122 bp, Homo sapiens
tccctcccggtctccccattcatcttcaaaatctgtaagataccgcagccccaggcggcacgatcctgacacttgtgacctctgagtctcacgggacaggctctggctcaggagccatctgt

SEQ ID NO: 433475 - DNA, 122 bp, Homo sapiens
cctcgctcgcccgagcgctgcttctcgtccccgcccgagccgaacctcgattctccttcccggcccgatgcacgtcactctagggttctcagctgagttcgcccgcctagttctttggttcg

SEQ ID NO: 433476 - DNA, 122 bp, Homo sapiens
ttccctagaactaggtcagaattagggaagacaaattacttgcattactttgaggcagatcgttgtctatttcttctgaaaagtcagtctgagttgcagaagtaatagtgtgccttggagta

SEQ ID NO: 433477 - DNA, 122 bp, Homo sapiens
ctagtaggaagccaggggtggttttcccacagggtccaatctttctgcagaggacagcatcgatcggcatcgatcggctccttagtcctgaaggtctgcacggccatccttcctcagatcca

SEQ ID NO: 433478 - DNA, 122 bp, Homo sapiens
actccttactggctcccttgctggcttttcctcgtctaaatgtaggattgcctggggcttcgttctggggctggtttgctatctctacattcattatcctgtggatccaatccagtctcatg

SEQ ID NO: 433479 - DNA, 122 bp, Homo sapiens
gacgagccgggccggaagaagaggtagggcgccgccgtgacagattagtcctaaagggaacggggttgttagttcaattggctaccggaaaaaaccaggctgggctgggcgccgccatgaca

SEQ ID NO: 433480 - DNA, 122 bp, Homo sapiens
ccaggtgcttaagttccgcttccttctgcttgatgccatcctaggccgcccctctgtgcccgcatctgactataacagcgggaggaaaggctgcacctcaacgcctggcctggaaagagctg

SEQ ID NO: 433481 - DNA, 122 bp, Homo sapiens
gcactcccgactccagcggcttgcatatcaatgtgccccatgcccagggggagtaggtgccgcctggtgcgaactacccatggtaaaccaattttgccggcgttatgtatctgtcacttaca

SEQ ID NO: 433482 - DNA, 122 bp, Homo sapiens
catcttcccaggggcggcaccccggacggggctcctcctacacctgtcggggaaacagttcgcacctgtggcctcagctggtgggtggctggtccagccaccaaggttttcctgactgcgag

SEQ ID NO: 433483 - DNA, 122 bp, Homo sapiens
acatggtaaaacgacctgtggcctaagtcagaaagtgagtgaaaggaacctacagggacgcgcattttatagcagctgctgggcgcgaaaaagaagctgggccattggctaagcttgcagct

SEQ ID NO: 433484 - DNA, 122 bp, Homo sapiens
ctatttttagcggcagtggctgttcgggtgcagagatgagatgagtaaccagctcccatgcggtggagagaggaggcggtggcttttaccaagcttttgtgcgactctgagggagagctgcc

SEQ ID NO: 433485 - DNA, 122 bp, Homo sapiens
cgtgaatggtctagggggcttccgaggcgatcgtgcagtgtcagtcttcagctgctaagccgagaagatctgggaaggagtcagtcagagagccttgggctagagttccaggggctctggga

SEQ ID NO: 433486 - DNA, 122 bp, Homo sapiens
cctcttcctgtcagtttctctttcagtgtctctgtttcactctctctttgtttttctgcccgtctgcccccaccctcctcgttgagcctttccatctttctgtctctctctctctctctctt

SEQ ID NO: 433487 - DNA, 122 bp, Homo sapiens
ggcactacggaccacagtgaacgacctggcatgctctgataagaaaacgctttataatctcgccaactaccttaactgccgtacactcccaacacgctcccgccaaagattaaagtgtggaa

SEQ ID NO: 433488 - DNA, 122 bp, Homo sapiens
aagccatgccaagcattgttcctattttcttccacttgatccaggttggaagtaaactttcggttcagatccagaagccaccttccaatatcaagaactccagaatgacccaagtctttcat

SEQ ID NO: 433489 - DNA, 122 bp, Homo sapiens
aacaatgcccacctctgagtagagctgtgggtggcggtaaccatggtgaggggccctccacgccaactgcccatccggggtcagccgggcccgtggccctggttccggctttgtctcggggc

SEQ ID NO: 433490 - DNA, 122 bp, Homo sapiens
ttgtagtttcaggagggtgcatgtgggctgtcaggagcgagggcgttatgggaactctaacggcagaagcgggcgttgtgtactctcccagggaaggcacaatggggaccgtgcagagctgt

SEQ ID NO: 433491 - DNA, 122 bp, Homo sapiens
cgaggcactctgtgggcacaaaccagggaagcccagggtcccctgggccctgcccatgggcggtagagagggactttctcacattgagggggaactttgacgcgtggtttgttttctttcca

SEQ ID NO: 433492 - DNA, 122 bp, Homo sapiens
tgttgctgcgttatcagcctattgatcatgtgtcgcctgtaataggacaggcgccgccaacgcgactctttacaaaagccgtgcacatttgttctaatagggtccgggtccccaggggaccc

SEQ ID NO: 433493 - DNA, 122 bp, Homo sapiens
aaggggcagaaggtgcagcgcagctcttcactgccagggtggccctgcttcttgtgtttacggaataggtgcttattggaacaagcaaaatcacagtgggggcagtggaaggcgtagtgact

SEQ ID NO: 433494 - DNA, 122 bp, Homo sapiens
ctctggggccttccctctccacgcaattgcgatcccagtgatgggtgggacagagatccccgttgtccctgtcaccgctcccgcctccacttgccgggcctgaggacaattgaggggctctg

SEQ ID NO: 433495 - DNA, 122 bp, Homo sapiens
ctcctctttctcccggaagcggagcaccgagccggcaaaggcttgggtgtgagacagcagcggtggcagacaccgcagaagcaaagagcagtgaggctcctgcattcgggtggagcaccatg

SEQ ID NO: 433496 - DNA, 122 bp, Homo sapiens
cactcacgccctgccgtcgccttgttgcagagccgggccccacgccccctgccgcgcccgcgtccccggcctgctggagcgactcgcccggccagcactacttctccagcctcgccgcggcc

SEQ ID NO: 433497 - DNA, 122 bp, Homo sapiens
gggtaccccgagggcggtgtacgtcggtaagattgtaacagtattactggaagacttattcgactgtcctgatgatacttgtaataggaagtgccgtcagaagcgataactgacgacgtcta

SEQ ID NO: 433498 - DNA, 122 bp, Homo sapiens
tgtgggtgtacgacttcctgatggtgacgctgccgtggtgcgacacgccccggggcaggacgcactcctctgtcagtttctgggcctcggggtcccagcacagcaccgtggcgataacctcg

SEQ ID NO: 433499 - DNA, 122 bp, Homo sapiens
tagtgtgcatatgtggcccagggcatggggccagtatcagcgcctgagggacagtctgtgcgaggctgcttagcccagaagggggctgcgtggcagggggcgggcttcccctccctggacac

SEQ ID NO: 433500 - DNA, 122 bp, Homo sapiens
gcgcctggtcactcacgtgagcaccgcgtcacgggagctaggccaccaccacccccttcccgcccacctcaccatccatccccgagggaccaggaggttgcggaaggtgggagagggtgtgt

SEQ ID NO: 433501 - DNA, 122 bp, Homo sapiens
tgggaacaggcaagaaaacctgggtgcgtgcacgcattgacatccacctgcatgtgagggcgggaggggacagaacagggacagcgaggaggagacactcaggtcacaggaggaaggctgcg

SEQ ID NO: 433502 - DNA, 122 bp, Homo sapiens
agggttctaaggaggtatggggagggaagcaggattaggaattcatgagctggggtacgccgttccagtaccctcctgcaaccccaggccccaattgtgggtcctgctcactctaggattaa

SEQ ID NO: 433503 - DNA, 122 bp, Homo sapiens
aggtggagccaagatggccgaataggaaccgctccggtctacagctcctagtgtgagcgacgcagaagacgggcgatttctgcatttccatctgaggtaccgggttcatctcactagggagt

SEQ ID NO: 433504 - DNA, 122 bp, Homo sapiens
gattaacaatgataccctttttaagagagatcaaagaaggcgcctagggaagctctacaacgcggcttcttggagttctgaggccgcctgcgcattcactttccagtgtaagcccccgctcc

SEQ ID NO: 433505 - DNA, 122 bp, Homo sapiens
agggggcgagggcagagcgccccctcgtggctggggcgcctgcgcaaaccagctgcctcacgagcactggagcttgcgttacttggcctcacctcacctgtgctgtccacgcctggctttgt

SEQ ID NO: 433506 - DNA, 122 bp, Homo sapiens
agtccctagatcaaactttgagtagcaaggatctatctagtaagtagcttgagtaagacacggaaagagatgaagataaagtagctacagacagacaagagaagaaactaacagagagttca

SEQ ID NO: 433507 - DNA, 122 bp, Homo sapiens
actgcaggggtggtggaggtcgcaatgcgctgtccccaccacatggagcttgcttgcctccgcacctctttgctggctgcagccttgctgctcagtgggcggttgtggaaagaatcggttct

SEQ ID NO: 433508 - DNA, 122 bp, Homo sapiens
catgatccgcctgcctcggcctcccaaagtgctgggattacagatgtgagccaccacgcccggccgacagcctagttatattttagtgtgaatgaaatagttggttaacctgaatcccattc

SEQ ID NO: 433509 - DNA, 122 bp, Homo sapiens
aaaaaattgtatctttgtctcaccttatgtaaaaaaatccagagagattaaagacctaaacgtgaaagccaacagatgaaaatccagagtaactttgagaatgtggggtgggaaaagatttc

SEQ ID NO: 433510 - DNA, 122 bp, Homo sapiens
tatcattccaatttaacagcttgcttagcaaagttgataggtaggagtttagaagatattcgttgaatgcctattttgtatatttacaaaagaggtagatttaagggagttacccagaagca

SEQ ID NO: 433511 - DNA, 122 bp, Homo sapiens
acacattactaacagcttcacctgccaacttcaacagagaaaatagcccacttccctgcacggctaggcctagaaccatggaatgaccagatagatagcagaagcccttgctctagatcagt

SEQ ID NO: 433512 - DNA, 122 bp, Homo sapiens
ttcttaatgctttcctccctggcatgaccatcctgtcctttgttattatcctgcattttacgtctttggaggaacagctccctagtggcttcctccgtctgcaatgtcccttgcacagccca

SEQ ID NO: 433513 - DNA, 122 bp, Homo sapiens
gaatgcgggcagccgcgcgggggaggcgcggacagctgcgcccggccgccggggagggggcgcgccgctgctttttttaatcgtatgaccacttattttaagagtttccaaataaagcaagg

SEQ ID NO: 433514 - DNA, 122 bp, Homo sapiens
ggaagcagaagggcagcccccggaagggagcaccgagtgcggtgcgcccagacccccgtgcgcccagacccccatgtccctaaaccccagggtgcacaaaccccagtgcctaaaccccagag

SEQ ID NO: 433515 - DNA, 122 bp, Homo sapiens
tgacgcgcccccataaatctgcccggcccggggctgctccgagaactcgtacagtagcggcgtcagatccatcccgcgcctcccagtccggagtccatttgcataattggattttttttttt

SEQ ID NO: 433516 - DNA, 122 bp, Homo sapiens
cagcccaccccaagggaagaatcatgggaaaagggccagcctataaagtcctaggatcatcgcacttgtcctcggtgcccacttgggtctcttccaagtgtactttcctttcctttctttcc

SEQ ID NO: 433517 - DNA, 122 bp, Homo sapiens
aacggggatctgggaatcggggatctcggtctgggaactgggatcttagtggaggatccacgaggcacggcgattggatccagcaattcctgcaattaaaatgtatttaatttaactaaaat

SEQ ID NO: 433518 - DNA, 122 bp, Homo sapiens
ccgcctcccggattcaagtgattctcctgccttagcctcccaagtagctggaattataggcgcttgccaccacaccaggcaaatttttgtatttttttgtagagacggagtttcaccttgtc

SEQ ID NO: 433519 - DNA, 122 bp, Homo sapiens
cttcacctaattctacagcaccctactgggcttcattgatgaacttcagcctctgccagtcgctcaacgttcactatcccctcaagctgagggtcaggcccaagcagaggggaaagccagtg

SEQ ID NO: 433520 - DNA, 122 bp, Homo sapiens
gctgcgtcggcggccgcggtgccgggcgctctcagggttctggagaagcaggcggaggcccgcccccggcccagctcccggagcccccgccgccccgcccaccccgggcggagagtgggcgg

SEQ ID NO: 433521 - DNA, 122 bp, Homo sapiens
tccatcataataatcccgttgaaagccatagtccaagtcaaaagaggagccgtacatctccgctgctgatcgtttcacacctgcgtttcctcggttcacttttggctctgcagccaggttaa

SEQ ID NO: 433522 - DNA, 122 bp, Homo sapiens
ccttcatttatgaatgaggccactagggggagtgcacgtatcagggaagaacctgttccccggcaagcctagggcggtctggaaagggacagtcaccaatctccagagcccagggtgacggt

SEQ ID NO: 433523 - DNA, 122 bp, Homo sapiens
tttttctaaagttttacaagtctaaagccaaatgaatgacagtcttagaggaattcctcacgttttaagtgcttgtcaaagtttaagcaagtagcatatataaggtctctagaatagtgtct

SEQ ID NO: 433524 - DNA, 122 bp, Homo sapiens
ctttcatccagatcgttcatggaggacttctttccaacaatgaggtctctacatgaatgtcgtctgctcagagaagcttgccgcaaccaaaatttcatcctttcttctatctcgagcctaaa

SEQ ID NO: 433525 - DNA, 122 bp, Homo sapiens
aggcttcctcgggcacctccagcgagctggagctctcgcctctgctgctgtctcatgtggcgcttagcacactctcccacgtgcccattcctgactctgctctcgaggccatcggctctcat

SEQ ID NO: 433526 - DNA, 122 bp, Homo sapiens
ccgcggagtagcagtgggccagattgccgcgggggtgccatttagtggcgggctcaatggcgtactctctgaaggtcacttcgcgcacgggttggacctggggcaggttggaggagtaggag

SEQ ID NO: 433527 - DNA, 122 bp, Homo sapiens
tcgccggccagctggagttccgggtgggcgtcggcttggcgggcccgcactgggagcagccggccggctctgccggcccagggcaatgaggggcttagcacccaggccagcggctgcggagg

SEQ ID NO: 433528 - DNA, 122 bp, Homo sapiens
cggtaacaacactcctcctccgtgggaagcgcacggggtgagtgggatgatgggcgtagacgtgcttatctgctgttgttttaaattttattggtaaaacctgcaaaaggagggctggcagg

SEQ ID NO: 433529 - DNA, 122 bp, Homo sapiens
gacttaaatttggagactcaaatttgggaccaggctctgccacgaattcactgtgcaactcgaggaaagtcacttaccctctctgtgcctcagtctctcatctcgaaaacaagggcgagggc

SEQ ID NO: 433530 - DNA, 122 bp, Homo sapiens
ctgggtggatcttcaccccatgtgcccaggggctgccccgggttcctgcactgctgtgaacgcagctcctctgtccacggcctccctccgccgagcaggagcagctccctgtgcaggtctgg

SEQ ID NO: 433531 - DNA, 122 bp, Homo sapiens
taggaagtgagtgtcagatgctgttccggcagcccttggcgtctaacaaggtaaataagacggggcctgtcctctggagcccagaatccaggaagaaaggcgcacatgtattgagcgcttgc

SEQ ID NO: 433532 - DNA, 122 bp, Homo sapiens
ttagctttgcgagcccaagcttgttatccaactttccgaagctgcagcagttccgtcgtccgtgtaatggggacaataattcctgggggtctgttcgtccggggtattcggagaggtggaag

SEQ ID NO: 433533 - DNA, 122 bp, Homo sapiens
gcccccggccgcagtgcacgccgggcaagaggaagacctccatcagctcgccgcgcagcgcggctgtatttgcggcctgtgcgagtaggcgcttgggcactcagtctccctggcgagcgacg

SEQ ID NO: 433534 - DNA, 122 bp, Homo sapiens
cttgttttctcataatcaaggagtatggtggagctgggtcaatttcaggcacagcccagccgagtcaggcgaggtccagagagacctgactcgcctggcagcctcaacggacttgtccccgc

SEQ ID NO: 433535 - DNA, 122 bp, Homo sapiens
cagcgctagctgttctttaaatgagctacccagtaagtcaaagctcaggtggagagcagccgcaaggcagggagcagctgggaggtatctcaggggttcccgggatgctgcctgtgcacccc

SEQ ID NO: 433536 - DNA, 122 bp, Homo sapiens
atctctgcccagtcttcttgttgactcaagcagttttggggggagtagactccgcccctccgctgcctttcatcttcaacccggccttactcctaccaatcaggagccatgcacccaggctc

SEQ ID NO: 433537 - DNA, 122 bp, Homo sapiens
ctgcctgaagaaccaggttcctgcccggtcagcgcagccccagcccgcccacccctgcctcgagttagttttacaattaaaacattgtcttgttttgtgtctgtgtgcgatgtgtggggggc

SEQ ID NO: 433538 - DNA, 122 bp, Homo sapiens
gaagccaccgaaggtcctggataaatctctaatcatacttataatggctttaaatcctgccgtcattatctcttgcctcaaccttagattcctgaaacgaaacttccgtcctccagttttac

SEQ ID NO: 433539 - DNA, 122 bp, Homo sapiens
gactctgtctgctgccatttccttgacgtcggtgcactgacccagccgcagctgcctctgcggcacccgtgcatgccacttacagggacgcggtaacagtcttttccccactccgtgctccc

SEQ ID NO: 433540 - DNA, 122 bp, Homo sapiens
tctgggccttaagcgcgtggctcgggtgtggtgtggaattggtctttattctctgctaggcgcatttctgaatctgagattttctgagaaactatctggattgttatatggaatctgatttt

SEQ ID NO: 433541 - DNA, 122 bp, Homo sapiens
ccagacaccttttccagcctccactgctcactggcagcaccaacggtgcagcaccgggcacgcctgagcaggatgatgaaacatcagtgagggcttggcctggctgggcagagactttacta

SEQ ID NO: 433542 - DNA, 122 bp, Homo sapiens
atccgcccgcctcggcctcccagagtgctgggattacaggcatgagccaccgtgccaggccggtagtcagcttttcaagacacatttgttcattatcgtaaataaactgtagtgatctctaa

SEQ ID NO: 433543 - DNA, 122 bp, Homo sapiens
attaaactagatgacttctaacttcctttccagctctaaaacactatacaaacaataagacgtctatagtgaaatggcattcaaaataccaactgtgataatctaatttctttccaattata

SEQ ID NO: 433544 - DNA, 122 bp, Homo sapiens
aacgtccgagacgcgggtgcggagccgggggcggaataactggttgcgcggcgctttgaccgtaggcgctggagcgcgtgcgttgcgtgcgcgcgcggaggcggctgcgtcggggcgcgaga

SEQ ID NO: 433545 - DNA, 122 bp, Homo sapiens
gcctcccaagaatcagcccatggatggagactctgccctactcactttttattctcatgccgactagcacaaggcaggtactcgatgtgtgtcagttgacacaaaataaagtgagcatgtcc

SEQ ID NO: 433546 - DNA, 122 bp, Homo sapiens
gccctgccgccctccctgtattgcgaccaccccatccccgcacccccacccctaggatagcgtgcctcaccaagaccgtttcgccagccaccccatcaagctgactgtcattcgcttgttct

SEQ ID NO: 433547 - DNA, 122 bp, Homo sapiens
gcacccccaggaggatgtaaagaattcaggaacatgaagcaatgggtaaagggcacagggcggcctggcaaagtcccatggcaagaatggggagaggcacaccctttactcacccctaccac

SEQ ID NO: 433548 - DNA, 122 bp, Homo sapiens
cagagccctgggcactgttgctgcctggggtagaacaaaaaaaaagacctggtcagagcccgcaggagatgtgggacaagaggaattatggagtaggtgagctcctccacacgcccgccgcc

SEQ ID NO: 433549 - DNA, 122 bp, Homo sapiens
ttttttttttttttttttgagacggagtctcgctctgtcgcccaggctggagtgcagtggcgcgatctcggctcaccagtctattgctttttaaaggttctcattccagctctttctttcaa

SEQ ID NO: 433550 - DNA, 122 bp, Homo sapiens
tgggccgcacccttgccactgccccagggcatgtctctactcaccaattatgaagggcttcggcatcagatagagaggctggtgcgggaaaatgaggaactgaagaagttggtgcggctcat

SEQ ID NO: 433551 - DNA, 122 bp, Homo sapiens
gccccacacacgagcggcctgatgctcggaggccctgtggcccctgggtgactcagtgagcggcagggatagggctggatccacagccccgccccaagcttcctgccaccgtgggaaccaca

SEQ ID NO: 433552 - DNA, 122 bp, Homo sapiens
atgcagacctgtggggcaggaattccgagtccggggtggagcgcgatgtggaatctgactcgcttgaaacagcaccgcggtggattcggatccgggtgagtagggaaatgcgcctcagcccc

SEQ ID NO: 433553 - DNA, 122 bp, Homo sapiens
cgcgcccgccgcgccctcggaagcttgcccccgagcaccacagctagcagggttcgcggacggccacccgcactgccctggccccagaggtgcagggttcaaaccccttctctgcagctttc

SEQ ID NO: 433554 - DNA, 122 bp, Homo sapiens
gtggccctgtcgccagttctggcgcgtgggggagcagcaggccgctctgaggggtcaacgcggaacccgggtcgggggcctgcccgcgggggctactcaagctgtcctgggggcccttagga

SEQ ID NO: 433555 - DNA, 122 bp, Homo sapiens
gcaggtggagttttctttgtagctgggcccggaggtagcggaggtcttgctgatcaagcccgtgagccaggcccaggtagagggtaaggaggaaagcaaggaggagacggtccgtgcccagg

SEQ ID NO: 433556 - DNA, 122 bp, Homo sapiens
ttttttaatcaaatcaccatccaatgtaattccatctccaccatctactacagatgtgatcgtggataaaccataaacctttcataacttctagaaagtaactactaatactattatggtag

SEQ ID NO: 433557 - DNA, 122 bp, Homo sapiens
tagctccttagtctcgcaagggggcctctccttgctcctcctgcagcttctgtgagccagcgactctcagctggccttccaaagctccagacctgagggacccagcctgtgcccatccccat

SEQ ID NO: 433558 - DNA, 122 bp, Homo sapiens
aggggttttaattttagttcatcccaagtgtccaccagtctacagaggaggaaaaagagacgggctgtttctatgtagcaggatcggcccagcttcgggaaaatggagttttcagaggctca

SEQ ID NO: 433559 - DNA, 122 bp, Homo sapiens
tgggccacctcctcctagctcagagcccactgccctcccggaaccccttgctaccactggcgtccacttccaatccccttgcaaagaggccttgaccggcacccactgccctccttccctga

SEQ ID NO: 433560 - DNA, 122 bp, Homo sapiens
catctccatttctcattcctgtaacttcttttggatcgtgatgcccctgcaggactacatcgctgtttacttgctcccctattggtggacattccggctgcctcatttttcataccagctgt

SEQ ID NO: 433561 - DNA, 122 bp, Homo sapiens
gatctagtgtggactaggtacccctcttccccagtgtttacactacttataaattagttgcgtttgagaaactacataaaaaacctggagatttcacctatagatctggatttctggcttct

SEQ ID NO: 433562 - DNA, 122 bp, Homo sapiens
tgcccacagactttggctccagggcagtctccgagagagaagccttgggtcccactggtccgagctctgcgtgctgagtctagaggctgcagtctctaagccgaaactagcccaggcctcac

SEQ ID NO: 433563 - DNA, 122 bp, Homo sapiens
agagagggacaggaaagggtggtagtgtttgttgtgcagctccagtggacaaagggcctccgggacctttgggagctggtgtatcagcctgagtctcatctcaaggtgtccgggtccgagag

SEQ ID NO: 433564 - DNA, 122 bp, Homo sapiens
aaaccgataagatttaaaaaaaaaacaaatttaaaaactcctccaaagcactccttctgccgcataaagcatacatagtagagctcttcactctagggaagcctctggagcagacaaccttc

SEQ ID NO: 433565 - DNA, 122 bp, Homo sapiens
agactgggtggtggacacagagtgaacagcagccaggagcagccctcctccaagctctggcgaatgattaacgtgcagggaagagatgcctgtggagtcctctaggacatcctctgcctcct

SEQ ID NO: 433566 - DNA, 122 bp, Homo sapiens
atcctgagaacatgttctgattatctgaaaactgaaaaacaagagcttaaaaaatacagtcgctttgtataagcaatttcaaaaggaagatacagaggagaaagaagcttttctgcagattt

SEQ ID NO: 433567 - DNA, 122 bp, Homo sapiens
cctggtcttcagtccttgcttgctgtgtgatcttatgccaattacctaatttctctcgcacgcacaccccttccttatttgtagaaagagcaataataagagctgcttctcagagttgttgg

SEQ ID NO: 433568 - DNA, 122 bp, Homo sapiens
ggggcacaatccactgaccccccccttcccgtcaccgccgcttctcagcgctcgtccccgcgtgctcgcattccaccccgataggtggagacgccgacagtcaccacttagtccttcggacg

SEQ ID NO: 433569 - DNA, 122 bp, Homo sapiens
actgtcctccggcagtggcagcgagtacaagacccacttcgcagcctcggtgaccgaccccgagaggttctggggcaaagctgccgagcagatcagctggtacaagccctggaccaaaacgc

SEQ ID NO: 433570 - DNA, 122 bp, Homo sapiens
cttacctaccaattcctgccaaatgcaagtacatctatggaaaatccgacttccttgcttcgttatttacttcaggatctcctagggtgatcaaccatcatggtttgttctggggttgccaa

SEQ ID NO: 433571 - DNA, 122 bp, Homo sapiens
cttgtttttaaaatccatccgaaagggccaatcagacgcggcagtctgagtgcgcaggcgcggattggtccgcagctacttagagtgaccaataggcgtggaggtaagtttggttgagacca

SEQ ID NO: 433572 - DNA, 122 bp, Homo sapiens
aagcttgagggactctgactgcagcagatgggggagccaggtgggcgagagttgggcctgcgtgtgcctcccgcagaccccggggtgatggccttcctcatcctggccaggacgctgcccca

SEQ ID NO: 433573 - DNA, 122 bp, Homo sapiens
tgcggagacggccgtgccgtgcaataaacgcaggggcaccccaagtgcagcaggttgttccgtgtggaaccttctggaagctaccatcgcctcctctgccccccgtcccccacccctagtcc

SEQ ID NO: 433574 - DNA, 122 bp, Homo sapiens
ttcagtaccccaaacttttagaaatgtttttacttgttaggtgcaacataaacagctacacgtaaaaatactattaaatttatatgctataaataacagtatcagcaatgattcctacaaac

SEQ ID NO: 433575 - DNA, 122 bp, Homo sapiens
taaccttttcgggttcaggtcggcggaaagccccgcccgaaggggctatggctccgcccacgagcgcaaaagacccgccttccgcgtcacgccagccaccccgcttccctcccccagcaagc

SEQ ID NO: 433576 - DNA, 122 bp, Homo sapiens
taggaggccccagtgcagggtgcgcgctgccggacctcgccaggcctccatcggagctgtcgccaccgccgtcgccgccactgcctcgcccaggaggctgcaaagccctcgcgcccaccctg

SEQ ID NO: 433577 - DNA, 122 bp, Homo sapiens
taaaaggcagatttaagagagcacatcaaccacaaagaacgttaaatcattttagctgagcgctttaaaggaaaaaaataattccacattttctgaaataccttgtttttagacatattttc

SEQ ID NO: 433578 - DNA, 122 bp, Homo sapiens
ggcgcttggcgctgctgggctgggggatgacgtgatgtctatttctgggcctcctggcagcgccgacgctctccttccggggcctttgttccctgtttccctgggccgccttttcaaaaagg

SEQ ID NO: 433579 - DNA, 122 bp, Homo sapiens
agccctgtggattggggctgggggctcaagggccgctgccgactcccgcgggctggaggccgcttgcaggcgagatttggggaggaagagattgagtggaagggaaaataaataacctcggg

SEQ ID NO: 433580 - DNA, 122 bp, Homo sapiens
cacgctggggcttctttattctcaggggcaggaaccacataaaagggcttatttacaagacgaacccgcggcctgcaggctccaagacaccactgccgttgaggcagacagaagagctggcc

SEQ ID NO: 433581 - DNA, 122 bp, Homo sapiens
aagcaggcagggggcagcactgggccccgggaagaggcggagaaggcgagggagtgcctgcggtgagcccagagccttgggcccgttatcctctgatgctgctcccccaactttcctgccgt

SEQ ID NO: 433582 - DNA, 122 bp, Homo sapiens
gagtccggccccagctggtcatagccaagggcatcagggccagcagggaagtaagggtcgcggaacaggatccccgaatccaggcaggctgcccgaattgcctcatagctctggccccgaaa

SEQ ID NO: 433583 - DNA, 122 bp, Homo sapiens
ccatcggggtcggcggggagctacgggtatgcatagctcatagagcgtcagagctgacgacgactagtggaagatggggaaactaatgctcagagcgggacagtcactacctcaggggcaca

SEQ ID NO: 433584 - DNA, 122 bp, Homo sapiens
gtgcccttcgtgcacaccaatgttccacagtccatgttcaggttgggtcttggggtggggcggggcggggcaggggcaccggtcccagcatggcacgggctgacccattcttggctcctcca

SEQ ID NO: 433585 - DNA, 122 bp, Homo sapiens
ttgaaaaattactttaatcaagtccggcgctcccgggagcgggggaggaaaggcagcacccgctcgggacgggagaaaaaagcctccaggtctgtcccgcgtctccaactcggcgagggtct

SEQ ID NO: 433586 - DNA, 122 bp, Homo sapiens
ggcctggatgcctgtatctggatctctgaggccaggtgacctctcacagggacccctgtgcgtggccccaccccacgtcatcaccacaattccacttgtacctggctcagctgctgaggttt

SEQ ID NO: 433587 - DNA, 122 bp, Homo sapiens
agtgcgggggcggcgggaaggcctcggccggggggctgtaggtgaggtccagcacctctccggggccgcaaggcagcgccagcgggcgcggggcgggcggggcggggcagcccagggcgggc

SEQ ID NO: 433588 - DNA, 122 bp, Homo sapiens
agcatcagaagcacccaggagcttattagaaatgtagtctcaggacccagtgcagtggctcgtgcctgtaatcccagcaatttgggaggacgaggcaagaggattgcttgaggccaggagtc

SEQ ID NO: 433589 - DNA, 122 bp, Homo sapiens
aaacataggctggttgagtacgggagtcatacagatcaggtggatcaggcggccgcacaccgcagctctacggcccgggaacgttactaaatactcccatgcctcagcttcccgccttaacg

SEQ ID NO: 433590 - DNA, 122 bp, Homo sapiens
ggagtgggtttgtcttgggagagggcgggtgggcgggggctgatgggagggagggctgggcggccagcgtgtgctgagcaagcccatcccgtggctaggagtcagcgacatatggggagcac

SEQ ID NO: 433591 - DNA, 122 bp, Homo sapiens
tccgagctcgagggctgggccaggaagggcaggcgaggcgggcggctccgacgcgggtcgcgaaggcccagccgcgtcctctgtccccaggacgactacatttcccagaggccagcggggcg

SEQ ID NO: 433592 - DNA, 122 bp, Homo sapiens
ggttgagtacctcgatattctgcagtggagaagggacgctgtcacccctgggacccgggtcggcctgatcccaccgcctcctgccgggaccgtgctaagggcattgcctgcatcaccccagt

SEQ ID NO: 433593 - DNA, 122 bp, Homo sapiens
gaggaaatgagtggctcagcctggggacctagttagggagcctcccacccagggaaatgacgtgggtgtctgggatgacatgggagactgggatgggcttagggtaggaatggactaaacaa

SEQ ID NO: 433594 - DNA, 122 bp, Homo sapiens
agcgtgtttgacttgatcgctggagcatctgccggcaccgcccaggacccgcccaggacccgccccgccccctgcggccccgccccccgcatgctgaatgccatataggcgagtgacgtcag

SEQ ID NO: 433595 - DNA, 122 bp, Homo sapiens
catgtattttattttcttagtttccaagccagcgccctactgggaaggaacagctgtgatcgatggagaatttaaggagctgaagttaactgattatcgtgggaaatacttggttttcttct

SEQ ID NO: 433596 - DNA, 122 bp, Homo sapiens
gactccttagcatggaagctggtctttgagtacctgtagcttgtctttcaatacacccaacgtgcagcccatgcactggttgtactgaactcgatatatgagacccataatgccgcaagcct

SEQ ID NO: 433597 - DNA, 122 bp, Homo sapiens
gtgaagtcaaggcttctctcttctaaagactattaaggtttgaggattcagggcccgtttcgcttccggctagggaaggaagcgtgcttcccggggcccaaatgaacatggaaatttactaa

SEQ ID NO: 433598 - DNA, 122 bp, Homo sapiens
cttagtccttcggacggcaaaaccttggtcactgcccggccggaaccgccatgttgaggccgaaccctgaccaaccggcagtactactcccagctgcccccgcgcgcgtccctcacgtgact

SEQ ID NO: 433599 - DNA, 122 bp, Homo sapiens
ctcctccacctccagggcgtggcccacgcagcgacccaggggcttgtccatggcggtcagcgctgccgcgacccgaagccctaggctggctcccacgccaacctgcggagaggaggctcagc

SEQ ID NO: 433600 - DNA, 122 bp, Homo sapiens
gggaggctgtggatgggactgatcccttttggagaaaaccctcactcgttcttgtgttttcgcgctctcttcattttaaaaagtgttcctaatccctctatgagcgtccctgaggagaggga

SEQ ID NO: 433601 - DNA, 122 bp, Homo sapiens
gggcacacaagagtctgcgacccgaaggggaaccccaggctgggaagtcgctgggagccacgcccatgccgcgaagaggctggccgcggcctttcctgaggctacaaaagtctcgaagtttc

SEQ ID NO: 433602 - DNA, 122 bp, Homo sapiens
catcatgctcaacttctgtcccgacctccagtcagtccagccgtgcctgagaaaggcccacggggagttcatcttcctcattgacaggagcagcagcatgagcgggatcagcatgcaccgag

SEQ ID NO: 433603 - DNA, 122 bp, Homo sapiens
gcggggcgcggggcctgggaaggcgcggggccgggaggaggtctgggcccgggtcctgtgcgccccccgcaaccccggcctccccggcggcctggtccagcgcgaggccccggccgcttccc

SEQ ID NO: 433604 - DNA, 122 bp, Homo sapiens
gcccggggtgtccggcagggctgcggggcgcgggggcgggtcggggcggccttttattgacgcggttgagaaagcctcggctgggagctgggcggcggcgagcaccggaacctcagaccgcg

SEQ ID NO: 433605 - DNA, 122 bp, Homo sapiens
aagctgctcctaccttctcatcggtcacaccgtcattgtcatcgtcatcatcacaggcatcgccaatcccgtccttgtcaaagtcttcctgcccagaatttggcagatgggggcagttatcc

SEQ ID NO: 433606 - DNA, 122 bp, Homo sapiens
gacactctgtagttgttttcaactttcagacagcataaataatgatcaaataaacaccttcgagcacaaaactttgtccacatttctgattatttgcttaggatccctagaagtagaaggac

SEQ ID NO: 433607 - DNA, 122 bp, Homo sapiens
ccgctctgcgcccaaggctggcgctggaggctgcgctgctgcccgggagccgctgccgcacgggcctggggccagtggccaaaccagcccaaccagcgcgcagagccccggagccccagagc

SEQ ID NO: 433608 - DNA, 122 bp, Homo sapiens
ctgggccttcctgtcccagggcctatgggcaactgcgttgaaaggacgttcgccaagggccgtgtgtaaatacgaactgcgccatggagaggagaggcactgccggagcccttgccagatct

SEQ ID NO: 433609 - DNA, 122 bp, Homo sapiens
gggggccacataatcagatgagccactttgggcagccaaagtgagtggatcaccggaggtcgggaattggaaaccagcctggccaacattgtgaaaccctgtctctactaaaaaacaaaaaa

SEQ ID NO: 433610 - DNA, 122 bp, Homo sapiens
cagccagcggcggggggcgaggggagagggacggtctccccacccggcggccaaccctcccgcgcacagttgctcacaacaaagtgaaaatccgccctccagacggacccattcctccacac

SEQ ID NO: 433611 - DNA, 122 bp, Homo sapiens
gccgacccgctgtcgccgtcccccggctccgccgccgaccagtcccggactctatatacccgtccggcggaagcttccagagcccgccagccccctccagaaccttccgccccgcccgcccc

SEQ ID NO: 433612 - DNA, 122 bp, Homo sapiens
cggtagcaggagcagctccaggggactgctgatagagccattattactccgtgattacagcggcagatcgggcctgcctggcgggggtaatgtggtgaaaactcctggatcatcttttccca

SEQ ID NO: 433613 - DNA, 122 bp, Homo sapiens
ccacgactcgaaaaaggggcccggaaagagacacaatgcacagagacacacacgcagagacggagagataggaagagtggaagagggaggcccaggcgccgggaccagacaaaggacgcgcg

SEQ ID NO: 433614 - DNA, 122 bp, Homo sapiens
gccccgccgtcgcttccgcggccccgggccgggggcttttctagcctgctccgggaggctcggccgaggagctatgaggccgcccatgccgcctccctcggctgcccacaagaggccctccc

SEQ ID NO: 433615 - DNA, 122 bp, Homo sapiens
ttgggcatcagacttgttcaaacttcccaggtgattccaacgtgcatcaaggtatgagaacggatgcgctaggcggtggcctctaccaagtctccctctgatgccaagaggcccgttctatc

SEQ ID NO: 433616 - DNA, 122 bp, Homo sapiens
aacatgtgctcctagccacaaggagacagcgtgagggtgagtgagcagaaactctcacctcgcctggaagaatacttcattgcgcatgccctcccttcacagaagaacaattttggtttggt

SEQ ID NO: 433617 - DNA, 122 bp, Homo sapiens
ccccgcgccacgctccggccctggaagccctggggcggtggccacggagcgcgggcggcgcgccggggcaggcccctggctcgctgacttccagcagggcacacagaagcaagccagcgaca

SEQ ID NO: 433618 - DNA, 122 bp, Homo sapiens
tccaaaaggcaacagtgcagccgttaagaaaccctgggttagctgaatgacccagtgaaccgcgaaaccacagcccccgagagggcggacgtctgcaggtggaagggctgcgcggatgagcc

SEQ ID NO: 433619 - DNA, 122 bp, Homo sapiens
cgatggtgccggccgcgctccgccccgtcctccgcctaggccgagtccctgcgtcggggccgcggaggctccgccctgggcctggccctggtctttgtcctcacaaacctatttccccagat

SEQ ID NO: 433620 - DNA, 122 bp, Homo sapiens
cccagcgaatctgaccaaataacccctgaaactcacagtttggtgccgtgtgcgtcaaaccggggcgacgttgggagcacgcggcgtccccgcgtcacacgccgctctgtacgctactcggc

SEQ ID NO: 433621 - DNA, 122 bp, Homo sapiens
ttgcccggttttcggccccgtgccccttattggataaagcttcaggccccgtccccagtccgtgagtgacagaagatgtgaccaaacactggactcaatgaggacggagtgacaacctaggc

SEQ ID NO: 433622 - DNA, 122 bp, Homo sapiens
cgatgtttgccgtccacaggggagaagccgttccagtgtgagtttgagggctgcgaccggcgcttcgccaacagcagcgacaggaagaagcacatgcacgtccacacctccgataagcccta

SEQ ID NO: 433623 - DNA, 122 bp, Homo sapiens
tctctgcgccccgcacaggctcagaggctccgcccgcgtctccgcctaactcgccggccacgcccccacttcggggagctcggtccctctcggattcgagttttcctcggctccagccgccg

SEQ ID NO: 433624 - DNA, 122 bp, Homo sapiens
aaccctttgttacccttgccctccctcacatagtggggccgagtatccaacccccctaggcgctgggggtcagtgcttcggacgctctgaacattcatctccaggatcagttcaaaccgtgg

SEQ ID NO: 433625 - DNA, 122 bp, Homo sapiens
aagatgaccagttagtgtctgaaatcctggcttgccccacccataacagggactcacacccgctgtagacagggaacccactacctcacacagcaaactgtccatcagagatgcccctccca

SEQ ID NO: 433626 - DNA, 122 bp, Homo sapiens
ctgcacctcgctgggactgatgctgtcggtggtgctgctcatggggctggcccgcgtagtcgcccggcagcagctgcacaggccggtggcccacgccttcgtcctggagtttctagccacct

SEQ ID NO: 433627 - DNA, 122 bp, Homo sapiens
aacttgacttgtagagctaataaaagccctttggggaactcatctcgtaccttgcctacacggtccctgtacagggtttctgacctataacaagtaaagaatgtcactttctcacaggtcca

SEQ ID NO: 433628 - DNA, 122 bp, Homo sapiens
tctccacaaccaccagattatctcaccggcgagtgagactgcaaggtttgggggcccggccgtaccactccgcgctgcgcacggggggttcgtacccatctggccgcgaccgtccgtttccc

SEQ ID NO: 433629 - DNA, 122 bp, Homo sapiens
gccacgccacatgggctgacagcttggctgcgccgcccaggccaatgagcgtcggggctgcgccccgggacccggcgcgccgccgccggtggggtgatgctcgtgcgcgccgccgcccgagc

SEQ ID NO: 433630 - DNA, 122 bp, Homo sapiens
tgaacgactttacagtgtagctggttatatgcttgcccctatatgtgtcattatcagcaacgccataaatacaaattcagactgagatggatgtgtgccaatatgattgaaataccataagt

SEQ ID NO: 433631 - DNA, 122 bp, Homo sapiens
gcccccagtacctctagttctcgctgctgagccgcctgaaccacaggcaggttgtggggccggcaggcctgctgggcttcctggtgcttctgccgcagcgcctgcctgagcactgggaggga

SEQ ID NO: 433632 - DNA, 122 bp, Homo sapiens
ggattttcccatcgtgctcagaggcggctgctcagaggttgcttccgaggctcctcccaacgcccgcccagtccctccttagccttcgctgggggccagaaggatttctgtgagtgcctcca

SEQ ID NO: 433633 - DNA, 122 bp, Homo sapiens
cgcgggcggggcctctggggcggagcggccaccatcttggaacgggaggcggagcagagtcgactgggagcgaccgagcgggccgccgccgccgccatgaaccccgaatagtgagtgagccc

SEQ ID NO: 433634 - DNA, 122 bp, Homo sapiens
gtcagtctcagtttattccactcggggagatcctctgcttggccatctcagcaatgaactcggcaagaaagcctgtcacccaagaagcactgatggagcacctgaccacgtgcttcccaggt

SEQ ID NO: 433635 - DNA, 122 bp, Homo sapiens
ctggcggcacctgcagcactgggggagccgctgaaccccgtgcttcagcgctgggggagccgctgggccccgtcttccgccacaaaccatgcatggccgccacgtgagctcaaacgtccgtt

SEQ ID NO: 433636 - DNA, 122 bp, Homo sapiens
gcctggccgccggcagttcttggtccctccggctgaccgtccaacgctaggcgccgaggccggtgcaagagacagccaatagaaagctgtcttagttggaggtctagtagaggaatccaatg

SEQ ID NO: 433637 - DNA, 122 bp, Homo sapiens
ttcctcctccagatctttcactgatcgccgtaatttacagataagacctacagagcaacccgtcatgccttcctgccgcgccccaagttcatttccaagtccttgcattttttccccctaac

SEQ ID NO: 433638 - DNA, 122 bp, Homo sapiens
aacaatttcaaccctgctggaccgcatcaagtgagggccggcatggaaaagcggccatgccgaggtgccccggaagcagcctccggagtgtgcctcagagtttctggccatttcagctaaga

SEQ ID NO: 433639 - DNA, 122 bp, Homo sapiens
ctcctggggtcaagcaatcctcccacctcagccttcccagtagctgggaccgcagtcacacgccatcacaggtggctaacttattttttgtagagacggggttttgccgttttgcacaggct

SEQ ID NO: 433640 - DNA, 122 bp, Homo sapiens
cttggacttgatgcatagtttcgattgtgagccccgtcaccttccccccattcccgtccccgaatcttcgagcccgctttccagggaccctacctgagggcccacaggtgaagccacttagt

SEQ ID NO: 433641 - DNA, 122 bp, Homo sapiens
tgtcctcacatgacctttttcgagcacacgcatcttcttacaaggcacaagcactaatcccgtcatgaatgtcccatcctcatgacctcattaaacccagtcacttcctgaaggtcccacct

SEQ ID NO: 433642 - DNA, 122 bp, Homo sapiens
ctcagagccatacaaaagtaggctggattcagtccatggaccatagattgctgtccccctcgacggacttataatgtttcaggtggctggcttgaacatgagtctgctgtgctatctacata

SEQ ID NO: 433643 - DNA, 122 bp, Homo sapiens
gggagaaatgtaaattcactgttttttctccagagcagccagaggttccttaatttgcatcgttatatgagtgcaaagcatgatgataaaatatgcaattcttaagaaatgtcaaagacagc

SEQ ID NO: 433644 - DNA, 122 bp, Homo sapiens
gccacctgggcaccacagatgtgatgtgctctttcctcctccttcctcctgcctgaccaacgtcccttcctgcaggggcttccccgggcgctcagctgcacccacctcctacttctctccca

SEQ ID NO: 433645 - DNA, 122 bp, Homo sapiens
ttggattgtcctgtaattgtagtcccgttagaagctttacttgaaaattcagatttggctcgggattagtctaaatatcattcttgccagaaatccagagtgacaggcaagagatgtcaatg

SEQ ID NO: 433646 - DNA, 122 bp, Homo sapiens
gggccacccacagacgcaaaggctaaggagctgccgcctcactcacagacgcacacacgccgccctatgcccagaaatacatgtgcacgtgcatgctcacaaacacgtccggctcgcgtccc

SEQ ID NO: 433647 - DNA, 122 bp, Homo sapiens
gcctaatgaaacatacacattctcactttgcaaactgcaaatggctaagaaccgaatcaacgtccataaaaaaaaaaaaaaaaagcagccaatttcatctctcctagccacaccttccatta

SEQ ID NO: 433648 - DNA, 122 bp, Homo sapiens
tcccccagtgagggtttcctccagtgcgggtttcctccagtgcagaactcagtgttcacacgaatcggcagaaggaaagccgcatgtgctctgtggttatcaccgaggcatgcccagggcgt

SEQ ID NO: 433649 - DNA, 122 bp, Homo sapiens
gtagaggctgtgctggtccaaagaaggctcaaaagagggcagtttgcgcacacaacgtgtcggggcagggcttccagatgatcattcggcttttttgtgtcttccaagatgatgatccgggg

SEQ ID NO: 433650 - DNA, 122 bp, Homo sapiens
tcatacaaggtcctgtcacacagcactcaaagtaatttcttctcctgagcacttcctgcacgacttcattctccttaattaagggctgaccccagacgttctattaatctaagctctacctg

SEQ ID NO: 433651 - DNA, 122 bp, Homo sapiens
cttcaaatgagcatacatacagctccggtaaacacactgcacgtgtggcacctccaagagcgggcaggcaactgcacaggcagacagcccaccccaagggcagaatcagggaagaagagacg

SEQ ID NO: 433652 - DNA, 122 bp, Homo sapiens
aaatgagcttgttatctttcactcggcaccagcgctctcgccagcggctgttggagagcacgttcagatagcctgcggagacacaaggccacaggtcagccgcctcggacaagaccaggcga

SEQ ID NO: 433653 - DNA, 122 bp, Homo sapiens
gatggggtttcacgatgttgcccaggctgatctcaaactcctcagctcaagcgatctgcccgccttggccacccgaagtgctgagattacaggtgagggccacagcacctgcccagtaagct

SEQ ID NO: 433654 - DNA, 122 bp, Homo sapiens
cctccatgtgcagagaggccaggaaggtctccagcgggctagtctcgggctccaggtcctcgtccaagcctaaatcgagctcatcccagggcagctcctccccacagctgcggtcctgcagg

SEQ ID NO: 433655 - DNA, 122 bp, Homo sapiens
gtttctcagggcagttgccacaggtttccatggaatgacaattacaaggtagatggatcacgtaatgcctgctgtgaactttacaatacatggggatcactattttaatgttgatttgcata

SEQ ID NO: 433656 - DNA, 122 bp, Homo sapiens
ggtcccctgacaggaggcagccggggccggtgcgtgtgtttgcatgttgcagtcatggggcggggccggcagaggcctgtgtgattgtggcgtccctggaaaagatgcttggcaggcccctc

SEQ ID NO: 433657 - DNA, 122 bp, Homo sapiens
ggctgtgggggagaaagaagagctgtgctcacctcacccttggtggcctgtgagcgccgccgcccctgcagtatcttgcggcagatcatcagcatcgtggtggtgatcatgaccgcagccac

SEQ ID NO: 433658 - DNA, 122 bp, Homo sapiens
ttcgggcagcgggggatggggggcgcctggagctgggaatgggacgcagggggcggacgccggcgggaccacgtgacagcgccagcagcggccgcagctgccccagctgcagacgccgccgt

SEQ ID NO: 433659 - DNA, 122 bp, Homo sapiens
tgccgttaccagtgttggacccgccttcctcttttcctagaaaaggcgcagatgcgtggtcgcaaactgatttccaagtccgttgtctgatgctgcgagacactatccgtttgttacagcga

SEQ ID NO: 433660 - DNA, 122 bp, Homo sapiens
cttctatgcaggtaaggaagtcacctgccttgacgggtggttgcaaaagctgccgaggaccgaggagtgattcaaattgcttgtcagtttgcccaacccaagagtaagtgcgggtcctgatg

SEQ ID NO: 433661 - DNA, 122 bp, Homo sapiens
tctccatgcctgggtgtgtgtgtatggacctccgtgtgtctgcgtgtgtgtgaccacgtgcggctgagaggccatgtagacgtgacttgggtgtctatgtgtgctccctgcctgtgtgtagt

SEQ ID NO: 433662 - DNA, 122 bp, Homo sapiens
tttcaccattatctcactcatttgcattctgctccatttggattctgaaactcaactggacgctttattttcagggtaggtctgcatgatggcaaacaaacagtttgggaaggaattagcca

SEQ ID NO: 433663 - DNA, 122 bp, Homo sapiens
attagtggtaacaaataatagccccacgcctgcaatatctcctttaatattcccaacgtccgctaagcgcgtctcatcaccatttaaagaaaccgtggctcctagaggtaaagtacttcggt

SEQ ID NO: 433664 - DNA, 122 bp, Homo sapiens
cctctaattccccgacagtcttcgtgtggttatccagcgccctgccactcccatctcaagcgactggagagccacagcccttgtctcagtactggatcacactggtagctgtgttctccgcg

SEQ ID NO: 433665 - DNA, 122 bp, Homo sapiens
ctcgccgtgagcggggccaacgggccgtgttctccctgaaggggcggggtctgatcgctgcgggtcggattcccttgggcctgaaagtgaggatgagcgacaaccgtgggcggggcctgcgc

SEQ ID NO: 433666 - DNA, 122 bp, Homo sapiens
caaaaaaggaatttgtcccaggtcctcagaatcactgtctaggaagcaacccaaaggccgcggagtgggtaggatcccccaagagaccagatgtcatggtgttgtccagctggtccctctca

SEQ ID NO: 433667 - DNA, 122 bp, Homo sapiens
caccccatctctctcccctttgctttctaactgggttgggaagctaatctgccaagagcccgctgcttagccggtgcggtggcatgtgcctgtggtcccagctacttgggaggctggaacag

SEQ ID NO: 433668 - DNA, 122 bp, Homo sapiens
gtggaagctggcctggcccccggagctccctggagtcggtactgggggcttcgttttgtacgcaccggtaggtacgctctttgtggtccctggcctttcctcctgtctgaatggagaggttt

SEQ ID NO: 433669 - DNA, 122 bp, Homo sapiens
cttcacaggttgtctgaaaagatactaagcacgtgcaccggcagggtgtcggcgttccgccgacatccaggtcgaacactttgtcaccagagcaccagtggggctgtcttgagtggaagtgc

SEQ ID NO: 433670 - DNA, 122 bp, Homo sapiens
gtggcggcttggcccttgtgaatcttccacgtatcgatggcgcacctaccttgtgccaggcgcagcggatcccacaatgtaaaagaagaggaaatacactgcgacatgtgatatggagagac

SEQ ID NO: 433671 - DNA, 122 bp, Homo sapiens
ctccgccccccccttacacgtttgcacgcgcttttcacgtcctcccccccgccgccagcacgcaccgtgcacgccctgcccccacgctcagagctccgtggcacgcccccccagccccacga

SEQ ID NO: 433672 - DNA, 122 bp, Homo sapiens
agagtgatccactaccgattactgatgaaagggcccgggatgggcagcgcgaaatcttgccgagaggcgcagctcgcatcaccagaccccgcacctcgccggccctccgtccgggtcgccta

SEQ ID NO: 433673 - DNA, 122 bp, Homo sapiens
ctggggatggaagtagagaggaatttcgggttacgatttggttccgggtctgagtttcaacgttgaattctcccatatttgggcctgaattctcagaacagaataggatgtaagggctgaga

SEQ ID NO: 433674 - DNA, 122 bp, Homo sapiens
catccgtggcgctgactcttgcgatactggtccttatagctgtgttttcaggtaaagaaacgctgtatgaggtgggtgagaataacggtctcaagtcatttgtatccagcacctgcaccctg

SEQ ID NO: 433675 - DNA, 122 bp, Homo sapiens
ttcggggcgcctttgccaaagtgttttgagtaggccgttcggaaacgcggagcaggagttcgagcccccaaggtcacgggtggcgcgggaagaactcgggccccagagggacggaggggaag

SEQ ID NO: 433676 - DNA, 122 bp, Homo sapiens
agaagttagaccctcggagctggtctcggactgctggggcgtcaccccttcagcaacccccgctgaccatggcagtatttcatgacgaggtggaaatcgaggacttccaatatgacgaggac

SEQ ID NO: 433677 - DNA, 122 bp, Homo sapiens
attctttagtcaactccagagcaggaacttcttagaaaccaagcaagttctgccacaagacgctgaaatcccgcaagtgagcgagacacatgggggaagtggtccgacctatgcccttactc

SEQ ID NO: 433678 - DNA, 122 bp, Homo sapiens
caaaagtaaaacattggtcctgaatgccacagggattctggattttaaggtggttagctgcggacaccaatctgaggaatgctggccccaggatgaagtctaactcctaggctgacgttcaa

SEQ ID NO: 433679 - DNA, 122 bp, Homo sapiens
ccacagcgggtcagccaccccccgccccctgctcccttcccgccttcccttccggagtagcgtgagctcacttccctcacagccgaagcgtctggcgccatcttgggtcagggcggcgggtc

SEQ ID NO: 433680 - DNA, 122 bp, Homo sapiens
agctcctccagctctccccgcggcagcaggccggggagcagatgtcttgtccagtgtgcgcggggcaccgaggtagggaaagcctgtttaacccgtcccgcccctcctgctctggccagcag

SEQ ID NO: 433681 - DNA, 122 bp, Homo sapiens
cagatcttcctcctcctcttcctcctccagatctgggtcttggggaaccaggggtgttggcgctgggcaattaccacctcgcttcacgtatacccagtgtttctgtggcatgatgctagggg

SEQ ID NO: 433682 - DNA, 122 bp, Homo sapiens
gcagcggccaggggaccctggaagcgcgcgcggagaagtgaatgcagagaccaacgggagcgcagggaggtcgcctgtagcagccagcgcttgcaacccgcaatgagcatagagtatttctt

SEQ ID NO: 433683 - DNA, 122 bp, Homo sapiens
tgcccacggggtagacctcgcgcacgtagaggatgagatgcacagccacctccaggaactcgcagagcacatcggccaccactgcaggggggcacaagccggtggcgcgctcgaggaagccc

SEQ ID NO: 433684 - DNA, 122 bp, Homo sapiens
accatccccaggtgggtgtgttctgaggggccactggattttgacgtatggattctgccacggaacaatcaaattgcccgtacttggcaaagttttgggagagcagaatgcatcactttctg

SEQ ID NO: 433685 - DNA, 122 bp, Homo sapiens
cgccgagtgcacctggagaggcgtgggaggtagcagccgcagcttgcctggcgctcgcgccgcgtctgagcgcgcaccctgggcctgaatctcagcagttccgctgcgacgcggctgctcgc

SEQ ID NO: 433686 - DNA, 122 bp, Homo sapiens
ctagaccccgccacgtgaggaggtcacccaggcccgtagggctcccgtggtgtgcggaggcgcagaacaagctcaggagtctgctgacctggtgcgccacaccccggggaccgccagtgggc

SEQ ID NO: 433687 - DNA, 122 bp, Homo sapiens
gccctgttaaggagtttgactttattccaaagggcagccatcagtttcaggtgtgggtcacgtggtcagctgtataccttaaatatctcagtttgctaaatcaagaaatagtagaggctggc

SEQ ID NO: 433688 - DNA, 122 bp, Homo sapiens
catccaacagcaaggacgaagctgcagaaagagcagcccagcagcagaggaaactgaacccgaagcgagggccacagagaaggcagatgaagccgcatctctcaaacctgcaaagtaactgg

SEQ ID NO: 433689 - DNA, 122 bp, Homo sapiens
gaactgggctgtttcttcttctgcaggtaaaggcaattactggaccctggaccccaactgcgagaagatgtttgacaacgggaacttccgaaggaagaggaagaggagagctgaagccagcg

SEQ ID NO: 433690 - DNA, 122 bp, Homo sapiens
ctttgtcctcccattatggcgacgagttcagaagattgttaatatgcaattgtccagacacgtctaatcgaagagttaattctcagaaaatgacaagtttattatggtgtttgtggaagcca

SEQ ID NO: 433691 - DNA, 122 bp, Homo sapiens
agagataatggcaagaggtaggggcaaagtatctgttcattcataatcactactgtgcttcgtttctgggcaaggtagtctgatgaaattaaaggaagttctgtgttacaagtcatgtgctt

SEQ ID NO: 433692 - DNA, 122 bp, Homo sapiens
ttgaaaattgcaaagtcttcacaccgcagcttcccctttctttgttgctttggttttctccgtgggacttcccaccatccgtaaaattaggtgtttttgcctgttttattcactgctacgtc

SEQ ID NO: 433693 - DNA, 122 bp, Homo sapiens
gtgccacagcgcgccctagtggccgtcgtccggaaagcgccgtcagaagaatcgcaggctcgcagcctgggagccccgcagccctcatcttctgtccgccctaaggctcattgacttcacat

SEQ ID NO: 433694 - DNA, 122 bp, Homo sapiens
tcgcagtttaaacgtgtcctcatcctacacctcccacggctgtttcggattcggtgccctcgtgcccctcagcttgcccagcggcacgtgggcctcaagcctggtccccagcggctgcgcca

SEQ ID NO: 433695 - DNA, 122 bp, Homo sapiens
tctggagggcgccaacagcagctaccagggctgcttttcctggtgggtctcacgtcagaccgttgttgggtgcccctacccgggctcctgagtgctgggaacgaggaggatggggtttctcc

SEQ ID NO: 433696 - DNA, 122 bp, Homo sapiens
ctgatgggaggaccggcgaaaggggcttggtgaagcccgcgctccttgggggtgggaatgcggggatggggtggtcgcgatgcagggagggcgacagggtccaggtcgtgctcataagtttg

SEQ ID NO: 433697 - DNA, 122 bp, Homo sapiens
agtcggcgcagaaagtttgtcgagaactcgggaccgcggagagccagaggcgcccaggtccgccttcggagccggagccggccgactgcatcgcgaggacggggacaggggatcccggggaa

SEQ ID NO: 433698 - DNA, 122 bp, Homo sapiens
ggaaattgaggctcagtgagggcctcaggtcacacagcaaggtgcgaaggcagctagtcccgagagcttgtggtggttgcttctctcttgcctgggctacaggaggacgcaggggcagcccc

SEQ ID NO: 433699 - DNA, 122 bp, Homo sapiens
taataggagagtggtcatgagtgcgccagcgcatgaatgaatggactcaaaatgaatgcacgcacagagtaaatgagccttgcctgtgaccattttcaaacatgtcatttctaacaaaagtc

SEQ ID NO: 433700 - DNA, 122 bp, Homo sapiens
aaagccatttagtcctatatttccaactcacagatgaggaaactgaagcccagagaggagcgactttgcccaggtgcacagccccggcaggagttccatcaggacagtcttggcagactgga

SEQ ID NO: 433701 - DNA, 122 bp, Homo sapiens
ggtctccaagccgattacagctgagctcccacgtgacgttttaccttctgtctcccggagcgcgttgcccgaggacagtccttccccggctgccgccccagcccgccgcgggggctcggctc

SEQ ID NO: 433702 - DNA, 122 bp, Homo sapiens
tctggcgtcccgaggcccgtcccagtaccggggtctctttccagcacgcgcgcgcgcattcgagctcgccccaaactcggccacacaaggctgggcaggacagacacagccccagcctgcct

SEQ ID NO: 433703 - DNA, 122 bp, Homo sapiens
cgcgcacacacatgcccatcccaacagatgtcacccgagtactcgcacttgctgacagatcgcattccgaggctgcacacctccacctccctctctgcccgagacaccctgcacagtccagg

SEQ ID NO: 433704 - DNA, 122 bp, Homo sapiens
cctgcactccaggcacggcccagagttgcccctcccctagcgctcccctattcgtgggtgcgagttcttgagctggagcaagggccatgagaaaccaggccttcactctatgctcttcactc

SEQ ID NO: 433705 - DNA, 122 bp, Homo sapiens
actggccaggtgccttcttgggtaaaggcgaatgatagtgttgtccctttgctcacagctcgagaggttaaggaataagatcatccaggccacctttagcatctccgggaccaagtccttgg

SEQ ID NO: 433706 - DNA, 122 bp, Homo sapiens
aacaataagcagcaatagtagagaaaacatgggtaaaaagggaatcatcttgagtctctccgttgcagttagtccccgaagagaactggcagtgggctttggagagctcagaatttatatac

SEQ ID NO: 433707 - DNA, 122 bp, Homo sapiens
gttggttcagaggatcagggatccgcaggtacccaaggatcacccaggtaaaaatgaccacgaaggagttgtaaaaggggacacgcattccaaatagaagggaagctgttggccgggcacag

SEQ ID NO: 433708 - DNA, 122 bp, Homo sapiens
ccgtaaggatccctcctcccagccgcatgttcactctcctgctgccttcaccacgtgagccggcggtcaaggccaggaagcccatcccagccactctcctggaggagaccgaggtgtgggcc

SEQ ID NO: 433709 - DNA, 122 bp, Homo sapiens
tgttacctacctgtatgcagtcggcaatgagaatcttggagcaagcaggaatactacatccgggtcctaatgtccattgccatttgcggtactacgttcctcacagttacgcactgcagaaa

SEQ ID NO: 433710 - DNA, 122 bp, Homo sapiens
gcctgacttcagtcatttttatgattaatccccagattagcctacaaaatttcacgccatcgagagtgagctatattcaatatcacttcacccagtgcttcattccatgaatcaacacagcc

SEQ ID NO: 433711 - DNA, 122 bp, Homo sapiens
aaaagaaaatcggaaaatagatccggaggctgtttaaaaatgtcttcttggagagacttccgtagggtcggccagcgcggagtcttcagttgcgcctggccaagttttttgcaaacgtcaaa

SEQ ID NO: 433712 - DNA, 122 bp, Homo sapiens
tatcccacacgaaccattagctggagcaaattgcccacgtcctatgcactgtgattcaagcgaagagtaattattgggaaaaagtgtcccaccgcatcagcagtcgttccgggttcctgcct

SEQ ID NO: 433713 - DNA, 122 bp, Homo sapiens
gggatgagtccccagagttgacagtttacgttcccagctggttggtgagatatgcttgtccggggaccactttaggaaccgctgacctgaagtttcgggaagacattgaacggagagccaga

SEQ ID NO: 433714 - DNA, 122 bp, Homo sapiens
cgccgcgcgtatttctgtgggcccaggagggttgagcggcgtttcccggagcgcgaaatccgatgccgtgttgagtccgccgggggcgtcccgggggaaagtgagtgtgccttccctggaag

SEQ ID NO: 433715 - DNA, 122 bp, Homo sapiens
agcaggacacttgctcatggtcacacagctagtgagaagcagagacttggccttatcccacgccctctgattccaagtttggataaaaaataaaggctttttctagagttttatattcctta

SEQ ID NO: 433716 - DNA, 122 bp, Homo sapiens
taaagagacccgtcaaagcctgcggattcttcttttaacagctctattctcatgcatgcacgccagggctggggggaacttttgttgtttgtttgtaatagaaatcgagaaagggagtgggg

SEQ ID NO: 433717 - DNA, 122 bp, Homo sapiens
ctggtggtccctgagggtgcccaggctgcaggatcccggcgtgagggaagggcagccggacgtggccccaaaagtggtccttatcgggttatactggaagccactggcctggctgcaggaac

SEQ ID NO: 433718 - DNA, 122 bp, Homo sapiens
gtgaagagtggattcagtgatgcacgaagtttttacatcatctccgacttgcaccacttacgagctttaaagtgaccccccggctttaaagcttcctgaagcaaattacctattgccaccga

SEQ ID NO: 433719 - DNA, 122 bp, Homo sapiens
acttccgctttcggtctcaactcctctccctgaggagagtggtttaaacggtgaaggctgcggggcgtcgccggaagtgtcgtaaacgtcggatatccggttcttctgggcgctaagggagc

SEQ ID NO: 433720 - DNA, 122 bp, Homo sapiens
attgagggggtcggagggagcttggaagcagccggtttctttaaactcttaccaaaaccccgcgctctgtctagacggtgatgattattattcaagacctggaaacatttcgaggaagggcc

SEQ ID NO: 433721 - DNA, 122 bp, Homo sapiens
ccttccccgaccggaaaaaggcaagcgtccttcgttctcgcgggtctgttagaccagatgcgaacacgactgtgcctccggcggccgtgtggtcaaatgcgctgccgtttgacgcaggcgca

SEQ ID NO: 433722 - DNA, 122 bp, Homo sapiens
cttcccctttaatgatttaattaagacttaaatatgtaaagttctccaccaggactgccccgtggaacgctgtctgctccaggtgatgtttataatcacaaatgggttccaagaataaacaa

SEQ ID NO: 433723 - DNA, 122 bp, Homo sapiens
tcttagtaactccagtagccttcattagttaaaaacattattattttttgcatgctgcttcgactctaaatatctggttttccctgtctttttggtttactacttccccagattcagaacag

SEQ ID NO: 433724 - DNA, 122 bp, Homo sapiens
cttccccgcctgggcttctttcacacaatgggctctacagccttcgcttgtgtcagcctgcgctggtggggatgggaacggacttgggcaccttttggctccccggtcttctgtgcttgtca

SEQ ID NO: 433725 - DNA, 122 bp, Homo sapiens
ccttattcctattgtcagcctcgctgcgctaggaccctaaaaatttggtctcatgttgcccggggaacaacatttcgctacacctacctccataccgcctcccgctcccgctctcccttgca

SEQ ID NO: 433726 - DNA, 122 bp, Homo sapiens
gtacatctctgcgtgcctgggtttgtatggatggcagcatggatgctcaggcaactgacccgtcaggactgcagcaaatgaacagaagctgggggagagcgcgggctggtgctgtacggagc

SEQ ID NO: 433727 - DNA, 122 bp, Homo sapiens
ttcgagagctgggagagacccacccagctggcactggctgagaggtgagcaagccgctcccgcacagagggctccatcccaagtgcacatgtgtttcctgcagggggagcacctttaaccag

SEQ ID NO: 433728 - DNA, 122 bp, Homo sapiens
gataaaaaatgtttattagtttccttgctttccctatagctaaagacatgactacttcaacgcacctaatccatatttctcaaagtgtaaagtgtacaggtggaagggctgcctattaaact

SEQ ID NO: 433729 - DNA, 122 bp, Homo sapiens
gtttattcaaattattcttgatgggtacccattggtctatttttttcccacatcctttaacgtcaacttaaaaatagtaaaggtactgcatttcagctcactgacttgtttttgacgtatta

SEQ ID NO: 433730 - DNA, 122 bp, Homo sapiens
tgcggagctgggctttgcgtgcgccgcttctggaaagtcggctccagtcatatccctgggcgctgcctgcggccgctcctcccgcgcttctcacggcacctgacacgcggaggcggcggccg

SEQ ID NO: 433731 - DNA, 122 bp, Homo sapiens
gagaggcacagtccggtgctttgaggctggtattctccatcatgcaggagagccagggggcggggtaggggtggtttctgacacctctctgatgaccaggcctcattacagagccagctgtg

SEQ ID NO: 433732 - DNA, 122 bp, Homo sapiens
tgtatctccatgccctttggagcacagataattgacagttggaggctaaaggggttgggtcgcgggaaggttgtgataagtccctgatagcctcccgtgcccttttttgacaggtcttcact

SEQ ID NO: 433733 - DNA, 122 bp, Homo sapiens
tcacacaaggtcacttaccaaaagggtgacctccgtggaagaccgttttaacctgacaagcgagtaccttgcgtaagtccaccaggcctcacccttgactcctcggagccaggcacctccag

SEQ ID NO: 433734 - DNA, 122 bp, Homo sapiens
atcagcactgtaggcccggaaggtactcgtgctggtgctggtgggcggtggatgggggggcgggaccgaaacacgccagattctctgcagctgtctttgccaaacccctagccctcgccaca

SEQ ID NO: 433735 - DNA, 122 bp, Homo sapiens
gctgtgaactaaaacaacacttagttacctacttctgggaagccatcttggctcggactccgggactgggtgagagtgcttaaagaatgtgaagaccctgtcggtgttctgtccgactatct

SEQ ID NO: 433736 - DNA, 122 bp, Homo sapiens
ccaggcttccctcgccctctccttgagctggcccagtgccctacggttgccatagtaattcgggagcgctagattcaaaagattgagctattatacgttcccggaccaagtttggccacctg

SEQ ID NO: 433737 - DNA, 122 bp, Homo sapiens
ccacgcccccgaccctttgctcaataaacattccgcactccattttcaggctcttccttgcgtgtgcgtgcacgttgggtgctggggggtggagaccggatcttcctcgcttgggtactttc

SEQ ID NO: 433738 - DNA, 122 bp, Homo sapiens
gggatcacccagagcctgatgggagagatggggtagccagtcctcactcaaggtgctgggcgaaattatagtgcatcatgatacctaaggagtataacaatcgataaattcacacagttgat

SEQ ID NO: 433739 - DNA, 122 bp, Homo sapiens
ctgcgttgactgcttgtctctccacggcaacgtgagaactatttttgtgtgctgtggcaccgcagcactgagagcagcatccagtacgcaggtggcactcgacactgactgcacacaaggtg

SEQ ID NO: 433740 - DNA, 122 bp, Homo sapiens
cgaacccgtagcagcttccgagagcgtacccgtttgcaaattgctgcaggaagagcgaggcgggccttgcgctttttaatccggaacgggaagcactggggaagggaccgaggttaacttcg

SEQ ID NO: 433741 - DNA, 122 bp, Homo sapiens
gaagcgggacgtacagattccttttgtcgtggagttggaggtgctggacggccacgaccccgagcctggacggctgctgtgccaggcgcagcacgagcgccacttcctcccgccaggggtgc

SEQ ID NO: 433742 - DNA, 122 bp, Homo sapiens
tcctccccaattccaatatccccgtcctcgtgtccacttgcagtgacccaagaccccctacgttacgaccaccccttgtttctgaggtcccgccctcgagacggagaccccgccctggactc

SEQ ID NO: 433743 - DNA, 122 bp, Homo sapiens
gttaaaaagcagaaggcatgtcagggccaggccgggcctcgggacagagagggctttcttcgcagccctggatgaatctcagtgtcttaatgaaagctcttattagccccagctggcgtccc

SEQ ID NO: 433744 - DNA, 122 bp, Homo sapiens
tgacgcaggtcctggcgggggacccttccggagcagctccaactcggcagacatggggtgcgtctcctagcccgccagtgccacccagctcaggccagggcaaacccactggggatccaagg

SEQ ID NO: 433745 - DNA, 122 bp, Homo sapiens
gctttcagcgttaggtccctctctgtaacccacagcagggcctagaacatgaggcggttgcgcgtgagcagtatttctttttttaactccagcaaaagccccgcaaacgataaacgctaaaa

SEQ ID NO: 433746 - DNA, 122 bp, Homo sapiens
cggggacagcgaaccgaggggcagatgatccatcagaaaagagccggcactgcccagccccgcgcccctgcccctgcctttttccgggagcgcgccgcgccgcacccgctacggccgcttga

SEQ ID NO: 433747 - DNA, 122 bp, Homo sapiens
gcagtcaccctccggggatccaaagacagtcacgggcttccctttcctgcggctggaggccgcagactgggtggaagaggcatctgtccccaagggcgtgcacattgccctctccagccaag

SEQ ID NO: 433748 - DNA, 122 bp, Homo sapiens
ggtcgggtctgggtccagggagcgggtcgggaagtctgcggcacggagcactgctagtgtcggatctgcatctccagctctgtgctgcagcttcacttgcccgccccccaccactggcttct

SEQ ID NO: 433749 - DNA, 122 bp, Homo sapiens
gcctgtttttctgcaggctggaaagggagataaacaggccaaggcctagttgtgggtaagcgcctggcaggctgtggaatcagcgtcaccaaccttaaaatgttccttctcggtgtcggtca

SEQ ID NO: 433750 - DNA, 122 bp, Homo sapiens
aaagagaagttgccttgaaactccacgtagggaggaggcagtggcctgtttgaatctggccggcacagtcccgctccagggaccctgcggacccagcccattccatcagccaccaccagtag

SEQ ID NO: 433751 - DNA, 122 bp, Homo sapiens
gccgttcctcagcgctgcatgccgctcactggggccggcgatctggtcccctcgggccagcgctgaggccgccgcggcaggaagtggtaaaaacttttatagtattttctcaataggaataa

SEQ ID NO: 433752 - DNA, 122 bp, Homo sapiens
ttttgtggaaccgcagtgaagttactgctcagtgtgtctgaccgaggctttcacacgtgccgggacgcaccctgaaacttggtttctaagctttcacacagtgaactcagtgacgtaaatga

SEQ ID NO: 433753 - DNA, 122 bp, Homo sapiens
agaaagggtgaagtggttgtttccgtgacggactgagtacgggtgcctgtcaggctcttgcggaagtccatgcgccattgggagggcctcggccgcggctctgtgcccttgctgctgagggc

SEQ ID NO: 433754 - DNA, 122 bp, Homo sapiens
tacaaaattctgttaggggtacatacataaacaagtaaggcatgggccctacctgtctgacgacactctctctgctttttccacttctctaagttggcctctaaacagcaccttctcagcac

SEQ ID NO: 433755 - DNA, 122 bp, Homo sapiens
agggtgcagagtctcatctctgtgtccatgctaagtgcagcttctcatgatggtggaggacgagtttcttcatgggaaataaaagagcccgtgggaacccttcgcagcggcccacatagacc

SEQ ID NO: 433756 - DNA, 122 bp, Homo sapiens
tgcagtttacaggctggtaacctacatctttgtctacgagaatcccatctccctgctctgcggcgctatcatcatctggcgctttgctggcaatttcgagagaaccgtgggcaccgtccgcc

SEQ ID NO: 433757 - DNA, 122 bp, Homo sapiens
tccgggcgctgtccgcgctgggcaggccgcccccgcgtcccgccgcggcggcccggggcccgtgcgcgctcaccagatggccatcctgctcttggggtagtccagccgctccaggcagccga

SEQ ID NO: 433758 - DNA, 122 bp, Homo sapiens
cagctgcgctcccccagcctaccaaggtctctcagggcacaagtcacatgccgagccccacgctgctgcccactgggctaaaggtaactagcagacaaaatccacacttgacttctcaggag

SEQ ID NO: 433759 - DNA, 122 bp, Homo sapiens
cgataggggagatgttgcgggagtagaaagcgcagcaggctctcttgccggtttggtcgtcgatttggatcagggaggcgtgcagggccgtgccggtgacgccggtttccaagtagaatggg

SEQ ID NO: 433760 - DNA, 122 bp, Homo sapiens
gggccgagcgcactgggaaggccgggccggaccaggctcgggatccgccgccgccgccgccgctccacagacgtcacatgatgtttggtcacgtgggctccattcatgaagcggcgacgcgg

SEQ ID NO: 433761 - DNA, 122 bp, Homo sapiens
tgcttttctacatgcctgtgaaggagacttttcatgaaactgaataaaagaaatcctttccgagatagaggagatttgtaggtgaatgcagaagtgtatccagctttgaaccatgcattcca

SEQ ID NO: 433762 - DNA, 122 bp, Homo sapiens
gaggttgtgtgttctctgcttttgttttacttggaacagatgtttggcttttgtcaaggtcgttatttccagtgaagtatggcatcgaacatcagatagttgcccacacaaatgtctgtttt

SEQ ID NO: 433763 - DNA, 122 bp, Homo sapiens
acaggtagcgctggtggttaaagcggcgctccagctcgaagacctgcgcgtgggagaaagcggcccgcgagcgcttcttgcgtggcttgggcgccgccggctcctcctcctcctccgcgacg

SEQ ID NO: 433764 - DNA, 122 bp, Homo sapiens
ataccggggcgaggccccttccttttctagtccttctacgcgccaggtgggtgggtttcgcggtgacgaggcgacacctctttcccctctggcgagcacgttaactggggaagctaccaaat

SEQ ID NO: 433765 - DNA, 122 bp, Homo sapiens
agagacaggcttgggccccaggatgggaagtgatgcaagagttctgtcttagatattttacgtttgagttaccttaaaacctccaagtagaaatgtcaaataggatttatgtttctggaggt

SEQ ID NO: 433766 - DNA, 122 bp, Homo sapiens
agatcatacaatcacatggccacagcattcccacactctggtgggaatatggaagctccccgttgcttccaagaatttacaatccttgctaggaatccacctttggaaaaatgctcacttta

SEQ ID NO: 433767 - DNA, 122 bp, Homo sapiens
ttctaaacaattacaaactcattgacaagcaaacatgttcagggaaatattcatgtgtgacggggtggctgcctaactgtgagcttttcaaataaacctctatgtaaattacaacgtttttt

SEQ ID NO: 433768 - DNA, 122 bp, Homo sapiens
tatcacaagcccgccctactgatcacgcggagaggattccttcttcccctctttactccgcgccctgccgcggaaacccttcccgtggcctcgaactggtccccgacgactgcggggtacgc

SEQ ID NO: 433769 - DNA, 122 bp, Homo sapiens
gcgatggaacactctggaggcgtacttgagggtctgggtcatggtctggttcagggtgctcgcgaaagaaagcgcttctcctgagcatcatatctcaacccctatttaacctttgggtgagg

SEQ ID NO: 433770 - DNA, 122 bp, Homo sapiens
tcaccctcttctgctctagtgcgacatgggtggcaccggatggcccttgccgaggaggcacggcgggttcttgccagccgacggcccctactctccggttcccaggttgtgaggcggtgcgg

SEQ ID NO: 433771 - DNA, 122 bp, Homo sapiens
acagaacattatcactcacctcacctggcaaaacaaaaagctttcagagagatgtgtggccgtcatgatgtctcagctgcaggcatttttcaaagttatgtttgatgcagctggcacctttc

SEQ ID NO: 433772 - DNA, 122 bp, Homo sapiens
ttgacattcctttgaatacgctaataagtgacaaataagattaataagatttttcaaaatcgccaggactggtgaatataaatgatgattgaactggaataatattggggaccaaatcaaat

SEQ ID NO: 433773 - DNA, 122 bp, Homo sapiens
gcctcgtctgcagggacagactgtggccctccaagataaggggcgcagagagttcctaaccgaataggctgctcggagagcagctgccagccaacccctgggaaggcagctgtggaagtgga

SEQ ID NO: 433774 - DNA, 122 bp, Homo sapiens
gaagtgtgaggaagtgataaagattccagaaaccttccagtgctaacagcccttgcccaccgcagttcctcatgttgccctgctaacatcggtatgtatacacacacatgcacacacgtgaa

SEQ ID NO: 433775 - DNA, 122 bp, Homo sapiens
ttctctatgcatttttagagtttcctgattctagatttcagagcagatgaattaagatggcgaagaatcactttgctaatatgatacagtccaaaaatttcagagcaacatatgggccaaag

SEQ ID NO: 433776 - DNA, 122 bp, Homo sapiens
gggaaacttacaattacctgctggtctgaaggaataaactcaagagctttctggataacacggcagccatacatctgtagtgccaatgacaggacgtggcctcgaatccgttctgccaaagc

SEQ ID NO: 433777 - DNA, 122 bp, Homo sapiens
tgcgggcggagtttcgcgagggccgaagcggggcagtgtgacggcagcggtcctgggaggcgcccgcgcgcgtcggagcagctccccgtcctccgcagccgtcaccgccggccgtcgccgcg

SEQ ID NO: 433778 - DNA, 122 bp, Homo sapiens
agcgcacgtcgagcgggggagcggcgctgcctgtggagatccgcggaggccgacaggattcgttggctgccgtccccgctgctgtgcattgggtgaggggtcctctcgggcagagtggcgac

SEQ ID NO: 433779 - DNA, 122 bp, Homo sapiens
acaattcagaacagcagcagattctacccatggtggcattcctgtaaagtgaaactcaagcgccaagtttgttgtcatggggactgttgattgcatgctagtcttatggaaacacacggaaa

SEQ ID NO: 433780 - DNA, 122 bp, Homo sapiens
cttttcttcgcgtttagtcttagctctgacattttaaccaaaaggttacacgttaattaacgaggtattgaaggggaagatctcagctgaaagaaatgactgtaggaagtgtgtcagggaag

SEQ ID NO: 433781 - DNA, 122 bp, Homo sapiens
ggaactccaggacgccaagcctcttccactacgggtcgaaggatgggtcacgtcacattgcgcgaacaaggatggtcacgcgccacaaaaggacttgcagggcggggcgactcgacggcctt

SEQ ID NO: 433782 - DNA, 122 bp, Homo sapiens
cgaaggcctctttccttcatccttcccagccccagacaaacaggcagagtaagcagtattcgtcttaggtgccatatggaagatcttatttgtagactcgtgaatttcgccacccattcctc

SEQ ID NO: 433783 - DNA, 122 bp, Homo sapiens
agtcagtggaaagagtgtggctttggagcctgaactaggttccaatcatagctccacactcgtagtgtaagctttgtaaaatatctcctaaatagtgcccaaaatgaagaaggtgaatggta

SEQ ID NO: 433784 - DNA, 122 bp, Homo sapiens
ttgcgctcaggcgtgacgccggggtgcaggtgggagcgacgcccgggtgcgtgggtgcagcgctcgcccgcccgcggttaggcgcaccgcgggaaccggtcaggtgcgccgtgtggggcggg

SEQ ID NO: 433785 - DNA, 122 bp, Homo sapiens
ctcaggtgatccacccgctttgtcctcccaaaatgccgagattacaggcatgagtgcctgcgcctggctgggactgtaccttctggattttcaaatgaatgaaatgagtatttcttgagtgt

SEQ ID NO: 433786 - DNA, 122 bp, Homo sapiens
ccattaccccaatttgcacatgattccccctaaacctgcaagccaagccactattctcgacggtggtccacatgccctggcactgagttggatgcccgacactgtcacctactgccttctac

SEQ ID NO: 433787 - DNA, 122 bp, Homo sapiens
agagggcgccgttcttccctgagaacacggtccagggaggctggatggccaccgcgtccacggagagagcaccccaggagctccagaaagaacgtgaccacaacgcgcagaaaccaagctgt

SEQ ID NO: 433788 - DNA, 122 bp, Homo sapiens
gggctcatcgcagccccggcgtcccaggggcgggggccggggcctcagcacaaagctaggcgaagtggcagcggagggtcccccaccgccagccccccatgcacacacacctttggttctct

SEQ ID NO: 433789 - DNA, 122 bp, Homo sapiens
gagttgatcttttttaacttccttggtttgggctaaggaagctgtgatccagagaagccacgtgatttgtctaaggtcacatagcagtctggcctaaaatagcttgatatgctgtggatgga

SEQ ID NO: 433790 - DNA, 122 bp, Homo sapiens
cccatagcttgttctctgtcacagtgaatcttttatcacagagttaatcttaatttctgtcgcatgcagattctgacaccctgaaactcttttgtttctgaatgtaggccatattttcagtc

SEQ ID NO: 433791 - DNA, 122 bp, Homo sapiens
ctgaagtgaaaaaccttctgaacgtggctgtgtgtgctgtttgtcctatagtggcagtcacggtggcccaaattcacagaattgtgtgtgtcactcctagtttgcagatagcaccagctaaa

SEQ ID NO: 433792 - DNA, 122 bp, Homo sapiens
cggcctgcagcaaaccagacacatcagaagccaaggtcccactttaacattcagtgacatcgaacggagggagttatctgtagcaatcgccttcctgggggacccgtacaacacgcatgacc

SEQ ID NO: 433793 - DNA, 122 bp, Homo sapiens
cgtgtgggggcaagatggctactcaggcccgcgggtccgggagccactgcccccgtgccgcgaccctggggattttgtccctgcgctcagagactacagccgccgctattatggccactcca

SEQ ID NO: 433794 - DNA, 122 bp, Homo sapiens
cattagcgaaactacagcaagtttcaaggaataggctttccacccagcctcggatttacccgaaaagatcaggcccctcttaacacgtaaccacagagcctcggccacgctcggaaacgttc

SEQ ID NO: 433795 - DNA, 122 bp, Homo sapiens
gctgctccatccagcgctgactctgcagagctgcccctggtggcaggcgctgggatgagccggtgggagcccgtggagagatgttgcagtgaatgcacctgctctcagtggggtcgggagca

SEQ ID NO: 433796 - DNA, 122 bp, Homo sapiens
gaagtattcagagccataacactggaggcacaagggaaatgggtatagatgggtaagagacgaggatgagaggatccaggaaagaaaacaaggtggaggaaagcaaggtagctgtggcttcc

SEQ ID NO: 433797 - DNA, 122 bp, Homo sapiens
aggctttttcaagccaggtgatgaaagtctaaattgctctacacagaagaacaggaggcacgtctccagatagatccaggtgggcacagtcttagtgaggggtagatatatgagatcatccg

SEQ ID NO: 433798 - DNA, 122 bp, Homo sapiens
gccgagcttggaagaaagtgtgacccgttcgacggaacaaaggacatgacagcccggccccgtgcggccactgcggagcgttaggaacattccctaaaatggcggccggcgcgtcggaacag

SEQ ID NO: 433799 - DNA, 122 bp, Homo sapiens
tgatgtccaacccaggtgtttttccttgcactgagccttgaaggacagcccaggtattggcgaggacgctgcttccctttgctgctgctctggagctggggagaacgggccaggtcctaaat

SEQ ID NO: 433800 - DNA, 122 bp, Homo sapiens
actctgtaatagacaatggcctagtcctttgttaactgtctggaggtcctgctgggaggtcgcagagcagggctgagctgctggaccctcagagcaggaagtttctgggctttgagaaaagc

SEQ ID NO: 433801 - DNA, 122 bp, Homo sapiens
ctgacggcctcggtgcagctcccctgcacccccaaatgacgcaggtcagtaatccagggacgggcagcaggctcacgtgtccccagatgcaggcacacctgtgcctctcgagtcatctgcag

SEQ ID NO: 433802 - DNA, 122 bp, Homo sapiens
ttaaaaggcgaaatgtcagggagctggcgggggtgggggtgtggagggggattgaagtcccggtatgaatcgcagcgtttgaggaacttagggcagtactccctgttctggggtgaccattc

SEQ ID NO: 433803 - DNA, 122 bp, Homo sapiens
aaaagtgatcctctcttcagagctgtcaaaaacaaatccaagtctggatctcgctctcctcgctcaggatctgcatcaagatctcgttctcgttcatgttggaagtctcggtccctaaggcc

SEQ ID NO: 433804 - DNA, 122 bp, Homo sapiens
agcctggatcgctacctggccctggtgcacccgctgcgggcccgcgccctgcgtggccggcgcctggcccttggactctgcatggctgcttggctcatggcggccgccctggcactgcccct

SEQ ID NO: 433805 - DNA, 122 bp, Homo sapiens
cctgccggccgggcggcgatttgcaggtccagccggcgccggtttcgcgcggcggctcaacgtccacggagccccaggaatacccacccgctgcccagatcggcagccgctgctgcggggag

SEQ ID NO: 433806 - DNA, 122 bp, Homo sapiens
gattacagcctctgctgggctgccaccccatctaggaagtaaggagcgtctctgccgggccgcccatcgtctgggatgtaaggagcccctctgcccggccaccccgtctgggaagcgaggag

SEQ ID NO: 433807 - DNA, 122 bp, Homo sapiens
gggtccctggaagggctgtgccctgtcgccgttgcctgtgtcctggccgggtggttggagcgccactgccccctgagggattgattgcttgtccctgccgggagatccttttttgagtggag

SEQ ID NO: 433808 - DNA, 122 bp, Homo sapiens
atcccccccaacccaagaatggtttggtccacagccacatatatgtttattctgcgagtccgtgtcccacagtctgagactcttcttcccctccccttcccgccccgtgaagtggcccgggg

SEQ ID NO: 433809 - DNA, 122 bp, Homo sapiens
tgtgcggtgtctgtgactgagctgtgcagtgcctgtgactgagctgtgcggtgtctgtgacggtgagctgtgcggtgcctgtgacggtgagctgtgcggtgcctgtgacggtgagctgtgcg

SEQ ID NO: 433810 - DNA, 122 bp, Homo sapiens
agatgtaaaatcaagaaaccagtgaaataacacgtaacaggtgagtcaaacattaccagccgcatcaaacagtggaagtgaaatggcaccatctagcccacctggtgaaatccaaagcgaga

SEQ ID NO: 433811 - DNA, 122 bp, Homo sapiens
cagcagcaaagtgactgttcaaaggagcctgaagatctggcctgggttcctgctgggtgacggacgaggagccaagcaacagattcccagagccatttcctttgctgaacaatgggaaagtg

SEQ ID NO: 433812 - DNA, 122 bp, Homo sapiens
gctcccatctcatcagaattcagccttgcctggggtgatcaggggtcctgatgactctcccgctgtcccctttcagagcccatggccacatagagccccctctcctaaggtccctccagtat

SEQ ID NO: 433813 - DNA, 122 bp, Homo sapiens
aaacccacacacccttgttaaaaaaactttaatgtgattttaaaggaatctctggaatggcgtgtgtttgaacgcagtgcggcagactggatctctgccgtcccccatccccaacctccaat

SEQ ID NO: 433814 - DNA, 122 bp, Homo sapiens
tagtactctgtctcccagtcctcagcagccagtggtgtttccaggggtggctctggacctcgagcttctttcttcccatcctgggcaggcagtgttggtggtgatggcagtgtcattggtgg

SEQ ID NO: 433815 - DNA, 122 bp, Homo sapiens
gtctctgctttcctggtgcccagcatgggacctgatgtacagtagctacccaggaaggtacgttgaggcagagccactggcagcactaatgggagccctgtgtgccccagggaagctgctgg

SEQ ID NO: 433816 - DNA, 122 bp, Homo sapiens
tctctctcttctgcctcagggcagctcagaaaatgccaggaattatttctttacaactttcgggtgttatcctcttcccattcccccgcaaggcgccttgctttcccctggtccagtgagca

SEQ ID NO: 433817 - DNA, 122 bp, Homo sapiens
gggctcccgcccctctgcgatactgcagtggccccgcttacctctctttaccccctgggccgcagcgcttttcctacagattaccaggaccgacgctccgggccaggactgctcactcgggg

SEQ ID NO: 433818 - DNA, 122 bp, Homo sapiens
gcagttctggcttcgaggaggtcaagccctttaaggtggcatcgccctaagtcgcaggagcgggtctctccgcccctccctcgggccggggggcggggcctcctaatccggaactgaaggtc

SEQ ID NO: 433819 - DNA, 122 bp, Homo sapiens
ggtcgcgcggctttggaaaaacaaatcctggccctggactcggtttcccagcgcggtcaacgcatctggaggggactggaggaaacccccttgttggaagagattccaagagaagcacggtt

SEQ ID NO: 433820 - DNA, 122 bp, Homo sapiens
cagcactcaaatgagccaggaagagcagaacatgcttcagtacaaatgacagaagccggccgtaggcaggcagctgggaacccccacctccgacacatgtgtgtgtcatttctctccgccgt

SEQ ID NO: 433821 - DNA, 122 bp, Homo sapiens
tagttcactgtgcggtgcattctgtgggttttgacaaatgcatgccatgtcccaccattacgtgtcacacagaatatgttcaccgccccgaccgccctgagtcttctctgttctccttccgt

SEQ ID NO: 433822 - DNA, 122 bp, Homo sapiens
gacaatatggaactgcaagcaatctttaaaaaaagaccttagccctaggtcaaagagtagcgagtgaatatatttgtttcattaacatattttaagttaaaagattcaagatatgtgtatct

SEQ ID NO: 433823 - DNA, 122 bp, Homo sapiens
agctgaatgctttatgtcggaatcgaccaatgggatggcggcacccggttgccagggctacggccaagcggaggtagggcctcggcactatgggcggggcctgggcggggttatataagcca

SEQ ID NO: 433824 - DNA, 122 bp, Homo sapiens
agaggcttgggaacaaagtctcacatcaccaagaagctcaggcagagtcagggccaacctcggcccttcctgtgtttgcttctgggaagcccggcgtgcgtgggctcagacagctgccctcc

SEQ ID NO: 433825 - DNA, 122 bp, Homo sapiens
gcgccgtgcgccagcggagttggcggccttcccctgggggttaccccgcagcgccgtctccgggatcccctgggggttactccacagtccagtctccgggatcccctgggggttaccccgca

SEQ ID NO: 433826 - DNA, 122 bp, Homo sapiens
cccaccaagtcacccccacatggcacccaaggaggccgaggacactgagggcacaaggcccgcacgagagaacatgagtggccagtgccccagagctggcttggtaacctgacttttccatt

SEQ ID NO: 433827 - DNA, 122 bp, Homo sapiens
cagtggcactgagggaggcggccgatatcccctcacgaaaactaaagaactcatccggaacgtcttgctgcggagaagccatcccacctctccttacaggcacccaccagtaataagccccc

SEQ ID NO: 433828 - DNA, 122 bp, Homo sapiens
gatgcagccgggcagtgaggagcgcaggcgaatgttacagcaggcgcgagcgaaggggcccgaggcaccggtgcttccgacggggcccgagggccgtctgacctttccggccacggggcagc

SEQ ID NO: 433829 - DNA, 122 bp, Homo sapiens
cagggaagttgagtgacttgctcaaggtctcactgccagtgagactgggactggaacccacgcatgcctcctaactgccgatattctgtatacattgcttctcttaacaagtagaatctgcg

SEQ ID NO: 433830 - DNA, 122 bp, Homo sapiens
ggggtcggggctgcaactgccggtgcagggccacagagaagccgaagaggctgcctggctcgccctccttgcgcaaggcacccatcacgtccagattgaaggcgacagcccgtgagaagagc

SEQ ID NO: 433831 - DNA, 122 bp, Homo sapiens
ttcaggttttttctatctattgagagactgcctttccctggcactggctgtgaccagtgtcggccaggctggtcttgaactcctgacctcaagtgatcggcccacctcggcctcccaaagtg

SEQ ID NO: 433832 - DNA, 122 bp, Homo sapiens
aatgaacttttaatgacacttaaatttctaaaatgtctaaccagctggttttcctacctccgatgtcaccccactttaatgtcttaaatatggttcctgaaatttttttttgtcaaattgtt

SEQ ID NO: 433833 - DNA, 122 bp, Homo sapiens
agacaaggaagccatgtaaacgtttttggatgggcgtgaggcgttgtcagtcttgaaccccgttatgtcaggtaaagagcgcagcctcttctaccacaaacaccatttcccacatggaggaa

SEQ ID NO: 433834 - DNA, 122 bp, Homo sapiens
acataattatatttaagggaataatgtcagtttacctcattttgacttcaaggggtgttacgtgtcaggccttgggcttaaggctgtagctgctgaacattgcccaatttaacaactataaa

SEQ ID NO: 433835 - DNA, 122 bp, Homo sapiens
tcctcaaaccactggttttgtagctacaccaacagacccagagaaaggggccactgccttcggagaccctgccagactcagccctagcctacagcgccacacgcttactttagcctgcaaat

SEQ ID NO: 433836 - DNA, 122 bp, Homo sapiens
tagtacttttagactgatgaggaatgatgtctgcttccgtccgtcaaatgcagccacattcggagtgggaggtggtgaatctgtagttagcataagcagggtagggaaaagtaattttgtgc

SEQ ID NO: 433837 - DNA, 122 bp, Homo sapiens
gtggacgacacgcagttcgtgcgggtcgacagtgacgccgtgagtctgaggatgaagacgcgggcgcggtgggtggagcaggaggggccggagtattgggacctacagacactgggcgccaa

SEQ ID NO: 433838 - DNA, 122 bp, Homo sapiens
ccttcccagttccaaagcccaagaagctgggactgtgagatccacgttcccaaggctccccggtgctttccagcagcactcagggttggcaagagctggcttcagtatactgttatttcagg

SEQ ID NO: 433839 - DNA, 122 bp, Homo sapiens
cgttggtctgcagcctcctctcttagtggtgctctggtcccgtgaggcttacggcacacacgcgtccgtgagagaaatgccgttggcccagaagttcactctgggggctctaaaatttgact

SEQ ID NO: 433840 - DNA, 122 bp, Homo sapiens
tatcttgtgccttcagccacaacttcaccaggtttaaagagaaaacccctttctctacaccgccattcccaaggcgagctcactctctggcatcaaagttccctggggtgagttttcttcta

SEQ ID NO: 433841 - DNA, 122 bp, Homo sapiens
taattccattttgttttctgatcaatgaatgagactttggggatttcaaaatacttccagcgcccaggagactactccttgcttttggctctgtgcttaaatggtagatatttttgtcaagt

SEQ ID NO: 433842 - DNA, 122 bp, Homo sapiens
ctagtcctattccactgggtgtcggggcctcgggatccatgaaacggaaaacagcaatagcgtgggcttgcctctctacacatgaaggcctcctttgatttcagtataaaaacacccatgaa

SEQ ID NO: 433843 - DNA, 122 bp, Homo sapiens
cacagactcttcttggaaggtgtgtgtgccgtgaggggatacaccgccgccgggagttgccgggggaggagggagacggggtggcctcaggagacccgggcttgcgtctcacagggacaggt

SEQ ID NO: 433844 - DNA, 122 bp, Homo sapiens
gggggacgctcacctgttctggaaggcgatcagcagcctggggtccaggatgttctcctccggttcccacgtgttatatcttgcaagggaaaagggagggggacacggtgtaaaaaaaaaaa

SEQ ID NO: 433845 - DNA, 122 bp, Homo sapiens
ggcactggacttttccaatgactttcccatggaatgggcagtcgtaagtcctggtgccagcgggagcacagctggacatgctttgaatcataatggccaggtacacacccacatgacatgga

SEQ ID NO: 433846 - DNA, 122 bp, Homo sapiens
gcagtgccctgcgaggccgcatggcttttttaacccagccatgttgaaaatgtgttctggcggtcagagataataccttttcctatagaacatcatgaagtactgcaaaattcaactttaaa

SEQ ID NO: 433847 - DNA, 122 bp, Homo sapiens
cctccgtttgtcatttctcctcctaatgatttgaactgaggtctgtgtgctggcccagcccgttgcgggtctgcataatgtatgaacacgagtgacagccagccgcagcccgatcaaaacaa

SEQ ID NO: 433848 - DNA, 122 bp, Homo sapiens
ctgccaagagatccggcacagtgcagttgaaagcaaccgtgagacccaagttctagtctccgtcctgctacgaacgtgctgtgtgatctcaggcaagtctactggcccatgggagctccgga

SEQ ID NO: 433849 - DNA, 122 bp, Homo sapiens
ctcgactttttgcccccgcctccgttgctttctgccccggccaccacagctttctgcccccggcctcccggaatttagcccctgctgccgcggctttttggggatgtttgccctcgcagccg

SEQ ID NO: 433850 - DNA, 122 bp, Homo sapiens
gtgccgtccacctccgccatgacaacagacacattgacatgggtgggtttacccgccaagcggtcgatggtcttctgtgtgaaggccagcggcagggcctcgtggcccaccatgcaggagaa

SEQ ID NO: 433851 - DNA, 122 bp, Homo sapiens
cccgacccagtcagttcccccgcggcccggtcccctccgcctccaggcccgagctcccaccgcgcgctccccagccccagctaatattataagctaatataatcaggacgaagaaaatgaaa

SEQ ID NO: 433852 - DNA, 122 bp, Homo sapiens
agggggagggcaggcggcccacgaaagtactgccacggggcagacacacggggtcaccggcgtgccccgggcaaggctaggggagaaccgggctcccccaggacagatcccctccgtctccc

SEQ ID NO: 433853 - DNA, 122 bp, Homo sapiens
gggcctgctgggaggtggctctgcgggagcgacgcgcgaatacaggccgcaaatgataggcgggcggcgcaggagccccatctggaatccccggcggactcgcaccgcctccggttgacaac

SEQ ID NO: 433854 - DNA, 122 bp, Homo sapiens
atggtttgtgcacattcgagattggagagctttattaagggcgggctggcactgtatcatcgatggccattgggacaacaaacatttggtgagcattctcatatgtctgtcttctcgttagc

SEQ ID NO: 433855 - DNA, 122 bp, Homo sapiens
ggtcgatgggaccaggcactgtgaagcaggaggcggtgctcgttggggaggcttgggctacgcaggagcccacggtgggggggagggggactcaggcatggcgggctgcaggtcttgagccc

SEQ ID NO: 433856 - DNA, 122 bp, Homo sapiens
ctctcgtgatccaccccccttggcctcccaaagtgctgggattacaggcatgagccgctgcgcctggcctctgtaatgcaatttctatatgggtccactggaccctggacccttttacaaac

SEQ ID NO: 433857 - DNA, 122 bp, Homo sapiens
tcagaaaacgtcaccaaacttccaaaaagcatccccagtaagaaagacggacttgagacccggtgaagaaaaccaatggggtaagggtaaaggagcccctgaattccgcagtgaggcgatga

SEQ ID NO: 433858 - DNA, 122 bp, Homo sapiens
tatgaggccgaatctcatcctctagtcccaagcctctccactaccagggctgggtggcttcgccaggtagagcgccggcccctttaagagcaaacgacccggacacgtctgcgaagcttgcg

SEQ ID NO: 433859 - DNA, 122 bp, Homo sapiens
atggtgtggccctggggctaaggaaatgaagaggttgatgctagaggtgtagatatagtacggtcattggcatccagaggtgactgtcaaaacctgggtgtggataaaattgcatagggaac

SEQ ID NO: 433860 - DNA, 122 bp, Homo sapiens
atgcagacatggatgaagcaatgacaggcacgacgagcgttaatgaagggtataagctagcgcgagggcattcaagggaacttcagagcgcaaaggaagaatcccacttagtctctcaaaac

SEQ ID NO: 433861 - DNA, 122 bp, Homo sapiens
cagtacagccgccactcacctgcagggggcaccggcggcgcggaggagttagcacgtgagcgagtggcagcaaacgcggcccttcctagtgtccgctgtgtcgtccaaggcagccacctccg

SEQ ID NO: 433862 - DNA, 122 bp, Homo sapiens
gagagcttccgagcgctccgacaggagcagggagttggggtgggtagctccgcaggtgcacgctgcggcccttagggcgacagcctcggaaaaggcgcatctccggctgtgggtttctcggg

SEQ ID NO: 433863 - DNA, 122 bp, Homo sapiens
aatacaaataaacaggcatattggagtagaaatatatctctattgcaattttaagacaaccgtgaaagtccctatatcttccctaagtcctgccctaaacagcaaaagtcttggttttatcc

SEQ ID NO: 433864 - DNA, 122 bp, Homo sapiens
agcggcgggcggggcgtctgattatagtgtggggagcctgcgattggggtggggcgcctgcgattaggttgggaagcctgcgtttagggtggggcacctgcgattaggttgggaagcctgcg

SEQ ID NO: 433865 - DNA, 122 bp, Homo sapiens
cacccgaaagttagccacagttacgtgatggagcaactccaggctgcagggaaacgtgagcgccggccgtggggatgcgcggggaggagggcgggccaccaatgcctcgcccacactgtgtg

SEQ ID NO: 433866 - DNA, 122 bp, Homo sapiens
agaaggaggggaagaatgacagaaactcagtgaaggccttcagaaccgtttgccaagaaacgttttggagaggttaatgatacttgaacactaatgctcttcagttgcttttaccttgaaga

SEQ ID NO: 433867 - DNA, 122 bp, Homo sapiens
ggatggggaggggggagggcaggccttctgggaacatgaccccaaaaaccaaaatttccacgggcggccaatgggcgcagggcgcggtgtatgcccgctcctcctcctgttttcttcgaatt

SEQ ID NO: 433868 - DNA, 122 bp, Homo sapiens
cccacctttccccctggagctggaaacttcgctccatcagcagaatcctcagtccagccccggccccggccccacaccagccctggcctcttgtctggtttaaatgatcgagacgaggaaca

SEQ ID NO: 433869 - DNA, 122 bp, Homo sapiens
accctttcgggtacagttgcacacagtggatcacacagatccgaagtctgaggcacagggcgcggtccgcgagtgggagcggctgcttgtgggcagggtggacgcggggccacgtcttggcc

SEQ ID NO: 433870 - DNA, 122 bp, Homo sapiens
tcggaggtcaccggtggcgtcaactagctaggatcatctcccttttaagtctggctctggcgttgccctttgccaagcccctcctcctcccccgccggggccgcgggcaggtcgccgggcta

SEQ ID NO: 433871 - DNA, 122 bp, Homo sapiens
agccacccttcttggcctccgaaagtgctgggattacaggcatgaggcaccgcgccgggccgaacatttaatttttgattgtagaacttgaatatctcttgcagtgacactttggttatcac

SEQ ID NO: 433872 - DNA, 122 bp, Homo sapiens
ccactccctcttttgcagctactgtgccttccacacccctttttctggattccaaagagacgcaggagcaggccagtgctctccaggctggaggatcccacaagttactctccgactctgtc

SEQ ID NO: 433873 - DNA, 122 bp, Homo sapiens
tgctgataccagtagtaacaggttatactaagatgtcagttcctaagatctgtcacacagcgaggttgtggtgcggatagcataagtgtctcttgacactgtagtttatatgtaatggttgt

SEQ ID NO: 433874 - DNA, 122 bp, Homo sapiens
aggcgggaagaagctgctcttcgagtgaccctggggctgtctgttagcaggtccctcagccgttggaacgtccttgggcttctgaactagtgcccatgtgtgcctcggcctttcccaagggc

SEQ ID NO: 433875 - DNA, 122 bp, Homo sapiens
aagagaagcaggagtgcagaagacagggcaaaatcgccaacccggcgcaagcagcgcaagcgcagtgggcgctggggagcgcggaggaaaaggcgggacgccgcatggtggccagtcactgc

SEQ ID NO: 433876 - DNA, 122 bp, Homo sapiens
taaattaaatttacagtagagcttattcacttttattccaagcagtaaccatggcactcgcgttaaatcattacaagtgcagcagatatattgattactgccaggcctgtcattaccaatct

SEQ ID NO: 433877 - DNA, 122 bp, Homo sapiens
aaactatgcaaaagaacagaaatatatccaccaacttctgtatgaagtcaccaagaataccgcaaccagcaaagaactcctctctaaaaacgtggctcatcccctcgaaaggtaaaggtata

SEQ ID NO: 433878 - DNA, 122 bp, Homo sapiens
ggtggagggtggggctgaactcggtgacgcctccctcacacccagcttcagtggcgccaacgccgcttccccgcaccctcagggcgagggaagacttccctggctcaccaacttgctgccgc

SEQ ID NO: 433879 - DNA, 122 bp, Homo sapiens
atgggcagccagagtggggggacgtcgaggcccagatgatcttcaaccgggtggtcttcacgccccaccgggaggcctgcggcccccgttctgccctgccccctggcggcacagccctcggt

SEQ ID NO: 433880 - DNA, 122 bp, Homo sapiens
tactaaattgctaagaaactcatcaatctttttagcactagtctttttagcaccaaacaccgaatggtaaccaaatgctgaaattattactaaatataaagggatctctccaaattcctgat

SEQ ID NO: 433881 - DNA, 122 bp, Homo sapiens
gggccctgaaatcaattatccaaatgacagcccagagttcccataaatgaacaggcagaccgtgacactgggctccggctcaagaatgccgtcaggaaatgcttgtggcgaaagaatcatac

SEQ ID NO: 433882 - DNA, 122 bp, Homo sapiens
ctttgatttttttcacgctgtcatatgggttggcatcaaaggtcattaaatcccattcctcggaacggacatgcacctgggaagtgaaagccacaagacagttacctaggatgcctgcctcc

SEQ ID NO: 433883 - DNA, 122 bp, Homo sapiens
ggaagcatcattgggaagaaaggggagtcggttaagaggatccgcgaggagagtggcgcgcggatcaacatctcggaggggaattgtccggagagaatcatcactctgaccggccccaccaa

SEQ ID NO: 433884 - DNA, 122 bp, Homo sapiens
cttccaaagtgcccggacccaaaacaggaagtaagtgcgatggaaccttcaggttccaaccgccgccagggccgctccgcccagtggagcctgtccggcccccttgctgcccgctagctccc

SEQ ID NO: 433885 - DNA, 122 bp, Homo sapiens
catttacctaaggaccccagtgataaaattattgcatttctaaatgacaggaaaattggacggtagtaaaaattaggcagattaactgttggaaggtatattatatcatttaagggtctact

SEQ ID NO: 433886 - DNA, 122 bp, Homo sapiens
ctgcctcctccctgcccccagcctctgtgtgtatgagagacagacagacagacagacttccgaggctgcgcgttacctgccgaatgccgggctgatgaaagctgggtgtcggaacactgccg

SEQ ID NO: 433887 - DNA, 122 bp, Homo sapiens
ccgccgctgctgaagccgcggctgatggatgccagggagtgccgcattgcttagcgaccccgcctctgggtttgctggtaggagcggctgctctttcttctttcttgctttggggttttata

SEQ ID NO: 433888 - DNA, 122 bp, Homo sapiens
cctttagggaccacttctttccatctgtgcctcggaggggccggctgagagccgggctaccggcggaacttgtccttgcagcaaaaatgtgtttttctctccgcagagcacaggctgccggc

SEQ ID NO: 433889 - DNA, 122 bp, Homo sapiens
cttaagccaatcaacattttccattcccctggccacaagataggtttgaggttgggcctgcgacccagccctatccaatcaagtgaatgttaggactctttcccagcattctgggacagaac

SEQ ID NO: 433890 - DNA, 122 bp, Homo sapiens
ggccccgcagctctggccacagggacctctgcagtgccccctaagtgacccggacacttccgagggggccatcaccgcctgtgtatataacgtttccggtattactctgctacacgtagcct

SEQ ID NO: 433891 - DNA, 122 bp, Homo sapiens
gcccagctctccccaatacctctccctctatatccccgcccccgcctctgatccccgcaccgtccggcccccacctcagaaaccgtctctcgaggcgaccctcgccgcaattctcagaacct

SEQ ID NO: 433892 - DNA, 122 bp, Homo sapiens
ggcggtgggacgggacggggcgggcgggcggggcggggcctggcgggaatgggttgcggccgccgggggtgccccagaaggaacctcggcaaacccgttcgaaatgatccacttggcgggtg

SEQ ID NO: 433893 - DNA, 122 bp, Homo sapiens
agccgtcctccccgcccagagggcccccagctgctctgtgaggagccgcgaaggaacagccggccctgggaaagggctgataactggggccaaccctggtggcctgctcagcctgaagagga

SEQ ID NO: 433894 - DNA, 122 bp, Homo sapiens
aataatagattgatgtcctctctaaattttgcagctgtaaacagtcccagccctgcaaaccgaaagtttgttgctcttccctttaaaattactgtagggaccagccccacagggtcagtggg

SEQ ID NO: 433895 - DNA, 122 bp, Homo sapiens
gggcgcctcctgggcgccgcccaatcaccacacacctcccccaacacggcccaatccctgcgccgcgctctgtgacctcccgccttagcaaccaccgagtctcttccagagcctctcgcctc

SEQ ID NO: 433896 - DNA, 122 bp, Homo sapiens
cttgtttctaatatcttcctccacctctaaaaattaggtggcagagccagctccactctgcgtgtgcccccgactctattccgcttgtgagccccactcggaaagtaggcagcggtccggac

SEQ ID NO: 433897 - DNA, 122 bp, Homo sapiens
tacgtgccgccccccgcaccctcaacgcccgggtcctggttactcacccacacacgtgggcgctgagacattccattgggccaaggccccaggcacagggaggcactcgatctctggcgacc

SEQ ID NO: 433898 - DNA, 122 bp, Homo sapiens
gggccgccgttataaagcagccgccggcgccgggtgcctcacagcacgctgccacgccgacgcagacccctctctgcacgccagcccgcccgcacccaccatggccacagttcagcagctgg

SEQ ID NO: 433899 - DNA, 122 bp, Homo sapiens
cgtcgtgtttctgcttctcggctgtcgccatctttctccaggaactgagtctgcgcatggcgctgcgggagggggcggagggggcgggcagggccgcgccgggggcgggcggggagggggtg

SEQ ID NO: 433900 - DNA, 122 bp, Homo sapiens
gcaggtgcagaggtgccgccggcggcgtgcggctgcgaaggaagggaccccgacaccgagcgttcctgcggacgctcctcaaccgggggttgttctccgtgctctggacccggcccttcctc

SEQ ID NO: 433901 - DNA, 122 bp, Homo sapiens
ctctgccttgctgcatctcacttaagggctcgaggccccactgatccagcgtcctgtattcgggatctctgttgctgggccccaatgaacagcgccacagtgagaagatggttccaggggtt

SEQ ID NO: 433902 - DNA, 122 bp, Homo sapiens
cctactatcttcagttaggataactgagtatcagattagttttcagggtgggaactggctcgaatatgtggattcccaatgaggtagtcagcagactttaacagacaaaatcattcttttct

SEQ ID NO: 433903 - DNA, 122 bp, Homo sapiens
tgattttccagccaaagaaatgattctctccttcttctgtgtctcacgttgaagagctggcgcagaggtttcctgcagacccgggaggggtacctggggccggttaggagggtcctagggtt

SEQ ID NO: 433904 - DNA, 122 bp, Homo sapiens
tgagctgttatattttatctcttatgtctttacaaaaatttggaaagaatcaagataagacgtgtcagtagaaatgggaagtcctaatgtttctgcagaaagaaaactgacatttcatttgt

SEQ ID NO: 433905 - DNA, 122 bp, Homo sapiens
taatttaagaaagttctgtctggtaagaggtatggcagaatggcagtagggttggattttcgagtgacctgagaaagacgagtaaaaggataagaaatgcaggcaagaaatcatcccttaac

SEQ ID NO: 433906 - DNA, 122 bp, Homo sapiens
ctttcctgcgccttccaaggcttggagctgccccggggaagcagaccgaaccaaaccgaacgttcctgcagcctccccgccagccctgcgggagcccatccgcccaacgcggccccgcccct

SEQ ID NO: 433907 - DNA, 122 bp, Homo sapiens
aactttgaggatctgattcagaactaacatggaagatttaaatggatccattgcaacagacgttttgcatgttggcacactggaattagaggaactaatcagagccagagtggtaccagatg

SEQ ID NO: 433908 - DNA, 122 bp, Homo sapiens
attgtagtcctgcagccaggcgaccaaagagccgggagtcgttaagagactacaacgccccgcatgcccggcgaggtgcgcagcgccctgcctctctctctctaatggctgtgccccaaccc

SEQ ID NO: 433909 - DNA, 122 bp, Homo sapiens
atacacagaggtcttggttttatacagaacctttaattgcaaagaacttgaaagcagccacgctgggggtggcagtggagtggagaacccaccacaccctcccctcagtattcttcaccttc

SEQ ID NO: 433910 - DNA, 122 bp, Homo sapiens
tttatggttccagttaagagtaagtcatcaaaccaagagaacacaggaaccaagatggtacgctccaaaaagttcagttctgctctgaagcgccccctacaggatcctgttcagagacgcag

SEQ ID NO: 433911 - DNA, 122 bp, Homo sapiens
cagggggcgccggcacgtggagagtccgtggaaggtccagactcacccgtaggggccaggcgggcaacggcggagcgctcggagggagcagggccagagagaagtccccggggccagcctgc

SEQ ID NO: 433912 - DNA, 122 bp, Homo sapiens
gggaagaaaccttaagcccaggatctggcagcacaaaggtgcctggaaagcgacaatcagcgtttttatattcagggaaatcaggaacactgccacccgcccgccaggccggcgcccatgcc

SEQ ID NO: 433913 - DNA, 122 bp, Homo sapiens
tcgccgggaggaaggggtgtgtgtggcgcctgcgcagtggcggtgaccaccggctcgcggcgcgtggaggctgctcccagccgcgcgcgagtcagactcgggtgggggtcccggcggcggta

SEQ ID NO: 433914 - DNA, 122 bp, Homo sapiens
ttttgaagattatgccggtgcagaagcagaccggagccggccagcgaaccaggttcaaggcgtttgtggccattgcgggctacaacggtcacgtcggtctgggtgttaagtgctccaaggag

SEQ ID NO: 433915 - DNA, 122 bp, Homo sapiens
ggcttcccgcagaatcgctaaggagcgcctcctggcggcctggcccaaatcctcaactgccggcaacctgctggacctcagcactcccgcaggcatatggcaaaacatacacacacacacac

SEQ ID NO: 433916 - DNA, 122 bp, Homo sapiens
accccctaggcctggttctaggtctgccagctccgagaaggcccctaacaatggtgcagtcgcaggggctgtgtcccaggccgggctcacgcccagtcccgctgccccgggggtagatgggg

SEQ ID NO: 433917 - DNA, 122 bp, Homo sapiens
aagtagcttgcctacttctgcccacaggtgagcctgagacctgattagcctcttcctgcacggaacaagaggtagcttcctcctgaaagatgtcctgagtcgcagaagcattctctgacttg

SEQ ID NO: 433918 - DNA, 122 bp, Homo sapiens
aaataataaagcacaataggaacctcaactctgatcattctgcctttgcaatcaaagaaacggagaagctgtgagaacattccatgcttctctaggagccaagctgcaaatgtattagggcc

SEQ ID NO: 433919 - DNA, 122 bp, Homo sapiens
aaccgaatgattgattcgcctttgtcccaaggacacacttaacaccaacaggcagaaacccggggttaatgatagagggtggggagagaggaaggatgtttttcccagaaacttgatattgg

SEQ ID NO: 433920 - DNA, 122 bp, Homo sapiens
gcagagcctcagaagggccgtttgtgctgcggaatagattggagctccaccagccagccacgctttcgcgctcaaaacaaaacggaaaactgccggatcaacctcagtcggcaagcaagtct

SEQ ID NO: 433921 - DNA, 122 bp, Homo sapiens
tgctggaaatgcttttcagactcttctggaaatgtatacatgaatgacctgcacaggcagcgataggggaaaaatgctgccagagctgctgggcccaggaagctgggctcaattcaggaacc

SEQ ID NO: 433922 - DNA, 122 bp, Homo sapiens
gctgtacaatggcaacgcccggggcaaggacttcctggcattggcgctgctagatggccgcgtgcagctcaggtgggcggggaggggacggggccggggcagctcaggtgggcggggagggg

SEQ ID NO: 433923 - DNA, 122 bp, Homo sapiens
atgtgagcagcttacagagcaaccagttgcacgtgcttaagctgccgaggtgacacagggcgctgtagggtccagccccacagggtcggtaggtctctccctgtgtgcggcgacgagagagt

SEQ ID NO: 433924 - DNA, 122 bp, Homo sapiens
aggagtgtggacttgcccgtgcctggcaccccgacggttgacagaaccaccagccttgaccgtctctccagtcggacgtgcagctccttcaggagccctgtgacccagcggacgggcatgct

SEQ ID NO: 433925 - DNA, 122 bp, Homo sapiens
tagctaggcaccttgtaaaacccatgtcccagaatgccaaacctggaaatgcaatgtcagcgccgaaactgcattgaaactgaatgaatgaggtccccaccctcttatctaaatatcctatc

SEQ ID NO: 433926 - DNA, 122 bp, Homo sapiens
aggaccctcacaggctgggtgacgaaggctgtcatgccgtgagaggtcgggccacgaccacgcagcaattggagaggaactgcacaccacggacactgctcttgaaaagaggatgatttact

SEQ ID NO: 433927 - DNA, 122 bp, Homo sapiens
gggttaccctttaatagagcagattcttgggcctcatgaagacactgaatcagaaacccccgggatgatttcttgaaacttgcactttaagcacgaactctacgtttgaaaaacacagccgt

SEQ ID NO: 433928 - DNA, 122 bp, Homo sapiens
accgcccacaacccgccagcccccgcgcgtcccggaccacctgcatctcagctgcccccgcgcctctccagaccgcccacgtcccagctgccccctggcatctccgatcgccgacgtcccgc

SEQ ID NO: 433929 - DNA, 122 bp, Homo sapiens
caaacaagacaacagcctccttaatggttatctctgcttttattattgcctgacaataatcgtactcattaacatacccagaatgatttttttttctttttttctctgattttttttttttt

SEQ ID NO: 433930 - DNA, 122 bp, Homo sapiens
cctgcctggcatcaggtttcacatcaggaaaagccagggttctaaagggactatcaggcccggcacagtggctcacgcctgtaatcccaacactttgggaggttgaggtgggaggatctctt

SEQ ID NO: 433931 - DNA, 122 bp, Homo sapiens
ctgctttttcttctccccagagccagctgctttagactggctcctgctaggcttgccaggcggaatgagggagtctgaggggctgggtggggctgagatgactcaactggccagggtcattg

SEQ ID NO: 433932 - DNA, 122 bp, Homo sapiens
ccactcagcgtcaccccctcggcggttcatctccagaaggcttggaattgatgacgtttccgcaccacgaggggcttttgcgattctgcgtcactgaacttgcatctcatccccacgatccg

SEQ ID NO: 433933 - DNA, 122 bp, Homo sapiens
caaacttggcggggggcgggggctggggacgcacggctgagactggagcggcgcgggccgcgcagggtcggggcctcggggggctctgaaggacccctgcatgagcgtggaaaagtgagagc

SEQ ID NO: 433934 - DNA, 122 bp, Homo sapiens
agacaaaactccctgctttcccggagccggcatcttggtgggcagacagcataagcgagacgagtaggtggaggagaaggcgtgtgagcaggtgacaggcgctggggagaaacagcccaggg

SEQ ID NO: 433935 - DNA, 122 bp, Homo sapiens
caggtatgacaaggcccaggccacagcccacatccactgtgtaaatatccgtcctggtgacggcctcttccgcgacaggaccaccaaggccgagcacttctatgccagggagccaggtgaga

SEQ ID NO: 433936 - DNA, 122 bp, Homo sapiens
ggcgacacgaaggacaagaaggacgaagaggaggacatgagcctggactgagccacgcgccgtcctccgaggaactgggcgcttgcagtgcgttgcacaccctcacctcccacccactgatt

SEQ ID NO: 433937 - DNA, 122 bp, Homo sapiens
tctcagtagcttggtagttaccatggctcccagtgctgtgcgtctgacgtcattctgcggcgctggctgatggcgcaatcagttgcggcgtcctgtgagcgcggggatgctgggaggagggt

SEQ ID NO: 433938 - DNA, 122 bp, Homo sapiens
gaacctaaatccagtgatggaatcttattgtccacagtcttttgtggtatgtgctaccaccgaagatcctctcctaacctatcatgtgttcaatacgtctcagctcctagacttgctgaagc

SEQ ID NO: 433939 - DNA, 122 bp, Homo sapiens
gtaggagaggattctataaatggtaaggcaatccttggcagcctgtctgtcagcactgtccgtgccattcccagaggagcctgagaagaggcagaggaaggcgaaacatggctggtgagtgc

SEQ ID NO: 433940 - DNA, 122 bp, Homo sapiens
cccatttcctgggagcctgaccccgccctaggattcctggagtgggtgtgcccacgcttccggcccagacgtgggtggagggatcccaccctgccaggcctcccgcctgtgcggcttctttc

SEQ ID NO: 433941 - DNA, 122 bp, Homo sapiens
tctatcagaagctgtgggtcatggaataaaactgtggaacccagcgactagtgtttagctcgattaggatgaacccgggcacttaggcatgcaggaacaaaggcgagcctttagccccattg

SEQ ID NO: 433942 - DNA, 122 bp, Homo sapiens
acgaagcacggcccagcgccaggccagcccaagggtgccccgggggcccccgcgcccgcccgagccaggcgtaccttgttcttgacttcggccgagagcccataggaagggcccttgttgaa

SEQ ID NO: 433943 - DNA, 122 bp, Homo sapiens
tgggcaggagacccaggacaggaaatatctccgccctctactgtcagaccctcctgccttcggggtgagatcaccttttgccacagtgggaaaaacaggcacagggccagtgaccagcaaag

SEQ ID NO: 433944 - DNA, 122 bp, Homo sapiens
actagcgtcgaaatggccttctgctatagggttgtggaccgaccccccacccccacctcccgggattacagcccgggccaacagacccccagtatactgcaggcaaaatgaatgaatcggga

SEQ ID NO: 433945 - DNA, 122 bp, Homo sapiens
atgatgggacgcgcactttaatactgagtctttcctctgattataaaaatgctatctgttcgttaagcaacatttgaaagctgtatgaccaaataaagaagcacttttataccgccagttat

SEQ ID NO: 433946 - DNA, 122 bp, Homo sapiens
tgggtggtggcctcgcgtagctgggcccgggcccccgccgctgcctcctccgcagcctcgcgggcttcctccagctcccgcaaccggccccgcagaagctcactcaccccgcgctggtgctc

SEQ ID NO: 433947 - DNA, 122 bp, Homo sapiens
cgggcatcgaggccaccgcgccagagacaggtagggaccgggctggtgcggactggggtccggaaacccagaaacctcgggcctcagtgaccttgccccctgtcacctggaaatcctactcc

SEQ ID NO: 433948 - DNA, 122 bp, Homo sapiens
ccgttcagcagacactacctcttcgtcaccccctgcccaccctgacccgcctttacctcgcgtctagaggacacagccagggatcatcccgcagccccgaactccttcacagacccccacta

SEQ ID NO: 433949 - DNA, 122 bp, Homo sapiens
cgctctctctctcttcctgagagttggcagttgaggaaacccagcctacttgggatgcaacggccctggaccacgcgggtcgtgcaggggcgtgaccgcttaaaaaggcgggtggctgagcg

SEQ ID NO: 433950 - DNA, 122 bp, Homo sapiens
taggaccctccgagctaggtgcaggatataatcttgtggtgcgccgttttttaagcccgtcggaaaagcgcagtattcgggtgagagcgacccgattttccaggtgccatccgtcacccctt

SEQ ID NO: 433951 - DNA, 122 bp, Homo sapiens
ggaagaggccgggatagggttttctcccagagcccgcagcaggaaacaaacacgccttttcgggcactttgattttgtactgctagtctcgagggttgtgagaaaataaaattttgtgtttg

SEQ ID NO: 433952 - DNA, 122 bp, Homo sapiens
tcggtcttcccgggctcagaccccggcggcgaccaccgagacagccgagcagggactcagcgcctgcgcactcccctccgggaccccgggaccgcgcgctgcaccccccttcacacacgcac

SEQ ID NO: 433953 - DNA, 122 bp, Homo sapiens
cgggacctttggagaacctaagaataaggaaaaagagaagcgaaggaagccaaggcacagcgaaagtccagtttaccctgaggaagccacatccatcacaggggaggtgttaggaggggagg

SEQ ID NO: 433954 - DNA, 122 bp, Homo sapiens
tttttttttttttggtatttacttagctatgataaagaataaaaagtcatttaaaaaacgcgataggacagataacagactcacaacgtatttagatttaaacactgctggtctacgtaacc

SEQ ID NO: 433955 - DNA, 122 bp, Homo sapiens
caattacgaggaagtcaccccggagtgggcgggctgatcggttgcctagagacgccgaggcgcttcacccgctaccttcggccagggtgcagcagtcttacggggaccccttgcccgtttgg

SEQ ID NO: 433956 - DNA, 122 bp, Homo sapiens
tcggggagctgctcggggggaatccaggtgacctgcagtaccgcggtcttcccatcccggcgtccccactgtgtgctgatcactgtgctcggcgcttttccatacttgtctcctttaagacc

SEQ ID NO: 433957 - DNA, 122 bp, Homo sapiens
ccgtgtgctcgttggccacgcacatgtcgaggggccgttctgacgatggactgaggggctcggggatagcacgtgtccagcggggcaggtcagcctttctcttctccccacagacctcagca

SEQ ID NO: 433958 - DNA, 122 bp, Homo sapiens
aaacaggggacaagatgacatatatttgaaaacatgtattacactactgtcttcttcgagcgcctcttgatctatttttccacgagatttttgtcttgtttaatgtctaatgtagcctgggg

SEQ ID NO: 433959 - DNA, 122 bp, Homo sapiens
agccggcgcagccacagcgcggagccgcggcgcccactggtcctcggagctgccaatcggcgtgtaatcctgtaggaatttctcccgggtttatctgggagtcacactgccgcctcctctcc

SEQ ID NO: 433960 - DNA, 122 bp, Homo sapiens
tccagtcttccctgatacaaagttctcgggatgaccaggcaggcttgggaaaaggccacccggagcttttagaagtggtgatggcgcaggttggatgccggggctcacgcctggaatcccag

SEQ ID NO: 433961 - DNA, 122 bp, Homo sapiens
ggcatgggagagaaacgggctggggagtgaggccaggagtgggattcagctgcagcagggcgccccctccaaactgcagctggtctggcttactgttttgccgttcaaaaaggtcgcgaatc

SEQ ID NO: 433962 - DNA, 122 bp, Homo sapiens
ggcactgcagagccggaaggggcctcggcgctgctccctccgccccctcatttcacaaaccggaaactgagacccaaagcaaggaagggacttggccaaggtcagagctcacctgggaccac

SEQ ID NO: 433963 - DNA, 122 bp, Homo sapiens
ggagccggtatggggagacgccctgctggagaagtggccgggtcccggccgtgcgtgggccggccctgcgccacctgggtgacctcagacacctgggccttggacggcccggctgcccggcg

SEQ ID NO: 433964 - DNA, 122 bp, Homo sapiens
gcctcccgtatcggcccggcccttcatcgctgctgctccgacgagagtacgaggagacgccgtgctcgaccccacctcgggcccctacacccgccgcccgcgcccccgcccccaacaccagg

SEQ ID NO: 433965 - DNA, 122 bp, Homo sapiens
gtgcgtggctaatgcaggacccggagaacttccaggagagcgtggctaatagcaggaccccgagaacttccaggagagcgtggctaatgcaggaccccgagaacttccaggagagcgtggct

SEQ ID NO: 433966 - DNA, 122 bp, Homo sapiens
tccacctcctcgtcccggggcgcccggcggcagcaacgacggcagagccggcccgggacgcgttacttcaggaggagggagttcccgggctccccacgcctcggcctcactctccacctcct

SEQ ID NO: 433967 - DNA, 122 bp, Homo sapiens
aggctcatgtttggtcactgcccctccctaatggccttccccagctcctgactcctactccgactccagactcacctctgagcttgtggtcaatatactccaagatgacccgggctatctgc

SEQ ID NO: 433968 - DNA, 122 bp, Homo sapiens
ttagtctgacgtaactgctacgttgtacccggatggcctcttcctcaatcttcaggggtacgcgtcttccggccagggtaggtgtcttctgctggctctcttcttgctactgctattttgct

SEQ ID NO: 433969 - DNA, 122 bp, Homo sapiens
tatttatgggaagtctgccccgggatcggagcagatgtcatccagggctctcagatgctgcgaagcggggatggtgtccccatggccggccccctgcactcccacccctgcccatcctctca

SEQ ID NO: 433970 - DNA, 122 bp, Homo sapiens
aaaggcacgcataacagtgaatgcaaaacatccgcaatttcagggggtcggagacccctgcgcacccacctaaggggtccatgcacctgggctatgaggctggaagcagaaagggggcgcca

SEQ ID NO: 433971 - DNA, 122 bp, Homo sapiens
agtcctagtctttgcatagtcagccgggtcacattgaattccagcatccggctgcactcccggcggcttccccagctacctgaggacagtacagggggtgagatggggtggtggttggtgaa

SEQ ID NO: 433972 - DNA, 122 bp, Homo sapiens
tatcagcttcgggaagggcaggtaacacggtcctaaaggagcctgcctctgacttgctcccgctcgcagcccccggtcctcagacccttctagaccttcaacggaagcgggccagtgttctc

SEQ ID NO: 433973 - DNA, 122 bp, Homo sapiens
cctttgcttggcatatgccaaacgtttaccagctttaattcactggatccttacagtaaccgctcgaggtgggtgttagccccatttcaccgccgaggcaactaaggctccgagctgcgctg

SEQ ID NO: 433974 - DNA, 122 bp, Homo sapiens
ctctcctatcccctccccaccatggtccccgctggccaggcagggtggtgcttaagcgttcgggctctttgcatgggctctttggtccccagccttgagggcaaatgctccaacttcagggc

SEQ ID NO: 433975 - DNA, 122 bp, Homo sapiens
ccctctttcttttcttgatgtttcttgtctaggacatttttccttcaataaatcttcacccgtgacagcctacctatatgctttctgattattccaggccatgagaaactatcactattttc

SEQ ID NO: 433976 - DNA, 122 bp, Homo sapiens
gtccccgagctccgggcctgagtgctggctggcggagacccacagtgggtgccccgctcccggacgatgcccctgggcttccagatccagagcctcgggacgaaactgtttcaggaagaccc

SEQ ID NO: 433977 - DNA, 122 bp, Homo sapiens
ccctcatgggtgagacatctgcaagccctgggcagttaaggagaccatctgaagagaatccgtcttcactttagcgtttacagttatcaaattgttggattgataatagaaaggaaggtggt

SEQ ID NO: 433978 - DNA, 122 bp, Homo sapiens
caggcgcgccgggcggtaagggacccgcgctgtcccccccccacccaggtagcctcacagcgcatctgtttgttgtgaaagccgagctcttactcatgtgacctgctcctcccccgcggccg

SEQ ID NO: 433979 - DNA, 122 bp, Homo sapiens
tcgccgcaccctcggagtccagcttcttcacgttaaactcagactccagagcggctggggcgtggctctcggggccaggcctcgatgaggaggggcaccgtccagaatgactgcggatgccc

SEQ ID NO: 433980 - DNA, 122 bp, Homo sapiens
gcaagaagggaccaagtcccctgtgggaccggcagccttgggagggttccagcgaggccccggcctgcgccccagccagtcacagaggccccttcctgcccactggccagacacccagggtg

SEQ ID NO: 433981 - DNA, 122 bp, Homo sapiens
tgaaacaatgtgagaaaaaggctgagcattgtgtcaggcatcagatacatggtacattctcgctacgtggtagtttattttgtgagatatgacttccgtccctggttctgctgctagctaca

SEQ ID NO: 433982 - DNA, 122 bp, Homo sapiens
gggtcctgtgatgctcttatatctttctgagaacacagagtatgtgatcgctcccacacccggctgtagccactgggtttctgttttaaatatgagtacctcagtgagtcatagggagtcca

SEQ ID NO: 433983 - DNA, 122 bp, Homo sapiens
gagcctggtggccgctgacatccagatgtaaatttctcattgtcctggttattgcacccccgtgaagtcccctccatcccaggctgagctgtggaggccaaatctctgctgagttctttcca

SEQ ID NO: 433984 - DNA, 122 bp, Homo sapiens
ttcaggtgagagacaatgctgccagagtaagggtcgtggagagacgtggatgggctgagacgttaagaagggcactggcaggactttgcagttgattggatgtgggagtaagaggaacagag

SEQ ID NO: 433985 - DNA, 122 bp, Homo sapiens
gttgttgccattagaatcacctgggagctttcaagagtcctgctgcccaggtctcacctccgatactcccatcagattctaggggtgggagccaggcaccagcactttccttgcattcccca

SEQ ID NO: 433986 - DNA, 122 bp, Homo sapiens
ttctgcacataatggtaagtcaaaaataatcttggcacttcctaaaatttaggacaatttcgaattctgagattaatttagatacagtactactgcacttcaattaccatagaaaggtctta

SEQ ID NO: 433987 - DNA, 122 bp, Homo sapiens
cttcaggccagctgcctccagagttacccaaaggggcagctcccagactgaatggacagccgccacatgaggcgattggtgagttccaggaaggagtcatccccaccagacctccatcctca

SEQ ID NO: 433988 - DNA, 122 bp, Homo sapiens
gacattcagggtaggacctcaaatgtctgcaggtgtcctcaaggctggggttcatggtgtcggtacacccttcacctctggctcccccatttattatgatatgaccacaagcaagtgactta

SEQ ID NO: 433989 - DNA, 122 bp, Homo sapiens
actaagtgaaaaggaacttggccaatcaatcttcggtgacaaaactcagaagcagcaactcgggcttagctgagcagctcatcgttttattgacacctatgagtggtggttctaggaatgtt

SEQ ID NO: 433990 - DNA, 122 bp, Homo sapiens
acaactaaatcccatcctctctaccgactatgagtgctgagaagcacgtagtaacaaatacgtgatgaactgagaaagaaatgttaataaaatgagctattaaaggacacagaaagagtgac

SEQ ID NO: 433991 - DNA, 122 bp, Homo sapiens
cggtactggttctccgtggtgatgtcgatctggtagccggtgagcgtgtagcaggccttgcggaactcctggatcttggtctggaaaacctccttgagccgctggttcttcagctcggcact

SEQ ID NO: 433992 - DNA, 122 bp, Homo sapiens
ggatctgcccgcgtgctctgaaccacggcatggagatccgcccgtgtctctgaaccatggcgtggagatccacctgtgtctctgaaccactgcgtggagatccgcctgcgtgctctgaacca

SEQ ID NO: 433993 - DNA, 122 bp, Homo sapiens
gaccaacatacttgatgaagaagattctcccaccgccgtcaactccgtaggcccaccggccgggcaggtccagccagtcaatctcatcggccatctcggtgtccctgcagcccctctcgctc

SEQ ID NO: 433994 - DNA, 122 bp, Homo sapiens
atccgggtgtagctggggttgcaggcttggcaggcacggcggcggtatcgggaggcacagcgatcttgagggactcaaaaggctgggacaactgagaccccgtgttctggaactcggcctcc

SEQ ID NO: 433995 - DNA, 122 bp, Homo sapiens
tactcaggaggctgaggtgggaggattgcctgagtctaggaggttgaggctgcagtgagccgggatggcaccattgcactccacctgggcaacagggtgagaccctgtctcaaaaaagaaaa

SEQ ID NO: 433996 - DNA, 122 bp, Homo sapiens
ttctatcacctactgaccttacttaccttcctccgtgaccctgcagagccggaggagctgcggcccagctgaccgcccgtgcctgcacggtccaaccctagaaatggccatgtcttgtgccc

SEQ ID NO: 433997 - DNA, 122 bp, Homo sapiens
ccaatcaggaatcgctgattcaccaagcctctcctcctgcgctcgccctcttctgcacttcggtctcaggcgcaaacacgttcaaagtcgctaggccaaagcgctgagatacggtttcccaa

SEQ ID NO: 433998 - DNA, 122 bp, Homo sapiens
aggcggggggtggggagaggatggccaacagggactctggggtcaatgcctcaaggggcgcgggggaggggccggggacccccagaggctctgactcctgggtaaacaggcgcaggggcgga

SEQ ID NO: 433999 - DNA, 122 bp, Homo sapiens
tggtgaggtcacacacggaggcggggctcaggattggggggcggaatcatgcgcagggggcggggcccgagagagagcttggagaagaccggaagtccctccgcctccactcgccctcgtgc

SEQ ID NO: 434000 - DNA, 122 bp, Homo sapiens
cgcagcggtctcccagcgtcagggcgcaccgcgatcaggtgtgtggacagtcggtgggcacgcagcggtctcccagcgtcagggcacactatgatcaggtgctatgcaacttccgccccctg

SEQ ID NO: 434001 - DNA, 122 bp, Homo sapiens
actgtggacactcatgagggtggggacctcaaacttgaatggcatagaacatgtgcacttcggtgaaaatcagatcaattgccaactctgccatccacctaaagtgcccctgcatgctgaaa

SEQ ID NO: 434002 - DNA, 122 bp, Homo sapiens
tacccgcagccgccgccatctttgcggaagcgcagctaggcggcgcttctctcccggcgccgccgcctaccgcttgggaactctcgcgacatccgacaggcttccgccccgcctaccgggcc

SEQ ID NO: 434003 - DNA, 122 bp, Homo sapiens
aggcagcaaagcctggcagtatgcagagcacacacctggcatcacatgtcactgccttcacgtaagtatcatcactgtccccaggtaagaatcacctgcaggaccttgagtacaggtgtaat

SEQ ID NO: 434004 - DNA, 122 bp, Homo sapiens
tgctgctcagatccacggcggccgggagctcaggggtctgggaggctgacaggacctcggcggactcccccatcagggctgtggaagccgactgcagaagctgccgtggcggcagctgctgg

SEQ ID NO: 434005 - DNA, 122 bp, Homo sapiens
tgctctgaagaggttggtgcagactggggggccagccctgcacccacctctaccctttgccgacagctggaccacaacaccagattgtaccagatggctgggattggaagtgtggaggtttc

SEQ ID NO: 434006 - DNA, 122 bp, Homo sapiens
tcctttcttccctgactcttcccttggagtgggctgtgcacatgcgcagtgctctgccagcgctcgggagaggagcatgcgcagtgtgtttactggagttgtgcgcatgcttgcttgaggca

SEQ ID NO: 434007 - DNA, 122 bp, Homo sapiens
aaagtttaaaaaggaaagtgaaaccttgtcaaaatcagcattcacctacacaaggcaattcggaaagttttcatgtatctccaccctaaatctgcactaattagcccttgaacctcttttcc

SEQ ID NO: 434008 - DNA, 122 bp, Homo sapiens
aaatcaaaatggttttaaaaggtgtcattttcattggaacggggtggggctcctagtgcccgccacagtcctccactcaggccggcggggcgggccctggcctcggcctcggtgcgtgggtg

SEQ ID NO: 434009 - DNA, 122 bp, Homo sapiens
atggaggtaagggtgccgatgaggctcccggcgtcggtgaggctgcctccggagaaggggcgcagggggaactcctggccaagaggcctggaaaggctgggaacccagcacccctgagaaag

SEQ ID NO: 434010 - DNA, 122 bp, Homo sapiens
atttgatggtcaccgggcgtgtgggaggtgaacgtgaagcggccctccgagccgtactgccgggacagcaccacctgcaacatatgtgagtgaaggccccacctttataccgcaggctctcc

SEQ ID NO: 434011 - DNA, 122 bp, Homo sapiens
gagaggaggagaggtggagggggtgggtgccccaggggaagttggtgtggccgggaggagcgtggtaatcagcccggtgcatctgcctactcagcagcagcagtggctgcagtgtggggtac

SEQ ID NO: 434012 - DNA, 122 bp, Homo sapiens
ctatgaacctgttaccttccttgcctgagataaatgaccacatttgcattggcgctctcacggcacagaggatgacttctcatactgtgcctgtagccccttactgtgcttatctacttgag

SEQ ID NO: 434013 - DNA, 122 bp, Homo sapiens
cgccctcagggttcatattacccatgaggcctggagctccttggccaacatggccttctgcgcttgatgctgcccccagctgaggtgtggggcttatttttacctggtatacactcaggcag

SEQ ID NO: 434014 - DNA, 122 bp, Homo sapiens
ggaggagagcatcaccaaacaagagcttcattagaggactgcagccaacgcagggccaggcggagggagccagagggaggcaggctctgctctccctcttcctgcccttcagtttccaacca

SEQ ID NO: 434015 - DNA, 122 bp, Homo sapiens
ccccaacaaccagcttctccttcacagtgtaggaaatccagccaccggaaagcaagctggcgctccaggatgcaattcccccacataggcaccaggtgtcgctgtgggcttgttgtcccggc

SEQ ID NO: 434016 - DNA, 122 bp, Homo sapiens
cattctgcagaagtttcttctcctaggttgggatgtcatgcacctcattctatgagcctccgcctctgtaagaagaggaaaattgaggctgggaaaggctgccccgcaccttttcatgcaag

SEQ ID NO: 434017 - DNA, 122 bp, Homo sapiens
tcacctagttctagcattctactcctagcacttgggtctaggagactggtcccacaccagcgcttcattacccagttgttggctaggggaagaccactaatctatctatctaatctattctc

SEQ ID NO: 434018 - DNA, 122 bp, Homo sapiens
ctcctgtgttcaagggattctcttgccttagcctctgaagtaggtgggtctataggtgcccgccaccacacccagctaatttttgtatctctagtagtgatgggatttcaccatgttggcca

SEQ ID NO: 434019 - DNA, 122 bp, Homo sapiens
gagggggctgcatacttctccagggcttttgctacctgccccagtgtctccggcattccgcggagccgtgcaccagtcccctcaaataacctatcaaattctgtggcttctattagatcacc

SEQ ID NO: 434020 - DNA, 122 bp, Homo sapiens
ccacgaggcgaggtggcccagggagagaagagggatgaggcgcagagggagtgggaggcccgtctgactgtcatgggcataaaggtgacgggggaggaaacccagagaaacttacagaacaa

SEQ ID NO: 434021 - DNA, 122 bp, Homo sapiens
tcaaacggccactcagccgtggggcgagccgggtccccagcagcctgggacactagcatccgcctttcagccctcacactgtgtccctccagctcgctggggtcctttaaaactgaagttgg

SEQ ID NO: 434022 - DNA, 122 bp, Homo sapiens
ctttggttaaaatcaggaggtgaacctcacttacctgaaattctttaggtcaggcaatgacgcttttagttctaggaatcttcgtgtaataaagttctttttaaaaattttttcgttggtca

SEQ ID NO: 434023 - DNA, 122 bp, Homo sapiens
gtttttgcctataagaatttgctggtctgggaaaacctgccctatcaatgagtatgttgccgtggttaccttactaagatgctgaagttctaggagagtaatgattacatcagaaggctagg

SEQ ID NO: 434024 - DNA, 122 bp, Homo sapiens
cggagccggagggcgggaggaacatgacatcgcggaggtgaggagccccgaggggcccggcgcgggcctcggcccggccaccgccgcgttcggttagccccgtccggaagggggcgccccgg

SEQ ID NO: 434025 - DNA, 122 bp, Homo sapiens
agaaggcatagaagtaggtgggggagccgtactgcgcgtgcaggtcggcggtggccacggcgggggccacccactggtggtcagtaaagagagccaccagggttttccgccgcgtctccggg

SEQ ID NO: 434026 - DNA, 122 bp, Homo sapiens
ttttattttcattcacttcatttttacatggaagattgcatagacaagcaaccaaatgaacgaagcttagttttctggtgggttggtgatgacagttttctcagtttgtagttgtcgtggtt

SEQ ID NO: 434027 - DNA, 122 bp, Homo sapiens
ttattggttgctgggattgggttgttgatctctagaggtgaagctaccgactcatggaaacggggatttcggtgagaggatctcaaagccctgaggatccatgagggtatgactgctaatct

SEQ ID NO: 434028 - DNA, 122 bp, Homo sapiens
aggaccagggcactggcagctggctggtcctgcctagcacctctccctgccccaccccagcgtccccagacagactggtagggacttctccctggtgggtcaagcctacacaggaggcctgg

SEQ ID NO: 434029 - DNA, 122 bp, Homo sapiens
catatttgtgtagacaccaagctgcccgggggctgcctctgtttgagacctgggcctccccggacagcccacactggctggaagactctctgaagcttaaccaagcctcccttgtgtccctt

SEQ ID NO: 434030 - DNA, 122 bp, Homo sapiens
tgcgcgctaagggtgagcgccaagcaatttcgcgagcaatagccggcaaagtaaccaccccgagagggaaaataaacctctgcaaactggagcaagggggtgctttcctcccctggccagaa

SEQ ID NO: 434031 - DNA, 122 bp, Homo sapiens
aggaagatgcaaaggataaagccagatgacctcaaaggtctcatgagattctaatctgtccgctccttgttctacagattccaaaccaaaagaagcaagcaagtctgtgctgatcccagtga

SEQ ID NO: 434032 - DNA, 122 bp, Homo sapiens
agccgcgggccaagccccggcccagccccagggaatacttaggggactgcaggtgcaggccgtgggggcggccgggctcgggccggctctgcagaccccgctccacgcagagggcgatgctg

SEQ ID NO: 434033 - DNA, 122 bp, Homo sapiens
tttccagagggaaaatttgccgtgggaagcaaggattcccgagcctcggtcctgtccacgcggtgcagggcacctgtccaaggtgggcctggcctggccctgcccagattcagccaggtgac

SEQ ID NO: 434034 - DNA, 122 bp, Homo sapiens
ggtgtctctaggagaatgaggaatagtcacttcctgcctttgtccattagcgccgaccaacgcgaccagctccgtttacattctttcagtggtgttgttgaaagggcttggcagctcccaaa

SEQ ID NO: 434035 - DNA, 122 bp, Homo sapiens
ccttaataattgatggtgggagagagtaaatatcagcagaggcacccagctgcatcaccccggcccgtctggctgggacccagggcggctgcttgtccactaatatgcctataaattattga

SEQ ID NO: 434036 - DNA, 122 bp, Homo sapiens
ggcaggagcagctcactgattgggccccgactttcccaggtgtctacactgctagagctacgctcacagctgcggacgtgcacgcgctgccagcaactgcaccgagcactcagcgcacacct

SEQ ID NO: 434037 - DNA, 122 bp, Homo sapiens
agaaggtgaagaaattagtccatgttcagtgatttaaaaatcaattgtcttggccgggcacggtggctcacacctgtaatcccagcactctgggaggccgaggcgggcggatcacgaggtca

SEQ ID NO: 434038 - DNA, 122 bp, Homo sapiens
ctcagcttccagctccaggctaggctgcggtccgccggcaatgtggggtgtgggtcgggccgactagggaagtgagagaatgtgagaggacactccctgtatgtgactacacacaggaatgc

SEQ ID NO: 434039 - DNA, 122 bp, Homo sapiens
atccaaatcagctgaaaattcgcttctttgacacaagttgtaagccccagactggagccgcgtccttccacttcccactgtaccagggacttttttttcccctagtgccagtttccatggca

SEQ ID NO: 434040 - DNA, 122 bp, Homo sapiens
ggtgcagggcttggaggtgcaggcagggcgtcacctgcttctgctttgagccaggaacctcggaaaagaaagcccagcaagtctacgtctcacacgagcaatctcagaatagagactgtcct

SEQ ID NO: 434041 - DNA, 122 bp, Homo sapiens
aacaggtcacccaagcccccactgccaccctcttccagaccacaggaaagagagcgtggccggagacagaaacaggacaagtgaggaacctccgagctctccatcgccagaccaacttcccc

SEQ ID NO: 434042 - DNA, 122 bp, Homo sapiens
ttacagatttgggacttctgtgttaatgctgaaacaagaccggactttgggggactactgcgaaggcacaactgaatcttgaaatgtgagaaacatatgagagttgggggaccgggggtgca

SEQ ID NO: 434043 - DNA, 122 bp, Homo sapiens
tcctgcctggcggagctatcgcccagtcccgcacgcactcggcctcagggtcacactcggcggtcccacgctcaagtggcccggccagtggcccagaggcgtctgttctcctcctcagcttc

SEQ ID NO: 434044 - DNA, 122 bp, Homo sapiens
tcccggggcccgaagtgggaaggaagaactcctgggaatagagtggcaaggctgggcggccggcagaaaagcatcccggcctctcgggctcccagctcgatacgcaccgcagagcgccagga

SEQ ID NO: 434045 - DNA, 122 bp, Homo sapiens
gaagaggaacaggacattctgcagcgactccgagaaaatgctgctcaccttggggacaagcgccgggacctggcccacttggctgccgaggtggagggcaagtgcttacagtcaggcttcga

SEQ ID NO: 434046 - DNA, 122 bp, Homo sapiens
gcacctcctactttgaagcaacactggtgatgatggcataactcaccctttccttagtatcgggtgcaactggcaccaagaacaacacccatgcccaggtgacaactgcgccaatatgggtc

SEQ ID NO: 434047 - DNA, 122 bp, Homo sapiens
agcagtccacgggggccttaaaggaatgtaggctgggtgaagttggcccagtgacacctgcgttcagaaaaacgttctttccgctcccaacgccccctctccaccgccacccgacccccgaa

SEQ ID NO: 434048 - DNA, 122 bp, Homo sapiens
gctgcctactgcaagtggatggggaggccagggcccgaacagggccactgcgaggggggccggacttcctgcggctggaccacaccttccacctggagctggaggccgccaggctcctgcgc

SEQ ID NO: 434049 - DNA, 122 bp, Homo sapiens
agcgcgaagccatggctgggaacagcaacctgcaagtggatctgttcctagctactgctccgcagggcaagcccgctcctgcccgggcccgcccacaagcgaggccccgccccaaaccccgc

SEQ ID NO: 434050 - DNA, 122 bp, Homo sapiens
ggaaggctcctcccggcagagtgcggagacctgggaggcgcccgccaccggccaggccagcgagccgctttgttctcgaagcccacctgggcctagagaataagtgttgccccggagcgggt

SEQ ID NO: 434051 - DNA, 122 bp, Homo sapiens
agcagagtgtggaagagccacatccttgctggagcagaggcggctgtgtgggagccgaggcgagtgcgacacatgggccgtggcccactcagcttcccctcagccaggaggccaggaggcgg

SEQ ID NO: 434052 - DNA, 122 bp, Homo sapiens
tgggaagcgaaataagaaaaaagaaaagtaaagaggactaaaggatttggggtttctttccggctatttttatgactgtttcttgaaatctagctatatttttgaaaggggagtgggagaga

SEQ ID NO: 434053 - DNA, 122 bp, Homo sapiens
ctcgtggggagaggtgcctggggctgtggtgcgtggctgttatttggcctgtggaaacgacggttttgcggggctcagcctccgagaagaagccgctccaggtactcgcccggcaggtttca

SEQ ID NO: 434054 - DNA, 122 bp, Homo sapiens
ttggtggctgagctctcgtctgtctgggacctgaggatgcctgtgtgtcctgggcggaggcgtagcagctgtctctgcagggcgaggtggagacgtggcttgagggcctttagagtggctag

SEQ ID NO: 434055 - DNA, 122 bp, Homo sapiens
gcggccgtgaccctggcaagcgtctgcccaaagcccagccgcctgcagcccgacccctggcggctgggagggccccctgcacccaggtagcttcccaccatccagcccgtgcctcaggacac

SEQ ID NO: 434056 - DNA, 122 bp, Homo sapiens
ctaattaaggccaattgtagtggctcgcgcctacaatcccagtacgttgggaggccgaggcgggcagatcgctggagtgcaaggagttcaagaccagcctggtcaacatgatgaaactctgt

SEQ ID NO: 434057 - DNA, 122 bp, Homo sapiens
cgccaatggccatgcctccccagctcctcccagccccagtcactaggccggcgcctggcccggagatcctcccagagccctggcggtgccatcatgccggagaagacaagctcggccccgct

SEQ ID NO: 434058 - DNA, 122 bp, Homo sapiens
tcccagaaccaaagaagacaagcagcgccaccaaatggctccctctgcccaagtgaaagccgagaggtcagcggctggctggggaggcaggtgagcgcagcacggcacagggcaggggcggc

SEQ ID NO: 434059 - DNA, 122 bp, Homo sapiens
tggccatggcctcgtgtcagccccagttcagtcccagatgcttcccaagggtttgtcgtgcgaggctcagacagacctggttcctgcctcatagggtctccccagtgaggccgcaagccttt

SEQ ID NO: 434060 - DNA, 122 bp, Homo sapiens
aggcaccacttccctcccgctgcatgtcccagagcctgcctcacaccagcccggcagcaccgctcagctcctgcatgtccttgggagagctggaaggtttcctgccaaattcccaaacccaa

SEQ ID NO: 434061 - DNA, 122 bp, Homo sapiens
gcttgcccactgtctggcctgtgggtgtcaaatgtcccacctcttcaaatgtgcttggatcgatgatgagtcccccataaaaacattccttggaaaagctgaacaaaatgagtgagaactca

SEQ ID NO: 434062 - DNA, 122 bp, Homo sapiens
cttcttcggcgctcctgaaggtaaccggtgcgcgtgcgcacgtcaatccgagggtgtgtgcgcccagtttccggcgccgcgggacacccacaaccgcggggctgtccctcagctcggccgcc

SEQ ID NO: 434063 - DNA, 122 bp, Homo sapiens
gctgggcctacgcggagaagagggggcggagttcgagcatcggatcgtctccgcctcttccggtctcccactttatgcgctgaaggccttttccggtcacgtggaaggctgtgagcaggcgc

SEQ ID NO: 434064 - DNA, 122 bp, Homo sapiens
gtttgggttgacgtgggggtcaaggggagagcagaggaataatctgtaagatctgagtcccgaagctctttgggttatggaggttagaaaagggcctgttaaagttaggcccaagtttcggc

SEQ ID NO: 434065 - DNA, 122 bp, Homo sapiens
agtgttggagccgggactgcggtgtcgaggccctgcctctaactggactgcaggcctgtgcggtttcgtggcttcatgtgtgtgtggagtggccatgtgtgtctagtttcgtgcagattgat

SEQ ID NO: 434066 - DNA, 122 bp, Homo sapiens
taagggggaggggcatggggcgggtcggggcctgagacagcgggggatcgggggtgtggccgtggctgtctgggttcagagtcaatcttgcaacagggcccccttggcaagggtcacagtgc

SEQ ID NO: 434067 - DNA, 122 bp, Homo sapiens
cataggagcatcatcatggtgctccattttgcatataacttggtgtctacatgtaggggacgtgtttcgtggtttagtgagaaagggaaagccaagacatgctatgatgacatccatatggt

SEQ ID NO: 434068 - DNA, 122 bp, Homo sapiens
attctcccattctgaaaaatagatcggaagagggctattggttgattcttgaaaggggagcgcatttcctgttggcctgcgaatttggggtgaactgggacaagtgatcagaaggagagcaa

SEQ ID NO: 434069 - DNA, 122 bp, Homo sapiens
aaacaaacaaaacaaaaacatgttagtagaaagtatgttctgttttaaatttcagacacacgcagtgataggagacgtataaatgcatctagattttagagtacttgtatattatcataaat

SEQ ID NO: 434070 - DNA, 122 bp, Homo sapiens
aggagctgacgaaccacgaatgcttctgcctgtgctgtgcattcccaggcccgcagctcccggtcgaggggactccgatgtgaatttgttgtgaatttgttgtgccacaatagcagttctgg

SEQ ID NO: 434071 - DNA, 122 bp, Homo sapiens
tgagagcagaggagtgggggcatcaaggaaagccgcggctgccttactggcctcgagttccgcgagcggggctgggcaccaagcctgaggctggggggacaggggcgcacgactgcactccc

SEQ ID NO: 434072 - DNA, 122 bp, Homo sapiens
gacaaccagactagtgctctgccctctgcagtgatgctaagttcaaagtcagttgttcttcgagagtcattttcttggcattttctctagttggaacttgtccaggatgagaaataactcct

SEQ ID NO: 434073 - DNA, 122 bp, Homo sapiens
ccgctgccatattgggttcttactgtacaggctgccgctacggtcatgtgaccgctcccgcgcggccgtcactactgtacgcagccggccgcgcgaacgagcgcgggcgcgcccccgcctcc

SEQ ID NO: 434074 - DNA, 122 bp, Homo sapiens
cgggctcttgagccagagaagccagccagtcattttctccagcctctagctgagcctccacggccagccatatttcagcatttaggattttaagtgctggttaaaatgctcatatagggaag

SEQ ID NO: 434075 - DNA, 122 bp, Homo sapiens
ccatctgtcctggctctccagctgcctggtgctgaggtgtctttgcttcctggggatcctcgatcactcccgtgcccttctcttgtccctgagagatgctctgccctgacaaacaccaggtt

SEQ ID NO: 434076 - DNA, 122 bp, Homo sapiens
caggttatacatccagaacattgcaaaccatagcttgtctcatcgaggctgtctgctccacgttgcacacaggataggattgatcttttaaccctcactgttgccccaggacgtaggcactc

SEQ ID NO: 434077 - DNA, 122 bp, Homo sapiens
gcaggtttattttcccagtgcatctgttctctaaatcagtcagcatttgtgatactaggtcgcattgtgacaagggtgtctcaaagagtaactcaaggcctcttaaagataatgcttgcaaa

SEQ ID NO: 434078 - DNA, 122 bp, Homo sapiens
aggacccaggccagcgctccccagcagcagggcaggaggcagcctgagagtcggcagccccgccttggagtctgagcactcgcgcccatccgtcaaccttgcagagcattgcaactttatgc

SEQ ID NO: 434079 - DNA, 122 bp, Homo sapiens
ggagaggaaggtgcaggatcgaggcgggagaggcgagccctgagcccagcttccttgggccgtcaccgaatcggtcccagccgcgctgtgcggcccccctgccgtggcccccgggatggggg

SEQ ID NO: 434080 - DNA, 122 bp, Homo sapiens
gcgctgggcacaatggcactgaagtcttgcagtgcaggaagcctcagcaatcaattcccacgctttccaggtggtgctgtttggttccattcacattaacttttcagctttctatgtgaaga

SEQ ID NO: 434081 - DNA, 122 bp, Homo sapiens
aaggtgcatgtgttctattgcctttattttccaactccctgcccaaggtaattgtatgaccgtgttgtgtgttttaaatagttctacaacatatgtatgatatacatatatgtatagtgtgt

SEQ ID NO: 434082 - DNA, 122 bp, Homo sapiens
atgtggcagtgcctcttccttctcctagtcctccagcccagcaggagaagctcccgctgccgggcgctctcctactgctctgtcgccaccaccaaccacagcgaaacagtgtcccacgctcc

SEQ ID NO: 434083 - DNA, 122 bp, Homo sapiens
cagagccagcccacacagcagaagaagacccttgacatcatcatcagggttctagatccacgcatgcctgagatcagtccatcttggactcccatttacttaatctaacatatccactgtct

SEQ ID NO: 434084 - DNA, 122 bp, Homo sapiens
ttagggctgttcttgattgtggtaaatgaagagacaatcgacatcaagagttccattgaccgtgataagaagctgtaagtgtagccactgcttaaaagtaccatgaacttcttaagtttaag

SEQ ID NO: 434085 - DNA, 122 bp, Homo sapiens
agacagacaataatggagaggctgtgagtattgaggggcagggggaggagtggtcttacccgaaacgccagagttctggcgctttcgctcgattttgacaatgagtgagacctgtagggtga

SEQ ID NO: 434086 - DNA, 122 bp, Homo sapiens
cactcatttgaatatttcccttgtgcttttgtatgaactttgagatgaatactatgagaacgtgtgttgggaaataagaacacatgaccactttggtgtgtgtctacaggtagggttgcagg

SEQ ID NO: 434087 - DNA, 122 bp, Homo sapiens
ttcaaagtagacctaaaaacaccactctgctttttttattcctgaactggattttaagatcgtattgctttaaaataaatgaatgaataaataataacattttattttggggaggaggaagt

SEQ ID NO: 434088 - DNA, 122 bp, Homo sapiens
gatctcaagtgagctttcccgtcggcctcccaaagtgctgggattacaggcatgagccaccgcctatggcagcttttgtggttacattgtagccattatttctgtgtttggtgcagattgtt

SEQ ID NO: 434089 - DNA, 122 bp, Homo sapiens
gagagaaggaaacaggagtgggagccgcacggcttggggaacgcgggagatcgcggattgcggggatagcgcagcgcggctgcccggggctgctgggaggggccggacgaggccagggcgag

SEQ ID NO: 434090 - DNA, 122 bp, Homo sapiens
ttcccggaccagttttcccctgtcccgtggagtccacaagacaggcggcagcttcaaggccggcaagttccgcgtctggggggctgcgggccgcccctgcgggaccggggggatctgggcgg

SEQ ID NO: 434091 - DNA, 122 bp, Homo sapiens
tgggcgcgcagaggaacagatttcgcgtttcacacagcgcacaatggccgccctcaaaggcgcgccgcccgcattgttcgggccggcgcccgcgcgtcctacctccgcgcgcgaattaaccc

SEQ ID NO: 434092 - DNA, 122 bp, Homo sapiens
ggcgcaaacgccctcaagtccggatcattggaaagtaactcgaagagaggagagaactagcgcaagcgtagcctcaaggcggccgcaatcaccccgccccggggctgtctccgcccctgccc

SEQ ID NO: 434093 - DNA, 122 bp, Homo sapiens
aagccagaatttttatcagttctggacatgttttttttttttttttttttttttttttgccgtaggccagaatttttttcaattattgtggtgactagttaccagaactcagccttcgcctg

SEQ ID NO: 434094 - DNA, 122 bp, Homo sapiens
tgtatctctctttgcaagagaaaagcccctttgttccaacttcaagcctctgttggtccacgagttctcttagcaaattcctgtcccctaacggtaatgtgactgtttcctgattctctatg

SEQ ID NO: 434095 - DNA, 122 bp, Homo sapiens
atcatggcggaagggaagtggagcgggcactttacatgggaaagcaggagtggagggggtcggggggcggggtgccacacacttttcaatgaccagctcttgtgtgaactcagagtgagaac

SEQ ID NO: 434096 - DNA, 122 bp, Homo sapiens
tgcattattagcgtagagtaatggtagcagaattcaagtgagtatggtgggggaaagcttcgtttagtaagcatccccagtgtctccaggcactaggctcagaggatgtggaggaggcagtc

SEQ ID NO: 434097 - DNA, 122 bp, Homo sapiens
tctcccatggcaggcaaatacctctgacacacctccaccccatgcatacatctgacaaaacggaaaagaataaagctgcaatttggaggccaaagtgaggcaaaaagaaaggctgatgttga

SEQ ID NO: 434098 - DNA, 122 bp, Homo sapiens
tgcgtcccccggcagggagcgggcgggctggctggcgggttcttggggcccgggtgtgcccgcaccgtgcgcgcgggggcgctgcgcagtccggcggcgctgatggattgcagaagtgccgg

SEQ ID NO: 434099 - DNA, 122 bp, Homo sapiens
cgtggcccctgtacagagacgaattggcgctcacggactcaccctgcgaggcagcatctgcgtctgcaggacttcccggcccttggccgcacatttccctccagttcccatcatggcagctg

SEQ ID NO: 434100 - DNA, 122 bp, Homo sapiens
agccggggtctgcagcggcgaggtcctggcgaccgggtcccgggatgcggctggatggggcgtgtgcccgggctgggaggagaagatgcccggtgcgggggcggcccccgggggcgcggcgc

SEQ ID NO: 434101 - DNA, 122 bp, Homo sapiens
taatcacgtccactgggaactggcgcagtagtggaggggacgcgatcaggcccgtggctgcgcccagagcatgataagccagggacctcgcggcgcaggcggagggagggagagcgtcgcgg

SEQ ID NO: 434102 - DNA, 122 bp, Homo sapiens
gtggaaaaatctccgacccacctagagtaaccaacgggcacaccagtgtgaacaatacagcgtctggcaaaagagaagccacgtgcagggaagcgatgtgtgcctttgtgccttggggtctc

SEQ ID NO: 434103 - DNA, 122 bp, Homo sapiens
tccctcttccctaggcccagctgcggctgacagggaggctgccttgcgggaggggtgacccggctccctaagctgcgccacggagggtgaggcccgacccctctccagtttcccactgcgtg

SEQ ID NO: 434104 - DNA, 122 bp, Homo sapiens
gagccttgtcacattgtgtaattggaagtaattgccagtgtggggtttgagaaaggcgcccgattgggtggtgggggctggtgaaacctcttttgagcccttgttaaatggggagggcagat

SEQ ID NO: 434105 - DNA, 122 bp, Homo sapiens
gcttagcttcagcaaatattgccaaatcatttcccaagtggttgaagcaattaacactcccgccagcagtgcaagagttctggtagctagctccaagctcttgccaaaattcagaattatca

SEQ ID NO: 434106 - DNA, 122 bp, Homo sapiens
acattcacagatgtattatttctcagcaaaatatccgtccgtccccacctgctcacaaggcgcagggtgtacagcggcgggtgaccgctagatggcggcggagcgcctccgaccacctgggt

SEQ ID NO: 434107 - DNA, 122 bp, Homo sapiens
ctgcccagcagctgcgtgtcggccctgattgcccggagagaacagagtcggggggcttaccgctagggcagcgtccccaccctggcagctcagaggtgcgcggtccgtgcttctccccagga

SEQ ID NO: 434108 - DNA, 122 bp, Homo sapiens
ctgtacacctgctggctgccatggctgaggtgggccgtaccgggatcagctacccaggcgcgcttctcccacagggcttctgggctgcggtcgaagtgtggctggagaggccgcaggtggca

SEQ ID NO: 434109 - DNA, 122 bp, Homo sapiens
ctgccggttgttaggcaaccgacgtgtacactgactcggcgccgttcccaccgccccgcgcgcgcagccccgctccccattggccgtccgctcgtcgccgcctctccctattggtgcagggc

SEQ ID NO: 434110 - DNA, 122 bp, Homo sapiens
gctcagagcaacactctactccgaagacgggcatatatcaccctacaggtctcaattccacgtctctttcatttaaccattgaagaacattttttgctctaatcgtaaaagttatgctcaat

SEQ ID NO: 434111 - DNA, 122 bp, Homo sapiens
cgcgcaaggggaacgttccgggacgttctcgctacgtactctttatcaatcgtcttccggcgcagccccgtccctgttttttgtgctcctccgagctcgctgttcgtccgggttttttacgt

SEQ ID NO: 434112 - DNA, 122 bp, Homo sapiens
aaccactggtgttaatgaacaaagatactgtgcgtctctggggaagacgcacctaggtggcggccactcccatggccttgtctaggactcagagaccactcggctctgagcttccaggcgcc

SEQ ID NO: 434113 - DNA, 122 bp, Homo sapiens
gcatggttagagtcatatttgaatggtacattgcactcctcaatttgatcttccaagtcacgtttccttcatattcttttgtccatacagtctcatccatgtttatcacaaaaagatgacaa

SEQ ID NO: 434114 - DNA, 122 bp, Homo sapiens
tccggggcggtccagcacgcccaggagccggcgagctctcaatccttcccctgggaggagcgagcgtgtgtcactgccccttttacggaagggtctcgttcagagtgtggaaacgaggagag

SEQ ID NO: 434115 - DNA, 122 bp, Homo sapiens
gcttcagtacaccattaatgttcaccttacacctcccggaggaggagatggcgtgatactcgcaaacacgggactacaaactattgattccattccgcgtgcttcaggaaggtggcgctgtt

SEQ ID NO: 434116 - DNA, 122 bp, Homo sapiens
gttcatctccgtcctcaagctatcagtcatggatgtggcactggcgttcttctctgccaccgtatctcattatgcaaagggaaactgaggcacgaagaacagagtgagtgagccaaagaact

SEQ ID NO: 434117 - DNA, 122 bp, Homo sapiens
cctgttcttcccgtccggtcctctgccctcagtcattcgcgggagcgcaaccagcgatcccgccccagtccggctgccaagcctggggcctgtccccctacagggccgatccggaggcgggg

SEQ ID NO: 434118 - DNA, 122 bp, Homo sapiens
caggaggcctggagtgcggggccagcgatcagagctgcaccaggccagcccgcatggacacgcccgctgcccaggctgacgcagcctccaggaatgcaaacaaagctgggcggaggggcctt

SEQ ID NO: 434119 - DNA, 122 bp, Homo sapiens
taaaagattatgtaaagagaaatgagaagggagagataagcaagattttatagcaccttgcgggccgtggaaaggagttttgtttgcaacagtaagggaggtgatttgacttatgcactatc

SEQ ID NO: 434120 - DNA, 122 bp, Homo sapiens
aatgggtgggttcccttgggggtcgacctgcgcgtcacctccgaccctcctctcgggattcgggtcttccaggaagggaaggagagggtctggcgtgatcttcccaacccaacagcggagcc

SEQ ID NO: 434121 - DNA, 122 bp, Homo sapiens
tctcctcacctgagacctcctcctggccaagctgcagatcagccggggaggctgcattaacggctttctgaaatgtcaccaagaacaaagctcccctttctgccagcctctagtatttacaa

SEQ ID NO: 434122 - DNA, 122 bp, Homo sapiens
gcgcacggtgtctgtggaggtcaggcggacacgtccagccatggcctggacacagacagccgggctgtgtggcacaggactgcctgctggaagcttccgcctgcgcactcctcccggcctcc

SEQ ID NO: 434123 - DNA, 122 bp, Homo sapiens
ctctgattcacaccccatctggtgaggaagagagaatctcagttcctctagagataaacacgcggcagcagcaccccaggatcctgccccgcgtgcattatattcccctgcccatcctcccc

SEQ ID NO: 434124 - DNA, 122 bp, Homo sapiens
cgctctggccctgcgctccctccctcgctcgcttgctcgcgtccctctcgctcctccgctcggctccttcagcgaccaatcattaactgtcaagccctaagggccagacaatacatttgcag

SEQ ID NO: 434125 - DNA, 122 bp, Homo sapiens
gggcaggagaacaaagagaggaacccacatcgtgaccacaaccatctcagccccgaacgacgctgctctcatagcgaaggtgttcagtttcaccactagagggagcgcagagcccacagcat

SEQ ID NO: 434126 - DNA, 122 bp, Homo sapiens
gagccattttcctggtcaactttgtacagctggcaagaatccagggcaacgtggttccctcgctcacggtcccggaaatgtccagggaagcaggtctgagcctgctgctgttagtgcattca

SEQ ID NO: 434127 - DNA, 122 bp, Homo sapiens
ctaaatctttaaaagtcctctataaaccagctgaatctgacccatgtccaaaacccacctcgcccgacttctttccgctcttttcctccttgcaagctgaatttgcaattccctaaaaaaca

SEQ ID NO: 434128 - DNA, 122 bp, Homo sapiens
tgagggatagaaggggttagggatgaagcatagagtttttcagacaccagtcatgagagtcgaatgctggacaaagtagatgggtcttgaatctgtggaaaatggagaattattgcggagtt

SEQ ID NO: 434129 - DNA, 122 bp, Homo sapiens
ttttttttttcatatgcacatgtaattattttaatagcacttgttgagattatcctttcccggttgcattatctaggcatttttcctgaaaagtatttatatatgtttgagattatttctgg

SEQ ID NO: 434130 - DNA, 122 bp, Homo sapiens
cccgcagtgtcaggggttggtgtgaggatcggcctccttctctggcctcccttggcctttcgctgctctgcacacctccctgttcaggccgccttgggcctggttgccaccctgtgatttta

SEQ ID NO: 434131 - DNA, 122 bp, Homo sapiens
ttagtgcccttagactcttcatcaaccagaaacactaatggtccctggtttccttctggccgttcttcaggaccatcagtagcacagccactgcttcagcctcttttatttgtgcacacaca

SEQ ID NO: 434132 - DNA, 122 bp, Homo sapiens
agctgctgggatggagcccacctcaggggtctgggacgttgcttcagactcgcctttcaacggaacatgctgggctgacagccttgtggtttccctgactttgaatcgggtctgtttggcat

SEQ ID NO: 434133 - DNA, 122 bp, Homo sapiens
ctcggcctaaccagcgggctccaggcttcaggagctggtctagggcctggtgccagcctccgttccaggagaggagactaaacccactgagtctgggtctcaccctacaggctggaaggaat

SEQ ID NO: 434134 - DNA, 122 bp, Homo sapiens
cggctgtcaagctcccggccgggctgactcaagcggaggcgcgcggaacagtcgccgaggcgattcccgcccaggtagttcagcgccccagtccagctcccggtaccgttccccacatggtc

SEQ ID NO: 434135 - DNA, 122 bp, Homo sapiens
agaaatagattctgtgggaggcatgttttaattcagaactcgggctgacgcagctggacccggtgtaaattcgcctcacggagcagggagtccaggcactgtgttcaagcagcgacggaacc

SEQ ID NO: 434136 - DNA, 122 bp, Homo sapiens
aggccttattttactagtgaggaaataggccagagaaaggaagtgacttgctcaaagtcacgcgaccagttgaattgagatgaaaaccgtaagtgtgtctcccaccacagtgtctttcctgt

SEQ ID NO: 434137 - DNA, 122 bp, Homo sapiens
cccagctaggaatgcagacctcctgaaaaccaagccgaggactgcggggtccggtgtccacgcagagtgagtactgtcttccgccgctttgctccaggccgcgcgtgctcccgggtctaggg

SEQ ID NO: 434138 - DNA, 122 bp, Homo sapiens
gtatctacttctctgcactcccactgctatcccctcagtccagtctcattttcctctcttcgggacagaggcaataacctctgactgatctgctgtcactggtcttgccttctattccactt

SEQ ID NO: 434139 - DNA, 122 bp, Homo sapiens
tgctttcatcaaaaaaagaacactcaggttaacaggagacacgccctgtagccctagtcgcgtcgcgacccagagcgcatgcgcaaagcgcagtggcggtttcccgcccaggagcggcggga

SEQ ID NO: 434140 - DNA, 122 bp, Homo sapiens
aaaagaggaaagggtagagaataggttcccaactgttagccagtaggtagcgtggccgagcggtctaaggcgctggattaaggctccagtctcttcgggggcgtgggttcgaatcccaccgc

SEQ ID NO: 434141 - DNA, 122 bp, Homo sapiens
tagaccaagaagcgtgaggcccaggccctcgccgctcccttgatacccgcttaccaacaccgggggtttcatctcgcagcgccaccacgccccactcccagcagccctcccctggtctccgc

SEQ ID NO: 434142 - DNA, 122 bp, Homo sapiens
caaattaaattatatttttatactacatcctcaaggactcttccctggaaatgaatgtttcgcaaaatgtcgctggcctcaagagcagtttccgtggactacacagttaccataggttgagc

SEQ ID NO: 434143 - DNA, 122 bp, Homo sapiens
tgaccataccatgcactaggctagaaataaagaggaaaaagatgaatgaaaccaactccccgctcttcatccgctgcttgtgaattatgtgatgctctccaaagggcagggatcatgataat

SEQ ID NO: 434144 - DNA, 122 bp, Homo sapiens
tgctgtggaggcagcctcaatgctgaaaatggagcctctgaacagcacgcaccccggcaccgccgcctccagcagccccctggagtcccgtgcggccggcggcggcagcggcaatggcaacg

SEQ ID NO: 434145 - DNA, 122 bp, Homo sapiens
caccagttctatcttgtaagttctattcttaggagcatagtacaggtgagaaaattgtagcgcagagaggtaaagtgacctgggtaggtttacagagcaagtaagtgttggggatgaaattt

SEQ ID NO: 434146 - DNA, 122 bp, Homo sapiens
ggagtgggaaggttttcccctggagtcgggctctcctccaacctctctagccaaactccacgccattcagccagtcaatggaccgccggcttgcaggtgtgctccgacgccgatgcgttcct

SEQ ID NO: 434147 - DNA, 122 bp, Homo sapiens
ccttccgccccttcccttccctaaagtgatgggctttctcttttctctttttagtttacccggtttctttttaagtaatgtggaagaaaatggtttattttgtattgtggtattgaatattg

SEQ ID NO: 434148 - DNA, 122 bp, Homo sapiens
gcccagccgggacagcagccactgcatttctttggcttgcgctgcagtccggatggagctcggttctgacccagaacatgagatcgggttctcattaattcagcccagggccttgcacacgc

SEQ ID NO: 434149 - DNA, 122 bp, Homo sapiens
gtacatccgtaggcggtaaggccagaaaggaagatgaggccagtacaaaagttaggatggcgattgcctctaggtggaggaacagggatatctgtgatcgtgagggctgcaggggtgctaat

SEQ ID NO: 434150 - DNA, 122 bp, Homo sapiens
tgttttgtcctcactagacattaatagtgaccttcctcagggggtcacccctggccctcccgtgcattcccaagcacagtatggatcaagaaaaaagacctttctgaaggctgaaaaggatt

SEQ ID NO: 434151 - DNA, 122 bp, Homo sapiens
gccagaggccaggctaagagccttgcacaaggtcacacaaccaccatagggtgaaagaaccgggattccaatccagctctgcctcgctctaagatctgtttgtcccattattcttctttctg

SEQ ID NO: 434152 - DNA, 122 bp, Homo sapiens
aatgaggggacattcgggctgctgttccttcatgctttctcccacctcatagcccttccccgtcccacagaaagaatcttagagagttggcctactttctgtcgatgctgctcccttggagg

SEQ ID NO: 434153 - DNA, 122 bp, Homo sapiens
atgttcagacacatttaagaatttttattgagtaatacaatgttctaattgaggcatacacgttgttctaggagtctgtgaaattctaaagataaaagtttgattatgcttgttttgacttt

SEQ ID NO: 434154 - DNA, 122 bp, Homo sapiens
aagcacgcttggcccacggagcccccgcatccagcccggggcaggtatctctgccttcctcgacccgccctgcctgacagcgggctcccaccttcgtcgccccgccctgcctgacagcgggc

SEQ ID NO: 434155 - DNA, 122 bp, Homo sapiens
ccggagggctcggtagagtccggccgagaactgtcactatacagcgaaaggagcaggaagcgaggctggcagctcctggggtctggagcatgagtccttgctctagctccgccgcccgggag

SEQ ID NO: 434156 - DNA, 122 bp, Homo sapiens
agtgggtctcgcgggactggaggttgctctggcgaggcagtgggtgagcgtgaggggttgcgaaggcctaggagatgaccgtactctactctagactttataaatgctgcacactgaggcca

SEQ ID NO: 434157 - DNA, 122 bp, Homo sapiens
gggcgtgacgagaagtgccaggtgtacagaaagattctcccttggttcccagattgggtccgcctgtgagaccaggacctcgcggagtagcccaaaggctgggaaatgctgataagaggttc

SEQ ID NO: 434158 - DNA, 122 bp, Homo sapiens
agtctctgagatgacagtagcatgcaggaagttagcaaaaaagtgctcaaggggaacacacgtggggaaggggaaaactcaggattaggcaaaggagaaggtgggcaggtagaactagagcc

SEQ ID NO: 434159 - DNA, 122 bp, Homo sapiens
tatcagcccttctgcctttttgtagccaggcttgctatgaatgaaacggttctagtcgtgcggggggccctagtcatgcctctgcgcatgtggcataggaagtggagtctcctcccatgacc

SEQ ID NO: 434160 - DNA, 122 bp, Homo sapiens
cactgtgtcctggaggctgtccattcctggccggggcactggctaccctgcacgcctgagcgcctgcacggccagctttgtccagcgagccaccccctgcctgggcagcccgtgtcggtaca

SEQ ID NO: 434161 - DNA, 122 bp, Homo sapiens
cgccccaaagtgagtgatttattctaaatagacttgcgtcttaatctctttctttccccacgatttgcccgagcctcttgactcaggctttttagctttggaatggctgctccgtcctctcc

SEQ ID NO: 434162 - DNA, 122 bp, Homo sapiens
accgcctggggctgcaggatgctgctgcggatgcagagctgtccgcgggctgggcagcgtcgccgtctcccctgagccgcctcggtccggcaggagcggagccgaagcatcccttgctgcac

SEQ ID NO: 434163 - DNA, 122 bp, Homo sapiens
catctcatccaaggccatgggcatcatgaactccttcgtcaacgatatcttcgagcgcatcgctggcgaggcttcccgcctggcgcattacaacaagcgctccaccatcacctccagggaga

SEQ ID NO: 434164 - DNA, 122 bp, Homo sapiens
cccgtgctgccggtgaaacgctgttgacatgtcctgaattattaagcgtggggagggctccggagcacatgctgagcggagcggctggggctgcgcggcgtggcggagcagcgctcgctccc

SEQ ID NO: 434165 - DNA, 122 bp, Homo sapiens
ttaaaggaaaatctggccagacgtggtggctcacgcctgtaatcccagcactttgggaggcgaaggtgggcagatcgcttgagcccaggcatttgaggccaagctgggtaacatggcgaaac

SEQ ID NO: 434166 - DNA, 122 bp, Homo sapiens
ctttggctgttactttgagtgacatgggagccactgtaagtttggggcaggagaaggacacgatctaatgtgttctgaaaaggcctctctagctgcagtgttgagaacccaccttagggggc

SEQ ID NO: 434167 - DNA, 122 bp, Homo sapiens
atcccaacttctacggctatcaggacgccccctggaagatcttcctgcgcaaagaggtgccgagcacagccgtagccaggggaggggctgaagcggggcaggggaggggctgaagcgagcag

SEQ ID NO: 434168 - DNA, 122 bp, Homo sapiens
ccgctatagtgacgcctctacttttcagggcgtgggaggtcaatgagatcactggtgtgccgcactgaactcggggatggactctttatttccagtcagtaaagggaggtgttctatgcatc

SEQ ID NO: 434169 - DNA, 122 bp, Homo sapiens
gcgcggcggctgcctgggctttaatggctgctccgcggagcagcgcctagggctggaaggcggctgcggctcaggaagtcacccgagcaagcctccttcggggccggccgcacccgccgcgg

SEQ ID NO: 434170 - DNA, 122 bp, Homo sapiens
gcctcccaggttcaagcgattctcctgccttagcctctccagtagctgggattacatgcccggctaattttttaatttttagtagagacagggtttcgccatgttggccaggctggtctcaa

SEQ ID NO: 434171 - DNA, 122 bp, Homo sapiens
gccgattaccagccagtggcccgtgcagtacgtgaacgggttgctgccatccagcgaaagcgtgagaagctgcgtaaagcaagggaattggaggcactcccaccagagccaggacctccacc

SEQ ID NO: 434172 - DNA, 122 bp, Homo sapiens
ctccctacctgtcggcgagagaagagagcggtccctggctgcagcacccgggagccgcaacgctggcacagcaccgccttccggtttcggccctcggctgacactaactcgctcggctgctc

SEQ ID NO: 434173 - DNA, 122 bp, Homo sapiens
tccttcgttaagttcaaagtcacggtgccacttcctttcccatctaaaggggactgctcgcgacccaagccaaggcccgcaagtgtggctctccctgcggggagagtagggcaggaggtgga

SEQ ID NO: 434174 - DNA, 122 bp, Homo sapiens
cggccgtgctgacccataccgcccagtggccagcccgcgcacggacccctacgcggccggcgctcagtttcctaactacagccccatgaacatgaacatgggagtgaacgtggcggcccacc

SEQ ID NO: 434175 - DNA, 122 bp, Homo sapiens
tgatccggcggccatttttttccgactgtctgtgggtaaacgagcagcccctgttggctccgaaggtaataacagcttttcgcagagacgttttgaatatgcgccggtagggggcagcgatg

SEQ ID NO: 434176 - DNA, 122 bp, Homo sapiens
cgtcattcaccgcagcaccaccagccagaccattaaggtctcacccgacgacacccccggcgccatcctgcagagcttcttcaccaagatggccaagaagaaatctctgatggatattcccg

SEQ ID NO: 434177 - DNA, 122 bp, Homo sapiens
cgaccccctaggaggccgggtcgcttattcaatatggcggcctcggctaactctgtcagccgggcctggagaacggaaagcccggagggactagaatccttgcattcgacaagtttgtcggc

SEQ ID NO: 434178 - DNA, 122 bp, Homo sapiens
cccaaagccaagacagcttcctcctgggaggcgcctggcacccagctcgtcacgctcagccggcaggcagcgggcaggaacccctcacctgtgatcatttattgcagttcctgggccctcgg

SEQ ID NO: 434179 - DNA, 122 bp, Homo sapiens
gaaaacctgagcatttgcaggcatctggttaaagcagggtctgtgtgtacaattttaaaacgggtaatatgtcatgctcttagttcatcttcacaacaaaactatgagtaagcggtattagc

SEQ ID NO: 434180 - DNA, 122 bp, Homo sapiens
gtttgtaagaggggatctagatctccaaatgggtaaccaacaggtgtttgcacctcaggacgtggcactgctgtgtgctgagctcgcacatcccggcccactcgactctgagctgggttcgt

SEQ ID NO: 434181 - DNA, 122 bp, Homo sapiens
gaggctgaggatcttcgtgaagcggacaatgcgcagggcccgggcagtcttgtagacctccgagtcgatgcgtgtctccacaatgaggaagatgtagtccacggggatggaggaaatgaaat

SEQ ID NO: 434182 - DNA, 122 bp, Homo sapiens
ccgggagtctctccgggcagggtcggggagggacttttttgccggtggccgtggaggaatcgtcccgttgagcaatgaccccggtgacgcggctgagggctataaaagcaaaagttgtggca

SEQ ID NO: 434183 - DNA, 122 bp, Homo sapiens
ctcccttcggtctggctccaaagacctagcagcactgacttcacccagctgtggttccaacggcgggtccagcggcctcggcccggcgccgtcctcctgctggcccaacaggcccgccagcc

SEQ ID NO: 434184 - DNA, 122 bp, Homo sapiens
cctgcgaatgagttctcgcgacttgcgagaagacacgtgcgcggaaggagcttgcagtagcgggcggcagagctggagtgaagggagctagtggtaaagggagctggtggaggggtggcggc

SEQ ID NO: 434185 - DNA, 122 bp, Homo sapiens
ttatgacccccgcaggagtaaccagagagcgcgcgcgagcgcccagcgcctggctcaagacgaagatttaaccgagaacaaaagaacgtttgccaatcagaaaacgctacccgagaacgagg

SEQ ID NO: 434186 - DNA, 122 bp, Homo sapiens
ctgtttatttgttagagttctacgctcttcaaatgaacccaaatcaagggcaagttatcacgcaccatgtgacacccggcagctccagactagaacaaggctctgcactgaacgtgataatt

SEQ ID NO: 434187 - DNA, 122 bp, Homo sapiens
gttcccaaaagtactttacatcctgagagcctgagtgtgtagtgagatggattggcacagcgctacgccaggtgcgtgtggcctgtgctgctggggcagtgtgtgttgctgcaccacaacgt

SEQ ID NO: 434188 - DNA, 122 bp, Homo sapiens
agggcacagcgtggctggctgcatatgtgaacaaggtgagcggcggggccgcggtcgtcgcggagtctgagcacaccaaggagcgcatcagacttcaagggtcgaagtgcaaaggggcagtt

SEQ ID NO: 434189 - DNA, 122 bp, Homo sapiens
gcgaagggccgctgagagcagccgaagtgccggcggcaggcggtggctgcagaaagggcccggccgcggccccggggggcggcggcggcggcggagcgcccaggtacgcggcggcggctgcg

SEQ ID NO: 434190 - DNA, 122 bp, Homo sapiens
gaaaaacaacccgaatactcctcaactcttgatgggagctcagttcacacggctccgaatcggcgaaacgcaaccaacgctgggcagaaccttggcacaactttgctggtgtctgctgagaa

SEQ ID NO: 434191 - DNA, 122 bp, Homo sapiens
cagatatcatacatggtgtgtcagaaattctgcagagacatgacatttgatctcaggaatcggacttatgttcatacatgctgcaactacaattactgtaactttaaactctaagatatttg

SEQ ID NO: 434192 - DNA, 122 bp, Homo sapiens
gaagcagcttctttgccttggctcctagcatcctgtcagtgctggacccaaatccatacccggctgacctctctccagggcacttggatggctggcagacatcgtgcacccaaacgtcctga

SEQ ID NO: 434193 - DNA, 122 bp, Homo sapiens
ccaagcgcgagcctctttatctccaggttgtgcctgcgtccggagaccacccaatcttggcgatggcgctctgagatggcctctgtgcaatgccttttactcctaataatccccaacagccc

SEQ ID NO: 434194 - DNA, 122 bp, Homo sapiens
tgagccctgagtgtccaagaataaaaagggccaatgagaatcaaggtcatggatctggcccgtggggaagtttgcttgggcagagcctggacaatgaagcactgtaagcccagctctgagcc

SEQ ID NO: 434195 - DNA, 122 bp, Homo sapiens
cattctgaaaagccccggcgaaggcagcacgctgcagacacctcggaggccaggcccttccggggtagtgtcggtagggtttcacagtgcaatctctgccccacgagaatagaagtttccac

SEQ ID NO: 434196 - DNA, 122 bp, Homo sapiens
ctgcccacaagctgtcaccgccaccaggccgtggttctgtgctcagaagtcagccctagacgcgccctctgcgtggtgggtgtgcattgcagcagcatctgtggtgtcatgctaatagccag

SEQ ID NO: 434197 - DNA, 122 bp, Homo sapiens
agaaatatcctgctgttatttttttaattatttggctcatattcaaattcccaagtctgccgtcaggggttggggaagaaggagggagaaaaggaaaagatgagaaagaagaggcctgggaa

SEQ ID NO: 434198 - DNA, 122 bp, Homo sapiens
gggactcttatttcctttagggttctgcagttgattattgtacctgataatacctgtaggcgcaggtgcatgtggatagaagcccactccaactctactattcaactcagacacacacacac

SEQ ID NO: 434199 - DNA, 122 bp, Homo sapiens
tggttctaatggtattttggtaagcataattggccctagtgattgttggttagtggaccacgttgtgcagtcccagcaagttgttactggggaatcggtggaacaagcagggtgtgcatacc

SEQ ID NO: 434200 - DNA, 122 bp, Homo sapiens
gcttgcaattgtcagttaatcactagctgcatgagtgatgaaagggactttataatccaacgcctgcagtttatagagacccagccttgttaagtgaacagaggcacagttaaccagggcac

SEQ ID NO: 434201 - DNA, 122 bp, Homo sapiens
agtcaaattcctggcagccaatcgggagaagggaggaatctggttagcccgcctattgaacgtgacatcatttcctccgcaaccatgaagctccaggccttagcaactgaactaggccagag

SEQ ID NO: 434202 - DNA, 122 bp, Homo sapiens
tgaaaagaaaccctgggctgaagtgattctcccactttggcctcccaaagtgagctgttgcgcccggctggatttgtttttgttttgttttgttttgttttgttttgagacagggtctcgct

SEQ ID NO: 434203 - DNA, 122 bp, Homo sapiens
ccaggggcatttaatggctcactcgtgcattccacctgggctgtgatgtgacttcagggacgcttggccgcgccggaattagcgagtggcagcaggagggtgaggtcatggtgaaaatcccc

SEQ ID NO: 434204 - DNA, 122 bp, Homo sapiens
aatgtgccagcgcctgccagtgtgttcctcttgatgtccagctgcctctgtgtcttcttccgcccagctgcctctgtgtcttcttccgcccagctgcctctgtgtcttcttccgcccagctg

SEQ ID NO: 434205 - DNA, 122 bp, Homo sapiens
tgacgtcttgtaactagcagtgtgtgcacagaatcctactcaaggaacgtcttggcccagcgatgcaaagaactgaagtttcaaggttttatgtctattgctggatggtcggggtagcccca

SEQ ID NO: 434206 - DNA, 122 bp, Homo sapiens
cccagatgtgaagtgtggtaggctggttcatatgtggaggtgggtgtgtgaagctagacacgaaggtccctaaggttctgaagagacttgaactgtggaaatgctcttagcaggcatcccga

SEQ ID NO: 434207 - DNA, 122 bp, Homo sapiens
tgaccccttctcatagcctccgcattaggtctgcctcctttgctctgacacatgtccagtcgagcccttcaggtgtattcccttgcccctgggcatttaccatcatttctgcctccttttct

SEQ ID NO: 434208 - DNA, 122 bp, Homo sapiens
atacaacccaaaaaaataattggccgggcatggtggcttgcgcctggggtcccagcgactcgggaggttgagcgggacggacggcttgagctcaggccttccaaacaagcctgggcacatag

SEQ ID NO: 434209 - DNA, 122 bp, Homo sapiens
acaacttgtttctgttctgtcgtagggctagtgagaccagctttcccttgagttctggggcgggacgtggaatgtttgtgaggctacccttcattgaaggggggcccgtgatgttgagtgtt

SEQ ID NO: 434210 - DNA, 122 bp, Homo sapiens
agggcatctttccacagcgaggagggaggcggcccggcgcaggaggaggggtcgcttccgcggctgaggagactagaggctgcggcagcccggctcccaaccactcccttcctctcccttcc

SEQ ID NO: 434211 - DNA, 122 bp, Homo sapiens
gcagcccagcaaccaggaacaacagcactgggaataatgtcattgctgggaaaacaaaaccggtggaacagggatctgcattaaaatgattggtacatgctgttgagtaacatgggggtggg

SEQ ID NO: 434212 - DNA, 122 bp, Homo sapiens
cattgcaaaacatcagattttgagaactatgcagtctgaattcattagcagccttctcggcgaaggttcttttccccgtgacaagtttcaaagtccagaccccctccaacgttggtaggggt

SEQ ID NO: 434213 - DNA, 122 bp, Homo sapiens
ctgcctgccttcaacgcctgtttctgactcttgcggtttcctgcatggctcccagcgagacgatcccgtccgggatcccatccggctcccatccggaggcgatcccgtgaaaggatcgcgtc

SEQ ID NO: 434214 - DNA, 122 bp, Homo sapiens
atgtccctgcactccgtgatcacgctgaggcctccacaccgtgaccacgcccctgcaccccgtgaccacgcccctgcaccctgtgatcacgccactccactctgtgaccacgcccctgcact

SEQ ID NO: 434215 - DNA, 122 bp, Homo sapiens
gcacttgtcctcttcctgttccttgagatggtgaccccagaggaggacatgcgttgggcccgctgtccctggccagtggccatcagccaagtgcctagcccctattgcactgaaactcgggc

SEQ ID NO: 434216 - DNA, 122 bp, Homo sapiens
gtgtgaagagcgctataggattttagagagattcagcccggacaatcagggttggcttcacggaggagggggtatctgagctgagctttgatgaatacgtcagatttgggggaaaggttgct

SEQ ID NO: 434217 - DNA, 122 bp, Homo sapiens
tgtaagagacggagcctcgttgtgtttcccatgctggagggccgtggaaattcacaggtgcgatcagggtgcattactgcctccaatttctggcttccagtgatcctccttcctcagcctcc

SEQ ID NO: 434218 - DNA, 122 bp, Homo sapiens
gaggttgatctgctttattaatggaaaccggtgcttctctgggcctaactagctccatggcgcccctgctgggctgcttcagagggttgtgtccacgtgtcctctgttgccctctcacattc

SEQ ID NO: 434219 - DNA, 122 bp, Homo sapiens
tgttgtcccgctttatgtacggctgagggcgcgagacctcacaattgggcacgcaagcggcggtgccacgccacaatgagatgatgtaaaaaccggccctgccggaaaccaggcggcactta

SEQ ID NO: 434220 - DNA, 122 bp, Homo sapiens
ccaccgagtccctggcgctgatgtcggccgtctgccaggagttctgcagcaggaacttcacgatgcccagctggttggtgcacgcggccagggacaggggcagttcacctgcatgaacacag

SEQ ID NO: 434221 - DNA, 122 bp, Homo sapiens
cttcgttttcattgctaaaccgtaacccattgttcccgctgttaactcatggacatgccgcgtttcatccacgctgaacggtaacccgttgttactactgtctttttgttttgttttgtttt

SEQ ID NO: 434222 - DNA, 122 bp, Homo sapiens
gtacccggaaccgtaaaagcacgactttcccggagcccaggcactgaatggcacccactgcgcatgccccagagcggcgacgaatgggagcccggagcgcaggggcggaggcgcgcccgggc

SEQ ID NO: 434223 - DNA, 122 bp, Homo sapiens
aaagagggaagaactcattcaccaaggacatttggatggcagataagaacacgagatgctcgacatcgtcagccacgagggaataaaaatgtacaccactgatgtgtggaaccaccacacac

SEQ ID NO: 434224 - DNA, 122 bp, Homo sapiens
caccaggactccaaggaagtctttccctaacgcccttgcatgtcccctctacccggctaccgtggataaaccgccctctgtctgtcagcattagctggcgcacggcaagaacactatcgcca

SEQ ID NO: 434225 - DNA, 122 bp, Homo sapiens
atgaagatgtctgggtaccgggtcttggcaaacagtgcttccagcacatctagctgcgcccgagtgaacgtcgtcctctcccggcgctgtttccggggggtggctgcgggacaagaagccca

SEQ ID NO: 434226 - DNA, 122 bp, Homo sapiens
ccagagacggactcgcttgtatgaatggcatatgtgatcatcacatttgcttacatactacgtgccatcccatgggaagtgttggatgcacctgggcacatccataggctgcaacgccgggc

SEQ ID NO: 434227 - DNA, 122 bp, Homo sapiens
gctcctaccagtaacataaatcaagaagtgctgggtgcatgattcccaaacccttgcccacgttgggattatcatttttttttttatttttgacatttaattaattaattaattaattaatt

SEQ ID NO: 434228 - DNA, 122 bp, Homo sapiens
ccccaccagtgtgtttctgtttatcctcctcgcccgggggctgggtccctggcgaagcctcgttttcacccacccacccccaagccagagctcaccagtgatgtaatgcgggacccgcgcgg

SEQ ID NO: 434229 - DNA, 122 bp, Homo sapiens
atttagcactttagcacccattgattcttgctttatccagctttcactttgatggatgctcgggccgatcttttgaatcactatctgtgagtgggtgggtaggatttatgcactcttttcaa

SEQ ID NO: 434230 - DNA, 122 bp, Homo sapiens
aactcacagcagtgacgcttcccgacgccccccggccacatccccacaggaacgctacggcgcacagggcattactgtgcccccaccacaaccacataaagaaaatgtgggggctcggtcct

SEQ ID NO: 434231 - DNA, 122 bp, Homo sapiens
ctcgctggtaggggatgggccctcggcgatggtagggttgatggtgagcgccggcagcaccggcttcctccgggccagcatcggggctccgcgggccggcggcggcggcgcctctagccggg

SEQ ID NO: 434232 - DNA, 122 bp, Homo sapiens
cacagaggctctggagattccctgggttcacaatcctacttctgccatttactagctgtgcgatcttgaacaaatttctgagcttctctgagcctgtttcctcatctctaaaacagagataa

SEQ ID NO: 434233 - DNA, 122 bp, Homo sapiens
gcgggggaggacatgcccctgatgggtctgggctgcactggcctctgggtgactcattggcgttttgtaaaccaccttatctttgaagaaaatgttttccactactagtaaaatttctttct

SEQ ID NO: 434234 - DNA, 122 bp, Homo sapiens
tccaacttaagatgaccttactcagaacctacctctactccagctgcagccaggagccaccgaatggactccatactgccccgtgcattggagtagtggagcttgggcttctctgccatgat

SEQ ID NO: 434235 - DNA, 122 bp, Homo sapiens
aagacagagattttaggtgccccgatcacaccgttaagtggtagaaacaaggttttgacccgtgtttattttgatccaaaatgtgtgctctctattctgtactatgggggagagtcttttta

SEQ ID NO: 434236 - DNA, 122 bp, Homo sapiens
ggctagaccagatgtgagctgcaatttgctaaatgggaaacaaacacaaggaatgcagcccgtctgccatctgttgatgcagaaagcagcagggcatgcctggcatttcaacagggctcccc

SEQ ID NO: 434237 - DNA, 122 bp, Homo sapiens
ctcagaaagaaagcgggtttatcctctcagcacagcaaagtgcccagtccttctgccgaacgacgagtggaagccgggcaggctgttcctccgtcagaggtagagagggagaaattgccaca

SEQ ID NO: 434238 - DNA, 122 bp, Homo sapiens
agaactctccatgttttctgtgagaaatctaagcaggttcctcatgcccagcagctgaagcgagctaggggttagctgagggtagccagcaccctgcactgtgcaaggtcttccttacagat

SEQ ID NO: 434239 - DNA, 122 bp, Homo sapiens
aacaaccaagtatgaacaaacacactagaagtcattccttcaagatacaaaagtcaggcacgttgatagctcttcattcattatgggagaacaaacaacttcaactaagaattatagcccta

SEQ ID NO: 434240 - DNA, 122 bp, Homo sapiens
tctctgtttgcaaaggtcttctgtactcagcagcaaactgcacttcaagcttttacaaagcgacggcctttgtcctgtaacataggcttaacaattggagaatccattagtcagtagatcac

SEQ ID NO: 434241 - DNA, 122 bp, Homo sapiens
ggttgcagtgagctgagatcgtgtgattgcaccccagcctaggcaacaagagctaaaccccgcctcaaaaaacaaacaaacaacaacaaaaaaccccaacaaacaaacaaaaacaaaggagt

SEQ ID NO: 434242 - DNA, 122 bp, Homo sapiens
gaggcagcaaccggactgcatggcgagtgggagggtgtggagtctggcttctgtacagcccgttttcgggctcggaagctccactgtagcaggacaagccgcagacaaaactcctcagacac

SEQ ID NO: 434243 - DNA, 122 bp, Homo sapiens
atcccaatttcccatgagaatttgaggtacaactttattcctactctattcatcctgtcacgtttttaggaaaaggatattaaagaaagccatctagggtctaaattcttacttaaactctt

SEQ ID NO: 434244 - DNA, 122 bp, Homo sapiens
gcgtgtcttgtgagagctcttgaaccaagtcagcgctggagtcggctaggcggctggaaacggcggctgccgccggtgactcagggaggcgggaggcggggtaagagcgccgcggcctcggc

SEQ ID NO: 434245 - DNA, 122 bp, Homo sapiens
ccactgtcagctggagcaggccggctcggaggggcgggcccggggcctaccctcaggcagcgctcgctcgaggccagcttccgagctccaacccctgcccgaaacctcggcctcactgaacc

SEQ ID NO: 434246 - DNA, 122 bp, Homo sapiens
gaggcccaccctctgtggccctgtgtcctgtaggtattgggagatccacagccaagatgccgggaccccttagaagcctagaaatggtgagagtgcccattggacatcctgagagaggggag

SEQ ID NO: 434247 - DNA, 122 bp, Homo sapiens
ccgcctcctgggctcccattggctgcttttgacgttgtgctccaccctttctgggcggggcggaaaaaatacttcccgtctctccttttcgcctattagctccgtcaaaggtcgagtccgtg

SEQ ID NO: 434248 - DNA, 122 bp, Homo sapiens
accagaggagtcatgtggtgggcctggaaggccgggccggactggtcagggaaggctttgcggacacctcggggagccgacacctagaggaggtggtggaggtgtgggggccagaggaagtc

SEQ ID NO: 434249 - DNA, 122 bp, Homo sapiens
tgtgggaagcatgcccagcacacgtctcagtcccgtccctcggagcaggccaagctcgggcggcaggcagctgccttgcaattctcggagtttcaggaactggacaggggaaggttggcttg

SEQ ID NO: 434250 - DNA, 122 bp, Homo sapiens
cttccctcttccactgttttcccggggtcacagttgtagtatagtttgcccaatggatttcgcatggtcattgtacctggaatatgtcacgctccctactcttactgcccccaaactcttct

SEQ ID NO: 434251 - DNA, 122 bp, Homo sapiens
tggggagggggtgggagactatctggcacaaactggacagagccgagccagtctagaacccgacggaagttactgaatccagcggccccagaggcccacatctcttcttagtgcgcccgagg

SEQ ID NO: 434252 - DNA, 122 bp, Homo sapiens
gaggataaggcgctatgagaagctgccaagcctcagatgtgcagctgggctgaataccgacgccagcgcctagcgcccattactttgcacccacacttaggaaacaacccacgcctcaccgc

SEQ ID NO: 434253 - DNA, 122 bp, Homo sapiens
ctaggctctgtccccttaaatgctgcccttcaaatagtcctcgggagggggaccaaggatcggatgacctatcccctaaatctggattttagagttgtaggatagggccaattaccaggatt

SEQ ID NO: 434254 - DNA, 122 bp, Homo sapiens
cgggccggggacccaggaccggcgctcgctgtctgggggcgtgggggtgggggtggcgggcggggtccctacggcccgtcttgagcctcccgcggctcagccccccttcctcctcgtcgccc

SEQ ID NO: 434255 - DNA, 122 bp, Homo sapiens
gactgattgttttcccccaaaaaagttcatctcaaagagccttggtaacgaaatttgagccggaaacagccttttgtgtgctagttcacgtttctcccacccttcctcagcaaattatccca

SEQ ID NO: 434256 - DNA, 122 bp, Homo sapiens
ttggggcacgggaacctgtctcctgaccttcgtgccttacctcggagtgtgctgcccagacggacttgtgaatagctgcgtctgtccccatagttaacgggagaaggaaacaccaggagaaa

SEQ ID NO: 434257 - DNA, 122 bp, Homo sapiens
ccaccccaaccctggatgctcgtgctccacaatgagggggtcagccggctcagggacccgcggactccccagagtgctccttcctcgacgaacacagccagaggggcagggacattcgagac

SEQ ID NO: 434258 - DNA, 122 bp, Homo sapiens
cgggggacaacaaccacagagcacaagcctcctccctgacaaccctgcctcgctcctcctcggccctgcttgggcttcaggggtgctcgttcccctgctgcgcagccactctctcccctgcg

SEQ ID NO: 434259 - DNA, 122 bp, Homo sapiens
tgcacctgagggaggcgcagccgcaaccgggtgggaggcagagacacccagaaacagagacggggcgatacgaacagacaaagccggctcgagcgcggcccgagcggcggcgcagggaggcg

SEQ ID NO: 434260 - DNA, 122 bp, Homo sapiens
tgggggagaagagaagaaactattttaaatgcatgaagtcaggctgggcgcggtagctcacgcctgtaatcccagtactttgggaggctgaggctggcaagtttgagaccagcctggccaat

SEQ ID NO: 434261 - DNA, 122 bp, Homo sapiens
tgccacagcaaggaccgcgcaggatccccggggcgccgaatggggcagctcccgccatcacgccagtgcctcaggaccggggcctggtaccataccagccgcccctccctgaggacagcgcg

SEQ ID NO: 434262 - DNA, 122 bp, Homo sapiens
tagagggggagttgtggaggagcccattctgaaactgatctgatattgcaaacccatacacggaaaggaagaactgcccatacgtattcgagtcttccaatctgactccgagcccgcatccc

SEQ ID NO: 434263 - DNA, 122 bp, Homo sapiens
accatggtagaagtaatgctttcaaccagcttctcaggttgctctcgggcatctgaagggcgcaataactctgtcatgttaatcagctcttgctgaaaagcaaaccagctgagctgaaagga

SEQ ID NO: 434264 - DNA, 122 bp, Homo sapiens
ttcatctgtctctcgagcgagtgcggcattgtctttctctgtgcggtacggctgatcgggcgtccacccttccagaacgggttcaagagccgagtaggggaccccttccacgtcgccgaggg

SEQ ID NO: 434265 - DNA, 122 bp, Homo sapiens
cggtgtatcctcgctggtggagtaccctctgcttgagcgcatctcatgcgccagtagtggcgcccgccccgaacggtgtcgacggggcgttctctgagcggttcagggtcactggaagggac

SEQ ID NO: 434266 - DNA, 122 bp, Homo sapiens
cctgcccggcagaacaggcactgcgagtgccccgtgaggctaggggtccaggtagcggttcgcagggagaggccccggagaagggagactgagtgtgagtgagggtgtgggcagaaaaagtg

SEQ ID NO: 434267 - DNA, 122 bp, Homo sapiens
ggtgcttctgtggatgcgacggcaaggtaccggctggatgggtgctgcgggggctgcgtccgcctccactgggtgggctggccccggctctgcgtccaggctcttgctgccgggctgacctt

SEQ ID NO: 434268 - DNA, 122 bp, Homo sapiens
gacacacacacacagagacacacacccagacacatgcacagagatacatacatgcacacacgcatacatatatacatacagagagacacacacagagacacacacagacacacgcgcacgca

SEQ ID NO: 434269 - DNA, 122 bp, Homo sapiens
ccctatgcctacaccttttggacttatatgatgaatgctcgatccaagaatgttggttggcgccttgattactttttgttgtcccactctctgttacctgcattgtgtgacagcaagatccg

SEQ ID NO: 434270 - DNA, 122 bp, Homo sapiens
tgacaccgtctttcggttttgctttaaaaattcactctcgcggccgggcgcggtggctcacgcctgtaatcccagcacgttgggaggccgaggcgggcgcatcacaaggtcaggagttggag

SEQ ID NO: 434271 - DNA, 122 bp, Homo sapiens
cgccccgtcacgggcagcgccccgaaccggggccggacacctcggccgctcgggccgcggcggcggggaccatgccgaagaaagtctcctgagcccggcaacttcggcccctccccgccccc

SEQ ID NO: 434272 - DNA, 122 bp, Homo sapiens
ctgcgcggtctcgggcggaggctccctcggcctgtccagcagctccttccaggcgctcggcggccaccaccgcatctgcagccaggcccgctgcagcccacagcgcccccggcggcgggagg

SEQ ID NO: 434273 - DNA, 122 bp, Homo sapiens
tctgctctatgtcaaaccagatgccgtggtctggccccaccgacatgcctgggcaggggacgtgtgggtatatcatcgtctcccatgggaaacagaccgtttgcgtctcttggcattgcctt

SEQ ID NO: 434274 - DNA, 122 bp, Homo sapiens
ggctgctgagggtacgcgcagcggcctctcgtcgccctgcacgtgcctcgccaggcagtgcgcctgctcgcagcgaggacctagccctctggttgcagagacccggtgccgcagcagcggcg

SEQ ID NO: 434275 - DNA, 122 bp, Homo sapiens
tccagttatctctaagcagtttccatcttacaatgaattactgctctcaaatggaaaggccgggggagtgccagcgtagcccaaacgcggcccaaatcgctttgccctctgaactgcttgtt

SEQ ID NO: 434276 - DNA, 122 bp, Homo sapiens
cctgcgcccccgcactgggcccggctccgtcgagggaaggccaggaatcttggaagaaaccgaaagaaaactccggcggcgggcgaggaggggcgggaggacgacggcccgaggagccgatt

SEQ ID NO: 434277 - DNA, 122 bp, Homo sapiens
tttcttttttttttttttttttttttttttttttttttggagacaaggtctcactcttctcgcccaggctgaagttcagaggcacaatcatggttcactgccaccttgacctccctggctga

SEQ ID NO: 434278 - DNA, 122 bp, Homo sapiens
ctccccatcctccatctgccactgtgggaggtgggtcgggccaaacaggcactgcgggggcgtctgcagcattcctgttccagaggctctgatgtaatcagcctgatggtgtgggagaaacc

SEQ ID NO: 434279 - DNA, 122 bp, Homo sapiens
ggaacgtttacagcgccccctggcgccggggaggcccggggatcgtggaggctaattcagcgggccgagttgggcctgccccagatgaattcctctggagctgaccggcccgcgcagagagc

SEQ ID NO: 434280 - DNA, 122 bp, Homo sapiens
ataactgcctgacgcccgagccggtggtgcggcagccaccattgcgcaagttcgagcgcccggctctggctgctcacatgatggaggatggggaaggtcctctgcaccagaaaggccgccta

SEQ ID NO: 434281 - DNA, 122 bp, Homo sapiens
gtagggtccttcttcctggacactcaggatgtggactcagttctcacccccatttggtgtcgggtttctagcgaagccaatcggcgtcgctggggtccctgttccagaagtccccgcgaacc

SEQ ID NO: 434282 - DNA, 122 bp, Homo sapiens
cggccgcacccctttgtggggctgtcgtgccgggaggggcgcgggcgaggcgggcccgggcggcgctgggacttgtaggccgggagcccgggcgcctccgggctgaagcccgtggccacgcc

SEQ ID NO: 434283 - DNA, 122 bp, Homo sapiens
ttgtacgtgctgacgtagccggctttccagcgggtatattagatccgtggccgcgcggtgcgctccagagccgcagttctcccgtgagagggccttcgcggtggaacaaacactcgcttagc

SEQ ID NO: 434284 - DNA, 122 bp, Homo sapiens
cctagaaataaagggcgttctgggccaaccgggagagctgactgcgggggggcggagccacgccgggtgactgacgttgaggcccaaccagggagaggcggggccaaggccagggcctgact

SEQ ID NO: 434285 - DNA, 122 bp, Homo sapiens
aatttggggctcagggtgatagtaattcctcagataaataaagtgggtagtttttgttcacgacaagaaaggagaaatgactttaccgtcagatttgcaaagcacgggcagcaacccgattc

SEQ ID NO: 434286 - DNA, 122 bp, Homo sapiens
agagacgctcctcactttccagaccgggcagccaggcagaggggcttctcacatcccagacgatgggcggccaggcagagatgctcctcacttcctagacggggtggcggccgggcagaggc

SEQ ID NO: 434287 - DNA, 122 bp, Homo sapiens
aaagaacagtcccgggatggttgacgcccccagggtctaggaagagtggggagttgttaacgcctttgggcctcccggggcaggaacctgtgtcaccagcacaagatgagctggagatgtag

SEQ ID NO: 434288 - DNA, 122 bp, Homo sapiens
cagtctcaagggcagaccccacctggctagagttgattgtgtgcacaccggatgacccggcgttgaaggcctctcctctctgtgagcctcatccccacctgccagactcccagcacagcctg

SEQ ID NO: 434289 - DNA, 122 bp, Homo sapiens
cccatccccccggggccaggccagggcctcagtgcacagactctccggggcgctcattaccgtaactacaaccacacactccatcactccgagccgacccgacgctgctgctcctggtcccc

SEQ ID NO: 434290 - DNA, 122 bp, Homo sapiens
ttaaaaataaagggatggaaaaagttagacaacacactgatcaaaagaaaactgaagtagcgatgttaataccagacaaagaagacttagaacagggaaaattgttaggagtaaacgggaaa

SEQ ID NO: 434291 - DNA, 122 bp, Homo sapiens
tattttctgtgtattagaaagaaaccctatttctcacttcctcatatggtaattatatctcggtggaattgaatcctcaggacaacagggcatgttattgtgagatattttacacctggctt

SEQ ID NO: 434292 - DNA, 122 bp, Homo sapiens
aatggacttttgcgatgtatatactgtgaggctattttgagcttctctctttaaggcacccgcacatctgaatatgcttacttggctttactctttaacatataagaacacatgaaactttg

SEQ ID NO: 434293 - DNA, 122 bp, Homo sapiens
cttgtgtaggtcggggagccagagatccccgaggacgcgcgccggacagtcggcactgaccggcccacctggtagcagaggacacccccagccccccaagcattgaagacatagtgtatttc

SEQ ID NO: 434294 - DNA, 122 bp, Homo sapiens
ggccattcctcccaccgccatacggtgcaggtgggtggcgtggaactcagaggtctggttcggggcccgaatcacacgtgccgccacatggccagtgctcggccatcctcctccgtgccgtc

SEQ ID NO: 434295 - DNA, 122 bp, Homo sapiens
aacgcccataaacagagatggtcctgaactctggagagatccttccctgatcctttcggacgactacttggagccataagtaacctcagcaaaaacgaggcctctgcaagccacttttccat

SEQ ID NO: 434296 - DNA, 122 bp, Homo sapiens
ggagcagctgctccactcgggccctgttttcaggactttctcgtccgggtgcgcggaggtcggcctggtcccaggaaggatttgcaggcctgtggctgggtaacccagagtccggtagcgct

SEQ ID NO: 434297 - DNA, 122 bp, Homo sapiens
ttctcctgcatatgtcccacccccaagtattggatgacactgacgaatttttaacaagctcgacgccttatgtgagaagtgtctcttccctctttggcctcctagggtgggaaagcagatcc

SEQ ID NO: 434298 - DNA, 122 bp, Homo sapiens
tgacactctgaccattttcacacagctgtctgctcccaggaggcgatgacggggccctgccgggccgtgatgcctcgttggtacttcgacctctccaagggaaagtgcgtgcgctttatata

SEQ ID NO: 434299 - DNA, 122 bp, Homo sapiens
ggctccgccaaactttggggcgggcggggcgggctggggcgcccagggggctctgtagaccgagggcggccccctaaccatgatgtttcgcgaccaggtcggggtgctggcgggctggttta

SEQ ID NO: 434300 - DNA, 122 bp, Homo sapiens
cgtgcacctggcggaagattcgggcctgtcctctccaggtgtcactgcggagcagggggccggacgctactggtacctgagccctggcttcgtagaagagcgagtgagcttgttaggtacca

SEQ ID NO: 434301 - DNA, 122 bp, Homo sapiens
agctgcatccaatcctggtgtcaccagaaactgcgtcacaggcctcccgcgagctgcacccgacctctaagagggcagtgcttgggttggttaagggcagcacctgcgcctgtcacggcttt

SEQ ID NO: 434302 - DNA, 122 bp, Homo sapiens
ccgcccccggactccgtgggctgggctgggctgggcgcggtgcggctgggcacacgcagtcggaggcggcgccggccaggccgccgggcgcctatggacgcgcggagcccgctgtctccccg

SEQ ID NO: 434303 - DNA, 122 bp, Homo sapiens
cgtcagaagctgtgcagcagtgcagtagaatagggcctggcaaaacctttgctagcaaagcgccttttgtgccgggctgtggctcgctatcgacatctcgtccgttaccaaggctgggtttc

SEQ ID NO: 434304 - DNA, 122 bp, Homo sapiens
tccgaggaaactgacacattcatcgtggaaccgtcctgtgctgagcagtacatcatcagacgtgttctcactgcagctgcaacttgtgggcaaaacctctggcctatctgtgtcccagcaca

SEQ ID NO: 434305 - DNA, 122 bp, Homo sapiens
gcttcgtaatcctggcttcctgctttctgggtcaaagccctggtggtgtgttcttgatatcggtccatctagtggcgttgtttgattcctcccaccttgctgatcattcgtagtgtagcccc

SEQ ID NO: 434306 - DNA, 122 bp, Homo sapiens
aagttggtttatttatcaggctgaattgagcccccactggccctccccactcctgtgccacgtctgaagatgtttcagtgttttggcgtgatctcaggacctacttctttgtgttgttagac

SEQ ID NO: 434307 - DNA, 122 bp, Homo sapiens
acctcttagtcttcttgtcgcttggtcgcgagtgaaggagcaactcgccatggtgatgcacgatggttttaaggtgagcgaggaggagggggaattcaggaaagggagggttgggggaagag

SEQ ID NO: 434308 - DNA, 122 bp, Homo sapiens
gcgtgtttccctcaaggacggaagtctcccctttactctcatccactgcatgctgcagcccgcacctctcatccaccacagcacactgcggcccgcgcctctcctccaccgcgccacaccac

SEQ ID NO: 434309 - DNA, 122 bp, Homo sapiens
cccaaaggccatgcccagggtaaactaccctggctctggtgggtccaaaccaagctggggcgagtcagttggttaatccagggctgccactgtgtctgcaggaaacagtcggctccttgcat

SEQ ID NO: 434310 - DNA, 122 bp, Homo sapiens
atgcataacgatggggccattgggtggtaaacaaatgcagtttgaatcaggcgtctccctcgccctttctggagatgcgcaaatcatagagaaaagagttactaacccagcggtaaaccgcc

SEQ ID NO: 434311 - DNA, 122 bp, Homo sapiens
tcagccaatggcagaggggctctggggccctgtgggcggggactaagggtggagttgcggcgtcataggtcactgggcgggctatgggcggggtccacgtcgcctaccggggcggagcgggg

SEQ ID NO: 434312 - DNA, 122 bp, Homo sapiens
cgcctccaccgctgcattcaccaccggtctcctgtagcagtcagcacactgcccctcccccgcctgcagccactaatcttctgtgtccaggagtttgcctaggctgggccttccctgttaag

SEQ ID NO: 434313 - DNA, 122 bp, Homo sapiens
taattcatgattcaaagctgaattgatagcaaagttgaacctgctaagattgggcttacacgtgagaagaggctggtgggccaaaaacttcatgggcaagctcagcaggcacattccagaga

SEQ ID NO: 434314 - DNA, 122 bp, Homo sapiens
cccactatgatggagttatcatctatatgcctgcattcgttttgccttcatgacaccttacgtctgagctaaataatttccagcatttgtctttcttgctactataataaaaagtcacacgg

SEQ ID NO: 434315 - DNA, 122 bp, Homo sapiens
ctcaggtgatccacccgcctcggcctcccaaagtgctgggattaaaggcgtgagccactgcgcccggcctacctcctgtcttatatctgagatatccagaggacccttgagaccttctcccc

SEQ ID NO: 434316 - DNA, 122 bp, Homo sapiens
cacaggatacaggtgtcccactccaggcttcataggcaatgaagctctgacaggggaggacgacatcagatcgtagcggcgcctggttagggagtgacgcccatgctgggtggtggggccac

SEQ ID NO: 434317 - DNA, 122 bp, Homo sapiens
ccctgagccccagccctgcagagcaggcaccccacgcggtggttgcaggcaccgggcagtcgctccatcctggttttcagcttttggtgcacagaagcatgaagaagaggggtcactggcac

SEQ ID NO: 434318 - DNA, 122 bp, Homo sapiens
tcaggagccctcctggacccgccagcccgggtctgaccccggtatcagcccgaggggcctcgtcttgaacggaggagccgctggttccactcatgcatttatttcataaatgttggcctccc

SEQ ID NO: 434319 - DNA, 122 bp, Homo sapiens
aatgagaatgcgacgccacagagcaccctggcaacggggggcggggacttcctatgttagcggggcgaggggccgcctcttaaaggagccgcctggagcggggaaactgctgacaaccctta

SEQ ID NO: 434320 - DNA, 122 bp, Homo sapiens
ttcctggcgacgcggccctgcaggcggttgcgttccccgtcgttaccctctttctcttcccgacgcgtgagttaggccgtaatgccttggctgctctcagcccccaagctggttcccgctgt

SEQ ID NO: 434321 - DNA, 122 bp, Homo sapiens
aactgacacatcaaaataacccaaaaacaatgtacaattcaacaatttgtctgtagccatcggtgacagtgtcacccattgctgataccgatattgccactctttacatttgtagggtttgt

SEQ ID NO: 434322 - DNA, 122 bp, Homo sapiens
taagtctataagtgatgagtccattggaacagcagcagtatagaggatacagaccaacttcggcggcagggctcagctaaagggaacaagatgtggcatcaggagcccagccatgtctgtgg

SEQ ID NO: 434323 - DNA, 122 bp, Homo sapiens
gcccacccatcacgtatgtccagctgggctgggctttgcggagggcggccagccctgggccgcgtgtgccaggtgtggtcaccatgccgcctccccagggccccagtggtgtgcacccggaa

SEQ ID NO: 434324 - DNA, 122 bp, Homo sapiens
tgagagtgggccagggggcccagcgctgggtaatggagctgcccctctggatggggtccccgggtatagctggagaaatgagcgacgggctcacagcctctcccgggtggcggtcttattct

SEQ ID NO: 434325 - DNA, 122 bp, Homo sapiens
cactaaaatggtaaagtgctcatttccaagtagtaaaatattgaaactttttcttttcatcgttgatagtgatttaacatttcattactttatcgttattatgattgtcattattttagacg

SEQ ID NO: 434326 - DNA, 122 bp, Homo sapiens
acctgttccctacgtaggtgtcggttgtacttaagagcatcatttggtcgctcgtgtattcgcagaacccctagcctgcaataagatggttcaggaaacacaaccagaaccggtctcattcg

SEQ ID NO: 434327 - DNA, 122 bp, Homo sapiens
tatttcagacacaaatggggattcacaagggggtcgttaagaaggacattttcggccgggcgctgtggctcacagctgtcatcccagcactttgggaggccaaggtgggtggatcacttgag

SEQ ID NO: 434328 - DNA, 122 bp, Homo sapiens
ccatttcaggcagaaggttttggtaccctccactgaccctacacccagggctgctactgccgcttgtggcttcaggtaagtaatggcctgtttttctcctgttggggctcactggagcagac

SEQ ID NO: 434329 - DNA, 122 bp, Homo sapiens
tgagagctttacaggcaccatttcactatgatatgggaccaggctgggtacggtggctcacgcctgtaatcctagcactttgggaggtggagatgggtggatcacttgagcccaggagttcg

SEQ ID NO: 434330 - DNA, 122 bp, Homo sapiens
tactcaggaggctgacgcagaagaatcgcttgaacccaggaggcagaagttgccatgagccgagatcccaccaccgcatccagcctgggcggcagagtgagactccgtgtcaaaaaaaagaa

SEQ ID NO: 434331 - DNA, 122 bp, Homo sapiens
gctgtgagtgggcgacaaggaacctcgtggtctccgtgtgctttgcggggaccacctcttcgcaggggccgccacctgcctctccggcgctgcatccttagcatccccactgcccccggatc

SEQ ID NO: 434332 - DNA, 122 bp, Homo sapiens
ccaggggcctcctgcagcagccgggccagctgctcctcccaggggctctcgggggcctggcgcgtgcagtcctccaggcacccggccatctgcttgctcaggagccggggctccacctgcag

SEQ ID NO: 434333 - DNA, 122 bp, Homo sapiens
gaaagaactaagggtaagtgctgagaagcctctctttacagccagagaacgagccagagccgagcttgagaatgacgggatagatctagcagttatgcccaaggaagaccctcggccctttg

SEQ ID NO: 434334 - DNA, 122 bp, Homo sapiens
ttaggttgaaatgaacatgctggaaagctttcaagaattgcacacgtgaaatgctctttgcgtgtctcccggtctcccacccgcccccgacacagaggcgcaggagtaaccctgctcccttc

SEQ ID NO: 434335 - DNA, 122 bp, Homo sapiens
ctcctcgggcaggctccagctggcgcaggagcccgtggtgcgttgccgtgtgtggggcggcggggggaggaggggcggcagggggagagggggaggctcaggcatggcaggctgcaggtccc

SEQ ID NO: 434336 - DNA, 122 bp, Homo sapiens
tagtgtcccagaagaggctaagaggacgtgaggaccaagcaccacgtggtgcctgagccgcgtcctggaacagaaaaaggacatcattggaaaacccggtaaaacctaagtagcctgcaggt

SEQ ID NO: 434337 - DNA, 122 bp, Homo sapiens
aaggaaaatttcactctggcatttccttcagatcctatgccagatttcttccggaaacaacgatcacagggggaacaaagaaattctaaaggatttgaatgatggaatgtagagataggatg

SEQ ID NO: 434338 - DNA, 122 bp, Homo sapiens
caggcacatcgtctggttagcgggagacatgtttggccagcggtgaaagactgccttgcccgagttcctgagacttcggggctactgatggcagggagaggctggccgagggcagggccacg

SEQ ID NO: 434339 - DNA, 122 bp, Homo sapiens
catcaggaacaagtctagcagttccagtcaaatcccggtggttggggtggtgacggaggacgatgaggcgcaggtatgagcaggtgtctgtgctttcagaggtggagggggtgggagtgaag

SEQ ID NO: 434340 - DNA, 122 bp, Homo sapiens
cctgcctgtctgccctccacactaatgaccctagacccctaggaacccgtgctatgggggcgtgggaagcccctctgcagcccggtctgagggcatatgcaagcgaggctaagggcgtcctg

SEQ ID NO: 434341 - DNA, 122 bp, Homo sapiens
ttgagtctcaataaatctggcaccagagttccaaagtttgattagttcatggcggaaattcgtggagcctattgatgagatgggatccgacccatgagaggtgctggatgatggagtcaccc

SEQ ID NO: 434342 - DNA, 122 bp, Homo sapiens
aataatcaactaccggatgaatacaatgagggaaaagttaacatgatacaacaggacaggcgtgaagatatctttagaacttggctgaatgcttcaagtggaaatttttctgcattaaaagt

SEQ ID NO: 434343 - DNA, 122 bp, Homo sapiens
gagaaaggaagtgatggctttaaagggacgcagctttgtcgggctcaaaagaggagccctcgctcactcttgagcggctcaagatgttaccagaagctcccgccagatgtgcggggcggggg

SEQ ID NO: 434344 - DNA, 122 bp, Homo sapiens
cctgttttacaggacactcacagctcctggcacctggcagcttttggggtttcctctccccgccttgcacaggttgactttatttccagatcttttcaaaactcctgtggtaacacatcaaa

SEQ ID NO: 434345 - DNA, 122 bp, Homo sapiens
ggtggaagccaccttaaggagactatagatgagttcagggatcagcctgtccttctgggccgagtcttgaggcccctgactccagccacagtgacaacccacatgcgggcgctggacctcgg

SEQ ID NO: 434346 - DNA, 122 bp, Homo sapiens
gatgaacttggtctgagcaggggtcccatgagagtaaaagacagccccatgcggttgtggcgggggtggggttgcgaggcatgggggatggaagctggggctggggggactgtggtccctgg

SEQ ID NO: 434347 - DNA, 122 bp, Homo sapiens
cttttcccaacccctaaaacattcctgacctctctcgaattgacataaactcccatttctcgccctgagaaagcctgcggagagccaaggagtgatatttgtgatcttttcagagcaagaga

SEQ ID NO: 434348 - DNA, 122 bp, Homo sapiens
gcgggctaggagggtttgggtcttcaggtcacatctggacggagagacctccggggcctccgttggtcggtccttccgctccggataccgttccggatgtcaggtagttcaggtcccgcccc

SEQ ID NO: 434349 - DNA, 122 bp, Homo sapiens
aattgaagtccgctggtctccagacaggcacggtaacgtgcacgcatcggatgtggttcccggggaatggtgggtgattgtccatcttcctaacagtcctcaaatgaggactcagttccagc

SEQ ID NO: 434350 - DNA, 122 bp, Homo sapiens
gagaccatctgctagctcattcagccagttcctaggttcagacaggagattatgtaaacacgcacatgcaccgattgggcaaagcctttctcaggactttcactcaattcagggttgctgct

SEQ ID NO: 434351 - DNA, 122 bp, Homo sapiens
agctgtcagcccacgtctcctgcggtgcttgcttgcgtggggtctcggctgcagcattcgcgattttgtgtgcaggatttgctgtggagtctttgcggtgtacctagcacgccttccagcac

SEQ ID NO: 434352 - DNA, 122 bp, Homo sapiens
tgtgcctgtggtttataaacacaataaaccttaaaatgcaaagcggtgccttggccttcacgtcagtatccctcaaagtgtctgactccccaggtgatggttccaggagctgggggcctttg

SEQ ID NO: 434353 - DNA, 122 bp, Homo sapiens
aaacaaaaacgtccggtgggtttttcccggggaagaattcagatagaagagaagtggattcgggtctgctttcaatcccagtggaattcagcctcctctgagtggggcggttgagggtgcag

SEQ ID NO: 434354 - DNA, 122 bp, Homo sapiens
cccggatcccggtcggcggagcgcatttatttgcatatttctacctttgttccctgccagcggccaatcagcgcgcggggcgagacgaaggggctgggcggggctcgggctcctgctccggc

SEQ ID NO: 434355 - DNA, 122 bp, Homo sapiens
tgttgccaattttttcattataatttttaaatgttgttcttagtgcctgtctaatctcaacgaagccaactctcctaacaggataatacttgctcaacacctccagataatgactaatgcct

SEQ ID NO: 434356 - DNA, 122 bp, Homo sapiens
cctgaggccctggtcaggttgccctcttctttgcctgttacaggagtaactacaatgaggcgattggagaaaattttgggtagatagatttttttttctccaaatctctgtgcattctatct

SEQ ID NO: 434357 - DNA, 122 bp, Homo sapiens
tccctagggcaggggagcctcagatagatgcaaggtcctggtgccacaccttctcaggtacgcagggcactgttgacatctgagggtgtgtccgtgccgcgagactggggcagccaatacaa

SEQ ID NO: 434358 - DNA, 122 bp, Homo sapiens
aaggaccagaaaaaatccattcagactgtcacttgaaatatgggttattccacatctccacgttgattatcctgataatgtagattgtctctagttaaacttacaacatgtgctgaccctct

SEQ ID NO: 434359 - DNA, 122 bp, Homo sapiens
tatcggtgacgccccaccggcccgcagcccctgctgcccaataaaaccactccgaccccacggcctcttgtcttgactctggtggtccagggtggggccgttcccggcctgcctgaggcctg

SEQ ID NO: 434360 - DNA, 122 bp, Homo sapiens
gcacacaaactttccgctaggaatcaagcgagcatgcgcacacagatgttagggttcgggcgagctatttggagcctgcgcagtcagatccgaggacatgttgacgtcgtccgagagtctta

SEQ ID NO: 434361 - DNA, 122 bp, Homo sapiens
tggtgatgtggctatgtctttgactgtatctctgtgtggccatccatctacatgagcgtgcgtgggtctgtgtagacataaatgtgcttgttctggtattttgtgactggcataaaaggtgt

SEQ ID NO: 434362 - DNA, 122 bp, Homo sapiens
gcccgttgcaaccctagatgaggttgtctcattttctcgctggagaactgtcagggaacacggaaaacccacccgcgacccggcttcatgcggcgccgtctcctatggcaaccgggaggagg

SEQ ID NO: 434363 - DNA, 122 bp, Homo sapiens
cttggtttccctgtgaagccgcccgtgccctgagagctgtccctgcctagccaccaccaccgccgaggtcagcctgtacttgggcaggcgcagacgtccccgccactcctcccccagcctgg

SEQ ID NO: 434364 - DNA, 122 bp, Homo sapiens
agacagacgaggggcgaggcctctgacctgggtttccttctctgaggaagtgttgggtcccgaagccctcttcgggagagtcaggtggcggcccggggcagctcagaccgcgcctcaggagc

SEQ ID NO: 434365 - DNA, 122 bp, Homo sapiens
taaggagcagcgctagggccgcttcctctctgcagctgacacagaatctgaattttgctgcgtcaaacaggcccacccgctcgttcgctggttccaatcgtggagagagaggccagtatgac

SEQ ID NO: 434366 - DNA, 122 bp, Homo sapiens
ctgactgacaggtgttccccgactcccagtggcgaaaggtcctcagggaaaacaggtgaacgctatcaaagtatgcttatctccgaacctttcttaaaccagagtcttaagggatcgtctct

SEQ ID NO: 434367 - DNA, 122 bp, Homo sapiens
ggggctgttgcctttgtctgcttgtttctgctctctggagagccccagagcctggagagacggggaggggagtgtgtgcccagggctaaacccagggagggggcccaggaaggctctgcccc

SEQ ID NO: 434368 - DNA, 122 bp, Homo sapiens
ccagggctgcaaataaagcagctgttctaaggaagtgggtgctgcagttataacagtaagcgctgaagtgggtgtccaaatgctgacagtcagaacatgtgtgcatgactgggcagctctgt

SEQ ID NO: 434369 - DNA, 122 bp, Homo sapiens
cagagccaactgagacagatttcagtaccgcgcgcagagcgggggctgctggagaaatgccgacggtgtggacctggcttcgggaccgggaatgggtacatgctgcagacgttttcagggac

SEQ ID NO: 434370 - DNA, 122 bp, Homo sapiens
ggcttagcacctgggccagaagctgcggagggtgcgccaggtccctcagcactgccagcccgccagcgctgcactcaaattctcgtggggactcagctgcctccccacggggcagggctcgg

SEQ ID NO: 434371 - DNA, 122 bp, Homo sapiens
gattacagttgtgagccactgcacccggcctctccttcttttaaacatatgcagactcaccgcagaaactggaaacagattaaaagaaatgctggcttttaaggcgagtttgaaaaacgtaa

SEQ ID NO: 434372 - DNA, 122 bp, Homo sapiens
agcgcgccggaagtgatgccttccaggttggcttggctgcggaagcgactcctgccagggcggggtgcggcacgggagggcggggagcgcggcaatttccgcttccggtccgtcgcctcctt

SEQ ID NO: 434373 - DNA, 122 bp, Homo sapiens
tgccccaggcaaaaataatatggagcctacatgattactgggatttttctagacaccatccggcagcactgcaaaagagctcctgtcctgctggtctgctttctatttgtacaaattaattc

SEQ ID NO: 434374 - DNA, 122 bp, Homo sapiens
cagctatttgccttagttcctagctctctgttcactgcacctcaggggtgcttccttttacggcaggatccccctagataaaaggaaaattataaacactcatccttagaaatttggaaggg

SEQ ID NO: 434375 - DNA, 122 bp, Homo sapiens
aacaacccggtgggaagccatggagggggtcccctagcggaggctgggcgcgggccagtgcgcgtgcgcggctggaggctcagcgcgcaagcgtgcgcgtgatttggccctgaacggacgcc

SEQ ID NO: 434376 - DNA, 122 bp, Homo sapiens
ttcctggagaatttctcaaggactgctggctggaaacttaacggctaatgtggatctgaccgtagtttgccaaattaagaaaacggtgtgagcaaaacccacctttacctaccatgcacttg

SEQ ID NO: 434377 - DNA, 122 bp, Homo sapiens
aggacgtccatcaggatcctggcagtgtggaggtgtagggtccagccctacggggcttagcgggtgttttccctgtgtgtggagatgagggattgtaataaataaagacacaagataaagag

SEQ ID NO: 434378 - DNA, 122 bp, Homo sapiens
ggacgagacggtcgaggaggtgaggctctgcccgctggttggggccggcgtggcggggcccgctgggcttttgctgcaagaatagttgctgatcttatgagtaaactggtttggttctgttt

SEQ ID NO: 434379 - DNA, 122 bp, Homo sapiens
agtgcctgccctacgcaccccgatggcggagctgcggcctagcggcgcccccggccccaccgcgcccccggcccctggcccgactgcccccccggccttcgcttcgctctttcccccgggac

SEQ ID NO: 434380 - DNA, 122 bp, Homo sapiens
gcctggcctttggaatctgactacttttatcttctaacttgttttgcaggtgcaggccaacggcatacagcagcactcacataagcaaaggagagcgtgcacaaggcgccaaatgtatatcc

SEQ ID NO: 434381 - DNA, 122 bp, Homo sapiens
atccaacacgaactgagaaagctcgtgaagtaactcctgtgcttcttcgagatctgattccgagatttcgactggccttatgaattggctcagataacgggcctgcatttttggctgccttg

SEQ ID NO: 434382 - DNA, 122 bp, Homo sapiens
tgatccctatgttcccccaggcatgttccctttttaggccagggtggatacccaaccccacgctgggtacataattctctctgcagaaagaatgcagagtgactatcagacatctgttgtta

SEQ ID NO: 434383 - DNA, 122 bp, Homo sapiens
ctgaggcctggcaagaaatcgagcagggcgtgggtgggctggcagtgctgggggaccccacgcaccctccacagctgctggcctgggtcctgcgagcgccaccacagtcccggttcccaccc

SEQ ID NO: 434384 - DNA, 122 bp, Homo sapiens
ccagaagtctggggctctccaggaagcgaagcggatggaagattactcggctcggggtcccgggtccccacccccgccccgcccccgggccgcagcgtcacaaaggccgctggtccccaggg

SEQ ID NO: 434385 - DNA, 122 bp, Homo sapiens
gttcgaagtgtgactatggcccgggagccagggcagcatgaactcctttctctgaaatttcgaggcctccttgggttccctgaactccgggctgatgttcccaggacccagcaccaggagac

SEQ ID NO: 434386 - DNA, 122 bp, Homo sapiens
ttggtgacctggacttaggtcccagatgggtgaggccaagccttgctgccttcttctcagcggtggttcctggggcacagaatgagaatgctaaacagcttcacccttaagaactaccagct

SEQ ID NO: 434387 - DNA, 122 bp, Homo sapiens
aggctgaggcaggagaatcgcttgaacctgggaggcagaggttacagagagctgagatcgcgccactactctccagcctgggcaactgggcaacaagagggaaactccgtctcaaaaaaaaa

SEQ ID NO: 434388 - DNA, 122 bp, Homo sapiens
ctgtcagtatataaggaattcactgatttttttgacaattacccattgtattccattctacggatgtaccataatttatttaactaatccctgttaatagaattgagttttgttttttccag

SEQ ID NO: 434389 - DNA, 122 bp, Homo sapiens
acaattagaataagcccacccaaatcagagattaaatgattctatgaactaaacatgtaacgatgaaggagggctggagtgaaaaagatacaggagagtaaaaaggagctataaagaaaaac

SEQ ID NO: 434390 - DNA, 122 bp, Homo sapiens
gttcctgagggatgccctgtccatttccaatgcacataccgtggatttctacacagaatccgtgtgggaggagctggtcgacttgccaccggagacagtgctggctgcgctgaggaagtcag

SEQ ID NO: 434391 - DNA, 122 bp, Homo sapiens
cctcccccgggaactgcatcggccagacgttcgccatggctgagatgaaggtggtcctggcgctcacgctgctgcgcttccgcgtcctgccggaccacgcggagccccgcaggaagctggag

SEQ ID NO: 434392 - DNA, 122 bp, Homo sapiens
ggcgctgtcggtggtgtggctttggctgacacgaggtggagaggatcttgttgacctgaccgtataaagtagcagtgaggccttacaagtagttctaggcctggaaaggaaagggaaagaaa

SEQ ID NO: 434393 - DNA, 122 bp, Homo sapiens
tcttcaagcctccatttcccttcttggaaagtgaggttaggatgaatgagatcgtcccaacgtaggtgcacaaaaagagctggcttgcaaagtcccagaggtgggttggataggacagatgc

SEQ ID NO: 434394 - DNA, 122 bp, Homo sapiens
gaagcttctgtgagctcagccatttgtaatttgacctctatgtgtctaaattaagctcaccgggcaaaagtgactgtatggtagaacttgggtttgattatccctgctacccctaataaccc

SEQ ID NO: 434395 - DNA, 122 bp, Homo sapiens
ctccctgaagcggggaaatgagtgagtcaaagacacagactcacaggcagcggttggcgccgggcacacgaaccggccgagccctcctgctagccagcttcgggcacctttagtgcgccctg

SEQ ID NO: 434396 - DNA, 122 bp, Homo sapiens
gctccgactcgataacgtgataattcactcaggggcacggggaagaagatttcccaactgcggctaaccaatgttgaagacctgaaaacagccacttgggactgcttttatgttcagctgtc

SEQ ID NO: 434397 - DNA, 122 bp, Homo sapiens
gggcagtaagcaaaattttaaaaataatattattcccattgtcaccttgaaacagcagagcggatcagctcagaatcaaattgggtagcaagcatactcatttcccagatcactacacctac

SEQ ID NO: 434398 - DNA, 122 bp, Homo sapiens
cctccccgctcggggtccagaaaagcgcactgcttccgctcccttcctccttgataaacacgtccctgtcctgccccagatggccagcggggtcagaggctggcctggcgttgaccgcccgg

SEQ ID NO: 434399 - DNA, 122 bp, Homo sapiens
tcataaggaaagcaagtgttgagctggcctaatgacacctccacattaccgtcattaggacgctgaaaccgggacacagatgcgtagagcagaatcatgagcaaggcgtgtccgggacagga

SEQ ID NO: 434400 - DNA, 122 bp, Homo sapiens
caagtaaggtacacattattttagcagtcttccttggggaggacgtggggcaagcacaagcgtagcgttaggcctgagactccaccccagccgtctctgagcccagttcagcacgcacgcgt

SEQ ID NO: 434401 - DNA, 122 bp, Homo sapiens
gcgcagcatcgcaccgcgcgtctcacggacctcgcggcccgcctgctgctgctgcagggccgctgcctcgccctccaggctgcggttgtgcacctccagctgccgctccttgtcgatgtagc

SEQ ID NO: 434402 - DNA, 122 bp, Homo sapiens
tttcaagatgccgaaaccttctccttaattatttctgctcacatactcttccaatgagggcgtgatgcagcacccgcctcctccccaaccagatgattccggaaagtacggtgctgcaaaag

SEQ ID NO: 434403 - DNA, 122 bp, Homo sapiens
tagatttttgttgttgttgttttcccttctgttaacctctaagcacactgccttgctgtgcgctgacttcagaaaactacagctagagggcacgtgaacgctgagcacagcaggtaaagagc

SEQ ID NO: 434404 - DNA, 122 bp, Homo sapiens
cgctgctccctgtgtccggcgcgagtggagctgttgtaaaatggcggccgaagctcacgccgctggcagcaaacccgatccagttccactcgcctccgagcgcgctcccggtgcgcgcgcgc

SEQ ID NO: 434405 - DNA, 122 bp, Homo sapiens
attcttggggcctcctagggctctggtcagcgaccctaggtgctgtgagcgctcaggggacgtgtccaggccccacaggggtggtgtaggggatgtcttcctccttgccccatttccaggag

SEQ ID NO: 434406 - DNA, 122 bp, Homo sapiens
gaacaaaatctaaaccatacattcacgtacatcttttcaactcagagctccaaacgcagccgccaaccacacaactgcccacaatcacagcggtagcgcctactcttaattttgaagctaga

SEQ ID NO: 434407 - DNA, 122 bp, Homo sapiens
caaagagatgagtatggagagaaagactgaaaaagagatgggggactgagaaaaaagagacggaaagactgagtgtgggaacaactgaggggtactgaagatatgctgaggggcagaaagaa

SEQ ID NO: 434408 - DNA, 122 bp, Homo sapiens
attgtcgtctgccctgcttacaatgctacaatggcactgcatttctctaggacaaagcctcgctgcctttgtgtggcccggcctgtgtgcacactctgcagggaaccctcttccccaccgcg

SEQ ID NO: 434409 - DNA, 122 bp, Homo sapiens
ttctttcctgcgggaaacccccagggcgtgtgggactctttgaggagacagagctcactccgggggaggtgagggcagacgaggaggggaactcacgggaaggtaggaaaggggtctcgttt

SEQ ID NO: 434410 - DNA, 122 bp, Homo sapiens
cgagaaagaaggggaacagatcaggcaaaggagttagataatgtcccacctctccccacacgccgaagagagaaggaaacaggctccccccaccaatgggccctcaagccacccaggctccc

SEQ ID NO: 434411 - DNA, 122 bp, Homo sapiens
ggacatcagggaggcatcctgattgatactgggatgaggtcccagtgctctgggccaggacgcagaagagtgaggtgaggtcacaggtggggagaggggagcaggaggcgccaggacatcct

SEQ ID NO: 434412 - DNA, 122 bp, Homo sapiens
actatttgcaggagtgagtgtgagtgtgtttaggagtaaaggagatggagggaacatggccgcaaatcaggagacctttaatctggtccttattgcaccatatcttaatgttgtagatttgg

SEQ ID NO: 434413 - DNA, 122 bp, Homo sapiens
ggccttttcactctttgattttaaaggtgctgcctctgttttcttatctctagcagacttcgttgtaaccgaaggctggccaccccgggaagtctcggacaacgacgtgtttcttgaggtac

SEQ ID NO: 434414 - DNA, 122 bp, Homo sapiens
acggctcctccacccaggtgacgctgagcaggctcagggtgaagcccagggagatgcccacggccacgggccctgcgggccgcagcaccgacagcagcagcgatgcccgcatggcgcccgga

SEQ ID NO: 434415 - DNA, 122 bp, Homo sapiens
cagcacaggccccagctgagccgtgaccaggcgtctgaccacagagccggcgagatggcacgttggtgcagctctgaggcactgcttcaatacacggttgtgttagaatgaatacgcctcat

SEQ ID NO: 434416 - DNA, 122 bp, Homo sapiens
tcttgccctctgtgctgtcgctgccgtgtgctgccgtgtctgtcgctgccctgcagtcctcgtcagtcgtggaggaaaaggtaaaacccaagaggtgtgtccactgtggtgctgggggacga

SEQ ID NO: 434417 - DNA, 122 bp, Homo sapiens
aaggataccagcccaaagggttactaagatttcatactgttcccattctcaaccgtctggcgattataactactttagatgttccaaataagtcagtgtgagctaccccacaaaaagtactc

SEQ ID NO: 434418 - DNA, 122 bp, Homo sapiens
tagtatagcctagccaaattgccagaagagctgggtgtggttgttcatacccataatcctcgcattttaggaggctaagtgggaggattgcttgaggccaggagttcgagaccagcctggga

SEQ ID NO: 434419 - DNA, 122 bp, Homo sapiens
tgggggcgctgacgctggagcagccgggtagggtctggccgggagggtgtggactgggaacgtagggtcagaagctgtggaaagaaaactgaagtggaaggcggggaacctgagatagaggc

SEQ ID NO: 434420 - DNA, 122 bp, Homo sapiens
acaggcaccccctgagctcaaactccatatgttagacaagactctcccatgaatctcctccgtagaatcagagcactaagttgctgcccacacatcacaatccaccaggctgcagtctttgt

SEQ ID NO: 434421 - DNA, 122 bp, Homo sapiens
ccccgggaggtaggtagggggcccgaggcagggagatgccaactcactggggctgcctcccgggtgggctccgcggcggcggacgggcgggaggaggggcgcgggcccagggccggaggacg

SEQ ID NO: 434422 - DNA, 122 bp, Homo sapiens
tcacgcagattaattttcctaattgttattcttagagctaaactgaatttttcctaagtacgtatcatctgtatcacagaagtcacatgaaaattggagatgtgataaggggtcaaagtcca

SEQ ID NO: 434423 - DNA, 122 bp, Homo sapiens
atttccacgaatcctctcagatcagcctttctcttcaagcctagaaaaattccagtagcacgtcaccgcgcccgcccgcccgcttctgccaaactactgggcttcctcttccctaagacaga

SEQ ID NO: 434424 - DNA, 122 bp, Homo sapiens
tccaaaaacgagagagaaaaaaaaaaagaaaccaaaaaactcacatgtaccccatagatacgtatgactaccgtttgtcaataacaaaagaaaataaaatggcaaccacacacacaaaaaag

SEQ ID NO: 434425 - DNA, 122 bp, Homo sapiens
gtcctgataataccatcaaaggagagaagtaaaagacaaactagatgacatgaagctagccggaggcaataataacactctgtgttacatgcatacattgtcaagcattaaggattaagctg

SEQ ID NO: 434426 - DNA, 122 bp, Homo sapiens
gggcggcagggtcttttgttgtcccctctgtgcaaataaatgcagatgtgggttaccctccgcccaccgccctcccctcaccccagaaacaaaaggaccccggggctcgcgccttggcgcgg

SEQ ID NO: 434427 - DNA, 122 bp, Homo sapiens
aaagcatgtacaagagcggtctctagggcagttctgcgtagacgccaaagtacaggaagacgtgcaggaactttgtgccgtcgacccttgaacaatgcagggttggggcaccgacccccgaa

SEQ ID NO: 434428 - DNA, 122 bp, Homo sapiens
ggagggggcccaggcacggtgctgcccgccgtccgcgccgcgcggggccgcgggtgccgccgccactgatcctctaaacgcggtctccccgcactctcccgggccgggggatgcagaatggt

SEQ ID NO: 434429 - DNA, 122 bp, Homo sapiens
gcccctctcatcctccaggtccacgatgatttttttacgagtctcccagcagcatttaaacggacagttcagcagctcttttgcggctggggacaccggcctgtcggttccccctgccctac

SEQ ID NO: 434430 - DNA, 122 bp, Homo sapiens
agtgtagagcctttgtttcacaagaagccagatagtaatttcttctccaggaaatcattccgtaagtcagaatttctcctctgtacccacccataaatgataatacaggccgtattttacct

SEQ ID NO: 434431 - DNA, 122 bp, Homo sapiens
cttagccaacccaggggcaggaagcagaagaacctttcagtgtgatcacagagagagaggcgcaggacagtcttgtgtgtcccgcaggagtggccagtgtccctcatagacctcaagagcca

SEQ ID NO: 434432 - DNA, 122 bp, Homo sapiens
ggccccagtgtctaggttggcaatcccctcgtgtcccaaggaggtgagagcccagtgatccgcagcttttagtgtccaggtgggcatggagatgcaggatgaggcctgtcccagaccctgat

SEQ ID NO: 434433 - DNA, 122 bp, Homo sapiens
ctgacaagtgaccacaacaaggaggagcaatcaatgagttagtttaccaccataccaccacgggtttccagggtctgaatacattccaccccttgtgaactgccttctctctctgagtatgg

SEQ ID NO: 434434 - DNA, 122 bp, Homo sapiens
caggtcctttagtctgttgttcttgaaaactaaagatacatacctggtttgcttggcttacgtaagaaagtagaagaaagtaaactgtaataaataaaagtgtcagtgactcatttatttga

SEQ ID NO: 434435 - DNA, 122 bp, Homo sapiens
ctacaggcaggtggcctccagtcagctgctgacccctgccgagaggcctggaggcttggacgacagatcccccccaggctcctctgagactgtggagctggtgcggtacgagccagacctac

SEQ ID NO: 434436 - DNA, 122 bp, Homo sapiens
ggcgtcccgggcgaccgtgtcgaaggacggttcaggaggctcgtaggggtgcggcaccaccggtagaaaatccttgatgaaaacggaagtgtagtgagccggggcggggggccccagtgctg

SEQ ID NO: 434437 - DNA, 122 bp, Homo sapiens
agctgtccctgttcggggtccgcggccgcgtggggacacttgagggctgggagagagccccggaccagaattcggaggcgacagtgtcatcatccccaatatccttagtttttcccatccta

SEQ ID NO: 434438 - DNA, 122 bp, Homo sapiens
cacacacacacacacacacacatatatgaagtaaactatattttaataagatacataaaacgtatcaaatataacacacaagatcttatacaatctttacaacgactttgcaattatggtct

SEQ ID NO: 434439 - DNA, 122 bp, Homo sapiens
gacgcccgttgccaagtggaccgtggtctagcggtagcgttagtgtcagggaaaaacacccgctatttagcagaccgggaaagggagtctccctttccctgggggagtttagagaagactct

SEQ ID NO: 434440 - DNA, 122 bp, Homo sapiens
cggtagccacaaccctccggtagcggtagcgtaaccccgttcggtgatccagccgcacagcgcaacgggtacaaagaaccccactggctaaggccgacctaccagggcttgggggaggggag

SEQ ID NO: 434441 - DNA, 122 bp, Homo sapiens
gttttccctgccgtcagcaagagattccaagtagatttggcaaggtcttcctgatctctacggtcagacattgtgtctatgtgcacgcacacagacataccgtgccatatcagtatagggaa

SEQ ID NO: 434442 - DNA, 122 bp, Homo sapiens
gacaggacgtgggcgtgccgggagctcgccggagcagctggtccggctctgggcgcccagcggaaccagggctgtactcacctggatgccggacccgccccctagagaccccgccccctggc

SEQ ID NO: 434443 - DNA, 122 bp, Homo sapiens
tacagaaaagcagaaatcttaaaaacctccgattaccacgattatactacataaacagagcgcagtgcgctgccccaggcagcctccctgtcacgtggaaacattttcggcgtgcccgtcac

SEQ ID NO: 434444 - DNA, 122 bp, Homo sapiens
aaggagggtgttggaaataaatgaagaactggatcttgtcctcttgctaccattagctcccgagaactccgctctcagggtgcacactggacccacgatggctgctctcgccttgcgtctgt

SEQ ID NO: 434445 - DNA, 122 bp, Homo sapiens
aaaagatgatatgatttttaatgcaatcatacacaactgttttcacattggaaataatcacgaggaatcaataggtttaggctaactgactgattggttttatttccattgttaatttcaag

SEQ ID NO: 434446 - DNA, 122 bp, Homo sapiens
ccgagtccagctgttcacttactggctgctgtgagacctctgcccgatgacttccagtcccgcagccacctcaacctctgcatctgcggaacccgagcgcagattcctgcttctcccagctt

SEQ ID NO: 434447 - DNA, 122 bp, Homo sapiens
gcaattcttggcctaagtggctatttgcagactcccctctccccacaggcccggaggagtcgcagagtggctttgtaacagtgcgttctccctgcgtttaccccagtgggttctacaggctg

SEQ ID NO: 434448 - DNA, 122 bp, Homo sapiens
tcgcagcggaggccgttagggtgtggagggcgcgggaaggtgggtcgcctgccactggggcgcgggcagatcggaccgctctgtcccaactggtcgagaccgacctagtcctgacgacagga

SEQ ID NO: 434449 - DNA, 122 bp, Homo sapiens
ttttcttccataacatcctggcaatagtggcaggcagggagatgttcatattactgagcacggttttgacttgatattagaatatatatttatttgctcagcttttttttttctcatcccta

SEQ ID NO: 434450 - DNA, 122 bp, Homo sapiens
aaactttattagacactgtcactgtgctttcatgttatttttattacacacacgcgcgggcgtgcgcgcacacacaccctcccccccatccccccaacggaaacaagcacacacccgggacg

SEQ ID NO: 434451 - DNA, 122 bp, Homo sapiens
ctggtggggaggagaaaagatccctggagagggcagtgggtgcagggcacgtagagccagcgcctcctctttcccagtcttgttcagagttgcccctgaggcaaaacccaagatgaggctgc

SEQ ID NO: 434452 - DNA, 122 bp, Homo sapiens
actccaaggagaaaggcggcggtgcgtgttgctgcgagtgggacgcgcactggtcggtgccggctcaggagccggggtaatgagctgcggagctagttcttctccgtcttgggcgctagttc

SEQ ID NO: 434453 - DNA, 122 bp, Homo sapiens
atagcaagcgtccagaaggaggcgggacttccgggccaagcgagccaattccggccgcgccggaagtctctactgaggaaagctatgaggatactctgttcgtaagctcccggtgaattttg

SEQ ID NO: 434454 - DNA, 122 bp, Homo sapiens
gttctggggcgggggctgccgggcgccccgagtggagaaaggcgaggaggtttgccgtcccgggctgtcggctgagaccccaccaaaaacctccagactttgtctggtggggacagatctgc

SEQ ID NO: 434455 - DNA, 122 bp, Homo sapiens
acatggtgaaatcccatgcccaggctgctcttgaactcctaggctcaagtgatcctcccacgttggcctcccaaagtctaggcaccaagccaaaaattaactaatttaagaaatcaaacagt

SEQ ID NO: 434456 - DNA, 122 bp, Homo sapiens
ggtggggcctccccatccctgccccacagacccctggaccccccggtccctggggctgtccgtctgttcctgggcaccagcaggggccacgcagagttgggaccctccccggctggagtcac

SEQ ID NO: 434457 - DNA, 122 bp, Homo sapiens
tcgtctagggcagaagggaggcctggtcagcacagctcctgggcagccgccccaggtgcacgtcctgtgacagcccgccccaccccaggggccttcagtgcccccacgctcctggatctgac

SEQ ID NO: 434458 - DNA, 122 bp, Homo sapiens
gctgtggtcacgtccccaccgtcacgtctccgtttttataaagtgggtccctgggtatgacgtgatgtcacatgaaatgccttattatgcaccaaacattctgtaaacccccagagcaacag

SEQ ID NO: 434459 - DNA, 122 bp, Homo sapiens
ggaccctcaatctcctcggcgtctttggaagatccgaggcccaggactggtgccaggtctcggaagctccagggggagggggcggcgtgaacccaactcaccgagctccgggcgccacttgt

SEQ ID NO: 434460 - DNA, 122 bp, Homo sapiens
cggggcccgggcgctggagggggcggggcccgggcgctgggcggggcgcagatggctgagcgcaaccgcgtccccgcatgggatccttccgccaaacgggccgagtaaataggcccgccccc

SEQ ID NO: 434461 - DNA, 122 bp, Homo sapiens
aatgatcgaggtgtagaggttggagggtcgtggcccagcggcttctgtcccagggggtggcggcgcgggcccgggggtggccatctgggtcccagcccttccttccctgtagcaggggcgga

SEQ ID NO: 434462 - DNA, 122 bp, Homo sapiens
gtaaatacaaaccacttagactggacttcacttgggtctcaatgacccttcctgccccatcgtccctgaaaacctctatccttccatcgttcctaacattatggagcaccgactgtatgccc

SEQ ID NO: 434463 - DNA, 122 bp, Homo sapiens
ttccatagcttagagtgcaccatagtactaatctttaatacaaagtcctatcaaacttaacgatagtaaaacttccatgcttacttcctatccataactcttactcctgctataagcaaaac

SEQ ID NO: 434464 - DNA, 122 bp, Homo sapiens
gaacccgcagcccagacgggacagtcaaccaaagcgggatggagagaggacccatcgcggcggaggctgcatagttttggttaaccaaggactgcctgggctgatctagactcatttatatg

SEQ ID NO: 434465 - DNA, 122 bp, Homo sapiens
cacaacagtgacacatgtttgagcttctctcgcactagaaaagcctcatctttccccctgcggggagaagctgcccacagaagcagcgagaaggcaacggttcctgcgtactgccctgtcct

SEQ ID NO: 434466 - DNA, 122 bp, Homo sapiens
ttctgtgtgcttacatgtctgtcaggacagcccggctccggccatgccctttgcacatcccggcctcctgggaacgcggagaacttcgtgcctgctgtccagttcttggcatccgggagctc

SEQ ID NO: 434467 - DNA, 122 bp, Homo sapiens
attctccagaaggatctacatgtcaagggcagaattcttcattcctccaagcaactgcaacgatggtgaaaataataaaacaagaacagcagcagaaatagcaacaagtcctatcactatta

SEQ ID NO: 434468 - DNA, 122 bp, Homo sapiens
atatcaccccctccattttcccagacaggaatacctaaggccaaacctcatgcccatcctcgggttgcaacaagtaacgtttacttcagcaacaaagtggacctctctagagattatttgtt

SEQ ID NO: 434469 - DNA, 122 bp, Homo sapiens
caacctcccgacagtggcacatccttcccaagcgccctctcccaaccagcccacaaaacacgtggacaatcgagagcaccccaacgagcaatagcagagaatgccagaaggtaatcactcag

SEQ ID NO: 434470 - DNA, 122 bp, Homo sapiens
tccgaggactgtgacgaccttatctgaggaaggtgcaccctagtcatcagaggaacgagtcgctgcaggcactgtcaggtgtcgaggtaaaactctgagactgagggaaatagagcgccctg

SEQ ID NO: 434471 - DNA, 122 bp, Homo sapiens
tcccctcactccccactgccattcatccagcgctgtgcagtagcccagctgcgtgtctgccgggaggggctgccaagtgccctgcctactggctgcttcccgaatccctgccattccacgca

SEQ ID NO: 434472 - DNA, 122 bp, Homo sapiens
tgcttgagggggaagggctggtcctttttggccatcctgacctacggattaagtgcatgtcgaaattttaacaagtggcggcttgcaggattagccaactcgggcaggtcattaaagcctcg

SEQ ID NO: 434473 - DNA, 122 bp, Homo sapiens
accccaaaacctaagacatacaattttaagtggcaaaaatgaaacctaagcagagtgttacgggaaaggcttcacagtgatagtaactgtcccctgagccttaaaggataggggtagggcta

SEQ ID NO: 434474 - DNA, 122 bp, Homo sapiens
gagttttcttcttgcgtcaccccagcgtgggcaccccggcccgcccccctccacctggagcgcctctgccttgcccccagacccaccagccaggagccagaggagggaggctgaggggcggg

SEQ ID NO: 434475 - DNA, 122 bp, Homo sapiens
gcatcggaaggccgcgtcgtaattgcgggcaaccaatcgtaccagagcagggcaagcccccgccctctggctcggtggaaggcctccgccaatggcagagctcccatcgcagagcctgcggg

SEQ ID NO: 434476 - DNA, 122 bp, Homo sapiens
gtggccgctcctggtcatctccagggctgatggctgcggccgcgattctcagcgctcacccggtcccatgatccggccaagccctaggagctcccctccaagatccctagctccgcttcctg

SEQ ID NO: 434477 - DNA, 122 bp, Homo sapiens
ttggaaaagcttgcgctggtgacggaggcaggtgcttccgaaaggtcgtagcctcaggatcgccggctcccgcggggccgggcacccctccgctcacacaaggctcgcggtcccgcggcggg

SEQ ID NO: 434478 - DNA, 122 bp, Homo sapiens
ttgatttgattttctctggtgttttcactagttccggcctttggcgctctatgacgtcaccgaagtgacggagcggaaaagcgcgagaagcggcttggttccttgtacgcagaggcggtagt

SEQ ID NO: 434479 - DNA, 122 bp, Homo sapiens
cgagaaattgcactcccacacccctgggttgcaatgggcaagctccctccttggctcaaacgacaccccttggaatttacgcagatttggggatccaaacgtttacgactgaacactgtggt

SEQ ID NO: 434480 - DNA, 122 bp, Homo sapiens
gcggggggccgacgaggaagtggaattggagggcctggagccccaagacctggaggcctccgccgggccggccgccggcgccgccgaggaagccaaggagttgctgctcccccaagacgcgg

SEQ ID NO: 434481 - DNA, 122 bp, Homo sapiens
ccacccctccgctcagtccgtggtctccaggaggtctgaacccgacttcaaagctgggaacggaaaacgccagaaaagaagaaaaaacacaacatccaagtcctttgtgcaggaacgccccc

SEQ ID NO: 434482 - DNA, 122 bp, Homo sapiens
agtccttagaagggtccaacttctagcctgagggcctgggggcttccagggatctgcagccgagcggaagaccggtcttgcgtacagcgaggcctacgagagctaagtgggctgagggtccc

SEQ ID NO: 434483 - DNA, 122 bp, Homo sapiens
gtttcctttccccattgcaaggacggagttcccaatacttactgccaaggatgccttcagcgtgcccaggttcctggatgtcccccaaaaggatgaatggtaccaggattggcagaagtcct

SEQ ID NO: 434484 - DNA, 122 bp, Homo sapiens
gcgccgggctctagctgtttccctcaggcggcctgttccacgccaggattagttttgcttcgcagatgggccgtggtggtgagaggaagcaatcagtatggaaatggagaaatggcttacca

SEQ ID NO: 434485 - DNA, 122 bp, Homo sapiens
ttgagcggagtcagaaacatgactaggtcacgatcacaaccccgtgtgtgccagggtgaccgagactgggtgactttatggtgtttcaacgtgtgggttttgactgattatattatgggttt

SEQ ID NO: 434486 - DNA, 122 bp, Homo sapiens
caggacggggagctccacggcttccgcgcccctgctgagcctcagggctgctcgttccggcgggagcccagctacttcgagatccccacgaaggagaccccgcagccgtcgcagccccccga

SEQ ID NO: 434487 - DNA, 122 bp, Homo sapiens
ggtagacaggacgtgctcaccacgggaacacgtgctgctgggccgggctagggggccagacggaccctggggagtaggcaccccccggatggagcgcaagcgaagcatcaggtgagatccca

SEQ ID NO: 434488 - DNA, 122 bp, Homo sapiens
gggcccctcgccagcggtgagagctcctggcactggggtgcatcccagcctctgcggggccgctgcgttccagggaactctcccagcaacctgccctataaaaatgtctttcttccccagct

SEQ ID NO: 434489 - DNA, 122 bp, Homo sapiens
aaaaaaaaaagaatcaagtgattttgctcttatctggagttgagacaagccagatgttctcgtgttgttttcataagcaaaagaggctaaactgatggccagaaagtactcctgctcatagg

SEQ ID NO: 434490 - DNA, 122 bp, Homo sapiens
tccttccttttcacggctgagtcatactccgctggatggatgtgccgtattgtgtttgcccgttccgctgttggtgaccactcgacctgtttctgccttttgggtttgtagtgctgtacacg

SEQ ID NO: 434491 - DNA, 122 bp, Homo sapiens
cttttctacatagacatagtaacaatctgatctctctttcttttccccacaactgagtcccgggctccatctcctggtagagtccagccctacagggctttgcgggtgttctccccatgtgt

SEQ ID NO: 434492 - DNA, 122 bp, Homo sapiens
tggcgtcatcaaccccaggtccgtctggtcttttttattcactgcatattaaggtgcgtgcggcctgtggctggtccctgtcctgcacacctgtatggcctggactaggcctgagcgcctca

SEQ ID NO: 434493 - DNA, 122 bp, Homo sapiens
gtgtttttctccaggctgagacagaattcgtgcgcagcgcgcgtggctgcctggcgcaggcgccgctgcagaggccctagtgtccctgaggaatcccgcggctcctcaggaccaggaggcag

SEQ ID NO: 434494 - DNA, 122 bp, Homo sapiens
ggccgactggcagagaaggctagggacttggccaatatcatgcagccttcatgccttattcgggaaaggtgctccaaataggaggaatatttggaagaaatcccaatagggatttggagaca

SEQ ID NO: 434495 - DNA, 122 bp, Homo sapiens
gtccactttcctcctctatttgagcctgggaatgcgatctcaagaattccctctcctccccggccctcctaaatgagaggttcagctctctctacctctctgatcctctgggggtaacttga

SEQ ID NO: 434496 - DNA, 122 bp, Homo sapiens
cacctgagagccccatcctgtttctgggtaaccgggcgggggtcttaagtgggtaatccccgccctgttgctacgtaacgcggtgggctgcagccaccgcgttgccaggtaactgactgcac

SEQ ID NO: 434497 - DNA, 122 bp, Homo sapiens
gaccagcctggccaacatggtcagtcccttgtctctactaaaaatacaacaattagccaacgtggtggcatgtacctatagtctcagctactcaggaggctgaggcacaagaatcgcttgag

SEQ ID NO: 434498 - DNA, 122 bp, Homo sapiens
aaaagagagaagcagggactctctgcaaggcctgagtccctgctggtgtgcttctcgcctcgcagctggaatcccaggttccacccaggaagaggaggggccaggctcctccctgttgcaaa

SEQ ID NO: 434499 - DNA, 122 bp, Homo sapiens
gttgtctagaccagagttgtcaacctcagcactcctgacatttgaggccagaccattcttcgcggtgggggctgactgtgcactgtaggatgctttgcgacatccttggcctctacccacta

SEQ ID NO: 434500 - DNA, 122 bp, Homo sapiens
ctgcggtagaggctgctggcccggcagctgctggttgccatggcaatgaccaatgataagcgaccaagctcagggggaggggagatgggcgaagcaagctgcagggtctggaggggagtgaa

SEQ ID NO: 434501 - DNA, 122 bp, Homo sapiens
ttcttttgtatcaaattactctgaccatcacattcctcttatattagcacttcctggttccgtaaggactggaaatagacattcgggatccccaaaaacaaacaaagcaaaacaccaaggtt

SEQ ID NO: 434502 - DNA, 122 bp, Homo sapiens
cccccgccgacctcgccctcgggccatgaggctttggcccggagctcctcgcctctgagtcgcgcaccgcctgctccagccccagcgccgctcggccactgattgcactctggccgctgaag

SEQ ID NO: 434503 - DNA, 122 bp, Homo sapiens
ctgaagttgcttctcttcttgctgaagggttttgcctccacccactgtgagtgcaaaacacgttgatgtcagcataatgtagagaggcaactgaccaaacactacccagtactcctctctga

SEQ ID NO: 434504 - DNA, 122 bp, Homo sapiens
ccgcgacgcgcgcccagcctcacctctccgggcaggtccaggcagcccatggtggggatgcgcccccctcggcgtctccccgcacgggccccaggctcagccagcttctctcgcagctcgcg

SEQ ID NO: 434505 - DNA, 122 bp, Homo sapiens
aaatgggccgtcttctgacccggaggccgcttttttaagtagggatgtggatgatggttccggtagtccacactcgccccatcagctgagctcaaagagccttcctagccagaatctaagtc

SEQ ID NO: 434506 - DNA, 122 bp, Homo sapiens
cctcggcgcggtcctgaagagattaaaggcgtcaaatggaccgctccacacctgagctgccgccaagctaactcaatccgagccggcgcatttgagaaggcgcctgtgagggtcgctcctca

SEQ ID NO: 434507 - DNA, 122 bp, Homo sapiens
gcgcaggaaaagggcgagcaggtgcctcagggacaccacttccaaccgcacgccgatcgccggctccaccataaatagaaacgggtggtctctaattggcctagctctaattggcctagctg

SEQ ID NO: 434508 - DNA, 122 bp, Homo sapiens
agcaaaacaaagagggaggtggcgggggacacagccaccagcccagccgcaggtctccagcgtggcctgggcgccctggcctccctggccgggcagcctcggaacgcgagaggagggggttt

SEQ ID NO: 434509 - DNA, 122 bp, Homo sapiens
cccgcaggaagggtgagcaggcggccaagatgaccttgtggcctcgaaacttgaggctgtcggccacaatggtcacgtcgcagaaccgctcctctgcccggagctggttcatgttccgtagc

SEQ ID NO: 434510 - DNA, 122 bp, Homo sapiens
cagggagtgagctgactcccaaaggcagtgcatgtagtgtgactttcaggcccagcacgccgggcccaagttgatgagaagctggtctcactgaagtattttatcaagtctccagactggct

SEQ ID NO: 434511 - DNA, 122 bp, Homo sapiens
gagcggggcgggtgaggaaggggctgagggggctgtgccggccatggagctgtacctcggcgcctgctccaagcctgccaaagtcgccgtcaccaagacggtcgccagcgtcctggccgcgg

SEQ ID NO: 434512 - DNA, 122 bp, Homo sapiens
agcggggggtgggggctctgatgccctaccaggtctccagatgggtgcgtgctccaccgtcgtggtggacgtgaggatggacttttcccgctcccgatcccggtcccgctctcgatcccggt

SEQ ID NO: 434513 - DNA, 122 bp, Homo sapiens
acagcactgcaggcagtgggaacagcagctgcagaggcccttggtgggaacagggacagccgggaggctggtgtggctggaagggaggagtcttggagagaggaggatgaggagggcgcagt

SEQ ID NO: 434514 - DNA, 122 bp, Homo sapiens
ctgtagtgtcctgggtccgagcgacgcccgcttcccgcaaccgggagagccgattccggccgctgccctcggggggctccgcatacatctagtagcgccatgaccgcccagcacccagagat

SEQ ID NO: 434515 - DNA, 122 bp, Homo sapiens
agtcctggcatgggtcgatgctggcgtccaggttggcggccaagaagcgagcggtgcacgcgaagtcttgcgctcaggacagccttcaggacaggctccgccgccggccgcgaccgggccca

SEQ ID NO: 434516 - DNA, 122 bp, Homo sapiens
cggtgagccagacgacggcggcggcggcggctactgctgcgagacgggggcgcccccaggcggcttcccctactcgcccggctcgccgccctcgtgcctggcctacccgtgcgccggggcgg

SEQ ID NO: 434517 - DNA, 122 bp, Homo sapiens
agagtctgaataggaagagaagcctggaggacagggctggctttggggatagcagcagggcgagattctggacaattcgggggtttggtttggcttggcctacagggtcagtcatgccgcag

SEQ ID NO: 434518 - DNA, 122 bp, Homo sapiens
gtttcgggaggaaggtgcatgctgggagcggcggcgcatgctgggagctgtagtctgcgacgcaactcggccgaggtggctccctggtccctgaagctcccagagcccgcgtgttcaggcgg

SEQ ID NO: 434519 - DNA, 122 bp, Homo sapiens
tgctgcctcctggcggccaagcgccaccaaagcgggtgatccagatgcgctgtggctttgcgggcggtgtgggtcaccagagaaagaggaccaggcggagaaggcttaatccgggggatgag

SEQ ID NO: 434520 - DNA, 122 bp, Homo sapiens
ctacttaagtattctgggcaagaaatgatgagaggctgtctctgatcaccctctacaaaacgcctttgcttattccttgaaatttgggatgagaggatttagaaaaaaaaatggttgtactc

SEQ ID NO: 434521 - DNA, 122 bp, Homo sapiens
acctgaacagtcagtaacacatgagtggaaagaaactgaacacccagggacaccagagaccgttcactgtagaggaaggaggcaggtataactcataaggtgatcttcctccagtcccagag

SEQ ID NO: 434522 - DNA, 122 bp, Homo sapiens
tctgtttggccccaactcacttgtttcgcagccagatgatctcaggcttggggttgccttcggctctgcaggtgaagtacacggtgttccccgaggtcacatctgcgtcctggggctcggag

SEQ ID NO: 434523 - DNA, 122 bp, Homo sapiens
accccattcttggaagctggaaagatctgagagctctcctgaggcccagcgagaaccacacggcacttctcccccatcgggagtctctttctccttcctggcatacgttccatcccttgccc

SEQ ID NO: 434524 - DNA, 122 bp, Homo sapiens
aatgttgtactgtggtgtgcccccacatacacaggcattttctcccagcatttcacggctcgttttttaccccgacctggcgaagcccgcttctctcccgatttagcagctgcctcaggttt

SEQ ID NO: 434525 - DNA, 122 bp, Homo sapiens
tgaagatagaggcagagatcgggacggcgcttttacaaaccgagggatgctgaagattgccggcagcctccagaagctgggagagaggcctcaggaggaaccagagtccggaactgggggac

SEQ ID NO: 434526 - DNA, 122 bp, Homo sapiens
cacatatacacaactgaggtgccctgccattggcatcccctgggatccttgattcactgacgttagccatacgaatccagtgttcaaactcagaataataagcttagtttctgcattatcag

SEQ ID NO: 434527 - DNA, 122 bp, Homo sapiens
cctgcacccacccggaacccgcgccgcccgcgagcgctgcgctcagcccccgctcccgcccgcgcctctccgccagcagagggagctggctccagcctcggccagccccagagaggggcccc

SEQ ID NO: 434528 - DNA, 122 bp, Homo sapiens
cgagcgcgcgtcgcgcagcaaagagcagccaagagttgccctggacagactcctggcatccggagaacctgaactccggcgctgcaaggggcgcccgtggccctgcaggaggaggttctgca

SEQ ID NO: 434529 - DNA, 122 bp, Homo sapiens
tttttattttctgaaaggagatgggactgaaaaaacgacttttaattgcatatgctctcccgagccccgagctttttggagatgtggtggctgcaccctggatgaccaatagaccagagacc

SEQ ID NO: 434530 - DNA, 122 bp, Homo sapiens
ctgaggggacattcggggaatttgctatttgttacagcttaccatttatgttctcttaagcgaagaagaagggggtcacttcaaaagggagaggggaaatggggcaaggagaaaaaggcttt

SEQ ID NO: 434531 - DNA, 122 bp, Homo sapiens
ttggcaagaaacatgatgtctcggaggcggtcccctgggtctgtgcctgggggtcaggaccgggcctgatttgagcctcctttttgaagatgatttggccgagtgtggaccaccggaaagtt

SEQ ID NO: 434532 - DNA, 122 bp, Homo sapiens
ctccctgctgcctagaagcagccatcaagcagcccgagagtgtggcagacatggcttaggcggcctgatggagaagcccttgacacataggattgcagaagtcagaggtcttggccttaggg

SEQ ID NO: 434533 - DNA, 122 bp, Homo sapiens
agcaggtggcagcaggagcacacattatgtgagaaatgctagcgaaagcctctccaggaccggggaggtagctgagcttacactccatggttttcactgctgctgaggacccgaggaataaa

SEQ ID NO: 434534 - DNA, 122 bp, Homo sapiens
aaaccccgaaggccttttttagggtccccccaaaaccaagctgccaaaaacagttaatcccgctttaaaaaaaaaaatgaaaaaaaaaaaatctccaagcgccctgtgtgtgggtcgcctcc

SEQ ID NO: 434535 - DNA, 122 bp, Homo sapiens
tggtatccagcccagccatccaaacctccctggagaaagcctggagttagaggagagccacgggtctcggcatccgccatgccatggcacttggtggaatggtagactcttagatgtgtgct

SEQ ID NO: 434536 - DNA, 122 bp, Homo sapiens
cttgacagagttcttttttctcttgagatcattttgtccttttccatttggcttccatttcggagataaagctatcatcaataaaccatttgaggaagagacaaaagaaagattatatcctg

SEQ ID NO: 434537 - DNA, 122 bp, Homo sapiens
ggggggccattcgattcgcctcagttgctgctgtaataaaagtctactttttgctaaaagcgtcgtgtgttcgcgcctttcccgccagggggagcgggcccggggcggaggcggggcccagg

SEQ ID NO: 434538 - DNA, 122 bp, Homo sapiens
tcgtagacgagcacgttggcgtcgtaggccactccgaactggccatcaatactgtgggctcggggaaaccgagctttttgcacaggtctgcaccctctcagagtacccccttccccaaccaa

SEQ ID NO: 434539 - DNA, 122 bp, Homo sapiens
gggtggcctcaggtcccgttgataatgtggcgtcttatggccacagtcggttctgccaggcgatgttctctatctcaacactcatgctgggcagttgctgcgtctaaccacacaggggaggg

SEQ ID NO: 434540 - DNA, 122 bp, Homo sapiens
tgtgagaaccctctgtactttctgttcaattttgctgtaaacctacaaagtctactcttccgggggagaagggcagcagcgtgagagttggctctgaagagtggtgagtcagaagagacctc

SEQ ID NO: 434541 - DNA, 122 bp, Homo sapiens
accagctaagggtcttagagaagagctgcctcgtaaagctaagcaacaataaccagggaacggtgggcatgggccctgatagacaaggcaggtcttggctttttaagccatagaattggatt

SEQ ID NO: 434542 - DNA, 122 bp, Homo sapiens
acaatatggagattccttaaagaactgaaagtagaactaccattcaatccaccaatcccacgactgagtatctacccaaaggaatagaaggcattatatgaaaaagacacttgcatacacat

SEQ ID NO: 434543 - DNA, 122 bp, Homo sapiens
cgggaaggagtcaattttcagcgagggagatgtccagtggtcaacgggatatgaggagagcggtttgacataacattcagattcagaaggaagtggtatgtggctgctggttgaagccagca

SEQ ID NO: 434544 - DNA, 122 bp, Homo sapiens
gacacgcccttcatccctgaccgccaggctccagccctgctggggacactcaaggcaggacgccgggtccccccgcatggcctttccgcggagctctccgccgccgaggacgcccaggcctg

SEQ ID NO: 434545 - DNA, 122 bp, Homo sapiens
cacattcctccaggtccaccccgccttgcaaaaccggctcaccagctgggtgctcaggttcgggatctccagcccgcccccttgaggtcccctgggattagcccccctcgacctgcgtcagg

SEQ ID NO: 434546 - DNA, 122 bp, Homo sapiens
gaaaggcttttgttattgcttttcccctaagggtttcgcgtttccagagaacgctggccgcggattggccggcgcccgctgcgagcactcgcgtctgattggctgggccgaggcggccgccc

SEQ ID NO: 434547 - DNA, 122 bp, Homo sapiens
tgtagcccaacctgaactccagggtcatcagccaccaactcgaaaacccaaggccccgttcgctgaatgtagcccttgcctggatcccaagaaaatgccaagggacccgaggacactcacca

SEQ ID NO: 434548 - DNA, 122 bp, Homo sapiens
tctctctaacagaaggcccgagtagaggaagcctccaccccaaaggtcaacaagcagggtcggagtgaggagatctcagagagtgaaagtgaggagaccaatgcaccaaaaaagaccaaaac

SEQ ID NO: 434549 - DNA, 122 bp, Homo sapiens
cacgccgatggctgggggcagggactcagccagtgtcctcaatccaggaccttgtgggaccgcccggcagccagtgcttccgcaaatctgaagggtcccatttgcctcaaagcggcgagacg

SEQ ID NO: 434550 - DNA, 122 bp, Homo sapiens
actggttttttggagtcctccacttcccggatactcagattctctaaagggatgattccacggggctccttatcctacagaacagttgaagagaggaagtttaagatcacagtttaaggaca

SEQ ID NO: 434551 - DNA, 122 bp, Homo sapiens
tctagtgtcagaaactttgagctccattgcactgcaggtgctgtcattagtcctgcaagccgtggcgggccagccccgccgcgctgcctctcggggtcaattagccctttgcctgcccaggt

SEQ ID NO: 434552 - DNA, 122 bp, Homo sapiens
tgcagagtaggggacagggcgggagcccctcgggctgagagaacccctagaagcatcagccgccccgcgctcctcactgagctcctggctccctttccctcctccgttccgccgggaaagct

SEQ ID NO: 434553 - DNA, 122 bp, Homo sapiens
agcaatagacatcacagcccacgtccgcacgcagactcggacacgcgtgctcacagcccacgtccgcacgcagactcagacacgcgtgctcacagcccacgtccgcatgcagactcggacac

SEQ ID NO: 434554 - DNA, 122 bp, Homo sapiens
tcggatccgccgcgacacagcagctattcagacgtcgggggcgggggccgggccgctgagcgagcagagcaatgccgccctcgcgtcccctcccggcccacgcggctgccccggccgccctc

SEQ ID NO: 434555 - DNA, 122 bp, Homo sapiens
gcctctatggggcactgagtgaccccatccgccgggctctacgcgattacaagcaggtcacggcttcctgcaggaggcgggattactatgacgacttcttgcagcggtgagccagggcacac

SEQ ID NO: 434556 - DNA, 122 bp, Homo sapiens
gaggcggaggaaccggtgttcgccgccgccgctgcttcagcttattccttgtggcctctgcgggtcctgcctcagccatgatgatccacggcttccagagcagccaccgggatttctgcttc

SEQ ID NO: 434557 - DNA, 122 bp, Homo sapiens
aatcctgggtacggcacggcctgtcccgaactcatggccgcagtaaacggggtggctaagcgtcccgcaggcaccgggggtggtgggggggggatgcgccgaggtgcaacggcaggaggccc

SEQ ID NO: 434558 - DNA, 122 bp, Homo sapiens
ggcggggcgggcagagggccggggatggcaggttcaaccaacgggtgggcacgtcgtcctcgcgaggaggcgtgccctgcggccgggcgtgcggtgtccgcggcggcgcagggagggggagg

SEQ ID NO: 434559 - DNA, 122 bp, Homo sapiens
ggggaaagcagcagaggaagggcaatggtttggaatagctgcaaggaataaataaagtggcgatgagctgtgccataagagcgagggcctcatcaagttgggataaataggatttactgagc

SEQ ID NO: 434560 - DNA, 122 bp, Homo sapiens
gaatcaccaatgtcttctttcagggagatagacagaaatgcaaagaagtggattgtcttgcggaagtcatagccggatggaagataagctgcacctagaacttggtgttctaaattccgaga

SEQ ID NO: 434561 - DNA, 122 bp, Homo sapiens
ccaccggcgctgcgctccatttctcaccgggccttagctgccttcccgcagggcagggctcgggacctgcagcccgccgtgcctgagcctcccacgccctccgtgggctcctgtgcggccgg

SEQ ID NO: 434562 - DNA, 122 bp, Homo sapiens
ttcacgtggagtatgaagaccacgagctccatggagcccaacgagatgatgcgggagatccgcaaggtgctggacgcgaacagctgccagagcgagctgcatgagaagtacatgctgctgtg

SEQ ID NO: 434563 - DNA, 122 bp, Homo sapiens
tgtccacccagaaagacactcaccccatttccctcatttctttcctacacttaaatacctcgtgtatggtgcaatcagaccacaaaatcagaagctgggtataatatttcaagttacaaacc

SEQ ID NO: 434564 - DNA, 122 bp, Homo sapiens
agcttaaccctcgtggcgctggatggtgggtcaccacctaggtctggcacggtcatggttcgaatcctgatcatggacatcaatgacaatgctcctgagtttgtgcacactccatatggggt

SEQ ID NO: 434565 - DNA, 122 bp, Homo sapiens
caccttttcatgatgataccaaaggtctaattccctcacttgtctctctattgctagcctcgcctttgtctcagttactcctctcttcagggatcttcttcatcccaccacttctcaaaatt

SEQ ID NO: 434566 - DNA, 122 bp, Homo sapiens
cagccaagagctgctaactgggtcattaacctccaaaagcaaagcgaggactgtaaggcccgctctgcctcccttcatctcgccaataaaagtgcctcagtgtgagggggaagaaaaagccc

SEQ ID NO: 434567 - DNA, 122 bp, Homo sapiens
caggtgcgcgggtctctcctgcgggctcagcgggccggcgccgcggcgtctccagcagagcgcagcaaagaagacgaagcctcctggggcctttcctcgccgcctggagcggggcatccttc

SEQ ID NO: 434568 - DNA, 122 bp, Homo sapiens
cttctctcccctcccctcctttcttccctcccactaccccctctccctgacgcagggtttcggtctcccagttaatatagggcctatggccattccaaggcttctcctagaacctccagatc

SEQ ID NO: 434569 - DNA, 122 bp, Homo sapiens
cttcccgatcctttcccctgggacccgagggatccctccccccaagtgccgggtcctccccgcggctccccaggggctcctccggccgccctcgctgactcagcgtaatccgagccgcggag

SEQ ID NO: 434570 - DNA, 122 bp, Homo sapiens
catgttgaaggacaggctactggggtcgatgcgcacgttctgcaggggaagggacaagtacgcttgtgaggagagtgatgagggccccacgccccaccacaaggctccggaacagctgcccg

SEQ ID NO: 434571 - DNA, 122 bp, Homo sapiens
ggccgggccgggccgcgccgggagctggaggcggccgatgttccccggcgcaggctgagccgactctgacagccgccgcctccggccccccgcacacaccccctccgggcctcacagcgccc

SEQ ID NO: 434572 - DNA, 122 bp, Homo sapiens
aaatatgactcctattggaaagtggttagccttagcactgagaagattggctcatggtcacgtagcgtatctcccagatggaagtctaatgtcttgacaattagtcaatagaaagataaact

SEQ ID NO: 434573 - DNA, 122 bp, Homo sapiens
ctctttcacaaaacctcccggctcccccccagtctccctagtcatcttagatgaggaagtcgagcgcaccccagggctgatcgcacaggaagagcacctgggctccagaccctagtaactaa

SEQ ID NO: 434574 - DNA, 122 bp, Homo sapiens
gctctggaggagggtccctgcttcttcctacagccgttccgggcatggccgggctgggggcgtcgctccacgtctggggttggctaatgctcggcagctgcctcctggccagagcccaggta

SEQ ID NO: 434575 - DNA, 122 bp, Homo sapiens
atccaaccgcctatctatgataaaaaccaagtctacttattctcattcttgctttcgaaacgttctcaagctcattccagactagcctgggtgttgtcccactatgtttagaaagttccatg

SEQ ID NO: 434576 - DNA, 122 bp, Homo sapiens
gggctggacactccagctgaaccaacaagaggaaaccagaataagaacaggagagcagaccgccatgagctgccataaatcagcacaggagactccccagcgaggagtaggaagtaccagcc

SEQ ID NO: 434577 - DNA, 122 bp, Homo sapiens
gcaccttcagtaaaagggaagccagctccagggcagagcccagatgctggccacgccaaccgcgggctgaagggagaggtttccaggggcgggatagggtgccttcgtcacagaggacagcc

SEQ ID NO: 434578 - DNA, 122 bp, Homo sapiens
tggccatctgggggacaagtgacgggcagctggggtcagggaggccgtgtggagctggcacgggtgtgggatttattccatcagcagttactgagcacttaggacatgcctagaggagggga

SEQ ID NO: 434579 - DNA, 122 bp, Homo sapiens
atcccaattcctaagttgatgggtttaggagatggcgcctttgtgggggtgattcagtcacgagggtggaggcttcatgagtgggattagtgccgtcataacagaggctctcacgagacccc

SEQ ID NO: 434580 - DNA, 122 bp, Homo sapiens
gcgccctctcgtcccccgctgcggaggtaactggttcgggaggttcattgtggaaggctgcgctcggccacccactcccttagctatgctgtcccttcccccagaggaccttgggcaggaac

SEQ ID NO: 434581 - DNA, 122 bp, Homo sapiens
tatgcacttatagaaacatttgaaaaataaattgtctgtgggatggacagagtactttagcgttatttcatagtgacctgtattttagtacataaaattcaggtgagatcatagagatcaag

SEQ ID NO: 434582 - DNA, 122 bp, Homo sapiens
gctcctcctcgtgcccgttccccagggcttcacgcggagaagccgagcaccgcgccggagcgccctcggccatccgttccgtcccttgttaatttggagagaagcctcgaggggctgagtca

SEQ ID NO: 434583 - DNA, 122 bp, Homo sapiens
tgctgaaatgctgaaaaatccctttgcttataacaggactggctgaaatcagtgggaacccgtatggctgacagcaatccgcacagaacgagcttgctgatgtcacagcctgaatttccacc

SEQ ID NO: 434584 - DNA, 122 bp, Homo sapiens
aactaaagggaacgcctaacggagcgatggatctccgtgttcccagcaaagcagggagcacggagagtcaaagctaacatagagcccaaccgacgcttaaaggaggtgttttgggttttgtt

SEQ ID NO: 434585 - DNA, 122 bp, Homo sapiens
aagcagatgtctgtacagatctgaccaggtaacttggggttgaagcagaaggggctgacccgtctctcagagtccagtgaagtagcccccaagaagactggggcaaacatagaattaagaca

SEQ ID NO: 434586 - DNA, 122 bp, Homo sapiens
tcattttctgttctcgagtctccttttttcagtttttctgaatttctttggactcttctacgtatcttattctttctctttcattttctatctttgtgccctttgggtcaatttcccacctt

SEQ ID NO: 434587 - DNA, 122 bp, Homo sapiens
tgtcatttgagatggaatgcttgtgttctttgtcctgtgaagggcattggagtacgacaccggggtgagtctgcctccttcccctccctgggacgtatgacagtgtctggaggcacatttgg

SEQ ID NO: 434588 - DNA, 122 bp, Homo sapiens
cggcaggagggggcaccagggagcggagccctggccctcctgacgtcctgcccgcccacgcgtccgcaggtgaggtgcatcctgacaggtcacgagctgccctgccgcctgccggagctcca

SEQ ID NO: 434589 - DNA, 122 bp, Homo sapiens
tcaaagaggtaatcataaaatatcccattgttttttatgttgactataaaatattttaaacgtattgggttaagtaaatcattaaaagtaatttcatatgcttttatttttaaaaatgtgga

SEQ ID NO: 434590 - DNA, 122 bp, Homo sapiens
aagctgggcatctattcacagttccttgttacttgatagtgactaatgtgaacctagtcacgctgaccttcacaagtactgaggaaatatctttcttcttttctttggaagcagtgaagctt

SEQ ID NO: 434591 - DNA, 122 bp, Homo sapiens
aacctcaagcttccggagcatgtcggcgggagggacttaacagcggaacccaacattccccggtgaagttttccagccggagtcagggtcagaggcagcctttcctactgcgcaggctcagt

SEQ ID NO: 434592 - DNA, 122 bp, Homo sapiens
agggggcggtccccaggctgagtcacgagagcccgggcttccgtggcaggagccgggggtcggcaagccccagccctgccctccctccgactctggactccgtcgccgactgggtcctccat

SEQ ID NO: 434593 - DNA, 122 bp, Homo sapiens
acccgaaccgacccgggcttcacaggcttcgtggagagcagctgccccgccggcatcttccggatgaggctctctagacaacaaagccttctacgcggaagttactggtgacaggggaagga

SEQ ID NO: 434594 - DNA, 122 bp, Homo sapiens
ggcgggcggtgccagcaaccaaccccattggctggctcgaggagggggctcgcgagacagcgccggcccccggcgcgagactcccagtccagtggccgcctggaaattgcggagtggaatgc

SEQ ID NO: 434595 - DNA, 122 bp, Homo sapiens
ttgcacttggggacgtggtagtggttggggcagttactgagcagccctagctgtagcctccgcctgcaaacctcgccccttcagtctgagccccgcccccgcaacgcccgggcccaccctct

SEQ ID NO: 434596 - DNA, 122 bp, Homo sapiens
acttccgatatatcctgtcagtcaaagcaaattacccgaacaagtcagattcatcgggggcggggtggggaatagaccacacccactcaacggggacagtggcagtgtcatatcgcaaagag

SEQ ID NO: 434597 - DNA, 122 bp, Homo sapiens
atgcatgaatacagtcattattcaaattagctaaaacacctaactcattcgggtgagtctcgccagtccctctgggctgactgtcccgccccgcgcttacacccgggagcgtcgggcgggag

SEQ ID NO: 434598 - DNA, 122 bp, Homo sapiens
gagcctggagccagctgtagggccggccggtggcctggaaacaaacagtcccacataggccgggaggaatatgcgcgcactgcctgcctccattgttttctttcctggaatagctgcttgtt

SEQ ID NO: 434599 - DNA, 122 bp, Homo sapiens
actaccaggccctggccggggtccagctgcaggatcttgttgtagttgtccgtgaggcgccgcgggtgctcgcacgaggcctgcggcagctgcggagcgtgacacagcgggctgtcgggcac

SEQ ID NO: 434600 - DNA, 122 bp, Homo sapiens
aagctggacgtgactgtaaggggtcatggctgcggaatccagcaggggcattggggttgacgtgcactcagcgccgagcttcttcgtagttcctcacccccttggctactatgggctggtcc

SEQ ID NO: 434601 - DNA, 122 bp, Homo sapiens
aggatggacttacccacgtgatccggccgggcccgggctttcgggagaccaacgtcacttcgtggcctctggcattcagcagctgggttagggctgtcccaatgaagcctgtcccgccacct

SEQ ID NO: 434602 - DNA, 122 bp, Homo sapiens
tgtggtgtcctctgcgagatcctcttaaaaagctggctacgcgcaggcggtttctgtgcacggagccgtagctgtcggagcggttagttcgatttcgagctcgaggtttcccccgccgccag

SEQ ID NO: 434603 - DNA, 122 bp, Homo sapiens
actcgctggacctgcagaacgtcagcttctcagctgtcaggacagtccgtgtgctgcgaccgctcagggccattaaccgggtgcccagtgagtgacccctcagccctcagcccctgaagaga

SEQ ID NO: 434604 - DNA, 122 bp, Homo sapiens
taggggcgtcctggtttccggtttgggtgtggccgcatggcgtgctgtggtgcaggtggccgaagggggcgttactgttgcgactggcatccgcatccggcagatgtagatggaaccaaagt

SEQ ID NO: 434605 - DNA, 122 bp, Homo sapiens
aaggcataaagaccccccacagccactcactgctgtactagccccttagtcctcattcctcgtctctactgccaaagaaaaggagaaattcacatttgttaagcctctgctctgggccaggg

SEQ ID NO: 434606 - DNA, 122 bp, Homo sapiens
atcatttgggagcgaatccgtctcaggttccagccaaggtgtagggcgaggggattggcccgtgcgtcgggccaggctcagtaacgccttctccaagtggatggcggggtggacacgcgtcc

SEQ ID NO: 434607 - DNA, 122 bp, Homo sapiens
agaggcctggctcctgagtatagaaccacttctcctagcacggctcggaattctggctgccggacacacgtgacaaaccagcgagtcacattattccagatccggcgggcaggtgggtctag

SEQ ID NO: 434608 - DNA, 122 bp, Homo sapiens
tcacctgggcacctgaccagctgacgcgcgtttccaggagccatatctgtgccgtggggtcgggttgccggcctaaggagcaggatctgtgcgcggagcccctcgcgggcccgtgcattctg

SEQ ID NO: 434609 - DNA, 122 bp, Homo sapiens
gagcaagtaggctcaggacggcgtatccggggaattctgggaaatgtagttcacacgctgcgcggggtaggggcacttccgctcccggggggcgaggttgctgcagtgcattcggtggtagt

SEQ ID NO: 434610 - DNA, 122 bp, Homo sapiens
tgtgttttatcatcaagatctgaagaggagttgcagaagggacgttccccatacgctcagcgcgagacagccttccagaagggcccgaagacaatgccagcaaatcgcgtcccggagcagag

SEQ ID NO: 434611 - DNA, 122 bp, Homo sapiens
gcgcatgcgccagacctccccgcagcaggtggcctccgcacggctccgcccccgggtcgccgtaaccctctcggtgccagagcgggtaaatgacagcttagccctgaaggactcttcccccg

SEQ ID NO: 434612 - DNA, 122 bp, Homo sapiens
agaactcattttcacttaatttgttctttaaagaccctatttccaaatataaacacattccgaggtgttaaaactttaacaaaggaattttaacgggacacgtatcagcctgtaacagtgtg

SEQ ID NO: 434613 - DNA, 122 bp, Homo sapiens
gggctcgggacctgcagcccgccatgcctgagcctgccaccccctccgtgggctcctgtgcggcccagcctccccgacgagcaccaccccctgctccaaggcgcccagtcccatcgaccacc

SEQ ID NO: 434614 - DNA, 122 bp, Homo sapiens
cccggatcccccagcggcctgcccggagctggtctccagtccccgccgtagtccgacgcacggccctctcctggcagcaagctcccagcggccagtctgaagccaattctgttcaggcggcc

SEQ ID NO: 434615 - DNA, 122 bp, Homo sapiens
gagaggatgcagcgatctaacggctgcattctaactaagtcaggcgagcccgcagccggccggctgccagcaagcccccagaccccgcggcctgctgctgtctgccccgctcccggctcggg

SEQ ID NO: 434616 - DNA, 122 bp, Homo sapiens
acacctggcacacagcctggcggatggcactcactgctgttttcctccgtgacagagaaccgcagaacttccttcacagttggcgagctattcagaaatgatacccgagtccgaggctcggc

SEQ ID NO: 434617 - DNA, 122 bp, Homo sapiens
ggtcaggagcgaggcgcccagcctgtgtctgaatcctcctactgaccctggggatccgtgcgacttgatcttagatattggtggtgaagcgccgctctccttgacagcatccaggaaaggta

SEQ ID NO: 434618 - DNA, 122 bp, Homo sapiens
tctgtccacccctaccggccggcagaggcaggagccctggtgatggaagtggaccatgaccggcaggtggtgcatgtggagacactggggctcactctgcaggagcccgaaacactgctggc

SEQ ID NO: 434619 - DNA, 122 bp, Homo sapiens
cgctccgggatgacaggctccggtgccgacccaggtcctgcgcccaccagtcgggtgcagcgcagccaccgcccgccgtcaccccaccgagcccgagcatgccgggaattgtagtcctgcct

SEQ ID NO: 434620 - DNA, 122 bp, Homo sapiens
gccttcgcccctttccaggcttacttctcaacgcaagaagactctcacgtgttgctacaccgcaagtctccaattaagagtggaccggcaagcgaatgcgtccttaaggcagggcttttcaa

SEQ ID NO: 434621 - DNA, 122 bp, Homo sapiens
tagaaggcgactccggcaacacacccgccctgatccactaggaacaaaccgctccgagcccgggtggtgggaccgatcctggagcccagatcaagccaagtccggccaaagctgtgtcgcaa

SEQ ID NO: 434622 - DNA, 122 bp, Homo sapiens
tctacgtgtgtacacggcactccatgtgcctgtggttgtgcttgcgtcagcctgggagtgcgcaggcatcagtggtgcttgggagcgaggcccctcagtctgcactgggatcatctgcactg

SEQ ID NO: 434623 - DNA, 122 bp, Homo sapiens
ttgtagaagtgatatgtgggtgttttctccttacacagagttgaaaggtgacgacaacaacgttggcactaccaatcccccaccctccagaggggtaaccagtgttaccagtttgctgtgtt

SEQ ID NO: 434624 - DNA, 122 bp, Homo sapiens
ccactcttttccacaggccaccacgcacgtgtacgtgaccattgtggatgagaatgataacgcgcccatgttccagcagccccactatgaggtgctgctggatgagggcccagacacgctca

SEQ ID NO: 434625 - DNA, 122 bp, Homo sapiens
gagctgccccagcggtagggggcctggggcggagaagccgctacagccgcggccgggcgacgctgacatctggcatccctggggtctcagagacacgggtggacagcgacgagggccttgtg

SEQ ID NO: 434626 - DNA, 122 bp, Homo sapiens
atgaattaacagaaactcactactttaggttacataaaaacccactgtaatctaaactgccggaaaaaattatggttatttggaagttcaagctaaatgattccaacccctccaaattttca

SEQ ID NO: 434627 - DNA, 122 bp, Homo sapiens
aaaccaaggccgggtaaagttatgtagggcccttaaagtcgcagagccaggaataaagtccggattgggactcgggtctgtgggtaatccaaggctgccccgcttacccttcaaatgctctt

SEQ ID NO: 434628 - DNA, 122 bp, Homo sapiens
cggggccccccacgcgccccgcttccccgcctctgcggccgctgctgctgcggccgccgccgccctacaaagaggcctggtgttgggcccgtcggactttgcgcagtaccagagccagatcg

SEQ ID NO: 434629 - DNA, 122 bp, Homo sapiens
ctccctcctctgtccctggggtttagcagccgctctgggcagccatgccgccctcgcctgcgtcctgcggccgtcccgaggtgtcacgctgtcaacaacacaaagtcgtagttgacgtcgac

SEQ ID NO: 434630 - DNA, 122 bp, Homo sapiens
accctccttttgtgagcggcgccttccccgggcggcctggcgcgcagggctcgggcactgcgccagggcccggaatagcctccctgcccggccgcccgccccacgccccggcggagccgcct

SEQ ID NO: 434631 - DNA, 122 bp, Homo sapiens
ccaccacctgctctttcctcaccgtcccattggtggatctacataagagactcacgaagacgttcacactgcagtgttaactgcgttagccatcccaggggtgcttgcagtttaagtcttcc

SEQ ID NO: 434632 - DNA, 122 bp, Homo sapiens
gttacatagaaataggctatagaagagtagaatcgtgtcgcggctcgagagcgagactcccgtcttggagccagcccagcccaacccagcccaacccagcttgacctagccctgacaggtcc

SEQ ID NO: 434633 - DNA, 122 bp, Homo sapiens
catccgacgctgcgatagctgctgctaaccacagggtcccctccacacacacccgagccccgcctcccgaccgcattggctcataccggcctcggcttcacgtctattggaaggaaccgctg

SEQ ID NO: 434634 - DNA, 122 bp, Homo sapiens
tcttcctacattatctcctctcaccaggatgtgtccaaggaacccctcccacccccaacccggcccatacctggcctttgaggccctcaatctcagcctggagccggctgatgttccggttc

SEQ ID NO: 434635 - DNA, 122 bp, Homo sapiens
ctcaaagggttaagcaggtgcctctccgggcgaggcgctattggccgagggctggggcggcgcggccgcggtcaccacgcttcgccgatcccaacttgggttcctgcggaaggcaaggcggc

SEQ ID NO: 434636 - DNA, 122 bp, Homo sapiens
atgagccaccacacctggccaaagcttgaagtcttgttgggggtgagggtggtcagattccggatatattcccacattaaagtcaacagaatttaggaggctgttgaaatcatctgtggaag

SEQ ID NO: 434637 - DNA, 122 bp, Homo sapiens
ctgcctcaccgctgggcccacaggcctcgcgccctgagtttccggctcctccctcctttgcgaacgctgggagttccgttgcctacaggccgttatttccgccttcaacggctggggcattt

SEQ ID NO: 434638 - DNA, 122 bp, Homo sapiens
gggaggtgacactgacagggaagacagacgtgagacaccttcctcccttacggttgggcccggccacctgtcctgcgactgcatcggctccttgtctgcatcccacagaagaacccacaggt

SEQ ID NO: 434639 - DNA, 122 bp, Homo sapiens
ttgggttaccagatagaaggcttggcctcagttttggcctcgcctttttgctctttctaacgagcacgaaggggcgatagggacgcggaggacacctttattcttggctggttctagcatgc

SEQ ID NO: 434640 - DNA, 122 bp, Homo sapiens
aaaacaacaggaagcagcttacaaactcggtgaacaactgagggaaccaaaccagagacgcgctgaacagagagaatcaggctcaaagcaagtggaagtgggcagagattccaccaggactg

SEQ ID NO: 434641 - DNA, 122 bp, Homo sapiens
cgcgctcttctcccggacgtgtaggttgaggagggcaccctggcattccccttctggcagcgggaggcagacggtcttttcccggacaccccgggcgcaccatgccttctcccgggccagac

SEQ ID NO: 434642 - DNA, 122 bp, Homo sapiens
tgtttctgtttgccatcatctgcctggctgcggcaggaactgccgaggctgctgctgttgcgcggggaagaatccccggcagcgcgactggagagactggggaggtcgagctgtgcgcgtgg

SEQ ID NO: 434643 - DNA, 122 bp, Homo sapiens
tcccacccaccagagtggctggagctgaaggaaatcccgctggctctgacctctcccagacgtgcagccccacttccaaacattctctctcagccggggccattacctactctcagatactg

SEQ ID NO: 434644 - DNA, 122 bp, Homo sapiens
aggcggtgggggaagagcacagacgtgtccaccacggtgctgtggatgacctgtgggcagcggcagagatcagcgcacgtggggcctgcgcaggtcctgctggagaaccgcgcgggacccgg

SEQ ID NO: 434645 - DNA, 122 bp, Homo sapiens
ccgtttgtcctccacccctcttttggggcgctccaagataacagaatcacctctccaatacgcagccgctctcggcgcgtgcttctcgagcgtcctcggggatttgcgtggctcgataacca

SEQ ID NO: 434646 - DNA, 122 bp, Homo sapiens
aaacaacatagcagtggcataaaaacagacatgtagaacagtgcaaagggatatagaacccgtaaataaatccgtatgtctgtggtcaattgactttttgataaaataactaaaaatacaca

SEQ ID NO: 434647 - DNA, 122 bp, Homo sapiens
agcttgacttagcacagtctactcagcccagaacctgtgagctgtgtagctactaccccccggtggtgggcaaagataagttcgagacaagacatttttaatttttttattttagtttattt

SEQ ID NO: 434648 - DNA, 122 bp, Homo sapiens
gccctataaaaatgtctttcttccccagctggtcctgtctctgctgtgctgacagagctgcgttgcacttgtttacgcgttacgctgagagtaaaccccaaaacgattggtaaactgcaggt

SEQ ID NO: 434649 - DNA, 122 bp, Homo sapiens
gttggtggcggcggagacagctgtgaagtgtgaggttctttgtctgctggcagctaggggcgacgaggcgggacgtcatggaagtgtaagtcttctcgggcgcgtcccttttcgcccgagga

SEQ ID NO: 434650 - DNA, 122 bp, Homo sapiens
tggttgcctcggtttccttttgggacaagcagtctgtgcacaagcgcacctggtttgcaacgcccagagcgtttgaaatgggttcaaagcctagggatgcgcgggctcctctctcctcccct

SEQ ID NO: 434651 - DNA, 122 bp, Homo sapiens
cgggctgagcaggtgactggagccgcctgggaaggacccaggtgctgggctgggcagggccgggggctgaggtgatgaatgggtggcacagggtgtctggctgccgcctgcctcctccgtgc

SEQ ID NO: 434652 - DNA, 122 bp, Homo sapiens
tccaggtaggagactagtgcagcttgagctgtgatggtggctgaggaaatgaagagaggtcgaccagttccagatggactttcgacaaagggagacaaactttactcatggacaggaggtga

SEQ ID NO: 434653 - DNA, 122 bp, Homo sapiens
tccctttcacgctgttttgtctcttcaccgtctgttctggatcatcctgtccagagagaccgttgggtcagagggttcctgtggacccctggggcgagcttaatgtccccgaaaactgcgtg

SEQ ID NO: 434654 - DNA, 122 bp, Homo sapiens
ggcttaccacaagagtttattctgtgatcattatgtgaccaaatccagtgagcctgctcccggaagctttcttccatgtctacattgaggaactgaggtttcttacatcttgtggctctttc

SEQ ID NO: 434655 - DNA, 122 bp, Homo sapiens
ctattaccagacagagaacgaggatgagagccccttcatctgctcccagccacgcgagaacggcatgcggtcctgcagaagcgtgcccacgctgcgcggggacgggggcggtggcccacctt

SEQ ID NO: 434656 - DNA, 122 bp, Homo sapiens
tgtaaatagaaatcctttgatagccactgggttaaaaaatcagacaagcatactcctttccgactattaacaacagttatttgttcctacccaatctagttgtgacatttctcctgatgatg

SEQ ID NO: 434657 - DNA, 122 bp, Homo sapiens
ggggcggcgcggggcccgccccccatcacaccccttccggccgccctccgcgccccggggcgcaccgcctgggtcccccgcccattctgcagaggggaaactgagaccgcccgcggggcgcg

SEQ ID NO: 434658 - DNA, 122 bp, Homo sapiens
cagtctcagtagcttggtagttaccatggctcccagtgctgtgcgtctgacgtcattctgcggcgctggctgatggcgcaatcagttgcggcgtcctgtgagcgcggggatgctgggaggag

SEQ ID NO: 434659 - DNA, 122 bp, Homo sapiens
aaaaacctcaaagtcagggtcttacaaacaagagatcagtagcatcatctttctaaataccgttcatgtgtgtcaaaccgatcgaaataggagactaatcaagggacaagaggcccatccac

SEQ ID NO: 434660 - DNA, 122 bp, Homo sapiens
gtctttgggagggtcccctcaaggtaaagggacaggactggggtgagggctggatcccagcgcaggaggtggagtgtttctgggtctcaggcaacacatttgtgttacgttacattctcaca

SEQ ID NO: 434661 - DNA, 122 bp, Homo sapiens
tctaccactttttccaatttaactatgtagcaccttcatttatgcagcatgccatcatatcgcttggcattaacttagagtgaacaatcgagtgttaaatttttattattcacaaataataa

SEQ ID NO: 434662 - DNA, 122 bp, Homo sapiens
ctcttcacagtgagctgagaccgaacctcttcacagccgcgcgtgggtgcggctttggggcgtggtgggagggaaggatagggaggccggctccgccccctcagggcgaccggcgcgcctga

SEQ ID NO: 434663 - DNA, 122 bp, Homo sapiens
ttaactgccccggacaccgcggtcaccattaacggaccctgcatttgagccccatcccctcgctgggcaaagaccatcgcccacacaccgctcacatctgctgccgagagcttccagaattc

SEQ ID NO: 434664 - DNA, 122 bp, Homo sapiens
cgtagtccttctttctcagagaccagcgtgcgaggcccaagggacccaccttccgtcacccgttctgctttgtttacagggtgtgtccgcagccggccaggtggtatccctgaaggtgtggc

SEQ ID NO: 434665 - DNA, 122 bp, Homo sapiens
taactccagggtcttggtcaggtgactcagcctcactatgccgcgaggctccctgggaagcgtagttctggaaatgcattaaaaacgccataggctcggaccggaagactactattcccggc

SEQ ID NO: 434666 - DNA, 122 bp, Homo sapiens
gagcaccgcctctgggggcagtcaggcactggacaagcccatcgacaatgacgcagagggcgtgtggagcccggatattgagcagagtttccaggaggccctcgccatctacccgccctgtg

SEQ ID NO: 434667 - DNA, 122 bp, Homo sapiens
aggtgtctgtacttctactattctcaagacctcctcaaccccaggcttctaaggcgagaccgatcttctgagaggcctctccctgtttcaaaattcggcttggggcgtaatcccacctagaa

SEQ ID NO: 434668 - DNA, 122 bp, Homo sapiens
taagcaacagctccggcttctgggcattttgtcgtgtttgctgaggagcccttacatcatcgcattccgtgttcacattccatgcagtgagtggaagtactgtttctcatgctgttgctgtg

SEQ ID NO: 434669 - DNA, 122 bp, Homo sapiens
gctctgggcccgggaccctcctgccaactgcaggcccacgggaatgctcggtgttggactcgcaccgcgctccacggctgtagccccgcccacagcccctacccacggctcccattggccaa

SEQ ID NO: 434670 - DNA, 122 bp, Homo sapiens
tctgcggggagagttgagcggatccctggggggttggtcctgggctagttttaaactctccggttgcatctcgcgtggccccaccgacggcgcgtctcggcgtagctcttggcgcgggctcg

SEQ ID NO: 434671 - DNA, 122 bp, Homo sapiens
caaacactcaccccttcctggagtcccggcgggacgggagaactggggactctgcgaaagcgctgcggagcgtccaagagctccccgtggagctgaggcaggaagaccgcgcactggctgag

SEQ ID NO: 434672 - DNA, 122 bp, Homo sapiens
atctggaggccccggggcccatgcaggagaccaagctaaggcttccttagtgagcttgcccggctctgctccttggctgcaaaagtctaaatgtctttcagtgaattaacagttcatttggg

SEQ ID NO: 434673 - DNA, 122 bp, Homo sapiens
agttaattttgccaaggtcaaggataaggccagggaggcaaaacaaaacgtgacaaaacacggaatcgctgaaacagtctgtggtctgtgcctttctccaaaggtgactttgagggcttcca

SEQ ID NO: 434674 - DNA, 122 bp, Homo sapiens
aagaaaaactagagcggcagtacggctctatccgctctagccggctcgccgtctcagtcccgtgatctcgttcctgaccttttcgatgttcagtaggctggtccctggagctaaggctgggg

SEQ ID NO: 434675 - DNA, 122 bp, Homo sapiens
aagaccttctcttctgaacctcagactcatagatacagcttcctattagtcatttcaacccggcaatggatctccagccattgcaaatgtagtccaactcaaatatttcctgaacaatcctt

SEQ ID NO: 434676 - DNA, 122 bp, Homo sapiens
ccccagcgctgacctacggcacaattgttcatgcacgagagccgccttatggggtgagtgcgtgactctggtgcgaggtttatgttcccagggctgacatgtctgggagcttcacagctgga

SEQ ID NO: 434677 - DNA, 122 bp, Homo sapiens
gacctggaataggataaattagttctagagcctctctcagacctagagtgagatctgctccgccgtcgctctctttctgatctacatcgggaagatacataccgagtatctctttcaagttt

SEQ ID NO: 434678 - DNA, 122 bp, Homo sapiens
ggcttccgatcatcttgctatttgcaaggaatcttactcacaaatcaatctaacaggccacggtgatattatggggatgtaaaagggactgaaatgatcaagagcgtcacgtgtcttccaag

SEQ ID NO: 434679 - DNA, 122 bp, Homo sapiens
gatataacacaatcatgtgtcctttttagtctcaagagtcaaagccctgtaacttaacggcgcaaggactttaaagacaatacagaaacttacatggatacaataacctttttaagtccata

SEQ ID NO: 434680 - DNA, 122 bp, Homo sapiens
aaaatataggggagagtgcagtttggctttcacgcctacctccaaaggagcttggaaggccgggcctgctccgtcagaggggccgctcagctggccgggcctccctccgtcggcatacatca

SEQ ID NO: 434681 - DNA, 122 bp, Homo sapiens
atccactgatagtaacgcagcagtgggagcctgagagacccttgattattctcatgctcacggcttcttgaataaagtggatgactaagtggacttaccatagtaagagagatcattagcag

SEQ ID NO: 434682 - DNA, 122 bp, Homo sapiens
tgccagccgcccgcccgcccggcgcagatgcacgcggctcgtgtatgtacatagacgttacggcagccgaggtttttaatgagattctttctatgggctttacccctcccccggaacctcct

SEQ ID NO: 434683 - DNA, 122 bp, Homo sapiens
tccgcctaccttggctatccccctctgagttcttgccttgattctcctgttactgtcccgcgaacccacatccctacaaagcaggaaagtatgcttgggagaggccaagtgagtggggaatc

SEQ ID NO: 434684 - DNA, 122 bp, Homo sapiens
caatgacaaaacccagggcatgggggcaagacggtggcctcggggatgtccccagccatccgaaggcctcagtccccagagaggaaaccaaggaacagaaatgtaaacaaaggagggagagg

SEQ ID NO: 434685 - DNA, 122 bp, Homo sapiens
taaacctatgttattattaaaatctgaatagcacttagatttgccatacgtgccacaaaccgtacatcatccgtactttgtgaaacacttatttttattacacaaaagccttgtaatgagta

SEQ ID NO: 434686 - DNA, 122 bp, Homo sapiens
cagtggcccgaggaacacttactttgaccacggtgactaacccgtcgttgctgtttgggtcggtctggatggcgaaccgtccagtaggatctccgccactgattctgtacactgcgttccag

SEQ ID NO: 434687 - DNA, 122 bp, Homo sapiens
aaatcagacagctaaccccggggcaatacgaaccattttcgcgccactcgctcaggaccgcgcagctgcacaaggagagtggtccccgtagcccctaaagcccccctttctcaaaggggatt

SEQ ID NO: 434688 - DNA, 122 bp, Homo sapiens
ctacaaatccacttggcctcagccacagtgtctttattcgtaaagcagaaacagtgggaccgtcagagcactgccgggcaggcgagagaagacaggaactgtatgaccacggaagttgttgt

SEQ ID NO: 434689 - DNA, 122 bp, Homo sapiens
gcctggggtgacttcacggctccactgtcagcaagcggccgtcccgtggtggatcctgtccgccctgcgaggacacctggctccatccacacctgggcctctgtctccagccgccgaggccg

SEQ ID NO: 434690 - DNA, 122 bp, Homo sapiens
agtacctcagcccaatccaggtctctgacttaagccactccgctccttccaagaaatgcgcgctgaaccaaaggtgctgcaggtttgtaagtagatggacagcagaaacagccaaatcactt

SEQ ID NO: 434691 - DNA, 122 bp, Homo sapiens
actgtcctcccctgtaaatcagaagcagggcaagtaaaagcttggatgtcttcgtctctccgtagccagaggaaatctgggcgcgcagagagatttggagtttcatcctccccgctcagcca

SEQ ID NO: 434692 - DNA, 122 bp, Homo sapiens
tcactgtctcaaaatgtgctttaataaatacaagggggaggaaatggatttgggaaggctcgttgtcagctctgcccctgctctcacactgcctctgcacagtggtgtaggggtcacacaca

SEQ ID NO: 434693 - DNA, 122 bp, Homo sapiens
atgagcagtgaagtagttaacaggatactttccaactctgaggggaataagaaggatccccgtgtccctaagttgagtaaaatgatagagaatgagtccccctcagttggccttgaaactgg

SEQ ID NO: 434694 - DNA, 122 bp, Homo sapiens
aagttacttggacaatagctcctcaaaccctgtctcctttacgcacggggggccacgccacgcccatcccaggtcagccccgccctcatttcggtcaggtaacccagccccaaggttcctcc

SEQ ID NO: 434695 - DNA, 122 bp, Homo sapiens
aatttacgtagagcatttatcacactgcttgaagcatcctaactactcgataaatgcggtcggtgttacagttataacatgagcgatgaatgcgtgcttccacagtggagtgccagaaagac

SEQ ID NO: 434696 - DNA, 122 bp, Homo sapiens
taagtatgttaaacaatgcaaatggggcctcagtctggacacagctggttcagattacagcgctcaccaactggctagactcctcacaacaatcttggggcgtctgccagggcccagtgctc

SEQ ID NO: 434697 - DNA, 122 bp, Homo sapiens
attattattattgttattattttaaattgaccactatcagaaaagcttgttatagccaggcgcagtggcccacacctgtaatcccagcactttgggaggctgaggcaggtggatcgcttgag

SEQ ID NO: 434698 - DNA, 122 bp, Homo sapiens
taacccagataggtttgccgagaaccaaatgacacaagggggagggatgtggagaaggagcgagagtgatcaaactgaggcactgaggatcaaccaagcccatcccagcactggtcttggtg

SEQ ID NO: 434699 - DNA, 122 bp, Homo sapiens
actgggcgttaggtgctcccggctggttccggcgagcagcccccacccctcgcccacgctcggggttagagaccccagcaccccacgcagacggcccgggcttagacctctccacgtcgctg

SEQ ID NO: 434700 - DNA, 122 bp, Homo sapiens
atggctgagcggtggtcctcagcaggtggaagatgctggggctgggtacggattcgcacccggccagcctcctccgccacctcgcacacagccgaggtccgcgtgtagccgcagagctgcag

SEQ ID NO: 434701 - DNA, 122 bp, Homo sapiens
tgcagtgccaaatgtcaagatggttgtatacaggagaagacgtccaagacacgtcttttccgagtgtcccagagctcagaactctgtgagcactttgagcttccccagacctctttcttccc

SEQ ID NO: 434702 - DNA, 122 bp, Homo sapiens
cgccggtggcagatgcccctggtggcaggctcaggctactgtgctgggtcccctctgccccgcacgccccgcgagcaccagcagggcctccccggcatgtggcggggccagcgttggcctgg

SEQ ID NO: 434703 - DNA, 122 bp, Homo sapiens
agttctctgttttgtaaatatggatcagagcaaacacttactgagtacttcctatgtgcccgacactcttctgagtaccttacatatagttattccttttatctcctaagtcatataagttg

SEQ ID NO: 434704 - DNA, 122 bp, Homo sapiens
gtattacctaattggtagcatcaggcactaacacattctaaagtacttggtcatctaatccgaaaatagtttagggtgcttaaaaggcttttaagcatcagtcatacaccaaagatctttat

SEQ ID NO: 434705 - DNA, 122 bp, Homo sapiens
atccagtgcaacctactctcctgactctccctgacggccatgtcgcttgggaaccctctccgagccacaaataattacctgctggaaaagcaagcaggctgtccggcaatgtttcatttatt

SEQ ID NO: 434706 - DNA, 122 bp, Homo sapiens
cacaactccttgcttggttcagagccttgaagaggcggatacaagaggccctctgggcaccgccgcccagtcccgcgcagccccctgcagttcccaggggcgcgagagagggcgacgtagag

SEQ ID NO: 434707 - DNA, 122 bp, Homo sapiens
gagcgttcctgaggtggagaacggtggccggacggagagactgcgggtctgagggactggcgggcgggcgggccgagcggcgccgccgaggccgggctgggccgagcccaggagcgcccggg

SEQ ID NO: 434708 - DNA, 122 bp, Homo sapiens
ttctttctagaagctgtcaagtcagattgcgtaggcactctcctgagtaggtgaagcgtgcggctggagaaagaaaaggaagaacaaggctctgacaatcacaattactttcttaggtcact

SEQ ID NO: 434709 - DNA, 122 bp, Homo sapiens
ggggccttcatctgggatttgggggtctcttaaaggcctgcacaaattttccagctgaggcgtgatgggggacaactgaagagagcagtagaaataacatccctcatctggtttactgccaa

SEQ ID NO: 434710 - DNA, 122 bp, Homo sapiens
tgaggagattcaaacacagatctgcccattgcctgagtctgtgattttttttcattacatcgtgctgctcccttatttccagaggtgttctgagctgattggggcatgggccaggtcaaggt

SEQ ID NO: 434711 - DNA, 122 bp, Homo sapiens
gcgatgacgtcctcaaggcgcgccacgtccgcccggcggcgcagctgcccagcgcaacctcggccccgcctcgatagccccggacccctgccccgcccgaccccgccccgccacgggagcgc

SEQ ID NO: 434712 - DNA, 122 bp, Homo sapiens
agtcgggagcgcgggggtcccgggcctctggccagccacggggcctggccatgaactttgcgtccgggccaatgctgcagtggccgggcggtggtgagccttccgttccccgcctgtccctc

SEQ ID NO: 434713 - DNA, 122 bp, Homo sapiens
ctcaggccgggggtgggaagggcttcctagcagagggcactgagcaggggaggccggtagcggcacagctgagagggaatacacttctagccgggcacagacccgaggcacttggtccaagg

SEQ ID NO: 434714 - DNA, 122 bp, Homo sapiens
aagtgcctttccctgtaacgcagaggcacacctgccttccctcgggaaacagcggcccgacgtgcgcccgcaacgcgtaaagcgtcaacagctgaaaccctcggaatcctccccgaacagaa

SEQ ID NO: 434715 - DNA, 122 bp, Homo sapiens
ggatttttaggggctcttgagctggaattttttggggggcgccgggaggtgtgctggggccgcagaccccatacaggaggtaagttagagaaccacacgcaggggagggatgctgctgcttc

SEQ ID NO: 434716 - DNA, 122 bp, Homo sapiens
tttccatctcaactcaccccaagtgactcgagcggcagctgctgctgagcctgtgcgaagcgctggatgcacaccacgaggcagatcaccaagcccgcgaccaatgggaccaaagcagcccg

SEQ ID NO: 434717 - DNA, 122 bp, Homo sapiens
ggtacaagactaatacatgcaaacagcacatctctttgtttaacacaaagactcacgtgtcgaattctgcaccccttccacatgcacagcattttagaactctgcaagatagccattttgca

SEQ ID NO: 434718 - DNA, 122 bp, Homo sapiens
gtagatgttcctatccatagggaaaactgacttctagaaagttcatcagcatctaatttgcgtatacagctaatccaagcacatgaaaagctacattttctttatgctgaatagtttcccaa

SEQ ID NO: 434719 - DNA, 122 bp, Homo sapiens
gtcttactagttatgtgtgaacccacctgatcatttttcccattgatttataagggctcacgttgtttttctccgtgcagaattgttgtttggaaatggacaagaatgtgtctttattatgc

SEQ ID NO: 434720 - DNA, 122 bp, Homo sapiens
aaggttgttggaaattaaaatgaattcatgcaggtgaagccctagcaggggatccacaaacggcagctgcacggaccctcctcgtcctcccaccaacccaagtcccatcccaccagacccac

SEQ ID NO: 434721 - DNA, 122 bp, Homo sapiens
cagctggagccacctcgcctggattcctgaacgcagactcttgacagaccgattgtgtaacggcattcctcccaaggaaacacgcctgccccctccaagaaggtgcgagagcttcccagaca

SEQ ID NO: 434722 - DNA, 122 bp, Homo sapiens
catcagaaggagtggcatggaggctttggagttaagaagatttaattcaaattatgtgtccggtgcctgccagcaatgagaccttggtaaggtttcttaacctctctgagctgggaccatac

SEQ ID NO: 434723 - DNA, 122 bp, Homo sapiens
cagccagtgggaagccctagatttgcgttgcgttcatcaattcaacagacatccactgagcgccccctatgggtcaagtcggcagctgggtgctctggaaacaaaaatcagtgcgatccagt

SEQ ID NO: 434724 - DNA, 122 bp, Homo sapiens
tctgggtccggcggggcacagccctgggcgctgccgaagccgccgccgccgcctccgcggcgagtacaggcggcttcccccggagcctgtgcagctccagctcctcgggggtggagaagtgg

SEQ ID NO: 434725 - DNA, 122 bp, Homo sapiens
cctcaggtgatccgcccgcctcgactccccaaagtgctggattacatgcataagccaccgcgcccggcctatgtacatttttgttgttgttgttgataggatggatatgtacactaacttcc

SEQ ID NO: 434726 - DNA, 122 bp, Homo sapiens
ccagagcgaggtggtgaggagagctggttgcgtgagtctcctcagctctgcttaccggtgcgactagcggcagcgacgcggctaaaagcgaaggggcgagtgcgagtcccctgagctgtacg

SEQ ID NO: 434727 - DNA, 122 bp, Homo sapiens
aataactggacagagcgatgcccggcggacaccccagtgcgcgtgcgtgggcgctatgcgcgctgtaaatgcagtgtgcgtaaccgggcgcgagagcatagattcttaccgcaaaccctggg

SEQ ID NO: 434728 - DNA, 122 bp, Homo sapiens
gtgctctggcctggggcctgctgggcttccgggagagaaatcagacctcagcctctcccacggccagaggccagtaggatcttacttagtgagatcctgcatgtcacacggggtagcaggca

SEQ ID NO: 434729 - DNA, 122 bp, Homo sapiens
tctgcgctcaaccttaaagggggcagtgaggtggcctggcactgcctggacatgatgtctcggcctattcctgagccgcagagccagaggaacggggggacgtttgtcagaccaggcacccc

SEQ ID NO: 434730 - DNA, 122 bp, Homo sapiens
aggggcacagacccgccacacccatttcctcagaggaaaccagcacaggcctgtctggagcgctgggctgatgggctgagcccgtcctcctccagcgagaccagagagaagcacacaggccg

SEQ ID NO: 434731 - DNA, 122 bp, Homo sapiens
ggtgtgcactgcacaaggggcctcgtctgggccaaggcaaagcatacctatggggggctccggtgggagggactgcggccaggatgtgggagggcagggggaggttctgcaaagtgctgggg

SEQ ID NO: 434732 - DNA, 122 bp, Homo sapiens
tctgaagctcgtacttttcctcccaccctcagctccctgaagagtgtgagtgcgtgcgcgcggagttttaaacggcagctttaaaaatagcaaaattatgttgtttctaaatccaggaggaa

SEQ ID NO: 434733 - DNA, 122 bp, Homo sapiens
cggctgttcgctgttccagtgggtcgtggcggtggcggcagcggcggttaggggatgtaacggtcgcccgcctccggcgtgacgatggcggccgtagggtccggaggctatgcgcggaacga

SEQ ID NO: 434734 - DNA, 122 bp, Homo sapiens
tgcaggcggctcctgacaccccgggatggtgcgggcggctcctgacaccccgggatggtgcgggcggctcctgacaccctgggatggtgtgggcagctcctgcactccctcttttcctctcg

SEQ ID NO: 434735 - DNA, 122 bp, Homo sapiens
tgactaaaggggaggcttccattcagcatttattttcccagctccagggtcaagacccaccgtggtcactggagtcctggcagtctgccactgcaggatgggtcctccagcacaattccata

SEQ ID NO: 434736 - DNA, 122 bp, Homo sapiens
tcctggagcttgcggaaggtcaccgaaatcgtgggggtatctgagagcttctggggcgcgcgggtgcaggggaaggggtcatgcttccgtggaagcggtggcctccaggtggagccgatgaa

SEQ ID NO: 434737 - DNA, 122 bp, Homo sapiens
tcctagttctctgaggacagggcctgtgtggaggaggctcccacggtgcatggaaaggtccgtgcctgcagctggtgggccctgctggctggcgcctctgcccttctacatccttgcagcct

SEQ ID NO: 434738 - DNA, 122 bp, Homo sapiens
ctgcttccggtagacatagcacgcagcgatggcgaccatggtggattctcccacaaagcccgccaggagggagcccacgcccagggtcgcaccgtgcaccctgcagatgagaacacaaaggc

SEQ ID NO: 434739 - DNA, 122 bp, Homo sapiens
ggatcccagatgggagggataacttgtgtaaaagtgtgaaacactagctgtgaagacactcgctgattcagaggacaatacatgatcttagtgtgagtgaagtacaggttgcacaagctgaa

SEQ ID NO: 434740 - DNA, 122 bp, Homo sapiens
cagtgctatggctgcaacattgtgaaatcaattcctagaagtcacaaagcaagaatttgacgtgaagggatgtccctcatttagaattcccttctggataagatactggggtttcattgcag

SEQ ID NO: 434741 - DNA, 122 bp, Homo sapiens
ttgatgacacatacacaaacaataaaaactgggactatggagacttccttctctccaactcgaatagcatccaattttggcttttctatatactattcgaggacattataatagcaggcctt

SEQ ID NO: 434742 - DNA, 122 bp, Homo sapiens
aattgcttccttcttgggaaaaaaaaaatcaaaataaaagaagtggtggggctgggggtccgcttccaggttccaaggtgcgtgcggcccggccccagccctgactgagaggggaagcggga

SEQ ID NO: 434743 - DNA, 122 bp, Homo sapiens
ggcttggccggagatacatccaagtggtgggtgtagcctgggggttcaatcctcctgtggcgccccagaacccggtgcctcctccaacgtccggcatctgatgaggatccgacccaggcggg

SEQ ID NO: 434744 - DNA, 122 bp, Homo sapiens
agctgtaacactcacctgcgaaggtctgcagcttcactcctgagccagtgagaccacgaacgcagcagaaggaagaaactccgaacacatccgaacatcagaaggaacaaactccagacgcg

SEQ ID NO: 434745 - DNA, 122 bp, Homo sapiens
ttacttaacccctctacacctcagtttctcatctgtaaaataagttagtcaaattagtcacgttatctgcctcgttgagttgctttattaagtgaaataatcttcgtgcttagtttagaaca

SEQ ID NO: 434746 - DNA, 122 bp, Homo sapiens
ctgggtgtgctgctctacgagatgctggttggcgaggtgagaccccgcccctgtgtgtctcggatctcattggaacctgcgcgtgcccagggtgggatccaagtctgcctccaccatgtgtt

SEQ ID NO: 434747 - DNA, 122 bp, Homo sapiens
gacacgattttctgtgatgcgtgggctgtcgggacatctgtcttctatacctaataaagtcgcccgacgcagaatgaactcctcggcatcgctttgaatccgggctcacatatggttgctaa

SEQ ID NO: 434748 - DNA, 122 bp, Homo sapiens
agacccagcagcgtcgggtgggtttggggacgttttaagttgcagaggcaaaaaaatctacgcttcgaaattgggggctgtctgacagcaccgtcggccttttatcagttgtgtttctgtgg

SEQ ID NO: 434749 - DNA, 122 bp, Homo sapiens
ccagctgtctaaatgggaaccctggggaaagagctaaatgaacacagaatctgtgccccacgcctgggaaccctggggaaagaaccaaatgaacacagaatctctgccccacgcctgggaac

SEQ ID NO: 434750 - DNA, 122 bp, Homo sapiens
ttgaggctcagagaggaaaagaataacttgctggaggtcacagctggaactcggtaaatccgaactccccgctagccaggttttttttggttgttgttgtttgttttttgttttgtttgttt

SEQ ID NO: 434751 - DNA, 122 bp, Homo sapiens
cggacccggacccggacccgtggagcctgctcgaaagccgggtgctgggggtctgggccccgtgtcccccctctttttcttcttcaataagaaattcctcaagggcagactgcgagtccaca

SEQ ID NO: 434752 - DNA, 122 bp, Homo sapiens
tgccgggcactgggtaggtgcacacgaggaccgggacagggccagacactttggtccccgcgctttgtctccagcaccccaggcatgctccaacctcggggcatttgtgctggctgtgccca

SEQ ID NO: 434753 - DNA, 122 bp, Homo sapiens
tagacactcaaaccccaaggctgggccgggcaccaggcccctagagtccctgccacttagcggacaggccacggggaacccaagagcaacagcacccccttggctggggcggggccggcagg

SEQ ID NO: 434754 - DNA, 122 bp, Homo sapiens
cgccgggccgctctagccggtgaggccggcgggctctctgtggctgcggctgggaaaccgcgcggaggaggtgcccggccggggaccaggtggccgcggtttgcggggacgcggccctggcc

SEQ ID NO: 434755 - DNA, 122 bp, Homo sapiens
ctacgtttgtatgtctgactgacttctttcacttagtgtaatgttctcaagcttcatccacgttgtagcatgtgtcattgcctcattcttttatatgtcctataattttgaaaaatgatgtt

SEQ ID NO: 434756 - DNA, 122 bp, Homo sapiens
gctgagattaattttcacatcttaagaatataagttagtggcctggacgctggcagcagccggggaaaaaataaccttcataattactgtggcttcagggaaaggttttaacacccttcaga

SEQ ID NO: 434757 - DNA, 122 bp, Homo sapiens
ctgcggaccacgccacccaccacggtgagcacccacggcagcacatgcacctctgttgaccgatgcacgtgaactcctagggagtcgcacacacatgtgaagtctgagcccatcacagagca

SEQ ID NO: 434758 - DNA, 122 bp, Homo sapiens
tttccccatagctttcctctgaattcccacattaaaatattcatctagagaaaggacccacgcccaaaccagccagaaatactttggatctcaatggccgtgttcgcttgaacctaattcag

SEQ ID NO: 434759 - DNA, 122 bp, Homo sapiens
catccccatctcaaggccgaacctgtgtgaacctcatgccaagcacagatatagggctggcgcaggtgcttcctaaagctcaccttcctggagatgacatgcatagaaagaggggttgggac

SEQ ID NO: 434760 - DNA, 122 bp, Homo sapiens
tcccttatttattccttccagcagggccctcttccctaggttcgggccagcaggaggtgccggctggagtctccaccatagactcagtggcctggcctccccagaccccagagccaagaaca

SEQ ID NO: 434761 - DNA, 122 bp, Homo sapiens
caacatttctgcttgacctctgggcaccatagcacttcacagtgcagtgtcaattctgaacgctcccacacctgtgtggaagtgcacagggaaaaccaagaaggaggagttggaggaaatgg

SEQ ID NO: 434762 - DNA, 122 bp, Homo sapiens
tatgaagctgaagtcattccttgtgattgcacttcagggagattggtttcacatgatctgcgaaggcaggcaaggcgagctgaagaagaaccccacatgttcaactgaggctgagctctgcc

SEQ ID NO: 434763 - DNA, 122 bp, Homo sapiens
tggggggcagccctgcaatacgggctgcggcggtacacggggacccggctgcaatggctgcgggggtggcgagcaactactaaacttcctggggaagcgaaatagaatttcgtaagaacaaa

SEQ ID NO: 434764 - DNA, 122 bp, Homo sapiens
accatcctcccgcccaccaccgcggccgggcgcgcaggctcacaccccttcctggggaagcgaatggtcccttccaggcgggtggccatgttgctctaataaagcgggaggggcggcggcgt

SEQ ID NO: 434765 - DNA, 122 bp, Homo sapiens
ctccagggggcgggcctgcatctgggccacctcttttgcatattggcacccacaatccaccgcggctatgaggccagtataaggcggtaaaattacgataagatatgggattttacgtgatc

SEQ ID NO: 434766 - DNA, 122 bp, Homo sapiens
ccgcccccggaaatgacgtctccaccttcgtgggtcgcgccggataaggtgggctttgggcggggtgctgctgcagcggcgcttcctggtggtcagggcgccatggcgctgtcctggctgca

SEQ ID NO: 434767 - DNA, 122 bp, Homo sapiens
catcgatgtggggctgagggccggggtccagggtggcgggaggctcggggaggaggccgacgagccctcggcctccccactacccgccacatcctccaggaacgtggccttcaggggcacag

SEQ ID NO: 434768 - DNA, 122 bp, Homo sapiens
gatgggcgtcttgctcacgcactcccccgcgcggcaccactgaaacacagcggggagggtcggggcccaggcactcagcagagctgctcactccagcccgccaggccccaaaatgccgtgct

SEQ ID NO: 434769 - DNA, 122 bp, Homo sapiens
gtgagcgggaggaagggcagctgcgctggaggggccttctgggaaacgtccttccagcaccgcccttcgcccacactgcggatggtgcgcatgcgcagcgcgtggactttggcctctgccct

SEQ ID NO: 434770 - DNA, 122 bp, Homo sapiens
cagaggttggggaacaggatgcagggcagggccaaaggtcatggtggttgctacctacaccggctcatcctgagtacaaagggttctcagcacagagggaaccccaaatctccccctccatg

SEQ ID NO: 434771 - DNA, 122 bp, Homo sapiens
tttgtaacggacgtgctgccattgccctccgcattgagcgcctacctattgaaatctttacgtcgggacaatgggagagcggctaaaattaccctcttgggtcctgggcgggcaagattcct

SEQ ID NO: 434772 - DNA, 122 bp, Homo sapiens
gttttgtttcgccatctgaaggacacatgaattttctcaactgaaaatgacggtgctcatcgccttcagggataggactcaggctttgtccctccatgggcctggtacaaaaacagactttt

SEQ ID NO: 434773 - DNA, 122 bp, Homo sapiens
gtctcctgtaaaagcaaagcactggaggtcagaaactgacaggggaatcatgaacattcacgtttcattatcttctgcatatccaccaattatgatcactaattgaacttataccaagaatc

SEQ ID NO: 434774 - DNA, 122 bp, Homo sapiens
catttactatgagcctggcattctctttggtatatatggatgaaaaattgatttctgctacgaatataataacctgtgagtatccattgtttccatggagaggctacagctttctaacagta

SEQ ID NO: 434775 - DNA, 122 bp, Homo sapiens
ataattatttagtgcagcacgccaagtgaagcagttagtaatgctttgttacagagggggcgcatccatgattaattcacaccctctctctattaactttggaatcttaaactgtctgggcc

SEQ ID NO: 434776 - DNA, 122 bp, Homo sapiens
aacgtatccactaataattattatttcttcctagaacaagacaggattaagcatcatgaccgtccctattgggggatgtttttatagatgcaagcactgtggcacctactggtataaatgca

SEQ ID NO: 434777 - DNA, 122 bp, Homo sapiens
caggacccggggcgtcgtgggaccgatctcgaaggatcttagaacgacactgggagagcgcggcaagaactagccccaccttcccccgacgccccggactgactgccgggcgcagacccgac

SEQ ID NO: 434778 - DNA, 122 bp, Homo sapiens
ccaggcttgcagggggcggggtccgggacggctggggcggagctggaccgttgagggccacggcggggcgtctccgggccgagcggggctgctgcgcccgagcggttgggggcgcggagggc

SEQ ID NO: 434779 - DNA, 122 bp, Homo sapiens
tcagggcttccgcgaagccaggggcagcgcggccgcgtgcaaattaagtactcatgtcaccgtgttagctatggtggcttgaaagaaatgctttgtagccctctaaaggcaggctgatcgga

SEQ ID NO: 434780 - DNA, 122 bp, Homo sapiens
tcaggacttaagaaaattctgcaaagtgaaaaagtccactctcaaaccgacctaagtgaacgcgtcagtctgtgctgctgctgtcagaggtgtgagccggggactacaggaatcagagtgaa

SEQ ID NO: 434781 - DNA, 122 bp, Homo sapiens
aagagggcgccagggacgaggcaacgtctcctcccacagagcagagttcccacgattaatcgcctaattagagctgtgattacaactgagagtgctcagtggcgcggggaggtacacgcagc

SEQ ID NO: 434782 - DNA, 122 bp, Homo sapiens
gattaatatttgttcggtaagaacagctccaggttcaggccggggggctccaggttcaagcgcctcttgtttactcacccatggcctgtgtggttccagggaggtcccatgggtgctgatcg

SEQ ID NO: 434783 - DNA, 122 bp, Homo sapiens
gcgctgtgccctctgtcggcggcgtggggcagctgtagcagcgttggcggcaggaggcggcggccgcgtcgacgtcgacccagactggagcgacgtttaaagaaggggcagaatcgctgggg

SEQ ID NO: 434784 - DNA, 122 bp, Homo sapiens
ggtcgtgtcccagggttctgacagtggagccaggacgtccgggagctgacaatctaaacgcgacctgggaaggggcggtagcgggagtggctgcttcctgggaggtggtgctcgcaaacctg

SEQ ID NO: 434785 - DNA, 122 bp, Homo sapiens
agtcctgaatagtccaccattgataagttgtgtgacttggaacaaattactaccccgcgtcgatgtggagaggattaaacattaacagcgcgatgtaaattcaagctggtaatacaggaaat

SEQ ID NO: 434786 - DNA, 122 bp, Homo sapiens
ctcccggccgtccgaccccgggtccccgcacgtgactgtgggcctgcctgggaggccgcacggccgccggcaacttcggtgcccggaccctgtcggctctctatcttgagggagtttctcat

SEQ ID NO: 434787 - DNA, 122 bp, Homo sapiens
ggcctccgccgcttgtcgtcgcgccccgcccgcgagcccgccccgcacgtcccccgccggcggccaccatgagcacaggcctgcggtacaagagcaagctggcgaccccaggtgagcccagc

SEQ ID NO: 434788 - DNA, 122 bp, Homo sapiens
gtgggcaggaaagggtccccgtatggccagggggctctgtgttggctgttgccccatgtgcgtgcctgtcaccagactctggtaggattagtgggcactctcaggccacctccagttaaccc

SEQ ID NO: 434789 - DNA, 122 bp, Homo sapiens
tttaatcttattcctgaagcaaaacaaataactcatcatggctgagttatttatgagtgtcggaagtcactctggaaaagataaaggtgtgtttactactactaatttgtcttgaggatctg

SEQ ID NO: 434790 - DNA, 122 bp, Homo sapiens
ccctggagaagggaccttccctttggggtcggaacccagaaaggaggggcctgcgatccgcggagctccttgttcttgggataacacagctctggcttggaggcccccttgcacttcgactc

SEQ ID NO: 434791 - DNA, 122 bp, Homo sapiens
tcccactggggaaatgctcgctacctaacaatgccactggtggtgactcatccaaaattccgacacagacctaatgagcttctgagagaatgcctggcagactcagtcctattcagtgtgtt

SEQ ID NO: 434792 - DNA, 122 bp, Homo sapiens
tagcagtggtgagttagggaaggagcagaataaaagatattctacctagcaatggggacccgctgtagtagtaagaaactaagtaccttaagggactggggagttttcttaaacctctctgg

SEQ ID NO: 434793 - DNA, 122 bp, Homo sapiens
ggggtcctgaccgctgctgggcctgcccgtagatttgcctgactctagcgaacctggctccgcccctcccccactatacgttgaggattttaagacggcgatgaaagggctgaggttgtggc

SEQ ID NO: 434794 - DNA, 122 bp, Homo sapiens
tccctccacacacctggaggaggcagcagcctcctcattttccacagccgaagagctcggcggccatggccctgcaaggagggttttatggggccaggagaggagtcagaagagaagcctcc

SEQ ID NO: 434795 - DNA, 122 bp, Homo sapiens
caggggtgcccaactgcgccctcaggtgagaatccaattgctcggaatcggaaatccaggcgaatgagaaactgtcttgtttctctcgccacccctagctcccctgcacctttctccaaatg

SEQ ID NO: 434796 - DNA, 122 bp, Homo sapiens
ttcctacttacctggaactggcaaaacgtggctgcatggtagggttgactcttaatctcccggggcgggagcagagcgcagaatcctctttccactctatgttcgcaaccacaagccccgac

SEQ ID NO: 434797 - DNA, 122 bp, Homo sapiens
taaacgcgtgggactgggaaggacccagtcatctgtatattggttaccaacacgtggccgcgtagaatcatgggggaaaaaaggccccatcccaatactaaccaacagaatctctgagaatg

SEQ ID NO: 434798 - DNA, 122 bp, Homo sapiens
gcagagagctgtcagtcatccctgggtgcctcctgcgcaagcgcagttgtcctcctgcgccgacctcgaatgcggtcctcctgctgcagaccacgcccaccaagggctggccgcagccactg

SEQ ID NO: 434799 - DNA, 122 bp, Homo sapiens
ggttatttttttaagtccttatctggtgaagatatatacatggaagtatttacaaacaagcggatatgatgtctgggatttgctttaaaatacttgagaaaaaataaagggagggagtggga

SEQ ID NO: 434800 - DNA, 122 bp, Homo sapiens
aaacattataaaaatgaacctgaaaagagtcttagggagtctgatctcaccatattcatacggtgtgacaggtatttaaagaggggaggcatcactaaagctatttataaacctgaacaacc

SEQ ID NO: 434801 - DNA, 122 bp, Homo sapiens
aaatccaaaactaaatcaaaccaatcaaggcaccaagacgcaggggggatatccacagttcgatcaaggtaataatcaaggtcttccgacgtgaacattgcacgccttttgtggatttttag

SEQ ID NO: 434802 - DNA, 122 bp, Homo sapiens
taggatgtagaatatccattgctttccccaagaccagaatgatacctctcacaggcaatgcgaggagtcctccacccctgccacccacactgggtgtgtgacccagcaagggggcatgggtg

SEQ ID NO: 434803 - DNA, 122 bp, Homo sapiens
ccccgccccctccccccggcggccagatcctctcagcgggcgacagggtggcggtgctggcgtttgcgtctgaggccggccttgctgagggaatgcacgtctctggccccagacacacacct

SEQ ID NO: 434804 - DNA, 122 bp, Homo sapiens
tcggagcagactctgagcattgttttggccccacttggcacctgcatagagccaactccacgttcctggcccggtttccctcccagtctctttgttcttttgtaaagccggtgttcaagtct

SEQ ID NO: 434805 - DNA, 122 bp, Homo sapiens
aaaaatcttcatgtgcaccaagttcccaaagtgatactaacattgctagactggggactacgcttgtcctaagcttagcagaggtctactgaagacctgaatggaattttattccaatggtt

SEQ ID NO: 434806 - DNA, 122 bp, Homo sapiens
gccaaggacctcagctctgagaattccccagtggacaggagcaagccatacccggggagacgattagtggcacagagtaggcacacagtaaatatttggtgggggatgaacaggcaaaggag

SEQ ID NO: 434807 - DNA, 122 bp, Homo sapiens
tgtagcactagaatttaggtctcctcatctaaggtcagaagaaaaaaagacaaaaccaaacgggaacataactaatagttaccgtttactgaacactcatatgtgccaagtccttaatttga

SEQ ID NO: 434808 - DNA, 122 bp, Homo sapiens
tcctcctcctcccccttcacgctcagcccagccggcggcgaggagtccagaggccaaggtcgcccagtcctctcggctgtctcgagctgaatggctggcagtctgcggctcccccgcctccg

SEQ ID NO: 434809 - DNA, 122 bp, Homo sapiens
ctactctgaagcctcgtccatctacttagccaatcttcctcttaacaacaaaaacaaggccgggcgcggtggctcacgcctgtaatctcagaactctgggaggccgagacaggaggatcacg

SEQ ID NO: 434810 - DNA, 122 bp, Homo sapiens
cctcttcggcccccggcggggaatccctttcaccgtcccccggcggctggaggtggcggtcgagagccctgctacactcactgcttagcagacgtcagactggtggtcgtcttggaggccca

SEQ ID NO: 434811 - DNA, 122 bp, Homo sapiens
atgtcgcggaaggcggccatgactacgccaggctccaacccgcgcaaatttgactgtccgcggggcccgccctcttccagaagaggttgctttccattggattttttgatacgtcagtcata

SEQ ID NO: 434812 - DNA, 122 bp, Homo sapiens
cacatgctctagcagaagcacagccttctgaggtttgtccacaatcacggtgctgatgtccgctgcagggggccatcaaggagagtcaggccatgtgggcccaggtcatgagtgcaggcagc

SEQ ID NO: 434813 - DNA, 122 bp, Homo sapiens
gacaccgacagccaatggccgggcccgtcccgccccatccgggattggctgtgcgtgccgcggccctccaccccgccccgctcaggatcttcccgggattggctgagctacccgacctctcc

SEQ ID NO: 434814 - DNA, 122 bp, Homo sapiens
tgttagaggaactccactgcaccaattttgctactagacaaaccaggaatcttggatttgcgcgctttggtgctgacaggctttttcggccccagcgggctgccgtagcagagaagagcact

SEQ ID NO: 434815 - DNA, 122 bp, Homo sapiens
tgagagcagcaggcggcgttcgctcgggccagaccccggccgcaggcctggtcggtgctgcggcagtgcccactcccgcgccagcgcccactcccgcgccagcctttggggcctgtgggagg

SEQ ID NO: 434816 - DNA, 122 bp, Homo sapiens
tgctgtctgtgtgagactccgccagcttctgcacccgcgctgtgggggccgctcagagcccggcagccttgggtaaaggggagctgcttccctgaacctgcactgctcagaacattctggaa

SEQ ID NO: 434817 - DNA, 122 bp, Homo sapiens
ttttcccttcttacaagttccgctgaccaatgatgggtgatgtcaaagcagttatgtgtacgagtttccttttttcccctttgttattacagatgaaaaatactagaaatataacaaatacg

SEQ ID NO: 434818 - DNA, 122 bp, Homo sapiens
ctttttcagtgtgaggcagaaaattctttggcaaacacagactttcactgggactagttgcgaaaaactgatatgcctttagtgagttgactaccaataaaatacatttgcagaagcttgaa

SEQ ID NO: 434819 - DNA, 122 bp, Homo sapiens
ttcaggtgatccacccgccccagcctcccaaagtgctgggattacaggcatgagccaccacgtccagccaaaacacctatttcgctacaagcaaactaaggatgaggaaatatcagacttgc

SEQ ID NO: 434820 - DNA, 122 bp, Homo sapiens
ataaaggcaaaactcacccttctggttctataatcctatccaaatggagtcttcatctaccgcatactatcctaactaatgctacaggattatcaggaatacagatataaagacactgcaag

SEQ ID NO: 434821 - DNA, 122 bp, Homo sapiens
acgcctttgcatgaagcctgtaactatggcaacacagtgtgtgtccaggaaattttgcaacgttgtccagaggtagatctgctcactcaagtggacggggtgactcctttgcatgatgcact

SEQ ID NO: 434822 - DNA, 122 bp, Homo sapiens
acgttgcacaccaaagacataccctagtgattaaatgctgattttgtgtacgattgtccacggacgccaaaacaatcacagagctgcttgatttgttttaattaccagcacaaaatgccatc

SEQ ID NO: 434823 - DNA, 122 bp, Homo sapiens
tgaaaaatgttacttacactttctcttgcgcttggcagggtagccacatttgccacaggtcgacttctgaaggtggtaggccttagagccacagcggcggcacaacgtgtgcgtcttattgc

SEQ ID NO: 434824 - DNA, 122 bp, Homo sapiens
gagccaggtcctcgtgtgaccttactgtctactgctgctatgtaaggggactggcactcccgccctcctgaaggcgcggagaccccgacggcctcggaacgcttcgctcgggcacactgaaa

SEQ ID NO: 434825 - DNA, 122 bp, Homo sapiens
gatgccccgcggcagccgcgctcggggctctaaggtaggctctggggcgggagtgggcgccgcgccgtttcccgcgttgcggggaagcggcgggccggcgcggggctggccccgttgtgctg

SEQ ID NO: 434826 - DNA, 122 bp, Homo sapiens
cttggctctcaaggggaagccctctaccctgcctgtctggctcttgttgagtagtggagtcggtctttgatgaccttggcctaaaactcttcataatagtccaagaactgaaaaattaggat

SEQ ID NO: 434827 - DNA, 122 bp, Homo sapiens
agagggagggtagcggggagggaggcgaggacctggagacttgttaaaaccggtgccctccgctcccctaccctaagagggaggtgcctctaagctcatttgcatactgcttgcatgtcatt

SEQ ID NO: 434828 - DNA, 122 bp, Homo sapiens
gtacactcacacacttatacactcacatccgcacacgcattattcacacatgtgcacacacgcgcgcgcacatgcatgcagtcacgcacacacattcatacacgcacacaggcacacattca

SEQ ID NO: 434829 - DNA, 122 bp, Homo sapiens
tcagcacagttgtgagagtgcagacccagctgcgcaggccggaggtggccatgaggcccacgcctttccagtccaggaggctccggctcaaagcagcgggaagttcagtttattaaaccaca

SEQ ID NO: 434830 - DNA, 122 bp, Homo sapiens
gggaggggccgaggccgagagaggcggggcttggccgggtcagaaatggggcgtggctcgcggagttatccgggatcccaaaagaaagagctcaggcggggacctggatctagttccccaag

SEQ ID NO: 434831 - DNA, 122 bp, Homo sapiens
aagttaaatacaaccaccactgcaagctactccaatgtatcaactttctgaaattgtaatcgacataatgatataaacccttaagtagcaccaacagtttaagtgtaatcaagagataattc

SEQ ID NO: 434832 - DNA, 122 bp, Homo sapiens
ttctgcacacagcaggacacgtataaaacttatataagtatatggatttttttttggtaacgggattacaataaaaaaaagtttggagaacacaagtgcaggcagttaatgctgtgggtgtt

SEQ ID NO: 434833 - DNA, 122 bp, Homo sapiens
ttaaagaagatgccagatgttgaacagctatatggccttcaccctcgataccttgagaggcgaagagtaaggggccatgaggcttttagcattccaggagtcctagaagctttgcaggcatg

SEQ ID NO: 434834 - DNA, 122 bp, Homo sapiens
ccaccacccatccagagtcgcagaacctggctcccacactagcccggagcgcggggccagcgtcctagttggcctttgcagcccggcgcccagagggaaccaagagcaagttcgattctccc

SEQ ID NO: 434835 - DNA, 122 bp, Homo sapiens
gccgtgcaggacccaaaggaagggcgccccagttcagcctctgtagatctgggaaagggccgggccacaggtcgggaccaatccagaagcagcacccagaccggtttacccggttccaggac

SEQ ID NO: 434836 - DNA, 122 bp, Homo sapiens
gggccagggtcgccaatgcctggagaacatgggacaggctcattccatcattccacactccgcgttctcgaggctgttggcaggtgcggcctccgctgtgcccctccaccctgtctctgttc

SEQ ID NO: 434837 - DNA, 122 bp, Homo sapiens
aataaagcgtttactaaagcgccttaaaaaatgggccgcggggctgggcgcggtggctcacgcctgtaatcctaacactttgggaggccgaggagggcggatcacgaggtcaggagatcgag

SEQ ID NO: 434838 - DNA, 122 bp, Homo sapiens
gggaagcagggacacatagggcatatattccagaacttcggggcttgtcccctcaatgtgcggcctaacaaataagccgcccgtggtccgcgctgtgggtgacccttggcgccttcgaggtc

SEQ ID NO: 434839 - DNA, 122 bp, Homo sapiens
ccttcaggtgcatttcatatacaaaagctggccagaccctgtttcctagttccattaactcggattattagtttaacaatggaatgaggtatttaacaggaggtccttgtcacatagaaggc

SEQ ID NO: 434840 - DNA, 122 bp, Homo sapiens
aagttactgacacagtaaaacaaggaaagttctaccctaagagccgccatcacttcaggccgctggtttgtcagccatctgttgcttcttattgatagatggcattggaatgtggtacaaag

SEQ ID NO: 434841 - DNA, 122 bp, Homo sapiens
aaaggattactttttgccagctgcatcatttctggcaagagcttactactttgcttattgcggtcattgttgtggttgttgttaacccatcagagaaactaaccactacattggttttagcc

SEQ ID NO: 434842 - DNA, 122 bp, Homo sapiens
ccttagccttcccaaaaagaattacccaccacactcacaatggtctctactctccatatgcggaaggatcccacaatcactctcagaatgttctcttccccgcccccaacacactgacaatg

SEQ ID NO: 434843 - DNA, 122 bp, Homo sapiens
ctgtgtaggaattattcttcctgtgagcaaacaacatagagagctttctttttttgacaccgggtctcaaaaatatatcatatacattttattataatgtctgatattgataatataatcat

SEQ ID NO: 434844 - DNA, 122 bp, Homo sapiens
gcctattttaacgataaaaaatgaggcccttgaagggtaagtgacttgcccattgtcatacgggacgtggcaggtgtgggttcaaagtctaggtctgttgctttcaaagccttctttcctca

SEQ ID NO: 434845 - DNA, 122 bp, Homo sapiens
tccctgtgctgtcttccctaatgccaaaatggacttggcaatgagtggaggcttcttagtcgccccagcctggatgccctaaccaagtttgggtctactttttatgtttttttaaagacaaa

SEQ ID NO: 434846 - DNA, 122 bp, Homo sapiens
tagcaagtcccttgagcacaaactattttcctaagcttggtgggggcgtgagagggtggccggggactggtgacaatgttgtttgtgcactgggagagtccggctgaattgcaactggcctt

SEQ ID NO: 434847 - DNA, 122 bp, Homo sapiens
gtaagctcgggaccccggggtccgtcttccaaggggtgcccagccctggcagcagtcgtgcgagctcctcggctctaatacagggagtggctgctcgccaggatgcttgtctgaagtcagtg

SEQ ID NO: 434848 - DNA, 122 bp, Homo sapiens
caagtccagaggcagttacaaaaaacactcttgatgcaaaccgtgagtggctacaacacacggatgggggtgggcgcgattcccacaacagggagtggaatccgggaagatgatatataggg

SEQ ID NO: 434849 - DNA, 122 bp, Homo sapiens
tcgagtgggagtcagttcaggatgcgggctgtgccacgcgcggaggtccggggaccccaccgccgcctcctcgaggcccgccccgccccttacgacccgtccctgcaaccccccgcgtgggc

SEQ ID NO: 434850 - DNA, 122 bp, Homo sapiens
tgcagacccggctgcgctcgcagaagtttaagggctcaaggcaggagggcggcgcggggccgggccccgaaaaggcgcaggagggcacgaaggtctggcgccgacgctcggcgcacgcgggg

SEQ ID NO: 434851 - DNA, 122 bp, Homo sapiens
gaggagtgcagggtctcatggcttgctgactgacaggctgtgtgggtcttggaagaataacgtgagttcccagaacatcagtttgctcatctgcaaaatggggaattacagtccacaattaa

SEQ ID NO: 434852 - DNA, 122 bp, Homo sapiens
cgccgtgcggttcggacacggttcgcgcgcgcgcggccctccgggtttggcagggccgggcgccccctcgcgacagctctggggaatctctggaaatcagcgtctgattttttccaggccct

SEQ ID NO: 434853 - DNA, 122 bp, Homo sapiens
cggcttcgagccaggcccagcaaccattgcctgcggaaagatcgtgtcgcacacgcacctcggagtttctggaccagtcactcgccaaagaagttttcaaattttgttggcccccatttgac

SEQ ID NO: 434854 - DNA, 122 bp, Homo sapiens
tgagtgcacgttgaaagaaagcgcggccatcaaccagatccttgggcggagggtaggtgacgcccttctcagggagaagcggggggcgggtggtgagggaccagagtgcagcaggtcaggtg

SEQ ID NO: 434855 - DNA, 122 bp, Homo sapiens
aaggggacggctccttccccttctctctttccaatgcagatccttcaaatcctaaaatgtcgaggcagccgcgtgctgtgggaccacgtcctcgccctctacacccgcattttgcagatgcg

SEQ ID NO: 434856 - DNA, 122 bp, Homo sapiens
attgctctcttcaacactagcttactttaatgtgtcatgagttctgcacattaaatagtccgtgagaatgagctacttatttggagtcagattttcgtgggcatggacatacccatctgcac

SEQ ID NO: 434857 - DNA, 122 bp, Homo sapiens
ttgctcctcactttaagtctttgctcaaatgttgtgttctctgaccaccctacgtagaaccgcaataccctaccttgattcctctctgcactcccattttgcttttctaacatctatatatt

SEQ ID NO: 434858 - DNA, 122 bp, Homo sapiens
cgtgtgcctgtgaaaacgccgagaccctagtggtctagctggacgtggagaggaacgctgcggcgtaaggacacgccaacagatgctggcaggccagcaggccattaactggcagaacgacg

SEQ ID NO: 434859 - DNA, 122 bp, Homo sapiens
aatggcaaagccctgagtctggggcagtggctggggagccagacaacaccgccaggccagcgcctccccgaccttgggctctgaagagtctaggctgggaattggtttcttccgtagggctt

SEQ ID NO: 434860 - DNA, 122 bp, Homo sapiens
gagggcaggctttcttggcgttgtgtggattgtgggctgtgagaagtagctgagcatgcacgctcatcagcagagcttcaccaagggtgtggcagcacctgtgtattggcacggaggagggt

SEQ ID NO: 434861 - DNA, 122 bp, Homo sapiens
ttgtttaactgcactttattgtacttcacagatattgcttttttacaaatggaatgttcacggaactctgtgtagagcaagtctgttgttgccatttttccaacacctgtgttcacttcctg

SEQ ID NO: 434862 - DNA, 122 bp, Homo sapiens
aattataccgtagaaaagcccgggtgacgggagtgaggccctgtctgaagaagaaaacatcggagacgtttaaaagcagtgagtgaaacagagggtagcataacctttttaatactggctct

SEQ ID NO: 434863 - DNA, 122 bp, Homo sapiens
aatgttctccctgatgggggcgggggctggccagggttgagtgccactttgacgaaagcacgtggctatctgaagtttgtgggccccaaggttctcctcgagccttccctcccctcccctct

SEQ ID NO: 434864 - DNA, 122 bp, Homo sapiens
cagctatttgggaggatgagcctggtaggcagagattgtactgagctgagatcgtgccaccgcactccagcctgggtgacaacagtgagacagcaggcctaagtggggcctggggccctgaa

SEQ ID NO: 434865 - DNA, 122 bp, Homo sapiens
tctggggaggaaaatggtctctataattacgtggttttgcggggccgtcccagcctcccgcgggaaggaaaggacatgtcagccgttgggtcaggacaaaaccctgggccagactcagcgcc

SEQ ID NO: 434866 - DNA, 122 bp, Homo sapiens
agaggaggcagtgggggagacagacagcggctgggacgcgcgggactggggcgcgccttgcgcgctgggcaccggagctgcgcacgggcggcccggggcgggggccccagagagcccgggag

SEQ ID NO: 434867 - DNA, 122 bp, Homo sapiens
atgcaggatcctctccaggcaagtgaccagccggatcctcttaattctcagttgacagggcgtattgacacccctggaaaccttttccaggctttctgtgtattctttcaatgcttgccttt

SEQ ID NO: 434868 - DNA, 122 bp, Homo sapiens
agccacgagcaggacggaccaggacacagcgagaaactgacctcggaggaggctggccaccgggaggttctgggagaccaggaagaggtggagtcagggtcactgtcagcaggattcaaacc

SEQ ID NO: 434869 - DNA, 122 bp, Homo sapiens
acgccgagctccacggtcggtgcaagtctttcttatcggggactgggactggggcgggtgcggggatggcggagacgctgcctgggcccctcggtcgggagaagacgagagctgggaacgtt

SEQ ID NO: 434870 - DNA, 122 bp, Homo sapiens
tgctcatcagggtcgctgtctgaggccgcccgggccagggcgcggcgcacgcgcgccaggcgactgcccagcagcagcagaaggccaagcacgcgctctaggtcggccatgaaccggctgaa

SEQ ID NO: 434871 - DNA, 122 bp, Homo sapiens
gccccctccgcctcccgggcctcttcctcctgccggtgagggagtgcttggcagattgcgcgagggggagcgagcgagcgggcgctgccaggagcccgcagccctggcgcccgccgccgccc

SEQ ID NO: 434872 - DNA, 122 bp, Homo sapiens
accaaaaatttaaaaatcagccggaagccagacactagggacatggctgaggatcgctcccgcccctcggaggccagaaaccgagggtcactcccgctctctagaggccggaggccccgggc

SEQ ID NO: 434873 - DNA, 122 bp, Homo sapiens
tgggttctgggaattgtgataatgaggctgctgagggcctctgggctgagccagctgctacggacacaggccctgcctagcgcctaccttgcgtgggctctgactggaaacagggacgtata

SEQ ID NO: 434874 - DNA, 122 bp, Homo sapiens
tgttccctccgctccccgcctgctgagcacctgccccaccccgctcagcgtgctgcaggccgacccctccaggattccggcgcccaggcacgtctggtctcaccacgcgctccccatcacgg

SEQ ID NO: 434875 - DNA, 122 bp, Homo sapiens
tcttaggcgggtcctgtaactgcacctagtcccggaccacaggagggcggatggaggtggcgaggcgctccactgtggcggggtccctagctggccgtggggatcgaatattctacagggca

SEQ ID NO: 434876 - DNA, 122 bp, Homo sapiens
cttcaagtatacaaataattcctcatttgtaatatatttagggctcttcacagatctaaacgatttctgtgattctatttcaaagaaaagctcaacctacctatgtacattttgtttcaatt

SEQ ID NO: 434877 - DNA, 122 bp, Homo sapiens
tctgcggaaggggctggggtgtaagtttcggctccctgggatctgacagccgagggtatgcgccctggggtgcgccgggacccagagggcgagtgagcctcggttggtcggctctggagttc

SEQ ID NO: 434878 - DNA, 122 bp, Homo sapiens
agttacagaaggttttgtctgagtgacaggaaaatcaataagtaagttagaaggtgattgcgttggtctaggtgaggcattatgaggcactggcattgaatttctgggatatttcagagtat

SEQ ID NO: 434879 - DNA, 122 bp, Homo sapiens
tgagcccctttctgcctcttgttctctgcgtatccatctttcctttgtaagccccttgcccgtgactattattgagccagtatgacagtactggttgttaaaatattgaaatacttctgtat

SEQ ID NO: 434880 - DNA, 122 bp, Homo sapiens
gacgtccaggtctaatgagtgttcagggtggacacagacaaacacacatatgtgaggtgccggtaagtcgtgtgaagataaataaattgggataagggcagagaaggtgatggggagtacaa

SEQ ID NO: 434881 - DNA, 122 bp, Homo sapiens
gctcggtcccagcatcccaccactgccgagatggttctgagcgggttcctgggctgaggccggggcctgtgttttccaagattccttggagagccagctccatcctcttcctgattatctga

SEQ ID NO: 434882 - DNA, 122 bp, Homo sapiens
ttggagtgaaagctacagaatgatttaacactgtgggaacttaatcaataagagtgttgccgagagctcccaggaaagggtgttgttttccatccagatgataatgaggccgagtagcagca

SEQ ID NO: 434883 - DNA, 122 bp, Homo sapiens
agctggctccagccaaagccagcctggcccagaagcctctgcctggcttccttggggagccgctgggggttgccgggacaagaaccagcaggggtgcctgacctccctctgcagcgatcacc

SEQ ID NO: 434884 - DNA, 122 bp, Homo sapiens
gaggtattgcctaactcaaactcaaggtgctgaaagaaaagggtcacaggattagctagtcggcagtgtaagaacatcgttgtccagaggcagggcaagggcacgacaaagggaactcttcg

SEQ ID NO: 434885 - DNA, 122 bp, Homo sapiens
taatctgagattccttataaaaacttccagcaaagcaactttaaaaaagtctgtgtgggccgggcgcggtggctcacgcctgtaatcccagcactttgatccgccgaggcgggcggatcacg

SEQ ID NO: 434886 - DNA, 122 bp, Homo sapiens
tgggggcgtgcccgaagtctctctacggaagctggtagggctgtgggtgcttcactatggcgacggtgggggctccgcggcacttctgccgctgcgcctgcttctgcaccgataacttgtac

SEQ ID NO: 434887 - DNA, 122 bp, Homo sapiens
gtggatcaacaaggcggagaaccacctttgcaccctcgccgggaaaccagctcctacctccggccccctgttgggccttctggccctggtgttctctggcgctcctctcccaccaaggcccg

SEQ ID NO: 434888 - DNA, 122 bp, Homo sapiens
cgaattccacgcgagctgaagcccagggatatcccagaatcttcctcaggatcaatcttccgcctttcaccggccctgcgcccccgcagcatcgggtcctgggcgcgcgcccctgccccgct

SEQ ID NO: 434889 - DNA, 122 bp, Homo sapiens
tgtgccaccaggtgacacacaggcccctgaatcataggaggtcaaagctgtgaggggcatcggcatcacctcagccaactccctcatctcaggtgaggagtgagaggctcagagagggcaga

SEQ ID NO: 434890 - DNA, 122 bp, Homo sapiens
tttgaggggacaggggcttgtggatcatcttgtcctttatcgtgaagtgtcagctgcatgcggcgccgggatgtagcacccaagccctgtgggtcctcgaaggtctgtggccacgttctgag

SEQ ID NO: 434891 - DNA, 122 bp, Homo sapiens
caacagtcactggatttgggccccttcaggaggcatggctttgagcaaggccaccatagccgaggcaatccttctagaagctgaccattgaaagctgctggcatgcttgatactagggcaac

SEQ ID NO: 434892 - DNA, 122 bp, Homo sapiens
tccgccgcttgtgccaagagagccttagactctttccagtaatgaggcttgtaaatcctgcggaatcggagcccaacgtgtgtaatgccggggctgtgcttacaagatcgtgctccagtccg

SEQ ID NO: 434893 - DNA, 122 bp, Homo sapiens
ccccacgtgaccggccaacactgagtgttgtctcgctctggcgtcagagccgtcgtggctcgttccattctcggcggtggtacctgctcccggtggccctgaggacgtgtgggccaggggcg

SEQ ID NO: 434894 - DNA, 122 bp, Homo sapiens
attgattaagaaggggatgggctcaccttccactgtgagagttacccgaagctcggcgtccgtgatggtctagggggcttccgaggcgatcgggcagtgtcagtcttcagccgctaagccga

SEQ ID NO: 434895 - DNA, 122 bp, Homo sapiens
tggccagggagggaacatcaccccataaactgaggtcacgtctgggactcagcagaactgcggtggggccatcggaggaaggctgccacctgcttcatgtccagggaaaaaaggtccaggag

SEQ ID NO: 434896 - DNA, 122 bp, Homo sapiens
actgcgttgaaagcttctgaatttcaagcagaaagtagaaggagctccaaaggcagtgagcgtctttccttgggctgcgtgtgccgagcgtagacaatgaaaatcttcatccccctccccca

SEQ ID NO: 434897 - DNA, 122 bp, Homo sapiens
tgttcctgctttgagacctgtgaattcttgtgggacagttccactgacagcttgcgttcccgaggtaccagtcctcagtgacctcgggaaccccaaccacttaggtcccaaagccacaaggg

SEQ ID NO: 434898 - DNA, 122 bp, Homo sapiens
ttagtattcattcatgtttagcagggctcagcgtgcagcacatacctgagccagtgccagcgctgtcccggggtggggtgagcctgatgaaccctgggtgtgaccttgcccgcccccaggac

SEQ ID NO: 434899 - DNA, 122 bp, Homo sapiens
ccccgcccccaccatctgacgtaactattttgcatatcaactcgccgagaggtgaggggccgcccccttgactgggcttctgctagagtcagctgcggcaatcggggcaacaaaattcaggc

SEQ ID NO: 434900 - DNA, 122 bp, Homo sapiens
aaaaattgaagtattttcaaacttcagtttttatctcagaggttaacgtcctatgtaatccgaaatctcacgaaaacataactgagttaatcaatatctatgcttactaatgaggactgctg

SEQ ID NO: 434901 - DNA, 122 bp, Homo sapiens
ggggagacctctggggtcccagctgccaaggtactcgccgctccaaggagatgcggacgccggataccagctctgcccaagattgctgggtcccgccgcggcctttaaaggcccaccacgtg

SEQ ID NO: 434902 - DNA, 122 bp, Homo sapiens
aaccaaggaaggaagcgtggctgctgtctgaacctctccgccctgcaggggaccaaagaccgactcgggccaacgctgctctccagggggcgagggcggggggtcgacagtgaccattgtgg

SEQ ID NO: 434903 - DNA, 122 bp, Homo sapiens
ggtctgcatgacgtaatttattgtggcaaccattcctggcgactgcccagaaactcagtgcgtcctgcccggggtttaagcgcgggaagtgggagaggcgggtggcgcccgagcgcagtagc

SEQ ID NO: 434904 - DNA, 122 bp, Homo sapiens
tcattcccggcaaaagaaataatacggccggcgcagaggcgggaaaacatggactgactgcgagagaaaagccagagttccagtttggctgcaccaaaggctactttaagcatgaaagaata

SEQ ID NO: 434905 - DNA, 122 bp, Homo sapiens
aagttgtctgtttctttgaaatctcccaaggggtttgtgaaggtacatttcagaagatttcgaagtcctgagcgcttagccgtgcaggaacaatggtgagtctttagcccgatcgggagcgg

SEQ ID NO: 434906 - DNA, 122 bp, Homo sapiens
ccacgctgctggcgagagtcaagaaggaacgaaaagaaggagctccatctagcgttgttacgaaacaagaccagcggcatcctgaacagttagctcctttctgaagggcgagtaccaaatga

SEQ ID NO: 434907 - DNA, 122 bp, Homo sapiens
gagcctgactaagtgccgcccccttgccggctgcagattgctatttctgccccccaccctcgcccatccccccgcgagctggactgcgccaaggcttctgtgagccgcttggggccggccgg

SEQ ID NO: 434908 - DNA, 122 bp, Homo sapiens
gtcccccaagaggaaacagatggagagagatgtcaggaaagcaggctcagatacgcactgcggctctgcctaagggatcgccacagaaagagaacttaaggtgaggaggttatgacctccaa

SEQ ID NO: 434909 - DNA, 122 bp, Homo sapiens
aaggactgctataggcctgtgtggcaaaacttgggttcaagtccagctctgtgcttattgcgtactttggacaaatcacctatcttatctaaactgggagacaataatatctactttgcagc

SEQ ID NO: 434910 - DNA, 122 bp, Homo sapiens
cgggaagcgggaggaggaacccccgaggggcgggagcctctggatttcggtgtcacccagcggccctggcgcgggcagggagggggaccctcggcccgcggatccccctccgctcttcagcc

SEQ ID NO: 434911 - DNA, 122 bp, Homo sapiens
gggacccttgcgtttgtcagcccaagcctggcggtgcacaagagctcctcggccgtggaccgccagcgagagtacctcctggacatgatcccaccccgctccatcccccagtcagccacgtg

SEQ ID NO: 434912 - DNA, 122 bp, Homo sapiens
tattctactttttatattccaaaacccaggcacagagaaatgaaatgactttgccaagatcgcacagcaaataagcaggggaagccagggctcacatcaggcccctgctttggggctgtgct

SEQ ID NO: 434913 - DNA, 122 bp, Homo sapiens
cttcaattcagcccacaaagtcattgatagagctggattcacacacttggatgtagacctcgaccttcacaggactcttcattgctggttggcaatgatgtatcggtgagttagttcccttt

SEQ ID NO: 434914 - DNA, 122 bp, Homo sapiens
caggagaaggcaacagaggcctggaaggggtcttcgtgcatctgtgccagttgtgcaagacgaactctttgaacactacatgctttggacttcagccaggcagaggctggaagaaggttgac

SEQ ID NO: 434915 - DNA, 122 bp, Homo sapiens
atttcagagcctttctccctacatcattccatctctccattctattaggtctagcaataacgtaacttcttggataccaagtaaatcagttactttttattttttggagggggttgtttctt

SEQ ID NO: 434916 - DNA, 122 bp, Homo sapiens
ttttaataaaaaaaatctttaagtgagaaatgcatctgtaatgtccttattaaccaaaaacgcctaagggataaagaagcacacgctccctagccaacgctagaggaacacaccccgagagc

SEQ ID NO: 434917 - DNA, 122 bp, Homo sapiens
ggctcgggggactacgcgcttcgggccgggcggggattgaggtgcagccgaagctggtgccgcgggaatgcgcggaccggagaggcccccgggacctttcaggcccacaaacgccgcgctaa

SEQ ID NO: 434918 - DNA, 122 bp, Homo sapiens
gtccattgagccggacgcagtggctcacgcctgtaatcctaacactttcggaagtcgaggcgggaggatcgctctgagcccacaagttggagactagcctgtctctataaaaaataaacaaa

SEQ ID NO: 434919 - DNA, 122 bp, Homo sapiens
gagatagagctgatatcccagcaacagtcttcttacttcataatctaagtatatcagagacgtattttggagacacaaatttgaccctaaatatagctaaaaccatgctatagcaaaggact

SEQ ID NO: 434920 - DNA, 122 bp, Homo sapiens
gtaaatatgtgaagatatctccatttttacaggcttagagagattaagttgcttactcaacgtcatttagcaaagtattgaagttgggggttcaataaatctagtaagtctacattaaaagt

SEQ ID NO: 434921 - DNA, 122 bp, Homo sapiens
attccatttacgtaagatgctcagaatgggcaaactcaccaagacgggagacagattagtcgttgccaggggctgggaagaggagggaagatcagagtggggagcaatgctgatggttttgg

SEQ ID NO: 434922 - DNA, 122 bp, Homo sapiens
ccaaaaaaatcccgagccgccgctgggtcttgccgagggagctcagcgtgcagcgatccccggacagctgtgctgctctggccgcccaaagttcagctccatccagtgaaagaggaaactcc

SEQ ID NO: 434923 - DNA, 122 bp, Homo sapiens
caaacacctatattcttatttcatttgatgggttataatccattactgtccttgtgtattcgaatgctcgaattctcctaatttggccactgggaggctcttgccgctggcttctctgtcct

SEQ ID NO: 434924 - DNA, 122 bp, Homo sapiens
ccggcgctgctgacacctcggatgaggggcactgacggcgcagtgagcgagatggtgctgcggtcggtgggcgccggcgtagtggtggggaaggtgcgcgcagtggacgccgactcgggcta

SEQ ID NO: 434925 - DNA, 122 bp, Homo sapiens
accctcgcgcggcgatctggccctatagcccaccccttactccgccgtggggcggagccgcgccacagctgacccaatgagaaaccgtcgtttcccagagtgacgtgtacgcagagcaatca

SEQ ID NO: 434926 - DNA, 122 bp, Homo sapiens
gcggctcctttaagggcgggtgggggcggggcgccggcggtgttgtcagtgtcagctctgcgcacgcagccctcccggagccggtgccggcccgcgagccccagcgtctctgcagaccagtc

SEQ ID NO: 434927 - DNA, 122 bp, Homo sapiens
aggaactgaaggggggctggagagaaactgcacatgatctgctggttctccatctcctaacgcagctcccagctgaatcttcccttgaaagatttgattttgtttccatacttttagaatct

SEQ ID NO: 434928 - DNA, 122 bp, Homo sapiens
gatctctaatgtggcagtgttgggcggtggggcctagtgagaggtgtttggttactggtgcggatctctcatgcataggttggtgctattctcaaggaaatcagtgagtgctcgccccgggg

SEQ ID NO: 434929 - DNA, 122 bp, Homo sapiens
ctgtagccggtacccggcgtagggacactgaggcgctggcaggaggggtccctgtgtaaacgtccagtggattcaccttgccagctgcctagagagagccgatttgtgaagacaggggaatt

SEQ ID NO: 434930 - DNA, 122 bp, Homo sapiens
ccggtgagcacaaaattcctgctacgaacagtgccttactgctgcttggagactgcaagtcgcagatcacactaggtattgactgattgtataaggaaatttcttaaagtctaaagtaaagg

SEQ ID NO: 434931 - DNA, 122 bp, Homo sapiens
gcatgtccctctgacatgcccagggttctcatccacagcagctgggtcacctgatagggccgccctggacttggggtccctccacctgggggcccctggacactgtctacttggagaccact

SEQ ID NO: 434932 - DNA, 122 bp, Homo sapiens
gagcgaaccggagctggcaccaggccctcatgacccagtgtttccccagcgtttaaaacgcggaccttagtgacttccctgtggtgtgtgtccttaggagtgaacacacataccatgttctc

SEQ ID NO: 434933 - DNA, 122 bp, Homo sapiens
gcgggctctgtgccgggcgggcgggcggcgggggggccagcgaccgcagccggggggacgcgggaggatggagcaagtggagatcctgaggaaattcatccagagggtccaggccatgaaga

SEQ ID NO: 434934 - DNA, 122 bp, Homo sapiens
ggatccccggggccttggggataccgaacggtctggggtaggggtctggcctggccggggcgtgtgagcgggacgtggggcaggggttgggcagagtggacagagcggggatgtagaggaag

SEQ ID NO: 434935 - DNA, 122 bp, Homo sapiens
tcactgggtccccgtttgctgcttgagtctcttcggagcccagtgttgactcccgctcttcgtggctgccccggctatctggccatgaggagctgaccacgcacctggccggactcacatcc

SEQ ID NO: 434936 - DNA, 122 bp, Homo sapiens
tgcgcggcgggaagagccggagcgcgttgatgtggttgccgagacaaccaagagggtggccggatttaacggctggggattaagcactttcaccgttgtaagggaaatctcgcgcacgcgca

SEQ ID NO: 434937 - DNA, 122 bp, Homo sapiens
ccgacccctctcctctgttccttccttccctaggcaattttgaagcatcctctaggttcccgattctacaccagacatgagagaattgaggaactgcaagtgtgtgacgctgtcccaccccg

SEQ ID NO: 434938 - DNA, 122 bp, Homo sapiens
ggaatttggagatgggcaagagatcctgggagctgccagtcgtggggaggagaagtttcccgggaggatcctgggccaaacacctgcactcctgggacccagagcctcagatgctccttagg

SEQ ID NO: 434939 - DNA, 122 bp, Homo sapiens
taaatacagtgcggaagtgcttctgatgaagtggcaggagagagaatgaaggaagatgatcgacaaaagcaagcagggtaatttatcgaaagctaagtaccccttgctacatgaacattttg

SEQ ID NO: 434940 - DNA, 122 bp, Homo sapiens
agacaaagcagtcgcaggaacatggggagtcagggctcgacgacgccatctggggagaggcgggcctctccataaccctggccacggctcagccccgaggagcagcctacccccacacgtgt

SEQ ID NO: 434941 - DNA, 122 bp, Homo sapiens
aaatatatatacacaatatgacagcagggggctggccttcaagtctctatgtaaacatcacgactgacttcggagttctggaactcttactcctgaaaaccttatattttcaaatggcatcc

SEQ ID NO: 434942 - DNA, 122 bp, Homo sapiens
ggcagaaaaagacaaactaacaagtaaacactgaataaatttaggggaaaataagatttgcgacaggagtgtggtcttctaaagcaggttttaatatcctaaaacatctccctatgcctaaa

SEQ ID NO: 434943 - DNA, 122 bp, Homo sapiens
tccatttgaatgaataccaggtcatcccaaagccacacctgtctcgtgggtggggcagcacgtggggtagaccatcgagcccctctattcccagcgtaaagccaggtagccagagcgtgcaa

SEQ ID NO: 434944 - DNA, 122 bp, Homo sapiens
gcgcgcggggctggggcagcggtaaccgtaactgtggccgcggccgccgcaggcgcacagcgcgcgtccaagtggagaacaaagtgacccccagaacttctccaactcctcccggcgttccc

SEQ ID NO: 434945 - DNA, 122 bp, Homo sapiens
ctgctggaggcgagtcagggacccgaagtctctaaacactcgcctctacccgccgccccgcgaaccccacacactgcagacgcgacactcgcaagtttcggggatggcggccggcgagggcc

SEQ ID NO: 434946 - DNA, 122 bp, Homo sapiens
cactttatattttgctacaaaattaatgaaggctgcatgcaggtgaaacattagtagacacggaattctagataactgttggttctcaagatctgatggtctgatgtggaaaattaatatgc

SEQ ID NO: 434947 - DNA, 122 bp, Homo sapiens
cccatccctgcggcgcccagagcaccagccctttctcgagtccccacacaacctcgaggccgggctccgggcatccaggcgtgtgctgtttcctagttattttcacgtccatacccctgcct

SEQ ID NO: 434948 - DNA, 122 bp, Homo sapiens
tgccctacttcccgcagcatccggatggcagggtctgcgtcggaaggcccgggagggcgacgccctccactgctgccgcggggtgggtgcgccaggcctgggtgtggcctcacgggagcgag

SEQ ID NO: 434949 - DNA, 122 bp, Homo sapiens
cagttactcaggtgctccacacaggggcgctccacacaggggcgctgtgggcctggggcccgttactcaggtgctccacacaggggcgctccacacaggggcactgtgggcctggggcccgt

SEQ ID NO: 434950 - DNA, 122 bp, Homo sapiens
ccccctgccttgggagcccctgggtatcagatacaaaaggcattttcggccgggtttggccgagaccgggcgctgcccgtggtgaggggaagggtgaacatctggaggggaggagcaggggg

SEQ ID NO: 434951 - DNA, 122 bp, Homo sapiens
gccctcggagcgctgcaccgtcgggggtggctctggccttggggtccggggtttaggtagcgccttgggagccccgaccccagcgttttagcgccgcccttgctactgaccgcatgaatgac

SEQ ID NO: 434952 - DNA, 122 bp, Homo sapiens
gggttctggcaatgctgatgttggattatgggctgtacaaaagacaaagagactagagaccgggggctttcctggggaattcagatccatggaagttggggactagaataggtgttaggtgg

SEQ ID NO: 434953 - DNA, 122 bp, Homo sapiens
cgatcctttggagcacatgtgatgcatggagcagcccaaggcctgctgtgcaggccaatacgagggtgcatgcctgcggccacagcagaactccggggcctgagctctgaagcaggaggcag

SEQ ID NO: 434954 - DNA, 122 bp, Homo sapiens
gcagctattccagaggcaacaactgcttccctctgttctcatctccccattggtggctggcgacccgaatttgggaatggggagattgcccacctgttatctttgagcagactaatctcttg

SEQ ID NO: 434955 - DNA, 122 bp, Homo sapiens
gacgtgccagctcttcttgggcaagatattcatggcgtcgtagctgtccagggactggcacgcccgcctctttgcacttccgattggcgagaggatgcccccctttttcttgtccctacttc

SEQ ID NO: 434956 - DNA, 122 bp, Homo sapiens
acctcaaccctgcacagcctgctagtcccacgctaaagtgattgaggaatggcacagagacgggagcgaacccccagggaggcaccaggcgagttgccggaaaggaagagttcgctacagga

SEQ ID NO: 434957 - DNA, 122 bp, Homo sapiens
cagaagctccctgggagcacagagcggttttaaactggccaacaccttaacgcccagagccgccctcctctcgctgccactttggaaaataagagactagagattcactggacgcttcctcc

SEQ ID NO: 434958 - DNA, 122 bp, Homo sapiens
ccttgggaaatccggggaggctgcatagaaaaagcccccatgcatcttggaaacccccaacgaggggaagtccccctatcacctggcagcagagagctactatggccttcctttaccactgg

SEQ ID NO: 434959 - DNA, 122 bp, Homo sapiens
ttgcacaaagcctctcttccctccactcagcaagcactcactctgtccaggggctagggacgccatcacagtccctgctggccagagaaggaccggggccggctgtcctatgctcactgccc

SEQ ID NO: 434960 - DNA, 122 bp, Homo sapiens
tgtctcaggaacctacgacatactcccttttcctattcctttttctgagccatggagtgtcgagttatacagtgccaaattccaggcagggtaagtcctgagggaagaatcaccctttgtgg

SEQ ID NO: 434961 - DNA, 122 bp, Homo sapiens
ccacgtcactcacaaggacctgcggtgttgctctgcaaccttcaacacgattgcattcatcgcctcactcacctgcaccacaggctcactgaccgtcatcatccgccgtgacccccgacctc

SEQ ID NO: 434962 - DNA, 122 bp, Homo sapiens
gcaggcctccccgcccaccagcaccgtgtcgtctgcaaggtcttcacattgcagggagcccgtgctgaccaccgagtaggaggacatggacatgtcgtctttggtttcatcgtcagacagca

SEQ ID NO: 434963 - DNA, 122 bp, Homo sapiens
gacgcgttttcagcacagtaattgtctttacgagggaagtcacacagagggagctttgctcgctgaggcttagaatttattgactgcctgctaaagttatgggccgcagtgtaacattccag

SEQ ID NO: 434964 - DNA, 122 bp, Homo sapiens
gcattgtgggaagggcgcagcatgaggatggccgcgggagtggcaggtccgagcgcagcccggagagccgcgggcagcgcctgggactacgggcagcgttggagcggagggctggccctggg

SEQ ID NO: 434965 - DNA, 122 bp, Homo sapiens
ggtgtctcttctctggacttccagaggccctacgcttactctcatcatagcctacatcatcgcggcatttaatcactgattgacttgcctaaatcctccctagactgtgggtttcttgaggg

SEQ ID NO: 434966 - DNA, 122 bp, Homo sapiens
tctctgtaagagttattgcatggatgctgcttctaggggcaggcaggcaggcaggcaaaccgtgctacatatttttaagaatgtcactggggaggaaaagaaagctctctttagacactacc

SEQ ID NO: 434967 - DNA, 122 bp, Homo sapiens
gcggcgcataatgaaggggaccgcggagggcggcggcagggaggctccggggcgcgggcacgcgtggggagctccgggtttgtgtctgcgcccggcgcttcctgcaggagcagtggcgctgt

SEQ ID NO: 434968 - DNA, 122 bp, Homo sapiens
tccgcgatccgggacttggcgatcttaattccgggttccgggatttgtcgatccgggctccgggatttcctaatccaagttcgcgagttcctcacagacccggttcgggacagattccgctc

SEQ ID NO: 434969 - DNA, 122 bp, Homo sapiens
cttaacaattctaccagtagattctattatggttcccatttcacagatgaggaaacagatcgagagaggttaagcaagctgaccagggtttatagtcagtaagatgcagagctaagattaga

SEQ ID NO: 434970 - DNA, 122 bp, Homo sapiens
gtgacgtcgcgccctgggacgggtagcgatggcgccaggggccgcccgcctcacgcccgccgtgcctgttcctggcaggtactaccgctgtgaccgaaacctggtgtggaacgcaggcgcgc

SEQ ID NO: 434971 - DNA, 122 bp, Homo sapiens
gaagaaatccgtttgtttagagtgacaagaagcacaaacagggcaggtacggaatacagacgttgacatattcacactagcctttttcagaaagcagagctccattatctcaaaaagctaaa

SEQ ID NO: 434972 - DNA, 122 bp, Homo sapiens
cttcaggttgggaattcctggccccctttattttttatcctctctccaaggaacaggcctcggccatcagtcaccatctgaggccagaggtattcactgcttgcctcctcacacctacacac

SEQ ID NO: 434973 - DNA, 122 bp, Homo sapiens
gcctcccgggttcaatctattctcctgtgtcagcatcctgaatagctgagattacatgcccgtgtcaccaccccagactaaatttttttttttttttgaaatggagtctcactgtgtcaccc

SEQ ID NO: 434974 - DNA, 122 bp, Homo sapiens
ctcatgaggacctgaagggtgacatcccaggaggggcctctgaaatttcccacaccccagcgcctgtgctgaggactccctccatgtggccccaggtgccaccaataaaaatcctacagaaa

SEQ ID NO: 434975 - DNA, 122 bp, Homo sapiens
aaaaaaaaaaaaaaggcagtcgcagagcggcaggagctggggccttggctgaatgcgggccgggctggccaggtggcggcgcggggctggcgtccggcgcggcccgcggaccaggcgaggag

SEQ ID NO: 434976 - DNA, 122 bp, Homo sapiens
ggtgtttccctgatttgtccataagtgtgaaatggagatgagtgtgtccattaggttcctcggtgcagtttcctaaactccccagcaacctgcggaggctctcagtgtgctccctctggcgg

SEQ ID NO: 434977 - DNA, 122 bp, Homo sapiens
cgtagtcgtgcccagaacgccggcgtggcccagactccattttggaacttcgcaggctggcgtggacgaagtaaacacatttatggaaaaaccccggggttaggaggtttgcggaaagaggg

SEQ ID NO: 434978 - DNA, 122 bp, Homo sapiens
cggccgccgcagcacccagcaccgcgccgctccccacagtcgcacgtagccagtgctcgccgccatagcccggccatactggcggctcacacaactcgcgtcatttccgctcgccgcgaaac

SEQ ID NO: 434979 - DNA, 122 bp, Homo sapiens
agcagagcggggactgcaattcccagaagaccccacggtaggggcgggacccaagatggccgcttgtctggggacaggagcggaggccaatacgcgcagagcatgcgcctacgccgggccaa

SEQ ID NO: 434980 - DNA, 122 bp, Homo sapiens
cgggcccggaaacggggggcgccggaccactccaccgcctcggggacgggggagggcggacgagaccactccaagccagggggcttctccgagacaaagttgcgccaccgaccccagaccct

SEQ ID NO: 434981 - DNA, 122 bp, Homo sapiens
tgccggcggcgtcgacagcgacagcgtttggaatgacgcatgcctcggtgaagtcgggggcgtgaagcaacactgtctctctcctaagcacacgctgtgccgagggaccggatcctgggctg

SEQ ID NO: 434982 - DNA, 122 bp, Homo sapiens
attttctaagttttttttatgaaagtttgaaatatgctgacttaggtaaaagacaccaaccgaaggaacttgcaaatctggagatgagataactgactgtgatgggttaaagggagctataa

SEQ ID NO: 434983 - DNA, 122 bp, Homo sapiens
gggccagaggcctggggctctggactccaaggtggccccggttgcaggctcttctcaccccgccccctttaccggctgcctcattcctccgccccccccttacacgtttgcacgcgcttttc

SEQ ID NO: 434984 - DNA, 122 bp, Homo sapiens
gggctcctcgggggaggagtcagtaaaagtggctataaaagcggcctctcggctgagggccggggagctagcgctcaagcagagcccagcgcggtgctatcggacagagcctggcgagcgca

SEQ ID NO: 434985 - DNA, 122 bp, Homo sapiens
agctgcacctgggcctcacgggggcgcacgttgaagccattatagcgggccgtctggcagcggtaggtcccgctcatgtctcggctcactcgctccagccgcagcttcccgtccggagtctc

SEQ ID NO: 434986 - DNA, 122 bp, Homo sapiens
ctatttgtaatactgatttttatgcagtaaatcctcccactatggacaatttcaagctaccgatgtggtcagtgaacgtggagtttggaagagatgcagagtagcacatcattatgtatttt

SEQ ID NO: 434987 - DNA, 122 bp, Homo sapiens
cgtttctgaaaggatctgaaatgtaaattttttcacgtgtgttagcatgtatcgtcattccgacacccatatgaagcacataaatgaggattaatcgtttatttttaatcccgcagtctaaa

SEQ ID NO: 434988 - DNA, 122 bp, Homo sapiens
tcatatctgtaaaagtgggagctgtgatctgtaccctctgccaaacgtttacgtgggaggcgggagcgggggctgagggcttcgtcttttctcccctctgctatcaccggttctggaccttg

SEQ ID NO: 434989 - DNA, 122 bp, Homo sapiens
aatacagcacaataagaaagtgtgaaaggggccgggaaaggtggcgggagcggggcggcacgtgggttcccctcacagcactgtgcacggtgcctgcttgggttcctccatgtggaccagca

SEQ ID NO: 434990 - DNA, 122 bp, Homo sapiens
gcccctgcgcggagaaggcgggactcgaactcgcgctgctcccgggccttgagccgaccgcggaatcacctggctgggaggcatcctccaggtaagcttgggagtatgtgtgcttagtgctg

SEQ ID NO: 434991 - DNA, 122 bp, Homo sapiens
ataaataaataaatagcttcacatagctgccagcatggcagacacaataggtactaaaaacgaactattttgctcctcccctcctccaggtggccttcctagatttacccccatctgggata

SEQ ID NO: 434992 - DNA, 122 bp, Homo sapiens
agctaagaaccatttggtgggtggagaggaacagggatcagttatttgatgagtcagaaacgcttaaatgtagttccgagactctgcagttctcactcctgcagtgagaaggggaggggtgg

SEQ ID NO: 434993 - DNA, 122 bp, Homo sapiens
tccttcttccaccacgagagggcgctgtctctccacgagaggcgcgaggtagctctagtacgcagccttcactgcttcgcgggcgagccccgctctgcggaaaggacgacgctgccacctga

SEQ ID NO: 434994 - DNA, 122 bp, Homo sapiens
gactgcagccctcgcctgcctgtgtgtagcttgtttcacttcggtagaacattagctgaccggacacatttttgccacaccgttttaggaaaggcataggattctggctttcttataaggtt

SEQ ID NO: 434995 - DNA, 122 bp, Homo sapiens
cagagctaataattcagaatggtttatctgaaatctcagtggggcactagaaaggcatgacgttggcactcatccactgatgggagataatactcattactgagctacacataactgccact

SEQ ID NO: 434996 - DNA, 122 bp, Homo sapiens
tgtggccaccccctccctgtccttccatcttcatttagtcactttctgcctggaattccacgacccacttctatggattgacttgaatttttttgtgtttggactgcattctactccacatt

SEQ ID NO: 434997 - DNA, 122 bp, Homo sapiens
acaccagaggcaggcaaagccacacctgtgggtgcaggccacacgcaggctgcacagacccgggacaggtctgagctctgaggcgtgcggcccatctccgcggcaggagcttctgtctgagc

SEQ ID NO: 434998 - DNA, 122 bp, Homo sapiens
ctgcgaggagggtggctgacagctttctcctttcctctccccttttcgtggagggctccacgccttgttccagcccccccttccccctttcaaaaagagacacatgggaaatccgcagcatc

SEQ ID NO: 434999 - DNA, 122 bp, Homo sapiens
ggtgagaaaagtgtcagttcactagcaatttgtattaatttctcagtagtatttttgccacgtttgattattgtaattttcaaatggagaactggagacactaagggagatttgcccaaatc

SEQ ID NO: 435000 - DNA, 122 bp, Homo sapiens
taacacaggtccatgttcacatgcatgcaagagtaacatgaagttaaactcagcactttccgcacagtagatgccctacaatactcgagtaagtagttaaagatggtcattcctcataaaga

SEQ ID NO: 435001 - DNA, 122 bp, Homo sapiens
cccggaagccccgccgccggccgctaaggcgatcacgggccctgtcctaatatgggcaaccggaagcggcccgcgcgactgccctacgtcactccgtccaaatttagttgtggaagtcagcg

SEQ ID NO: 435002 - DNA, 122 bp, Homo sapiens
agcgcagaaggcccagtgtttgcttttatttcctccaacagaaggttctatttgtggaagcgaacagacgctggggattagagctgggagggggcaggaaaagggaaaaaaaaaagccacat

SEQ ID NO: 435003 - DNA, 122 bp, Homo sapiens
aaaggcctttttaaatggtcttgtctgaggattgcatttgaaacttgcactaaaggcccacgttgccttagaagaacctgcgcttatcaaagctcacaggtagtgaaatggcctttatttgg

SEQ ID NO: 435004 - DNA, 122 bp, Homo sapiens
ctaatgcagagacaccttttaattagcaggtcatatggccatttaaatgcgagttgcaatcgacctcataaaaatagccgcagtgttgttttattctgaatcgtcacatgatcatggagtat

SEQ ID NO: 435005 - DNA, 122 bp, Homo sapiens
ctcctgctcgcgcatctgcctctccagggactcgttctgtgggatggagccggccggtcccgcggagccccgacccgacttggggaggtttcgaggcccggcccccggccccaggccccgcc

SEQ ID NO: 435006 - DNA, 122 bp, Homo sapiens
ttcagtgctacagactgcagcttgtggtggccagttagtcggcaagtcgtcagagggtctcgatttggcaggagctatgggatggtattaatacattggcagagcaacccaagggggcagca

SEQ ID NO: 435007 - DNA, 122 bp, Homo sapiens
caggcttctgggaacaggcactgggactttttccccccacagccttcttagcgtctaatccgtcactgacttgctgccccgatctcggcacttaagagaagtttaaacgaaaaaaaattttt

SEQ ID NO: 435008 - DNA, 122 bp, Homo sapiens
tttccctccacccttagtagtccccagcgtgatggcctgcggagtgactgggagtgtttccgtcgctctccatccccttgtcattctcaacatctcagaccactggatccgcatgcgctccc

SEQ ID NO: 435009 - DNA, 122 bp, Homo sapiens
tccttcaccgcatgaaaggaatccttcagaacttactttcagggacggcttcttctatctcgaatttttgcatttgtagggaattttatggggtagaggagcgaagagggaacaatgtctcc

SEQ ID NO: 435010 - DNA, 122 bp, Homo sapiens
gcgcctgtagtcccagctactcgggaggttgaggcacgagaatggcgtgaacccgggaggcggagcttgcagtgagccgagatcacgccactacactccagcctgggcgacggagcaagact

SEQ ID NO: 435011 - DNA, 122 bp, Homo sapiens
ggtggaggagaagggggaggtcggctttccatttccagatgtgacctcccagctgctgctcgccgctgctggattccaatttcctccccttctggcgatggattggtgatgaaaccgagtct

SEQ ID NO: 435012 - DNA, 122 bp, Homo sapiens
ggggtctggattcctggatctctgctggggacgtggcttagaagcgctgggtatctggggcgcagagagggtcaagaattggggagcggggaagaaataccttggggaggggtctacagggt

SEQ ID NO: 435013 - DNA, 122 bp, Homo sapiens
ggcaaaagcgccatgggggaagttagacgtgaaggtcttcgacctcctttccccaagcggcgtccaagctttggactgactgtgatgttgagctatggaagacaaagccctgaatttggggt

SEQ ID NO: 435014 - DNA, 122 bp, Homo sapiens
aaactgcatcctgggaggcatgtccctctcaggccgtttaaagagaaacactccgaggctcgtcggaggctgccggaacccagacagctccatctacagccggtaggagcgaacagtgtcga

SEQ ID NO: 435015 - DNA, 122 bp, Homo sapiens
acgtgtatatgtgagcagtgacaacgtgctagcagccctcactggctcttggcacctcctcggcctccgcgtccgctctggccgcacttgaggagctcttcagcctgtcgctgtgctgtggg

SEQ ID NO: 435016 - DNA, 122 bp, Homo sapiens
cagatccccggaggagttgttgctgggcggagtcagagcagttcttgaggttcaaggaggcgggggagacctgagctcacgcttgctgagacagaagtcacagcaggattatgcccctcagg

SEQ ID NO: 435017 - DNA, 122 bp, Homo sapiens
aagttaggcctcatgaacagggagggcaaaccaggcctgcttgggggtcggggtcggggtcgggattggggtggggttgcagatgagatatctgaggccaagccctgccctcctgtagcttc

SEQ ID NO: 435018 - DNA, 122 bp, Homo sapiens
tgttcattgtgctttccaccattgctttgtctctcaatacgctgccggagctgcaggaaacggacgaatttggacaactcaatgacaaccgccaattagcacacgtggaggctgtgtgtatt

SEQ ID NO: 435019 - DNA, 122 bp, Homo sapiens
aactcctccgccctcccgcggcccggctcccgcagcccccggaaaagccagctttcctcccgccgagctccccgctttttaataaaatccaggtagcgccggtttaaagaatcccaaatctc

SEQ ID NO: 435020 - DNA, 122 bp, Homo sapiens
aaaatgatatctcttggtccgctgtgtcctgaaggctccttctcagccccactgggctgtcgtgctttgcaatcctccctgtgcacatttgtgtctgaccttccctttcctaagtcctccat

SEQ ID NO: 435021 - DNA, 122 bp, Homo sapiens
aatctgagtcgagagccctcctggcccacatgggatatgccctgccctgcccgatgatagcgggacttcattgggacttaggcaaagactacctggtctctggcgcccacgtggcccacgtt

SEQ ID NO: 435022 - DNA, 122 bp, Homo sapiens
caccaggccgcccccctcgaggtatcccacgcaccaggccgcccccctcgaggtatcccacgcaccaggccgcccccctcgcggtatcccacacaccaggttctctgctgggaaccgttttc

SEQ ID NO: 435023 - DNA, 122 bp, Homo sapiens
tgcccagtggtgaaatttttaaactttggtaatgatctccaggttcacccctatggataacgaaaatattttaagaacctataagggtgccaacctttcagaaccatgtctctttgcaagga

SEQ ID NO: 435024 - DNA, 122 bp, Homo sapiens
ggcgtccgagagagcccctgagcccggcccggaccagcgcccgtgctcagggcagctgtgcgctccgcgctgccttctggttctgtgtgatggatgtgatgcttgcatggtgctgtccctgc

SEQ ID NO: 435025 - DNA, 122 bp, Homo sapiens
acggctgggcagtctgcgggtgtcccttctcccagcacgcaaggctcatctcaagctgcacgaaattgcagaagacactggcaatgttaaaaacacacatgagtggacgggttgctcctgag

SEQ ID NO: 435026 - DNA, 122 bp, Homo sapiens
gggggcggtctggtggccacccaggagggtcggtccggtggccatgcaggaggggcagtccggtggctgggcaggaggggtggtccggtggctgcgcaggagggttggtcgagcggccgcgc

SEQ ID NO: 435027 - DNA, 122 bp, Homo sapiens
tgtgtattcattcagcaagtatggatcgcatgtttagcacatgggacccccagggctcaacgcagctcctgcccctcccaggaccctgccttcttcctgggccccacctcctgtcccaggcc

SEQ ID NO: 435028 - DNA, 122 bp, Homo sapiens
ggtgcaacctgtcggaaagacacgtaaccccggtgtaggagccaaggactccaagctccccgctcccttcggatccagtgcagttcctgccaggaaggcattggcctctggggaaggacccc

SEQ ID NO: 435029 - DNA, 122 bp, Homo sapiens
cccactgggagaggaagggcggggctgccactgggcaggcagagactcgagcccggggcgcgcccggctgggagccgggaggggaggcgcacgttgactacgggccattcaagtgcgggaca

SEQ ID NO: 435030 - DNA, 122 bp, Homo sapiens
gggccgggtatcgagggaggcaaagctggggtcccagtggtgtggctgcggtctggggagcgctttcagtctcagatttagttggcctcactgttaacctatttagagctttttttttctta

SEQ ID NO: 435031 - DNA, 122 bp, Homo sapiens
ggtctcctgcctgagatgcaggttggggttctaactgttcccggcctgtgtgagggcctgcgttcgcgtgcactggtgccctgcaggtcttggtcggtgacaccgcctctgctcttagcggt

SEQ ID NO: 435032 - DNA, 122 bp, Homo sapiens
ttctgtggcagccttctgggccagtgcctaccatgcataggacaggtactgaatttgacacggctgcaggcatctgcagggccagcgctcccctctctccaccgttctgtccaaagggctca

SEQ ID NO: 435033 - DNA, 122 bp, Homo sapiens
cgggcttctgtttcttcactggaaaaaaagtgaagtcgtcgaacaaaaccgagcccttatcgtgtgccaggttttgtgactagtgttctgtattgttacctcatggaacgctcacagtaacc

SEQ ID NO: 435034 - DNA, 122 bp, Homo sapiens
cctggcaaccaagaaagcggctgctcttcctcctccacacagccaccttggtgagggagacggggcgggtcagggacggggcgggcgcaggaagcccagctctcaggcggtgaagggggcgg

SEQ ID NO: 435035 - DNA, 122 bp, Homo sapiens
cgtcggggacgcataggaccctcgccctggcccccgggcctcccggctgcatctgctcaccgagtctaagatccagcggacaccagggctgcaggccgctaccaaggccccgcaacgccacc

SEQ ID NO: 435036 - DNA, 122 bp, Homo sapiens
gtaccctaggagctatgaggaattcagggcaggaggtggacggggctggctgtttgctaacgattcaagcataggcctatggaatgtgaagcatctgtgacacatccctgtccggcactcaa

SEQ ID NO: 435037 - DNA, 122 bp, Homo sapiens
aaggcctctaagtgtaactgtcctgggcgaggcgcggcggttcggttcccatggtaaccccgcagctccagcgtcgcgcttccgggcggacgagcagcgcgctccagtgacgtcacggcgcc

SEQ ID NO: 435038 - DNA, 122 bp, Homo sapiens
cctcgccagctcccttgccccgcgggcggcctgttgctgtttgtttgttttacgaccctgcgttattgtgcaacggtaacagtcgtttccaatcagctgcgcggccgtcgcggccctcgcca

SEQ ID NO: 435039 - DNA, 122 bp, Homo sapiens
cttcctgtaactgcccaggcatgatggttgctcggcggcacattcctccacggattgcagcgggctgcgccgagccaagagcgcgtgcttcagctcttcccagaagatcgaagaacaatttt

SEQ ID NO: 435040 - DNA, 122 bp, Homo sapiens
agggacgtcagcatggggcctgctccgtggttactgcagagctccaatctgctttagccgcgtcagcagttccccaatctgttgcatagagactagatcactgcatccgcctatacaatctt

SEQ ID NO: 435041 - DNA, 122 bp, Homo sapiens
ccgagtagctggaactacagacaccagccactgcgcccggcaggacttgcattttcactgcgtaccggagcccacagattacggcgccagcggtaattaggggacttgtgccatttccacac

SEQ ID NO: 435042 - DNA, 122 bp, Homo sapiens
cccttccgggactccgctgggatgtggcgtctcatctggagctcacctcctgaagagaagcgtccacagcttcaccgccatgaagggaaaaaggagagagaggcggggagggccacggagtc

SEQ ID NO: 435043 - DNA, 122 bp, Homo sapiens
aaagggcgcctccatttcagggaaactcctgctcatttatttagcatcttcagagatcatcggcttttccaggaagagcttttctcttagagtatcacaagagaaaaataataacttcgttt

SEQ ID NO: 435044 - DNA, 122 bp, Homo sapiens
tcaaacactcctgtcatcgctcacgggcggcggcagcggctgtccttgctgttgtggcggcggcagctgccctagttggctgtggggctgctctggtctaagcagacatggctgtgggagcg

SEQ ID NO: 435045 - DNA, 122 bp, Homo sapiens
gagaagcttggccccggtcagcggctccaggagcccggaacctcctccctggcggaatcccgggcaccattcagccttttcgaaggctccagacttcgcgctgctcctcctcccgaggaggg

SEQ ID NO: 435046 - DNA, 122 bp, Homo sapiens
ggcagagaagggcgcccataaatcgcgggtgtcagggcgaaaaactctctttattgtctgcgtgatggatgggcccggggacgagacaccaaatacttcgtatcgcctttaaatgggaacac

SEQ ID NO: 435047 - DNA, 122 bp, Homo sapiens
tggatccctgtaaacatagtctatgtagctagtgtctgatgattcaacttcccacatacacgtattccagaacaaacagatcagtaaatccaggcaaacctataaagagaacagatattaac

SEQ ID NO: 435048 - DNA, 122 bp, Homo sapiens
gagggatggggtggctcttactcagctctggattccatggtccctgcagggccagcccagcggggccctctccccaggggtcctgggggcctgtgtatgctgggccccaagccggctcagct

SEQ ID NO: 435049 - DNA, 122 bp, Homo sapiens
cgcgctccatggctcccggccgcccgcccgtgcgtccgtcggtccctccgcacccctgcccggcctcctgcaccgccaccgccgcagctccccccacggacggaagtgagcctcgttctcac

SEQ ID NO: 435050 - DNA, 122 bp, Homo sapiens
aaacttagttgataaattagtgggattcttccatttctccaccaggtgacagcataagcacgtcaaaatagcaaaaattgtctcagaacacagtatttggtctgacattgaacattactgct

SEQ ID NO: 435051 - DNA, 122 bp, Homo sapiens
ggcacgtcccctaccggaagagaagggcacgccccctaccggaaaagaagggtgagggcgcgcccctgccagaagagaaggaggagggcacgtcttgcattggaagaggagggtacatcctc

SEQ ID NO: 435052 - DNA, 122 bp, Homo sapiens
cccgactcctgtgattctgccgggaggtttggccttcccagggagctcggctcaagccagcgtggatccagctccaccccacgtgccctctgagccgctacagctgtagcatctcgcacagg

SEQ ID NO: 435053 - DNA, 122 bp, Homo sapiens
cgcccccgcccccgcccccgcccccgcccccgcccccgcccccgcccccgcccccgcccccgccccgctcggacccctccgctgcgcgcgcagtttcccacaaacccggaagcggatcgcgt

SEQ ID NO: 435054 - DNA, 122 bp, Homo sapiens
tcagccaacatggtgaaacccgtctctcctaaaaatacagacattagccgggcgtgatgacgggcgcctgtaatcccggctactcaggaggctgaggcgggagaatcacttgaacccaggag

SEQ ID NO: 435055 - DNA, 122 bp, Homo sapiens
attcctgggggacttcacttaacccttagttctcccaaacttgttttcaatgcactgttgcgtgggggctcctcgttgcacccagctgtgcggcagatgtgctttttgtattctgggaagta

SEQ ID NO: 435056 - DNA, 122 bp, Homo sapiens
ctgaaatttgagaaaaatctaaaggaagtaaaaaagagctgggttatttccttcaaggaacgagtaaatctgcagggcctctgaatcaagggaggacccctaggtctccacaggcaagtcct

SEQ ID NO: 435057 - DNA, 122 bp, Homo sapiens
gaggaagttcgccccgcgcctgcctcgcaaccgcagccgcctccgtgcgcttcctgcccgcgccgccctccacactgcgctccgtgtctggcagcagcccccgcctcgctgggcgcgttccc

SEQ ID NO: 435058 - DNA, 122 bp, Homo sapiens
tggtgacgccgaccctggggagaagggccttggccgcccctgcggagggggagccctgtccggaggtggaggagggttttcagctcaggaacaacggtcacatccatgtctcaggaagccac

SEQ ID NO: 435059 - DNA, 122 bp, Homo sapiens
gacggacggatgcacggatgaatggatggatggagccccgtgcaaaccaaggtttcatcacgtgcctaacgactccgctgaaagtcccagggaagcagatgatttattattattattattat

SEQ ID NO: 435060 - DNA, 122 bp, Homo sapiens
tccggggccgggggaggggggcagaggataatattccctcaaatttagcaggtggtttgacgccccttgtggtgttgttttacatatccagcgggaaagacaatagtactgtttttgaaagt

SEQ ID NO: 435061 - DNA, 122 bp, Homo sapiens
gcggcggccgccctccctcgctgggctcccgaggcggcgctccccaggcgggcgcggggacggccctgtctggcctcaccagcacgtggggcgctgcctgcgctccagccgcggcaccctgg

SEQ ID NO: 435062 - DNA, 122 bp, Homo sapiens
gcctggcgcgaatgtgggtcctggaagggtgacccacggtgcctgtttgcctgggacatacggggtttccagaactcggggtattcgatgcaaacctggcagtttcccggcaagctgcttcc

SEQ ID NO: 435063 - DNA, 122 bp, Homo sapiens
agcgagactctgtctcaaaacaaaaccaaacataagaattcgtaaaagcgagtgcctaggcgaagctaatgtgcctcaaagtcctgggtaagtagaggccctggagacccgtccgcatcctc

SEQ ID NO: 435064 - DNA, 122 bp, Homo sapiens
tggtggtggtgggggggtggcggcggggggcaactggtgggtggaggccaagtcacaagtcggctgctgaacaccctactaggcaccagaccaaccccccaactacagggaattatccggca

SEQ ID NO: 435065 - DNA, 122 bp, Homo sapiens
ggtggttccgcgggccccgtgcgctcccaccttcacccagagggccttctctggtgcagccgctgcttcttcagcctccgcccaaaaggaacggaggcccctggctgatccgcaggcctaca

SEQ ID NO: 435066 - DNA, 122 bp, Homo sapiens
cacagcctgcaccaggtagttgtccgtgttcaggctttccagcttgtcccccatcagcaccgacttgcccgtccccgcgttccccaccagcatcaccggccaggacttctccatgagcaggt

SEQ ID NO: 435067 - DNA, 122 bp, Homo sapiens
ctgtcttcccagtcgggcgggcgagatggttgcaaggacggggacgctgtctgcctcccgcggactcttcctgggccctggaggagcctgctcttccaactgcccggaggtggacgtggacc

SEQ ID NO: 435068 - DNA, 122 bp, Homo sapiens
gaggagaagggagatgggcgccagaaagggagaccgaactcggggtgggaccaggagcggcggtgcaggagccgctaccgccacaccggagacgcacatcacacaaaacacacacaccggag

SEQ ID NO: 435069 - DNA, 122 bp, Homo sapiens
ctctgaaaattgcacacacccatgtttaaatgtacacacagaactcttgccacaggcaagcggagatttgtcatctgctgtccctgcctcatcttcttcctgaaatccactccatgccagga

SEQ ID NO: 435070 - DNA, 122 bp, Homo sapiens
gccctacgaatgcattgattgtgggaaagccttcaatgatcgctcaacccttagtaaacacgagaggacacacactggaggcaaaccctatgaatgtgaccattgcgagaaagcctttagcc

SEQ ID NO: 435071 - DNA, 122 bp, Homo sapiens
tcgccggcctcctgattgtggcagaaggccacatcccttggggtggtggggttagtacgacggcaggttttgggactcattcctgcaagcccaagccagaacttgttctgcaatggttctga

SEQ ID NO: 435072 - DNA, 122 bp, Homo sapiens
aagtgccgcccgaccttcctcttttggggaacccgcactttgtcctgggagcgtgcccagcgccttagtaccaaactttctggccggggctggcagagctcagagtcccgcttccccctagg

SEQ ID NO: 435073 - DNA, 122 bp, Homo sapiens
caacccccttcccccgtgctcagaacatttttgctgggatttaagttgttcttacctgcacgcacatttaacactcaacattgtggttcctgggttaccatctggggataattcaatatgct

SEQ ID NO: 435074 - DNA, 122 bp, Homo sapiens
tataatcagatgtggaaaatatttaacatcacattgagtcctccagtttgaatcagtacacgtgataaattgcatgggggtgtttcatttgtcttgcaacagaaacctttatctttgcctgg

SEQ ID NO: 435075 - DNA, 122 bp, Homo sapiens
cactggaaggaaccaactccggacacacttctaggagactacttccagtcaaatggaatgcgcttcctctgatcaagaaatgaatcctaccataagttcaaacatatctatacatacctata

SEQ ID NO: 435076 - DNA, 122 bp, Homo sapiens
catgcccatacctagactggtgtttgttcaagagtaggtgcgcacacatacacgctctttcgctctcgctctctctctctctctgctgctgtttcatggcaaaagcgtgtttctgtcattcc

SEQ ID NO: 435077 - DNA, 122 bp, Homo sapiens
cagaggagaggcagggcttgcgcggcgtctgggaagagtgcaatctggggggacgcctcccgtccccccagcgcagatgcatgactggggtaggaatgatctttgctgataagcctttttct

SEQ ID NO: 435078 - DNA, 122 bp, Homo sapiens
attaatacacatgatggagtcattctcgtcccgtttgttccttcatttaaaacacacggccgggcgcggtggctcacgcctgtaatcccagcactttgggaggccgagacgggcggatcacg

SEQ ID NO: 435079 - DNA, 122 bp, Homo sapiens
cctaagagtcacccttttgcttatattcatgtagacctctgaagagactttgacaacagtcgtccaagtgtatgcattaaagatgtttttcaaacacaccctgctttctagtgctacaagga

SEQ ID NO: 435080 - DNA, 122 bp, Homo sapiens
catgggtggcttggggggattctgcgagccggagctgtccccctactctcctcagggactcgttggttcgcgccagcgccttttaagggcaccgtggggcgaaccgagcgctcagagctgct

SEQ ID NO: 435081 - DNA, 122 bp, Homo sapiens
gggaggccgcgccctacgggtgctggtggacatggacggcgtgctggctgacttcgagggcggattcctcaggaagttccgcgcgcgctttcccgaccagcccttcatcgcgctggaggacc

SEQ ID NO: 435082 - DNA, 122 bp, Homo sapiens
cgggccggtcccgggggagggcctgagccgcacagcccgcccaggggtggtgcgtgtaaacgggcgtctggatccccgaatggttgcgtgtttccgtgtgtgggtccgggggaggcccacga

SEQ ID NO: 435083 - DNA, 122 bp, Homo sapiens
atgaaagagtcaaagaaaagtgcaaatgtaatgccaagttcccttccagaaaggtcgtaccgcttttcattctcagcagcaatatactaagactgtctattgcctgtcgacttcccaacatt

SEQ ID NO: 435084 - DNA, 122 bp, Homo sapiens
tccggaggagcaggcacggcctcaggctggcatcgggacgtgggtcctggagcacagccccggggccatcctgccaggagtacggaaggttctggaatttggaaagccatgcaaggcctggg

SEQ ID NO: 435085 - DNA, 122 bp, Homo sapiens
ccaatcaggcacgcagccagagaggaggcggtggcttccgggatgtggcgcgggtctttgcgtctggctactaccagaccgcgggttaggggcttcatctctctgcgttctcagttgtggga

SEQ ID NO: 435086 - DNA, 122 bp, Homo sapiens
cttttcgcatctgcagactcatggaggcaaccactcaaggtcactctgagaagggttgaacgtgctttattaaaaggactgaggatcatgtgtgttggtgtgtcccggagtctgctctaagg

SEQ ID NO: 435087 - DNA, 122 bp, Homo sapiens
tggcaagcagctgctatgttcggagctgactgtgttcgtcagaccagggccagatggacgcgtgaaggcgtgtgtctgacagatgaccgggtcttttaatgaaccactcacttgaaaattgt

SEQ ID NO: 435088 - DNA, 122 bp, Homo sapiens
atctttaatattcgaatggcacatgtgcatttgaggaaacctagattgcctcaggccacacggaaagcatttacatctgaaccactttacataggattgcaagttaaagcaaattctaaata

SEQ ID NO: 435089 - DNA, 122 bp, Homo sapiens
ggcctcattcccggatcaccccagggctattggcctggcaagaaaaggctgctccatcaccggcatgggtgctgtgaggccaccaggtctaggcctcagtttcccaaactgagttgttgcct

SEQ ID NO: 435090 - DNA, 122 bp, Homo sapiens
atctcctggctgaggctgtgactgccaggcctccccacgcaaagacgctctcgtcttccccgccccgcaccgcgctctcgaacgaagctgctgcacgcagaccacactgaaggggtggggac

SEQ ID NO: 435091 - DNA, 122 bp, Homo sapiens
acataaagcgtgcctactctggatgctgggtactcttcataaactctgactctgtgtggccggtactctacataatgcacacctactgtgtgccagatgctctatataaagtgttttttctg

SEQ ID NO: 435092 - DNA, 122 bp, Homo sapiens
acactcactcggtgatctcctctgtgaccgtgtgctccacctgcaggcgggagttgacctcgatgaagtagtgcttgccgtgcctgtccaccaggaactccacggtgcctgcgttctcgtag

SEQ ID NO: 435093 - DNA, 122 bp, Homo sapiens
ataacagcagccccactggaaccagtgggcacttccacatggagttgctgttacagggggcgggaaccaattggagaccggggccctgcctggcgtccgccttcggcagggctctggagagt

SEQ ID NO: 435094 - DNA, 122 bp, Homo sapiens
acagcaggaggtgcctcggagctggctgcaccagagctctgatctcacaaatgaacaccccgtgcctcacacaccaccaaggcagcagcatcacgccacaagagacacgtgtgcacccgtgc

SEQ ID NO: 435095 - DNA, 122 bp, Homo sapiens
gcgccgggcgcctggaggtgacctggggcaccgtctgtgatgcggccctggacctggccacggcccacgtggtgtgccgggagctgcagtgtggggcggtcgtgtccacgcccgagggcgcc

SEQ ID NO: 435096 - DNA, 122 bp, Homo sapiens
cgggccgccgccggccgccgcagccgcagcggtggccgggccgtgcgcgccggtgcacgtcgctcattagtaagcaggcacattcctgcctccagcgctcccgcgcggccccctccccccag

SEQ ID NO: 435097 - DNA, 122 bp, Homo sapiens
ccagccctgactcacggtggcatctcactctctccctgtaatctccaaacattaaacatgcggcgagcaggacagctttggttcaaacacaaaaccactgagatgaaagatgaagcatgaaa

SEQ ID NO: 435098 - DNA, 122 bp, Homo sapiens
tgtcaagtaaactctctgcacctgtacgaagcagttaaattgttccatctgccattagcccgggagatcaaaggcccttcctgggaggggtgcccgaggaccaaagcaaaggatggagctcc

SEQ ID NO: 435099 - DNA, 122 bp, Homo sapiens
cagggtcttctgattctgctaggagagacttctgaaaggccagcaacacaatgcctctttcgtcctcctaaatggggaaaacgggagagttccctaagctgcggtagcacactgatcagtct

SEQ ID NO: 435100 - DNA, 122 bp, Homo sapiens
tcaggagtctgccagctgtaccacatatttatttataaaattaaaaacccctgctgggtgcggtggctcagcctgtaatcccagcactttgggaggccgaggcaggcggatcacgaggtcag

SEQ ID NO: 435101 - DNA, 122 bp, Homo sapiens
cgaccaccccgggcccggcacagagactgcagggaaggcactgtttttcgtgggatttcccgcacccccccccggactgcctcaacatcccctttcaagcctgacctcctgttcccttccac

SEQ ID NO: 435102 - DNA, 122 bp, Homo sapiens
ctgtattcctgccttcccagtaagacactcatctctttaaggaagcaaccgggttctaatcgtttgtgtaccaccagggccctgctcactatctaggccatagtagaaactctgtggtttga

SEQ ID NO: 435103 - DNA, 122 bp, Homo sapiens
tcggcttcctgggggctgccgggctcggagcacgcggagaaggcgcagggttcgcagcagcgctcggactcagtcccccaatggcggggaagaccggctgggacccgggccgggggccaggg

SEQ ID NO: 435104 - DNA, 122 bp, Homo sapiens
gccgggctctatgtgactgagtctccccagccccaggaggctgaggctgtgagcctgggccggctgagtgacaagagcagcaccagcgagacctccctgggtgaggagcgggctccagacga

SEQ ID NO: 435105 - DNA, 122 bp, Homo sapiens
cgcggagcgcacccgcagtcagctgagcgcgctggagcggcgcctgagcgcgtgcgggtccgcctgtcagggaaccgaggggtccaccgacctcccgttagcccctgagagccgggtggacc

SEQ ID NO: 435106 - DNA, 122 bp, Homo sapiens
tgacaaaaattggtaaggtcgtttaggatactgaagtcgagtgtgccttcggggagccagcgagattggtcgtctaaggtatattgcggccaggcaaccatgcagaagaaaattagtcgctt

SEQ ID NO: 435107 - DNA, 122 bp, Homo sapiens
tatctggggccagagtcgcttgccacacccccagctatatttttttttattttgtagagacggtgtctcattatgttgcccagtctgatctcaaaccgctgagctcaagcagtcctcccgct

SEQ ID NO: 435108 - DNA, 122 bp, Homo sapiens
gctatttctccaaggagcactggttactttcattggagaatgatatcagaaaccaagatccgggtgctaggttatgcttattgctaccagggtacacagacattttaatgtatgtgtaacat

SEQ ID NO: 435109 - DNA, 122 bp, Homo sapiens
gaccgccccctagatcgccccccgggaccgccctctctagaccgcctgcgagactgtccccggaccgccccctggaccaccccctaggcggccccccgagctgtccctggaccgccctctag

SEQ ID NO: 435110 - DNA, 122 bp, Homo sapiens
cagtttctgggggttcgagtctttcctttctcatttaggttttcacataggctggctcttcgaatgtatggtaaagtggtggacagccgtaaagccactctaaattagtagatggttgttca

SEQ ID NO: 435111 - DNA, 122 bp, Homo sapiens
caagccccgccccccagtgggcggagaaggcgttacaagccaagggtgcctgtgcgtaggcggggaaatctggtagatccataggaactcctgggtcctagggttaagggagtgagccccct

SEQ ID NO: 435112 - DNA, 122 bp, Homo sapiens
gggctgccaaagcagttagggagccctctgaccctggaatatgtgaccactctgggctaccgcccccatcccccaccacctcctcctccagcttcctggctgaatgaataggggaatcctgg

SEQ ID NO: 435113 - DNA, 122 bp, Homo sapiens
caagcacctggaggcggaacctgtgtggccggctacagggtggtcctgtgtatgtgttaccgccttattgttccaaagaacagtctttttcaagtgacaggtagaagacgccccaataacga

SEQ ID NO: 435114 - DNA, 122 bp, Homo sapiens
ctctcaccatggcttattagaggtggcttatgaaaaggctggaatccatgctccagggcccgtcttgctctggtggagggtttagcaccatgaaactcactttgtaaaagtgcaccagctgt

SEQ ID NO: 435115 - DNA, 122 bp, Homo sapiens
caactccatgtgaacacctgccctggcatgcaggcagccgggccagtccacagccagtcacggccccacgggaggagccttctgagtgacagatatcattttcattcaggggggcttgaact

SEQ ID NO: 435116 - DNA, 122 bp, Homo sapiens
cacaagcaggagttaatggaccggccatccatagcggtggtggggcagggagccagtttccgaaagaaactcacgccgccgcaggagggccctgtgggatgctctgtgcagagctgttgtgc

SEQ ID NO: 435117 - DNA, 122 bp, Homo sapiens
tcgccctgacacctgcggccgcgcaggggctgggagggcgctgcaccgagagaatagccgcgggagtatcatgcaaattgcagattctcgctcccaatagattgcagccacctgttcttggc

SEQ ID NO: 435118 - DNA, 122 bp, Homo sapiens
cagcccaagggtgtggctccccttaccaacccaggtgtgtgcgggcagcatccctgcccacgggctccaagtgccccccgctacccctttgctctgagtgtttggggaggtgggagaagtgg

SEQ ID NO: 435119 - DNA, 122 bp, Homo sapiens
tgatctccctgcgccaggcaatgctgccccccaaatccagctgggcaggaaccgaggcgccggctgaaagacaagatccaaagtcacagcacggccgcagcacacaaacaggcttctttcgg

SEQ ID NO: 435120 - DNA, 122 bp, Homo sapiens
gtttaacgaatgcacagagccccactccgtgaaccactgtcatattttagacaatccaggcgagtcagccctggccagccctgctcttctctgcagtgtttatcagggagtgtatcaatgtc

SEQ ID NO: 435121 - DNA, 122 bp, Homo sapiens
ggatgagttctgggcgcacaaaatatggataaaagctatgtattttaacgtatcttacaccggagtaatttgggttgaactcagcagccctaagcactgtgccgcaggaacttgtgcagaca

SEQ ID NO: 435122 - DNA, 122 bp, Homo sapiens
cctttgagataataactaagtttcattttggtttgacaactccttttcacacggtaagtacgtgcttagtggataggtgctaagataatctcttggagggattcgcatctctcctcttcctt

SEQ ID NO: 435123 - DNA, 122 bp, Homo sapiens
gtgccaggccccccacgctgtgctccagggcctcagtgcccggcgcgccgggggctgtatcgccagccacttggggcaggaaaaaggaatcacaaaatacaaccctctcctttacccaggag

SEQ ID NO: 435124 - DNA, 122 bp, Homo sapiens
ccctgaaatagagacggtctttcagcgaccgatttaagggtgaggacggggttctcgagacgctagattgagaagctgggtggggtctatgggggtcgggccagggactagggcggggcctg

SEQ ID NO: 435125 - DNA, 122 bp, Homo sapiens
ctcctcttcttcctttgtgtgtgcgcgagcggagttggggcggagggagaagggggaggtcgctctgtctgtccgtctcccgccgcctctgcccggtctactcgaagtgcggcgggagaggc

SEQ ID NO: 435126 - DNA, 122 bp, Homo sapiens
taatctatgtctactcaatttagaatttctaaacccttcaggatcttcaaaagacaaaatcggccagcgattttaatagttccagtaaaggtttgagcagagaagtggactttcttctgttc

SEQ ID NO: 435127 - DNA, 122 bp, Homo sapiens
tcctgcctctgacggattgtcacacaggccccactcaagagaacacagctccaacagaagcgcagaggaggaaacaggcatctcatttctaagcaaagagggctgtagccaggaatgttgaa

SEQ ID NO: 435128 - DNA, 122 bp, Homo sapiens
ttacaggaaaggaaacaaacagagccttactccaggaacatcacttggtaattaagagatcgccttgcttcagatccttgctctcctagccacgtgactgtgagcaagtgactttgcttctc

SEQ ID NO: 435129 - DNA, 122 bp, Homo sapiens
ccacgaccaatttcccttagtcatggcatgagtcagctgtgagggctgatggcacaccaccgaatactctgctgtggcgccactagcctccatttaccttcttctccaacgttttccagcct

SEQ ID NO: 435130 - DNA, 122 bp, Homo sapiens
tttggtgatgggcatgacccaggctttgagaagcctctgagagtgacttgtgatgacctacgtgggtgatctatgtgcagagctatgcaggagctgtcagcagccacaggggcatgtgctag

SEQ ID NO: 435131 - DNA, 122 bp, Homo sapiens
ggcctgggagttagcagaggtcgggaagctgctgtaagagcgaaacgttgccccacttggcggtgtccaggtctcgcagtaggctcgggtcacaggagggagggggtaggggttcagctccg

SEQ ID NO: 435132 - DNA, 122 bp, Homo sapiens
ccctcaggagaatgtaaacgcatcaagaggatcttgtctttcactaattgtattttcaggcggggcccagaggctcacgcctgtaatccctgcactttggaaagctgaggggtggatcactt

SEQ ID NO: 435133 - DNA, 122 bp, Homo sapiens
aattcctgctcgcccatccaggcctccgcctcggcggcatcgcggtagaactgctgggctcgcagggcatcctccagtcgcttccctcgaagttccagctcgtggcccaggcgtttccacat

SEQ ID NO: 435134 - DNA, 122 bp, Homo sapiens
ctgagggctcgggtcccctcggccacaggtgagcttggcctacgcctatgagaccaaggacgcgctgtgcctggtgctgacactgatgaacgggggcgacctcaagttccacatctaccaca

SEQ ID NO: 435135 - DNA, 122 bp, Homo sapiens
accataattgtgtgagctgtattaaataattttcactggtcttttgtacccgattaaacacgaagatgggccaggcgtggcagctcacacctgtaatcccagatcctcccgaggtgggagga

SEQ ID NO: 435136 - DNA, 122 bp, Homo sapiens
cctcctcgcggggccgaacccgccacccacagtggagtgtggactgacaccgcggcctcacggttcaaccaggaaagtccaaggcctgtccagcctgtgggagcccctaatgcccgtgcctg

SEQ ID NO: 435137 - DNA, 122 bp, Homo sapiens
ctccataaataaaatacagggcgtcgactttcgcaagtgaccccgaggagcctttctaagcggactccacgtcagcccgacgaccgggcgcccgccccgtccggcccccgggccccagcctc

SEQ ID NO: 435138 - DNA, 122 bp, Homo sapiens
ggtgcgcgtgtgccgcggcggttcgttacgtaggtgcgcgtgtgccgcggccgttcgttacgtaggagcgcgggtgctgtggtggtttgctgcacctattaacccatcctgtaagtttcctc

SEQ ID NO: 435139 - DNA, 122 bp, Homo sapiens
tctcacattcttgtttgtgtttttatagctcttgctttctttacaaaaggggttagggggcggtggggaggccaaagcatcaaaatagcactcaggtcatgaagggagatgatgctccactc

SEQ ID NO: 435140 - DNA, 122 bp, Homo sapiens
cgcggcgtaccccgggggcagggtcgcgaactgagggcaggacgcgccgccccctccgcccgaacgcggcgctgtccctttaagatgatcctcctcccggggccaagcagcgcgttggcggc

SEQ ID NO: 435141 - DNA, 122 bp, Homo sapiens
ggtttaatggaaggcttgggctgggcattgcattacactgctttcttctcttgattctcccgtcccttccattcctagaatctaagaatgccccagaagcactttttcttccaatttgtaaa

SEQ ID NO: 435142 - DNA, 122 bp, Homo sapiens
catcataccccaccatctgacctcaaataataccagcagcgctcctctcttcagccctgacgatggccaggtgctgggctgagcttctgtgtgtcgcatcactgcatcctcacaataaattt

SEQ ID NO: 435143 - DNA, 122 bp, Homo sapiens
ttcagtttgttagtcaatagttacttcttttcacttagacccatttgaattgattttatccgctgcaacttaaagcttcttgactaataaagtcttcaagactaatgtaagacagttgagaa

SEQ ID NO: 435144 - DNA, 122 bp, Homo sapiens
gtgatataaatagagacatggcgacggcgaaggtggcagcctggagccttgggctgaggtcggatgaagccgcggcactaacgctaatgaattctgatgatttggagcggtcattaaactaa

SEQ ID NO: 435145 - DNA, 122 bp, Homo sapiens
gattggcgcactccatgcagaagaggttgtggccacagggcaccagcgcggcaatcacttcgctctcgaagcacacggagcagtcgcggctgcctttacgccgaagcccggaggaagaggat

SEQ ID NO: 435146 - DNA, 122 bp, Homo sapiens
ttggctgtgtccccacccaaatctcatcttgaagtgtatgtagctcccacaattgccacacgttgtgggagggacccagtgggaggtaactgaatcatggaggcaggtctttcccatgctat

SEQ ID NO: 435147 - DNA, 122 bp, Homo sapiens
aggcggggcggggccgaatacgagtggccaggggcacgacgggagctgtagtccagggcacggcccgacccgcgtgaagaggggaataatccttttcctcggtccggctgtgctgcacactc

SEQ ID NO: 435148 - DNA, 122 bp, Homo sapiens
ttgtttcatacaggttctctctcccctgctggattataaactccttgtggataggatctccgtataaagcccccaaaaggctgtgaaaaagtaaatactcagtaaatgcctgccaaatcaaa

SEQ ID NO: 435149 - DNA, 122 bp, Homo sapiens
gagaagagaaatctgagtttaacccgatcctgtcagaagagcgggaggaaagagctccggcggacagggctcccaggcccctccaggacgaggttggaggaccaagcgcagaaggtaaggac

SEQ ID NO: 435150 - DNA, 122 bp, Homo sapiens
tcagctcgctatccccgtctccgcccccggccagcgacccgggatcagggcgtcaagccccgaggggctggttcctcaggaagcagcctgcctctgtttgaaacaggctcaccaccgcctga

SEQ ID NO: 435151 - DNA, 122 bp, Homo sapiens
gccatacgctggctgcctccgaaaggcttgaccgtgcggaaagcaggctcaaatgtcagccgggaggtggctatggtatcttacttgccctcctaatcttccagaagatgctggctgcattt

SEQ ID NO: 435152 - DNA, 122 bp, Homo sapiens
actcaacaggtgtaccaggtattagtgcattcagtttgcttgtccttgatgttggggtgccgttctaaagtacactaacctagcttgtctggtaattgaatgcagttttttcctcttctttt

SEQ ID NO: 435153 - DNA, 122 bp, Homo sapiens
atgggctaggggtggcactgagcttccattccatttcttataaaataatgacgacaagatcgttttccttaaagggtggctgtgagccttcaattacacagtgatgaaaagaccttagcaca

SEQ ID NO: 435154 - DNA, 122 bp, Homo sapiens
ctggttcctcgccctcatcagccggccctccgcgattgtgcttcccaatcaacgggccttcgatgaaaagtgccaaggaggtcgccggatccgcccaagtggaattcccaagatgtttcccg

SEQ ID NO: 435155 - DNA, 122 bp, Homo sapiens
attaaataactctgcattattttaatggaatgttataaaggatttgcaacaaaatgcagacgtagatttagggactgccgacttctatagatcaaggacttcattggtgcagctgaggaaat

SEQ ID NO: 435156 - DNA, 122 bp, Homo sapiens
ggtgcggtgctccggggagctggtgctattgtgcttaggaaggaggtctgtccgtccgtccgtctgtccggccggcctggccccaaatgggggcggaagaggggcacggcccgagtaaaaat

SEQ ID NO: 435157 - DNA, 122 bp, Homo sapiens
acagggcagtggtgaggaatgagggtgacctagatgacattctgatatctatgtagttcccgagagtgtcaccttgatgaggtgcccagagctcccgtgcagccttactcagctgatgagta

SEQ ID NO: 435158 - DNA, 122 bp, Homo sapiens
ttgagcttcactacacaatgacccaggctctacatgcaccctctttatatatttctacctcgaaaaaaatttttatataatattaataatatatatttttacataaggaacacatatgttta

SEQ ID NO: 435159 - DNA, 122 bp, Homo sapiens
agctttcggtgggttccacagccagacgggccaccatcttacattagggtaagactcctccggcctcccgtgcgcaggcgcacgctgatccggccaggaggggcgggggaggggcgggagga

SEQ ID NO: 435160 - DNA, 122 bp, Homo sapiens
acattatctcaattattaatgtgccccctttctcttgagataaattaatctagttgcacacggtttcctctttctgcttaacatcagaatttaatatgactggacctgaggaatgtacccag

SEQ ID NO: 435161 - DNA, 122 bp, Homo sapiens
ttgtttttttgttgttgtttttaagatggggtctctgtcacccacactaaagtgcagcctcgaagtcctagacgcaagtcatcatcccacttcagcctcaaaactagctgggactacagtca

SEQ ID NO: 435162 - DNA, 122 bp, Homo sapiens
tggggccactgcttcagggtcagacctgcttggggagcacctgtgagaagctagggttctcgggcactggcaaagaaggagatcacccattcattcattcatctaacaaaagcactgaacat

SEQ ID NO: 435163 - DNA, 122 bp, Homo sapiens
gcgaggggcgtcccccattaacccccgcccctccaaatcagcctcgggaccgcccagcctcgtgtcctcaggatctgcctctgagtaaggggaggactttggttgttactttctggtttgcc

SEQ ID NO: 435164 - DNA, 122 bp, Homo sapiens
gggggcatcagctaccggggtggtccgggctgaagagccaggcagccaaggcagccaccccggggggtgggcgactttgggggagttggtgccccgccccccaggccttggcggggtcatgg

SEQ ID NO: 435165 - DNA, 122 bp, Homo sapiens
tgtatgtgtccccttttgatgaatattatgttacatgtacatgtataaagtgatcttccacgtggcctacaatgaaagtcgtattttctcaatgtctatatgcaatttcatattttgggggc

SEQ ID NO: 435166 - DNA, 122 bp, Homo sapiens
agctgggactacaggcgcccaccaccgcgcccggctaattttttctatttttagtagagacggggtttcaccgtggtctcgatatcctgacctcgtgatccactctcctcggcctcccaaag

SEQ ID NO: 435167 - DNA, 122 bp, Homo sapiens
gggtgaaggcctcctgagcgcaggggcccagttatctgagaaaccccacagcctgtcccccgtccaggaagtctcagcgagctcacgccgcgcagtcgcagttttaatttatctgtaattcc

SEQ ID NO: 435168 - DNA, 122 bp, Homo sapiens
ggtgctggggccctggtagaaccagctccgggagccgaaattgagccatgaagagtgggccgagggaggggcgaggggaacgggcctcaggagggaggggcgggcccggcggcacttccgtt

SEQ ID NO: 435169 - DNA, 122 bp, Homo sapiens
cagccccgcccccatgcctggtaccgcccacggtcccgccccagaacttctccccacccccggagctgatctccacccacactcagccctgcctccaggcctggtaccgcccacagccccgc

SEQ ID NO: 435170 - DNA, 122 bp, Homo sapiens
ttggtcttcacgcagcaccctgagtgaaagagaaacatccacaggcacccaattgcattgcgaggcagctctaatttttgtcaaggtcttccttatattgaggaaaaatttacctacccaaa

SEQ ID NO: 435171 - DNA, 122 bp, Homo sapiens
atcatgttagaacaacatctgttgtcaaccaatcattgagtatttgttgaggatattcttcgtgctacattaagtgaatgcaggcagcatatcaagtctctacctttttcacaacctagttt

SEQ ID NO: 435172 - DNA, 122 bp, Homo sapiens
caacaccgggcaactgaaccattcctgcacgttactttttaacgtagctggcgccattcccgacccatctttatagtggccagaaagccaagaacgtaagtgttctacacatagggcgcctt

SEQ ID NO: 435173 - DNA, 122 bp, Homo sapiens
ttgggatgcttctataagtaggtggtgctgtggtccaaggcatctaagtctaggctgcctcggagttcctgggtcctaaagccagaaacgtcccggtttccctgaggtcctaaagaacgttg

SEQ ID NO: 435174 - DNA, 122 bp, Homo sapiens
gccaacgggcccacaggtcaccatgtgctggtttcatggtgtggtccaagcactccacagcgcattcccccaaactggatggcttcaaatgacagaacttaattttctcacagttctcgacg

SEQ ID NO: 435175 - DNA, 122 bp, Homo sapiens
cccggttgacagggggcagccgcaccagcagctctcggtacctggagaccttctcctcctcgtcctcaatctctgggtgggaaagataaatcaagtcagaaaccccctgtaactatcttccc

SEQ ID NO: 435176 - DNA, 122 bp, Homo sapiens
aggttgactctttaagactggaatgccaaccaggctggataatctatatagcaggggtcacgttgatgtcagttgtgactgattaaaacgtggtgataacactgccatagtcctgggtacaa

SEQ ID NO: 435177 - DNA, 122 bp, Homo sapiens
gcacccaggcatggctggagaaaagcgctccaggccctggaagcagcatgtggaaggaggcggctctgagggtcagagcgaccaactgtcctgctttgcctgggactgtcctgcttttagca

SEQ ID NO: 435178 - DNA, 122 bp, Homo sapiens
gatccccccgcctcggcctcccaaagtgctgggattacaggcgtgagccaccacgcccggcgtcctttgtaaggtttctatccactatgaattcttcgatgttttgcaaggtttgaattttg

SEQ ID NO: 435179 - DNA, 122 bp, Homo sapiens
gtagtaaacaaatgaagcaggcaatgatatatttatcctccctctcccctcttcagttatcgtttgaataaattactgtttgtggaaacatggttggctcctcaaaaaatttcagtctatga

SEQ ID NO: 435180 - DNA, 122 bp, Homo sapiens
taagtcactgcagtctcgacctccgcggctcaagccatcctcccatctcagccggctgaacgtagctgctgggactccagtcgcttgcaaccatgcccagataatgaatgagtgtctccctc

SEQ ID NO: 435181 - DNA, 122 bp, Homo sapiens
cagacctgaacttgactcctcctacgccctgtgaaggctgcaaggtggttccgtccgaggcgcggactccgcccccacgagcgccgccattttgtttggctgaggggagcgagcggcgcttt

SEQ ID NO: 435182 - DNA, 122 bp, Homo sapiens
tgtgccggtcatagctgtgttcgtgggaagtgtgtggtgctgttggctccacgggccttgcgtcgtggttagtcactgtacgttgtgttttggtattttatccttatcagtgcacattggtc

SEQ ID NO: 435183 - DNA, 122 bp, Homo sapiens
cccccatgtacttcttcctctccaacctgtgctgggctgacatcggtttcacctcggccacggttcccacgatgattgtggacatgcagtcgcatagcagagtcatccctcatgcgggctgc

SEQ ID NO: 435184 - DNA, 122 bp, Homo sapiens
ctgcccaggggtgcaaggctggtccctggcccctggccaactgttaaaacggctagcagccggctaaccccaccggcaggctccaggatttagcctgtggcggctggtggcggagatggagg

SEQ ID NO: 435185 - DNA, 122 bp, Homo sapiens
aagagcagaggaggaagcaggaggaagccgatcgaaaactcagagaggaggtaaggcgggcgctagcccactgagaacgttgcccgggaaaattccctagtgccgtgcggctgttcttttga

SEQ ID NO: 435186 - DNA, 122 bp, Homo sapiens
ttgtgaaatgattatttggatgttagaaccatggcctgtcccactgggctgttctgtgggcgttttctatagcccggcccgggcaaaatgcctctggtaacgaggagtccagaggtttcctg

SEQ ID NO: 435187 - DNA, 122 bp, Homo sapiens
agcccgtctcccctgagtgtgtctttaagacggggaccaggacaactgaattaccaactccggaaagacccccaattcctggtttccaggaagatgagatttgtgagaggcgggggtctgct

SEQ ID NO: 435188 - DNA, 122 bp, Homo sapiens
tcagaagcaataaggagttgtctacatttcaggcttgttagacattctctccccccaaaacgtgttttcctggtgactaggaatgcatttcaaagttagatttttttttttttttaccaatt

SEQ ID NO: 435189 - DNA, 122 bp, Homo sapiens
ggggtttcaccatattggccaggctggtctcaaactcttgacctcatgatttgcccgcctcggcttcccaaagtactgggatcatcttaacaatgaatgggacctctagctctgagcaacta

SEQ ID NO: 435190 - DNA, 122 bp, Homo sapiens
ctcctcagccctggcacacccagttggtgctcagtgaggcagggattcaaatctttgaaccgggagttgttctggggtgctacccccatgggtactttgaggcccaaaagccctccctctgt

SEQ ID NO: 435191 - DNA, 122 bp, Homo sapiens
accagccgggagctggcgcgggggtcctgggcctgacgctgggcggggctggggcgtgtccggggcggggcggggcgggaggtgcggtcgcggctcgggcctggcaggcgctgcgcgcgggg

SEQ ID NO: 435192 - DNA, 122 bp, Homo sapiens
cacccctcgctcgttccctccctccggcgagggccgcctttataacaactgctcagagtgcgagggcgggatagctgtccaaggtctcccccagcactgaggagctcgcctgctgccctctt

SEQ ID NO: 435193 - DNA, 122 bp, Homo sapiens
cacaaaagagctgaccgctatgcgtggaagaccagttctttatggttggccatgttccttcggatgttcgtcttttgggaacttgctgtgctttacagaatctgaaaggacaggtctctgaa

SEQ ID NO: 435194 - DNA, 122 bp, Homo sapiens
ttctaaggggacgactaaggaatccacgcatcactaacgttatagagactcgcgaagtgccgctgtgttggttgtgaaatttccctcttgtagctgtctctcgtcagatttagaatttctta

SEQ ID NO: 435195 - DNA, 122 bp, Homo sapiens
gcggcgcctgcgcgttctcttgtttacaggaggcacgtggggcgcgcagggtagggagagcgggaggctgctggcctgaggctaaagctagtcactgacctctatcacgtgcttgttatatg

SEQ ID NO: 435196 - DNA, 122 bp, Homo sapiens
gcctcggtggtctccggtcagcatggcacagcccagtggggtccccactctgcaggggcgcgcccctgccccgcgcgccgactccgggtaccagagccgtcagccccgcccctcgggcaggg

SEQ ID NO: 435197 - DNA, 122 bp, Homo sapiens
ttctgcaagccagtcaaagtggcacagcaaatcatataaatcgaattaaatggacaacaccgttagatgtgtatgtaaaaattttctgtttcatatttttcctttcactttcggtttaaaac

SEQ ID NO: 435198 - DNA, 122 bp, Homo sapiens
tccaagccaggtgcgggatataatcccgtggtgcgccgttttttaagccagtcagaaaagcgcagtattccggtggaaatgacccgattctccaggtgccctccgtcacccctttctttgat

SEQ ID NO: 435199 - DNA, 122 bp, Homo sapiens
ggagattgagggggcttcggggccgtctctgcccctggcttcggcaaggcctggcctgggcggcattgaccccttagggctggatctgagggcatttgctctctgatctcagagtaaggttg

SEQ ID NO: 435200 - DNA, 122 bp, Homo sapiens
cgaacggtggaaaccctgaagttcggctggtttcttctgcaccatcttctgtccgggccccgccagcgggggaggggaccgagggcccggggggaggcccgagggcgggcggccgggcgggg

SEQ ID NO: 435201 - DNA, 122 bp, Homo sapiens
cccctccttttgttttgtacacagagaccaagaggcctcagtttagcaccttagtacctccgctgcttcacttgctttagccaaagccataaaaaacctgcaacgtagagaaaataatgcag

SEQ ID NO: 435202 - DNA, 122 bp, Homo sapiens
gccgcgtggggaggcacctccctgatccgcaggaacaatgggctggggtgggggcaggtgcggcttggagtgcagcagagggtgggggccgcaggcccgacagcaagacagggaacccagcg

SEQ ID NO: 435203 - DNA, 122 bp, Homo sapiens
ctcctgtgaaggcaagagacaaacgaggagcgttatgacactttgctcccaggactttggcgcacagttcccatgagtccaggtccgtccagtcaacatcctgaagccaggactggcaggtc

SEQ ID NO: 435204 - DNA, 122 bp, Homo sapiens
tcccttttagtccagggctgccttactgggtcctggagcccaagtcctctgggttagaaccgagtttcccataaggagaaggaaaggaaagggtgtctcttggtcactgcgctgaaatgcta

SEQ ID NO: 435205 - DNA, 122 bp, Homo sapiens
gaaagcctgctgggcctctaaaccaaacgcccccgggcctctcatctagccttcctggcccgggcacacgggacagcactaccccaggctttgcagtgcctggctggcctcccttcaagggt

SEQ ID NO: 435206 - DNA, 122 bp, Homo sapiens
acgggccccgcttaccgaatgcctgctttgtggaaacatcatgtcaatcgcggcggggggcgcgggctgcgccccggctgtgcgccccggctcgggctgctgggggcgccgggcggccgcgc

SEQ ID NO: 435207 - DNA, 122 bp, Homo sapiens
cctctctgggtttcacccggacagagccgggagctgggtgtcgcccccgtttggaatccacgtttcagcactttggacagcgccccggacgccccggcccctttgggttggcgatggcgagc

SEQ ID NO: 435208 - DNA, 122 bp, Homo sapiens
gccaagccccactacgttcaaaagtgtgtttgtggttgtcacagtgcacaccgaaaagctcgctccgcacccgcagagtgcgcggggcctctgagcctggaaacaagcccctcccagcgcag

SEQ ID NO: 435209 - DNA, 122 bp, Homo sapiens
aaaactgagaaaatactgctcgatccttgcggtgggtagtgattagaagagggcaggacgcgggttcctagggtgcaagtaacgttctgttaattgatctgggtgttcacttggtgaaaagt

SEQ ID NO: 435210 - DNA, 122 bp, Homo sapiens
aaggaaccgaggggtggggagtcctcaggtgtgtgtgtgtcggggccggtaccctgcttccggttcccgcacgcattcccggattgcagtgcggaccccttctgtaagcgcgcgataaagcg

SEQ ID NO: 435211 - DNA, 122 bp, Homo sapiens
ggggcgctcgcgtctgcgtggagaccggctggccgcgcgcgggaagccgcggaactgcgccggaaagtcccccggctctggggccccggtgacccagagtaagcctccaagaaggaggagga

SEQ ID NO: 435212 - DNA, 122 bp, Homo sapiens
gtggggtggggttgggaggaaggagctcgcaggagaactgcttgatacttcccgccccaccgcggttaatcactgtctagagaagccgaggttaagtggctctgacctatcacccatcccgc

SEQ ID NO: 435213 - DNA, 122 bp, Homo sapiens
ccactgacggatacagccaaggaggggcccccaagggaggcactgggaactgaggggaagcgtctgtctctgactcagctttcattgggggccaaagaacggagtaagagggacaaggagtg

SEQ ID NO: 435214 - DNA, 122 bp, Homo sapiens
tggctgccaccttcactttacctaggactcttctttgtttctctgccccagacactcacacggaccctatagaatcctatatcctgctggactaaacaccccatggatctaggtgaggctgc

SEQ ID NO: 435215 - DNA, 122 bp, Homo sapiens
gcgagggctttctggtccaaaccctgggagcgacagctgaactgagaacagtgggggcaacgcagtctgattctcctgggcctaatggttttttttctttctttctttcttttttttttttt

SEQ ID NO: 435216 - DNA, 122 bp, Homo sapiens
cgctgtgggggcggggccttgtgagccagtgcttggacttccacgtcataaacggaagggcggtgcgtggagggaactcaaggcctgattggttcctcctaagcaggatgcgatctggttgg

SEQ ID NO: 435217 - DNA, 122 bp, Homo sapiens
ataagcccatggggtgattcattatcagaccagcggagcttgctctgtgccctcagcattcgtcgggaaggagcagccacaccatataaaagtgaaagcggccgggcgcggtggctcatgcc

SEQ ID NO: 435218 - DNA, 122 bp, Homo sapiens
aagggacatatactcagcacacccatccagaagtggaaggcagccttgccttagagagaccgtgagggtgccagcctctcagagccaaagctccctgctggcacacagcagcaggcgacagg

SEQ ID NO: 435219 - DNA, 122 bp, Homo sapiens
gatcacccgttaccccgccctggtctacaagtgtttgctgatatagaaacggaataacggcgctgtgggctggggaggacggagttgccttcaggcttctggtctccagccgcggggcactc

SEQ ID NO: 435220 - DNA, 122 bp, Homo sapiens
ccagtcccgagcagctgaaggcctcagcgaagtcctgcatgtccaggcagttggccaggtcgagctgctgctgcaggaaggccccgcacgcctccttcacggccgggaactgcagcaggtcg

SEQ ID NO: 435221 - DNA, 122 bp, Homo sapiens
tcggtcttctcccgcccctccctcccttccccgcctctcccccaagctcctcagtggccgcggcccgtcaacactgtcgcgcagtcactggcgcaggttcccagctctcagctgggggtttc

SEQ ID NO: 435222 - DNA, 122 bp, Homo sapiens
caggggcccgggaaagggtcagaggcttcctaacgcagactcgagtgcgaagcgcgcagtcgccgggtgggtctctccccagcgacgatttgggtggtgagcgactgcgccttggcgtgggg

SEQ ID NO: 435223 - DNA, 122 bp, Homo sapiens
tccgcagcgggcttcttgccattaggcttggctttggacttcctgccaagagaggagacgcggtgtggtcactacacgcccatcagacccagggtctgcccggggggtcagttgtggccagc

SEQ ID NO: 435224 - DNA, 122 bp, Homo sapiens
tttatttcaaacgagatggggaaccaatcgacgcagtgcccctatcagagccaccagctgcgagctccggccccctacaggacagcaggcccttccgcagccttctgcaccgtgacctggat

SEQ ID NO: 435225 - DNA, 122 bp, Homo sapiens
ctgcctggtcacgtgggtccagtggggcaaagtctcctggtggggtgcaaggagccgaggcgagatgggcgtcctgggccgggtcctgctgtggctgcagctctgcggtgagccgggaccac

SEQ ID NO: 435226 - DNA, 122 bp, Homo sapiens
gcgcccgggctgcgcgggcccacgcgacatctgtcgcctgcggtcccggctcacaccccgcgcacccccgcagctccctgggcgctgccaccccccacgctccggctgccgcctttccccgc

SEQ ID NO: 435227 - DNA, 122 bp, Homo sapiens
gcgtgttagagcccggggacagaggtatagcctagcgcactggtgcccaggtgcgccattcgcggttgggacctggcagagtcatatggctggggcctgagccgcgagcagggcggagcggg

SEQ ID NO: 435228 - DNA, 122 bp, Homo sapiens
tcctggctgacggagcgcagcgcaacgcatgcgccttgaagacttatggaacttatttcacgctcagggcggcggtgacgtgtgaacgagaaggaggtggtcaaggaacggaagccgggagg

SEQ ID NO: 435229 - DNA, 122 bp, Homo sapiens
ccctccctgcccctttccttatgaaggccaagagcctccactactccgggggccagctgacggaagtgcgtcactccaccctgcggggagtgccgggagttgtagtcaagtggctactaatc

SEQ ID NO: 435230 - DNA, 122 bp, Homo sapiens
ttgggaagggggaaagaggggcatctagctgggcgctgcgtgtagcctgcccggcggggccggggtgtggcaggaccgaagcctgctcctcgtgtggggcccggcgcgaaaacagcttgtgc

SEQ ID NO: 435231 - DNA, 122 bp, Homo sapiens
cacagtgaggcactcataagatgagaccggttactgcaggcgagtgaaacccggacttcccggggaggctctccaatcaccatctcaccacttaacagttcagttaacaaatttggacaaaa

SEQ ID NO: 435232 - DNA, 122 bp, Homo sapiens
tgggacgggatgggattcttctcacggcgcacgttctgtgggcggagtgggcggagctgccggggtcagttggtccaagtgtcccggcctgaggtgtcggccggatccctccttctcccggc

SEQ ID NO: 435233 - DNA, 122 bp, Homo sapiens
ttccaaacctcctcccagactcaaagaccctattggagagcgagcgggaaaggctgtttgcgaaaatggaggacacggactttgtcggctgggcgctggatgtgctgtctccaaacctcatc

SEQ ID NO: 435234 - DNA, 122 bp, Homo sapiens
tgatatgtactttgtatgggctcaaatcccactatgaggccagttaccagccatgggtcacgttgcttgacatttcctagtttcatttcctcagctttaatgaagataacacccataacctg

SEQ ID NO: 435235 - DNA, 122 bp, Homo sapiens
ttcttccagtctgtctaaaaaaagaaagaactttgtgccatataaacattaaaaactttccgagttaactggatgaaggtgtcttttgccccttgagacctaaaacgtgttttcggtttatg

SEQ ID NO: 435236 - DNA, 122 bp, Homo sapiens
ctgatctcaagtcgagacataagtagcatcagtttgggaatcacacctgggtctccattccggcttggtagttacctgctgtgtgacttcacacagttacttaacctctctgaaccagttta

SEQ ID NO: 435237 - DNA, 122 bp, Homo sapiens
tgagctggtaagcacccctccccttgcccctcagacatggaggtaatggccttttgctgtcgcttcatcaggtcaaacctgtcatctcccttaacttcaccacttcactaaacccctcaatt

SEQ ID NO: 435238 - DNA, 122 bp, Homo sapiens
cgttccaggaggcagacagcggagtgctgaggccgtgtccccgtgtggtgaataaatgcccgggagggcgggctgccttcagggctcctctctccgctcatctccgcttgtgtgcgggctgc

SEQ ID NO: 435239 - DNA, 122 bp, Homo sapiens
tcccgagtcgccaccaccaccattctctagaggagcctccgccgttccctccgccatcggcgcccctcacatccgctctggagtgtggcgggaagaccttccgggtcacgcgtgtcttccct

SEQ ID NO: 435240 - DNA, 122 bp, Homo sapiens
tttatgagctgccccggcttgtctggacaggtcatttctctgccgcatccacatgttgaacggagtttaaagtctgcagttggctcctgctaatgtgatgcatggtttcctgacttcagctg

SEQ ID NO: 435241 - DNA, 122 bp, Homo sapiens
acgctcgcaagcaattatttatgcatgcggtccacgcactcagtttgagaaacactgactcgacttaaaagtctttataatgctcagatttctgaaatgctattgacctgaaaacatctcat

SEQ ID NO: 435242 - DNA, 122 bp, Homo sapiens
actactctctgcatgtggacatcagtgagtggcataagggcatccaggaggagatggaagcgcttgtgaaggatcacggtaggttgcactgagtcaatgccctctgcagatgtttccgcttc

SEQ ID NO: 435243 - DNA, 122 bp, Homo sapiens
tctccacacaggaggtggggatggttcccgaaggactggaaaggcttccagagcccaagccgtgagtggggcctcagaaaaggaccattcctatgggagagaggacaaatgctcttgtgtcc

SEQ ID NO: 435244 - DNA, 122 bp, Homo sapiens
cagccaaaaggtgtgcagtcagctgtatagaaactatagctgctgttgttgttgttaaggcggtgagagtgtcacccacagattgtcctctgtccatgaagcttctcaaactcggactttct

SEQ ID NO: 435245 - DNA, 122 bp, Homo sapiens
cggggcccaactgtccccagctccttcagccctttctgtccctcccagtgaggccagctgcggtgaagagggtgctctcttgcctggagttccctctgctacggctgccccctcccagccct

SEQ ID NO: 435246 - DNA, 122 bp, Homo sapiens
ccctcagcagaaggaggctggcatcatctttttcatcctttacctccaggaagcaggggccgggaggcagaaagcagagtatacagtgggcagaactagggtgagggatgagtttggaaagg

SEQ ID NO: 435247 - DNA, 122 bp, Homo sapiens
taaatcctgtgcttagatcgaactgtaacattattccaatcacatttatcttgcaggcggcggaggagatggcagcctcgctggaaacgcgcgggggagcctgagccggcggccggggacgc

SEQ ID NO: 435248 - DNA, 122 bp, Homo sapiens
aagccgactgtgaatggagaagattcccaagtcccgagcttgaggaggccccggctgtttcgttaagtgtatatagctgtgggaagaggttgcctgatttctggggctcctggtagggtctc

SEQ ID NO: 435249 - DNA, 122 bp, Homo sapiens
atcaacatacaaattccactcgaaagtagtaaagtgcttttacagtttttaaagcactcgcgtaaacatactatcatttgttcctgagagcaatctggtgtgggaggtggagcaagtagtaa

SEQ ID NO: 435250 - DNA, 122 bp, Homo sapiens
gtactgtttctcatgctgttgctgtgtgtagcacgcgcggcccttcacattctttcctgtcgtcttctgggatggggggtgatgtggacctcgtagcgcatgtggcttttccgttgtgtgga

SEQ ID NO: 435251 - DNA, 122 bp, Homo sapiens
cactttggccatcctgctctcccatgacacagagccggaccacagagggcatttgagaaacgttcacagagacacacactgagactgcccaggtggcaggcactaacagcatggttgggaag

SEQ ID NO: 435252 - DNA, 122 bp, Homo sapiens
ccgtgtcgaccccactcaacaccatctggcccaagcgggagcccatgaccgattggacgccgccggtcactacggactttgtcttgtccacgccgctctgcacagcaccgcgggtcgcgtcc

SEQ ID NO: 435253 - DNA, 122 bp, Homo sapiens
cagtaacaagccagccgcaatagagcccggacatccgggtctgtttggtccttcccgactcgctgaagcttggggcatttccttatttgatacgtcttcattgtgaaatgagaccctccagg

SEQ ID NO: 435254 - DNA, 122 bp, Homo sapiens
cggataataaaagcctttagagtttttcctcggctcctcggatagatttatggacaggagcgatagatgcatggcttatccatcctccggattcctacctgcttagctcgtaacagcctcaa

SEQ ID NO: 435255 - DNA, 122 bp, Homo sapiens
tctgcttaaaatggactggggaaagaagggctgttttacctaaatcgtttttcaggctgccgggttaagacaaaggcctgtaagagtcatataggaattaaaatatgtagaattattcttgc

SEQ ID NO: 435256 - DNA, 122 bp, Homo sapiens
ggatggaatcaggctgtatcaggcctgtgcccctgccccctgcccccagcccctgcatcccggtgacctcacctccaggtccccacggctccggtggatgtcagcgaagcagagcaggcaga

SEQ ID NO: 435257 - DNA, 122 bp, Homo sapiens
cgcgagacaggggcagaacgatgaggcgccggagttagctcgccggtgcgggtgcgggtgcgcggcgcgtcgcggcccctcctccgcgacgcgccgggtggtcacgtgacggccgcgcgcgt

SEQ ID NO: 435258 - DNA, 122 bp, Homo sapiens
gccctggccaaggcgctcaaaatgaccgatgcgcaggtcaaaacctggttccagaaccggcggacaaagtggaggtgagcaagcggggcgggccggccgcccgcgagcggcgcggtctcagg

SEQ ID NO: 435259 - DNA, 122 bp, Homo sapiens
aggaatgtgaacctgagcacgaccggggccacccggggcttagcgtcccgtatacacccacgtgagcttgggatttcagtttcatggaaggaacgtaggtcagggactcaggaaactagggt

SEQ ID NO: 435260 - DNA, 122 bp, Homo sapiens
tgcggcgggggcggagaagagctaccgggactgagccggagccggccagaggtgcggaggcgtccagggcgcgggccgggctgaagtggggcggcgctggggcgggggcggcccgcacggtc

SEQ ID NO: 435261 - DNA, 122 bp, Homo sapiens
ccttgtggggcacgcagtttcccgccctattaagagcttctccaggcggggattccggcgcggtctgcgtttccccagcgccctgctggaaatcttttttgacaggtttctaaggctggctt

SEQ ID NO: 435262 - DNA, 122 bp, Homo sapiens
ctccctgtacctccgcgacccaggggacgcccagtgcaccaggcccttccccggggtcagcggaggcgcagggcgttagccacatcagaggtgcaaatttaccccgggcccaggggaaaatg

SEQ ID NO: 435263 - DNA, 122 bp, Homo sapiens
acactcttagctgggtgcagggtgcggctcagggcgtggtcaccgggggctacttagggccgccggtgcgggggacgacgcaaaggttaactgcgagctgccgggcactcagcgcgggtcat

SEQ ID NO: 435264 - DNA, 122 bp, Homo sapiens
ctcccaggcccctggggcagccctcccgccgcaggtttcaggtcccaggccccagctgaccgccccagcccgcgctgattgcacctgtctgcattcacagacattcgggagacggccttcgt

SEQ ID NO: 435265 - DNA, 122 bp, Homo sapiens
caagaccagcctggtcaacatggcaaaaaccccatgtctactaaaaacacaataattagccgggctcattgctcacgcctgcaatcccagaactttgggaggccaaggcaggaggatcactt

SEQ ID NO: 435266 - DNA, 122 bp, Homo sapiens
tgagctcttgcgtgcatgtgcgctcgcatgcacacacacacacacacacacacacacacacgctgtctgtcattactgatggaaaagcctaccttctgcactccacccctgcctcatccccc

SEQ ID NO: 435267 - DNA, 122 bp, Homo sapiens
aggggaggggtggttgcctagcaaccggtggtgccaaacactggagctcagagcggggggcgcggagagcgaagcgggaaaggaggtaagggagctagggaagcgggggcgcccccttcctc

SEQ ID NO: 435268 - DNA, 122 bp, Homo sapiens
ctccgcgagcagccgcctgtaccagcctggccgcgcagcctgacgtcacaaagccagccacgcgcctgcgcggcccacaggccccgcccctggacacgcccttgccacctttctttttggca

SEQ ID NO: 435269 - DNA, 122 bp, Homo sapiens
ggagatcctcaattagaagtgtggcgaagctggcaaaagactacacagtggaaaactccccgcgtcgccagaggaggctcccggctgcggttcccgccctcggccgagcgccgccagcgccc

SEQ ID NO: 435270 - DNA, 122 bp, Homo sapiens
gaactgggctgggtgggtggacagacaagtgactcagcaggcgatgggggaccgacatcacgtggagaggggaatgtaaataaacagactccctgggagtctaggggggacatccaaaccgg

SEQ ID NO: 435271 - DNA, 122 bp, Homo sapiens
aagggcaactcttggcagctggaaaggttctcccagtccacaggccgccagaatcccttccggcgcatgcctgcctgagctgccacaatgccgcgtgctcactggccccccaggcctgtccc

SEQ ID NO: 435272 - DNA, 122 bp, Homo sapiens
cagacttcatgctcctcggccccaaaactgcgaacggtctgcagccctccaacggcttcccgcaccacctgccccgccctggccactgcatcctggatctcccgaagcacttcctggaaaag

SEQ ID NO: 435273 - DNA, 122 bp, Homo sapiens
acagagaaacagaaagggggataccagggaattcaggacacctctcctggatctggtacacggccctccaacctgtcccctcctccctctgtcccatttggcaataaccaccaatctttagg

SEQ ID NO: 435274 - DNA, 122 bp, Homo sapiens
tcgtaaggataaaattgctctttcaggttttactgggggagccagctggagccttgggcacgcgcgccctggggaacctttcctctttgccgcccctgcgtgtcgcccctttaaagccttct

SEQ ID NO: 435275 - DNA, 122 bp, Homo sapiens
acagggacacaaatatgcacataacacattatgccatgtcttatatctttcttgagttgacgttctatgagatatattatcacatcaacacatgagttaaaattgtcctattatccatacct

SEQ ID NO: 435276 - DNA, 122 bp, Homo sapiens
caaaggtaccctcagcagtgaggctttctctgactaccctgtctaaacaagcaaacctcccgacccaacttctttactctcttttcccttactcagtgttaggctcttcatatcacatacca

SEQ ID NO: 435277 - DNA, 122 bp, Homo sapiens
acctgcaaggccagggcagtgcaggccacatacagtgacctctgaaggaccccaaagtaccgggatgtccatgccttcactctttcagctgccatgaggctgtgctgcccaacaaatagaag

SEQ ID NO: 435278 - DNA, 122 bp, Homo sapiens
gctcctcccacggcgggccattaatccctagatttccggatccctccccgaattcccaaacgcctacttccgctcgccagtggaaaacatcgtcaccaactctttgtcctgtgtggtgcatt

SEQ ID NO: 435279 - DNA, 122 bp, Homo sapiens
actgtcaagggattctaccaggtagaacgcgaacctggaggccggccgccccagggaaggcggtggggcgttttcaaggatgagagtatgatctccaaatttcaaaaggtcacactgtcact

SEQ ID NO: 435280 - DNA, 122 bp, Homo sapiens
ctaggtcagtgtgaggctcgcactgagatttcgagggggtggcatctgggctggtgtgcgcggccccagcggcgccctggaggaaagctgccctctccctaattcatccatccacgtttatt

SEQ ID NO: 435281 - DNA, 122 bp, Homo sapiens
ggcagaaatgagaggggaggggacagaggacacctgaataaagaccacacccatgacccacgtgatgctgagaagtactcctgccctaggaagagactcagggcagagggaggaaggacagc

SEQ ID NO: 435282 - DNA, 122 bp, Homo sapiens
ctcgaacccaggaccttctgcgtgtaaagcagacgtgataaccgctacactatggaaccgcgtgcggaatggctgtctctggatttagcaattctgcataaagacatgttaacaacgtggac

SEQ ID NO: 435283 - DNA, 122 bp, Homo sapiens
ggcgcggacctgagtgttacagttcttaaaggcggcacgttgggagttgttcgtttctcccggtgggctcgtggtctcgccggcttcagaagtgaagctgcagaccttcgcggtgggtgtta

SEQ ID NO: 435284 - DNA, 122 bp, Homo sapiens
tttttcaagataagcttccccctccccctttttttcccctccacctgtgcactgtcttatcgcgatatactcttgacttctgaaaatcaagttgcaggattggtatgactggaatgcagagg

SEQ ID NO: 435285 - DNA, 122 bp, Homo sapiens
aagagcagctctctctcatgttcctggagcacccagtgtctctccatgtgtacacactctcgcttgcgtgatttgcacggtgagtgggagagggtctgcctgagccactgtcacatccccat

SEQ ID NO: 435286 - DNA, 122 bp, Homo sapiens
caagccattcacctgccttggcgtcccaaagtgctgagattacaggcaccacgactggcccgttaagagtattgttaatctttaaccatttgttctgcagccaagtatcagggagatgagtt

SEQ ID NO: 435287 - DNA, 122 bp, Homo sapiens
tcacaggggcggggccgattttaaagagccgggcgcggaaaaaaaaaggccgcctgtcgtcgtggagagaatgagtcacagatttactgagttaacaaaatatctttaataaaatctttttg

SEQ ID NO: 435288 - DNA, 122 bp, Homo sapiens
ttttcattggtccgctaaagataatgacccgcccctttctcgatacgtaaacatctagcgcgctgacgctttccaagcacgcatgcgcagttgtgaaatattgcggagttttcggagtccaa

SEQ ID NO: 435289 - DNA, 122 bp, Homo sapiens
ccctttcacacttaggagtggtaagtgcctaggaaacaaacacacacacacaaacacacacgaaggaaatctaaaagttagcagctgcttgctctgactttagagattatgaatgattttaa

SEQ ID NO: 435290 - DNA, 122 bp, Homo sapiens
agtttcatctccttagaggctccaaggcacacgccggccagccccagcaatgggttctttcgagcgacaagagctgtaaccagtcacggaacagcacgttaggcttgcgagccaatgaggag

SEQ ID NO: 435291 - DNA, 122 bp, Homo sapiens
gctgtccttactcctgaatcgcatggatcctgtgttggactcacctcaccccaggctgcccgtccctcactcgctgagtttcgtctcaattgcacggatcccgtcttggactcgcctcaccc

SEQ ID NO: 435292 - DNA, 122 bp, Homo sapiens
acataattgacacacagctcagaacagacccagacaggacatataagtggactgagcctgcgcccctggggcggggcggggctgcccccagggagttcccactgatgtgtctccccagtccc

SEQ ID NO: 435293 - DNA, 122 bp, Homo sapiens
ggccaggaggaagaatggataatgctgggcctgggagggaccgggaggccgagtccgaggcgagagccatggggtggtgcttgttccggttctcctgcagccggtctgtccatcctgcctgc

SEQ ID NO: 435294 - DNA, 122 bp, Homo sapiens
gtctacaacaccagcctggaacagaacaagagttttgcatggagtcaagcacaccctagtcgagtcttgtctgtacctcccagacgagctgaccccttctccagaactctgcttcttttctc

SEQ ID NO: 435295 - DNA, 122 bp, Homo sapiens
agcccacaggttggaatggctgagtcatccaaacaacacaggtggtggcctgcccctccccgcaggcactctgtcccagggagaaatcagaactctttagaatatgggtgagggtggctgga

SEQ ID NO: 435296 - DNA, 122 bp, Homo sapiens
tcaccatgtcccagctaatctttctttatttttagtagagacgtgttagccaggtttcaccgtgttaccgtgttaccgtattccagccgggctccgcccctggattcggtggacagaccagc

SEQ ID NO: 435297 - DNA, 122 bp, Homo sapiens
ctttgaacacagctgtctcagtcagcagctccttaaaagaaatggaatgtgacagacacccggctccaaatcccagcaccaaccctgggtgcccttgaccaagtcatgcaacctctctgggc

SEQ ID NO: 435298 - DNA, 122 bp, Homo sapiens
gctctaattctgcagaaactcttctcagctaatcacacttaattgagctttacagctaaacggagtggggaaggaggaaaggacccagggtgggaagacccagccccactccctctctcctc

SEQ ID NO: 435299 - DNA, 122 bp, Homo sapiens
ccacgccaccgccatgggcgccttcgtacgcccgcgggccccgaccggggagcctggcggcgtgggttgccagcctgacgacggcgacagtccaaggaacccccacgacagcacgggggcac

SEQ ID NO: 435300 - DNA, 122 bp, Homo sapiens
tcagtgggcagacccaagccagcagagccccaaactagggcctgccggctttgaagacagcgctgggtgctgtgctgtggcccgggaggctcgggtgccctcagccacaggccctggctccc

SEQ ID NO: 435301 - DNA, 122 bp, Homo sapiens
gagtgcacagccccccttttgccaatgccagtcagtagcaccgctttatttagggtaccacggaagagagaagccctgaactgtgggtgactgataaccagaaggaaaggcatgttcagata

SEQ ID NO: 435302 - DNA, 122 bp, Homo sapiens
ttggtgttttacttttatattgttttgcagattcagaaaacaataaagaagacagcacgtcgggagcagcttatgagagaagaagctgaacagaaacgtttaaaaactgtacttgagctaca

SEQ ID NO: 435303 - DNA, 122 bp, Homo sapiens
tgaaaccaggcctgtctcatgcaagaggtctcctcctcctgcatttgtccatcctgacttcggtagtcacaattatagccgaatgcccactgagctaggaccagctagctggctagccccgt

SEQ ID NO: 435304 - DNA, 122 bp, Homo sapiens
ttgaaaactataacatgagaagtagttgaatgaaactagaaaagtctgaggaaaaaaagacgggatgactttatagctgtgtttaattatttatagggttaccataaggaagaaggagtatt

SEQ ID NO: 435305 - DNA, 122 bp, Homo sapiens
cttcctcctcaccgagaactgcccctcgccggcggactacaagagggcagccgggcagagcgagcttcctctcggcagctcagcggtgccccttctgcagctttgccgccgggcacattttt

SEQ ID NO: 435306 - DNA, 122 bp, Homo sapiens
cccatgcctcctgccgcggtcagagcccaagtttgtcaaggtattttggatcccggagagcgagaacccagacgacgacaaaatctacttcttctttcgtgagacggcggtagaggcggcgc

SEQ ID NO: 435307 - DNA, 122 bp, Homo sapiens
gcaggtagaagcaccgcttaaggggaacggcgattcgactcgcagtgacttaagggttggcgtggtgcttgttcctgggcgtggggaggacaggaaaccgcggggtctgtgagacgccccgt

SEQ ID NO: 435308 - DNA, 122 bp, Homo sapiens
gactgccctgaggaggccgggagcggagggctgggccagccagcgggcgggcgaagatgccgaacttctgcgctgcccccaactgcacgcgaagcgcacgcagtccgacctggccttcttca

SEQ ID NO: 435309 - DNA, 122 bp, Homo sapiens
tttttttagggtctttaaaagtgttattctttgtcgccctttgtttctgagtaatgctcacgatgatgctgattcaaccactgctcttctgggatcggggaccccagaaaagaacccaccgc

SEQ ID NO: 435310 - DNA, 122 bp, Homo sapiens
gggcgccgaactctgaaggagtggacactgcaggtgagcccgtttggtcggctgcgggcgcggctcccgtgccacctggccgtgaggcccctggaccccctcacctacccggatggcgaccg

SEQ ID NO: 435311 - DNA, 122 bp, Homo sapiens
gtgacgtcagtacgctgctgcgaggggctcctggaagaagatgaaggcccgcccctttcccgaagcaccgcccactgacagcgtgttccaatcagaggcggagaggaacaaaagaggcgagg

SEQ ID NO: 435312 - DNA, 122 bp, Homo sapiens
gcgcgggcgggaactggggctgcgtgcagcgctcccaggccagcgtgagttccgggtgctcgcgggctgagcggccccctgctggcggcccagggagtgaggcgcttagcacccgggccagc

SEQ ID NO: 435313 - DNA, 122 bp, Homo sapiens
ggcaagtgatgtactctgcccatttataagcaccttcctgataacttatggtttctggaccgcccaaaattactcttaagctatttacacgaggaaaaaagatcccctttacttactaattc

SEQ ID NO: 435314 - DNA, 122 bp, Homo sapiens
agactgcgtgaagggtggcgtgcccgtggacgccctggaagcaactggaaggcgggggtccgggggaggctgcggctggggcttggagtcacgtggacgcagacggcagctgaatccctaca

SEQ ID NO: 435315 - DNA, 122 bp, Homo sapiens
caaacagctgcagatgaagtcagagagaaacttgggtcatcatgcaaaatcagcagagaccgtggcaagatatattttgtcatttcagtggaaagtctggcacaggtttgaatggagcaata

SEQ ID NO: 435316 - DNA, 122 bp, Homo sapiens
actccgctgctccccatttatctgttccatcaccagggcaggtgctgagtgcccatgtgtcgggccgggtggtgatgaagagctacctgagtggcatgcctgaatgcaagtttgggatgaat

SEQ ID NO: 435317 - DNA, 122 bp, Homo sapiens
cacgcttggcgtgaatagcacagaggttggtgtcttcaaagagacccaccagataggcctcgcacgcctcttgcagcgccatcaccgccgagctctggaaacgaaggtcggttttgaaatcc

SEQ ID NO: 435318 - DNA, 122 bp, Homo sapiens
gtaagctgaactagctacttttgttgtggattgtttttgcttaaaatacaacgggcagaccgactgtggttattcaaacttgagtatttggcagacatttcctcataaatgagtgacgtgaa

SEQ ID NO: 435319 - DNA, 122 bp, Homo sapiens
tatgaagttcctaacaagccagtgtctgccgcacagcagggctgcctggaatgtctgctgcggcacagaactgcccaaggaagagagtcaggaaacaggagagattccatccttccatgtcc

SEQ ID NO: 435320 - DNA, 122 bp, Homo sapiens
tctctttgctcagttttatttttttaattggtcattatcccttcactagcaacaaaagcccgcctttcctttttcctgtgtggcagaaccattgcaacacgctggttggaatgttcagatct

SEQ ID NO: 435321 - DNA, 122 bp, Homo sapiens
ctcccgggttcaagcgatcctcctgccttagcctcccaagtagctgggactacaggcgtgcgccaccatgcctgcctaattttgtgtgtgtgtgtatttttagtggagacggcatttgccat

SEQ ID NO: 435322 - DNA, 122 bp, Homo sapiens
aggctttgagtttctcagactgccttctgattcctcatcgactgtggaccttgtattctccgtattctatactgtgatacctccaacactcaatccagtcatttatagcttacggaatgatt

SEQ ID NO: 435323 - DNA, 122 bp, Homo sapiens
cagcccagcagttcgcgttcgcctacccgcgcgcgacctacctactcacgcggccagccgcggactccaggccagctctgtcttgttgctgggcgctgccatattggcccagagagcgtccg

SEQ ID NO: 435324 - DNA, 122 bp, Homo sapiens
aaggcggcggcggcggcgaaccagcagaagggactttcctggcagcccggcgacgaggagcgcggacagtgagtttgctctgccccggttcatggttcctgcaagccctctaggaggccgaa

SEQ ID NO: 435325 - DNA, 122 bp, Homo sapiens
tctagtcctcattcctttccttttccccccgccccccttttcacccccctcccaccttgtcggaggagagcatcttattcagaagatgctcaggctgaatttggtgactgagtgctcaggca

SEQ ID NO: 435326 - DNA, 122 bp, Homo sapiens
agttcttctatcagcctctatttcaccattttgtactttactgggttgtctgtgctctctcgtcctgtgtcctatgagaactgcctgaagacaaagcttgagtgcattttattcaccatgag

SEQ ID NO: 435327 - DNA, 122 bp, Homo sapiens
cttcagccaatttgagcaggcggggagcccgatcatacatagtgctcggggtggtgggggcgctggggaagggcaggtgccgaaaacgataaaaacaaggtagctagaagtgtggagaaaaa

SEQ ID NO: 435328 - DNA, 122 bp, Homo sapiens
aaggtgactgccccctggaatctgatttagccaagttttcaaacgttggagtgccccatgcgatcttggacatgtatagggctttctgggactagctctgaaccctgcttgcaacttggtac

SEQ ID NO: 435329 - DNA, 122 bp, Homo sapiens
tcaagacgcagggtggcgctgcaggctaagttgtgaataatgagccctaaaaagctcgcgcgtattcttctgtgtcgctagacgcaatcaaaaacacacggaagaagcgttacaagcagtgc

SEQ ID NO: 435330 - DNA, 122 bp, Homo sapiens
gactccgaggccgaggtactcacggttggtctgagagcgtctcaggagaagccttggccacgtgggtgatgggcacgagcccggcgctgggctggcccgaaagcctgcgtgcgaagatgtag

SEQ ID NO: 435331 - DNA, 122 bp, Homo sapiens
aaaatttagttttgttagtctctcagcaccgcagcactggagctgtcctgaaggtactctcgcaggaaatgggaattctacttgtgtgggtaagtactccaatgaaaaggtgctccaggtct

SEQ ID NO: 435332 - DNA, 122 bp, Homo sapiens
ggaacgacggatagactgggggctgcggcctagaggtccgggcttggagttcgcctcagacgcggtggagccgccggagtctgagaaggtaagaagccgccggcttgaggtccctgacaact

SEQ ID NO: 435333 - DNA, 122 bp, Homo sapiens
ttctttgcggtggccctgccgccaggtgaacgctgccggtgggagagcacacacttagtgcggccagctgaccttcacagtctggggggaaattttaaaggattgtggagaagaggccttga

SEQ ID NO: 435334 - DNA, 122 bp, Homo sapiens
gggtcaggcctcattggtttccggcggccccaagggcgaggtagccagccaccaagccgtcgcaggaacatggctggggtgtgtaatgggcccccaaattctgaggctgcttcctggcacta

SEQ ID NO: 435335 - DNA, 122 bp, Homo sapiens
tctggggcgtgtagggtgttgtgtctatgcgcacgagcatccaaagggaccgcgcatacgcgcaaacccggaatcctggtgcccttaagcgtgactgtactgtgtgtgtcgcgagtacctga

SEQ ID NO: 435336 - DNA, 122 bp, Homo sapiens
aagagagaactggcgcgccgcaacgtcacttccgtttggggcattggaaggggcgtggctcgttgtgtgggcagttggacaggatggaactcttcaggattctagtttccctccgcgtgggt

SEQ ID NO: 435337 - DNA, 122 bp, Homo sapiens
gccctgatggatttgttgacctttaatatttagaatctctgcctctatgcatgttacccccgatatctgcatgtaacacagatatggtagatttagaagatgacacttgattagacacaaaa

SEQ ID NO: 435338 - DNA, 122 bp, Homo sapiens
tccgctgctccctccagcgcggctcttcgcgacctcgcgatcctgtcctccgcccggccccgcagccgcccgccggtgccatatattatagcagcgccagaaatgtggtggtcgtcgccacg

SEQ ID NO: 435339 - DNA, 122 bp, Homo sapiens
atacaaagggaagatgtaatctgtgaaggtcgtagaggccaattagggattgaaatcccacggatatgggttgtcgtacacccacttcacaccagttgctcttattctacaccatcatttca

SEQ ID NO: 435340 - DNA, 122 bp, Homo sapiens
ttagtttcttttaatagatagggagtctctgatgagctacaaacagacaaaacaggtggccgtggtctcttcaaagccagctctagagcttttccttttggaagctgaccactcacacctgg

SEQ ID NO: 435341 - DNA, 122 bp, Homo sapiens
atccacccgcctcggcctcccaaagtgctgggattacaggcatgagccaccgtgcccggccggtatatgccttcttattacagtatataaggaaaaagttagatttactataggttagcatc

SEQ ID NO: 435342 - DNA, 122 bp, Homo sapiens
taccctctcactccccacacatctgttctgtgccaggcctggactaggtatgtagggtggcgaggcaaagagagaggggagtgggactcagtcctgccgctgaggttcccacaattgatgtg

SEQ ID NO: 435343 - DNA, 122 bp, Homo sapiens
cacctgagggcatctgagtttgagatccctggactaactggtctcaaaggtgccataaagcgagtctctgggtttctgtggctctggatcatgggacaggcaagagagagatgactgggctg

SEQ ID NO: 435344 - DNA, 122 bp, Homo sapiens
ctcctgcttctcccttcccctcattccccacgcgctgagcacccacgccccatctagaaccgggggtcctaaggtggaggtttgcatgcaagagcttgccatattgaaaagaactcgtgtca

SEQ ID NO: 435345 - DNA, 122 bp, Homo sapiens
cgaaggctggaatgtttcccccacgggcctccacgttcccagcgggaagcgccgaaaagtcgccaactattggccccgggtgcaaaggcaaaggtcacaaggcatttacttggcggaggtgt

SEQ ID NO: 435346 - DNA, 122 bp, Homo sapiens
ttcccttgaagctgtagggaaaaggctggctgcgcgcacggggcgctgtccctcggcgcccgaaggtgtagagcactgattttgactgattttggaatccgaaagacttccttttttttttt

SEQ ID NO: 435347 - DNA, 122 bp, Homo sapiens
ctgaatctgtcaggcaggcagaggggctcttgccccagaaccattgcacatgctggtccccgtctcttccctcagccatctgcatgactcaatacatcttcaacaaatatttttctcagttg

SEQ ID NO: 435348 - DNA, 122 bp, Homo sapiens
gcagtttcagaacccagccagcctctctcttgctgcctagcctcctgccggcctcatcttcgcccagccaaccccgcctggagccctatggccaactgcgagttcagcccggtgtccgggga

SEQ ID NO: 435349 - DNA, 122 bp, Homo sapiens
cgatgcctgaccagagcccagcctggacagccttccagcaaaggctgggcactggccgaccgtaacggcccaggagaatgaggacacgggagtctcggggctggaggagctggctgaccaga

SEQ ID NO: 435350 - DNA, 122 bp, Homo sapiens
atccgatgtatgaagccatcagctctgccatcccgcagctctggattaatcatggcaaggcgctaaccgatggagatcagtaggagaggactagaaagcttttcatgtacatcacttattta

SEQ ID NO: 435351 - DNA, 122 bp, Homo sapiens
aacaaaggtgtgttgtcattcaagttattgagagtaattgtagcaaggacttcgacttcccggcggtacggcaagccccagtctgatgcacgaatcctcagagtataaacccgaggcatcag

SEQ ID NO: 435352 - DNA, 122 bp, Homo sapiens
gccctgcctagggcagcggccgtcatctcggggcgtgcaagccgccaccgaggccccaggcggaacagaataggactccatgttcccaaaggcccccaaagacccctccatgcttcccgccg

SEQ ID NO: 435353 - DNA, 122 bp, Homo sapiens
ccctttttaaggtgcttctaactggcggcaaatcagcacactgatacaaagtgaacaccccgcgaggaagcggagcctgcagtccacgggctcgtggctcgccgggcggttttctggggatc

SEQ ID NO: 435354 - DNA, 122 bp, Homo sapiens
aaccctcgccgctgtggtccacggtttcattccctgaagcccgtgagaccacgaacccttcgatcgagaaaagaccttcaatcgggagaagacttctcgtctcaaaagtatcttcaagatag

SEQ ID NO: 435355 - DNA, 122 bp, Homo sapiens
ccccatccccccaccccaccctccacatgccacgaggccccatccccccaccccaccccacggggccaccctcttcgaagctccttcaaacacacgcccgcgcccccatctgctctttctgg

SEQ ID NO: 435356 - DNA, 122 bp, Homo sapiens
aggcgtcaggttctaccaaggcgctgaaatgagcccatcagcgggtaggagcccttcccccgccgtcccctccccaggctcgtgaacggcgcctgatgcccgcccggggcgcgagctctcga

SEQ ID NO: 435357 - DNA, 122 bp, Homo sapiens
ctttacacttgagagaactgaggcacagagaagttaagtaacttacccagagtcacacagcgaggaaataccaagcccaagattgggacccaggtagtctggcttcagagtctctgcttcat

SEQ ID NO: 435358 - DNA, 122 bp, Homo sapiens
gaataaatcccagccttttcaccactttgagagcacagctggcttgaatttaaacctccacgtggacttgctcctctgctctgtcttaaaaaatgtgtaagggaccttgggagggcagtgat

SEQ ID NO: 435359 - DNA, 122 bp, Homo sapiens
cggcttttgctggtaacctgaaacttaagtagtcacatgtagttcaaccagctccaaacacggttgtacagtggtaattattctgcagcatttatgggcctaaatttcagtctgaattgcaa

SEQ ID NO: 435360 - DNA, 122 bp, Homo sapiens
gaagtgaggagcgtctctgcctggctgcccatcgtctgggatgtgaggagcccctctgcccggcagcccagtctgggaagtgaggaatgcgtcttcccggccgtcatcccatctaggaagtg

SEQ ID NO: 435361 - DNA, 122 bp, Homo sapiens
ggatgaggggggtgcccactgctgtccccagcgacgagcgggtgaagacaccgcgtcatgcggcctcaaaggtctttggggcccccagaagcgctgactgatgaatgtagtggccgtacccg

SEQ ID NO: 435362 - DNA, 122 bp, Homo sapiens
gaatgagtcaaaacaatgatgcattgctggggtagcagtggggcatagtgggagtggggtcgtattcaaagagctctatgtgagtttaggaaagcttcttcattacctgggccttaactcct

SEQ ID NO: 435363 - DNA, 122 bp, Homo sapiens
cttctctccaaacacgtcttctgtcctgaccctgttctttattctgggccgaacttctgccgttcttccctagccatcctcatcccctctctccgatcctttgccctccgcctcatccctct

SEQ ID NO: 435364 - DNA, 122 bp, Homo sapiens
aatgggggtgagaatggtcccttcctcatagggttttagtaagcattaaatgaggtaatacgtgtgaggtacttggcacatagtaagcgctcaggaaactgtagcctcttagataacaggca

SEQ ID NO: 435365 - DNA, 122 bp, Homo sapiens
ctgaagagtgaactgacacttgtgcccattgatttggttcatagagaatgttctgatttacgtccccgtccccacagattttttttaaaatgcaccaaacgtttacctgaagtaaacctgat

SEQ ID NO: 435366 - DNA, 122 bp, Homo sapiens
ggagaactagtgcatgctggctggggatggcggacgcaaagccggaggcaaggccgcgcacgcgcaaacgcgggcgcgccgccgggccgtgctagtgcgcggaagacgcatgcgctggcggc

SEQ ID NO: 435367 - DNA, 122 bp, Homo sapiens
gtccaaggagaccagcggagcagaccacgcggcatttattgttgggcccgcgtccctgcccgccccgggttagcggcagccgcactcgtccaccaccatgtcctcatactgccgcagcacca

SEQ ID NO: 435368 - DNA, 122 bp, Homo sapiens
gatgatgagcctgagtgatctgggaatgcgtgcctctctaggcttggctcccagctgctccgatgtttcccccatgttggatccatgtgtgtctgcatgtctgcatctatctgtgtgtctct

SEQ ID NO: 435369 - DNA, 122 bp, Homo sapiens
tctccccatgggctaaatatggagattcatgagccagagcagttctcacaggcaaaggcacggaattgtatctcttctcctaagttgcttacagagtagcagaggagaaggccactgaccta

SEQ ID NO: 435370 - DNA, 122 bp, Homo sapiens
tatgagaattttagctgctccacattgctgctaggagtgcagctactctcaacagaaacccgagaaaaggggaactcactacgtgctagtcacttcctctaacttttgacccccctacaaaa

SEQ ID NO: 435371 - DNA, 122 bp, Homo sapiens
gtcttaaggccaaaagaaacattcaagatcatctaaagccgggccatctaactgaaatatcgcaatgatgggcatattctataatccatgcagcaatccggtatggtagctactggcctcaa

SEQ ID NO: 435372 - DNA, 122 bp, Homo sapiens
ggggagctgggggtgggcagagaaggccctgccgggggtgcgttgctaccctttgggactcgccggcctgaagctcgggcccacgggggcctcctgggccacgggtgaggggggcagggcgg

SEQ ID NO: 435373 - DNA, 122 bp, Homo sapiens
cggccgggcgcgccaccagtaaccagggacccaggggagaacctgccaaggggaataggtcgcacggagagaatacgacacgcttggagggaagaaccacgtgctgtacaggtttaaaggat

SEQ ID NO: 435374 - DNA, 122 bp, Homo sapiens
tagtcctgagaagtggctgataaagtgccggctggcagcccactcccccgtggctgccagcgccaagtgctcagaaatcaccaggttaaacaagtctgcagaaaattcaatcttcccggcat

SEQ ID NO: 435375 - DNA, 122 bp, Homo sapiens
tgaggatcttgagagatcagaatctcagaatggagattctgagtcagtaggtccaccaggcggcaagagagtctccattcctaacagagtccctagtaatgccagtgcaagtagcccaagga

SEQ ID NO: 435376 - DNA, 122 bp, Homo sapiens
tgcttttagcactcagatgactttgctaagctttggacagctcctttgcttaaagcttctcgaatgtttatctccccttttccactctacgcccaaagaatgtccagccctgtcaggcaaga

SEQ ID NO: 435377 - DNA, 122 bp, Homo sapiens
cccaggggccctgcggctggccagcgctccggctgcacctcctggtgcgcgccgcggcggcgccacaggcccctcgaccctttgaccaccgccctcgggccgcgcgtccggcagccgggacc

SEQ ID NO: 435378 - DNA, 122 bp, Homo sapiens
ggcttcatcccctacgaccagagcggcttcgtcagcgccatccggcaggtcatcactactcgcaagcaagcagtgggacctggtagtgtcaactcaggcccagtccagatcgtcaacaacaa

SEQ ID NO: 435379 - DNA, 122 bp, Homo sapiens
cgcggcagccagcttggcggggctggggtgaaagaggacgctgcgtgggggagggctccgcggcttctgactggctggagcatcaggattcatttgcataatattttctgacggcttctgat

SEQ ID NO: 435380 - DNA, 122 bp, Homo sapiens
ctactctccacctccttgcttaaaagcctcttctgatgggtaagtgcttccacttgcgatcgccgccttgccgcatcccctcagcctgtggcactcaaactgtgggggcactttctgctctc

SEQ ID NO: 435381 - DNA, 122 bp, Homo sapiens
agagacaattcttagaagcagcacactcaaataagggatttagacttttgccagtgacatcgtctgcctaggtgcttttagtataaaatgagctgtgcatttggacacaactttttctcagt

SEQ ID NO: 435382 - DNA, 122 bp, Homo sapiens
ttgaaccagacactgatgctcctcaagaaatgggagatgggcgcaaggctccggactccacggtgcagactgcacctcgcagtctccccaggtccgcgcagcagccacgcttcagccagaat

SEQ ID NO: 435383 - DNA, 122 bp, Homo sapiens
caggcgtgagccaccacgcctagccgggacatagacttttgaaagtcagcatcatatgggcggaaatcgaagtggggcttacatagccagagaaaaattacaaaatgaaaactgaagagaat

SEQ ID NO: 435384 - DNA, 122 bp, Homo sapiens
tgttccggactcgcccgcggccgggcggagccagttgcctccaagcgacccgacccaccccgcgattgtagtcctagaggcggagtcctcgccagagttcagcaaaggttcgctggccgagg

SEQ ID NO: 435385 - DNA, 122 bp, Homo sapiens
tcgaccgccgactggtgggagttcttccgtcgccctagccgtagctgccgcagttgaagccgctggcgacgcccgcctacccctcccctgtgcgcacagcgcccgccccgccgccgtcgtcg

SEQ ID NO: 435386 - DNA, 122 bp, Homo sapiens
aatggccccgcagccgaagcccagggagccctgggagccggcgcctaattgttttgttgacgcggctgccgagcacttccagtaggtttcctaatgaactggtttgttatcggcctcactgc

SEQ ID NO: 435387 - DNA, 122 bp, Homo sapiens
cgggaaagcccgcagttcgggcttgggactcgcttacaaagccccccaaggcgccagggacgcctctgcaggttgaattcctgctccgtatcacttcaattttaattaatcttttaaaacac

SEQ ID NO: 435388 - DNA, 122 bp, Homo sapiens
ctggagcagagtcccactgtccaggtgcccacccagggccctctcagtccccctgcacagcgtgccctgggaggcaaggtcagaacctcctcaaccgccacggcacccaagagacgggcatg

SEQ ID NO: 435389 - DNA, 122 bp, Homo sapiens
catgttgttggccagttcccaggttttctgggccataccgctcccggacgccgccatcgccgaggaagcggagaagttgtcgtctctacaaccaagacgcaactttacctcgctaggtttcc

SEQ ID NO: 435390 - DNA, 122 bp, Homo sapiens
aagattgtgctactccgctgcgggaccagcggagatcctccacccaataaaagccccaggcgcctataccggattccattttcagttcaggcccaaatccccgggggttggtcgaggctgag

SEQ ID NO: 435391 - DNA, 122 bp, Homo sapiens
gtgggccccgccctctacgggggcactggcgcggaaactggccctgtgtcgaagaaggaacgtactttggcgttcttatgagctgcctagtacaaattattggcagaaacaatgaattaaac

SEQ ID NO: 435392 - DNA, 122 bp, Homo sapiens
tcttcggtagtggcggtgaaagaggcatgacactaaatcgacccttaggacgctcccctccgtccccacccctcacccccttcccacacacaccctcattcctgcaccccctcctcaaacgc

SEQ ID NO: 435393 - DNA, 122 bp, Homo sapiens
accgctgattcgcctaggtgccatcggacaagcgggtgctcagagccagctctggtggctcgggagctttcccccaaccaggctaagaccactaaaccacgcctggcccggatgagcttgga

SEQ ID NO: 435394 - DNA, 122 bp, Homo sapiens
tgtcgatcaaagtgcggagagcatatgaaaaatggagtttttaaaacgttgagtttaaggcgcctgtaggatatttgaatgagctggtcagtaatttcttggaaaaaatgacccaggggcat

SEQ ID NO: 435395 - DNA, 122 bp, Homo sapiens
taggggactgcgttgctcgctgcggtgcaaccgacccagccggggcgcggaccccgcgtgcgccagggctcccagactcgcctgcctgggctgaaatatacacgctcgcacagctgagtgct

SEQ ID NO: 435396 - DNA, 122 bp, Homo sapiens
catgcgattaaaaatgggtataaatatgaccgcaaaactgcccttcaagcagttgacgagcgactttccccttacatcaagtgcacagtaagcccaagcgccggggccgcggggattcccgc

SEQ ID NO: 435397 - DNA, 122 bp, Homo sapiens
ctctgggcagaggccacgcggggacggaggaggcagagaggacgggctgtgatggagaaacgggagaggagccggccaggcgccaccgtcaccaccatcaccaaccaccaccaccatcacca

SEQ ID NO: 435398 - DNA, 122 bp, Homo sapiens
aagtacttcagtcaggcggcagccgtcacaggtaaacaaactcctatgtgggaaatgaaccgaggctgtgagcctcaggcagctccccagacccccaagaggagagggagcagtgaccgagc

SEQ ID NO: 435399 - DNA, 122 bp, Homo sapiens
tgagaaagggcggggaaaggacgcgcgcgggagcgtgtgcacggccgagtttgcattgggcgtcttgggagagtttggggagggggctgtcctgctgggcacgcccctcggggccccgcttg

SEQ ID NO: 435400 - DNA, 122 bp, Homo sapiens
gcaatccacagtctgaacagaaacactgctttgctatgatgcaagcgcagctgctggacacgtctagctctcttccaaccggattactactcccaagtccctccaagtagacattctggagt

SEQ ID NO: 435401 - DNA, 122 bp, Homo sapiens
gcccgccgcccccctgccaggggaaggagcgcagcgtgcgcgccgccaggaagcggcgctcgaaactctgcagcaagagttcggtccccgcattctcctcgggcgccatgacgtgggcgggg

SEQ ID NO: 435402 - DNA, 122 bp, Homo sapiens
gtctgccccgccttagggaggtggagcctcagcttgtgggccaatagcaggagcagcctccggaacagccccaacgcgacagggaaagggggaggagccgggcgcccggccctgtaactgta

SEQ ID NO: 435403 - DNA, 122 bp, Homo sapiens
ctgtgggctgtgaatccaactcgtcctgggagcagggcgctctcgccttctgttcctctccgagctcagtgcacagaagcattctgcttacccagctgggactgctgactgcaccatcgagc

SEQ ID NO: 435404 - DNA, 122 bp, Homo sapiens
tgtcactacctcatctaccgaattcctaggatacaaacagttctcactttacacagggcacgttcccgaaccggcctctcaggacggaacccaaagacaatttcacaggatttacaatttgc

SEQ ID NO: 435405 - DNA, 122 bp, Homo sapiens
gaagcccttgcgccttccttccgctaggtggcggtaggagttcggcggaccgagaggttccgcgcccacttcgcggcccagaggactgagcccggcctccggtgcaaggaaaccccagaggc

SEQ ID NO: 435406 - DNA, 122 bp, Homo sapiens
catttttttttatagagatgggggtctgcccatgttgcccaggctggtcttgaacttatgcgctcaagtgatcctcctgcctcagtctcccaaagtgctgggattacaggtgggagctactg

SEQ ID NO: 435407 - DNA, 122 bp, Homo sapiens
tactcactgtctggtgcaggtccgggatgccaatcctgaagaccatcatgctgaagtgggcgtcgtctgggacggacattgagcggccctggaggcctctaacagaggccaggctaccaggt

SEQ ID NO: 435408 - DNA, 122 bp, Homo sapiens
ttgccagccattgagctaggaactgagtgtgattgtgtgcccaggcgccggtgctgttcccgtctttgagagacagggtcagggtccacgcaagagatgacgtagaagccctttaaggggga

SEQ ID NO: 435409 - DNA, 122 bp, Homo sapiens
tccccacttctgactttatcacaattggcaggaagtcaggaatgggatcaagtctctccgcggagctgtgggtgctgagctgtttttctggcaaccctgaaataaactcccatttcagtgca

SEQ ID NO: 435410 - DNA, 122 bp, Homo sapiens
tgcgtcatagttgctaggcaacccccagcctgaaggagcgcatcgtcccccgttgccctccggtggccgctctcgcatgctgcaggctctgtcccgactgaggaatagcagcactgccacct

SEQ ID NO: 435411 - DNA, 122 bp, Homo sapiens
tcccccgttgaggggagatctgttgaggggactgtgaaatggaattccctgactgggtttcgtgcaggctttagtataaggctggaaggatggaaatagctccctcatcaatttacgggaca

SEQ ID NO: 435412 - DNA, 122 bp, Homo sapiens
tagaagactggagggatttttccctcaggtcaatgaccatcacataactgatcatattttcgtttttgttttggcccgtggcaagcatagaatcaaatttacagctcaattttattaacctc

SEQ ID NO: 435413 - DNA, 122 bp, Homo sapiens
agctgctacgccagaagatggagacagtctcaaccagatgctcatgccctgagggcaggacgcaagccctgggctgaggcccagtgaggatctcacattaaggggagggaggaggagggctg

SEQ ID NO: 435414 - DNA, 122 bp, Homo sapiens
ggtttggcgggagggggaaggactttgacagcttccatgcaaccggggcatgaagcagggcgtgggtccaggagggagaagatccaaagtcgaatgttgtaaagatgtgctgatttcccagc

SEQ ID NO: 435415 - DNA, 122 bp, Homo sapiens
gtccgtcttcacagcaacgcgccgggtctcaccacggcggatgccgagggacaatattaccgcgtccgtggccgccggactctgcacgcatgtccaacagcccccgtccccttccccgcagc

SEQ ID NO: 435416 - DNA, 122 bp, Homo sapiens
aactctgctcatcatcacacacacacacaacctctcagcctggctgctttctaaggagatcgctgccagaatgcttcttatacaagttaccaacacgtgcatggttaagaaagaaatttgac

SEQ ID NO: 435417 - DNA, 122 bp, Homo sapiens
ccgtaagtgttttattctctaatgctattataaatgaaatcattgtctccattttgagatcgtttagaagtacaattgtttttcgtatattggggcacatggcttttactaatagaaaaatc

SEQ ID NO: 435418 - DNA, 122 bp, Homo sapiens
cactactcgagcctttctcaccgtcttcctcacaggccccaccccctaccgcgaggagcacgagctgaggggaacacaagcccccgtcgggcactccccggcctcgccccaccccccaggcg

SEQ ID NO: 435419 - DNA, 122 bp, Homo sapiens
gaggttgggctttttaaattttttacttcaatatcaggcgtctgggggagaaaacctccccgatattttcaggaaagtaagaacaagagagagtggatgttggagttggagcgaggttggca

SEQ ID NO: 435420 - DNA, 122 bp, Homo sapiens
cggcggcgtctcgccatagcgcagcggccgatggtacagcccgctcccccctcgcgctctcggacagtgggtccttccacttgtagaaaagcattgtgggacggaagcctgtcctttcttcc

SEQ ID NO: 435421 - DNA, 122 bp, Homo sapiens
caaggacctgctatcatcttaaaagagcagcaggagttgagctggaattagcaactgcttcgtcctcttcaactcacctgctgccaatgcccagttgtcctttctggtgaatctgagatttg

SEQ ID NO: 435422 - DNA, 122 bp, Homo sapiens
ggctcgggacctgcagcccgccatgcctgagcctcccaccccctccatgggctccagttgcgcccgagcctcccctacgagcaccaccccctgctccacggctcccagtcccatctaccacc

SEQ ID NO: 435423 - DNA, 122 bp, Homo sapiens
gctcccaaacagcccccgaagttcagtaatggcccttggaggcccaggtccctcagaaaacgggctactcacccagcaaggcctggaagaggtcgctatgcagcactgtgaggagtgggggt

SEQ ID NO: 435424 - DNA, 122 bp, Homo sapiens
ataagttgaaaatcagccattctctctctgcctcaggccatttgtttgtgggagagcaatcgttgaaagaaactaggttatttggttaccaagagacactgccctttaccatgagtaattac

SEQ ID NO: 435425 - DNA, 122 bp, Homo sapiens
tagattttgaggttacaatctcagctcagatcccaagtctgacttgccacgtaccagctacgcaactcaggcaagttttcacatctctgtggacttgggctcctgctaccacagaggtttat

SEQ ID NO: 435426 - DNA, 122 bp, Homo sapiens
aaagatgcgctggctcgcggcgagctcgaggtgccacttgcagaaactttgccagccgaccgccccctcccggacccaggtcctcctagggtatgggggcctcggaatagcggtgcgctcgg

SEQ ID NO: 435427 - DNA, 122 bp, Homo sapiens
cctcagcctcccaaagtgctgggattacacatgagccactgggccaagcctaagccaccacgcccagcccctgagccacctcgcccagcccctgagccacctcgcccagcctgagccgctga

SEQ ID NO: 435428 - DNA, 122 bp, Homo sapiens
ttgtgagaggaagttgttttcagcttcttagccccctacctgtaggcggtgctctgggaacgctcaggaagcagatgcatgtgagcctgtctcagccaatgattgcttagttgcaagaaaca

SEQ ID NO: 435429 - DNA, 122 bp, Homo sapiens
ccggttgggccctagtgtctgccagcgcctggagggctaaatcacagtctaccattatgacggtgggccttgctatcgctgcatattctcccagccacccccggcggagacagtgaccaact

SEQ ID NO: 435430 - DNA, 122 bp, Homo sapiens
tttggctaaagtgttggccgactgggctggttctcctgttcagactaagccctgcttctgcgtgatatgcagaaaccctgaaggctgtatgagtttggtctggtgccctcttgaatttccaa

SEQ ID NO: 435431 - DNA, 122 bp, Homo sapiens
tcagtttatcctcacgggaaggtgagaaaaaaaatcaactttaaaagtcaagccatctgtcgctggcaatggagacaataacctgaaaagttctcccattacaacattgcaaaaattcaaat

SEQ ID NO: 435432 - DNA, 122 bp, Homo sapiens
gattcccacgtgctggcggagctctgcaggcagctctcacgtgtgcggggtaaacgagctcgggggcttggatttccccagcgtctcagctgtgatcacctgaatgtttaaaaggctttaca

SEQ ID NO: 435433 - DNA, 122 bp, Homo sapiens
tgtggttgctttgggtttctgatacacatggttaacataccacagtcttcctccgagcaacgctgtgccatttcacggcagtgaaaggcccgggaaggatcccctgccattgtctgcccgca

SEQ ID NO: 435434 - DNA, 122 bp, Homo sapiens
cgcgcccggccggcccagaaggaaatgctctcagtccgagccaaacttcctgggcgactccgggctttctggctggagagaacccgccccctccagaggctcctgcgcaccccatgggcagc

SEQ ID NO: 435435 - DNA, 122 bp, Homo sapiens
ggctgggcgcttcccgtctcccggcgccgaagactggggtgggggcgatccaggaacgcacgcgaggctgcgcagtctccctccactgggttatctgaaccggcaaaccccgccggggaggg

SEQ ID NO: 435436 - DNA, 122 bp, Homo sapiens
ctcccgctcccgagcctgcccgttagagcgcaaggaaaactcaccatccggcccccagtgcgtctcggaagagctcccgctccgaaacaaagctcacaacttccggaagcgatggccaatcc

SEQ ID NO: 435437 - DNA, 122 bp, Homo sapiens
gcccttgggggcggggcctggcgccgggagcgcgggctgaggcggggctgacgtgaggggcggtgacgcgggtggccaaagcggagcggagcgggggtgaggagagtcgagggaggtgacgc

SEQ ID NO: 435438 - DNA, 122 bp, Homo sapiens
ccaccccgcgcgaaaagtgcgctccggccccggcccgacacggttacctgggcaacgacccgggtgcccaaagtacacagcacgcaccaccacccaacaccagcacccaacaccagcaccgc

SEQ ID NO: 435439 - DNA, 122 bp, Homo sapiens
ctggttcaaactgacgaagactgtttctctaataggttcagtctgtgagcgctcggctttcggagactgaagggccctggatccccttgccccgtcgcgccgtcgtccccccgctatccggt

SEQ ID NO: 435440 - DNA, 122 bp, Homo sapiens
tgggccacatgtgtgtggtttgggcagaacgggagacttcacaggcctctgctgggagctcgcttgtttattttggaagaattgtttgtctctgctgctgacagtgcagcctgaatcctgtt

SEQ ID NO: 435441 - DNA, 122 bp, Homo sapiens
tccggcatttctccaccacgtgctccatctgcaggtaggaggcggctgtaaggtagttgacgatgtccctaacagcgaattccaaggcgcccgtgtagcaggagaggagcaagtcggccacg

SEQ ID NO: 435442 - DNA, 122 bp, Homo sapiens
gacgcagactcagttctcattcccaatgggtgtcgggtttctagagaagccaatcagcgtcgccacgactcccgactataaagtccccatccggactcaagaagttctcaggactcagaggc

SEQ ID NO: 435443 - DNA, 122 bp, Homo sapiens
ttcctggcaagttgaggcggtgagatctagacgaggctgcgccgccgaaggtggcagggacgtctgtggtctcagctcccgggtgggtgacctagatcaagctcttcccaacatggatttca

SEQ ID NO: 435444 - DNA, 122 bp, Homo sapiens
agcagagagcttggcgctctccgctctgcgcgcccgaggtcacagcgcggagaaacctggcggggccccggactccccggcttgggaaaagcgatgactgccctgaactgctggggcgttcg

SEQ ID NO: 435445 - DNA, 122 bp, Homo sapiens
ccccttcccacctctgcgcgggacaacttccatactcacaattgtcttgagcaaagtgctcggtacaatttgccacatagttcaatttttgtctgctgataacagagattagaatgagtgag

SEQ ID NO: 435446 - DNA, 122 bp, Homo sapiens
aggtctcccttcctttgtggactccttcttccttttgctgttggacctgagcctagcatccgcctcacctctaccaccctcctcagtgcgattagtttctctgggctctcccagtctagctt

SEQ ID NO: 435447 - DNA, 122 bp, Homo sapiens
gacagaagttgtcagtgaacagagacggcgctcagtctggggcgagcgctctagtgagcgcggacggatgcttaggcagtagtcctggcagcggcagtagtggtggcagcagaagagaggaa

SEQ ID NO: 435448 - DNA, 122 bp, Homo sapiens
gaacgcgggcggcgagacggcggcaggacggcggcaggtaggcacagtgggcgggtagggcgcccgtgtcccgcgcggtccggtcccgcggggtccccgacgccaggcggggcgtgggggtg

SEQ ID NO: 435449 - DNA, 122 bp, Homo sapiens
gtcccgcctctccgggcatgtcacctggaagctgagcaaatgaattttatcacaggagtccgctctcgtttgcagtaagcctttcagttgaggcttgatgaaaccactccaaactgcagttt

SEQ ID NO: 435450 - DNA, 122 bp, Homo sapiens
actcacctgcgcacacctcggcccctcacctgcgcccaccttcccctggcctcgcttgcgcgcgctgctccacgccgcctaccctctagccaggggtcggagtcacccgcagggcaggggcg

SEQ ID NO: 435451 - DNA, 122 bp, Homo sapiens
ggccctggtgggccctctgatcctccaacccgccttagcctctcccggtctgacgagcggcgtgggaccctgagtggggcaccagctcccccaactcgccatgatttttcctttgaccgggt

SEQ ID NO: 435452 - DNA, 122 bp, Homo sapiens
tcgggagacacagggagccactctgctcccagcaccggctcctgacgatggggaggtggccgtgaacaaagtcgacaaaaacgcgggccttgtggggtttgcattccatctgggagaggcag

SEQ ID NO: 435453 - DNA, 122 bp, Homo sapiens
tgtaaaatcagtcggtgtactaggctttgttgcagaaatccccaatatacgtttcctctgcggctccccgtaaccacacacaggaacgcttgccttgaacgaggagaatgcacttccagtct

SEQ ID NO: 435454 - DNA, 122 bp, Homo sapiens
ctcagattagaaaaattggttattattttatggcccttaatgaaccaggtcaagcaaactcgatgctcccaagtaaccctgaaaccaggtggttctagctctttaggctcccttcccaaaaa

SEQ ID NO: 435455 - DNA, 122 bp, Homo sapiens
agagctgttgatctgccgttgctctgtaataatcgtctagggttccaagctggcccaaaccgagctttggcttaacgaattatggaggcaacataccttttaaataaagccccacctaggag

SEQ ID NO: 435456 - DNA, 122 bp, Homo sapiens
agagcactggggcggcgcacccggccgagcggacctcccttcctaccacagaagccctcccgcccccagcacggccacccgtcaccggcggccaatctaacgtaacttcgcgagatccggac

SEQ ID NO: 435457 - DNA, 122 bp, Homo sapiens
ggcacagaagtttccctggagcccacttggacccggcagtgtgagcgccatcctcctaggcggttctgtgctcctgagaatctggggcggatctctgcagtcttcctgacccagaaacctga

SEQ ID NO: 435458 - DNA, 122 bp, Homo sapiens
aaccgtgattcaaatgagaaaatgagacgagagtcctcatggcatttttgttaaacaatccgtgctctcaatcattctcagttacttagacaagcttaaaacctgggtggagggtaaaagct

SEQ ID NO: 435459 - DNA, 122 bp, Homo sapiens
taatctggagtaccacactttggaaataagtgtgtgtcacattttggaaaatgctgattgcgatgaaaatgggaaacatggctggaacccatcatctaatccggatcacactgcatcactgc

SEQ ID NO: 435460 - DNA, 122 bp, Homo sapiens
caagcattttgatcatcagaaaaaggaacaaagtggtgagttatgacattaccacacttacgacaagggtttgcaaggtggatccaaaccaatttccaaatatgtagggagccagctgtaag

SEQ ID NO: 435461 - DNA, 122 bp, Homo sapiens
cccgccggttccgagcggagcatgcgcagtgggcagcccgcgagacgcagcccgcagcggcgatcccgggtggccgtcaacgcccactgtcccagcggtgaccctgccctggcgcttctgcc

SEQ ID NO: 435462 - DNA, 122 bp, Homo sapiens
cctgggtcgggcctgggcgccggcacagagctggtgaacagacatccttgggggagctcccgctgcaagcactgcggctgcccaggcaggtcgggggagacccgggttcggcttctttccag

SEQ ID NO: 435463 - DNA, 122 bp, Homo sapiens
cccctcccagtggccacgcgccttctcacgcccctctcccgtgacgtcatgctcctctcgcgcggcatgatgggagaatcctaatgttttccaacagatgctccaagaacagctttcagatt

SEQ ID NO: 435464 - DNA, 122 bp, Homo sapiens
cctcccctccccagggaggggctgtgggagggaagctcacagctcccactggctgggcaccgagtccacccactgcagcgggcggctctctgcttaaaggggacatggctattgtcaaggct

SEQ ID NO: 435465 - DNA, 122 bp, Homo sapiens
accaaaaatggccacgttgaccagctgtgtgcggttcaggccgggtatgctgggcacagacgccacgcagcgatagccgcctcctgcctcccgtttcaggtcatgcaactgaagcacaggcc

SEQ ID NO: 435466 - DNA, 122 bp, Homo sapiens
ttatttatgtatttattaccttcttttatttaaatcttgtttatttcacattgttttgtccggttttcagtccaaagctgtttgggatgagggttgggagacagactagtttaaaaatcaaa

SEQ ID NO: 435467 - DNA, 122 bp, Homo sapiens
cctgaggcagacgggccactggtgacgccaggtgtagcagtagaggaccttcgccgctgccgcaggaggaaatcgtgtgaagctccatccatggcgtagaatacattagccgaggctgggat

SEQ ID NO: 435468 - DNA, 122 bp, Homo sapiens
attgataagtagctctcagcagataggggagccagaaaggagatggttttcttcgggagtcgggcggcttcttcgcagcccgggctctcctccgactgcccaggccaaactccgcctcattc

SEQ ID NO: 435469 - DNA, 122 bp, Homo sapiens
acgcaccacgcactcagcggtactctcctctcccgggcccccacgggtcccgatgctgggcggggatgcactgaactgttcagttccgacgtgctgcagttcccacacgcccgcgccccact

SEQ ID NO: 435470 - DNA, 122 bp, Homo sapiens
gggaagaaagatttaaacacacatggagacaggcttctctggagctccctgcagctcccccgctctcctgtgtcttaggatatcatctctgctgatgtctgaagctagtttccataattaaa

SEQ ID NO: 435471 - DNA, 122 bp, Homo sapiens
aaggcaaggaaacactttctccctggagcctccagaaggaaggcagccctgccaacatctcggttgtagcccagggactctgactttcagaactacaagataatgaatgtgagttgttctaa

SEQ ID NO: 435472 - DNA, 122 bp, Homo sapiens
gcagcagccccggagatctgtgtttgggagctgccgggtcagtcctgggaatttccatgtcgtcccccgcccccagccagcctctcatgggctctgctctgcttccagatcttaattaatga

SEQ ID NO: 435473 - DNA, 122 bp, Homo sapiens
gtaagatcttgtctgaacacagccaccacaccccttcatttgcagattgattttgctatccgacagcagagtggggtaggtgtgacagaggtcgtgtaacctgtaaggcctagaatttgtat

SEQ ID NO: 435474 - DNA, 122 bp, Homo sapiens
ctctgcggcgccgaggccccgaggacttctgggaattgtagtcctgtccccttgggagcccgcctggcacctgggttgttagggctcgtgggaggactacaacccccagggtgcagtgggac

SEQ ID NO: 435475 - DNA, 122 bp, Homo sapiens
gaccaacctgggaaacacagtgagacccccatctctacaaaaaatataattaaggctgggcgtggtgggtcatgcctataatcctagcactttgggaggccaaggcaggcagatcacaaggg

SEQ ID NO: 435476 - DNA, 122 bp, Homo sapiens
cacacagccagcttgtagccttccctcagcgcttgcatgatccatgagcgtgtaatgttacgaagaccaaacatgtgtcatctaggcccttcagtttcatgcttcctctaggacaagctttg

SEQ ID NO: 435477 - DNA, 122 bp, Homo sapiens
tcttcgtccagattttgaatgcatgtgttgttaatggagaagacgtggtcttgacagtgacgaagttgaaaagggttgttgtcatttttaatacactcttatttaaaataggtcagtttgtg

SEQ ID NO: 435478 - DNA, 122 bp, Homo sapiens
aaagaaactctgggagaacaggacacctgtcagtgccacacagctcattgccggtaaaaccgggatttgagcagagatcttctgatacccattggggttcattaccacttacaccacagctg

SEQ ID NO: 435479 - DNA, 122 bp, Homo sapiens
aatgcaccacactattaacctctctccactccaggaaaccagcagtcactctgtctcccacggcttagctggttttgtagaaatctccagcctttgactgctcctgcccagctgaaagaagg

SEQ ID NO: 435480 - DNA, 122 bp, Homo sapiens
ccaagcatgttccagctcacaggcttccaccagtttttcatcttaagtcagtgttcctgtcgtgtcatgtaaccgagagctgtttgttcttctaagttattttgccttaagaattagataaa

SEQ ID NO: 435481 - DNA, 122 bp, Homo sapiens
aataaataaatgacagaggtctgcacgcatataccacttgccaatccgtacttgggaagacgcgcgaggtgtggatgcattctttctccacctccacggccgtccccccatcccctttctgg

SEQ ID NO: 435482 - DNA, 122 bp, Homo sapiens
tgcacgaaggcccgcccactggcgctgccggctccgccccgactcgtccgggcgcgcaggcgccgcccgccccgctggtctgattagcataggaccccgggccccgccccctgctttgcatg

SEQ ID NO: 435483 - DNA, 122 bp, Homo sapiens
ggcacagccgtcctgccagtgcgccgctcaccagacccaccccacccaccccacagaccccgcagcagtcaagctggagaacttccccatccacgccatcacaggggtgctgaagcagtggc

SEQ ID NO: 435484 - DNA, 122 bp, Homo sapiens
catattgcaaactcatcacaacatttcctaactagattccaatattctaatataaccaaccgcatgatgtcactgatgacttgtatggaggtaaatcattgaggcaactggagaaatattcc

SEQ ID NO: 435485 - DNA, 122 bp, Homo sapiens
ccatctctcctggaagagtcatatggaagcagagggaaaggctgcagcatgcagccctcccgaagcacactgcgggcctccacaggccatcatagttcttctgctccacgccaggtgacctt

SEQ ID NO: 435486 - DNA, 122 bp, Homo sapiens
gcgcgcccacctgcagccggaagttggcgggcggaggaccggaacaacggacctgatggacgtgctcccacttccgccggggtggtagactaggggtcagcctgtgtctccacatagctggt

SEQ ID NO: 435487 - DNA, 122 bp, Homo sapiens
cccctgttgggtggtgttcagccacccaactgttaatatataaggcagtgttcctaaatgcgaaattgcatcagtctatgaaacaatgggcaggaaaagaattgactcttctaaatataatt

SEQ ID NO: 435488 - DNA, 122 bp, Homo sapiens
gcctcacctcgaaccaagtctggtcccttgtaaaatggagctaatggagcaggcagccggcgcagccctggcctggctccttcttttgaagggattaattaaaggccatctgggctctccca

SEQ ID NO: 435489 - DNA, 122 bp, Homo sapiens
ccggtttcattttcagtttaggccaaaacccccgcgggttggtcggggcagggcggggctcgggggaccgggctgaccgcgggggcggggccaggttctcacaccatgcaggtgatgtatgg

SEQ ID NO: 435490 - DNA, 122 bp, Homo sapiens
accttctgcaaagcccacggcaaggtctccgggctgccttgcccagatctggcacagggccggggtcacagaggggatggcagccactaggtttttctagaaccgtgcagagactccccaga

SEQ ID NO: 435491 - DNA, 122 bp, Homo sapiens
gtgattctcttgtcttagcctccggagttagctgggactatgggtgtgcgtcacaacgcccggctaatttttgtatttttagtaaagatgaggtttcaccatgttggccaggctggtctcaa

SEQ ID NO: 435492 - DNA, 122 bp, Homo sapiens
aaagaagggggactagaggaagaaatgctccctgacatcttctttgcaacaaggaacaaacgaaaaccaccaggcagcaaaacctgttagaggaagagggtgagaccctgagggaagaactc

SEQ ID NO: 435493 - DNA, 122 bp, Homo sapiens
cggggaagaaaacagcccgcggacggggtcggcttgtccagggcacgcctgctcggcacacgtgttgccaacgtgaaggcagacatggtccctggccctaggatgagtccacgctgggcttc

SEQ ID NO: 435494 - DNA, 122 bp, Homo sapiens
ggcctgtggatctcttgagatcaggagttcgagaccagcctggccaacatggtgaaaacccgtctctactaaaaatgcgaaaaaaattagccaagtgtgctggtggatgcctgtaatcccag

SEQ ID NO: 435495 - DNA, 122 bp, Homo sapiens
ttcccccgccacccctccccaacgcctgctggtttccggggccggccaggaagtggagggcggtgatgggcagcctgttttgccaatcgtctcccagaaactctggcatctcctccccacat

SEQ ID NO: 435496 - DNA, 122 bp, Homo sapiens
agccgccagcgtgtgctgtgaggccctttctcttccaggcatctgtcccttgcatcccaacgggagcgcggtcccctgggaggcgtccctcagcagccccgggaagttctgtccctgctccc

SEQ ID NO: 435497 - DNA, 122 bp, Homo sapiens
ccgcctcgcaccctccccggcgcgctcgctctccccgccgcgctcgggatgccgcttgctcgcccgctctccgccgccgctcgctcctcgcgcacacaatgaagctgctggcagggaagtag

SEQ ID NO: 435498 - DNA, 122 bp, Homo sapiens
acaggaggagcagctgcagggggcagcgtcgttaggcgggccctgagacagctgggaccgcgcgctcggctctagggagctcggccagtccacaggcgtctcagcagcagctgccacctgca

SEQ ID NO: 435499 - DNA, 122 bp, Homo sapiens
cagggccctctgtctccttggggataggccagacccttcctggcagactgcaggcctaggcgctcctgagtgtggcaagccaggcaccagggtcacctgcacagggagagctagcagcactg

SEQ ID NO: 435500 - DNA, 122 bp, Homo sapiens
cgttctgctcagcacagaccagggggacaacgtgaaggcagagcagcgttctcctcagcacggaccttgggggcactgcctcgctttgggacaactcggggccgcatcgacggtgaataaaa

SEQ ID NO: 435501 - DNA, 122 bp, Homo sapiens
tttaaactgagaaagacagttgcaaaacttcgtacaacagcatgagctccaagcttcaaacgcattctcatgctcagacgagcactttatttttcatcaagttattttttgcattgttttgg

SEQ ID NO: 435502 - DNA, 122 bp, Homo sapiens
ctgactccctcccacgcatctccgacctccccttgggtccaggcaggctcggtctgcacacggcgttgttctgcacttgttcctttgttgctgtgaaaccggctcccggcacagtcagcctc

SEQ ID NO: 435503 - DNA, 122 bp, Homo sapiens
caactctctgcagccgactccatctgcgcatcactccgatctgtattacagtgattactccggcgtctgcatctcgtcctgaggtcctgaactttgggatggcaccgaccatctgtgactgt

SEQ ID NO: 435504 - DNA, 122 bp, Homo sapiens
taaagaataccaaccaggcctcttctgttcatagcgatatatgcatcatatttctcatatcgaaacccaaaaaggtaaagatacgtaagttttcttgcccttaatgccctaaaatgtaaaat

SEQ ID NO: 435505 - DNA, 122 bp, Homo sapiens
tggccaacccttgtgttttacctagtggcaatcaggtttcacgtctcaacaattaataaccgcaagatgttgttgacatcagttaagaaaataattacacaaggaagcccctgctggaacag

SEQ ID NO: 435506 - DNA, 122 bp, Homo sapiens
ccgcaatccggaaagggagctgtggcctgggtgttggcccctagtccaccaggacagtgccggaggggaatggctggatatgggggcgggggtggtgagatgcaacgcgatatgtcagcaga

SEQ ID NO: 435507 - DNA, 122 bp, Homo sapiens
attacccaggggaaataagagagaaaggagatgagaggagcaggcaggcagcctgagaagcgcttagggtgaggactcagccctgatgcttgccctgtccctaggtggatggagtggaggag

SEQ ID NO: 435508 - DNA, 122 bp, Homo sapiens
cggaagagctgttggtttcaaactatttagagcttggaagttccaagaaagacacagattcgtcccccgctaagccagcacttttacgggatcgctgtggggccggatggcttctagacttc

SEQ ID NO: 435509 - DNA, 122 bp, Homo sapiens
ctccagggcagaagtcgcggtgggctcagtgggtgccctgagcggggtctctcagactgacgtcaggccttggtgggctgcactctcacctggaggctccggggaagcatctgcctccagga

SEQ ID NO: 435510 - DNA, 122 bp, Homo sapiens
caggctgagtcctctgaggactgcaaggtggagcatccagagaaggtggcaaggcaccctcgggggtgaagagggcttaccctgtggggctgggcggccttctccatgaggacggccgtgtg

SEQ ID NO: 435511 - DNA, 122 bp, Homo sapiens
atgcacattttccattatttatgtttctgtgggacagtcacagtttccagctctccaagccggggacttttcacagactctgtttcaaccagagcctccaccgtggcctgtctggcctgcct

SEQ ID NO: 435512 - DNA, 122 bp, Homo sapiens
cggaccaaccagcggcagccccgctgcggcgcaggcgcctgtgccagatcgcagggctggcgccgcctaccagctcacagcgccacctgccggccggagagtgcaccaccgagaaggcgcgt

SEQ ID NO: 435513 - DNA, 122 bp, Homo sapiens
aagagaaaaaggaaatagaacagaagacagattagaagtagaagtttgtatagaaagcctcgtggggaataaagtgagctgagatgacaactacctatattgctcttctggggaaagtaggt

SEQ ID NO: 435514 - DNA, 122 bp, Homo sapiens
cgcacggcggcgacggggcaggttaggtttccactggcgtcaaaagaagccaggaggaggcggggcaagccagggataagttagtgggaggctggagcccttacgtcacttacataatgagc

SEQ ID NO: 435515 - DNA, 122 bp, Homo sapiens
gtgacgctcacgcgcgcagtccccctggcttcttccaggaaggctgaagcggcctaatctcggccaaaagatcaggacgactcgatctgggctggactccttctgcctgagcatctgatccg

SEQ ID NO: 435516 - DNA, 122 bp, Homo sapiens
acaagacagtctcgatggcataatattaccacagctggtgctgaacagagccctggatcgcgaggagcagcctgagatcaggttaaccctcacagcgctagatggcgggagtccacccaggt

SEQ ID NO: 435517 - DNA, 122 bp, Homo sapiens
tactgctgacgaaggatggcaacagcctcccgaagcgcatcaaaggctcctcgttgagctcggtggacttgtccactaatttgaagaagacgtcgtttggctcactggcgaaggtgtatacc

SEQ ID NO: 435518 - DNA, 122 bp, Homo sapiens
gcaggccctgctggagcacaggaacacagacgcaaacacaggtgacagctgagggcaagtcgcagtggtggcagaggagccggagctgttgattggttgccaaagaaattgggctgacactg

SEQ ID NO: 435519 - DNA, 122 bp, Homo sapiens
acccctcccgtcaggcccgcagcaggctgccgattggtccgggttagggacggcgggcagcgcctatagctattggagagggtgaggaacggggcagggagggcagcttcgtgtctatcctt

SEQ ID NO: 435520 - DNA, 122 bp, Homo sapiens
gtgagcgtagagaaggggctgggccaggaccaccaagtagggactatgtgcacagggacccgcgtttaccagcctgccctcagctgggcggggaaccggacagccctcagcctgcacccagc

SEQ ID NO: 435521 - DNA, 122 bp, Homo sapiens
cagttcaggccagacccctctcacttctgcccctcttcccgccaccgctcccccccaccccgcccccagaagccacaaaaggacagatgcagaggacaggcgccaggcacagataccatctc

SEQ ID NO: 435522 - DNA, 122 bp, Homo sapiens
cagagtcagacagagacacccagagatggagagactgctagtgactggcaggaacacacacgcctgccgacacatacaggcgcacatgcacagacccaccgcaactcacgggcacatgcagc

SEQ ID NO: 435523 - DNA, 122 bp, Homo sapiens
gcaccaccaccaccacccgcacccggcgcaccaccagcaccaccagccccaggcgcgccgcgagagcaaccccttcaccgaaatagccatgagcagctgcaggtacaacgggggcgtcatgc

SEQ ID NO: 435524 - DNA, 122 bp, Homo sapiens
aaaggtatccatcttctccaagcctcagtttcctcctctgggaattacacctagtcatagcgttcctgggaaaactagataacttgcaaaagtgctcactaaagtgatatatatcagcaaat

SEQ ID NO: 435525 - DNA, 122 bp, Homo sapiens
gccccacccttgcctgtccattagctccttgtgtcatccctccctctgattggttagtcgcgtcgctcttcggcagccactccctcatccccattggatactctcagccaagtccctgcctc

SEQ ID NO: 435526 - DNA, 122 bp, Homo sapiens
gccgcgattgcggggcaggcagaccccatgatagctcctttcgggctctttggcactctccgggtgaaaggctgctggtagaaaggaggctggggcgaaaccgggcaacggggagaaaggag

SEQ ID NO: 435527 - DNA, 122 bp, Homo sapiens
gccacaagtgcacggctcagtggcggtaagtacattcacactgtcgtgccaccatcaccacgtccgcctccagagctcttcaacttcccaaacagaagctgtccccgttctccctggctagc

SEQ ID NO: 435528 - DNA, 122 bp, Homo sapiens
acaaatgacaggatgcactcttctcgcccggatgtcaggaagcgtgtttagggtgtcagacgtggaaatcgtatcacaagcaaggatggaggcaccagaagctagtgctcctgcccatgcat

SEQ ID NO: 435529 - DNA, 122 bp, Homo sapiens
tcatgttgcccatccttcagaaagtcgcatgcgcttgactgagggactttccctttcgtccggcgaaggtctggtgagtccaatgggggagtggaattcgttccggtgatcctctcggtcgc

SEQ ID NO: 435530 - DNA, 122 bp, Homo sapiens
cgcggctcgaccactctccacctgggacagggccaagggcacacgcccccacgccggcgccgtttcaagccgaggagtccagcagcccaaggaacttccggcggcgcctccgctgcccgagc

SEQ ID NO: 435531 - DNA, 122 bp, Homo sapiens
agcccccaatagtcctgtgaggtgagcgttgttctagctgaggagcctgccacctctgtgcgaagaagcacttgcaaatgagtgtagcctgcgggcagctcaggagtgctgagctttcagct

SEQ ID NO: 435532 - DNA, 122 bp, Homo sapiens
acacctgatccaccgcctttcctggagaaagctgctctgccattttagagtcctgagctccgaaacagccgtggctgcctgggttgcacttggcccctgcacgtcactccacgttgcgcgct

SEQ ID NO: 435533 - DNA, 122 bp, Homo sapiens
ggagatgacgccttcggacaagggtggggtccgcaggatcccaccaccgggcagagaacgcggcctccctgggactgtggtgtcagcgctgggctccaggggccgacgagggtgaggctggg

SEQ ID NO: 435534 - DNA, 122 bp, Homo sapiens
tttacctcagctctgcccggcgctgccgggctggggcgtggagctgagcagagggagtggcggtgcaggggacacaccgcccggctccccggggcggccacagccccacgccacctttgaac

SEQ ID NO: 435535 - DNA, 122 bp, Homo sapiens
ctcaggttatccgcccgccttggcctcccaaagggctgggattacaggcgtgagccaccgcgcccggcctgcagccgactttcatgattgtattgttgagtgttatgtatgtatggctatac

SEQ ID NO: 435536 - DNA, 122 bp, Homo sapiens
agaaagactgtcctcatctgttccccgctctggacagcctgcactccctccacccccgcccgggccaattgctgttagcggctgtgtcttctgactcagacctctgtaatagcattcctggg

SEQ ID NO: 435537 - DNA, 122 bp, Homo sapiens
ttcaatacagaagcaaatacttttttgctttaaagcgtagtgcattccaggttagctacccgggggcacccacgtttctgtttatccaccactctggttgaaggctgggaacagttacacag

SEQ ID NO: 435538 - DNA, 122 bp, Homo sapiens
gtgcaagcctccctccagcagggatgcagagataattatgtaatagaggaagagcccccccgctccccaccccgcacccccgtatactttgcataaccgaggctgggcagcttcctctccca

SEQ ID NO: 435539 - DNA, 122 bp, Homo sapiens
gaaccccagaatgagacaaacttaccaaggacgtcacaggtaacaggcaaaaaaagacggcgcagaggcaaattccgaacctttccgttttacagcctggaggggtcgggtaaaacaggtac

SEQ ID NO: 435540 - DNA, 122 bp, Homo sapiens
ccgcagggcaggggcgtctgccaatgatgggggaggactctgctgcttcttaagctccagcgtctcaagccagggcgagacagcccgccggccgcccggatctccacctgccaccccagagc

SEQ ID NO: 435541 - DNA, 122 bp, Homo sapiens
tcttgggggctagaggcaggtccttcttcatcttttgattctggagctctcctcactgaccgcatcacctggtgtttgggaagaatctagtcctgtcttattcccgtttctccttggtacag

SEQ ID NO: 435542 - DNA, 122 bp, Homo sapiens
tgcggacagggcgcagagccgggaggcaggccgcagaacagggtgggcggctcgcaggggcgctcagccccaccctgtgcctgctgatgcccacaggggagccaggctggctgccgcctcgc

SEQ ID NO: 435543 - DNA, 122 bp, Homo sapiens
gaagaaaaaaatcatttcaagggtaggcgacgggagccttgcggtttagccgctagtcaacggatgggggggagtggtagcaaaaacataaaaatggggacaagagagaaactggagactcc

SEQ ID NO: 435544 - DNA, 122 bp, Homo sapiens
tgtccaggccgcaggaaccaccatttccctgggagtccgtgctctctccgcccccaaccccggggacaagaaatgtttctgtggccccttccggccctagtgatgtccaactaccagctcca

SEQ ID NO: 435545 - DNA, 122 bp, Homo sapiens
cctgtgtggccggctggggctcggggagccttccagagacaactggtcaggagccctgtgcggcctaggagcagggctggcccgatgccaagactggggacctcgtctacccagtggtgatg

SEQ ID NO: 435546 - DNA, 122 bp, Homo sapiens
ccgggcgagggtgcgcggggtggcgagtggaggggagcgactgccgggggagccagcccgcgaagcttctccagaccacgctcagctacccgcgccggtcccctcctgcccgcagccggagc

SEQ ID NO: 435547 - DNA, 122 bp, Homo sapiens
ctccccatgaagcctgtgtccctaggggactgccctccccaacacaattcgtcagcccaccgtccagtctgagaaactattccatccatggaatcacaggatattggggctgataaggatct

SEQ ID NO: 435548 - DNA, 122 bp, Homo sapiens
tggtacaagtggttgactcacacacagcacctccactatgttttggccattagtcttcctcgttgactctggaacaacattgcctccacagcaaaggacttcatagtaaatttggtttataa

SEQ ID NO: 435549 - DNA, 122 bp, Homo sapiens
gccataatacaaagtccttcccattcttccctcccctttccataagcagaggattctctccgcgtggccaccactgtcccaggcacatgaagagtactgcctggctaatgccaatgttcact

SEQ ID NO: 435550 - DNA, 122 bp, Homo sapiens
agctgcggcctagagcggtaggaaccgacgcgagcagtcctgcagcgtcccctggcggagcggaggctcaacgccagactctggaggacttgggataattttcgaaaactatctggaagttt

SEQ ID NO: 435551 - DNA, 122 bp, Homo sapiens
gagccatccgcctggacgtagatatcctgcagacctgtcaggacaggctccatcggggcccggaagcgaggaagaccccgctcccggctccatctcatccccgcctcatccctcccatttcc

SEQ ID NO: 435552 - DNA, 122 bp, Homo sapiens
cgattttttcttggctgggacgcaggcgagcatgaaagcgatccaaacacagccagagggcgccaaaatgccgcaaataaaagttccaaaggcgtcaactggcttttgcgggaaggtaaaat

SEQ ID NO: 435553 - DNA, 122 bp, Homo sapiens
gccttatatgtggcaggcctggtgtctcttgagaccattttggggttcgtcaggggctcccgtttgggactgcctcattatgcggttccctgacaagggcaatgaattatgtccctgatctc

SEQ ID NO: 435554 - DNA, 122 bp, Homo sapiens
cggcgagtgggtcctgcagcctcttggctgctgcttgtttggaggatgtacggacaggggcgaaggtggctttgggtcccccgaccccgcaacaaaggttatatggaagtgatggcgaggca

SEQ ID NO: 435555 - DNA, 122 bp, Homo sapiens
ccggactcaagatggtgagttaacgaacgagactgaggacttgggagccacagcctttctcggtggccggtgtggccctggcctgtcctttgttttatgttccaggctgggaagagcagagg

SEQ ID NO: 435556 - DNA, 122 bp, Homo sapiens
agcttggatcacaggcatgcaccactgcatctgactaacttattaactttttaatagagacggggtcttgccatgttgcccaggctggtctcaaactcctggactcaagtgatcctcccacc

SEQ ID NO: 435557 - DNA, 122 bp, Homo sapiens
tgcgaacacgcacgcagggagaggtgcacaagcgcaggagtgcaccggaagtccgcctcccgggacacccaccgcgggtcccaggacaagtaacggactctatttcccaggagcctacgcgc

SEQ ID NO: 435558 - DNA, 122 bp, Homo sapiens
ttattaaagctccaggttagtgtgtgtgcctgcaggtatctttaatatttcaacattcaccgctctggattaatgcacagattttaggtttgtttttggttccttgttacctcttatccttc

SEQ ID NO: 435559 - DNA, 122 bp, Homo sapiens
gccggcagcctcggctcgttctccagacagtgttccaagaagccacttccagcgaggaagcgttggcctgagaactggaacctctgcggtctctgcaaacacgacaatgacaaacacttgag

SEQ ID NO: 435560 - DNA, 122 bp, Homo sapiens
gtttccgtggttgttgctggggcaacagcaggctcctcccctagctttgtactcgctctgcgcgctactaattggtgctagccgtctgcggggggcggggtgaagctgtgatggacattttc

SEQ ID NO: 435561 - DNA, 122 bp, Homo sapiens
cgcccccatggggcgattgcgcgcccaaatagctggcccagggtgctttggccgccggagcgggttgcgagtacacttgaggcctggtgccttccagtttttaagttttaaatgtttataat

SEQ ID NO: 435562 - DNA, 122 bp, Homo sapiens
tgcagcggcggcttcccctggcctcccaccccagcgactgagcgcggagcccagcgcgcacgagcgccagcctggctcagagacacccacgaagccagggcctttcagcgcctgctaactgg

SEQ ID NO: 435563 - DNA, 122 bp, Homo sapiens
ctgttggtgtctcgatgctcctctcttctgctctggctcttatatacccatctccctgggcgtcagcctattactgagggtttttcccccatgtttcagtttatagttatttccataaaaaa

SEQ ID NO: 435564 - DNA, 122 bp, Homo sapiens
ggtacggcaagccccagtctgatgcacgaatcctcagagtataaacccgaggcatcagttcgtagtccaggttttctgacgtactcacggcaccagtgaaatggtcaatcgcaaacggcaca

SEQ ID NO: 435565 - DNA, 122 bp, Homo sapiens
tgtcataaatgcatcataaactcttatatgaggtcatacattgagttgtacccccatggccgtagtagatacttaaaggcagaataaagcgtacactcctccctccacacttgtcctctctt

SEQ ID NO: 435566 - DNA, 122 bp, Homo sapiens
agatggaaacccctccagagcagggactatgctctacgcttggcatctccagaagcccagcgtgaggaggcacctcacccacccatcaggaacttgaagtgtttccaatagcaaatcccctt

SEQ ID NO: 435567 - DNA, 122 bp, Homo sapiens
gactgcaactttatgaaagacctcaaggaagaaccacccggctaagatgctcacaaattccggacccacagaaactatgtgagatgataaatgttgattgttgatttaagctgctatgggtt

SEQ ID NO: 435568 - DNA, 122 bp, Homo sapiens
ctcctccagcttcctcccagcccttgctgctgccagagggtcaggggcacctccctcctccgcaggccatggggagccccgctaccgtgagcaccacccacgccgtccccaccgccaccacc

SEQ ID NO: 435569 - DNA, 122 bp, Homo sapiens
ttgtctttgcaatgcaggaaacatgcgataatgtgttgaagtggggcggcggctcctcctcgcagaaaccctccgcagtcccctaccccagaaaggtttcccttccctccccttcccgcagg

SEQ ID NO: 435570 - DNA, 122 bp, Homo sapiens
ctcttcgaagactggtcgcgggaaccagagaggtctgacgatggggacctctcggagtgtcgtcgccctgctactgagccttggcggccaccgggctcagcctggaggcttccttgtgcagc

SEQ ID NO: 435571 - DNA, 122 bp, Homo sapiens
tcttagttttacagtgctgcgctgtctcccaggctgaatgacgctgaagccaagcaaattcgggcagtctctggacctttctaatggaggtgtcccataaccatgttccatcctagttccct

SEQ ID NO: 435572 - DNA, 122 bp, Homo sapiens
tgaagcaaaagtgatcctagcagctttgtttataataggcaaaaacctgggaatagcccacgagtgtatctacaatgggatggataaataaatggtggcatatattttcattggatgctatt

SEQ ID NO: 435573 - DNA, 122 bp, Homo sapiens
gaggggcacttagggagcaggggggcagtgaacacctctgcatgagcaggggcataaaaacggaaggtgacaacatccagctttgcctatttcaacatttagctcagagcctccaagtacaa

SEQ ID NO: 435574 - DNA, 122 bp, Homo sapiens
gtagagcaacagccatgtgtattcactggaagtggatgtaggtcaggccctgttccatcacgtgcacgttaccatggatctcctgcacttgtggtgtgggcagccgctgggcccacggctcc

SEQ ID NO: 435575 - DNA, 122 bp, Homo sapiens
cagtctctgtacccaccacctccattgtagagatggggccgcagcagctcagagacggtgcggaccgtgtcgatcacacagcgcatgagagggaggggcggggtgagaaacccggtttgaac

SEQ ID NO: 435576 - DNA, 122 bp, Homo sapiens
ggaagggcctggctgggccggacgccccacccttgccaacaggcaggcccgccccgtctccgcctcgccgccaacaaggaggaccagcaccaggcctgggaactgctgacctgcccgcccac

SEQ ID NO: 435577 - DNA, 122 bp, Homo sapiens
gtagttccagtggagccaccgaacactgatactactttgttgctcagccccgcaaggaaccggccacttgccaccatggaaacgccggcggagttgctgcgttctagactcgtgcgcaagac

SEQ ID NO: 435578 - DNA, 122 bp, Homo sapiens
ccaggttaaggaaggatttggctttattttgccaggagcttcggcagactcacgtctcaacgtccgggagcttcggcagactagcgcctcaagaacccagctctctgaagaatttatttggc

SEQ ID NO: 435579 - DNA, 122 bp, Homo sapiens
cagcaaacttcacttccacaaataacaccactgccttggggaacagcagagacatttgaccggacagcagctgtgcagagggtgctatttaaagactcagcttttgcagcccaaggactctg

SEQ ID NO: 435580 - DNA, 122 bp, Homo sapiens
ctttcccgcctttctattccacaaaaccgccactgtcatcatggccggttctcaatgagccgctgggcacacctcccagacggggtggtggccgggcagaggggctcctcacttcccagtag

SEQ ID NO: 435581 - DNA, 122 bp, Homo sapiens
tttaatgagtaacagaactggctgctggttctttacaattgcccagctgctctgcagaggcgagaagcaattgcgggctgagcctcccgggaccttcgcgggagggtggagaggaggaaggc

SEQ ID NO: 435582 - DNA, 122 bp, Homo sapiens
cccggtgcctggagggcagggcccctgcggtctggggttggggtttgtgttctggctccgcgcggtggtctggaccgcgcccgccctgcctgggctcccagccggaaggacggagcggttgc

SEQ ID NO: 435583 - DNA, 122 bp, Homo sapiens
gcggacacaagcagcgagtgtagccaatgaaggcctagcagagcggcgtctacgggggttcgcaatgcgtgtgggcgggacttcctgcaacgcctcctggggttgtcaatatggctgcgttg

SEQ ID NO: 435584 - DNA, 122 bp, Homo sapiens
gggatgaggatggggcggggaggtggtcccagcctgctatcacctagctgggggccggggcgctttggccaagggacgatagcttgagataaatgggagtgtggggactctggaaagacggg

SEQ ID NO: 435585 - DNA, 122 bp, Homo sapiens
tcaaaatgccgttgccctttgcacaaagcccggggcccccaggtgtgtccacaggacccgcggattgaacaaagaacccagtgccccggtgttctcccatccgagcaggagttggacaattc

SEQ ID NO: 435586 - DNA, 122 bp, Homo sapiens
cagagaaaaaagatgctgcacgtcccagccataatggtctgggagggacctaccccagagcgggaaccagggtggggaagcagtgcagaggaaagagaggcctgtgtccatggctgctggct

SEQ ID NO: 435587 - DNA, 122 bp, Homo sapiens
cgcccccagcgcccagccggcacctcctgctgcccagctgccgaggcacctgcggagacgcgcccaagtcagcccctccggagacgcgcccaagtcagcccctccgacccgcgcgctcttgc

SEQ ID NO: 435588 - DNA, 122 bp, Homo sapiens
gagaaacttgtcaacgtcacttgggcatcttaagagtgggttcgtaaacttggttgtgtgcgctgtgcagatgtcagtcaccctgtgtggtgggcaaagccgacttctccgcctctgtagct

SEQ ID NO: 435589 - DNA, 122 bp, Homo sapiens
gactctgcttctgccgcccgcctcgcccagagactgaccaatcgctcccaggaggctgaccggcccctcaagtggaaggaaaactaagggcagagtcagaggtcgcctctgtgccgcagcgg

SEQ ID NO: 435590 - DNA, 122 bp, Homo sapiens
ctccatgctttcccgcaccggcgtctcaaccatccactatccggcctctagcgtctgccgcgccgcactcccacctcctcgatgtaggccggcgggtctcgcttgattagattctgtaactg

SEQ ID NO: 435591 - DNA, 122 bp, Homo sapiens
ctcatgcccagacttcagggggctgtgcgtgcggctggcggcggagctggcgacgctgggcgccctcgagcagcagcgagaggcgggcgcggaggtgctgagcgccggcgacggtaaacacg

SEQ ID NO: 435592 - DNA, 122 bp, Homo sapiens
gcgcgtggttaggagcagaacttcccagtaggtcccaggaaaccaccttggcgctttgctcgcgcatcccttactgtatggaagtcggggccttttagggatttagattcgtgtgtgtgtat

SEQ ID NO: 435593 - DNA, 122 bp, Homo sapiens
aaggcatggcaatgggtaattgtatctgtcaacttggctaggccatggtacacagataggcggtcacataccatctagatgtcactgtgaaggtatttttttttgatgtgatttgacattta

SEQ ID NO: 435594 - DNA, 122 bp, Homo sapiens
accttcttactctgcaaccaaaccaagtgccccatactacaggtaggtgccgagaaattccgcagcctgaaaaaataatccatgcaggtcaaaggcagaaatttactccgggatgagagatg

SEQ ID NO: 435595 - DNA, 122 bp, Homo sapiens
cagctcttttacttttccttcctaaactttttgacatctaaagtaagggtccctgaggctcgaggtcaaattaactatcatgcccaatacaactctcacacttccctcataaatagagggaa

SEQ ID NO: 435596 - DNA, 122 bp, Homo sapiens
caccagtacgcagggttccagagagagcctggctgcacgaccttgaggtcacctaactcccgggcctcccttgtgtgtctggacagggagagaggggaggattggcttcaggagaggcgaga

SEQ ID NO: 435597 - DNA, 122 bp, Homo sapiens
aacctagcagaattcaacacctcaaatttcaacaccaagctgagtcgctccagcttctgtcgaaagagttgcgtccgcagtgccccccaacctactcggcttggcatcctcagagagaccaa

SEQ ID NO: 435598 - DNA, 122 bp, Homo sapiens
tgggtttgccaggttctcataacccattcatagaagacagaggtgtttgtactatctttccgggcagtataattatcctgaatgccatccatttcacctatgaaaaaatacttctattatcc

SEQ ID NO: 435599 - DNA, 122 bp, Homo sapiens
acttctgcagacacaagacctagctgcaggggccctgggtttcagaatttgttttagacacggctgcagtcacctcaggaagcacttggatccattttgcatgcagttttgcagagtcaaga

SEQ ID NO: 435600 - DNA, 122 bp, Homo sapiens
cctcctcccccatccccgcgctcaattcctttagctggatccttccagttcatgactgatcggtttaaaatatgggtcgttcaaaagccgtgtgaacccgggctagtggctatacctctctg

SEQ ID NO: 435601 - DNA, 122 bp, Homo sapiens
agcctagctcagtttcattacggtgtggcctctttgtgcctcagccccgcatctgtaaagcgaatgtcatagcggcacctgcgtccctggaaccttgtcgtatttcatgagttggtgcatgt

SEQ ID NO: 435602 - DNA, 122 bp, Homo sapiens
gactttaacagcaattattttctttgaatatgagaaggatattttgatttcccaaatgcacgttaactgaatttttgaactggatcttttatggctgagttttctctatttttttctgtaac

SEQ ID NO: 435603 - DNA, 122 bp, Homo sapiens
ccaacgtgacccggactgattctcggaacagccagcgaacatttcgaaacccaaagtgggcggggcgagggagaagaagcggagagagtggcgcggaggacgacgggagaagggcccccggc

SEQ ID NO: 435604 - DNA, 122 bp, Homo sapiens
tctgtcggttggggtcctacttttacataacgcccccacaatgcccttcgccttcctcaacgtggcccccgctccaagcccattttctggagccaggaatccactctgtgggttaggaaagg

SEQ ID NO: 435605 - DNA, 122 bp, Homo sapiens
gttggctgatatagctgtccgtcgaagcggcattgccgcctattgggcaatggccagcttcgcacgccagacccgtgccccgcccagccgcgccgcgggccgcccccactcaggagggacag

SEQ ID NO: 435606 - DNA, 122 bp, Homo sapiens
ggctggctcaggtgcctgctcctttctggttcctctgccctgcccccagatcccacccctcggcaggcacccaggtgcctggctccatgacgcagcagctgcggtctcctcttatcagggct

SEQ ID NO: 435607 - DNA, 122 bp, Homo sapiens
gtgtgtagccgtgtgagtcagcctgtgtgtctcacagtgagcgggggtgaagggcttccccgtcagtcctgcacaccctcctggattggaagaaggagcaggagtggggggtggggggtgca

SEQ ID NO: 435608 - DNA, 122 bp, Homo sapiens
tctgttggccagcagacaggagcttagactagaaaggtaggttgccaccaatctggagtccgagactcacaagatggtagaggacctgcatgtccacctgaggcttcctgtcctcatcttac

SEQ ID NO: 435609 - DNA, 122 bp, Homo sapiens
tgtcacactggatcatgagaccttcatccttgtagaggccacagatacagcgaataacatcgtcgtccttctcatgcccattctccttttcagagactgaggtctcactgctgtctgcctca

SEQ ID NO: 435610 - DNA, 122 bp, Homo sapiens
ctgataaagcaatagagtgatcatctttgcactcacagtagtccgcacatcattcagcagcgccatcactgcttaggtcagaggctggtggacacagcagtaaacaaggcaaagctgtgctc

SEQ ID NO: 435611 - DNA, 122 bp, Homo sapiens
ctgtgtgggtggggtggaggcgtgaggaaaccgctttgcctcctggcttgcccgcccctgcgctgggccgctccagagcttcccacctcgcacccctagaggctgggcgtcctggggatgtc

SEQ ID NO: 435612 - DNA, 122 bp, Homo sapiens
tgaatccagaacttcgggacccccgcgctccctccagccctggaacttggggacccctcgcgccgctcccagtcccgggtccgaaacttctggggaacccccacgccctccccttggccctg

SEQ ID NO: 435613 - DNA, 122 bp, Homo sapiens
ccctaaccttgaggcttcttgaggtgaaaacctggcgtgtctgacactggtgacgaagttcgtgcgccaggcttctgctggcacttccagttcctctcagggacttacctttcgacctcttt

SEQ ID NO: 435614 - DNA, 122 bp, Homo sapiens
tttgccacgtaaagtaacatattcacagtttctgtggattggggcacacacatctttgggcgaggggcatattatcttgtctatcatggatctatctggaatccctagtgtctagggcagtg

SEQ ID NO: 435615 - DNA, 122 bp, Homo sapiens
accagggactgccagggcaaagttccaagaacaagcggggagcaggagaagcccttctggcgcaggagagcatctagttcaatcccctgtcctgacacccgtgtgcaggtgggtaggtgaag

SEQ ID NO: 435616 - DNA, 122 bp, Homo sapiens
gatgcaggctagccagtgcgcgatgagcgcaaaggtgcacatgagcaagaacagcacggccgcgccgtactctgagtagcgatccagcttccgcgccacgcgcaccagccgcagcagccgcg

SEQ ID NO: 435617 - DNA, 122 bp, Homo sapiens
agcgctccctcctgcagcaggggacaccagcagcgcccgaagcaggtggcggtgggagggcggcggaggcggctacgggcgactccaacgcgtccgaaatcgtctgtgcggcaggaagtcaa

SEQ ID NO: 435618 - DNA, 122 bp, Homo sapiens
tctctgccgccctctaccggaaccgagggagccagacagctgcgatattgggaaggcctccggagccgcgaagagcgcacgcgcgagcgcgcgcccgcgttctcctggcgggcttggtattt

SEQ ID NO: 435619 - DNA, 122 bp, Homo sapiens
acagggaatgacagactcggcgtccagtggagccatcccctggcctcggagtaggaggcgcgcccaggccaggccagaccacagtgtaacaggagggaggagggcttgcttctttcaggcaa

SEQ ID NO: 435620 - DNA, 122 bp, Homo sapiens
gccctgaagctgatggaggtgtggactgagtggaggaggacaatttcccagagaaaaattcgtgtcctgttactagaagggtgaagtaatgctgggcagcagaagtaacagatgtttatttt

SEQ ID NO: 435621 - DNA, 122 bp, Homo sapiens
gtgggcaaacctcctcctagcgcgctgcggttctctaattgggtgctgtgccttctgggtcgtacctcttgggtgttgggaattctcctgttttcaggtcctttaataaggctggattgctt

SEQ ID NO: 435622 - DNA, 122 bp, Homo sapiens
agtgggtgacaccctggtcactcagccacaccccggcccctcagcctctgctgtcctggccgcacatagagccctgtcctgctgtgtctgccgggcacaccccggtcactcagccacactgg

SEQ ID NO: 435623 - DNA, 122 bp, Homo sapiens
tgcttgagaaaagaggctcactctgagctctgagtatgctgcactgatccagtggtgctgcgggggccaaccctgagtcagctgaaggaaaacatgcttgtatataaagccagaacagagaa

SEQ ID NO: 435624 - DNA, 122 bp, Homo sapiens
acatgctgaagcggaagcattgcaacacgcccatgtttgtccccagccacggcgtcctgacggccgccaaaggcttgagggctattcagaccaaaagggaggtgcacccaggggaaaaaaaa

SEQ ID NO: 435625 - DNA, 122 bp, Homo sapiens
gtggttcagcatttccattttagattctctcttgttcctcatgttcttgcttccatttatcgttcccacaacctaaccaatgatctgtgtatagaccaaactccaaaagaagaaaaggagta

SEQ ID NO: 435626 - DNA, 122 bp, Homo sapiens
tgggccggctgcggcctagcggcttctcgagctcactaggccgggtacccgccgagccaccgccccgttgctaggcaaccgccctcccccgggggcgccccctagaccttcctgagaggagg

SEQ ID NO: 435627 - DNA, 122 bp, Homo sapiens
tggggattcatttcacagacatggggcttagcgggccgcctggggcagaccgaggcaacccgaggacccattcattcattcattcattcattcaaatgttttcacacctaccacgttaaagg

SEQ ID NO: 435628 - DNA, 122 bp, Homo sapiens
gaaagcctggccagtgagagtagagcaggctcctgtccacaaggatcactttggtatagtcggatgacaaagatcaggcccataggaagggtcttcaaggcttttgctggagttactgggca

SEQ ID NO: 435629 - DNA, 122 bp, Homo sapiens
ccccgagggagcgagcctctacgacgaggtgcgggccggcgcgacctcgggcgccgggggcggcagccgcctctactacagcttcaagaacatcaccaagcagcacccgccgccgctcgcgc

SEQ ID NO: 435630 - DNA, 122 bp, Homo sapiens
ccagctgcagaaccggagacctcaggtggtatctggttccacgtgtccccaatggcacctcgcctggaacgatgtctgcgccgaccagtgataacaatcgaaatagcaggcgtggctgaccg

SEQ ID NO: 435631 - DNA, 122 bp, Homo sapiens
cggtgcggagaagcgcgaagggaaatcgcgttgagcagctggggtgggtgcgcctgggggcgtggcctgcgggccggcgggcgggcgggagcctgcggtggaggcgtggcacgagggagggg

SEQ ID NO: 435632 - DNA, 122 bp, Homo sapiens
gtggggaatgctatatgtctgtatctgctttcctcctcaaccctaggaataaagtaaacacgtttactgagggcgggggtctaagggcctgcaacaatgagatctgtcgccttggctaggac

SEQ ID NO: 435633 - DNA, 122 bp, Homo sapiens
acctcagcttactgcaggctcaacctcccagcttcaagctatccttcaaccttggcctcccgagtagctgggactacataaagctgggactacggcaagacacctggctaatttttgtactt

SEQ ID NO: 435634 - DNA, 122 bp, Homo sapiens
ccaccttcctagagaggagacggtagtggttattagccgaggcgcggactgctgacgtcacgccggctgggcgcgtccgggacttactcctttccgcagggcagcacccagggacctgagtg

SEQ ID NO: 435635 - DNA, 122 bp, Homo sapiens
ctagctcttaaataacaataatcgtcttccagaaatttaaggactcagccctggccaaggcggcaaagggtctgcacttgtttgtctcaacccattagacaggcggcttgtcttgctactct

SEQ ID NO: 435636 - DNA, 122 bp, Homo sapiens
aggagcaggagggcaagggtgctccaggcccggtttttcccccggatccagctgcacccacggctgcctggaaatcctggaacgccttctacatcgcgaatatccctcgccggcctggcgcc

SEQ ID NO: 435637 - DNA, 122 bp, Homo sapiens
acttgaaataatgtcggaagaaaagtttggcctgtttttttgccctgtaagggatgatttcggtttttaccgcctttggtgtgaggtttaattcatcatattcttttgttccttactacata

SEQ ID NO: 435638 - DNA, 122 bp, Homo sapiens
ggcggctctgcgcgcgggcgccggggccctggaagatgctgcgcacctgaattaaccgggcgcctctgatgtcctcccagaagcaactagaactccagggctgtgaaagccacaggtggggg

SEQ ID NO: 435639 - DNA, 122 bp, Homo sapiens
cgtggagagtccgtggaaggtccagactcacccgtaggggccaggcgggcaacggcggagcgctcggagggagcagggccagagagaagtccccggggccagcctgcctgcctgccacttcc

SEQ ID NO: 435640 - DNA, 122 bp, Homo sapiens
cacacagaggaccctgcaaccaatgggaattcgcaggctggggtggtttcgaaggaaggtcgaacaggcctgaggaggcagagctttaagttgagatagccaatagagatgaaggcacagta

SEQ ID NO: 435641 - DNA, 122 bp, Homo sapiens
ggaacccagcgccgaaggcgaggtgggcgcgggccgaaggaggtcctgggaggtcggcggcgcggagggatctccgcgggagccgttggggctgttggcctcgggctgaggtgcaaggacca

SEQ ID NO: 435642 - DNA, 122 bp, Homo sapiens
cagccaagcacaagccccctccctcacccagcagaagcagctcccgtctgctacattcagcgtgagatggacctgtgcctggcctggcccaactgatccacctcccacagatggcagagggc

SEQ ID NO: 435643 - DNA, 122 bp, Homo sapiens
tcttcctacccaggagactcctccccgtgaggctgtgagcacctttggggatgacccggccgtctgggagcacaatgtcctgggtgacatggcgggagatgaccgggactgggggatgcagc

SEQ ID NO: 435644 - DNA, 122 bp, Homo sapiens
tgagaaggacgacaagcccatccgaggtcagttgacatgggccggagctcggagctggggcgggactggagcggagctgccttggcactggagaggagctggattcccgctcctggctctgt

SEQ ID NO: 435645 - DNA, 122 bp, Homo sapiens
tccctttgccacaatatgcattgctgacctaaatgtgtacaaatctcatcgtctctaagtcgacaccccaagccctgtgggttttgtgagggacaccagctcacaatcatttgcagaaatcc

SEQ ID NO: 435646 - DNA, 122 bp, Homo sapiens
aagtgatactagccctgaggaccctggggctggtgttgaacctgggatgaaatatcctggcgcctgtgaaccacaaagagctgggactgggctccttttcctgcagcctcaaacttctgggc

SEQ ID NO: 435647 - DNA, 122 bp, Homo sapiens
actataacccctgtccccggccaggcctctctggactcttcgacactggcctccaccacgcgggctcagcagggcccgacgcctccgtcatgaaccttatctcggccctggaatcccggggc

SEQ ID NO: 435648 - DNA, 122 bp, Homo sapiens
agaacgggaaggagacgctgcagctcacgggtaccagggaacacaagacgcctccctgatcgcctgtagatctcctgggctggcttcccacaaagagagaaggaaaatgggaccaacactag

SEQ ID NO: 435649 - DNA, 122 bp, Homo sapiens
caccacagcagggtagaataaacgggaaacaaaccaccaggcttcctctcgtcaaggaatcgatatgttgtttactagctgctgcttgctttacatggtgctgttccccagtggagaaaaag

SEQ ID NO: 435650 - DNA, 122 bp, Homo sapiens
tgcagttttcagaaaccctcattcctcccttgactgattcaccacttgaacctcatatgacgtagaagaagcctacctatgtccccttcacatgttgtggtcaatgtgtcaactgcacgatc

SEQ ID NO: 435651 - DNA, 122 bp, Homo sapiens
cctgcttcctctcaccgtccttcatctggacaatattgctggcggccacccggtcggaggcgacaagaacatagtcggggccttggataccgatgaggtactccatggtggcggaaggccag

SEQ ID NO: 435652 - DNA, 122 bp, Homo sapiens
ttgcgcggaccaaggaggcatgtccggcttcgcaggaaagcgggaggaggcagccgagggcggggggaaattgaatcctctttgggctactcaactctgctaaaatcccccaccatccgtca

SEQ ID NO: 435653 - DNA, 122 bp, Homo sapiens
ggaagcggccacgtcacctacacgtaaccccacccccagtgacgagggggcggtcccacgcgtttcaagcccagcgacccgaaagacacgccccacacccaaacgcaagagcgatcccgccc

SEQ ID NO: 435654 - DNA, 122 bp, Homo sapiens
gtagataatttcggtaaatttcgccaagcaggggcaggacaaagagtatttgaagtctaccgcggggagaacttacctaatccttgaatgttaaaaggctaaaaactccactagtcggaagt

SEQ ID NO: 435655 - DNA, 122 bp, Homo sapiens
agggaaaggaaatccacccccacgctccttctggtccaggaccctaagggttaagatcaacgagagtgggccatcactgtttcctagaacggccccagcaaagccgccgggggagatgaggg

SEQ ID NO: 435656 - DNA, 122 bp, Homo sapiens
ttgcagtgagccgagattgtgccattgcactccagcccgggtgacagagcaacactccgtcggggggaaaaaaaatgtgtaagtgatggatagggcctcagaaagtgcctttaagctggatg

SEQ ID NO: 435657 - DNA, 122 bp, Homo sapiens
cgacacctgcattcagcctcacagcgagtagccaggcaaggtacttagtggcaggagaagcgagcacagggaatccatatagcaaaaagaagaggtgatgacattcctcaggcacttattgg

SEQ ID NO: 435658 - DNA, 122 bp, Homo sapiens
aaataagcagcagatgcagcaaggcctctgcagatttaaaaaaaaaaaaaaagcatgttgcgtcagagcacatgtctccccaaagggtacgtgtacgaacagcatgcagacttgtgaactga

SEQ ID NO: 435659 - DNA, 122 bp, Homo sapiens
gtgtgattcttggaccagccacattgacatcactggtgagtttgtgagcaaagcaagttccggagcctgacctactgaatcagaatctctgggaatggtgtttgagaaattgtgttttaaca

SEQ ID NO: 435660 - DNA, 122 bp, Homo sapiens
tttagcaagcacaggtcctccttctctacagggtggacacagggtggtgtccgcaggggacgaaggctgccgaggtgcccacttcgagggccattcctcgcccggcccctcccaggcccaac

SEQ ID NO: 435661 - DNA, 122 bp, Homo sapiens
gcctccgcgcggcgctccctcctctgccacgctcctcagacacccgcaggccaccctgtacgtcacactcacacgtgcccacgtcgctcagtccacgatgggcgtctcgaaggcagagctgg

SEQ ID NO: 435662 - DNA, 122 bp, Homo sapiens
actctcattgtgtggccgtgtttgcatttttcgtcttcatctctcagttttatagtttagcgacggaatcgtgtcctataattagcattaacttagggacgggataaccttcagtgctccaa

SEQ ID NO: 435663 - DNA, 122 bp, Homo sapiens
aaacaaaccaaaaacaaaatgggcacagtggctcacagctgtcatctcagcaatttgggacgctgaggcaggagaatcttttttgctcaggaattcaagaccaacctgggcaacacagtgag

SEQ ID NO: 435664 - DNA, 122 bp, Homo sapiens
ggtcctagggacaccctgtgtgcatgcatgcatgcctgtgtgcgccgaactggttggcggcgggggcgtgctggcgtgcttgtgtgactgtgggcgaccatggcacgcagaccgcctccagc

SEQ ID NO: 435665 - DNA, 122 bp, Homo sapiens
tggacacgtccccaatgatattatttctaattgcagcgtgtgagaggaggacatgacacccgatatcccagggagcagaaacacccctgtgatactgttcataatattcagggaggaagagg

SEQ ID NO: 435666 - DNA, 122 bp, Homo sapiens
acctggcagaggcacctcccaggtgacgcagcaactttcttcatagaacctgctgtagaacgaaacctctggctgctgccctgcaccttataggccagctctctcaccccttatcactgagc

SEQ ID NO: 435667 - DNA, 122 bp, Homo sapiens
aggatgactcccattcacgctgggtggcgggggaggggcgggccgggggaaggggcgcggcgacgcgcacatccgtcgcgtttatccacctggcagctccaattcgcccgcccgtcactcac

SEQ ID NO: 435668 - DNA, 122 bp, Homo sapiens
ctcgatctcttgacctcgtgatccgcctgcctcagcctcccaaagtgctgggattacaggcgtgagccacggcgtctggcctttattttcagagttggggtcttgctctgttgcccaacctc

SEQ ID NO: 435669 - DNA, 122 bp, Homo sapiens
gggcgctgccgcccgccttggccatcccgggctgggaagtccgacccttcgattaagccccgcctgattgggaaaggctctgagaaactatttgcatgatcttgaaagagctgtgctgaatg

SEQ ID NO: 435670 - DNA, 122 bp, Homo sapiens
tcccattgtcacacacaccccaagggcctgggagggcacacacagggtcctctgcaaatccgaggttccggcgggtccccgcaccggccccagctcctcccccgcacctgcctggccggcgg

SEQ ID NO: 435671 - DNA, 122 bp, Homo sapiens
actgtctttgaggagacccgcccagatttaaactgaatcacgggggctggagagcacacacgcaggcttgccagttaagctcatctgtccccacttaagcttctagctaccaggaagccgct

SEQ ID NO: 435672 - DNA, 122 bp, Homo sapiens
aggaggccaaatcagtcccagcctctcccaccatcttccctgcagcgatttcttcgagctcgaaacatctctggcgttgttctggctgaccactctggtgccttccataacaagtaagaatc

SEQ ID NO: 435673 - DNA, 122 bp, Homo sapiens
atgacaactttgttccttccctccttttctgagaagaagggtggtgcaaaatgacagttccgaccttagcaatgaaaaagaaccaggatgctgccagctggtcactgacatgtgtttcttgt

SEQ ID NO: 435674 - DNA, 122 bp, Homo sapiens
caggccacctccctccgcacctgaggtcgaggtggtgcgctcccccctggatggtgacggcgatgactgaggcactcaggttcctccgaatctgtggtcagtggaaagaactccatcaggtg

SEQ ID NO: 435675 - DNA, 122 bp, Homo sapiens
gatcatgctccaatgcttctctcttaaccccttgctttttttttctttcggccctcagggcggctgagccccccagcctgcaccctccgcaaacacaagacgaaccgtaagccgcggacgcc

SEQ ID NO: 435676 - DNA, 122 bp, Homo sapiens
ggctttggaatgctttctcttcatgtgcctggaacgctgggcgggcggtgacccggggctcggagccccaccctggccacacctgctgtcgcccacggggtcctcacggtggggacccaggt

SEQ ID NO: 435677 - DNA, 122 bp, Homo sapiens
cccatagtccccaatccccttccagctggaaatttatgctgtgaccagaggaaccagaagcgggatgagaacacttaggggactgggtcctaagatcaaagactggtctcgcgcaactaatt

SEQ ID NO: 435678 - DNA, 122 bp, Homo sapiens
cgggccagagcgaatgaccaagagccggacctcggtttctgccgctttattgagcatccgcgcggccgcccgcgccctcggcccgccccccgcccgcccccggccccgccgcgctagtcggg

SEQ ID NO: 435679 - DNA, 122 bp, Homo sapiens
ccgggaagtcgcggcgccttcggatgtggcggatgcggccgtgagccggcgggggaggtgcgccagtgtcctccgagctcgcccgcagactccccaccccgttccgcgccctttgcccttcc

SEQ ID NO: 435680 - DNA, 122 bp, Homo sapiens
gcacggcacttccgaggtcgctcagcacggggcttccgaggtcactcagcatagtgcttccgaggtcgctcagcacagcgcttccaaagttatttacctggtagcgagtgtcagacttcctt

SEQ ID NO: 435681 - DNA, 122 bp, Homo sapiens
cttctaaaagataaaagcagactaaaacattttgcttccttgttacaaaatcataacccacgcagaaaactattaggataattttctcaatgagaatcatatttttataaccagagggaata

SEQ ID NO: 435682 - DNA, 122 bp, Homo sapiens
tcccttcccccagccctcccgccgatctccgtctccctgcagggccgactcttcagcgaccgtccctagagccagcggacggaaccattccaaacagcctagtctcgtgctgagagcctctc

SEQ ID NO: 435683 - DNA, 122 bp, Homo sapiens
gcactgcgcttccggtcgccgccaccccttagctcccagctctctctgcggctcttcaggcgcgtcccgaaactacaactcccgtcacaactcgcgattatgacctgagggtcccattggtc

SEQ ID NO: 435684 - DNA, 122 bp, Homo sapiens
aaggaatgagcgagtgaccctgtgtttgagtatctcttcctgaggcctcaccttcgagaacggacatggtagctgtcctctcgccgacgccgtcgtgtccggtcactactacttgaccagga

SEQ ID NO: 435685 - DNA, 122 bp, Homo sapiens
tgcgagagaagggtagccagtaccaggccagagagaaacgtgctatgttccatctcccagcggaactcatccagtagataaagccaggtcaccgaactatcagcctgggtgagagctgccct

SEQ ID NO: 435686 - DNA, 122 bp, Homo sapiens
ttgaaagtggctgaaaatagtttgtaaagctcagctttcctggctcgacagtgaaatgaccgcacaggccagtcactgggtcaaaaatcaattaacaaaacgggaagttttcatgtctttat

SEQ ID NO: 435687 - DNA, 122 bp, Homo sapiens
aaaccacagtggcaatggtagcaaaatgagacggtacataagaactctggacttttggctcgatttttctgtaaatttaaaactgctctttaaaaaaaaactctacaaattgaatcattcca

SEQ ID NO: 435688 - DNA, 122 bp, Homo sapiens
tcggtcttttccttagtccatctttcaattgtgagcgtcgtcctgacccacatcgctctccgcccaggtcttcgtctctacaggactcttgcgtgaagtccaaccctgagcctcagcccggc

SEQ ID NO: 435689 - DNA, 122 bp, Homo sapiens
aaaaaaaaaaagaaaaaaaaagcaaaatgacccagccagcctgaatcccagccgccgtgtcggactactatagtcccagatacttggaaggctgaggtgggaggatcaattgagcccaagag

SEQ ID NO: 435690 - DNA, 122 bp, Homo sapiens
ttactttcccaaagacagccatgccaaatcaagaatgagataatactcctcaggcagatacgaaagcgcacttgctgagcacgtgttagctcatcccagagttagacgcccaggtatggcct

SEQ ID NO: 435691 - DNA, 122 bp, Homo sapiens
tgcatgtgacaggactgaccacgtctaccacagaactggcctgggacccgccagtgctggcggagaggaacgggcgcatcatcagctacaccgtggtgttccgagacatcaacagccaacag

SEQ ID NO: 435692 - DNA, 122 bp, Homo sapiens
gacaaaaacacactgaggtcaggattctgaacgtagtgctgttgagactctagaacaagacggctgtgcggcaggaagacatttacctggttgctgggagggtgctgactcgggtgaaaaat

SEQ ID NO: 435693 - DNA, 122 bp, Homo sapiens
gcgcggcccggtgtcgggtttgtgtgttcgtaccagccgggatcccctggcgctgggaggcgtgggaactggctcccgccggctgaaaccggagatggtgagcagctgtggttaaagggtcc

SEQ ID NO: 435694 - DNA, 122 bp, Homo sapiens
tttagacttcagcacctgaacaagagtgggcagatatgtactccaagctccaatgatgaccgtgaaccctacagagttggaagtgtggaaagcgaggcattgtgtcccttgtctgagacttt

SEQ ID NO: 435695 - DNA, 122 bp, Homo sapiens
aaagaggaaggcctctgtctcctgcctgcccctgggaactgaatgtctctgtataaaacccgattgtacatttgttctattctgagataggagaaaaaccaccctgtggcaggaggcgagat

SEQ ID NO: 435696 - DNA, 122 bp, Homo sapiens
agagaaggagctttttcaaaattccctgcaaatcccgttacctcaagaccatggctttcccggccagctgatctcccccctggccgccccctgccttttgcgatctctaaggactgcattca

SEQ ID NO: 435697 - DNA, 122 bp, Homo sapiens
gagactataccccagaaaacctgcctattaatgggaacaaaggtgtgggcccagtgagaacgtgatggctatggcagctggtgagaaaaggagggaacagaaaagtggaactcaccgtctcc

SEQ ID NO: 435698 - DNA, 122 bp, Homo sapiens
ccgtgatgtgttcgcgttgtctcctgctgggctgagcatgtccaaaaggccaggggcctacggccgcgctgccctgcatcctcatagctggtgcctgttctgagcgagcgccaagtctcggg

SEQ ID NO: 435699 - DNA, 122 bp, Homo sapiens
gttgtctggtctccggggagcaagtcccaggtgcgcgtttcggagggcgggacagtcctacgctgtctctgcggggcagcgcgtctgtgaagcactcttatccttcgggtgtgtccatgtgt

SEQ ID NO: 435700 - DNA, 122 bp, Homo sapiens
tgtggttgagcaaaatgaagacagttcctcttcttaaatccggctctgtgcctatgaagacggaagcagcagcattccgcttgcaggtttttgaaaaaacaaatggggcaagagaggccagg

SEQ ID NO: 435701 - DNA, 122 bp, Homo sapiens
gctctggggtgcaggggctgtccctgtgacctggggaggcccctggggcgactgggggcccgtgtaggaggtgggcccaggtgagagttctgggttggtgggtttgcatttgaaaggttcgc

SEQ ID NO: 435702 - DNA, 122 bp, Homo sapiens
ctaggagaagcggtttgtgttggtggcaggtgcgccccctcccaataggtgacaagaacacgcactctcccgttcctgcgttacctcccccaggccgcgcggtggcgctgcgtctctgcagc

SEQ ID NO: 435703 - DNA, 122 bp, Homo sapiens
ccctggactcaggagctcgccgcgatgccccgccccactctccacccgctgaatgcagggcgcatgctgctacttggcggctcaagccccgcccgcaccgtccccattctctgaccgcccct

SEQ ID NO: 435704 - DNA, 122 bp, Homo sapiens
ggccaagacgggcgagtgggcttctcgggttctactctgtgaaggccaaggcaagggcgtcgtcgcgcgctgcctggcggagcccagccccttccccacactgtcgctgacacgcccgcctg

SEQ ID NO: 435705 - DNA, 122 bp, Homo sapiens
tgcccagccaaaaaactgttctctacagcaaaggataactataagagtaaaattttcaggcgaagtatgaaataacagtgcaaccatagcaggctgcagggaaggataactgttttttattt

SEQ ID NO: 435706 - DNA, 122 bp, Homo sapiens
tctgtgaccttgggcagggccctccaagtggccgagcctcacattcttcacctgtgaaaccgggataggaatggcacacatagagcacttcaaaaacccttctcccaggtccaacccttgag

SEQ ID NO: 435707 - DNA, 122 bp, Homo sapiens
gcgcagaaggcttagacacgaaatgtcatttcagcaatgtgcctagagaagctctgacgccgccttggaagtaagtcgttgctgcctgacctttgggcgtctgggacggatgcctatacctg

SEQ ID NO: 435708 - DNA, 122 bp, Homo sapiens
ctgttcagcggcactgagcgcttcacactggtgcagccgtccacaccatcgtctctggaacgttctcagcttcccgagaactgccatgtttacaggcactgactaattttctaggatgacct

SEQ ID NO: 435709 - DNA, 122 bp, Homo sapiens
gcaggagctcggggacacatctgcagaactgactggtggctcatcatagagcaccagggccgagcaggtgcgcttaccacaggctgaggtagagctctgtgagcaggccagccatggaagtg

SEQ ID NO: 435710 - DNA, 122 bp, Homo sapiens
gaaaaacacgacgaggcctgcaaaatgcgtttttctttttttcctttacgcatgtaaccacggtcctgcatcgtgaaacggtacgcgcgtcggtggcaaaagaaaaacagcagtggctgcaa

SEQ ID NO: 435711 - DNA, 122 bp, Homo sapiens
cgaagtggcttgagaagcacagtgaatggtggcgaagcccgagccgggtcgcaagacgcccgctggcactgccggcgccatggcggccgccttcggccacggcggaggactcgctttcccag

SEQ ID NO: 435712 - DNA, 122 bp, Homo sapiens
gggagacggggggagagagagagagagagaagaaggagagcgagcgagcgagcaagggagcgagcaggacaggagcctgatcccacagcaggtagaaacaacgaaatgtttttctttcaggg

SEQ ID NO: 435713 - DNA, 122 bp, Homo sapiens
gcgctgccaacctgccggccatggagaccccgtcccagcggcgcgccacccgcagcggggcgcaggccagctccactccgctgtcgcccacccgcatcacccggctgcaggagaaggaggac

SEQ ID NO: 435714 - DNA, 122 bp, Homo sapiens
gcacatctttgaaaaggtctggtgaggttgccttccccaccctgtcccctgtaaacgggacgataccactttgcgggaggaggctgagacttcctgctcccacgccagttctgtgagatctg

SEQ ID NO: 435715 - DNA, 122 bp, Homo sapiens
acccggacgccacgggctgcgtggaggagaactggagtgcatggaccctgctctcctccccggctgccaggagtgtccactgctttctaagtcagactccttgggcaagaagtgttgccaca

SEQ ID NO: 435716 - DNA, 122 bp, Homo sapiens
gggccgcctctgccagattctggctaaatctgggcaactctagcagggcgctcagtcacgcggggaaattatagttgctggcgggacacgacatgaggatgccagaaataagctcataataa

SEQ ID NO: 435717 - DNA, 122 bp, Homo sapiens
gttcactgcaacctccacctccagggttcaagcgattcttttatggtttacattttaatacgcttattgatcatattgtccaattttttgtgagtttcctgttcacatcctttgcctatatt

SEQ ID NO: 435718 - DNA, 122 bp, Homo sapiens
gctcacttcccagcgccaccagccttccttggatgttttccactctagttgggttcaggccggcagtttctccacattctttagctctctgttttatttccaacatactccaggctggttga

SEQ ID NO: 435719 - DNA, 122 bp, Homo sapiens
cccctacctgcccccactgtgcgaccccaaggacgggcacctgctggtggacgggtgctacgttaacaacgtcccaggtcagcgagcccatcgggccggctgggcctccggcgtgtctgagc

SEQ ID NO: 435720 - DNA, 122 bp, Homo sapiens
cagagcccagaaagccccggctaccactgctgttgccacattcaacacatcaccaggtgccgcctcacagttccaaaggctgtaccttaagaggagctggcgtgcccaaagccatgggctgt

SEQ ID NO: 435721 - DNA, 122 bp, Homo sapiens
cggcgcggtcccagtcaggaacgcgccctgtcgcctcccactccgtcttccggaccctcccgatcctctctcgtcagcgatcgggcgtcgctcccctggactaacctcccttgccccatctt

SEQ ID NO: 435722 - DNA, 122 bp, Homo sapiens
tggtcacgcctcctcctaacgccagaacctcatcccgctttccagccagcccaccgagaccgccccgaacggctccgccttttttagtactggctcggggatagaccccaccccgtctgact

SEQ ID NO: 435723 - DNA, 122 bp, Homo sapiens
caccgtgggagactccagggtcttcccgccgctcagccatgtctccacctgccaggttgccgtcgagtatcttaaggactccaacctcctgttcttcggggggctgctggtggccatcgcgg

SEQ ID NO: 435724 - DNA, 122 bp, Homo sapiens
tcattaatgtttgaaattcgagtttcaaccccagcccatcatggtctttagtgctccagacgcttaattccatgacgttatgcatgtgcagaatatattgagattcaaggtggtggtgaggg

SEQ ID NO: 435725 - DNA, 122 bp, Homo sapiens
agggaggaggggacagtcacgtgggacaggggcgtccgaaggtgccggctcggatgggctcggctcggccgccgccacaccgcccgggcctcccgggcctccccggcctcccgccctcgcgc

SEQ ID NO: 435726 - DNA, 122 bp, Homo sapiens
aactactaatgggccagaccatactgccaggcttgtgtagatctcaaaataaaggtatcccgtcatctcagtgacatcctgtttctcaggtagaaaggttgtagcgctaccattgctttttt

SEQ ID NO: 435727 - DNA, 122 bp, Homo sapiens
agaaaactcttagggtccccagacagcattgagatctcacagaggggccccaagggcctgcgactccaggagctgagaccccccagggagggaggtacctctagactgagacactcacaaag

SEQ ID NO: 435728 - DNA, 122 bp, Homo sapiens
tagctatacagaacattatggggacaacaggaactctgaatgtggactgtatattagatacgaagcctatatcaaggttaaattttctgagtgtgataattatattgtagctatgtaggaga

SEQ ID NO: 435729 - DNA, 122 bp, Homo sapiens
tttggcgtttgtgctgcccgaccctttctcctgtccggatgcgcagggcagggcctgagccgtcgagctgcacccacagcaggctgcctttggtgactcaccgggtgaacgggggcattgcg

SEQ ID NO: 435730 - DNA, 122 bp, Homo sapiens
cctgaggaacccggtgggccggggaagtgggcgcgctctgttctccgcggccagctgggacgccgggccaggtggggccgcctgcgtttagcaactgctttctcaccccctggatttgcgat

SEQ ID NO: 435731 - DNA, 122 bp, Homo sapiens
aggggatctactgaagtcatttctttaccccattctttccaattttagtatatgtgctgccgaagctagcactctttgcctcattcttaaaggccccctaaagttccagaaccacaggttta

SEQ ID NO: 435732 - DNA, 122 bp, Homo sapiens
cctacggccacgccgcggtcggccaggaggtggcgctgtgactgcagaaatggcgggctccggctgcccggcctcttctcaggaatgaatgcacctgggacttcccgcttcggaggcaacgc

SEQ ID NO: 435733 - DNA, 122 bp, Homo sapiens
ctggcgggggcggggggtgggggacccggagccccaaggcctctgcggagccggtctttccggacagggtgattttcgtttaaagattaatggtgaagccgagctcttaattattcctctag

SEQ ID NO: 435734 - DNA, 122 bp, Homo sapiens
tggacccctcctggcaggagggctcatctctgggcaggtgctggggccacaagacagatacgaatggaactttgtactcttcggggacggtacggggggcgggcaagaaacaataaacaagc

SEQ ID NO: 435735 - DNA, 122 bp, Homo sapiens
atccacccacctccacctcccaaagtgttgggattacaggcatgagccactgtgtccagccgaatacattcttttaaacagctgcctgatatgccatgttatgggggttccataatttattt

SEQ ID NO: 435736 - DNA, 122 bp, Homo sapiens
tttcagagctacctttgcagatgggtaggcttttcacccacccacagaaagaagagtcaacggggctgagacaggacagggatgggtttcaggagcacaattaaaagtttttcgtatcttaa

SEQ ID NO: 435737 - DNA, 122 bp, Homo sapiens
ttgggagaaggaacagtgcacatggacgtgctcaagacagtaccgccggcctgtcctcgccggcattgtctcaggcgggcaacaaagaaccagtgtgccagccggctgccctggtgttatga

SEQ ID NO: 435738 - DNA, 122 bp, Homo sapiens
cctgcgggctcccggacccgcgcccactcggaggaacttaggggcgtgcatggctgcagccgggcagcagccctaggtgcacagagcctctagctctgcaaacctcccaggagccggcgctc

SEQ ID NO: 435739 - DNA, 122 bp, Homo sapiens
tcttgcgggccatgctctcaggtagtggcttgagtccccctgctcctccaacaaggccaccgtccagctattaatattactcccaattccctggacttgctatgtcctctggcgtgtggagt

SEQ ID NO: 435740 - DNA, 122 bp, Homo sapiens
tttttctctttatcaagaggccagcccacacacctgatacaaccttgtcatttttgtagacgagacattacatttaccattcaaaatgaggtggtaggggtgatgccacagacacgctgtct

SEQ ID NO: 435741 - DNA, 122 bp, Homo sapiens
ctgaagaataaagggacaaatgtacacatctgtctaaatgaaaaaaatgaaaatcctggccgcaaaaacacatacattaacgtctaaagacctgcagggaagacaagacttttccgcctggg

SEQ ID NO: 435742 - DNA, 122 bp, Homo sapiens
cctctcacgacaaagttggagggggcccagggcaggatcctgggcctgcctgcctgactccgctgctccccatttatctgttccatcaccagggcaggtgctgagtgcccatgtgtcgggcc

SEQ ID NO: 435743 - DNA, 122 bp, Homo sapiens
tgatggtgcgagtgggtggtggctgggacacgctggagcattacctggacaagcacgacccgtgccgctgctcctccactggtcagtgccagggtggggctggggctggacgggcaggggac

SEQ ID NO: 435744 - DNA, 122 bp, Homo sapiens
cggcccccgcatgccaccaacctccttctgaaaatggtgattaaaagctaatcatggggccgggcgcggtggctcacacctgtaatcccagcactttggaaggccgaggcaggcggatcacc

SEQ ID NO: 435745 - DNA, 122 bp, Homo sapiens
tttggacgaaaagcgctgggggtgttggaggctcctcgctgctcacatctggctgggcttcgctccttgcgcgtctgtcccactttctccctctcttcctttactttcgagaaaccgcgctt

SEQ ID NO: 435746 - DNA, 122 bp, Homo sapiens
agccagcagcccgagacaaatggatccagatgctcaagctggcctcacacctgcctcatccgccacgtgggcagacctctggcctcagacagggctgccttcacccctggcagtccctctcc

SEQ ID NO: 435747 - DNA, 122 bp, Homo sapiens
ggatgggggtcaagtctaggctcaatggacctcccctcctccacccgggtcaccactcctcggaaatcctcgccccactcccgcctcaggcctgtacctcctggctgtgacgtggtttctca

SEQ ID NO: 435748 - DNA, 122 bp, Homo sapiens
cggattcatttttctcacttccctaacaaaatataaactgcaggaggcagaaaacgtcgccgacttactcaccattgtgttcccagcatctctggcaggatgctgatcggataaccagtgcc

SEQ ID NO: 435749 - DNA, 122 bp, Homo sapiens
ctgaggctcccagtcagtcacatcaacagcttccacatccagagatgtcaaagaaccccgcgtgccattggtgcctcccagcaagttctgtccccatcccatagatgagaaaactgaagctc

SEQ ID NO: 435750 - DNA, 122 bp, Homo sapiens
tcattaacctccctagccctcaattttccatttgataacatagggataataccatctactcgcagattgtaaaaatggagcaaatatgtgtgaaaatgcccaggaccgaggtcattccttcc

SEQ ID NO: 435751 - DNA, 122 bp, Homo sapiens
ctgctaagcaagctcatggccgtggtggtctgtgtgcccatctccacctcttgctgtgagcgggggttcaaggccatgaaccgaatcaggaccgatgagaggaccaagctctccaacgaggt

SEQ ID NO: 435752 - DNA, 122 bp, Homo sapiens
cacgtaaacggggcaggaaacagcgcaagtagaacgatcgtgccaccaccgaaggggtgccgcctgcgagctcggaggcttcagcctgtttgggaagagtaggctgagcggcgctctttgta

SEQ ID NO: 435753 - DNA, 122 bp, Homo sapiens
tcataatcacctcattcatggctggctgggaggtgtgctgtgtgcatgtctgaccctgggcgtgaggaacaccagccaagtccttctggctgcggttaaaagggctcaccagcctctccctg

SEQ ID NO: 435754 - DNA, 122 bp, Homo sapiens
agaggtaaattgatttcggcatctgtagccccaacctgtgacctctccttccttccttctcgggctcccttcagggatttcctgatgttacagaaaatggtatgtatgacgctgccctcctg

SEQ ID NO: 435755 - DNA, 122 bp, Homo sapiens
ctaatcatcatcttgttattgagatgagtctcgggaggcaaaagcgttgcacgaccccaccgccaccccaccaaggtgcaagccagggctagagctcaagtgagctcactttctgcctcaga

SEQ ID NO: 435756 - DNA, 122 bp, Homo sapiens
gtgcaccccccaaaaggagggaaaatgcaaggttcctgctgcagttcccgggacacactgcgagccgctttgttacaagtgtatccaatgtccccagaacgagggacttgtggggcgcggct

SEQ ID NO: 435757 - DNA, 122 bp, Homo sapiens
cccacctgaaagcgcctcgatggccttgagggcccagctctcgtccgggcagtccacgaacgcgtagccagtcttcaccaggaagggtcccgacaccgggatcttggcgtccttgaagatac

SEQ ID NO: 435758 - DNA, 122 bp, Homo sapiens
cgacacagaccatatacgacatgggccatatacagatgggacactgacacagatggtatacggatgggacactgatgcggacggtatacagatgggacactgacacagaccatatatggata

SEQ ID NO: 435759 - DNA, 122 bp, Homo sapiens
ttctatttccctgtcttcttttcttttttgtttgttttgcttttcctgctcttttcttagcgctgggtggcagtgggtatgcggcagccgtgtgatttgcccatcccctagtacacgcagcc

SEQ ID NO: 435760 - DNA, 122 bp, Homo sapiens
agatcccagtccagatctccacacaggtctcataaaaagtcaaagaaaaacaaacactgacgtaaatttttaagatgctgtcacttattggaaatgcgatttgttttgtgcctgaacggtct

SEQ ID NO: 435761 - DNA, 122 bp, Homo sapiens
accagatccttcagatctagaggcacacgcagtgggtgacaggagagtgccccctccccccgggcgggtgggggtggggagaggagcagggactcggcttggagaaggaggcagggaggcag

SEQ ID NO: 435762 - DNA, 122 bp, Homo sapiens
gttttccacgtgcgcgtagggcgccgggatcacgtggggaggcagaagccaatggggaagcgtttcgtgtaggtcttctgaggtggtggcgccagcggctacctcctgcctgtgaggagctg

SEQ ID NO: 435763 - DNA, 122 bp, Homo sapiens
agtcgttttggcttggtttccaattcctagcagctaaaactgcaccctaggtgatacagacgcttccagccccaacctctcatgagaaataacttcaaaataggctgttccaaccctcacaa

SEQ ID NO: 435764 - DNA, 122 bp, Homo sapiens
ttgatcgccagagaagaagggatatgtgagatccaaacgccgaaggaggaaagcaggctccgtggtctcttccagccctgatggaagaaactaccgagccttattatactaggtgctttcca

SEQ ID NO: 435765 - DNA, 122 bp, Homo sapiens
tggggagcacctctgccccgccgccctgtctgggatgtgaggcgcgcctctgcccggccacgaccccgtctgggaactgaggagtgtctctgcccgaccgccaccccgtatgggaggtgagg

SEQ ID NO: 435766 - DNA, 122 bp, Homo sapiens
catgtcccactgctgcctgcacgggagcctggagcagagctgtgaggagccgccagagagcgcagcgcggcggcccaggaccccggcccagtgactgcctcgccgccgcctccaggaagttg

SEQ ID NO: 435767 - DNA, 122 bp, Homo sapiens
gcagaacagctggctgggaaggcgatgtaggcacaaaacggggctgggacgggggtcccacgggcacctacctctcccaagcggcggtacttgatttcgtacttgaggatgagtccgttggg

SEQ ID NO: 435768 - DNA, 122 bp, Homo sapiens
aaatactgggaagcattcctacctgaagccaaagccattgcctagcaataagattgttgccgttaagaagaccttggatgttgttccagttatgctggattccacagtgaaatcatttaaaa

SEQ ID NO: 435769 - DNA, 122 bp, Homo sapiens
ccctgccactgccccggcgtgctccatggcaggcgtgggtggggaccgcagcgtcggctccgacttccaggcttcatcctagagactgtcatctcccaaccaggcgaggtccttccaaagga

SEQ ID NO: 435770 - DNA, 122 bp, Homo sapiens
cttgtgggtaatctcagggtgagacgaggctagcgcgaggtacggctagagcgtcatttccggctcgaatgcccggcagccgtggcggctagagcgttcctccccagctcgaatgcccggcg

SEQ ID NO: 435771 - DNA, 122 bp, Homo sapiens
ccctgctgggggtgagggggtatttttctgtctcttcaataaaccagaagcggccgggcgcggtggcttctgcctgtaatcctagcactctgggaggcagaggcgggtggatcacctgagat

SEQ ID NO: 435772 - DNA, 122 bp, Homo sapiens
gaccgtgggagggtcaagggagcgggtggctacaggtgtctgaataggaaacgtaaaggacgaagattaatgtgcaattcctatgactgagagacgccgaggccccaaaccgggccagaata

SEQ ID NO: 435773 - DNA, 122 bp, Homo sapiens
aaggcctgctgccctccctcgcagccctcccttttctcggccgtcaaagtcagtctccgtcgccccaagttccccctgagtaactggcaccaacaaactgactgccgttgccatagcgatgg

SEQ ID NO: 435774 - DNA, 122 bp, Homo sapiens
gtggattttctccacatcctaaacatagacaattgctaattaagtcattcacattatttccgtttgagaatgattttggcctgttgattgtttttctagcaataaacatctttctggaagag

SEQ ID NO: 435775 - DNA, 122 bp, Homo sapiens
ggagggggagctctctcaaacgcaggcacagcagctcatgtgagacagctctgaccgagacgaaactcaatcttgggtggacctgattaatgcttcctcatgaggactgcactttacagttt

SEQ ID NO: 435776 - DNA, 122 bp, Homo sapiens
gagagagagagagagtgtgtgtgtgtgtgtgtgaatgtttaggggggtgaagggtgtaagcgccatgctgtgcaaagaatcctagccaggatttggaaggctaggggccattccaggctctg

SEQ ID NO: 435777 - DNA, 122 bp, Homo sapiens
gtgtttgctgacaaggatctctctgggcacaggaaaggtggagagatctgtgagcagctgcgagctctgggtgcctccctggactgggatcgagagtgttttaccatggatgttgtgagtgt

SEQ ID NO: 435778 - DNA, 122 bp, Homo sapiens
catcccctttcccgaggaatccaaactccggtttaatgagtcgtgaagtgtgagaacttccggagcccgcagcgcccctgatgccaattccagatgtgtgagttgggaggggcgggcctccc

SEQ ID NO: 435779 - DNA, 122 bp, Homo sapiens
aggaggcagattgcccctcagcccacagactgacagagatgatggagtgtgcagcacacacgatgaggctactgtgttgagtgtctgtcctaggtgggtcatgctgatgtgcagccaccatt

SEQ ID NO: 435780 - DNA, 122 bp, Homo sapiens
tgaatcctggggacatatccatcatgaatggcttaatgcatccctttggcggtaagtgagcgctcactctgagttctcacaagatctggtcacttaaagtgtgtggcaccaccccctcactc

SEQ ID NO: 435781 - DNA, 122 bp, Homo sapiens
accaaggaagcatcctcacctggagagatttgagcgacaaatactgaagtctcaggcccacgggaaagcaagcaaacagaaagagaagatggcgttcttgcctggtatccgaccactaagca

SEQ ID NO: 435782 - DNA, 122 bp, Homo sapiens
gagatggagggagtcggtaatctctgccctgggatgtgtgctgggcagccctggacagggcgtgccctctgtctcccctcagttgctcctgcatcattctttttgtccccttcataattgtt

SEQ ID NO: 435783 - DNA, 122 bp, Homo sapiens
cctggacacaggaggcatctggcaaatacgcgctgcatgaatcaatgactccagtgcccacgcgcaaggggcccctgggctcagaaaaccccaccaggcgggcccctccgagctcggcctgt

SEQ ID NO: 435784 - DNA, 122 bp, Homo sapiens
agcagtgaggcgcgcgagccgggaagtgaacgaggactgactcctgtcgcttcccgtagccgcccacggacgccagagccgggaaccctgacggcacttagctgctgacaaacaacctgctc

SEQ ID NO: 435785 - DNA, 122 bp, Homo sapiens
gcagccccttgtggctgagggcagagctctttgcgttggtccacggtgtgctcctctgcccgggtaaggcgcgctccctcatgcagccctttctggcccactcagttggtgagctgccatgc

SEQ ID NO: 435786 - DNA, 122 bp, Homo sapiens
aactattcttgacctgaagagcctagaaaggtgctggatcgggctggacgtggtggctcacgcctgtaatcccagcactttgggaggctgaggcgggtggatcacaagtcagcagttcgaga

SEQ ID NO: 435787 - DNA, 122 bp, Homo sapiens
aaggttcttcctaggtaatgatgtgcccttactgccacttgtgtcaacctccagcttcctcggtggcttcccaccctcatcttcactgctgacaccagactcagcatcacagtggcagtggt

SEQ ID NO: 435788 - DNA, 122 bp, Homo sapiens
aaataaaaataaaaatcaccaaatgctctcatgtccctttgtttttgcatattaagagctcgtttctatgcatcatcatcttttgctttgcagctcatgaggtgctgtccagggccctctca

SEQ ID NO: 435789 - DNA, 122 bp, Homo sapiens
gtgccaggtgaaaggagaggtggaggtcttgcctgatcatttcctggatgctctgaggttcggtcttgtagggagaagggagtaaacaggaatgaccacaaccctttcccgatctccttttt

SEQ ID NO: 435790 - DNA, 122 bp, Homo sapiens
ctgtccctccttcctccctgcaccccaatttcgttgaccctctccgtcagccaggcacaccgggcgccgacacctccctggtcccctagcgcttcagaagcttgccccccgccggccgcgcc

SEQ ID NO: 435791 - DNA, 122 bp, Homo sapiens
agaaggagggtgcaagggaaggcagggcggggggaagagaggggaagaccggggagagggcgcctcccacaacccgagccccgggagccgccccggatcccagccccgccctggaccgccca

SEQ ID NO: 435792 - DNA, 122 bp, Homo sapiens
atacttcaaattccccctccctgctggatgtctcagaaggcggtagcagcctgggggcatcggcacctggcagcggcaatgcgaacatcctgtgtgaccctgagcaagtcacttagctttgc

SEQ ID NO: 435793 - DNA, 122 bp, Homo sapiens
tccctcgccccaatctttccttgaaccccttttccagtgtcccaaagctgtccactcttacgcctcttccagaaacacaggctacctccccccaattccccagtgccactctggattgtaat

SEQ ID NO: 435794 - DNA, 122 bp, Homo sapiens
ctgacttcaagaatgaagccgcggaccctcgcgatgagtgttatagcgcttaaggtggcgcgtcgggggtctgtcccttctgatgttcagatgtgttcggagtttcttccttctggtgggtt

SEQ ID NO: 435795 - DNA, 122 bp, Homo sapiens
aaccctcctcctgctgctcttgggggccctggccctgaccgagacctgggccggtgagtgcggggtcgggagggaaagggcctctgcggggagaagcgagtggcccgcccggcccggggagc

SEQ ID NO: 435796 - DNA, 122 bp, Homo sapiens
gatggggaaaccgaggcccagaaagaaaacagcccgcctgaaggtgacagagcgcctcgccgtatcaccagcaacccctcaagataaccttatcacgtttcacggagggagagagggcggca

SEQ ID NO: 435797 - DNA, 122 bp, Homo sapiens
gtcggttggggttgaactcattctggagatcccagtcagtgatctcaaagttctcccgctcgtcatcatcatcatcaatgcggccttccccatcccggtataagtgggacaatgacatggcc

SEQ ID NO: 435798 - DNA, 122 bp, Homo sapiens
taaatttttgaaaagatttaatataacccccagccataaagtctttgagttgaccctccacggtctcaatgattacacatgcagtttttattactaaagaataaattgtgggtttcccgtga

SEQ ID NO: 435799 - DNA, 122 bp, Homo sapiens
ttgccagagccgaggcggaagccggagcatttgggggacgggaccgcgggaacccggaaacgcctgggctgcaccgagctggcggtggctacggcgacgggagccggcggcgctgcgggtca

SEQ ID NO: 435800 - DNA, 122 bp, Homo sapiens
aactctggtgtctcagcttagggcctcctccgggaagagctaactgctcccaggtgaagccggtgcccgcgggcggtccgtacaccccgcagccggctcgcaccgctcgagagcctcggccg

SEQ ID NO: 435801 - DNA, 122 bp, Homo sapiens
tgtgaaattttgctgtttgaagctgcacaatgcatactacatctaaatgataatagcctacgagaatactatgtgccaaaattaaattagggaagtgaatactgccggtgtgttaacagcat

SEQ ID NO: 435802 - DNA, 122 bp, Homo sapiens
ctgaggcaatcggagaagctatcgctctgaccaaagcaaggacttcatctaccgtgagggcgcggggcaaagagcctccattcaaccgctgccagtgacgactgagtcccccttccacgcaa

SEQ ID NO: 435803 - DNA, 122 bp, Homo sapiens
gagcatgggacggagaaaaaacaaagcaaaatttgttccccacacggtttttggctttagcggtttggggacctgtggctttctccagccatgcctccactgcttcgcagagtcccagactc

SEQ ID NO: 435804 - DNA, 122 bp, Homo sapiens
agaggatgtgaaagctctcgtttagttcagtgtggtcctcgggaaagctcttctgctcaccgcaagttggctggtttccaaagctgtgcgtgccagcttggatctcctggggctgatatacc

SEQ ID NO: 435805 - DNA, 122 bp, Homo sapiens
gacctgtggcgccttagcaagagccagctgccgtcgggggggctggcgcagcgcgtgggccgcaccatgcaccacttcggctacctgctgctggtctccggcctcaccacgagcgcggcctt

SEQ ID NO: 435806 - DNA, 122 bp, Homo sapiens
catggggccatcgccaatggtcagactccccagggggccggtgatacacggttcctggagcgggctggaaactcattccttgcaggctctgggagacgatgatgcattcccgggaccccgcg

SEQ ID NO: 435807 - DNA, 122 bp, Homo sapiens
gccggagaaggcaggtccagacccctccggaagcgggagcgtgggcagcagggaaggacgcgcagccccgggccggggtccccgaggagccctccggccttggccgccgccagcgccgcgcc

SEQ ID NO: 435808 - DNA, 122 bp, Homo sapiens
gtagtttacacgtgcaaaattcattcctgagtcaggcgagccacaggctcagctgcggcgcggtgcggcgcttgcctggggctagagagtccacgacttgttgcctctgcgacccgaaagcg

SEQ ID NO: 435809 - DNA, 122 bp, Homo sapiens
acacccctttttttattgcctgagattccttcaatttctagagataccatgaagcagccccgcttaatcttatttaacagacgctgctgagactgccagaacgcaacacaacaagacttttt

SEQ ID NO: 435810 - DNA, 122 bp, Homo sapiens
cagggacccctctcacgaatgggggactcatctacgaacgaggaggctgcgtcacgaatccgaggctgccgtccaactacaggggacccgtctcgtctattctccgagtgccccacagatgc

SEQ ID NO: 435811 - DNA, 122 bp, Homo sapiens
cgaaaaccgcttctaggggcaggtcggcacacaaagaaaacgaaagctttgcaagaccctcggcgcacgtctgcgcaaagggtctctgtgtctctacgcccagatggccattttgagtcccg

SEQ ID NO: 435812 - DNA, 122 bp, Homo sapiens
caccacaccatgcaaggtagcctcgctgccgtctcctgaaacgtactgaagccagcagggcgcggttacgtcccccggagactgtggattgtggatgccccctccccaccccgtggttgggc

SEQ ID NO: 435813 - DNA, 122 bp, Homo sapiens
ctgccaccccacacggggcatcactgcccctcctctcgcccccagggaaggccagtgccacggaggcgcgctacaacaagctgaaggaaaagcacagtgagctcgtccatgtgcacgcggag

SEQ ID NO: 435814 - DNA, 122 bp, Homo sapiens
ttccaggaaaggcggtattgcagcccacctgcacttcctgtctgatacttgagggccaaccggttcctccgctcctggggaaagcgccttctggcactgaatcttttggctgccacggatgt

SEQ ID NO: 435815 - DNA, 122 bp, Homo sapiens
cgcgtgtggacccccagcgcggtcacccggaaggggcgccctggagacgcctgtgtccctcgagactccactggcagcgaattcgttactgtggtgaccgctgctcaggtccgttattcctc

SEQ ID NO: 435816 - DNA, 122 bp, Homo sapiens
cttggaagccactctcaatagatcgcagaacgagcgagctgcctcgcaaccgagaacccacggcgaccacacggcccgggaggccttccggctccagtcacccccaccctcctgcccgccga

SEQ ID NO: 435817 - DNA, 122 bp, Homo sapiens
tttaaggtttcaaaatgtggctgcaaaagattggtggtggaagaggtgggccaaacgcagcgcctatccagggtcctatccagggtcctcaggcacctcctgggcagacgcgaggcctcagt

SEQ ID NO: 435818 - DNA, 122 bp, Homo sapiens
acgttctgactggatgacagcaagtcttaggataaccaatcagaacaagataacaaagcccgatcagagtaggcctagaggtttctctcatccgatcagactatgtagtcgagaaacttcat

SEQ ID NO: 435819 - DNA, 122 bp, Homo sapiens
ggtgtctatttttaaagtccgaataccagggtgctgggtcctgcagaccagctgtccaggcgtccgtgtggccaagggtttcagctgagttgcctctagggtttctctgtaatgaaactgag

SEQ ID NO: 435820 - DNA, 122 bp, Homo sapiens
agaggaaggcacactgcagtccaggcatgtagacatcagcctgagagaaggctattcctacgtctgagcttctcttccccaaatacaaccaagagtgaacgcttaccctccgagaccttgga

SEQ ID NO: 435821 - DNA, 122 bp, Homo sapiens
cagcctctggaaagagtgctcagagacctccccactgatggctaggactccagggagcctcgaccctagggctgatcctcaagtaccccagtttcacacataccaaaccaaggttctctccc

SEQ ID NO: 435822 - DNA, 122 bp, Homo sapiens
agggccttctgacacacgctgcaacctggatgaaccttgaggacatgatcagaaacaggccgatgacaaaaggataaatcctgtaacgatttcacttatgtgagggacctggagaagtctaa

SEQ ID NO: 435823 - DNA, 122 bp, Homo sapiens
cgtcttccctgctgtccttgcaccccagagctctcctgtgccccgcgttccgagccccatcgcccaggccacgggcagccctgtgcaggaggaggccatcgtcatcatccagtccgctctgc

SEQ ID NO: 435824 - DNA, 122 bp, Homo sapiens
gggctggtgacatcaaggactaatgccacaggaatcaaagtgatgtcgggaacttacagccggcttcccttcaagaagagcagaggctaaaaggaatcgacgtcatgccagacatgggcgtg

SEQ ID NO: 435825 - DNA, 122 bp, Homo sapiens
gaaagacggtataaatgcaatgaatgtggaaagaagtttgcccagagctcaggccttgttcgacatcagagaatccacactggagagaaaccctatgagtgtgatcactatggaaaagcctt

SEQ ID NO: 435826 - DNA, 122 bp, Homo sapiens
ggcgacctcagagaccccgcactgctgccctcccctccagcgtgagggcgccgcccgtgacgggcatgagaaaagaaagtggtgatgccgagtgcaaaacgttagactgccccgtgtgaggc

SEQ ID NO: 435827 - DNA, 122 bp, Homo sapiens
cttcaagtccagttcggctctcattggctaccgcacgcagtgagggggcggggaaagtagcggcgaggccccgccctcacgcaggagccaatcctgagcaggctaggagacgaacccggaag

SEQ ID NO: 435828 - DNA, 122 bp, Homo sapiens
ggcctttccgctcccttccttcccacaagtcccttcccgcgcgcgccccacggccctgcccgccctcccgcgtcagcgccccaaccgtcaagccagcaattgaaacgtttccaaaacggtct

SEQ ID NO: 435829 - DNA, 122 bp, Homo sapiens
ggtggggggagtgggattggaagaggcttctcaacctggggttggggctgcgggagggcacgcgagccccaggctggagggttaggtgaggggctaagttggtcggggtaggggatggagag

SEQ ID NO: 435830 - DNA, 122 bp, Homo sapiens
atggctgcgggcgcagggcagcacgtagtaggcaggatggtggcaggctccaggaggctccgcgtgcgccaggaagcaaaggcgcggtagcaggtgctagtcaactgcggttgggtttagca

SEQ ID NO: 435831 - DNA, 122 bp, Homo sapiens
agagaaagggacatcatattttataaccaaggatcccaaggttcaaacagtcaagtaactcgcaaaggtcaaacagcaaatcatttatagagttgatatgaagcatatttgcatggatattc

SEQ ID NO: 435832 - DNA, 122 bp, Homo sapiens
gggtgggttgggggttagtaagaaccccagtccaggctttgcctcagagaattgctaactcggcctcagtttctccaggaacagggcaaggaccagccaggagggctgtctgtggaaaccaa

SEQ ID NO: 435833 - DNA, 122 bp, Homo sapiens
aaatcctgtttcgccagtgcctcctctcatttcatcctcagagcagtcagatgaggtaaccgggtggagaggagggaaggggccctcggggggcactctgcccgggcactgggctggatgtg

SEQ ID NO: 435834 - DNA, 122 bp, Homo sapiens
aaagacccaggatgaagggttcaccccaccagcccgtcgtccggctactctaacggcgagcgcagcctcctgggaaatgcagttccaagccgcccacgcccctatgtctggaggaaggtgga

SEQ ID NO: 435835 - DNA, 122 bp, Homo sapiens
gacctgaatggtatcatttaagctggaaggcatctgtacccatggctttccacttgctgccgagaatccatttgggagcatgcattcacagagcaaaaaggcaagatgcatttttattcctt

SEQ ID NO: 435836 - DNA, 122 bp, Homo sapiens
tggggcgcggcagcgcaggcagagccgcctagagctgtgcagccggctcgaacgagaggccgcccgacttgcagacctaggttgagcagagctccaccgcagtcccgggtgtctgcggccgc

SEQ ID NO: 435837 - DNA, 122 bp, Homo sapiens
aatctgggcctttgttccacacaacaccagccctgtgggctcctggggctccggttgggccgtgaggggcagaggggagagatggcaacagaagtgccccgggtttggtgtgcggctggcga

SEQ ID NO: 435838 - DNA, 122 bp, Homo sapiens
gtgacagataaatggagaggggaaccgatggccaaatggataaagagactccagtgcccgcgagtacagaacaaagggcgagaaagaagaacgaacaagagaaccaccgactggggcatgag

SEQ ID NO: 435839 - DNA, 122 bp, Homo sapiens
attcccaccagcaagatccgagggttccaatttctccacatccttaccaacgctcattttcggctttttgtttgttttaattttagccaccctagtgggtgtgaagtggcattttatcaact

SEQ ID NO: 435840 - DNA, 122 bp, Homo sapiens
gagctctctgaattaaaagcattcatcttctcctgctgaccgggatgtgggctccttccccgtgaggctggccggaactgggcaggcagggtcacagctccagagccagggaggaggatgca

SEQ ID NO: 435841 - DNA, 122 bp, Homo sapiens
gtggaggttgcagtgagctgagattgcaccactgcactccggggcacctgagcaagactccgtctcaaaacaacgacgacaacaacaacaacaacaaaaaacaagtgatatagagaacttgt

SEQ ID NO: 435842 - DNA, 122 bp, Homo sapiens
agagtccccattgtatcattcttatgatacaatgagtccattgtatcattcgtatgccttcggatacttgtagcttagttcccacttacgagtaacacacaatgtttggctttccattcctg

SEQ ID NO: 435843 - DNA, 122 bp, Homo sapiens
acagctgcatcggctgctccagctgctcgtaggacatgtccagcagctggtccaggtccacgccgcggtaggtgaacttgcggaaggtccgcttcttcttctgctctacttctgccatcttg

SEQ ID NO: 435844 - DNA, 122 bp, Homo sapiens
cacctccgcggcacctggatacccaacacccggagtcctgggaggctcggggctccagcccggaccagcaccaggggctacccaaggctggaaggccagagacaggctacctctcagctcag

SEQ ID NO: 435845 - DNA, 122 bp, Homo sapiens
ctctctcaaggtcacagctggtgctcagagttagaacacaggtggattgcgtctggccctcgcccgcgggctgcctggggaggggagagctgttggcggggcggtcacttcagcttcatccc

SEQ ID NO: 435846 - DNA, 122 bp, Homo sapiens
agacccccacatatgaaaaccgaacagcagagtggcctggccgagccgcaggggctaagtcgaacgttgaggaaggcagaggggagaagaggcaagacggcaggaaatgttggaagccttag

SEQ ID NO: 435847 - DNA, 122 bp, Homo sapiens
gagcaacagtttttagaagaaaaaaaaaaagtacttatcaagagtggttgttgctcttcccgctggagtgaccactacctcatcagtcatgaaccttctgataaagagagtatggagaaagc

SEQ ID NO: 435848 - DNA, 122 bp, Homo sapiens
tattctgaattctccttctctcaaagacaatgttcgttctggaagaggaacattctaaaccgcagcaccctgcactttttaaaaggctggaattacaaggacacccccggctctctctgcac

SEQ ID NO: 435849 - DNA, 122 bp, Homo sapiens
cggccgggcggccacccgaagctcccgcgctgggctctcaggccctgggttctacgcctacgtgtgggcatgggtgtgcacttccttgccctgacaagagcacaattaggggagggtgcagg

SEQ ID NO: 435850 - DNA, 122 bp, Homo sapiens
tgctcggtcgcgaccgtcgtggtttgcaacgtcccggcccaggcggcaattccttcccttcgttgttttccactgtctttgctctagagtctaaccgagtgggggcttttctggcatgggca

SEQ ID NO: 435851 - DNA, 122 bp, Homo sapiens
cagcacataagtctctgtgatctgcagcagaaattcttacaacagggcccttagaagtctcgtcctctgatgggctgccagaggcagagtccaaggcatatctctgcaggcagacttttttt

SEQ ID NO: 435852 - DNA, 122 bp, Homo sapiens
agggcacgttgcccaggggctcggcggggggcaggggcgcctgccggggagggggcatgacgcccagctgcatgcagctggggggccccagaggcctccggtccaccagagcccggcagaag

SEQ ID NO: 435853 - DNA, 122 bp, Homo sapiens
gcctcttccctaaccagcctcgagccaaattgggcgggcgaggaggggcggggcctgcgccgggccccacccccagggttctgcccacctggcagccgccttgggatgtgcggagctcagtg

SEQ ID NO: 435854 - DNA, 122 bp, Homo sapiens
gggctcgggacctgcagcccgccatgcctgagcctcccacccactccatgggctcctgtgcggccccagcctccctgacgagcaccaccccctgctccagggcgcccagtcccatcagccac

SEQ ID NO: 435855 - DNA, 122 bp, Homo sapiens
ccttcggagacgtctggaggcctgctttatgcatctctcttggacctcagtttccccacacgtgggaggaggcagctggacgattcctgaaaggactttcccttgcttcctcatcacgtgga

SEQ ID NO: 435856 - DNA, 122 bp, Homo sapiens
ctcctcttcagccgcagggtcgaggtcgagggcagcgggggagtcggggaccgtgcgacgcgcaacgctgggactgggcccacagcagcctccaccccgtctttgccctcccgcaagccacg

SEQ ID NO: 435857 - DNA, 122 bp, Homo sapiens
ggtgacaatggacttagaagtgttacatttcatgtaaattttcacctgagacaaagcatccgtggtcttggcaggtctgaattctaaatgacgaatctttgcttcaagggattgaaagggag

SEQ ID NO: 435858 - DNA, 122 bp, Homo sapiens
tgagcaccaggcacgctgggcaccgagctaagtgtttcccaggcgccatctcgcgccccgcgtccacagtcccacaaggagggctgtgtcaccagccaccttcttccagcctctctgtgctg

SEQ ID NO: 435859 - DNA, 122 bp, Homo sapiens
ccatgtagcgtgagccaggcccaggctggcagagcccactcctggaacccccacggccgtcggacttgggtccctgctccgtgcatctgggtagcccagacctcctggaattcttgaggcag

SEQ ID NO: 435860 - DNA, 122 bp, Homo sapiens
gcccctacctccaacttgggtaaataggccgcggacctcaagtcccagaactccgcgcggcggacttctaagggtattgtgatggagcatggggctctgggaattgtagtagcacagagcta

SEQ ID NO: 435861 - DNA, 122 bp, Homo sapiens
ggttccctcctgctcccgcagctgacacagcccacgaagcccagctcctgggaaagcgtgcgctctcaccctgccggcatcttcggtgggtgtgagtcagtgtgctagggttttcaagtgtg

SEQ ID NO: 435862 - DNA, 122 bp, Homo sapiens
ccatagagagcattttgtaaatgtaagaggatgttgatagtagtcattaaagattcgggtcgggtattagtggcatttggtagacagaacccagagatgctagactttccacaatgtggcag

SEQ ID NO: 435863 - DNA, 122 bp, Homo sapiens
gcccccagttgaccgttccatccttcccactgctccacgggctgctagggaacccattatcgaccggagcggtcttcccaaatcgccaccctacactgcttttctagggaacctaccctatg

SEQ ID NO: 435864 - DNA, 122 bp, Homo sapiens
ctggcgccgtgcagggcgcggcacgcgggggttcggggggatgcccaggcccggtgagctcgctctccgcctgggcacttgggctccgggcccttgggggcggcgtgtgggggggactttgg

SEQ ID NO: 435865 - DNA, 122 bp, Homo sapiens
tgcagagtgactgaatgccaaagcatgtcttgagtttatgcaacttggtgacatttccaccgctaaaactgttactacaaactttatcttggagaactcatgataggtggtgaagttgctcc

SEQ ID NO: 435866 - DNA, 122 bp, Homo sapiens
tgaccagcaggagaatgccgatcagcacgatgcctgccacggtgcccccgacgatggcggcgatgttggggcctgccacacactctagggaagaagcagcacacctgagcgtcagtccagcc

SEQ ID NO: 435867 - DNA, 122 bp, Homo sapiens
acgggtggttcatgggcctccaaagcaggcagcaaataacaacaatcacataactacaaacgtgacgtcacggaagaaaggtacaagaggctatacgctgtgatggccccagggcgggcact

SEQ ID NO: 435868 - DNA, 122 bp, Homo sapiens
gaggagggagggtctcccgagacatgctcctcacacaccctgacacacacagacagctgccgacacagtgacatgctgacagggtgacacacacacctctgtcgctcactctcgcagacatg

SEQ ID NO: 435869 - DNA, 122 bp, Homo sapiens
cgcgcccgcgctggccgctgatagcgggctcacaacgatgacgtagcgaggagcggaaaacgcggtaaccaaggcggccccaggcgcgcacttccgcccggccttccaccggtccaggtctg

SEQ ID NO: 435870 - DNA, 122 bp, Homo sapiens
catttgtgtggctttctgtgtattggcgattgaattcaaactcagaactgctaaggccagcgcccaaggcagccgaccgcagaggcgggtgggcagagtggatgaaaagcaggcgctcgggc

SEQ ID NO: 435871 - DNA, 122 bp, Homo sapiens
tcccactcacatttctgtaaagtttccactgatctaagatgcttccaattacaaagaaaacgatgcttcactaaagtcagcatgttttcaaaataaagatataattatgtgaagcagaaaat

SEQ ID NO: 435872 - DNA, 122 bp, Homo sapiens
tcggtggcggtcgctgcctcgctgtcgtggcgatgtcgtgggctgagaaagggggcacagcgagttggggcagcagtactgctgccaccgctaccaacggctgtgggccagagggcccggtc

SEQ ID NO: 435873 - DNA, 122 bp, Homo sapiens
cagaggccgtagggcagaggcaccggaaggcacaggccgcggcccggggctcgtcggccgcgccctctccggctgcgcactgaccacgcatcgcgcgccttcttggtctccgggcaagcgca

SEQ ID NO: 435874 - DNA, 122 bp, Homo sapiens
accagagcagatgtcttggagagtgcagaagcagctgtaagagtgctcctctcagccgggcgcgatggttcatgtctataatcccagcactgtgggaggccaaggcaggaggatcacgaggt

SEQ ID NO: 435875 - DNA, 122 bp, Homo sapiens
ctcctagcccacttcaaagcctgctttagggtgctcactgtcacacctcagtgaggttagcgagtcagattaatgccaagacactaatgctattgttcttggcaaatggaacagcactaaaa

SEQ ID NO: 435876 - DNA, 122 bp, Homo sapiens
cagcaggttgtggtccaggctcagctggtggaggttgaccatgcgtcgcacggagtcccacggcaggccatggaggttgttgtaggagaggtccagatcctccaatgtcagcaggaagtcct

SEQ ID NO: 435877 - DNA, 122 bp, Homo sapiens
tgcagcagccaggtgtaacagcattgttgtgtgtgtcatcacttccctgaattccacactcggctcccttttcagcctttaaagagcctgtgtgtgtatgcatgtgcgtgtgtgtgtgtgtg

SEQ ID NO: 435878 - DNA, 122 bp, Homo sapiens
ctcctactcttctgtgtgtcctgtgctggccgcaggtgcccacttccctgtccaaggggccgtgaagcactccccatggccactcacagccctgtgctgtggccttccctccactcagggcc

SEQ ID NO: 435879 - DNA, 122 bp, Homo sapiens
gtaacaatttcatagccacctcctgttgctactggagtgagtgcaagtgttgcaagtatccgctttaaatgccatgttacattaattatctccctgtgggcagttcacctctccaggaattt

SEQ ID NO: 435880 - DNA, 122 bp, Homo sapiens
ttgttaaatgccttcccacattctgtacattcgtaaagtctctcatcagtgtgaattttccgatgtctattaaatcagaaacagaagcaaaggccttccaacattgcttacatttataaggt

SEQ ID NO: 435881 - DNA, 122 bp, Homo sapiens
ctttttgggagggcatgatttcagggaacattactcttggccagctcaggggagcatagtcggaaatcttcggttgtattcctgactcagcctgggtgcggagcgagcgcggacaggaaccg

SEQ ID NO: 435882 - DNA, 122 bp, Homo sapiens
agtgccagtgagggagcctccagcagctgccccctgcccagggtgggggtggccggtggccgcgcggtgcctagcacctcctgtgtcgtcggtgtggaggagggaccgtcagcattttcaga

SEQ ID NO: 435883 - DNA, 122 bp, Homo sapiens
ccccagagctgggacagaaggggcagcaatggggcagcaactgagggagaagagagctgacgttagtgcttaggagacgttgcacactttgcagacaggaagtaaaggaaatgggaccccag

SEQ ID NO: 435884 - DNA, 122 bp, Homo sapiens
gctggcctggcccaggtgcagggttgctggcttgaggcctcatagcccagcaccattccacgtggttcagctggccagctgcctgccgggacctggatgcggactgttcccaggtaggcaac

SEQ ID NO: 435885 - DNA, 122 bp, Homo sapiens
acaccaaatctgaaggtttttcctacttatgatgttgccttgtgtgttcatggaacttcccgacacagtgaacataagaacattgcgagcactgacctgagaatgggttttagaatctttgc

SEQ ID NO: 435886 - DNA, 122 bp, Homo sapiens
tttacttcgctagtaacttgaaaattcagttcaggcatcatcacaattcagaatgggaaccgacagcggatgctggaagtcactgccaagactttgttcattccagggcatcagtctacaaa

SEQ ID NO: 435887 - DNA, 122 bp, Homo sapiens
ccctcagcatgtttcttaggcaacagataaagacttctggtgactctgtgttttctggtccggcttggctttctcatggggccagggagggaagctgtagttttctagaatacacacacaca

SEQ ID NO: 435888 - DNA, 122 bp, Homo sapiens
tacaggggtccctggagccatcctgacccctatcatcctgcctccacccatgctgtcccccgactcaccgtggtgagctccccaaggtggttgagggctcccagagcatacagctgctccaa

SEQ ID NO: 435889 - DNA, 122 bp, Homo sapiens
gtcctgggggcagtcacagccacagtgaccattagcaggcacccaggcctgtctttggctcggaaacggtggcccccaatgtagcctagtttgaacctaggaactgcaggaccagagagatt

SEQ ID NO: 435890 - DNA, 122 bp, Homo sapiens
agctcgatctggatggtgggctgctcgtagtgcacggccgccacgaacttggggtgcagccgatagcgctcgcggaagagccgcctcagctcggcgtccaggtctgagtggttgaaggcgcc

SEQ ID NO: 435891 - DNA, 122 bp, Homo sapiens
gggggccagtgaagctgctgtcaggaagctctcacagggcagtaaacagctcctggcacccggaataggaggaggaagtcgagaacccacagccgccctgcccagcctggctcctcctcacc

SEQ ID NO: 435892 - DNA, 122 bp, Homo sapiens
tccacagttattattgataactgtaaataagaagaggaaaaggtagaactaggtcagactcgggccacctagaaaattgtcctgaattgtctgtgagcatactttgtatgatttttattatt

SEQ ID NO: 435893 - DNA, 122 bp, Homo sapiens
ccgcggccaggacctaaggatgcagtacactgctgccaggatcttgtctgtggagcgcagcgcggccaggacctccggctgcagcacaccgctgccaggatcttatcggcagagcgctccgc

SEQ ID NO: 435894 - DNA, 122 bp, Homo sapiens
catacagcttggacacgctggacaaggggatggtttgtgtcctgggtgggaggagcaggacggtctgagagtttatcatcctactcagaacagcgcacagtttaaaacttacggagtgtttg

SEQ ID NO: 435895 - DNA, 122 bp, Homo sapiens
agacagaggacactggtgctcactggctagccaggggggcagcggggcagcaggcagggccggaaggcgtgagaggggcagaggcgctgcaggatccccagtctggagacgtagtttggaac

SEQ ID NO: 435896 - DNA, 122 bp, Homo sapiens
gggggcggccggtgtgtgtgggatcttggagcccctggtggaaggggcagcccgtgtgtccgcgtgtgtgttcgtgcccatgctcgtgtctcctgtgtgtcggtgccatgtgcacacggggg

SEQ ID NO: 435897 - DNA, 122 bp, Homo sapiens
tccacccagctccctgagtaatgtacaatatatatgcaaaacgagcataacagagctttccgagacctgaaggatgtaattttctttggtatacgataagatgatatgtatgtgggggtagg

SEQ ID NO: 435898 - DNA, 122 bp, Homo sapiens
gtgctaatgctcctcacaaggcccagagcacagaactctcaggtcactaccacaggacttcgatttcactgagtttaggtgacctgtgcttcaaagcaagagctaaactctagagctggatt

SEQ ID NO: 435899 - DNA, 122 bp, Homo sapiens
cccctcccctctgtgcccacaggtgtcctccctgggcagcggcagtgaccacgtcatggacgccatctcccagtgcgagcagtacgccaaggagcagggcgcccaggagcgcaacgccccct

SEQ ID NO: 435900 - DNA, 122 bp, Homo sapiens
cgtccctgctccccggccagttagacctggggcccttcaccttgaaagactcaaagaagccgccgcccccactgccattctccatcttgtcctcgtcgccgcccaagcccatcatggactgg

SEQ ID NO: 435901 - DNA, 122 bp, Homo sapiens
cttcctcccgaaagggggacctcccctggggacagacttgacagatcgcgagggtgggttcgcccgagtccgcgactagccggcctccggcctccccggtaggcggccttctgtctccgcag

SEQ ID NO: 435902 - DNA, 122 bp, Homo sapiens
gcacattgaagacttgttagttatgtgagaatatgtctgacatgcttatcatctctcctgcgggtgcctgagtatcagatacttggtttactgtgttgggttgaatgcttctgttctaattt

SEQ ID NO: 435903 - DNA, 122 bp, Homo sapiens
actgggatgcggcagggccccttccccgggatggtgttatgcgtaaagctcagcggcagccgctcctccccatcccagctccaaatcccaatgaccaactgcctgctggtttccccacaggg

SEQ ID NO: 435904 - DNA, 122 bp, Homo sapiens
acgccttcgggtgtgatcttatagcccgggcagctgcatttgaaacagcgcctcagatgacgctcaggcgcactgatgtttgagaagccctatgaggccgtacctcccggagagaatgccac

SEQ ID NO: 435905 - DNA, 122 bp, Homo sapiens
gggcctgaccggggctggccactcggggcttggggagcagggggcgctgctggggacagtcgttgtcggatgaagcccaaggaaccacagggagataatttggtttggacagggctgttcgg

SEQ ID NO: 435906 - DNA, 122 bp, Homo sapiens
cagaagcaggcggaggagacggcggccttcgaggaggtcatgaaggacctgagcctgacgcgggccgcgcgggtaagggggctgcccgcgccgacccttcagggccggcggagggagggagg

SEQ ID NO: 435907 - DNA, 122 bp, Homo sapiens
gggattacagccactgtgcctggtaaggcacttttatttttcatatccccttagccaactcgaagtaaaaccatctctcaaatgtatcttgacaaaacctggcagcaaacaaaaaaatctca

SEQ ID NO: 435908 - DNA, 122 bp, Homo sapiens
gctgattgattgataggctggaaagtctacggcgaaagggaaaagaaaaaaggacacgggcgttcactgacgggattcgtggcttccctcgtgtggccacctcatccaaacacgggccaacg

SEQ ID NO: 435909 - DNA, 122 bp, Homo sapiens
ggaccattgggggtgcatagcgtgtgctggacagaccccgggagaacactgcagatactgcgtgtccaggcgctgtgcatcccgtgggttggccacatggcacgacgcagatccagacaggg

SEQ ID NO: 435910 - DNA, 122 bp, Homo sapiens
atggtcttataaagagcagttcccctgcacaggctctcctgcttgctgtcatgtaagacacgcctttgcttctccttcacctcctgccatgattgtgaggcctccccagccatgtggaactg

SEQ ID NO: 435911 - DNA, 122 bp, Homo sapiens
tagcaaggtctctttttgcctctccaccttttgccatctgaggacatagcaagaaggtaccgtcttggaagaagagagcagcccttaccagactgtgaacctgctgttgccttgatcttgga

SEQ ID NO: 435912 - DNA, 122 bp, Homo sapiens
tggacattttttaaaaatatgtggtacactattactattatatttacgaccttcaacaaacgatctctcctgttatttagtcctttgtatagtcctcctccacatcaatgctggaattggca

SEQ ID NO: 435913 - DNA, 122 bp, Homo sapiens
cacataaagaaacattaaattatggtagtaattataaaaatatgcaattttatccttctccgcttgttataggctctaatttattcatatctagcattctgatggttgagtgtactcttagg

SEQ ID NO: 435914 - DNA, 122 bp, Homo sapiens
ctccaccctattacctgtccgaaggccaccacaaacttgtacttagtgagccttactctacgcagaaaggacacagtgacatgtagtgtaagtgactggcacctttctgagtaaggcactgc

SEQ ID NO: 435915 - DNA, 122 bp, Homo sapiens
agaatgagccctagccttttctgaagcacacacatcttggggttttgtcctctgtattttcgctgcattggctgccaatgcggaaagctttcatggagaagacgttctggcttcttgtctgt

SEQ ID NO: 435916 - DNA, 122 bp, Homo sapiens
acaaaacagagtgcctgtccctgcctaaggagtagtgggtagacggaagggttagtggcccggcctgtaggaatcccagccacctaaaaatccacgagggcctttctgcagctgctgccttc

SEQ ID NO: 435917 - DNA, 122 bp, Homo sapiens
ccgctgggtttacacctaataaaagatgagattactgccttgatgatgatctctctttgtcgaaacagaagggacataaccaaagacaagagaagatttggaagaagtattccaatgagtac

SEQ ID NO: 435918 - DNA, 122 bp, Homo sapiens
aaatctgttatcccccaaaatgataattcgagcctgcaatgtggcacaaacgggacacaccggaaggcagccctagcaaagcaggtcctcagtatagggaagcagcgttctgtctaagtgaa

SEQ ID NO: 435919 - DNA, 122 bp, Homo sapiens
ggctgctgtgcagagaggaggccgagtcggtaagaggcggcggcggctgagccggcaggccgcctggcccccgccgggccgcccgggacgcccccattctggtgtctctctttccggcccgc

SEQ ID NO: 435920 - DNA, 122 bp, Homo sapiens
gagagcttctcgaaggtcttggggtgcagagagcggatctggttgtactgcaggtccagccgtctgagctgccccagacggtggaagtcgaaggccgtgatgttggttatgaagttgccgcc

SEQ ID NO: 435921 - DNA, 122 bp, Homo sapiens
gggcggggaggggcggggcggaccaaagcctgggcggggcggaccaaagcctgggcggggcgggcgggggtcgggcttggagggaccggctaggggcccgggggagtagcagaacgggtgcg

SEQ ID NO: 435922 - DNA, 122 bp, Homo sapiens
acaggtcagactgcggttccgacctgcgggcctcggtgaatatgcgcaagggcacctgggcgcgggcagagccgttcccatccacaaaataagcatgttatgtctacaaccgaagggggtca

SEQ ID NO: 435923 - DNA, 122 bp, Homo sapiens
gaacttgagtcgtccacagcactaggccgccgccagcccgggcgagctgcctagggaccgcggacgccgcagcaagcagctccctgctcccgccacacccgccgagccagccgcgcggaacc

SEQ ID NO: 435924 - DNA, 122 bp, Homo sapiens
cccttgccccttggggccgggctcctctcagacagccaaatcttcatccacagaatgcaccgggcccgccccgcggcctcgcggtcctagggagggcccatatcccagcttctccctgctca

SEQ ID NO: 435925 - DNA, 122 bp, Homo sapiens
agagggactaggtagccaagagagtagggggtctgggacaaaagcatgtcaatatttcaacgatctgtactgtggtgttctggctgaacattcactctgctaagaggattagaagacatcag

SEQ ID NO: 435926 - DNA, 122 bp, Homo sapiens
acaggaaagagggatgtgacacagcaggactcactggagctaacataaggtctctgagtgcgcgtaaccgggcgccaggcagcgccaccagtgaacagcagcgcccgtgcggctcgggcccc

SEQ ID NO: 435927 - DNA, 122 bp, Homo sapiens
ggtgtcgtttctgcatgagcagtgagtgacgaggagaattcgcttgcagcctctccgctacgctctgcctttagagtccctctagccgtggtccctgtgttgccgcttgcccctgggtacct

SEQ ID NO: 435928 - DNA, 122 bp, Homo sapiens
ggaacctccctggaggcggagtttgcctggtagcttgctcgagttttaaagggacagcttcgaagacatttccatctggtatacttcactagttagcaatgcccaggaatgcaatacttgct

SEQ ID NO: 435929 - DNA, 122 bp, Homo sapiens
ccatgcctcgcagctaactggcagctgcgcctgcccggcaccgagccctgcccaggtggacgcttgcgagagcattacggcgatggttatgtaggctgccgttcttcccctcccaagcacct

SEQ ID NO: 435930 - DNA, 122 bp, Homo sapiens
tgtagctaagtctagtgacttactgcctgccatttggtttgaccttcattttgtgactatcgtaccactaaccacagccagtcacctctcatgtatgtgttgttattctcatggcaaacact

SEQ ID NO: 435931 - DNA, 122 bp, Homo sapiens
cgcctctgggtgccttagaccaccgagggtccagagtgggggacctgggaacctttcccccgactctgctctgccgatgttttccgcccacacggcggcagcaccactgtgtcccctgggga

SEQ ID NO: 435932 - DNA, 122 bp, Homo sapiens
ttctggtatcattatctcggttctcagctcttcctggttctcacatgatgacccagcacccgtatgcatacttcatcttattacttccttttattaagcccagagagatactgagtaaagag

SEQ ID NO: 435933 - DNA, 122 bp, Homo sapiens
gactgaacgtacacatactatctcaaattgacatggttacaagaagcaactttatatattcgattcagagccaagcagccagaaaatgttaaataagtcagatattcccactagtaggttcc

SEQ ID NO: 435934 - DNA, 122 bp, Homo sapiens
ggcttggcctctctcttagttattcacagctcagcccgataggcacctctggggcggcgacggcaaagagggtgcgcttattaagtgcagctccacggggactggcctctctgcacggctgt

SEQ ID NO: 435935 - DNA, 122 bp, Homo sapiens
cgtggatggactttgagaatactatgctgagtgaaataagccgtcgcaaacgacaaatcccgtaggattctgctcctgtgaggtccctagaggaggcacgctcatggagccagaaggtacaa

SEQ ID NO: 435936 - DNA, 122 bp, Homo sapiens
ctcaacactggccagtcccggagttcagctgtcctgtgagggagaccagacccttttgaacgccactgggctccccagcatgacagatggagcttggggagctcagccaagaagacaattgg

SEQ ID NO: 435937 - DNA, 122 bp, Homo sapiens
cagctcgcctgggaggggctgtgcacagaagagctggcctcggggctctgtctgctgcctcggcaactgcagctcaggactcctggctttggagaagtcgttgcatggatcggggaccagag

SEQ ID NO: 435938 - DNA, 122 bp, Homo sapiens
tgagctctcaagcctaggagtgaaaacgggtgagaagtttgggcttgttttaggctatgccgagtttaagttcacagtcgagtggatcatagctggcgggtaaggctgaaggtgagatcagg

SEQ ID NO: 435939 - DNA, 122 bp, Homo sapiens
ctcctgcttgtcagtgaattataaatctcgccatgggcaatgacagtttctctgaagctgcgattgaccacaatgcatgggctgagtggtcacttgtgtcttcatttaactagccctttcaa

SEQ ID NO: 435940 - DNA, 122 bp, Homo sapiens
tgggctgtgccaacatttaggaacaccagggcagccatcctggtacagcaaaacagcagtcgcattagaaatatgcttcactttttttaaaagggggtgaaagagaactttgggtcgaattc

SEQ ID NO: 435941 - DNA, 122 bp, Homo sapiens
ctctaggaccaataggcaggccctagtgctgggactcgaacggctattggttggccgagccgtggtgagagatggtgcggtgcctgttcttggccctgcagagagctgtgggcggttgttaa

SEQ ID NO: 435942 - DNA, 122 bp, Homo sapiens
acaacactggatttggcaatgatctattagctacgacacaggtccccaatccccgggccacgaactgataccagtccgtgtcctgttagaaactgggccacacagcaggaagtgagcggcag

SEQ ID NO: 435943 - DNA, 122 bp, Homo sapiens
tacaaacaatacaaatattattagccagagtggtggcccctgtctgaggtcccagctactcgggaggctgaggtgagaggatcacttgagtcccagaggtcgaagcagcagtgagctgtgat

SEQ ID NO: 435944 - DNA, 122 bp, Homo sapiens
cagggcggcgccagcaggccctggtgggcttgggaggaggcaggagactggagacagcctcggctagagcggacacaggcacctggcaagctttccttgaccaaatcaaggttgtccttgtc

SEQ ID NO: 435945 - DNA, 122 bp, Homo sapiens
cactgacttcaaaaacgaagctgcctggaccctcgtggtgagtgctacagttcttaaaggcggcgcgtccgaagtttgttccttccttggtctcactgacatcaagtatgaagccgcagacc

SEQ ID NO: 435946 - DNA, 122 bp, Homo sapiens
ggtgcgccagtggtagccctgtcggctgctttcgacctaccgcccccagcgccccttccgcgtggtccacctgcacagccgggccccggatctgaaatctcggggccctccctgggcctagg

SEQ ID NO: 435947 - DNA, 122 bp, Homo sapiens
tttaacagctggcccggaagtttaagtgaatatgcggcttgggctccaaaagttgctgtacggtattttattttaaagtagaaatctgtccgcttttcacttacggaggccttacagtgtgt

SEQ ID NO: 435948 - DNA, 122 bp, Homo sapiens
ccggggcagtggggaagccatggctgagctttccctgagagtagacactttcatcacatgcggcagaccctccttgagagcggggaggcagagaggtatgagctggggtggctgcagaccta

SEQ ID NO: 435949 - DNA, 122 bp, Homo sapiens
aattttatgtagattataaacccaccaacacggagaccagcgagatgctgctgaatgggacgggaccctgcacctataacaaatcgggctccagggagtgtgaggtatgaaccattgtgata

SEQ ID NO: 435950 - DNA, 122 bp, Homo sapiens
attgcccctggcctctggaacctgtcaggtcagccccacctgtctgcctgtgttgggactcgcctgcccagggaagcggcagtgccaggccctcggtgcacactcctgcctccctctcttcc

SEQ ID NO: 435951 - DNA, 122 bp, Homo sapiens
ttttgtcttcccagaaaagacaataagtaatctcaaactgtcagaacagcatgtcctctacgagggaggctgagggtttatatagagagacgctgagtgatgattggttccttgctccatgc

SEQ ID NO: 435952 - DNA, 122 bp, Homo sapiens
agccattccaagaaggcaaggaaaataagtaacaggtacgaaggatcaggaaggagaaaacggagctcattagacacagatgatgtggctgtgtaagtagatggcccaaagaatctccagat

SEQ ID NO: 435953 - DNA, 122 bp, Homo sapiens
gctggggctgctgagtgggtccctggcctggatctgtcccctcccgtcggcctggccacccgccgaggctcacgaccccgcccctgtgcccacaggcacacggaatgcagtgctgaacacgg

SEQ ID NO: 435954 - DNA, 122 bp, Homo sapiens
cctccagccaagtaagacagcagactctgccggtctgcggggcggggctggggtctttcccggggaaagggtcctgttgagaaaaaggggccttagtatttaagggtgtggcatcgctctta

SEQ ID NO: 435955 - DNA, 122 bp, Homo sapiens
cccggcacagcctcatacgcctcaccctttacacgcacggtcacttgccccgcgcaccctcgaggcctcctagccctgatacacagctaggactctcaggtccgaccagcggtcctggactc

SEQ ID NO: 435956 - DNA, 122 bp, Homo sapiens
tctgctttgctgggactgtccagtgttggcagggaaagtcctgcatccggcacgcaggggcggtggctgcaccagcttagaaccagtctctgattttaggggtgagaaaagtagaggtgggt

SEQ ID NO: 435957 - DNA, 122 bp, Homo sapiens
ccctgcggggtgaggctgccgtttgctgagtgtccggcaggggtctgctcgctgccagcccggcccctcctcagagcagctgccgcagcccgaggtaatctcggccccgcgccggggctggc

SEQ ID NO: 435958 - DNA, 122 bp, Homo sapiens
cgattggagtttttcgagagtttgaagctcttgtgtatttgaacggcgtgagaaacgttccgctgagagagcttcgcacgccctcgccaggccgggccttgcgcagggccgcctttggcgcg

SEQ ID NO: 435959 - DNA, 122 bp, Homo sapiens
tctgctcgttagacatcctgtgaggacttgggttggggccggaattggggggatggcaagcgctgtgtgtgcatgagtgacacttcactaccgccagcagggtcccccgcctccagtgacct

SEQ ID NO: 435960 - DNA, 122 bp, Homo sapiens
gtcggaccccgcgcggtgccctcctcccggcggcgtcccgggccccgaaccccagcggtgcgcagagccctggcccacccgcttctggaacagccgctgacgcaagccccgggggcgcgcgc

SEQ ID NO: 435961 - DNA, 122 bp, Homo sapiens
aaattaagggcagggctaggactgcattccggttctccggatcccgagggagctcccagtcgatgctgggcgaaagcggccgcacgagcccacgtcgccacgccctccgccgcggaagccag

SEQ ID NO: 435962 - DNA, 122 bp, Homo sapiens
acatgccataggagtggcgtgcacatctctctctcttccagcaggaggagcccgtgagcacgcacagctgccctgtctgctcacccgaaggcaccgggctcacctggacctcccaggaaagg

SEQ ID NO: 435963 - DNA, 122 bp, Homo sapiens
aggaaagagacttggctttggccgcggggtcggaggattggggccaggccccctcccccacgcacttttgggggtgtggattatctcatccctgcagggaggtaggagaggtcgccggctgc

SEQ ID NO: 435964 - DNA, 122 bp, Homo sapiens
tctcacagtcgtagccatcaaacagacactcttcagagtcacactgtgggtggcactgcccgtcccggaagagaagccagcaccgagagtgggaggggcagcccttccaggggtctgggact

SEQ ID NO: 435965 - DNA, 122 bp, Homo sapiens
actgcccagatgtcaactcttctttgtccttgtcacctttatttaaaatagtttgtcttacggagcaaagttgatctgttttgattcttctttgtgcagtgtggcaacctacgcaaatttta

SEQ ID NO: 435966 - DNA, 122 bp, Homo sapiens
tgctgatggaggtgttcaccggcaggttgctgaagtgagcattggactccaggaggaactcggcgcccagctccacgaagttgcccttctcgtccctctcgttgatcaggaccgagttgtaa

SEQ ID NO: 435967 - DNA, 122 bp, Homo sapiens
gagattgtgcctctgcattccagcctgggtgatagagtgaaactgtctccaaaaaaaagacgaatatagttgagcagaatgaattggtaatgttttctaaattgactatggaaaattacaag

SEQ ID NO: 435968 - DNA, 122 bp, Homo sapiens
gtttggatctgtgtccctgcccaaatttcatgtcaaattgtaatccccagtgtggaggtgcggcctggtgagattggatcatgagtttttttctaatggtttagcaccatcctcctagtgct

SEQ ID NO: 435969 - DNA, 122 bp, Homo sapiens
cgcgcctccgagaccacctgccccgggagctggcagacaagcgcctcagcaaagtggagacgctccgcgctgccatcgactacatcaagcacctgcaggagctgctggagcgccaggcctgg

SEQ ID NO: 435970 - DNA, 122 bp, Homo sapiens
ctcctcacatccaggcttcccagcagctcctccgggctcacagccgacgccctgcctttgcgttggtgacctttgagcctttcccacgggcccccgcagaaggtttgctaggtggaggtctc

SEQ ID NO: 435971 - DNA, 122 bp, Homo sapiens
ggctgtaggctttattgagcagattgaaaggacaaagcttccacagtgtggaaggggtcccgagcgggtagccagagttagattatgtgactgccttttaaactctttaaggccggaaatac

SEQ ID NO: 435972 - DNA, 122 bp, Homo sapiens
aactagaagactgaattatatcttatagatcagcgaataggtctcatgacttttatctttcgttcacgtgaaaatcttggttgccagtcacctgacatagacttaatgtgaattttgttatg

SEQ ID NO: 435973 - DNA, 122 bp, Homo sapiens
gtcctggagctgtacccagcatgggaagaaagagaccaagggttccctttaacatccctacgacagccacattgccttagtgttcactgtccagagaaagacaacttccgtgaaatgcccga

SEQ ID NO: 435974 - DNA, 122 bp, Homo sapiens
tcgcgtcaggcttctttctcagcaccgagcgagcgacgttcgtgaagctttcgttttgagcggccagactctgctgttctcaagcctgggaggcacagagaagcaagacttccgcatcgggg

SEQ ID NO: 435975 - DNA, 122 bp, Homo sapiens
gacctggggggtgttaattacctaacacttttcaaggggaaaatatttcgtgggagaattcgtctgaaattctgctggaggcaccttggagaaacagctgcgtgtaaatgaagccgcagcca

SEQ ID NO: 435976 - DNA, 122 bp, Homo sapiens
attttcactgaagggggtcggggaaatagatggcttcactaaccttaaattctaaaaggacgtacctgccatcttggctttggtcatgcaagtagtcctggatcagaataacctcaaaatca

SEQ ID NO: 435977 - DNA, 122 bp, Homo sapiens
ggcgctcgcgagcacaagtgacgggactggagcgtggcgcggcaggtggctccacgaaaacgccccttcgcgcaaggctgccccgcgtcctgccgcgccccaggaggcgggacttccgcccc

SEQ ID NO: 435978 - DNA, 122 bp, Homo sapiens
ttccacttcctgccgcgggcctcccgctcgggaccgtccacttcctcagtcctccggccgcggcttgggcagggtcagggctgggaagtgttgcaaaaacttaactgccctcggaacttgca

SEQ ID NO: 435979 - DNA, 122 bp, Homo sapiens
acgtgggtgacgcggcttccagaagctctgtgcacgcctgtgaatgaccaggaaagaccccggtactgatctggggattacgaatacgttttagcaagtaagcggatgtgtctgcatctctg

SEQ ID NO: 435980 - DNA, 122 bp, Homo sapiens
aggagggtgccacttgggagggagtgctcagtgtggatggaggagcaacctggtgcaattcgctgcgttcacatctacagcctgtgcagcaaccccagtggggaattcaaggtgacagtgta

SEQ ID NO: 435981 - DNA, 122 bp, Homo sapiens
ctctcccaacaaggtgtacatattctgcgtagatgctagaccaaccagcttcccagggttcgtcgctgtgaggcgtaagggacatgaattctagggtctcctttctccttatttattcttgt

SEQ ID NO: 435982 - DNA, 122 bp, Homo sapiens
tgatctagtaatgtgtatctttctggttgtatttagaccttcaactcaaatgtcagctcccgttaaggtctatacattgtggtggttttgtgctgtgggtccatttagtgatttccctacct

SEQ ID NO: 435983 - DNA, 122 bp, Homo sapiens
agcacttcccgagtcctgcctcccctcgcccggctcccactctccgctgcagccgctccgcgcttccattaaagaatgcaccttcccaggattcaccttctcggctctgccgcgctgccccc

SEQ ID NO: 435984 - DNA, 122 bp, Homo sapiens
gggggaatttctgttctctgttctaagaccattttacttggggtgtgggggtgggcgcggcggtcagggcagtggaacgcagtcgcggctgcgccatccctgcacttccaggcgcgcgggag

SEQ ID NO: 435985 - DNA, 122 bp, Homo sapiens
tgatggaagctatggttccgccactggtgagctgtgtactctggatacatcaaggaacctcgcctcacccagcccgaagtttctatacaggcacaaaaggcaaaatgagtgaaaagactgaa

SEQ ID NO: 435986 - DNA, 122 bp, Homo sapiens
gatattcagaggaatgaaacctggaaccaaagcctaatttgccgataaaaaaactgttttcggccaggtgcagtggctcatgcctgtaatcccagcacgttgggaggccgaggcgggtggat

SEQ ID NO: 435987 - DNA, 122 bp, Homo sapiens
cccatcaccgaccttcctggggacgggggcgattggaaactgccttggggtatctggacccggcaggggaagctccgccgcctcgggcagagggacggtcccctctgcggactagagagatc

SEQ ID NO: 435988 - DNA, 122 bp, Homo sapiens
gaccggtcagtgaaagtgaaacctgtatctttgcacctctgcatcagctgcttggctccccgcttatgcactgtatatgtctctctcacacctgaatacattctgagggtggacgttttaca

SEQ ID NO: 435989 - DNA, 122 bp, Homo sapiens
aatcatcacaaatagatccagggatgccatatcacgtcctgtagagagtcctcattgcgacgcttgctccacacagcattcattcatatcagctgcaacttgacacccaaggcacgggaaac

SEQ ID NO: 435990 - DNA, 122 bp, Homo sapiens
gggacggcaaaggagcaacctgagctgcgctggccaaggcggctctgcttacccagtccacgatgaggatcttgctcacgctcaacctctgctgcagaagcttggctgccacggccacggag

SEQ ID NO: 435991 - DNA, 122 bp, Homo sapiens
cgcccgcagacgctgcttcagctctccccgcaggctccgcttggcgctgctcaccgctgccgccgccatctcacgcccaagccgagtccagtcccgccctcggcgccctgggcgccctcggg

SEQ ID NO: 435992 - DNA, 122 bp, Homo sapiens
cactcacaccatccgtctgtccgtccgtccagtggctctgccgccctcctgcacgtcccgcgccacctcgaggcccgcaagccctcatgaaagctcccctgacctcaggcctcatcagcaga

SEQ ID NO: 435993 - DNA, 122 bp, Homo sapiens
ccgagccaagggctaccggcgcgaagggcccggcctcctgcaatgcgtggggcagtgatgcgccatgaggaaatgtcacggatcctacgtgacaaaatagtcttgcgaacaattttaagaca

SEQ ID NO: 435994 - DNA, 122 bp, Homo sapiens
gttaccttcaggaggaaagttttgggtttgggtcccctcttcttgggcccatacagctcacgctccctctccctgcggccgaaaaacaccagaggttaaaaagagccccttcccgggcccca

SEQ ID NO: 435995 - DNA, 122 bp, Homo sapiens
gcttcccactcagtgtgctctggtgccactcgtgaattacacgtgtgtcaaatattcatccgctcagctcttatgtgttattccaaggcacaaagaacattatcactttctaactgagccat

SEQ ID NO: 435996 - DNA, 122 bp, Homo sapiens
gaagttgccatgagccgagatcccaccaccgcatccagcctgggcggcagagtgagactccgtgtcaaaaaaaagaagatctcaggcagtgaccctctagatggaagcactgtctgttgtat

SEQ ID NO: 435997 - DNA, 122 bp, Homo sapiens
gagcgggagactgcaggacgccggccctgttggaggtgctgcaggcaggggagatatggacggaggcaccgcagtgggcagagaccggccccgtggcccccaagcagcggtcacttgaggtg

SEQ ID NO: 435998 - DNA, 122 bp, Homo sapiens
catggcaattatatgtgctcggttttcatttttaagggtggagattgttgaaaatggtgtcgtggaccagactccagaattggagattttgtagagatcaaaggtatagtactattaaagta

SEQ ID NO: 435999 - DNA, 122 bp, Homo sapiens
ctgtgcgcatgccaggagtctggcgcagttctaggcgctcgggatgagcagtggacctgacgttcttccctttctttcccttggttctgctgtttcttcgcaggcctcttcccacatcccga

SEQ ID NO: 436000 - DNA, 122 bp, Homo sapiens
ctaagggtggcgggtgtgcggagtgggcgggaaaacgcgaaggaggacaggaggtcaggccggaaggtatacttcggcatttgacagttgacgacaccagcaacaacattgaaatcctatta

SEQ ID NO: 436001 - DNA, 122 bp, Homo sapiens
tgaaacctattgcacactatttgcaactaaaatacagggtgctctttattaccaattatacgagctctgtatggtcaattacttcttttacaagacaattttgatgaatacaataatgttgc

SEQ ID NO: 436002 - DNA, 122 bp, Homo sapiens
gggagaccgcggcggttgaggagctcggagacgcgggagtaggcggcgggcccgggaggccgggagagaacgttggccggagcgcgggcgcgcggcccggggacgaggcgccgagggcgggg

SEQ ID NO: 436003 - DNA, 122 bp, Homo sapiens
tctgcaaaggattggttgttgacttaattgggggcttaggaatggtttcaggagaagcgccgatggggtagaatgtgagttattttctgtggtgctggtatgtccaggttttctcctgtgca

SEQ ID NO: 436004 - DNA, 122 bp, Homo sapiens
ggatcttaagggtcagcttgagcctaggctctcgagtcctgacatcatcctctaccgccacgctttccagctgtcagccttggtctccatctggttccttgagggtgtggcctctgcgtcct

SEQ ID NO: 436005 - DNA, 122 bp, Homo sapiens
gacaaagcatctgccagcagcagggcagggagccctgaacatgggccactccaagcttgccgacagctctctttagtgagattggagatgctccagctggtcacagaaagaggcagccagct

SEQ ID NO: 436006 - DNA, 122 bp, Homo sapiens
ccagcgcgcccccggccgctcctccgcgccgcgctcgtcggccatggcccgggagaacggcgagagcagctcctcctggaaaaagcaagctgaagacatcaagaagatcttcgagttcaaag

SEQ ID NO: 436007 - DNA, 122 bp, Homo sapiens
cagcagtggctgtgcgcgtcctcccctccccctgccccctattcgggacggagcctcctgcgctctgtccctcccgagctgtgcccttgagcccaagggggctagagggtggcagacccaga

SEQ ID NO: 436008 - DNA, 122 bp, Homo sapiens
ggacaatttgctaaggctcttggagaagggcagcccgaggaggctgggcctgccgcccatcgggagcggcagctattttccatcacatcctaaaaagcccagggctctaccgctcctgcagc

SEQ ID NO: 436009 - DNA, 122 bp, Homo sapiens
aggcagagctggagaaaggcggagcgagggagcgcgtgaaaagaaagagatgccgaatgccgggtgattgtctgccgcttgctgtgcattctcattctagggaggatggcataatttataac

SEQ ID NO: 436010 - DNA, 122 bp, Homo sapiens
acataagcttactttttctttgaagtattgaatattaaaaattgcagcctcggctgggcgcggtggctcatgcctgtaatttcacgcctgtaattccagcactttgggaggccgaggcaggt

SEQ ID NO: 436011 - DNA, 122 bp, Homo sapiens
tcgttcgggatgcttgggccgcacaggagcccatggagggggtgggaggctcgggcatggcgggctggcaggtcccgagccctaccccacggaaaggcagctcaggcccggtgagaaatcga

SEQ ID NO: 436012 - DNA, 122 bp, Homo sapiens
aggctcttttcttccaaggttgggagggacagttcattccccaagaggcctctccaggggcggaggcgggtgctggggctggcctgtctgcagctccctggccctacccagtggggatcgcg

SEQ ID NO: 436013 - DNA, 122 bp, Homo sapiens
cggcggcggacacggccggagcggtccggggatttttttttcctattttgattgactgtgcgggaaacacaaaaggtggagcctccagcccaaaaggggggaagagggtgacagcccgcccg

SEQ ID NO: 436014 - DNA, 122 bp, Homo sapiens
tgagagctggtcactttcatgttggagatgaacacttctgccgtgtatgggtgcccctctcggaggactctgaatgagtgtgcgtcaaatcatatgcgcataaaagaaacatggatcatgga

SEQ ID NO: 436015 - DNA, 122 bp, Homo sapiens
ccaaaaaaaaaaaaaaaaaaaaaaaaggaacacgaggggcatagaatgagggagagtaaacgtaaatgggacaccacagacttcaggtctattcggcctggacctgaaaaatactcctcctc

SEQ ID NO: 436016 - DNA, 122 bp, Homo sapiens
ctcctgggtttaagcaattcttctctctcagcctcctgtgttgctgggactacaggcacacgccaccatgcctggctaatttttgtatttttagtagagagggagtttcaccgtaaaggtaa

SEQ ID NO: 436017 - DNA, 122 bp, Homo sapiens
ccaacacacagctctgaaatttccaaacacataaaagtgcccagaccaactgaacccagacgacaatcgttttcccatgttgtgaaaaataattaggtgatttgctgttctcatgagtgcta

SEQ ID NO: 436018 - DNA, 122 bp, Homo sapiens
agctccctcatgtgtaagtgtctaagacttcttgctctcttcttaggcaaaggtgggctccgtattctgtttgttcatagagaagaaacattgtaaattttgtgacacttaacataagatca

SEQ ID NO: 436019 - DNA, 122 bp, Homo sapiens
cgtgcgactccaagtccctcagttctccggccaactggcctaatttgggggttccctccccgcggagtggggtctgcggtgaggatgtggactccgaggaagacagagccctcccttattct

SEQ ID NO: 436020 - DNA, 122 bp, Homo sapiens
tcctgccctgccctgtgccctgatgccagcagccactgcagccctttttgtgctcacccccgacctgtggtgtgacatcacaatgtagtccattcaggatcttgagactgatttgccccatg

SEQ ID NO: 436021 - DNA, 122 bp, Homo sapiens
ccacctctgctcatctgtggcccagatacgagtggagtgcgacaagggataaaccattttcgcgcactcttcagcgatggggcgaaagtaacggacctagtcctcgggagctgtccccgccg

SEQ ID NO: 436022 - DNA, 122 bp, Homo sapiens
cccctcgacccccctgacgcacgcgcgcagtgacgtaagcgcgtatttcgccgttggccccgcccctctgacggactctccctttgacagtgattgagcagcttcctatggatctgcgggac

SEQ ID NO: 436023 - DNA, 122 bp, Homo sapiens
cagtggattcattgccctcggaggttcaaccagttatgagtgagggattggccagaagatcggggcgcaggcaagcaggagtgctctattaggataagcaagtttgacaggaagaagctact

SEQ ID NO: 436024 - DNA, 122 bp, Homo sapiens
gcacggactcttagagggctcctccaccgccctgcgctccccactgtaaatagtcaaggccgcggtatagctgagctaaattgtcctggtaaattgaacggggcagtggaaaattcccctcc

SEQ ID NO: 436025 - DNA, 122 bp, Homo sapiens
ggtaggagggacgggacctgatggatggccgtggcagccaatggagccgcggggcctgcccggcgggcggagattggcgggtacgggcgggctccgaggtcgcgcggggcgcggagcgacgc

SEQ ID NO: 436026 - DNA, 122 bp, Homo sapiens
ccaccaactgattaaggagtgggtggaaaaacagacctgttcttccctgcctgcttagcccggatcaagtcacttagatcgctccttggtattcctgagggacaaactagagatcagttgac

SEQ ID NO: 436027 - DNA, 122 bp, Homo sapiens
gaccctcgcctcaggcggcacgctgacttcttggggtgctcgccggtatggatcctacagcggatgatccaaggtcccccgtgtgcgtgaagtcccggggccatcctgactgagacatgatg

SEQ ID NO: 436028 - DNA, 122 bp, Homo sapiens
ggaaatagaatcatcaatcacgtctttaaccacaaaatctatggaaaacagacccaacagcgggtctcagaggtgatcatgattagtttttgaggattcaggaatcctactgtcttcaaatt

SEQ ID NO: 436029 - DNA, 122 bp, Homo sapiens
aaaatccctagctgtcgtgtttggaaatgttgtagctgcttctcttggttcactcacttgcgaattacctactttcctttagagatgcaacctagacatcacatcctacatgaaaccctttt

SEQ ID NO: 436030 - DNA, 122 bp, Homo sapiens
ctaggtgcctcccaggctgcccagcgtgctcagctggcctgagcgggagaatgcggcccgcgctgcagccaatcagcgtccgcctcaggatccaggggtgaccacgtgcgggagcgttgcgt

SEQ ID NO: 436031 - DNA, 122 bp, Homo sapiens
ggcttagggagctgagagcccagcgctaatgcctaagaaagtcgtgggtggattagaaatcgagggggattagggccagagctggtggctgatgcaggagcggagcccctccctctgaggaa

SEQ ID NO: 436032 - DNA, 122 bp, Homo sapiens
gataggctcctctcaaaataaaataatgtttcaaggcgctactattgtctctgttagacacgtcaagtaggacacgcgtatttcgaaggaaatttcctgagtttctctattaacttagctgg

SEQ ID NO: 436033 - DNA, 122 bp, Homo sapiens
ttctcaacacagcagccagagggatcatctgaaaccacagttcaactgtttttcttgaagcgatggcccatttcattctttttttgtttttgtttttgtttttttgagatggagtctcgttc

SEQ ID NO: 436034 - DNA, 122 bp, Homo sapiens
tagcactaagtattaaaccaaagtaatgcatattctggttttgcttcttcaagaacagcccgtttattctgtttcaatctctctgaacaatactggtaggtaatagttacactgacaattct

SEQ ID NO: 436035 - DNA, 122 bp, Homo sapiens
aggggactttaaaggatgcttttcctaactatgaaagcaatacatcatcactgaagaaagcgaggaaaatacatggagaagaccatccagattctccatatccaaagaaaaccattgtaaat

SEQ ID NO: 436036 - DNA, 122 bp, Homo sapiens
aagtggccctgccctagcggaccgagctcctatcttgccacccacgggctgcgccaagaacgaccacctctcttagcctcggttttcgcttctgtgaaatgggaacagtaacctttgctgga

SEQ ID NO: 436037 - DNA, 122 bp, Homo sapiens
ttcccaggacaaaaacaatgacagacttgtccgagctaccatcgaagtcttgggtctgcacgcaaaggatggaatcccccatctccattcccaaaagtttccctacgggagcctggtgttgt

SEQ ID NO: 436038 - DNA, 122 bp, Homo sapiens
ggagctgatgcctcctgggagaggacagcccacagctggtggcagctggaggaaggtgcccgctggtggtgtcttctgaaaggaagagcgatgacgcccaagctgcctccctcccagcacta

SEQ ID NO: 436039 - DNA, 122 bp, Homo sapiens
ccctgcggactggcacttctcgagggaagtcatcgcagctgccatggagccagcatttgtcggggacctggcacgcaggccaccggctctgggagagggctgaggagccgtggggctcacgt

SEQ ID NO: 436040 - DNA, 122 bp, Homo sapiens
taatttagatgagagtggcctaaatcaggatgtctttgggaaggccctgattgagattagcgaaagggattctggccaaatccctgatcaagttgcttggcacagaattattgattggcaaa

SEQ ID NO: 436041 - DNA, 122 bp, Homo sapiens
tgaccaactgcggggagcatgacacaaccgaatacaaactccgtaccttacaggtctccccgctggacaatgtgagtggcccccacgccctgccccattccgggagtccctccctggacttg

SEQ ID NO: 436042 - DNA, 122 bp, Homo sapiens
aggccctcgtgtgtgcgcagctgacaccctaggcggggctgcgtcgggggcggggacaggcgcgtcccagcccacgcagccggaacgcctgagcgctgggcgcctggtctgccggacctcag

SEQ ID NO: 436043 - DNA, 122 bp, Homo sapiens
tttttcccgctgtctttcttcttttcttctcctctttcttaggcatatttgaatgtattccgcagggtgggtggtggcatgttgttttggtcttttatttatttatttatttgcaaggggga

SEQ ID NO: 436044 - DNA, 122 bp, Homo sapiens
gggttttgttaaataaatttactttaaatggcatgttaagatagcaagtaagagaagtgtcgtgaggcagtacatgattgtcatacgtgtatagtacaaatgctaattaatgttagaattca

SEQ ID NO: 436045 - DNA, 122 bp, Homo sapiens
aggtaggaagtttcactgggaaaaatatatgctcaggctctgaagggtgagctgcgacaacgaggaacccagtatgccggagctagtgggcctgcttgccactgactgagacagtttagggg

SEQ ID NO: 436046 - DNA, 122 bp, Homo sapiens
cccctgtgtgctcatcacctcgctagccatccttgtcttctacctgccatccgactgtggcgagaagatgacgttgtgcatctcagtgctgctggcgctcacggtcttcctgctgctcatct

SEQ ID NO: 436047 - DNA, 122 bp, Homo sapiens
cctccctcatctgtaaaatatgtgttgaagaggaagggggaagcgataataaatctaccacggtaggttactttaagaaccaaaagaagtcacttgagtaactgcaaaagattattcaaaaa

SEQ ID NO: 436048 - DNA, 122 bp, Homo sapiens
agccccatttaagcagtgcctcgggatttgagttgcctgtgaaacgcagcagccttctgccgaggacgcagaaacccccgcctctcatccagggctgacagggcacgggccgcgagccgcgg

SEQ ID NO: 436049 - DNA, 122 bp, Homo sapiens
tgtctaatagtgacaagttctcattacccatctctttctgaaataggctgcaggcaaatgcgttttcattttaaataaccgtgttgttgttccagtcaaggttgcattttacaaggaataag

SEQ ID NO: 436050 - DNA, 122 bp, Homo sapiens
tcttgatcctgttggggctggagcgagtgtggagttaggctcagagaagtggttaatgtacgctttgctcctgatagctgtttctgaacattctatagttatagttctataggtgtaggttc

SEQ ID NO: 436051 - DNA, 122 bp, Homo sapiens
agatgatcaagcacctattgtactcactagattaatcacatcctcacagtaggttattttcgcttgacagatgaagaaactgagacagaagagggtaagtaccttgcccaaagtcatggagc

SEQ ID NO: 436052 - DNA, 122 bp, Homo sapiens
ttatgaggcgggcgggagggacttggggctggggttgtcgcacgctaactggttgctgggcggtgcggaagaggcggaataggtggttactgaagcttctttggagccaagaaacacagggc

SEQ ID NO: 436053 - DNA, 122 bp, Homo sapiens
ctcaaaatactttttggaagacttctgggggagtggcagctagacctggcttatgagccacgcaagaaaaccagtcttgtaaatttatttatagcacagaattggcatggctcaattcattc

SEQ ID NO: 436054 - DNA, 122 bp, Homo sapiens
gaggccccgctcggcgcggctggtccacgccccgcccacgcccctgcccattggcctccccgagacccgctggcagaactttccatactattggctgcgaaacctgccactcatatgcgact

SEQ ID NO: 436055 - DNA, 122 bp, Homo sapiens
cgtcgacttcttccttacattcccacagctccctggccgggacccagccccagccgctgtcgctcgtcaccaagtctttagaatagctttagcgtcgtgaaccccgctgctttgtttatggt

SEQ ID NO: 436056 - DNA, 122 bp, Homo sapiens
ctatcaggttcagagatcacatctgtcagccgatgcttcttgccttaaggtcctgcacggcgatgaccgctcatttaggaaggaattcatggcctgtggataccttagctctgagtcctgcc

SEQ ID NO: 436057 - DNA, 122 bp, Homo sapiens
aaggcaaagacaagctttttttctcgtaggaacacacatcttctggtctggctgtgtttccggaggcatttccagaggacctagcgaggaccaacttccggctgcgacttccgcgtcttccg

SEQ ID NO: 436058 - DNA, 122 bp, Homo sapiens
gccctggcctggtgggagtctctgctcagtctagttctccctgagcccaggagtcaggcccgttgggcagaggggaacatgcctatgtttattcagtcagatggcacttagtgtctggagat

SEQ ID NO: 436059 - DNA, 122 bp, Homo sapiens
gaaaaatctatggactttaaggaattcaacttcccaaatgaaggatgaaggtaaaggctacgaatctgatttttggatagatccaagcgagttaaagcctttaaatttctgaaataaccatc

SEQ ID NO: 436060 - DNA, 122 bp, Homo sapiens
tggcacccgcagtgcccagggctcctggtcagcacggcgctgtcaggcttcaccatcttccgcaccatcagcgtctgaggcgtcccactggctctgatcttgcttcctgcttggaaactgaa

SEQ ID NO: 436061 - DNA, 122 bp, Homo sapiens
gaatacctttgtccaattccataagggcagagttggcatccagttcctgttcgccatagccggcatctgccaggaaagacttagttgagtttgacgccatgacccgaatagttactcgacta

SEQ ID NO: 436062 - DNA, 122 bp, Homo sapiens
cccacctgaaacatggcaccgaatatccaaagagggagaggatggcattcataccaatatcgaagtgtgtgtacacgccccttgtgacatggtttttaatatccaggaggcgggaggatgat

SEQ ID NO: 436063 - DNA, 122 bp, Homo sapiens
gcgtcaggttctctggatctccccttctcccatccttgacgctcatccctgtgttctttgcggtgggcccgtcggccctgctgccatcgatagaagcagcactctccccgtctgatttcgca

SEQ ID NO: 436064 - DNA, 122 bp, Homo sapiens
ttcttgaagtcgcatgtctgaagaggtaaatggggtctctgctttctgcctcagtttcttcgtccattgattgggtgaataaagccttagtttcctcagctaaaaggtgccaagtagcacca

SEQ ID NO: 436065 - DNA, 122 bp, Homo sapiens
cgagcggccccttaccactgcccggggctgggcaaacacggagctggagagggaacggcacgcactgccagggcggccaacgacccggcctcaccagggcaggcaaggcaggagggcagagg

SEQ ID NO: 436066 - DNA, 122 bp, Homo sapiens
tggattcttgcaccaaaaacgacactgtattaattactatggcttcttcgttagtctcgacgcctagtagtagagcaaggccttttttttttattctttgaacttttgccagctgctacttt

SEQ ID NO: 436067 - DNA, 122 bp, Homo sapiens
ggctggctgaaaggcagctgagagatccctacccagggctgactgagcgagcagggagaccgcgcgctaagcatgcgttctcagccctcctccgttccccggggacgcaggggctttttcca

SEQ ID NO: 436068 - DNA, 122 bp, Homo sapiens
tgtgcagctgctccagctgtgacaccagaatcaggtgctccttcaccagggtgcgcatggcggccgccagggcgtggttcacctgcccgtactcgaaggaagacttctcttcaatgaacctg

SEQ ID NO: 436069 - DNA, 122 bp, Homo sapiens
gaccctccagggccctcccaccaatgttccaactacctctcctaggtatcagttttccctcggtaaaatgggacttaggaaagatgaacccggcagcctgccacgtggagtggccacccagc

SEQ ID NO: 436070 - DNA, 122 bp, Homo sapiens
ggggagtaggtatgtcacatggcgaaaacaggaacaagcaagagagagtgagtggggaggcgccacacacttttaaagacgaccagatgtcctgtgaactcattactcactgtctccaaggg

SEQ ID NO: 436071 - DNA, 122 bp, Homo sapiens
cagagaggagggtgatgaactgggggagcgcgcgctgggtgggggggcgcggggcctcgccgcggccttctgatgcggccccgcccccacgagggacgtgaagacgcggaccccgcgcagcg

SEQ ID NO: 436072 - DNA, 122 bp, Homo sapiens
tgtggggcatgaaatcgcatcacagacgcagacgccctgccgggtgggaggaggacccttcgggggtgctgctgatgctcaggagccactgcagctctgggacaccaagtctgtgtccccac

SEQ ID NO: 436073 - DNA, 122 bp, Homo sapiens
agcagatactgggatatttgtgtgtgtggtagtggagttgaggggacattcagggccccacgaacagccaaaataagtttgaaaatgcaagaagctagaggccttggcagtccagccagaag

SEQ ID NO: 436074 - DNA, 122 bp, Homo sapiens
tttttaaaaaaaggaatacagatattgatcacatcaaacattttcattgagaaattgacacggacactaatgaggtttatcatggatggtctcagaagctttcctgtgtatgtgaagcagaa

SEQ ID NO: 436075 - DNA, 122 bp, Homo sapiens
tgctttaaagacagaggaatgcttaagtatttggtacaagaatccatccaaaaaaagacgcggattttttttcaaagataattgtgggaaattctgctaatgatttcttttcccttaaaata

SEQ ID NO: 436076 - DNA, 122 bp, Homo sapiens
agattagacatggccctggaaaaaggtgatgggggacctggaattaccagacagcaattccgttcccccacttagtggaatgggagcacaacatgtaaattaaaggaattagagaaaaacat

SEQ ID NO: 436077 - DNA, 122 bp, Homo sapiens
acagccaacaggtggcaggaccaggactatagcccaggtcctctgatacccagagcattacgtgagccaggtaatgagggactggaaccagggagaccgagcgctttctggaaaagaggagt

SEQ ID NO: 436078 - DNA, 122 bp, Homo sapiens
acacgcttctcagcgcgtcagctcagagaagccagggacttctaagtgtgcggagcagtccggcaagaattggaaggcactagcattgccaagggtggctctaaaggccacccctaactgca

SEQ ID NO: 436079 - DNA, 122 bp, Homo sapiens
tgggcctgcggagggatgacccacacgcccctcccctcgcttccttggcctggtttcacgcgactagagaaagttaaagacccgtgtgactgaagaggagctcacagttcccagcgtctgct

SEQ ID NO: 436080 - DNA, 122 bp, Homo sapiens
ccatcactataattgtatgcaaaaaaaactgcgccgtgttcccctctgttgtgtgcgccgcgtccggggagcctgggccgtgcctccctggcgtatgcaggtcgccggcgcagccgccagct

SEQ ID NO: 436081 - DNA, 122 bp, Homo sapiens
ggggcgcacgcgcgcccgagagaaggcgccgggggaggaagccgcgcggggagaccctggcgtggcccgcgccgcccaggatgactttcctggcaagttctgcagacggtgcccctttcttg

SEQ ID NO: 436082 - DNA, 122 bp, Homo sapiens
atcatcgcctggggggcctttgccaacgtggggtctcttctaacttcagcacttgacatgcggtcaccggtggcagcgcggtgtgttgaagggaaacggtagctattcattcacagttgcca

SEQ ID NO: 436083 - DNA, 122 bp, Homo sapiens
agggcacgtgggtggcttggaagaaccaaaactaagtgttttgggggacagccagagagccgaacacatatggaggaaagatgcggcctggggcccgccagattagaaaggaaatccccctc

SEQ ID NO: 436084 - DNA, 122 bp, Homo sapiens
gcgcgcggggggcgggggcagctctcccaacgcgggggctccgcgagtgagccccgggcgcgctgattggagctcacgctactgaataattcatgagggaagcggagaggggcaccgagtgg

SEQ ID NO: 436085 - DNA, 122 bp, Homo sapiens
cgaggtggggtggggaacaccccaagtgcgtgcgtgctgggggctggggggcacgatctccgttctcccgggtgccccagccctagcgcacgcctccgctcccccgcccccttcgcaggcgc

SEQ ID NO: 436086 - DNA, 122 bp, Homo sapiens
gtgccctgtacagcggagaccccgatcacaattgtgatcacagtcacaagggcttggggccggtgggcagggcacttggctgtgcctgttggttgcaaaggcaccttctggattatcaaggg

SEQ ID NO: 436087 - DNA, 122 bp, Homo sapiens
ataagagaataaaagcagggtgcctcaggtagaagtggcaatctgctcggtcgtcttccacgctgtggatgctttgttctttcactctttgcaataaatgttgctgctgctcactctttggg

SEQ ID NO: 436088 - DNA, 122 bp, Homo sapiens
cgcttcacctgagggacccctgatgccgcttcctcacagaacctgcaggcactggcaccacgacgctctcttagaaaaatgggtcctcagttctcgcgagagcagctgccctggctatccac

SEQ ID NO: 436089 - DNA, 122 bp, Homo sapiens
ttcacgttcccaagcgcaccctgagaggcaggtgcagcagctttccgatggcttctctgccgcccatgtatcccagccccaagaccaacacaggcaatcttcacatctgactttattttttt

SEQ ID NO: 436090 - DNA, 122 bp, Homo sapiens
ttaacagactacagcatagtgcaaacgtaacttttatatgcattaggaaactgaaaaattcgtgtgactcgttttgttgcaatactcgctttattgcgggggtctggaacctaacctgcaat

SEQ ID NO: 436091 - DNA, 122 bp, Homo sapiens
gcaggtgacaaggacatagggaccttgctgtggccacccgccggggtcacagcatgtccacggcaccctgatggaagctttaatcatcaacggtgttggccgccaatggcataatgaccgga

SEQ ID NO: 436092 - DNA, 122 bp, Homo sapiens
tggaaggtgaggggaaaggagacaccgcgtcaagggagagaggagagggcaccgagcgcccgcccctccgacgtggtccgccccggcctcacgacgccccgcctctgccacgcctcttcccc

SEQ ID NO: 436093 - DNA, 122 bp, Homo sapiens
ggaaataccctaatctgtaattgaagaagggacttttggagtcctgccttagaggtgggacggttttgagtgtgatcaggttctggaggtggctctgattctgtgctgctgctctggagtgg

SEQ ID NO: 436094 - DNA, 122 bp, Homo sapiens
ccatgtttttaaaaaaggcaattttccttgtagaatcttattatttaaatcattggaattcgtgcaagtgggaatacaaataacaatggatacaacaaagtattatgatgatgaatttgata

SEQ ID NO: 436095 - DNA, 122 bp, Homo sapiens
cggtgtcggtgtatgggtggacggtgcatgtaccacagagccaaatgtgaaccctacacacgccacccagaaaaacctgggcttttcccaaaaggaagtgaagacagaccgcacgctcacgg

SEQ ID NO: 436096 - DNA, 122 bp, Homo sapiens
ttcatctttggtaaaacaaatagaatcttgtttccaagtagatcaacagttcgtatgtgtcgtggctactgtctctaagaaacttctatttactgaggcctgtcatacgctcatgttttggt

SEQ ID NO: 436097 - DNA, 122 bp, Homo sapiens
ttctcaggctgggctgggctgggaggcccaggtccttgcaggaggagagggcctgaacaccggcccttcaagctccctagtcagtcagtcttgggcaccgggctcctgagggctgacagtgt

SEQ ID NO: 436098 - DNA, 122 bp, Homo sapiens
cagagttaccaaatgggctccttagtcatggcttggggctccacgaccctcctggaagcccggagcctgggtgggatagcgaggctgcgcgcggccggcgccccggggctggtgcgcggcag

SEQ ID NO: 436099 - DNA, 122 bp, Homo sapiens
aagccggtgagaaccgcgcctgaccggagcgggaagggaggaggaggtggggtctctccccggatgcccgtccctggctcacaaccatgcagcatttgtgagccccgcccctctctgagccc

SEQ ID NO: 436100 - DNA, 122 bp, Homo sapiens
aactaaaatttattttctcatggttctggaggctgcaagtttgagatcaggatgctagcacggttggtttctggtgagggctcccttcctggcttgtaaatagccaccttctggccacgtct

SEQ ID NO: 436101 - DNA, 122 bp, Homo sapiens
tgggatgatggcctcacaatgtggcactgcggagacaggacagcctgagtggggcctacacgaggtcagggggctgggacgatggcctcacaatgtggctgcccctgggctgggcactgtgt

SEQ ID NO: 436102 - DNA, 122 bp, Homo sapiens
tctcccctcgtgaacgggattagtgctagtcacagtccgttttgttctgttagtgctagtcgcagtccgttttgttctgttagtgctagtcgcagtccgttttgttctgttagtgctagtcg

SEQ ID NO: 436103 - DNA, 122 bp, Homo sapiens
acatccggtacggcgctgctaggattcccttctgcatccgggctgtgaactcaaggagtccggtgtctgggtatctccggatcgcagcgagagcggctagcagaggttcgcgacccctcccg

SEQ ID NO: 436104 - DNA, 122 bp, Homo sapiens
gccgcgcgtttccaagatacgcaggcgggctcggcgagagagcacgaagtatctgccccacgcaggaacggcaattttcccttgctcgctcctagaaaagccagccaggagctgtgggagga

SEQ ID NO: 436105 - DNA, 122 bp, Homo sapiens
cgggacaagcaggagactggaaggggggaaaaggcaaccgcactcactttggcaaggttccgtcatgttgcctttgggctgtcccgtggactcgtccctcaccccagcttccccgcccagcc

SEQ ID NO: 436106 - DNA, 122 bp, Homo sapiens
ctgtctctactaaaaatacaaaaattagctgtgcgtggtgccacatgcttgtaatcccagcgatttgggaggctgaggagggatcgcttgaacccaggaggcagaggttgcagtgagccaag

SEQ ID NO: 436107 - DNA, 122 bp, Homo sapiens
gtggcgtcttcgcagcggtcattttggctgccctcccggaggtccgttctgtctgtcagccgctttggtacgctgcatcgggatcgaagtgacggaccgtgaaggcgcgagagtcaggtctg

SEQ ID NO: 436108 - DNA, 122 bp, Homo sapiens
ttggctgagtcgtcgccgagctgggccaatcctcttggtggaggaagctcggctgattctcggctcacgcgggaggggagtaaagggtggcggtccgggcctggagttcagtgggtgcagcc

SEQ ID NO: 436109 - DNA, 122 bp, Homo sapiens
gcgtcccccgcggctccctccacgggcactggtgcgaattcataggcgagctgcggactccgccctcagcaaggccgccattaatgtcgttatgattatttttgtggatgttgtttatcatc

SEQ ID NO: 436110 - DNA, 122 bp, Homo sapiens
tggcccggccctccgtggcttttgcttgattagctcatagctccaggggaagccagaccccgggccctggaaggcaagatgggcccccagtcctccctggcaggccagggcagcgtgcagga

SEQ ID NO: 436111 - DNA, 122 bp, Homo sapiens
tcgaagctccgcccacccacgcgaggccccgcccgcccgctcgaagccccgcccacccggcggtcacaccgccttgcgcgctcggcatgacgtcactcccaccaggcacctcgccttgtcag

SEQ ID NO: 436112 - DNA, 122 bp, Homo sapiens
catttgactccatttagtgaaaagtagctttcaacaggggcaggaggagggaggagcaggcgggagaaatgaaatcacagctgagaaatgcccgtgatgggaatgataacggcccctttgaa

SEQ ID NO: 436113 - DNA, 122 bp, Homo sapiens
ggaccctctcagaattcttggaacggaatgagaaggaaaagcagtacacaaagaatatgacgtcatctctttaagggatgaggtgttttatttcttgaaatgcagctgctcttttttacttt

SEQ ID NO: 436114 - DNA, 122 bp, Homo sapiens
tcagggccacgtgactctccctccccaagctgtcacttaggatcaggagtaaatagtccccgaaaaggtttaactccatccacaccagcgacaagctgctaaccatccacgcagcctgcctg

SEQ ID NO: 436115 - DNA, 122 bp, Homo sapiens
gccgggcagctctgcttgtcgcggcaggtgacctgatgggtggcgccgttgcaggtgcagcgcctttggcacaactcgtccgcccacacttcctggcccggagcgagctggagaccctggaa

SEQ ID NO: 436116 - DNA, 122 bp, Homo sapiens
gcccggcaaggtctccttgtcccgccggggccggtgaggctctgggggctttgcccccgccgggcagctggtagagaagagacgtgtttcacctccctgatggtctggaccagtctggaaga

SEQ ID NO: 436117 - DNA, 122 bp, Homo sapiens
cgccaggcccgggtgcggggcggagctaggctgggactggctgggggccgccccgcccggcgcctgggcctccgcgccggcccccggggaggagttatgataatttccttctcattaaggcg

SEQ ID NO: 436118 - DNA, 122 bp, Homo sapiens
tgccctcttcttgctctgtggctgaacttcaattctcttcgggcttagaccccactgactcgctcccgggcaaagcaaacgatttgatcagatggccacgtgcattcttccttttcctgaaa

SEQ ID NO: 436119 - DNA, 122 bp, Homo sapiens
gctgagctggacgggaaatccgagttccggagaaaggtcgtgacttgctccagtcctcgacgctgggaacaggccgagcctggacaagggccccagtcgctggacgcccggctctaaggagc

SEQ ID NO: 436120 - DNA, 122 bp, Homo sapiens
caaactatctttgcaatgcttaaaagaaacactgagatcaggggtcagtaaagtttccatcgagtcccataaagtaaatatttgaggctttatgggccatacagtctgtttagtataagacg

SEQ ID NO: 436121 - DNA, 122 bp, Homo sapiens
cccctccaggatggcgaaggcgagagccaacccaggatcttggaggcccgtgagcaagcgcgcaagggcagcgccggcaatcagcctagacctgcgctctcccgtttcttccgccttgggga

SEQ ID NO: 436122 - DNA, 122 bp, Homo sapiens
cagaagtcaatcctgcctctgattgctctggttacctcaaagacttcttcatccagaatacgggcaccaaagatgatcactccatgggtgtccaatactggacgagcacttcgggggagagg

SEQ ID NO: 436123 - DNA, 122 bp, Homo sapiens
cctgtcttcctgtctctcagtctcatttacccccatggctaggcatagaaattaaaatctcgcctccccaaggtgggaaggtcatggaaaccagaaccccttttccccaaaggcagtcttaa

SEQ ID NO: 436124 - DNA, 122 bp, Homo sapiens
gcccgccgccgggttgggggatgtgccgaagggcgggcctccctgcggaaagcgacgtcacggccgctcctgcagtgtgaatgaatcaaaacgcccgggtgaccgcggcctcccgggcggcc

SEQ ID NO: 436125 - DNA, 122 bp, Homo sapiens
tctttggagacctggacaatactgattctcttagcatgcatttattgaagaactaatgtgcgccaagcactcaagctacagcctttcctctaaaggagctcccagtgtggtgggaaagggcc

SEQ ID NO: 436126 - DNA, 122 bp, Homo sapiens
tgcccttgtaagagacacacagagaaggtgatggtgacatgaaggccaggcagagagtggcgatgcgtcaaggaagtctctcccagagtctccggagggagcactgtcctgctgatgcgttg

SEQ ID NO: 436127 - DNA, 122 bp, Homo sapiens
ggggagagttttagccagagctcggatttgattaagcaccaacgaacccacacgggagaacggcccttcaaatgcccggagtgcgggaagggcttcagagatagttctcattttgtagctca

SEQ ID NO: 436128 - DNA, 122 bp, Homo sapiens
agtggagggggtcgggggtggcccgggtgggagggagctgggaatggcccctggatatgccgtgcccaggtcacttggtgtgacatttcaaacccctgcgacttgttttcttgaaaactggc

SEQ ID NO: 436129 - DNA, 122 bp, Homo sapiens
acaattaagaagacctgttcacgtcagggcttattctcatgtatcacccactccaggtgtcgggttattcccacttattacctgtaccaagagaggtccggccctgcctcctcctgccacct

SEQ ID NO: 436130 - DNA, 122 bp, Homo sapiens
tgtgttggccaggctgctctcaatctcctcatctcagttgatccgcccacctcggcttcccgacctgctgggggaaacttgattttctatagcattatgttactggatatttctgtaaaatt

SEQ ID NO: 436131 - DNA, 122 bp, Homo sapiens
attttctgtctctttgcctgctgtatatgagtaatgagactgtttttcttggtaggttctcgcatactctccaggatgtttgggtttttagagacacctggtcctcagctggggacaatggc

SEQ ID NO: 436132 - DNA, 122 bp, Homo sapiens
accaagcatattttaaaaacagctgggtggagatgcaggtgagccagcattctgggtgtacgtgcaaaccagtgtgtggaaggcggagagtcagctgcacctcctgcagcacctcacatcct

SEQ ID NO: 436133 - DNA, 122 bp, Homo sapiens
agagagaaaaagttgcgattttctcctcgcccaaaaaggggatgctgatggaacaagtgacgtccacagcggagatgtttgtgacccttagcaatgtctgcacgtggaacagcccgtggctg

SEQ ID NO: 436134 - DNA, 122 bp, Homo sapiens
aggtcttgggggtggcatggggaaaggggacttcccagggctcaagaaaacgtggaaaagcgggctacttttaaatcggaaagccttggtgcttcctacaagcaagtaggatggtccccaca

SEQ ID NO: 436135 - DNA, 122 bp, Homo sapiens
acagcatggaagtatggatgggaaggttgagacgattggatactgtatggtaacctcgatcgcagctctcctatgagacttgcttcttggattctgagtcacttaagcttgccccttctctt

SEQ ID NO: 436136 - DNA, 122 bp, Homo sapiens
ggcgggggatgggggatgcctcccagcttcatccgctctccgggttccagacaaccattccggagagccagctgctctcagtgcgggcaggcccaaggccactaactgcacttggcgaccca

SEQ ID NO: 436137 - DNA, 122 bp, Homo sapiens
catagttgagctgcaaggcgcaaaccgatgaggggcgtctgcttttcaccagggcgccgtcgcttttgtcgggaaaccggcagcgtaggcgcgcagaccgggaagcggcaagaagatttggc

SEQ ID NO: 436138 - DNA, 122 bp, Homo sapiens
cagcactcgcgagcagcggcggccccgccggcggccgagttgggagaatgcggcggcgctcgcggatgctgctctgcttcgccttcctgtgggtgctgggcatcgcctactacatgtactcg

SEQ ID NO: 436139 - DNA, 122 bp, Homo sapiens
accacaagtgatccgcctgccttggcctcccaaagtgctgggattacaggcatgagccaccgcgcccagtgtcttatgccttatttgatcctcacgataattacatgaggtaggaagaacta

SEQ ID NO: 436140 - DNA, 122 bp, Homo sapiens
atggcttcccacccgtccccgccgcacacctgggcccctcaaaggctagctgacccgcctcgcctcccgccacctccttgcagaattaattggtccctgcggcgttgcgtggcactttgttc

SEQ ID NO: 436141 - DNA, 122 bp, Homo sapiens
agcgagagtgggtgagtcagagcccccacccccaccccaggaatcctccttcggagggagcggcccactgtggaccaggctgccactcctggaaccttcggaattcaccttgcgctcctctg

SEQ ID NO: 436142 - DNA, 122 bp, Homo sapiens
agtcctcttccacggccgcctctgtttatccgcttgccattggccccggggactgccagtcggctctagggatggactctaacttgaggtctcatcctaacattgcatctattggcagatag

SEQ ID NO: 436143 - DNA, 122 bp, Homo sapiens
agttacatctgcaaagacccttttcctatataaggccacatccacaggttctggggtttacgacatggacatatctttttggaggccaccattcaaccaccgcaattactctcatggtggtc

SEQ ID NO: 436144 - DNA, 122 bp, Homo sapiens
gggctggggagcgggcctgcggctgcccagctgctaaaggacttcctactcgtgcaccgccgccggctccagggcaaaccccacgccatttagaaatgctggaagtttctgtctctccctcc

SEQ ID NO: 436145 - DNA, 122 bp, Homo sapiens
tcgcgtgcaccggaaaaactcacagaagcagcagcggaaatggccccgcgcggcaggaagcgaaggtgacgctacgcgagcgagtgggccccgccctctacgggggcactggcgcggaaact

SEQ ID NO: 436146 - DNA, 122 bp, Homo sapiens
acgtgtaagatttaaatgacaactgaaattagttgtaacaggattccacatctgttttgtcgttgtgtcgcccctttggccaaggtctgagagacggcggaatcaaccagagctaataaccc

SEQ ID NO: 436147 - DNA, 122 bp, Homo sapiens
gctctcctttttcttcttctccttatcctgcggggaaagcagagcgcatgagacctggagcgcggcccgagctccacgccccccggctccagattccgccgcgcgctcaccgccatcttgtc

SEQ ID NO: 436148 - DNA, 122 bp, Homo sapiens
cacagtgcaggctcccacgtgccttcttaggatctaccctggtgctccctatgttgggctcggtgggtggcctactggggcccaggtgagcctgccacctaggttctctctggagtagtttc

SEQ ID NO: 436149 - DNA, 122 bp, Homo sapiens
gcgcaggagaggcaaaaatgtaatagtggtgagtttgatatagattgtgatgacatgccccgtgctgcccccaaaggtctttctatgcagtggggacagtgagagctgaggcagagtggcac

SEQ ID NO: 436150 - DNA, 122 bp, Homo sapiens
aggagtgtagctataagcttgtcacaagtttttgcaaagataaactagccttgttgatttcgcagatctcaccaataaaataactttcaaacacaaggaatactatccatgtgaaatcatta

SEQ ID NO: 436151 - DNA, 122 bp, Homo sapiens
tccacctccaccgccagatcagtttgcccctccgggggttcctcctccaccagccactcccggggcagcacctctggctttcccaccgcctccgtctcaggctgccccggacatgagcaagc

SEQ ID NO: 436152 - DNA, 122 bp, Homo sapiens
tggtggaaaccctggtcaccacactgctcacacgctaagcagaagtaggagcaggtgcgtcgggctttgtggatgcaggtggtcccgctccgcaccacatgcgtggcctcaaaagaagaaag

SEQ ID NO: 436153 - DNA, 122 bp, Homo sapiens
aagttattataaacagtcttattttgtatgtgcttttaattaggtgctttatattcttctcggaaagagtcatgtttctaatagattctttaaaacaacagtgcatgttcatttttaagtac

SEQ ID NO: 436154 - DNA, 122 bp, Homo sapiens
aactacaccgggaagccctctgtattctttgtggtttcccatgttccatgagccagcaaccgggtgttcacttgcagtgactctggtttactcagcccctggggatgcattactgctcggaa

SEQ ID NO: 436155 - DNA, 122 bp, Homo sapiens
cctccccagggcctgaccatctcctgtcccacaggcccgagtgccaggcatggacggggacgctgctgctgggcacatgccttctgtactgcgcccgctccagcatgcccatctgcaccgtc

SEQ ID NO: 436156 - DNA, 122 bp, Homo sapiens
aagtggtagctgtgctactgcaagagtgcaagcaagtgctggatcagctcttgttggaagcgccagatgtgtcggaagaggacaagagcgaggaccagcgctgcagaggtgaggttctgatg

SEQ ID NO: 436157 - DNA, 122 bp, Homo sapiens
atacaaaactagtctgctaaaaaaaaatcattagatgtccaccttgagaccgtggaataacgtctgctgaaccagtgaggcgcctccctgtcagttttagatccgccctttgactagggagc

SEQ ID NO: 436158 - DNA, 122 bp, Homo sapiens
gggcgaagtcccgggccggcccactgagatccaaggtatcagtgtctcgtaggcgctgcacgaactcctcggcagaggtgcagcgctgtgcggtaccgatcagaaactgggcgacgtgccgc

SEQ ID NO: 436159 - DNA, 122 bp, Homo sapiens
gccacacagtgctcatcccagctggagaaccaggggttcagacgcctccggaatggagaacgggcgtacaggagcctccgcatcaggagctgggccgggggctgtggcagcgtttgaccccc

SEQ ID NO: 436160 - DNA, 122 bp, Homo sapiens
gtcagggtgggccctaaattctgcttggcgtctgtgtagaaggggaaatgtgggcacagacgtgatgcaaggaggacaaggtgacgcttccacaagccaaggaacctggaggatactggcca

SEQ ID NO: 436161 - DNA, 122 bp, Homo sapiens
caaagtcaaggagcatccggtcgggttctaggcgcccgctgcttgggtttaaatcacccgcgcttcgctgcacgcgatgggccctgagccctgcccagtgcaaggctcattcccgcccaaca

SEQ ID NO: 436162 - DNA, 122 bp, Homo sapiens
cacaacctgtaccgggaataccgggacctgacccccgtgggcgctgtcacccagtgctaccgaaacacgggcgcccagcaccgtgccctggcccaatccatccagatcatgaaggtggagga

SEQ ID NO: 436163 - DNA, 122 bp, Homo sapiens
ccagctgcagggacaggagcagcagggagcccagcaggaacttccctacggccattgtgacgggcaggtcctgagagtgggagctgtgccccaaatttatgccctgcctgggctgggagcta

SEQ ID NO: 436164 - DNA, 122 bp, Homo sapiens
atactaaatcaccaaagtagtgcatctgcagagagcagaatgcttctagaatattgccatcgttacaacaactattattatctcaatagatgtgtatagaaaacaccatgcttggcacatgt

SEQ ID NO: 436165 - DNA, 122 bp, Homo sapiens
tcacgggggacaccatcgccctgaacatcatcaagggcaatgaggagggctactttggcacgcgcaggctcaatgcctacacgggtgtggtctacctgcagcgggccgtgctggagccccgg

SEQ ID NO: 436166 - DNA, 122 bp, Homo sapiens
tagacgtggtaaaatcaagggctttccatcagcttcctagctgtccatcacccagtgccacgtctcccccagcaatgggatcacttgccatttatacagtctgcccccctacaaagtcatcg

SEQ ID NO: 436167 - DNA, 122 bp, Homo sapiens
ttcctgcctctcatccaaccttacaaggggcaaaagtcttgtccccgcagtctttattgccgactcagcccaagcggcagagcaaggaaagtttcgccagcccccgtccccacagccccaag

SEQ ID NO: 436168 - DNA, 122 bp, Homo sapiens
aactagaggtgtgttttgcgggcagggggctttcagcaccttttgatctctcaaggccaccgcgactgattgacggttcccagtactttcctatgctatcccccatactccaacacccatcc

SEQ ID NO: 436169 - DNA, 122 bp, Homo sapiens
ttgtcctcatagtcaaagcggtccccaaagacaatggagctgatgacattggaggtggtacggcttaggaagaaggtgggatagatgctggagcttgcgggtgtggcggtgtattgggggag

SEQ ID NO: 436170 - DNA, 122 bp, Homo sapiens
gggggagggagcgcctggaggagcttagagaccccagccgggcgtgatctcaccatggtgcgttttggctgctactttctttttcagtctttcggtgcggagaaggggaggaggcgggcaga

SEQ ID NO: 436171 - DNA, 122 bp, Homo sapiens
ttgtcgctgaggccggaagagccggagccgggtccctgtccccgggccgggcgccgccgccgccccctgcccagcgcccgcgtctccgcggcgccaccccagcgccaatattccggagatca

SEQ ID NO: 436172 - DNA, 122 bp, Homo sapiens
ttacaatgtgatctgctcttcctcagaccactaatatagaatccaaacaggtgaaaaatacgtcactccttagaatacaacaatgatctgataaggatttgacttagtggaaggaaaaaaaa

SEQ ID NO: 436173 - DNA, 122 bp, Homo sapiens
aattcccggccgctgcaaggggtgagtggctctcccacaggctgcggcgatttccgaacacgggaggggccctgggatgccgctgacaccgggggctcggaacctcgtgtgtgcgactgccc

SEQ ID NO: 436174 - DNA, 122 bp, Homo sapiens
cagacctcaccatggcagcctcagggtgcagacaacacatgggggctcagagagggtccgcgttggtcaaggtcacgcagccagcctgggacacacacatcgccctcaggccaccaccaacc

SEQ ID NO: 436175 - DNA, 122 bp, Homo sapiens
cccagcacccattgatcacacacaaagctccattgtggccaggatagcctcataaaagaccgaaagcctagcagctgcctgccaaaacccagccaggcttcacaagaagtgatttgtgctgt

SEQ ID NO: 436176 - DNA, 122 bp, Homo sapiens
ggcggcgcccatcagggagacttggaccgcaagggagcccacgggtgggagggtcgggggcgggctggggcatggcgaactgcaggtcccgtgccctgccccatgaggaggcggctgaggcc

SEQ ID NO: 436177 - DNA, 122 bp, Homo sapiens
gtgttagaaaattccaaacaatggccgggactcccagtaatttaaatataatggcctatgcgggttcttaagcagaggaattagttaacagagttagaacaaaggagagcattatcacaaag

SEQ ID NO: 436178 - DNA, 122 bp, Homo sapiens
gaaatacgtgaatagcaaaaggaccaggggacattttgagaggagtcagtgggccagagacggcaaaaagttattgctgaggtcctaagcacagtcggtgttacgatctcagatgtgagacg

SEQ ID NO: 436179 - DNA, 122 bp, Homo sapiens
ggtcactgggaggcaacagtgtggtctcagggtgctgggcgggcccgtgaggcccatcgccgtccccctaggcatcctgttcatctgtgagcagggcagggggtgccgcagcctcctcggtt

SEQ ID NO: 436180 - DNA, 122 bp, Homo sapiens
gggcgagggcgggggcgggggttcggggacggggccgggcctggcagctcgctggggccccgtctcggcaaaaactctgaggtggaagaggaccttggatccggggacagtgcggggactgt

SEQ ID NO: 436181 - DNA, 122 bp, Homo sapiens
acacactcgccagcctgtgctttgccacctgagcgccgctccctctcaggatgaaggtgacggtggtgagtacccagaccccatgcagagaggctctgctgactgctctcctggtggccagc

SEQ ID NO: 436182 - DNA, 122 bp, Homo sapiens
cacattcgttggcgctggcggtggaggtggggagaagtgtgtaccaagcaagagtcagctcggagcaaacaccaggggacaggcccagtcgctggtcctggacaagtaaaactttcccatca

SEQ ID NO: 436183 - DNA, 122 bp, Homo sapiens
cactccaagatgctgaaagtgggacccctgctcctgtaggtacaggaggcctctgcaccccgcttggcccaagctaaccctgccctcccagaccaggcctggccagaccctcccgccccggg

SEQ ID NO: 436184 - DNA, 122 bp, Homo sapiens
ggatcttccgtaaaatttgcaaacttgaggccaacccaaatcaaacaccattcatgtctacgcatttgttgtaagatctaagatcctaggacattaatttgtaaaccttgaagttatacttc

SEQ ID NO: 436185 - DNA, 122 bp, Homo sapiens
ggctcttcaatggctccgtgctcaatgagaccagcttcatcttcactgagttcctggagccggcagccaatgagaccgtgcggcacgggtgtctgcgcctcaaccagcccacccacgtcaac

SEQ ID NO: 436186 - DNA, 122 bp, Homo sapiens
attctgtgtccctctgagtgctgcaactactctcagggttttactgtagtggttttacctcgcctattggttgacccatctacctgtctcatttgagttgagtgtgaattgtttaggatatt

SEQ ID NO: 436187 - DNA, 122 bp, Homo sapiens
cagacaggaagaaagaggtttccttgcacatttggggcaggtggggcagaggatcagaaacgaggcctgaagactccaagtgacaatgacaaagaagctgagtcaacctaaataatctgggg

SEQ ID NO: 436188 - DNA, 122 bp, Homo sapiens
cagccgggcctcgggagaaagccggaagcccgagagggtgtgggcgctccgggagccaaacgcggccgctcagccgccacgcgccggtggccccgcggggactcgcgttccggtgagagagc

SEQ ID NO: 436189 - DNA, 122 bp, Homo sapiens
cgcctcatccccaactttccttcttggagtcgtctcaaggatgcctttctctcctccctacgtatttcttattttatatcctggccctagttattctacatatgcattaacccctaatgatg

SEQ ID NO: 436190 - DNA, 122 bp, Homo sapiens
catacctcacccaaaggaagactctatcgtaggcagggcaccactcccccacccgccccacgcgacaaactcggaagatcaggattgaagagcaagctcagatggagcaacaggcccagaga

SEQ ID NO: 436191 - DNA, 122 bp, Homo sapiens
gggagcctccagtcgggaacagctgaacaggtagctctgaaagaggaccttggtcataaacgcatagataagattatcccgaggttctcgcccacatgcttccttaccacaggtgggagggc

SEQ ID NO: 436192 - DNA, 122 bp, Homo sapiens
aggggaaccgtcgtggggaaggatggtgtgcgaaaaatgtgagttaaggggccgcttctgcgggaggaggaggctgggagaacctaactgagctctcccgggaactttgctttctcgttgtt

SEQ ID NO: 436193 - DNA, 122 bp, Homo sapiens
ggccggaatgctggtgtgggcccactccgtggccgagggcgccctcgctgccctggcacacgagcttgtgcttcttccagtcctgacgctggtgctccttgcagcagtagaaggagctgcgg

SEQ ID NO: 436194 - DNA, 122 bp, Homo sapiens
ttctctcggccggtcccggtgatccctcccacccccggtccctccactcccacctcgggccgtcccggtcccgtcccaccccggagtgccctcaggacacccctcggacggcccctcactcg

SEQ ID NO: 436195 - DNA, 122 bp, Homo sapiens
cacaggccagaattttcaagagacgtatttttaggcaggtccaagatgtttctccaaaaacgaagtggctttgcattgttttattagtaagagtcaacatttccgaattcaggcacttcgct

SEQ ID NO: 436196 - DNA, 122 bp, Homo sapiens
cctttgccgctcgccctcacagggcgagggagcctttgcttaaatccttttctttccccccggcccccaagagaagggaaggagatccacggtagctcacacacagaagctattacgagata

SEQ ID NO: 436197 - DNA, 122 bp, Homo sapiens
ccagagctgtggctgaccccagtgtggatgccagagctgttgctctgagtaacctggggccgggtatcaccagttgagcctgggaaattcctctagcttcaggaagcccagccctgggcatc

SEQ ID NO: 436198 - DNA, 122 bp, Homo sapiens
attctgggaggtccccggcgcccacttcattcacccctctcgttgcagccagaatagggtcgcgccacgctctaacgttgagcccaggcccttcgcggcaagaccctgctccgggcccactc

SEQ ID NO: 436199 - DNA, 122 bp, Homo sapiens
ccgggccgcttaagtgtgcgctgttggtcccgccccgccccgccccgccccgccccgccccgctcggtcccagaggcctcaccctatattcctgacaaatgccagacaagggcttagacttc

SEQ ID NO: 436200 - DNA, 122 bp, Homo sapiens
ggaaacccgggtatcttcgtagggtgcgtctaatccagagctgagttgcgggtgattgaacggagagctggggcgttggtttgtcttcccgcccctgctgcgaatagaccgtggctgcttag

SEQ ID NO: 436201 - DNA, 122 bp, Homo sapiens
agggtcgcagatgaggggatcgtgctgcttctttcagcctgagcatcgctgactattctgcgctgggcagttaaggctgcacggcccgaccacggttaaccttgcacacctcctctccccac

SEQ ID NO: 436202 - DNA, 122 bp, Homo sapiens
tccatccctcagtttcctccaattccggaagaaggctatgattatccacccacagggagacgaaatggacaaagtggcatctgcataactttcaagtacaaccagtatgaggcaataggtaa

SEQ ID NO: 436203 - DNA, 122 bp, Homo sapiens
cagaggcctgacactgatcacaccttttagttgaaatgcgctttcatctccatctgctgccgcagccgccgcccggcaccccctcgctctggtctcgggattgaaggccagccctctcctct

SEQ ID NO: 436204 - DNA, 122 bp, Homo sapiens
tcctggaggtcgttggtgtgtttggggcttctgaggaattccatgggggtgggggagccccgggaaggctgagtgaacgagatagttcagctctgagcttgaagagctcagactggccccag

SEQ ID NO: 436205 - DNA, 122 bp, Homo sapiens
cacacacacacacacgctcttttttctctccctcaactttgcgctctgctgctgggaagtcgatcgagtgttgcattctcaagacagatcaaatctaaactattggtccgagcagagaaagc

SEQ ID NO: 436206 - DNA, 122 bp, Homo sapiens
cctgttgactgcgtccgcgcgccgtcgttgccagcagtgtcccggcggcagagcgggctccgggctcgctggacaggaggttctatgaagacactggcctaaccttcactaccggtccctgc

SEQ ID NO: 436207 - DNA, 122 bp, Homo sapiens
aagaccctgctccaaagaaaaaaagaaaaagaaacacccgcgccccgccccccccgtttacgtgcacaagaagcccatatgcagttaagtgtgaggtttattttgtggcattccgaaatgcc

SEQ ID NO: 436208 - DNA, 122 bp, Homo sapiens
gcccggttcctgggacccgactcggagggaagtcctcttcggaacctccacagtgccgcacgggtggagaagggttcttgtttggcctccaggtccccaacttcccaccccatcctctcccc

SEQ ID NO: 436209 - DNA, 122 bp, Homo sapiens
gtctcctctctggggcgaccaaacgatacgtcgatgccggaaccgacccgacgccggagccgtcggctccgtccttaccgttgctctccaggtacacgcccccgtcaaaggcggctctgcgg

SEQ ID NO: 436210 - DNA, 122 bp, Homo sapiens
tcacgtgcgagggtagggtacggggccgggccagggtgcgggctggtgggctcagccgggcggccagccgggtgtggggcccgtggccagcccctgcggtgcccccccaggcgcggtggcgg

SEQ ID NO: 436211 - DNA, 122 bp, Homo sapiens
agtagtgaaaagaagatcaaaacaactcaccccgcccttcccagagcctggccaagggcgcgccccaccagcgccagccccgacgggtccaagccaccagcggcggaagcacgcgggaggag

SEQ ID NO: 436212 - DNA, 122 bp, Homo sapiens
caagagcagccacagtgcttagcgtctgttgattgaaaacaatgccatgacaaaagccaacggggctgttcactgatttccagctttattctaagaacactgatggacgtatgaaaactgct

SEQ ID NO: 436213 - DNA, 122 bp, Homo sapiens
gcacatcccaggtggtgaggatgcagtcccggtgaagggagtggggatcctgggatgatacgatgaatggaaggaaactaacaggaaaggcatctgggaccaggttctagttttggctttgc

SEQ ID NO: 436214 - DNA, 122 bp, Homo sapiens
ggggctggcggggcggagaaggttggggtgaagcagagcgccccgacctgtttgccgtgccgcgcccgctaccctggacacccaaatccggagcagaggggagcaaaccctcgctcctcgca

SEQ ID NO: 436215 - DNA, 122 bp, Homo sapiens
caaaaacatactttgtatttaggatgaatttgaaaagtctggccgagagcttgaacccaccgaaagttcaagaaataaatgttaatctctgaatgtggccttgggtcagtaactgtaaaatc

SEQ ID NO: 436216 - DNA, 122 bp, Homo sapiens
attcggtcgggaaggggacagggcctagagcccggggctagaaggcaggacacctggcttcggtctgggctcggcctttgactacgacgtgaccttgaggacggttccttcccttcgtgggg

SEQ ID NO: 436217 - DNA, 122 bp, Homo sapiens
tccaccctggagcttactgcaggaatgagtaagggagtcattttcctgcatcttttttcacgttggagcacgttttggagcttgatgagtcttcagtgacatttaacagtggggcgggacag

SEQ ID NO: 436218 - DNA, 122 bp, Homo sapiens
gaggctccaccccagaaactatttcattggcgccacctctagcccacacttcccctcttccgcatgcgcacaaggagcagaagccgaccagctcgtcacgtcgccttccccgcccctaaatt

SEQ ID NO: 436219 - DNA, 122 bp, Homo sapiens
aggctgagaccagggctggggaggaggttcagcccctgtggactttatcctccctctccacggctgagtcttgatttacagctggaagggcagacggaggcatcttggtgtatacacagccc

SEQ ID NO: 436220 - DNA, 122 bp, Homo sapiens
ggcaacaagtacgtggttttctacctggacctctccttcatcttcctcctagaactgaagcgctgcggcatggcgcgcgcctgcctccaggccgtcaagtacctcatgttcgccttcaacct

SEQ ID NO: 436221 - DNA, 122 bp, Homo sapiens
tgcccttcaagcagttgacgagcgactttccccttacatcaagtgcacagtaagcccaagcgccggggccgcggggattcccgccagtcactcccgccactaccgccacccggccccgccgc

SEQ ID NO: 436222 - DNA, 122 bp, Homo sapiens
ataaccaagagaggttcccaggagtctcttcctccagctgagaatattggtggtgcctggcgtgttgctggttcacctagttgaagtggccagaagcctcggtcctgcaaaatttatgcatt

SEQ ID NO: 436223 - DNA, 122 bp, Homo sapiens
gccggaagccgcgggagccgcgggacccgcagagagtgcccgcctgtgttggggcagcagcgcctggaaggaggcggccccggccgcccgcagagctccgcctcccaggccgcgctctgtgt

SEQ ID NO: 436224 - DNA, 122 bp, Homo sapiens
ttcgcccggggctgggagggcggcgagtcgggcgcacgcgcaccccctgcccgcccctggcgcccctccccgcgggcggtgcagctacccctgcagcgcctcccctagctagaagggagcgg

SEQ ID NO: 436225 - DNA, 122 bp, Homo sapiens
gagtgtccagggaagatgtgggagtcaggtgaatagttcccatcgccagtaaccccagagcgcctccccctgcgttgtttccttttaatgttagatccgccgcctgggtgcccatacttagc

SEQ ID NO: 436226 - DNA, 122 bp, Homo sapiens
gggactctgcgttttaaaatgggttccaaagcggcgcgctctgtcggcccagcgggcttgcggcaccagaggtggtctgcagccgcgcaaggattcccacggtcgttctgggctggtgcaga

SEQ ID NO: 436227 - DNA, 122 bp, Homo sapiens
tgtgtttcagaagcagcccccgccccccaacacacacacacacacacgcacacacacacacgcacgcagtctcccagccatacaagggccaacagctacaaatagttacagacttacagaac

SEQ ID NO: 436228 - DNA, 122 bp, Homo sapiens
taaacagaatacaagttcagagaggttaagcaatttgctcaatgtcaaatggctatcaagcggcagagtgtggactctagagcccaggactctctcagccaccttgtcatacttttttttaa

SEQ ID NO: 436229 - DNA, 122 bp, Homo sapiens
gcgcaaagcctctagcgtctcgccgctccgccctcctggccggagtagcgcgcagtcttccgtggaaactctgacaacactggcgaccggccatttccggaaatcaaaggacagccccagca

SEQ ID NO: 436230 - DNA, 122 bp, Homo sapiens
cagaggacagcccagcccagccacaggtgaggcggcctgatggcctggggcaaaggccctcggtccagtctcttccccgtccaccccaagtctgacttctctcaggagggactcatgaacac

SEQ ID NO: 436231 - DNA, 122 bp, Homo sapiens
caagatgggaaaaataagggatcagaagatctcatacaaagtgaaatacagggttactaacgaagaaatatttcaaaggagtaattatgagaatgatcaaaaaggccaaacccctgaataag

SEQ ID NO: 436232 - DNA, 122 bp, Homo sapiens
agaattgcgcagtggagttcaacttcggacagagagcagagccctactgttctgtcctcccggggtttaccttcatccagcaccttccccttagtgagcgtatccggggcaccgttggacca

SEQ ID NO: 436233 - DNA, 122 bp, Homo sapiens
gaaagagactgagattcccgtgacatactacattctgattcttcaagaaaatcctgacaccgggaatctctgagcagtcaggacagcctggtcccacagtactctgccccttgaggttactt

SEQ ID NO: 436234 - DNA, 122 bp, Homo sapiens
tgccaagttgccctgagctggctgagcagagaggagaaaaaggccacattgggagcaagccgcactttcattcatggcagcacagaggctgttcgtgttttcatgagccaaaaggtattcac

SEQ ID NO: 436235 - DNA, 122 bp, Homo sapiens
ctgccagccctcctgccgctcatacggtgtcgtcagcagttttgtcaggtgcccccgccacgtcactatggcctctgccagccagcctggacccctgagaggcaggagttacaggctgaagg

SEQ ID NO: 436236 - DNA, 122 bp, Homo sapiens
tatttagcagtttgccaccaagcaaaaataaaaattatcccctgcccccgaccccaaccacggggttgttggtgtcaggcctcaccttgggtcagcccaggccaagtcaatgtttcagactg

SEQ ID NO: 436237 - DNA, 122 bp, Homo sapiens
ttctgttctgcttgacttcctaggatctggaatctggtcagcaatcaggaatcccttcatcgtgacccccgcatgggcaaaggcttccctggaatctcccacactgtctgctccctataaaa

SEQ ID NO: 436238 - DNA, 122 bp, Homo sapiens
aagaaaaggcccccaaaactacaaataatctaacctctaccaccagagcatcttccaagtcgactgccgcggtgtctcaccaactcgaaaatgacgaggcctcgcagtggctgcccagggcg

SEQ ID NO: 436239 - DNA, 122 bp, Homo sapiens
gcgacagccgtgggaaggtgcagtacgcatccttccgggattccctggagatgcctccagcgcgtgtgtttcagcagcccgttcctctctgtgccgagccatccaggctgtggtgtggatgt

SEQ ID NO: 436240 - DNA, 122 bp, Homo sapiens
cggggagcctctgcgcatcatgcgcttcggggtgcatctacggtatgtcacacagccacccgcaccgagagtctttccaaacctccgtgtgtgcaatatgcaacaacgtgcgcgtgcggagc

SEQ ID NO: 436241 - DNA, 122 bp, Homo sapiens
agctatctgcccgcctcggcctcccagagtgccgagattacaggcgtgagccaccgcgcccggcctacccttgaagaccccgcagccaaggtcctccggccccgctctgcgcggcgctctgg

SEQ ID NO: 436242 - DNA, 122 bp, Homo sapiens
caggcatgagccactgcgcccggccatttgtgtgtgtttgagcaattctctgtgtgtgtgcgtgagcatttctgtgtgtgtctgtgtgtgtatctgcatgtttgagcatttgtgtctgtgtg

SEQ ID NO: 436243 - DNA, 122 bp, Homo sapiens
taagctgtccccagggacagttcaaatttgaattcccaaggagttgaggcaaggcagactcggataatgccccatccctacaggctcacctccatttgaagccatcccctcaggctgggcac

SEQ ID NO: 436244 - DNA, 122 bp, Homo sapiens
gaagtggagacaggtgctgcagatctcacggccgcgtctcaggagctggtgcccggtgcacgttcagtgggggatgctccgcagtgcaggctcgcgcccgggttgacacgcagacctcttga

SEQ ID NO: 436245 - DNA, 122 bp, Homo sapiens
tgacaaagactatttccttaattactgtacagagataatagcatttattctggcagttcccgtgttattcaatcaggcaagatccaatacaaaaaaaagctgatttgccaaaagggagatta

SEQ ID NO: 436246 - DNA, 122 bp, Homo sapiens
gggtcgtggagtggggtggaaggacttcgcagccgctaaagattgggtgggtaggcttcacgggcggtgggagggaccccggggaggcttctgccggttgctacccgagtacaaacggcagc

SEQ ID NO: 436247 - DNA, 122 bp, Homo sapiens
cgctccgcggaatagctgaagacctcgctggcctgcggctcagtggcctccccggcgattcgagaacagctctgggggtcctcgctaagtgtatgccattcccaatcccttatgtacgccag

SEQ ID NO: 436248 - DNA, 122 bp, Homo sapiens
ccatgtgggcatgtgagtgcagcccccgcggctctgcagatagttgaatttgaagaggaacgagagaaaaccagtctgcaaaggtgatgtccccatctccaacagaggaaagaggatgcagt

SEQ ID NO: 436249 - DNA, 122 bp, Homo sapiens
cgatgggcgcactggcctctgcctcggcgccttcctccaccctggtagcctggcagcctccgcctgaccttgaccaacctccagtccctgcagtgctaggtccaatctgttggcgttgacgc

SEQ ID NO: 436250 - DNA, 122 bp, Homo sapiens
ctggccccggggacattttcagccactttagggaaaagaagacgtaatgctcacactaaccgccccacacccgactccaggctggcctggcgccataccctcggggtctccaagagaggcag

SEQ ID NO: 436251 - DNA, 122 bp, Homo sapiens
ctgagcttggtgacgctgctcatggagccccggcgcgagtgggtgagctccttctccttgcgctgcaccacagccacgtctttgcgccgatgatcacagacgcagtagacggtgatgcccga

SEQ ID NO: 436252 - DNA, 122 bp, Homo sapiens
gccaggacccaatgagcaccttcaaaaccccagggaactgaaagtttggggcgtcctcctcggatttgctatgggacataaaaacagtaggaaacttccaaagacttctgattttccctttt

SEQ ID NO: 436253 - DNA, 122 bp, Homo sapiens
aaacaacagccgcccgcagctgtctgtctctaacacgtatcagactttgaaaaacatatccggaggcaaaacaacctgcctcagagaagcccggcaaacacccacggagtctctagcccgtc

SEQ ID NO: 436254 - DNA, 122 bp, Homo sapiens
cctccccgaggagctgcggcgggaggacgcgggttcagcgatgagggacgaacctcagagcgcgctcggccgcccggccgcccgcagccgcggggctgacaaaccagcggcgggaggctgcg

SEQ ID NO: 436255 - DNA, 122 bp, Homo sapiens
gaaccagcggatctagtgagggagctggcagtcccgccgcccctgcccactcctggcccgcggcgtttggcctggcaggctcaggagcttggcttctgccctcccagacactctgctcctag

SEQ ID NO: 436256 - DNA, 122 bp, Homo sapiens
gcgtaggaccctccgagccaggtgcgggatataaactcccggtgcaccgttttttaagcccgtcggaaaagcgcagtattcgggtgggagtgacccgattttccaggtgccgtctgtcaccc

SEQ ID NO: 436257 - DNA, 122 bp, Homo sapiens
cactggaagcaggattgggttgagagctaggtcggccaccgagcgccccactgggtggcgcgtgggctccgcgcgcaggcagggagggcggccctcggtggggtcgactgggcggagccgcc

SEQ ID NO: 436258 - DNA, 122 bp, Homo sapiens
tctggtcgtctttgagttgaaaggcttaatttgatccactctaggggctgggtcgaagagcgagggaggaaaacccaccttagtcaccgacgcaggagagatgtaaaagggctcgcacatat

SEQ ID NO: 436259 - DNA, 122 bp, Homo sapiens
aaataatgaactgcactaacagcttagcatcataaggagacagatggaaaacttctctcccgagatcactgcttccagaattagagaaagggcttctggacgtgttcagggtggatagttca

SEQ ID NO: 436260 - DNA, 122 bp, Homo sapiens
cgccccgttcccagccgggcaggtgctgggtgacatcagagccgggctcccgccctgtgacgcgacggggccccgccctgcgctggaccgcggaggtcgctgcacctgaagagaacggggat

SEQ ID NO: 436261 - DNA, 122 bp, Homo sapiens
gccctggagacttcccggggcccggccctcgccgatcgggcagccgcagcccagccgcgccgcggagccctgcgcccagtccccaagagcccaccccgcgcggctgccttcctgccgcccgc

SEQ ID NO: 436262 - DNA, 122 bp, Homo sapiens
agaactgggcccccagcccgttggacacggctgctgcctgggagcccggggtgacggcgccgttgctcacagaccacaggctggggtactgactgcaacagaaagacaccagtgagcagggc

SEQ ID NO: 436263 - DNA, 122 bp, Homo sapiens
acagaccctccggcccagatctgggccagagagaagtctgcaatcctcagatatcagagccgcctctgggtagctaaacccggcagggcacacgggccgcggccaccttcagcaccagggac

SEQ ID NO: 436264 - DNA, 122 bp, Homo sapiens
taaaattggccccagaggttggcgaggctgcatgccactgtgtattatgcattatgaaagcgacaggggccatgctttagaacagaaggtctcagagtcttcacagacacagatcgagccat

SEQ ID NO: 436265 - DNA, 122 bp, Homo sapiens
agaaggccttcagctcttccagggtttccttcttggtgactgagtagaccaggacgaaggcgtggccccgggctataacgtggcgctgcagagcgcggttgccgtcgccactcttgctgtcg

SEQ ID NO: 436266 - DNA, 122 bp, Homo sapiens
ttcctgagggcgctctcggcttctcagggcaagctgccttccacgcttggactttgagggcggttgtctgtcatgttgaagcctcagaaattaaacgtgcagctcacaagtccattaatttg

SEQ ID NO: 436267 - DNA, 122 bp, Homo sapiens
cattgcactccagcctgggtgacagagggagactttgtctcaaaacaaacaaacaaacaacgaagaagctgtcaatctgtttccaaaatggtcgtaccactttacatttccatcagcaggat

SEQ ID NO: 436268 - DNA, 122 bp, Homo sapiens
tttacatcattttagataatttacaaaaagctacaaaaatcctatctaccaggacacatgcgtaacggcctgtttgcgctccctgcggttacagccgacacacgctcgcagacgcacgcacg

SEQ ID NO: 436269 - DNA, 122 bp, Homo sapiens
gacggcccgacgccgggcgggggcggggctgggcgggggggcaggcgccccggtctacgccgtttcccattggtcgctgcctcctcgcgtcatccctccgcgccggccgacgcgccagccac

SEQ ID NO: 436270 - DNA, 122 bp, Homo sapiens
tctcttgaaatccccaataaagagagagttgtgctatttaagctgaccagtatctataaacgtgtttgcatgagtttacatcccaggattccatgattctgtaaatgcctatgcattcatgt

SEQ ID NO: 436271 - DNA, 122 bp, Homo sapiens
agtcccgggagggggaggggtattataaaaagccacagacaaacggaggtgccaggaccccgggacggcccgactccccgatgtcccctcacgaggcggctccagtgccccaccccggctgg

SEQ ID NO: 436272 - DNA, 122 bp, Homo sapiens
aaatatcaaattcaaatcttcagtgttctacttattttgggtgttaattccattatacaccgtcttatttcagtaatttccatattgtgccagacaagatataaaaataattcaactccagt

SEQ ID NO: 436273 - DNA, 122 bp, Homo sapiens
aggaccaaaagggactcagtgtggtctacttactctggggccctagaatccctgcccccccgccacccttcatgtttgcttcagcagctggtagcttttgatgagacagaataaagttttat

SEQ ID NO: 436274 - DNA, 122 bp, Homo sapiens
tatcgtaaataggcttgtttacttacattgaccaggagctgacctttgatcatccacatgcgtgacccgttccctgaaaggggaacaataatgttaattacccacagattgtttttgctcca

SEQ ID NO: 436275 - DNA, 122 bp, Homo sapiens
cgcggctcccctttcccggccgggtcagctgaggacttggtgcggcaggacctcctgggccggcctggtgtctctgcccgccctgcccctctgctctggcccagatgctccctggaactttt

SEQ ID NO: 436276 - DNA, 122 bp, Homo sapiens
tataaaagagaatacatactaataaaatattttccaaatcagtccatgcctctgttttcacgacatcaggaagtccacatgttctctgaatagatactctgtgcctgaactgaaggttgaga

SEQ ID NO: 436277 - DNA, 122 bp, Homo sapiens
ggagaccgcagtccgtgctgctgagagagcctcgcgcgatggaatcttgggccttcctggcgcagacccggatgcacgtccgatgactaataacgtgggacgtcaggtgacctcggcgcacc

SEQ ID NO: 436278 - DNA, 122 bp, Homo sapiens
agagaggtcatggactccaggttgaaagcctcttacatggatgtattttgttttgcgcagcggtcatgttacaaccaaaactgtatttgccatcctgacatctaatatgttctccaggctca

SEQ ID NO: 436279 - DNA, 122 bp, Homo sapiens
cactgggggcccccacccatagagggagggggtcagtgtggggaggggcggagcaggacacgatctatggacgtttggctcacttgttaggttttacgactcttaaattaatttgttttaaa

SEQ ID NO: 436280 - DNA, 122 bp, Homo sapiens
ggggcggggcggagtggtgcattggggtatccgtagccgaggctcgccagccggtgaccacgagcacccaccgctttggacaattgcatctcgggggtcctgacccttgaacgcccaaccct

SEQ ID NO: 436281 - DNA, 122 bp, Homo sapiens
cttaatcatcctctccctagacaatgacgagtgcgccgatgaggaaccggcctgtgagggcggccgctgtgtcaacactgtgggctcttatcactgtacctgcgagcccccactggtgctgg

SEQ ID NO: 436282 - DNA, 122 bp, Homo sapiens
actttagctgtttcgttctgtgtttgcacattagatcaaagaaatcggctggacagatgtcgggggctggaccggccaaggaggctccattcttgggacaaaacggtaacttccaaatctca

SEQ ID NO: 436283 - DNA, 122 bp, Homo sapiens
tttggaaatagaaataatgagcagtgccctactgtgttcattctccctccaaatggcactcgcagggcacaaggcaaaggaacttcctctgaaaagctcacattccagtgacataaactaag

SEQ ID NO: 436284 - DNA, 122 bp, Homo sapiens
ccgggccggccttcctccccggggctccagctgtgattgacgctgggcggcgagaggaggcgcctggcgctaacaaaagtccggcccgcgggcgagctgcgccgggtcgctagtcttcactc

SEQ ID NO: 436285 - DNA, 122 bp, Homo sapiens
tcctaccccctcgtactctttatttttagtcataatttcatgtttcatgcaggtgcactgcgcgccacagttcacaaagctccttcgcgtttttgtctccttggaggcccacgacagcccag

SEQ ID NO: 436286 - DNA, 122 bp, Homo sapiens
ttcccccaccaaatacctacggcgcatcatgctattcttggacacaacagcaaaagctcccgtgtgcttgccctatgtcctacacttgactgacaacatttgtggacaggccccacgtctga

SEQ ID NO: 436287 - DNA, 122 bp, Homo sapiens
taaaacaatgggaccaagagctggatggaacctggagtcaaaaagaactgcttcagtccccgctgtaccgcctgcctagctgtgggagcaggcagggcgcctgggagcctgcgttttctgga

SEQ ID NO: 436288 - DNA, 122 bp, Homo sapiens
aactgacccacaggggaccaagatgtgacaacagacttatcaagaagaccccagctttttcggcgagggctgaagatcctgcacttaattctgcttggctgctcaacattcaaaagcaggtc

SEQ ID NO: 436289 - DNA, 122 bp, Homo sapiens
atttttgctggacaaggacttatttttgtggttgtttggtcttttagacaaggtctcactcgcctaggctggagtgcagtggtttgattggctcactgcagcctcgacctcccaggcttaat

SEQ ID NO: 436290 - DNA, 122 bp, Homo sapiens
tctgtccccttttttgtctgtgggactcctaaagcttcctggagtctctttaatcctcctcggttctttgcattttcctctgatctcagaacagtcatgcagcacctcttccttcttgacag

SEQ ID NO: 436291 - DNA, 122 bp, Homo sapiens
ggcattattcctttttttaatttttatgtaacttttattcttttttatcaggcagccacccgagccagcagccagcgtaggctcagagagactcccctttctttcttgcaggagcaagggca

SEQ ID NO: 436292 - DNA, 122 bp, Homo sapiens
ctctggctccagccacaaagaggagcattagagctgcccttccttgggggctggtttcaccggttcttagtcctccaccctgactcgtttgaggtgctttgcacctgggtcctggaggccac

SEQ ID NO: 436293 - DNA, 122 bp, Homo sapiens
cctgttcatggatctggactgacaccttcacagctcttgggagtgtcattttcaggaatacggtgtaaataaagccaaggtgtgttcagggactcccacaaggtcacacagcaccgtggacc

SEQ ID NO: 436294 - DNA, 122 bp, Homo sapiens
cttactagtttgtagctaacctgaagctgccatctgagaaaatacagcacaacctacctccgtcccaaggagcactctctcagtctcatggcaagaagaaagtgagaagactacatgtgggc

SEQ ID NO: 436295 - DNA, 122 bp, Homo sapiens
acaaaaaccgcggaggcgcattggggtggggggtgtctactgaaggccgctcccgacgtgcgcgtctttacgtagacgtcgggggcgcagccgcgctgtgcgcggtgactggcggctgcact

SEQ ID NO: 436296 - DNA, 122 bp, Homo sapiens
ctcaagagactgaaggttctcgtttctgtttcccaacaccactgctgacgcagctcaagccgcctctgacatccccgctgtccggtggctctgcagtgggagggggcagagcctgtctttgc

SEQ ID NO: 436297 - DNA, 122 bp, Homo sapiens
ctacctataactcacttccctgtggctccaacgcctcaaagtataaccacgcccagccaacgcccggggcacgcctgccagcgccccagggcactcacagacactccttaacacctgcacgt

SEQ ID NO: 436298 - DNA, 122 bp, Homo sapiens
aacctaccaaagccccctcttctggcctaagttcaatgccacccgcccacccacattccccggttcagcaattttcagcccagacgcagaagcatctgtttccctggccagggcgccttaac

SEQ ID NO: 436299 - DNA, 122 bp, Homo sapiens
ctcgggtcctgctcttatttcctgctctccatgcaaacactgatcctcccagatgtgcatcgcagaggccagataaacacgcaaaggagctccagactttgagaccacagtgaggcttcccc

SEQ ID NO: 436300 - DNA, 122 bp, Homo sapiens
gagcttctgctgggcgctacgctgccctccacgattccattttgccccatttactcgggtcgtccacttcccgcggctcagtgacccagccagggggcgtcttccgctagcggtccaaatgt

SEQ ID NO: 436301 - DNA, 122 bp, Homo sapiens
ccaggcgcccctcccttccgccactgctggggcggtgcagagggcgggcggtacaaaaagcgccccgccccgcgctcctctcttgactttgagcgtccggcggtcgcagagccaggaggcgg

SEQ ID NO: 436302 - DNA, 122 bp, Homo sapiens
gcccgcccaggggtggtgcgtgtaaacgggcgtctggatccccgaatggttgcgtgtttccgtgtgtgggtccgggggaggcccacgaacgccagcgaaaccgctgacaccaccgcccaact

SEQ ID NO: 436303 - DNA, 122 bp, Homo sapiens
gaggtttctgggggaaggaagtgacgatcggcgcaaagcatgctggtctcaggcggtctccgctcaacgatccttcctcaaagcatggttgctgagtacccagagttgcgaggagtttttta

SEQ ID NO: 436304 - DNA, 122 bp, Homo sapiens
cgggaagtgattggagtgtaggcgtgaggtcccggtgctggatagacgcacacgccttcacgcatcctcagaaagtgatgttgctgagtgaatagaaggtgcacgtggcccttcctgagtct

SEQ ID NO: 436305 - DNA, 122 bp, Homo sapiens
cccgcagttcctgggatggccagcctcttggcgcggacttggggtgatggggacccccgccgctcccctgaccccgggccgcgctctcccctcctccagtccgcccctgcgggggaaaatgc

SEQ ID NO: 436306 - DNA, 122 bp, Homo sapiens
gggaaatggagtctacaggccggaggggtgccccacggcatactaggaagtgtgtagcaccgggtaaaggggatgaatagcagactgccccggggcagttaggaattcgactggacagccgc

SEQ ID NO: 436307 - DNA, 122 bp, Homo sapiens
gtactcgcttgcctgccagtcacctcctgctgtgtcgcaggtttcctaacagccaccgaccgctaaggttcgctgcctggggagttggggatccctgctttaaatggtttaaaggttacctt

SEQ ID NO: 436308 - DNA, 122 bp, Homo sapiens
cttcggaggtagttatggtggtcgatttgagagctcctaccggaatagccttgactctttcggaggtagaaaccagggcgggtctagctgggaagcaccttactcccgttcaaaattgaggc

SEQ ID NO: 436309 - DNA, 122 bp, Homo sapiens
ccccctcattccgcacatccctcatttcttcagtggtatcataaagatgaaggggagaaacgcgctgctgcctgaacagaaaggcaacccaggtgtcctgggccagaagtgggaggacatgg

SEQ ID NO: 436310 - DNA, 122 bp, Homo sapiens
ccaaagagaatgtttggcctttatggatacaaacactgattatacgctcaaagccattgacgtagtatgttttctctttttttccccccgatgaagtacttgaagctggctttttaagcata

SEQ ID NO: 436311 - DNA, 122 bp, Homo sapiens
acagcttggcacgtttccttctgaattagcctcccctttctggggtgaggagggaactgccgccacatgccctgccagagtcccataatgagttcaggcttcacctgtgctggtatggcctg

SEQ ID NO: 436312 - DNA, 122 bp, Homo sapiens
tcctcccagacgccagcctgcttggcacctgtctgtcaccgtgatggagcaccttccaagcgctgggtgcggaggatgtgacagcgaaggggacagacaaccccgaccctgagaggcgggag

SEQ ID NO: 436313 - DNA, 122 bp, Homo sapiens
gcgcgctctcagcgtcgtcaaagtttattatccacggagcgtcctggaatccacccgcttcggatactgaggaacagctgaacaacaacgcaaggagtttacaaaacaagatgacagtcaac

SEQ ID NO: 436314 - DNA, 122 bp, Homo sapiens
ccatgaagcctcctcttcctcctttcactttcactttcctccaaagggcggcatgaggggcggtggaaatccccgctctggttaggtgaaggtgcctgggggaccggtgtttccccactggc

SEQ ID NO: 436315 - DNA, 122 bp, Homo sapiens
ctgtggcctcgcacaggcggacagacgggcagcagggatctccaaccgggccccggagcacgaaccactacgcaatcgtcacagcatgtgctaccttccgtggtgttctgggaatctaaatc

SEQ ID NO: 436316 - DNA, 122 bp, Homo sapiens
gacccccaagcaggtagaactcaccacagcggggtggactccaccacaataaaggttaaacggcactgaccatgctgagccacagccggtaaagatggcggtggcacactgacgtcacttcc

SEQ ID NO: 436317 - DNA, 122 bp, Homo sapiens
gtgttctgggtttctggagtgcgcgggattggacaggctacaaacatatgagattatctacggccagaggttaaaatgccatttctggtatcagcaaatctaaaccattagagtctctgtgg

SEQ ID NO: 436318 - DNA, 122 bp, Homo sapiens
cagcagccacccagacaccccccgcccacgcagaccctgttcggtgaatccctccccagccgcctgttctctgtatctggggccacgctccgaatgttgcaagatgcaatggcaaaccgcta

SEQ ID NO: 436319 - DNA, 122 bp, Homo sapiens
gtggatatctgggccttgggggtgcttttgtacttcatggtgactggcaccatgccatttcgggcagaaaccgtggccaaactaaaaaagagcatcctcgagggcacatacagtgtaccgcc

SEQ ID NO: 436320 - DNA, 122 bp, Homo sapiens
gggggtgtaggaaacggcgagtacagaggccatagaaaaagctaagactcagtttgacgtcgtcagccggcttggtcttctacccagtgactcaaagcactaaaagtcagcataatcggaac

SEQ ID NO: 436321 - DNA, 122 bp, Homo sapiens
tggactcagctctgcgagtgaaggaatgcagaatggtttagaaagggtaggtgggagccccgctgcttaggtgttttagacacagcaggaaggaggaaaaggtggaaaaggaaaggaaaata

SEQ ID NO: 436322 - DNA, 122 bp, Homo sapiens
tctgttcctttgtcttaccctagatcaggggtcctcaaactccaggtcagggactggtaccggtccatggcctgttaggaaccagtccgcacagcaggaagagagctgccagcaagcgagca

SEQ ID NO: 436323 - DNA, 122 bp, Homo sapiens
cctccggggactgggaggcgggaagagagcagggccccctcaccgcaaggcggttcctgtcggaactaggaacctgtagggaagaggccatcgagaaaatgaccaggggcagcgggacccag

SEQ ID NO: 436324 - DNA, 122 bp, Homo sapiens
gggtctgattccctggttgggagctgatggagcggctgctgaccctgcagagctgaagtccgcatggggggctgcagtgagagccacaaggctggcacccaaacatgcctgcctgagtcaca

SEQ ID NO: 436325 - DNA, 122 bp, Homo sapiens
tcccaggctggttgatggatggctcagccccggctggcttgactcagtctagcttttcctcgtggactgccagggctgcctcctgtcctcctgcttaccgcccttgcccgcccagcaggtcg

SEQ ID NO: 436326 - DNA, 122 bp, Homo sapiens
tcagatcctctgccctggagcattcagatttgtgcctctacgttatggaaaccaggggcccgtccgggtgcaacgtggcatccacaaaatggcaggtccccgagctccgggctccgagagaa

SEQ ID NO: 436327 - DNA, 122 bp, Homo sapiens
gccgggtcaggacgctgcgccaggccttcttggccttgcaggctgctctgcctgccgtgccgcccgacaccaagctctccaagttggacgtgctggtgctcgccgccagctacatagcccac

SEQ ID NO: 436328 - DNA, 122 bp, Homo sapiens
gcggctgggcgagggcccagccgcctccacatccaggggccccgccccagaccgtgatagcgccccggcccccgtggtctcttctatgcaggcacagtccctgaagagtccccttcccccga

SEQ ID NO: 436329 - DNA, 122 bp, Homo sapiens
cgtttccgactgagagtgccgctgcttccttgggccacactttctgccttgacagagccccggaagagcccagctcagcccaggacgtggagtcctgaacacatgcagtcctggcctcacgc

SEQ ID NO: 436330 - DNA, 122 bp, Homo sapiens
agctcaaggttgtgcaagggagaaactgtggaaggaaataacacgagggacaagaagagacgactgaggcatctttggagaaagggaatctaaggagagagggcaacagtaggtacaatgca

SEQ ID NO: 436331 - DNA, 122 bp, Homo sapiens
gagggctccgattgcggaagggcctcccagattaagtgaaacccaaaactaatccactcccggaaccctatttcctgctcccggaggcagaggctcccagagctagggtaggaggggcagtg

SEQ ID NO: 436332 - DNA, 122 bp, Homo sapiens
ccgcggaccggggtggccccgcgacctgcagtcgccagtgggcgggccccagatatcagacgtcttaacagtgccccaaccgcttttatgcagggtgattccacgatgcaggagatctctga

SEQ ID NO: 436333 - DNA, 122 bp, Homo sapiens
gcgagcgggtgggcctaagccttggaggatctggggtgggggtggcgcggggtccaggcccggggcgccgagaggtggctggtccggctgcccacgccgagacgcgcgaggtgagcgggcgc

SEQ ID NO: 436334 - DNA, 122 bp, Homo sapiens
tatttttccttttaagaacaagatcttgctatattgcccaggcacagtcccactaccagtcggtgcgggagttctgacctgctccctttctgatctggtccagttcattcatccttaggcaa

SEQ ID NO: 436335 - DNA, 122 bp, Homo sapiens
ccaagaggcagtggtttgggcttgttgtttgtaacaagaaaatgatccacaccactcccccgattcccgggtgcagaattgtaactcggggttgggcctctatatggagtgaccaaaatgcc

SEQ ID NO: 436336 - DNA, 122 bp, Homo sapiens
aagggtcactaccagaggccttcatccaaagaaatcatctctaggtgaaatttcaggcatcgaagaaaataagtgggtgtgagtagaaggatgtaggaatggggtggggacaggaggcagag

SEQ ID NO: 436337 - DNA, 122 bp, Homo sapiens
gacgccaccatttcacatgaagaggcaggcgacatgcgagtgctggagaggaaccccagacgccaccatttcacatgaagaggcaggcgacatgcaagtgctgaggaggaaccctggacgcc

SEQ ID NO: 436338 - DNA, 122 bp, Homo sapiens
aaaaaaaaaaaaaaaaacaaccacaaaacaaaagcacagcacacacgactccctggaggccgccaggaagcctggcacccccgcgtgcgcagcccccggcccctctccggccttcggcgcct

SEQ ID NO: 436339 - DNA, 122 bp, Homo sapiens
tcaaaccttgccacgaagggtcaaaataatctcagcctctaagtaaacctgaaatgcagtcgaggccataaggactgcaacatatagttgaattctagggctgtactaggcccatagacaat

SEQ ID NO: 436340 - DNA, 122 bp, Homo sapiens
cctgcaggaggaaggccgctgggatggttgggcaatcgggcctgggaggccaggcaagatcgcaggtaggagagacggggggtgactttgagggtccccaaaggagacttgtgctctcctct

SEQ ID NO: 436341 - DNA, 122 bp, Homo sapiens
gcagagccgcggtcaggtgtggcagagcagttggggcccacgtagcatccgcgacggctgcgccgcctgcgggggagcggaggggccttcgagcgagccgcgggcggcagggccgaggcgcg

SEQ ID NO: 436342 - DNA, 122 bp, Homo sapiens
gaagaaaggagcagcttctttctttgttatctcccgtgaaaccttcacttagcaggtggacggagccccgcgaccgggcagagtccgggctcgcccgaggacaggaggaggagcgggagccc

SEQ ID NO: 436343 - DNA, 122 bp, Homo sapiens
gtaagttcccgtagtctaagcagcggagcctgtggggtctgtcccggcacacagggcacccgacttgactggcgtgtgcacagaagaccgtcgctgggctttgccagacccggcgggccgag

SEQ ID NO: 436344 - DNA, 122 bp, Homo sapiens
ttctctgaagcctttttcttttgatgttcttcagtcctagattcaagtcctgtctctcagcgacccactgctgagcaagtcatttcatcatttagactctcagctttcccatttgtaatggg

SEQ ID NO: 436345 - DNA, 122 bp, Homo sapiens
cgtctgtagtactcatcttcggtggccttgttgtactcgctgatggcgaagtgaagggcacgctgtacccactcatcattgaggtctgcatcatagatgccacctgggattatcctattctc

SEQ ID NO: 436346 - DNA, 122 bp, Homo sapiens
cagaggaaggcgcgtgtgggcagggaaggcgccggcgaggatctggaaggaacttagagccggaccgagctaattatcattgagagtagagtaggagggggaaacatgtcctgttcttctga

SEQ ID NO: 436347 - DNA, 122 bp, Homo sapiens
cgcgctgcagcgagcgcccggaggcccggtcacaccctgtgcccggcccgccgcggggagcggtccagccgcagcgcacgagccctccgccgtcccactgccccccggaaccgcgcgagcct

SEQ ID NO: 436348 - DNA, 122 bp, Homo sapiens
cttgcagcttaaggaagaggaacctgcagggggcggaagggaatccactccatacacagtcgctctgagatttgcttcagggcggagatctgaattcctgagattccgatggggccatgtgg

SEQ ID NO: 436349 - DNA, 122 bp, Homo sapiens
attacatttcctgcaaccagaaacacagataccagtttacatgcagggaggataagactccggaacttgaaatgacttggttcttagcacatagagagtagctgatcagctgtcctgagagc

SEQ ID NO: 436350 - DNA, 122 bp, Homo sapiens
aactttaactttttagattagtaagactgctaacgtgtttcattagttcagtgataataccggcttcaaagaaaagccttggcaaatacaaatcgtaagcagatagctcaactcatcatcac

SEQ ID NO: 436351 - DNA, 122 bp, Homo sapiens
gagaatgagtttatctgtgaatgcctgaaacacacaggaaattcagctttaagcttatctcgaagaacctatggagaaccttgatatcctttacattatatgatttatagagaggttgcttt

SEQ ID NO: 436352 - DNA, 122 bp, Homo sapiens
aattgtgacattactcagcagctgacttatttcatcttggatgaactctccttctagctacgtggcttgaattgagtaaatctgactaatgaatcaacaggcaggattttggcaacatgaaa

SEQ ID NO: 436353 - DNA, 122 bp, Homo sapiens
aggaataagtagaactcccaaaggacagctttcctggctgaacaagatgtaaacagtttacgtgatttccaaccaagcgcaaaagtacaggtgcaaaagaagacggcagacaccaaacttcc

SEQ ID NO: 436354 - DNA, 122 bp, Homo sapiens
actcgttgcttattttgcaaagtaaacaagcaaatgttatgtgcataaccttcgctgtctcgctaaaggtcagcgcgcccctgctcatttcccgggctgccttttgggggcactctgatgcc

SEQ ID NO: 436355 - DNA, 122 bp, Homo sapiens
gctgtctcaaaaaacccccaaaaaccccaaactaagaaatatgcacaattaggccgggcacggtggctcacgcctgtaatcccagcactttgggaggccgaggcgggtggatcatgaagtca

SEQ ID NO: 436356 - DNA, 122 bp, Homo sapiens
gttttgccaccagaatcacgactacccccccttcagaggactccatttaagctcaaaatacgaaatgagcatagggtgaagttgatgtgtaaatggtattctacagattcaagatggcctct

SEQ ID NO: 436357 - DNA, 122 bp, Homo sapiens
tggtctcggcggcctcctcccttggacactacagttgccatgggaacagttgggcattaacgggaaccagatcgtccacgagaccaactggggcccatcccatccatctcgccagttaaacg

SEQ ID NO: 436358 - DNA, 122 bp, Homo sapiens
ctacacgctgtcgggggagacagaggagctgtcgcggctggcagggtatgggccccggaccgtcacgcccgccatggtggaaggcatctacaagtacaactcggaccgcaagcgcttcaccc

SEQ ID NO: 436359 - DNA, 122 bp, Homo sapiens
agagcttaactttcttgaaggcaagcactgtctctacatttctatcagctagaacaatgccggcaatacagtgaaatcgatgcattttctattgaataaaatggaactgaaaattacattcc

SEQ ID NO: 436360 - DNA, 122 bp, Homo sapiens
ctcggcggtgggaggagtcccctccgggagagcttcctgaagggggcgagggctgacttccgtaatctttcggaagaggcggagtcttcttccgaggaccattcggaagaggcggagtcttc

SEQ ID NO: 436361 - DNA, 122 bp, Homo sapiens
ttaatcctcacggtgaccgcatttcccagctgggccaactggtgcggggttgactggaagcgaccggggttgactggaagcgaccggcatagcgcttggcaagtatatagcaggtagtaaaa

SEQ ID NO: 436362 - DNA, 122 bp, Homo sapiens
aggtgatgtgttcgtattgcacgtagacgtgtgtataacaggacctccttccccgcgccccgccaccccgacacacacaggagctgcctaaagtatccttgccttgcagattggaggctccc

SEQ ID NO: 436363 - DNA, 122 bp, Homo sapiens
tcaagattccagtgacttctccgaagcttaggtgtctcttcacccctggctgttccaaggcggccccatagtcaagattccttaaacccttgccccttaaaatgtttgcctttcttaccatg

SEQ ID NO: 436364 - DNA, 122 bp, Homo sapiens
aaaatatttattctgtggccttaacgggtatttaagcatatatgtatcagattgccagggcggcttaaccaacagaaatgtattgtgaaacaatacatttctggaggcttgctttctgagat

SEQ ID NO: 436365 - DNA, 122 bp, Homo sapiens
gttaggcaggaaaaaacacagaggtacactgtgcccctccccaggtgacatttgaatgttcgtgacatctccaccaggtggccccctggcttaggcttgagttcctccagtgacagaaggct

SEQ ID NO: 436366 - DNA, 122 bp, Homo sapiens
gggactgcagggaatgaacagctcatgtctcactcatcaacaactgtggctgtgggggaacgtggctctgtgtctactgaactttgccagttttaaagagaaacacacaatcgagatttttg

SEQ ID NO: 436367 - DNA, 122 bp, Homo sapiens
tcttgaaggttctgatgtgagcaggtgggaatgaatacgatggaaactgaagtctcaaggcgttggaccagtgtgaaaagaatgaaatggtatggtctgagatggggtgaggagagctttgg

SEQ ID NO: 436368 - DNA, 122 bp, Homo sapiens
gctgggaaaaggctgggcaccgcccacactccatgcagctctctttccctggctcggaatcgctgcaggcgccacagaccagacgcgcactgttccccactcctgcttatcggccgcgcggc

SEQ ID NO: 436369 - DNA, 122 bp, Homo sapiens
atttgcattgctttacttcctagatttttttttcttgtaccaccaagtgtgtattagcatcgttaaatttcaggccagcgtgtttatgcgtatcatacatttttacagatccttgcctcttc

SEQ ID NO: 436370 - DNA, 122 bp, Homo sapiens
tcctgctggtcgccagcgcgcacagttgctaatccgttgaaatacctctgtggctgctggcgagcgggtgtcacccgagcttccagtgcccatgctgcgctggcctgcatcattctgagtag

SEQ ID NO: 436371 - DNA, 122 bp, Homo sapiens
tccctccctcaggtgcaatgcccaggtctgagctctgcccactgcagttctagatacttccgtacttatgcagagcctcagaaccaccaggggaaggaaggcagggaaaggttgttatcccc

SEQ ID NO: 436372 - DNA, 122 bp, Homo sapiens
taccataaggtttcatcactttttttaaagaacagctataccacatgtaatgcctcacaccgagttcaaggtctgctaaaaatcagacttttttttaaaacctggactattgtaaaggtagg

SEQ ID NO: 436373 - DNA, 122 bp, Homo sapiens
gcagctagtagccgggtgagtggaggctggagttttctcggacagtgaactctaccgccccgtgagaccctgccctatgtgtcgcgggaacacatgtcaccccacagctctctttgagtgac

SEQ ID NO: 436374 - DNA, 122 bp, Homo sapiens
cgagggccgggttctgcggtgaggccctgtccggacacggggtggggtggccacagccaccgtggccagctgctctggggcagggctcttggccctgggggtcctctatgcatgggacagtg

SEQ ID NO: 436375 - DNA, 122 bp, Homo sapiens
ccctgcgcgaagccctcaccttctcgcttccttctcttaggctagggagacaccgccccgcgaccacacctgccccgaggccccgcctcctacgcagagccccgccctcctcttaaccactc

SEQ ID NO: 436376 - DNA, 122 bp, Homo sapiens
ggaagccgtacaggttcatcttgtacttgtggtctggctccaggcctgagatggtgaccccgtcctcgtgccccggcacccgcaccaccttgggctgcccatccccattcctgtactggacc

SEQ ID NO: 436377 - DNA, 122 bp, Homo sapiens
gcacttctctccaggacagtttccctggctgtaaataggactaaggacgaggtccagctccgctgtttatctgtgtgccttaggaacagccatttaattacctcatctctgggctcttggga

SEQ ID NO: 436378 - DNA, 122 bp, Homo sapiens
gactcgccggtcactcgccggcggctcaggccgggaggggccaggacagtcccggccgcgcggtggacggaggggccattcctccgggcgttagcaaataaattccatccgagtcaatatcg

SEQ ID NO: 436379 - DNA, 122 bp, Homo sapiens
cctttggagaacacatgttttggtggtgccagccaaagggcccttcttgacccacagtgccgctactgtttggcttaatgtgtcaaacactgccctggatttggggttcattagcaacacta

SEQ ID NO: 436380 - DNA, 122 bp, Homo sapiens
cctggatgcaaacattcaccccatttcccttctacttcacctgaatcctcaatcaagcctcgcttatgggtggcaacaaagcagttctctgtccttaaggagagagaaggtggctctttcaa

SEQ ID NO: 436381 - DNA, 122 bp, Homo sapiens
gcggggcgcgtggagggggccgccccaacccgggccctgcggtgccacgcggtgcccacgcgtgccttgtcatctgcttgacccagaccctgaggggcgagctgcgcttcgacatcaggaag

SEQ ID NO: 436382 - DNA, 122 bp, Homo sapiens
gacccatggcctctgtttctccaggaggttctctgctcacagtgtgctcagagtcgtcgccggctcgggcatcaggacccatggcttctgtttctccaggaggttctctgctgagggaggag

SEQ ID NO: 436383 - DNA, 122 bp, Homo sapiens
caaccgccgtgggggccgagggtgctggggacggccggagagcgatcaccggctgggcggcgggagtcgacgaggggcgagccccgctccggctcaagcgcgcacacccctcacggcccgca

SEQ ID NO: 436384 - DNA, 122 bp, Homo sapiens
tggaccccgggctgcagcccggcaacttttctgctgacgaggccggggcgcagctcttcgcgcagagctacaactccagcgccgaacaggtgctgttccagagcgtggccgccagctgggcg

SEQ ID NO: 436385 - DNA, 122 bp, Homo sapiens
cagaaggaggttggatgtcggaaagtaaggccgaggaaggatgcatggttctggtgtaggcggtgggatagtacccttccctgaggcaggagcgccaagtttgcagagaagatgatgtgctt

SEQ ID NO: 436386 - DNA, 122 bp, Homo sapiens
gcggggtggacggctcggtgttctgcccgttgtgtcttacgctccaggtgctggtctacgcgggcctggacagtcaggggtaggagcgggagccgagaggaggcggaggagatggcgtccca

SEQ ID NO: 436387 - DNA, 122 bp, Homo sapiens
cctccctctccttcccctctacctccctttcacaagtattgagcacttagtacatgctaacgctgtgctgccagggcagtgggcatatggtatcacacaagatggacttggttcttgcctca

SEQ ID NO: 436388 - DNA, 122 bp, Homo sapiens
attgcaattcaatgcacttgaaaccaagactccctaccagctcagctcacagcatggagacgtacagtgtggagaggtggggcccatatattgcatggtgtcagaacgctgtctgcctgaaa

SEQ ID NO: 436389 - DNA, 122 bp, Homo sapiens
aattcatcttaggccttattactgaatgtaaaatgccttcatctcttgggggaaaaggtgcggtgaaaatgcaaatcatcatttagctaaaactgaacagctgttacaagagtccataattg

SEQ ID NO: 436390 - DNA, 122 bp, Homo sapiens
cggcgcagccggtgtcatctagcggccggcagttccgagcgacttggggtccttgtgcctcggagtggcgtctgggagcaaaggcggcggaggcaaccccgcagttgaggacagtagggatc

SEQ ID NO: 436391 - DNA, 122 bp, Homo sapiens
acttggcacacgtgcggggctctttcatgagttgagggtgtctcagaaacctccgtctcccggatccatggctgctctacagagaggggccggaccgtgttctctccggctgtgggcaagcc

SEQ ID NO: 436392 - DNA, 122 bp, Homo sapiens
cctctgcctctgtcccagcgtgccctcgctcccgcccctcagcccacgtggcctcccacccgatgctgccatgccccagggactgatccggggcccgcccttgtgaaaagcagatccttcat

SEQ ID NO: 436393 - DNA, 122 bp, Homo sapiens
gcccacggcctccggaaagcataaatgtccaggctaatgggagtgctgaaggctctgcctcgttgatcagcacaaacgcttgtgtcctgctctaaggcttaagcgatggagcaacgttttct

SEQ ID NO: 436394 - DNA, 122 bp, Homo sapiens
cctgaaaattggaaagttggaccagctgtggggagagaaaggtcttcgtgtcctttcccacgttcaccgtgccagttacacacaaagcagagatttttttgcttgaatcattaaaagccggg

SEQ ID NO: 436395 - DNA, 122 bp, Homo sapiens
aggacgcacctccggggtctctattcacacctgcagcgggagcttatcatcatcactcaccgaccaaaaaaaaaaaagaaaaaaaggtggtggggtggagcggaggggaagaaggtcgaatc

SEQ ID NO: 436396 - DNA, 122 bp, Homo sapiens
tggggtgacttcagcaatgtccctgcgagacaagggcggggaagaagaatgttttgaatacgactgccaggatgaagagaggaagccaacccacaggcagcatgacacccaggacctcttgg

SEQ ID NO: 436397 - DNA, 122 bp, Homo sapiens
ccagccccctccgcccctccccagaaggtgatgtgtgtgagcatgggctccaccacggtccgggtaagttgggtcccgccgcctgccgacagccgcaacggcgttatcacccagtactccgt

SEQ ID NO: 436398 - DNA, 122 bp, Homo sapiens
gaaaatgaaaccgggtaaaggcgactggggctctctccggtcgagggtctgggcgggttccgcagatccaccttggggtggatctcagacggggagactctgggcgacccgggccgtccgtg

SEQ ID NO: 436399 - DNA, 122 bp, Homo sapiens
tttttgttgttgttgttgttgttgttttttagagacagggcctcactctgttgcccaggccggaatgcagtggctattcacaggtacaatcccactagtgatcagcagcggctcagttttaa

SEQ ID NO: 436400 - DNA, 122 bp, Homo sapiens
agatatattgatccaggaggaagagaagttaaagaaaataaatggtgatagaagctcctgcggaagaagaggaagcaaagagcctgcagttatgactgagaacatgggcctgaaggagagtc

SEQ ID NO: 436401 - DNA, 122 bp, Homo sapiens
atgtgacctcagcccccattttcaaaggaaaaaggagactagggcagaagacagtgtaaacgtcctaaaaagaaagttctggaagccacagcctcccagaagagatgagctcctctactggg

SEQ ID NO: 436402 - DNA, 122 bp, Homo sapiens
gcaccgtcagaggatggatgtacaaacatagatcggaggttagaatgacccttgtggtgtcggtgtcgcaatggaattggagataaaattgtgtgaacacatggttgtttacatagaagtta

SEQ ID NO: 436403 - DNA, 122 bp, Homo sapiens
agcgcggcggcggcggcaaggggtccgcgccccccttgccggcccagcctgcgccccgcgcgccagcagagcccgcagctcaaaaggagggtacccgggttggggtcccaggcggggaaagg

SEQ ID NO: 436404 - DNA, 122 bp, Homo sapiens
gggccctctctaggcacgatccagaagagctctaggcctgaaggtagtgttacccgccatcgggtccatccccaaattcaaggtatccctgggtatgttccctctcctgtgccccttcccca

SEQ ID NO: 436405 - DNA, 122 bp, Homo sapiens
gcgctgccccctcctctctccgcagtactcgccagggatgaccatgagcgtgtgatggggcggcagccccgggcctctctgcgggcctaggcttctgcccagcgcccctgctcagggcgagg

SEQ ID NO: 436406 - DNA, 122 bp, Homo sapiens
gtctgaggccttgtttcaggggcatccacagcacctaaagggtgctgggaggggggcgttcgttgagaacagcacacactgtactcctacaggaggagaagacagacccattttagactgac

SEQ ID NO: 436407 - DNA, 122 bp, Homo sapiens
ctgggctgtctgcagaagtcaggcggaatctgaggactgcagggagccctggcaagacttcgcaggccttcccgccaccgacgcctgcatcattgaaaaacatgttcccccttagtcttctg

SEQ ID NO: 436408 - DNA, 122 bp, Homo sapiens
ccctggcccgagccccctctcctgcacccagtccccaaggcctcaccatggtgaagtagccggctgcctgttccagcaaccctaccagccccagctcagtgaagtgcttcccggagcagaag

SEQ ID NO: 436409 - DNA, 122 bp, Homo sapiens
ctagtgcaacaaggttgtccagctggatacagggattcaaacaataagagaatggacattcggggatgcaaagtaacaagcaaaaacttcatgtcctttggccaaaggaaatgaaattagaa

SEQ ID NO: 436410 - DNA, 122 bp, Homo sapiens
agggaatcagcagtgggtccagtccaagctcacgccctcacggatctacattctagaagccggctacctaagcaaacctatgccaacaaaacttctctctccctgctcaggggctgggatcg

SEQ ID NO: 436411 - DNA, 122 bp, Homo sapiens
cccggcatccggaacccatgaatgccacgttctttctagcagccttcagcaatttgagggcgctttgtttcttacgttgggagagaaatccatcaggaaatcgacgcccaggatcagatgca

SEQ ID NO: 436412 - DNA, 122 bp, Homo sapiens
cgcgctttgcgcacccttttcctggcagggctgcgtccctgttcttcccaggaggctcctcgctgcctggtgccgtagaggcccatggaggaaaaggaagataagcatcagtaagtgctggg

SEQ ID NO: 436413 - DNA, 122 bp, Homo sapiens
acgcgcttttctcttccgactttgggccaaagccttgtccggagatcacagtgtctcgctcggggacacgccctctctaggcccagacttggtccccactggagttcccagcccccctcccc

SEQ ID NO: 436414 - DNA, 122 bp, Homo sapiens
agcctctcccgctcggtccacgctgccgggcggccacgaccgtgacccttcccctcgggccgcccagatccatgcctcgtcccacgggacaccagttccctggcgtgtgcagaccccccggc

SEQ ID NO: 436415 - DNA, 122 bp, Homo sapiens
ccttttcccttcataccttccaagttcatgctcaagacgctccaccttcctgcctgtgcacgtgctgtttccttcgtctgggagccccttcctttccacagatcctgctctgacctgcctcc

SEQ ID NO: 436416 - DNA, 122 bp, Homo sapiens
tccaaaatgaactcttcaaagtaatttacgccatagagttagaatcactgttcatactaccgcccctcaaccccacttcattctgttaggtaaaagcaggattttctaagcttattaataat

SEQ ID NO: 436417 - DNA, 122 bp, Homo sapiens
cccccaagtgagagcagcaagggtgccggcgggcacaaggcactatctcaggaccagcggcgttctaagcccccgagggccaagtggcagacccacagggagaagctccctgaacgaggtgc

SEQ ID NO: 436418 - DNA, 122 bp, Homo sapiens
agggaccccttctcactttctgggcccactggcccccacgctggggagctcccactgcagcgccactccggcgccccctcctggccgtgtcagcagcattgtggcccctgggggggccttga

SEQ ID NO: 436419 - DNA, 122 bp, Homo sapiens
ccccatggggtgctggataatacccggatgccccaccttatgcaggacttggcacgctaccggcagcagctgaagcacatcatggccaccaaccggctggatgtggcggagctgggtcgcct

SEQ ID NO: 436420 - DNA, 122 bp, Homo sapiens
ccaaacaagacgtgttcatgtagtcttcaaactggcctggagggggcagctccagccagtcggaggcgcccaggaggaaggcctggctccagcaggagggcccacagtccagtctctgttgt

SEQ ID NO: 436421 - DNA, 122 bp, Homo sapiens
cccgggtgggccccgctgccacccagagtggactttgcggagctgagatcaagagcccagcgcctctacctctgaccctcttgcccctcaccccactgcctgggcgacgcgcctggggagag

SEQ ID NO: 436422 - DNA, 122 bp, Homo sapiens
cgagacctgtcaatcaatcaatcaatcaatcaatcaagaggaggctggcgggagcatgctcgtgaccaccgggggcgacatagaccctaaccctaagtccaaccccaaggcagaccccaccg

SEQ ID NO: 436423 - DNA, 122 bp, Homo sapiens
ggggttgggagaggggcgattgggcaacccggctgcacaaacacgggaggtcaaagattgcgcccagcccgcccaggccgggaatggaataaagggacgcggggcgccggaggctgcacaga

SEQ ID NO: 436424 - DNA, 122 bp, Homo sapiens
gcccctgctgctcccggcccgcaggcccaggcctcctcccgggccgcgcctcccgaaggccggctccgggggaccctgttcagtgtgacaacgctgacccagatattttccgttccgacccg

SEQ ID NO: 436425 - DNA, 122 bp, Homo sapiens
atgacagaaagatgagatttgttccatgaaaccctaaagtagatgtctgagatccatgagcgaatatacagggacacaggtttagccatacctagggaagaattttttatcaactaaaaagt

SEQ ID NO: 436426 - DNA, 122 bp, Homo sapiens
gtccagagaggcaccggatagggcagacaggacctggcagacaaaaagtcttgaggaaggcgcaggctgctggggacatctcagccgccaccaagggcccgattccgggcctgggggaggca

SEQ ID NO: 436427 - DNA, 122 bp, Homo sapiens
acgcgtgcgtggtggggactacggtgacagtaccccgggtggggcgagggccagtcatggcggagtcctggtctgggcaggccttgcaggctctgccggccacggtgctgggcgcgctgggc

SEQ ID NO: 436428 - DNA, 122 bp, Homo sapiens
caactgttaaagcagtcagactcaaagccaactgaatctgttaacttaaggataactgcacgtagttagggttaaaaactagtacttgtggctttcagcgtctggctgactgaatgttctcc

SEQ ID NO: 436429 - DNA, 122 bp, Homo sapiens
tccggcagcggcggcggcagaactgggaggaggagttggaggccggagggagcccgcgctcggggcggcggctggaggtaaccccttgggccgagctggaaaggcgggccacctcggtcttc

SEQ ID NO: 436430 - DNA, 122 bp, Homo sapiens
gtgggctctggggccaggctgcctgggtttgaatagggctctgccacctatggtcaatttcgtcccctctctgggcctcagcttcctcacctgcaaagcaaggataagaagagtactcacct

SEQ ID NO: 436431 - DNA, 122 bp, Homo sapiens
ttacctgccaggatcctctcagcattcatccggtagctgtctgcagcctcggccatgaatcgcgctgttgccaaatggttcagcatgatttcacagctctggtcgtttttttcccacatgtc

SEQ ID NO: 436432 - DNA, 122 bp, Homo sapiens
cagcctagaagaagggtcccctcagtagagaccaggcctccagctctccgtccggcgctccgctccacaacccgccagtcgatgtgaggtccgtcaagggagcgatccctccgtctgcccgg

SEQ ID NO: 436433 - DNA, 122 bp, Homo sapiens
tctcacctcctgcagggagctccgggaatcgcgcagggaaagtggccggggcgcgagagccgccgactgccctccttcactcgctgggaagaggaaagtgccgctcggcgtccccgaaaccc

SEQ ID NO: 436434 - DNA, 122 bp, Homo sapiens
gcgggggttctggaatctaaagaggctgtatttggaactgaattggagtcagaacctgcgcgcgatctaaaggtctgggacttcaaggctccaggcaggtgccgaggtgccgaggttccgag

SEQ ID NO: 436435 - DNA, 122 bp, Homo sapiens
taaggtccaggcatgggaccctcgcccccgaatgccgtccttccccaccgggggggggggcgggaacataaaatggacccaagtcactgtcccttaaggagcggaccgcctgagccctggag

SEQ ID NO: 436436 - DNA, 122 bp, Homo sapiens
aggaagcgcggtcacaggggtgcccagggagggcctggtggctctggccgccttgtggtccgcctggctccagggcctcctctcctgtttcctgtgacgatactcctggtgccacctcgttt

SEQ ID NO: 436437 - DNA, 122 bp, Homo sapiens
cgcgcctctcttcctcatgctcgcgcttcagccgctgctcgagcctctcttcctcctcctcgcgcttcagccgctgctcgcgcctttcctgctgctcgcgccttagttgctgctggcgcctc

SEQ ID NO: 436438 - DNA, 122 bp, Homo sapiens
tatgggctggggattgggtacaggcttcaatgtcgttacttgggtgagttgaagaatgtacgtgttcttaggggacatctgcttaaggatatacaaggttcaggggggaaaaatatctccaa

SEQ ID NO: 436439 - DNA, 122 bp, Homo sapiens
gaccccgagtgctggggagcagggagcagggccaggtgccgaggatggccaggcagccaccgccgccctgggtccatgcagccttcctcctctgcctcctcagtcttggcggagccatcgaa

SEQ ID NO: 436440 - DNA, 122 bp, Homo sapiens
cgtgacgtcagagtgtattgttgtgagcggggccgagcggagcatccccggagctgtcaccgcagcggccgcggcggtggcgcagcgcgagccccgcacgagcgagcccggccggcgccgcc

SEQ ID NO: 436441 - DNA, 122 bp, Homo sapiens
gcttccctaccggctccagcccttgggattcgggagcgccctgctaggaagccagagccccgcaggggccgcggcgtccaggccgcctaacgcgcgcccctcgcccggcgccccgaagcggc

SEQ ID NO: 436442 - DNA, 122 bp, Homo sapiens
ctgcactgtgaatggccaggcccgagtcatgtgcccggagagggcggggctgggcccttccgctcgccgcgtctggcgatcgcggctacggagacccaggagggcccggccaggagacccgc

SEQ ID NO: 436443 - DNA, 122 bp, Homo sapiens
cactatagaattgcattataaagacaaaaaccactaacctcaagagttgtcgccggtcggcgtgatcctgaagtgtgtgtgttcgtttctcaggtaaaatatggctaaaagcttatggagta

SEQ ID NO: 436444 - DNA, 122 bp, Homo sapiens
ggaaaacatttacagttattctaatgagtcacgtggtttcctaatgacatctccctcaaacgtcagaaagtttctaccacaatttctgttgactaaaaataaatgtttgtcccactgcgtat

SEQ ID NO: 436445 - DNA, 122 bp, Homo sapiens
aaaggaggggaaagggagactgaccattgaattagctctggacaggaatctcgggcatctcgggcttggacttgccctggcacgaactcttgtagcctacttggcagttgtagttctcaacg

SEQ ID NO: 436446 - DNA, 122 bp, Homo sapiens
agcgggagaactgcttgaagccaggagttcaagaccagcctgggcaacatactgagaaaccgcatccctacaatttattagaggctgaggagggaggagcacttgagcccaagaagtggaag

SEQ ID NO: 436447 - DNA, 122 bp, Homo sapiens
ctcggccgtcgcaggtgttcgcgcccgagagggatgagcacgtgaagagcgcggcggtggcgctggggcccgcggcctcctacgtctgcacccccgaggcccacggtaacgcctgtcgcggc

SEQ ID NO: 436448 - DNA, 122 bp, Homo sapiens
ccaaagcctgactggttttcactcctttccttagagggagatgcgaggcccgccagtctccgcccccggccgtcttcagtgtcctgggtgcctcctttcttctggtggaacaagagcaagcg

SEQ ID NO: 436449 - DNA, 122 bp, Homo sapiens
tgggcaggatttagtaggacaactcggttactaatgacttggcggctggctgcgaccccccgggaaatcaggtgcaagcatgtgtgttcccggggcgcgtgtgtgggtggcctcgggatggg

SEQ ID NO: 436450 - DNA, 122 bp, Homo sapiens
ggctttttaccagaactccaggctgcgttctccaagggtcttccctcacagggatccagccggattcccacatgggaaatttctcttttggagagaatcaggtctgttgaatgtcatgtggc

SEQ ID NO: 436451 - DNA, 122 bp, Homo sapiens
cctctcccctctgagcctcagttttctcatctgcagagtggggacggtaacaccctttgtcgtagagtttggaggatgcaatgaggtaatgtggttgctgccctcgacgcggtggaaggctg

SEQ ID NO: 436452 - DNA, 122 bp, Homo sapiens
agttctctgttagagcctctggtgtgatgtttgggccctgactggactggctctcctctccggtctcctcctctgtcactctgtcctggtgtctggtagttttgagagagggtgggatgtga

SEQ ID NO: 436453 - DNA, 122 bp, Homo sapiens
gcgcccaacgaccatggcttccaaccggcctccgtgcgcccaacgaccatgactcccaaccggcctccagtttccaactgtttctcgaacagggaagccgccatgacacagctgactacgcc

SEQ ID NO: 436454 - DNA, 122 bp, Homo sapiens
gcaatttcctgttcaagtcgagtctttatgtcaagaaggatatggtattcgttgttctggcgttccatgttactccgaatctgcatcagttgggcctccagagagctcaacagcgactggag

SEQ ID NO: 436455 - DNA, 122 bp, Homo sapiens
ggtgacactctccaggtgagtccttgtgtaattattaaggactcgcctttctcaagctggcggggaaaggggttgctgagaagggagaaatctggagcctaagtgacctaaatgaccagaac

SEQ ID NO: 436456 - DNA, 122 bp, Homo sapiens
ctagaatcttgcaaaactgatagaagctcccagatcaagtagatagcgagacagactctccggccaagtgcgcagtggcaggcgcggaagtgcgagccggcaggaccgccaggcaccagccg

SEQ ID NO: 436457 - DNA, 122 bp, Homo sapiens
tgcgggggccacggcggcagcggtggctgcctgggacggcggcgcggggcgtcttctggccgggctgcagtcctgggacagttcccttgacttacacatgggccgacttcgccctccggcct

SEQ ID NO: 436458 - DNA, 122 bp, Homo sapiens
tcggtgtgagagggcttcctagggctggcatggacttccccaccacaaaatgcccagggccgggggggggaaggggcgcaagaaaatgcggactgggccagagaccagacttcggtcaccac

SEQ ID NO: 436459 - DNA, 122 bp, Homo sapiens
cgcaggtctcccgggcagggagcagcgaggcgctgcgcggtggcttgtctaaatgcccttcgaaccttttcctgcgctgaaaaaaagtgactctgcccccttctccccctttttcttttctc

SEQ ID NO: 436460 - DNA, 122 bp, Homo sapiens
ggccaccccgcagatacaggaaccaggcacgggcccgccaccctgtttccagggtctgagcgggtcaccaggtgagcacgccccagagctcaaaactcgtcgctggctgccctgcgtccacc

SEQ ID NO: 436461 - DNA, 122 bp, Homo sapiens
ctgaggacctgccaggctcgcaggccaccctgagccagtggtccacacctgggtctaccccgagccggtggccgtcaccctcacccacagccatgccatctcctgaggatctgcggctggtg

SEQ ID NO: 436462 - DNA, 122 bp, Homo sapiens
agttaattttttttaaaagtagggattatcaaaataaagctagctcaataatcactttttcgaagtgtttagaagacactcctacttgggtgtcgatgcctccgtggggattctgcaattct

SEQ ID NO: 436463 - DNA, 122 bp, Homo sapiens
tctctgcccccaccacctcctacccaggcccaccagtgcccaccccgcactcaccgcccacggcagcccctccgtcgatttccacgggacacctgccccagcgggcctggcgctgcgtctgc

SEQ ID NO: 436464 - DNA, 122 bp, Homo sapiens
gcggccggccccgcagcagcagagcgtgagcctgcaggggaggcacccggcgtcagtgtacgagcggcggcggaaccgtcgcgaaaacgcctcgcggaatctgagcaggtctaggttccagt

SEQ ID NO: 436465 - DNA, 122 bp, Homo sapiens
ccctgtccggcggcgtggacagcgccgtggccgcgctgctgctgaggcggagaggtgaggcgtccgaggctcccgccccccgccgagcgaatgtgtccccggaaacctgtccccgtccgtcg

SEQ ID NO: 436466 - DNA, 122 bp, Homo sapiens
gtaagtgtagacagtggaacatattaacccagtgaaaagacttctgccagatattttgtacgaggctcatactgtagttgcaccaggcataccagcttgatgagtcttgggttactcaagcc

SEQ ID NO: 436467 - DNA, 122 bp, Homo sapiens
tgccccgggtagtgcgcccctttcgttcctccggcggcggtagcgtccaaggggcttctgcggattccgccgggtcgtcccggggttgcaactccattgtacctgaaaggatgcatttggtt

SEQ ID NO: 436468 - DNA, 122 bp, Homo sapiens
gggcccaggatgcaggggtctgcccctggccaggctctgccttcagaggaggctgagcgtcgtcacacgggccgggctgaggccctgggccctgaccgtgcagcctaagacaggactgtggc

SEQ ID NO: 436469 - DNA, 122 bp, Homo sapiens
tcttagtcatacttctcagtgatcacagcttctcatcctctatacacacaagacatctatcgaccaatccacttaaaatgctggtaaaggtcaacatcaaactgctatggtagagtttgtag

SEQ ID NO: 436470 - DNA, 122 bp, Homo sapiens
gcaccctccaaagaggtggcttcttcggcgggtctggcaggtgacaccacacagaaaccacggtcactcggtccacgcgtcctgcccgggtgggcccaggacccctgcccaacgggcgtccg

SEQ ID NO: 436471 - DNA, 122 bp, Homo sapiens
gttctagtctcagctttgaccctccctggtaagctgtataatcacaggagtggccctgaacggacttaggatttggttttctactctgtgaactgaagctaatttctcctacctgggaggat

SEQ ID NO: 436472 - DNA, 122 bp, Homo sapiens
ggcccaccaccatcatccgctccacccgcatcactgggccgccgccttccaccacctgcccgcagccctgctccagcccaacggcctccatgcctcagagtcaaccccttgtcgcctctcca

SEQ ID NO: 436473 - DNA, 122 bp, Homo sapiens
ctttgccctcatgctcctggtgtccactggcatcgggctgtgggtcgggctggctcggggcgggcagcgcagcgctgaggacttcttcaccgggggccggcgcctggcggccctgcccgtgg

SEQ ID NO: 436474 - DNA, 122 bp, Homo sapiens
taccccgtgtgagaggcgctgccgcagtaatgacttactgataactcactgacttgaccgcgcgggttcttttcttaccttcgttttcgggcggttcgtcgcgtttccttcacagcattcct

SEQ ID NO: 436475 - DNA, 122 bp, Homo sapiens
caccaggtcacatggtttctccacctgatgaggccatccgtcctgttcatggcccttggtcgccccctgctggctggatagacccagaccctccaggaagagctccttagaaagagctcacc

SEQ ID NO: 436476 - DNA, 122 bp, Homo sapiens
agcatcatagagcgggcgcgcacagagcggccctcctgcccggggcgtggccccggccaccgcctcttaggtcctccaagcgctatgggcggccatcttgtctccgccttctcggggccacg

SEQ ID NO: 436477 - DNA, 122 bp, Homo sapiens
aggaggaggaggaagagcgagtcctggcagcgctgctggtggcggagcgggggtggcggccggagcccttggctccatagggcctctgcccaccatgggcttatgatcaccgctgtggtcgc

SEQ ID NO: 436478 - DNA, 122 bp, Homo sapiens
gagcaggaggaaacgcacgtctttccttgatttcctgacagaaaacctttctcagccttgcgttaaacctgagagtacctgtaatcccagctatctaggtggctgagatgggtagactgctt

SEQ ID NO: 436479 - DNA, 122 bp, Homo sapiens
ttgggctgggtgttcctctcatgtgcatcaataacacttggatttccttcactccagaaccgatcacagtgaactgaaacatcctgtccctttgatggtattcctcaatgatctaagtatct

SEQ ID NO: 436480 - DNA, 122 bp, Homo sapiens
agaaacagaaacccaaagacctttagcagtagaacaataaagggcatagagctgccatgtcgctaagggggttaaaccatttcttctatgccgtaaagctaaatatcaggcggagaacaaaa

SEQ ID NO: 436481 - DNA, 122 bp, Homo sapiens
gtgttgaggaaaagcagaagaaagtcaggaaagaggaggaaaataagtcatatagggagacgtctccctaacagtgtactttagaaccacctgaagtgcttttaagatgcaaatgctcagac

SEQ ID NO: 436482 - DNA, 122 bp, Homo sapiens
ccctggtgtaagagatgtgccagcggctggccgaggggcgcttagggctagagcccggggcgctgcagaggttgagagtcagtgggtggggcgcagttatcaaacaccagggcccaaaagca

SEQ ID NO: 436483 - DNA, 122 bp, Homo sapiens
gctgaatgagcgtgatgggctgtacgggaggctgctccagatcgagaggtttccccaggccgctccactggcccatgaaataatgtctgggccgcaagcagagcagaatggggctgcggcat

SEQ ID NO: 436484 - DNA, 122 bp, Homo sapiens
tcctccacggggtatgcaggcgccgctggtcatcccggccgaggggcagaaaagccaaggcgctctccctgccaagaagcgcagatccatctacgacaccgtcactgacacggagatggtgg

SEQ ID NO: 436485 - DNA, 122 bp, Homo sapiens
agatgggagccatcggagggtttcgagctgaggggtatgaagtagaacttaacatgacgccgcctctcccagggttaacaggccccgtctggctgctgggctgagagactgccgagcaccag

SEQ ID NO: 436486 - DNA, 122 bp, Homo sapiens
cttattgttgcctctacatcataatgtatagtaagaactgataagccgggtgcggtggctcgcgcacctgtgatcccagcactttgggaggccgaggcgggctgatcacttgaggtcagaag

SEQ ID NO: 436487 - DNA, 122 bp, Homo sapiens
tcttgtgaagttatgtttacttactgcatccacttcctcactgccactcttctgtcagcccgctgaagtctggcttcccctctctgccctgagcctctgtacttccttgtgacaaaatctta

SEQ ID NO: 436488 - DNA, 122 bp, Homo sapiens
gggtgccttcccaggcgctggcgttaccgctagaccagggagccctctagtggccctgttcgggcatgacagagggctcacacttgtcttctggtgacttctcactgtgtcccttcagctcc

SEQ ID NO: 436489 - DNA, 122 bp, Homo sapiens
gctttctcctcctcttcctgctgttgcatgttcaggtccgatttagtttctagctttccccggacctcagagcctgttgcagacttcagccttagcttctctttgattacctggcagattgg

SEQ ID NO: 436490 - DNA, 122 bp, Homo sapiens
tgtgcagctgtttatttctggggacaaagggaaggtggctggtctagttttagctggatccgctgactttaaaactgaactaagtcaatctgatacgtttgatcagcggttacaatcgaaag

SEQ ID NO: 436491 - DNA, 122 bp, Homo sapiens
gtagcccgtgtcgcaaatgcattcgccgtcctcgcagcgcccgcggccccggcagtccctcggacatgtccgcgtgctgcagtcctcgcctgtgtacccgggccagcacacgcagcggccgt

SEQ ID NO: 436492 - DNA, 122 bp, Homo sapiens
gagtgaaaaggggtgcattgaaatttatccctgagcagcagacatgaactgggacttgggcgtgtggtcaccctgctccacacctgttctcaggaaagggcctgtctagctgtgattttgtc

SEQ ID NO: 436493 - DNA, 122 bp, Homo sapiens
aacatgacataaatatgcggatggaataaacaacctaatagcaggctccctgggcagcttcgttctcagaagttagatgaatcatgtaaaacagaagtttataagtttaaacgagatgaaat

SEQ ID NO: 436494 - DNA, 122 bp, Homo sapiens
tcctgttcttacgttcactgcccatgtgaagagcacgtcaggtgccatcacctgcaagctcgccgtggcgcagtgaacgctgcctggggttccagatagcgtggggtgtaactcactccttt

SEQ ID NO: 436495 - DNA, 122 bp, Homo sapiens
caaaggtcgggggcgggtagagtgggggtggggggaaccgcgggacgccctagctgtgtgcgtttcgggaggcctcgcagtgccattctgcaagagtacctgctatctcgaaaatcttttgc

SEQ ID NO: 436496 - DNA, 122 bp, Homo sapiens
ctgtgggcttggattggctgagccttgacgttgtcccagtcccggtgatcggaagttctccgtgggcactgggcggctgaaggctccggaactgcgcctgcgcttttcggtgagtcatgctt

SEQ ID NO: 436497 - DNA, 122 bp, Homo sapiens
tctgaccggagcctcttggcaggacaccctccatccctggggtgaagcatgtaatacagtcggactttgcttgcatgttttcgactctgggaaggaaaagcataagcagatactgtaaaaga

SEQ ID NO: 436498 - DNA, 122 bp, Homo sapiens
gtcctggcctcccgggggctcccaggggcagggagatctggcctggccttcccagcaatgcgtgcctcagtggagaaaccccagcttcccagcattaggacacacactctctctcacaccct

SEQ ID NO: 436499 - DNA, 122 bp, Homo sapiens
acactcatttcatttccgatggtagagaaggcagacattatcctgcaaaactgccttcagcgatccccaatccggctcttctttttttaaaaagtagctttgttttggcttttatttcttcc

SEQ ID NO: 436500 - DNA, 122 bp, Homo sapiens
tttagaaaagcttttcagatcactttcttcatccatcatctcacttaatctttataataacgctataaagcgtgtgtgtgtgtctgtctttgggggttgattatatatcaaatagttaatta

SEQ ID NO: 436501 - DNA, 122 bp, Homo sapiens
cggagccaccgtgtggatcctgcctgttgcctagcacggcctggcctccctcccagtggacgctggaaaaacgccctgaaatggggagcggatcgcggtctgggttagaccagccttgtaga

SEQ ID NO: 436502 - DNA, 122 bp, Homo sapiens
gcatatttagtggggtcttggaaccgcccggaaatccagcttttggaacgtggggcgaggcgggagggacctgcccagcaatatggagccggctggggagagccagggagcctgcaacccgg

SEQ ID NO: 436503 - DNA, 122 bp, Homo sapiens
ccagaggacagtgcaaatggcacgctgcagcaacagaggcgacttcgaccccgcccacgccgtcagcagctcggaccctagggccagataccaccacagaggctaattccagtggtcgcccc

SEQ ID NO: 436504 - DNA, 122 bp, Homo sapiens
gctgagaaatgcccgtgatgggaatgataacggcccctttgaaaggcatgcggctttgcacggagagagcagcagctcagcgtggtgccctcatcgggggagtcccaggtaccccgtcccca

SEQ ID NO: 436505 - DNA, 122 bp, Homo sapiens
ggaggctggccaggaggaagagggcgtacatagcgccgtctgactccgcagtctgcaatgcggagcgtcagctgatcccccgcagatataaatctgccctgccccaaagccgtccagagcgc

SEQ ID NO: 436506 - DNA, 122 bp, Homo sapiens
cccagggcggccgaggcatgaggtcacctggcacagcaacagcagcagctgcggaggacgcgcaggcgctgcggcgggaggcagtgtcaggctcgggcccctggggaattcctcccctcctt

SEQ ID NO: 436507 - DNA, 122 bp, Homo sapiens
cgggaacccgctgtcggcccgcgccctccggcgcctcttcaccgcactctgtgagctccccgagctgcgctgcattgagttcccggtgcccaaggactgctaccccgagggtgccgcctacc

SEQ ID NO: 436508 - DNA, 122 bp, Homo sapiens
tgtaaaatgaaattactttctcttgttctctgatgatgggtttaaaattaaaagagcatccggttttggtatggggatgatccaggattatgttgtgactgatacatattagttacttgtgc

SEQ ID NO: 436509 - DNA, 122 bp, Homo sapiens
acacccattatcaacatatcagctgcactcctgggaatatgtgccgtggacacaggagggcgagtgtgcaagcacagttgtccgaggtgtttgtttcagcagcatttgtagcaaatgtccag

SEQ ID NO: 436510 - DNA, 122 bp, Homo sapiens
atgagggtaacagaggcctaggaatgggtaaattgggcacccgagaatgtggcgcccctccgccctgctcggacacctcttggggttccccgtgactgaaggatgctcagagcctccacctg

SEQ ID NO: 436511 - DNA, 122 bp, Homo sapiens
gagagggccgtgaagacgcaggcgggggcttaaagaaacagcgagcgggctgtccggcggcgggccgcacacctactccacctagttatcccggacctaatgcggaacggccggacggactg

SEQ ID NO: 436512 - DNA, 122 bp, Homo sapiens
ggccactttaaggcttccggccacacccccgccaggccacgcccctcatggccaaggccacgcccctgcccgagccgcctgctccacctgctgcgccgcgccccgccccgccccgccccgcc

SEQ ID NO: 436513 - DNA, 122 bp, Homo sapiens
cctttccccctccccctttatcagggacttagttcatgattaggactgcggcatggagggcggcctggagcgtgctgtatttgtgctgacctgggcctcctggcctcgctgctgtcgccgag

SEQ ID NO: 436514 - DNA, 122 bp, Homo sapiens
agacgtgctcctggctcttggcacaagtgcgttcctctgggcatgcgtttctgcacctcgcgaagaaatggattttctgccctgtactaatgtgctattgagaaaaggctacaagtaatttt

SEQ ID NO: 436515 - DNA, 122 bp, Homo sapiens
aggtggtccgaggaagaacactcatccggaaccttaaaacatgggacacgcagcctggcccggacacccagcccctcaagtaggatgaggggcaggaagagccatggccgctcggactttgc

SEQ ID NO: 436516 - DNA, 122 bp, Homo sapiens
aatgaccctggccagtgagcccgcagaccccacggacagggccaccccagggccagaccccgagggccctggaaccgtcactgtccccgcgcagatgtccgcatgcacaaagtccacacagg

SEQ ID NO: 436517 - DNA, 122 bp, Homo sapiens
cgcttgcggaccggtaggaacgtggcttgtcaggcccgggctggcgtgccctggcctccccgggccctgggccaaagcccggacacttccagattgggccgccgctttaggatcctgcagtc

SEQ ID NO: 436518 - DNA, 122 bp, Homo sapiens
ttgtctagctaaaaggggagtaataaaaacgtacaacactcaatttactgtagttttaaacgaacctatgttataattctaggtttcgaagtataaagcattccgcacgacgggggatggag

SEQ ID NO: 436519 - DNA, 122 bp, Homo sapiens
cctcgagggcccagacttgaaggaaggagttcaagctgagaggggctggggacaggcaggcgccaagccggtcgctccgacagatcacccccgccaggcgcctagtggttcatgccgagcat

SEQ ID NO: 436520 - DNA, 122 bp, Homo sapiens
ccggcggtcgcagctctgtctttggggctgcgggacaggaagtctggggtggccggtcctcgctgcccggtcgccaggcagcgacctcgggatgtggagtcacagcctggagcgagctgggt

SEQ ID NO: 436521 - DNA, 122 bp, Homo sapiens
gaaaggccattctgtggtcagataaagctgttgagagagctttgggagggctgtattgagcgccctttgttctctggggtgtaagtagctaataaatgaggcaatgcaagcaatgaagggac

SEQ ID NO: 436522 - DNA, 122 bp, Homo sapiens
cgctgactctgcccggtcccagaaccaaagccatgccggggtgtggcctctgaccccacgcggaggggacctcgccttgcgggaccccacctggaacccgacctcccagcctcgcagccggc

SEQ ID NO: 436523 - DNA, 122 bp, Homo sapiens
gattggaggatcaggttagtccaccactctgctcctcctgcgcggtgagggggtggtacacgcgccctacctcggagtgtgtggcgccatgatgcagggaagatggcttcgtttcggaagct

SEQ ID NO: 436524 - DNA, 122 bp, Homo sapiens
aaggtgggcacccggtgggcggcagggatgcttcttcagtcactggaaggagactgctggcggcagcgggcgagctctccgacttgggaggaaatcaagttgaacagctcactgcttagcgg

SEQ ID NO: 436525 - DNA, 122 bp, Homo sapiens
gagaaaaggctttttagaaccgaaataatcattttagtttttcctttcccctgccaggcacgagtatactgagtgatggattaacagaatattactatttttcacctagccaccatgccctt

SEQ ID NO: 436526 - DNA, 122 bp, Homo sapiens
tgcctgatgttcttccccggctcttccctccacactaagcctctgcgcaaatgtcagctccggccagagactcccacatgtaaaggcatttatcatgattactgttccaaggtgtctgactc

SEQ ID NO: 436527 - DNA, 122 bp, Homo sapiens
accggtcgaggacggcaggagacccccgagtgcagagaaagctcaaaccggcagcgaagtcggtcctagccaagctgaaaaaacgtctcggatttcgcggacagcggcctagacacagcccg

SEQ ID NO: 436528 - DNA, 122 bp, Homo sapiens
acggtgcccacggagggggcgtggttgatctccctcacagctccgtcgggaccagagacccggggaccttttacacccagggtccgcgcaaagtgtcggcctagccagtggttgggtggcgc

SEQ ID NO: 436529 - DNA, 122 bp, Homo sapiens
gctccgcctctgacctctgcgcaggcgtagctcaaatctttcccgccctctagtcgtgcgcggatctgacgcctgacgtaattgcgtagacgccattttagccggtcagacaagcactggac

SEQ ID NO: 436530 - DNA, 122 bp, Homo sapiens
ccgcccgcggccacaactccacattccactttccacaagcacacacgaggcgtcccaccccgggctggccttcggggccacactgccccacgcagcggtggacaccacttgcacgcgtccgg

SEQ ID NO: 436531 - DNA, 122 bp, Homo sapiens
accgtccaggagaggcgcagtgagtctggggtggggtctgtcacccacagctccccaaggcggggtggggcccctgggctggcgtcacctcgggcaactggagaggaaaggttcttgtgttt

SEQ ID NO: 436532 - DNA, 122 bp, Homo sapiens
tcttcccacctgcggccacactgtgcaacctggaatttccccacctgggcggactcatcacgtcatcaccaattggatgcatcttctgctctgtgcagctggtgaaatctttctcaaccctt

SEQ ID NO: 436533 - DNA, 122 bp, Homo sapiens
aggactggacggttttccagtcaaatcactccacctatgagccagtgctgctggccaagacgcgctcgtctgagtccatcccacacctgggcgcagacgccggcctgcatgctgcactgcac

SEQ ID NO: 436534 - DNA, 122 bp, Homo sapiens
caaagtgctgggattacaggcagttattttgacaatacgattatgatggttaaactgagacgtgtgccaggaaggttagggtgactcagacagattagataaacaggttttgcttgatatga

SEQ ID NO: 436535 - DNA, 122 bp, Homo sapiens
gagtggagtattgtcaccaccctgtctccgaatgcagtgttgagggacagaagcagagcgcgctcgctctacaggatgaagaaaaggctggaggggctgcttctcctcggagaaactttgct

SEQ ID NO: 436536 - DNA, 122 bp, Homo sapiens
aggatgccaacctgctccaacatgctgggcaccgggcttagctgcagctaattacgcgtgcgctctgaccgggcggcccacagcggctctgcaggctcagcggggcgagcgcaggaggcgcg

SEQ ID NO: 436537 - DNA, 122 bp, Homo sapiens
agtgccgccaggtgggggaggccgtactgggggagggggaggcccccatgcagtccagcccgggtccacctaaccgctgcctccagcggctagagatgcgctgtgggccaggcctgctcccc

SEQ ID NO: 436538 - DNA, 122 bp, Homo sapiens
cacccctccctccggctgcacgaataatgacaacagccgcccctcccacctttggcgtcacgttcaaaacaatcctttgactacaactcccagaaggccgagcggcttagcgagtgcacccg

SEQ ID NO: 436539 - DNA, 122 bp, Homo sapiens
caatcaagctgcctttcttcccgataccgcatcagcgcctgttgaatggaattcctctgccgtcatctgtcggcgctggagcatcctgagtttccggacgggcccggccctgcgagggcgcg

SEQ ID NO: 436540 - DNA, 122 bp, Homo sapiens
gcaggcgtggcaaaacagtctctatgggagggcgggctagagatgcgagcgcggaactcacgggtgacgctaaggaaagagcgggggcgtccagaccagccccggagcgacctcgtcctcag

SEQ ID NO: 436541 - DNA, 122 bp, Homo sapiens
gtagatgtcactatagtcagacattattttaaagcctcaaaaagagaaaggtaacctcaccggagtttaaaggatctgagggggaaaaaagcaaacaagttcttctatagctaaacatgtgc

SEQ ID NO: 436542 - DNA, 122 bp, Homo sapiens
ccgccgggtggggtcgggccactgtaggctggagcggggttggatcaaatgcctttggcgcgggaactgagtgctggcccgggagaccctccggagagctcgcgggctcggcctcggcctcg

SEQ ID NO: 436543 - DNA, 122 bp, Homo sapiens
agcctgagctatgggcaaggtcacttcgacagcagttgaatgcccagctcctcatggtcccggaggagaggagggtaggtttgtcttctgatgagacatcatctgattcccttaagtcttgg

SEQ ID NO: 436544 - DNA, 122 bp, Homo sapiens
agagcagagttcatacaattccatcttaggtcagtactcaggcttttaaaaatcatcttacgttttgaaatataatacaactactctggtaacaagaatacttttaaaacaattcttataga

SEQ ID NO: 436545 - DNA, 122 bp, Homo sapiens
cggaaggccgctgcatgtcggtaccactgcagagggctgcgaattgcttttggtggcctgcgcctgctgagcgacctgtcacaaacatgcaaagctatcaaaatgaacacggttgacagggt

SEQ ID NO: 436546 - DNA, 122 bp, Homo sapiens
cccctgccctccagggaccatccctgcgtcacgtctgcacccagcaccggcctcacagcccggcccctgccctgcaccaggccactgccctgttggtgaggagggtcggaggggcgacctcc

SEQ ID NO: 436547 - DNA, 122 bp, Homo sapiens
acacagcttctacaattgtgaggcaaaactagacaatgtgcatgcaggcgatgagacagacgtataataagcacttaaactcatctttggctacaacggccagaggtagctccatatctgct

SEQ ID NO: 436548 - DNA, 122 bp, Homo sapiens
ggggctgcactcgcacctgggcaggtgggcaggcgggcaggtgggcagcggggcggcgcgcggggccgcggcaggcaggtgcggccggcaggcgcggcactttggactctgcggtgtgcgcc

SEQ ID NO: 436549 - DNA, 122 bp, Homo sapiens
ggcggtgcgcggtggtggcggcgggcgcggcagctgtgcccgtctgcccaagggttaatccgtcccctgcagctgccgcgcgtgccttgcagaatttcaccagaagagggtacagtttgaaa

SEQ ID NO: 436550 - DNA, 122 bp, Homo sapiens
ggctccacggagtgaataggaggcggctcaggcttcctggctcgcgtgggcgccagaaagcggaacctcccgggccagtcgcgcggtggtcaccctcttgggagctggggaggaggctgcgg

SEQ ID NO: 436551 - DNA, 122 bp, Homo sapiens
tcggcctctagagcctccgcaccgcgccgcccccgcctcctgtccccagccaggaggagccgctggagggacgttttcgttctcagtaatttaaggtctttgctgagagcttgacgggaagg

SEQ ID NO: 436552 - DNA, 122 bp, Homo sapiens
ggatgaagaccgctctgacggtgtggcgctccctctagtggctgagagtcgctaactcaccggcgaggcttcccaaggccggagggcggcttctcaaaagtttgttccagagatgcctcgtc

SEQ ID NO: 436553 - DNA, 122 bp, Homo sapiens
ctggacaaaggggtgattcatgaccctgggcgggacagagagggatggagcaaggcagtccgagatttcatcatgctcctcagaacagcacgcaatttgaaacttatgaattgcttatttct

SEQ ID NO: 436554 - DNA, 122 bp, Homo sapiens
aggctggacgaatccaagctctcgtctctccacctgctccgtcccatctgccttctccttcgggaggtccgtaaagctgctctggagccaaaataatggggtcacatctcgggagtgacctg

SEQ ID NO: 436555 - DNA, 122 bp, Homo sapiens
ggggcgggaagtggcgggtgggagtcacccaagcgtgactgcccgaggcccctcctgccgcggcgaggaagctccataaaagccctgtcgcgacccgctctctgcaccccatccgctggctc

SEQ ID NO: 436556 - DNA, 122 bp, Homo sapiens
cgtttcacgaagcacctgcactcttggctgctttacgctcccttcagtgcgtgagggttccgggctcggcacatcctcagcagcccttgttactgcccatctgcgtcgcgaccgccatgcta

SEQ ID NO: 436557 - DNA, 122 bp, Homo sapiens
tgttgcccccgatgacaggcgtggaccctgagccgaagctgcagggccccccggccgtgacgcgggactgatactccttgaggcacactttgaagtatgtgtcacactcgtcgcgggtgcac

SEQ ID NO: 436558 - DNA, 122 bp, Homo sapiens
gaacataaatgtgattgagggaattcagtggggaaacagcttgaccgctccggtctttgacgatccaaaagaaacccttaacacttgagaaggactgggaggtcacttaccaaagggagcca

SEQ ID NO: 436559 - DNA, 122 bp, Homo sapiens
taccgtgcctggcctaagatgcttattttttaaacatgttagtagttactggtgccattccgaccccgacattctcttttccttattcttccccatttatgccaaggaaatggcccaatggc

SEQ ID NO: 436560 - DNA, 122 bp, Homo sapiens
caacatctgccccgtgcagcacacgcggggcagtcagcagcaaggcgctcagctcctgcccgtggaggcttcggttgaaggaatgcaggaatgccctgcctgtcagactcagtgcggcggac

SEQ ID NO: 436561 - DNA, 122 bp, Homo sapiens
tcatgttttcctgtctgctcgttcccccttttcttttacgctctgatgtccgaaagttgccgccagcatcaaatggacggtgtttcttcctcttctgggtacctagagcgcttgggaatgca

SEQ ID NO: 436562 - DNA, 122 bp, Homo sapiens
aatactcatataaaaagctgaaaagagagcttgtgtgcagatacctgttggaagaatgcacggatagattagttctggaataatgcctgagacacagcacccagaacctcccctggacttga

SEQ ID NO: 436563 - DNA, 122 bp, Homo sapiens
ccaaaacaaatggggaaaccaagccttaaaggcttgggtttccaggaccaagtccagatacgggctgtagacagagatgagctgcggacagtgatgagctgcagacggtcaggagctataga

SEQ ID NO: 436564 - DNA, 122 bp, Homo sapiens
ttttggcatggcaagaagttctggcattatgtgagtgatgcttaacagaacagtgggggtcggagcaccctgataaatctggttttctgacagtagtggtgttggtatgctgagagtgtgac

SEQ ID NO: 436565 - DNA, 122 bp, Homo sapiens
tggggcccggtggacacagagggccaggctgcaaccacagtgagacccgggccacgggaacgccacagcctcacaggactgcgctgaactctgaattctgtcctccaggcaatgtgtaagaa

SEQ ID NO: 436566 - DNA, 122 bp, Homo sapiens
gacatggtggccatcagaatacctacaagccatactgaagcagcagcaggagagaccaaccgaccgcacacatgttgtgtttggatatggagtgaacacaattatgtaccaaatttaacctg

SEQ ID NO: 436567 - DNA, 122 bp, Homo sapiens
tattagagttaagcagaacgtgattttgaatctagggggaaaagttcatcctttgttagtcggtcagtaagttagtcatataccttaagcactcactagtgaagagatgtttagatgaaata

SEQ ID NO: 436568 - DNA, 122 bp, Homo sapiens
ccgtaagtgtcggttctagttccaattcctctccactgcagcatctcagatgtaaactggcgtcagtaacaggtcctgtcatccacctcccaggaaaattgtcaaagataatagttatggcc

SEQ ID NO: 436569 - DNA, 122 bp, Homo sapiens
acagtttcaaagagggaaaactgaaacccagatcgtgagacccactgtttcttctactgacgtttttgaaatcctctactatttcaaccaaagtcattgattcaataaagttacaatttgac

SEQ ID NO: 436570 - DNA, 122 bp, Homo sapiens
cacacacacacaaatcagcatcataagggaatgtagccttccaacagagatgatgctgttcgtatgttaatctcagagacagtatttcaagagagtggcaggtctgttcctggtaaaatttt

SEQ ID NO: 436571 - DNA, 122 bp, Homo sapiens
tcccaatcgcacaagtgtaggggcggggcattctttggggggcccaatgaggaacgcggccgaagctggcctgtcaagagaaggggctgggggcggggagatggtgagtcggggataaacac

SEQ ID NO: 436572 - DNA, 122 bp, Homo sapiens
cttcaatattgtcacttcaaggtgggctcctaatatggcggggtgcacttcttggtgtcccggtaacagtggctgggccaggtctgactggatattccttgctggtcttttgcccaccggga

SEQ ID NO: 436573 - DNA, 122 bp, Homo sapiens
aatacgaggccgagggaggaattctgtcgtctgggaacggctggtttcgcggtcagacgccgagggccctcgaagtccctagcaacggctgcggagggagatgtaagtcgttttggacgcag

SEQ ID NO: 436574 - DNA, 122 bp, Homo sapiens
gcgggctgggaagcggggcttccgggccgcagggtcgcggggacgggtgtgatgcaatcgcgccacagccgctgcgtcaaggggcggctccgggatgcgggcactgcggtagagcccgtcct

SEQ ID NO: 436575 - DNA, 122 bp, Homo sapiens
ttccgtgatttgcagggagggttgaggaaatcgcagagatccagggaagttcaatggaatcgctttagcctggaacagctgatccaaatatgaagcaggtaagcttaggtcatccactcaaa

SEQ ID NO: 436576 - DNA, 122 bp, Homo sapiens
gaggataccaaacaaaggaacaactgtcttaatggtaacctaattgttaggaggattactcgccatatctaccttacatgtctctctgtacctgaaaaaaatataaatcgtgactgcacatg

SEQ ID NO: 436577 - DNA, 122 bp, Homo sapiens
acaccacagcttcccatctgcctggtcccccaagtgcacatacaggtcctgtgggaatgccgggcttgtgagggctgttaattacaaggccataactaacaattaaagatctctgttggatt

SEQ ID NO: 436578 - DNA, 122 bp, Homo sapiens
cggccacggtgcctgcacctccgctcctcctctccctgcaccctccaggcctgggggccccggggctgaccttgaccttcccacccgcccaggtgtggccgggacagcaccgcagttgtggc

SEQ ID NO: 436579 - DNA, 122 bp, Homo sapiens
ggctggacctgggcggggtagaggcggggccccaggcggagagaccttgccctttagaaccggcagagggagggcccggggcgggacctgtgcttctcagcctcgcactcagcgcctctgtt

SEQ ID NO: 436580 - DNA, 122 bp, Homo sapiens
cgcatactgctgatgaaatgcagcctggtttgctccagagcacatgttttctaaaacacacgtgtaactgatagacttagcgactgactaggtgtgaagataatataaaagttgcattagtc

SEQ ID NO: 436581 - DNA, 122 bp, Homo sapiens
atccaccaccctccaccctcccccaccagggttggctgcttcgtccctgggggtctgcagcgagcaaggcagagaggaaggaggctctgagttccagcctggcctgtgcccggtcaacctcg

SEQ ID NO: 436582 - DNA, 122 bp, Homo sapiens
tggggaagcaatgtagttagagacaattcccaaaaccatgtgagcaaatgctctgtagagcgcaccaatgcaatgctgccattgtgaggccaagtctctcctcgtcttggtactgagccctc

SEQ ID NO: 436583 - DNA, 122 bp, Homo sapiens
ggactccctttacggttcccggcacctggcccagctcatggagtctatacctcacagccccggccccaccaggatccaggctattgtaagaccagggtcccctggcttctggcgagggaggg

SEQ ID NO: 436584 - DNA, 122 bp, Homo sapiens
ctagctcttgtcataaatccacagatgcctcatttcacaataaggaaaactgagccaagacgggttttagtgactcatttaaaatctcactgctgcttatggcacctctgattatcatcccc

SEQ ID NO: 436585 - DNA, 122 bp, Homo sapiens
ctggcccacctggcagtgccctcatgcaccagccctaaccctccagggcctgaggctccacggatccaagcctgctctaattaagacccattaccctgtgatcacccacctcctgggggtgg

SEQ ID NO: 436586 - DNA, 122 bp, Homo sapiens
ccgggctccctccggaggcgcgctccagcccctccccgtttccatggctaccagcagcggcgtccacacctctgcccccggtcccacccgagctgaccgtaccgggagccctggcagggccc

SEQ ID NO: 436587 - DNA, 122 bp, Homo sapiens
ccaaaagagggactagaaatgccacggaccaaagctcttcctattcatgaaactgcatcacgagtcaggattctctcctgacgaccctcctgtggcccctgcacaatttgggagagacgccg

SEQ ID NO: 436588 - DNA, 122 bp, Homo sapiens
tttggacaattaccatggcaatcacaggccaggcattttattccagtcattgcctgggaacgctccttccacatgtcttgctttctgtgttacaggcttattactgtacagcctccagccct

SEQ ID NO: 436589 - DNA, 122 bp, Homo sapiens
cgaaaccaagtaagtgatgctttctctcacgttcgtgccgtggggccagggtaactctcacgttcatgctagctgtggggccagcgtaagctccaccatcagcaggttcagggtttaacatg

SEQ ID NO: 436590 - DNA, 122 bp, Homo sapiens
aagattttttagaaatatagtaagacggaagtattggacatgttggcagtatgaagagaccggactgatttgactgattcttaaaataatagtgtttgaaaatatagaatccagtgttttat

SEQ ID NO: 436591 - DNA, 122 bp, Homo sapiens
ccatgggctgctttttttctagttcatcctttcatcaaagggttgcacattgagcagtgccgtgttaaggggggattcttcattctaccttcttttcttgtattccttgacctcagctgggc

SEQ ID NO: 436592 - DNA, 122 bp, Homo sapiens
ctgcgcgctccccacatacacaagctctccatgtgagctgacaggcgagtggaaacccctcgagtcacgctgcccggcggcggagggagcgctcgcccgcagtggcaacagctgcaccaccg

SEQ ID NO: 436593 - DNA, 122 bp, Homo sapiens
ctttttataagactgaaaaccaagcccatgtgacgaaatgactgtttctttccgccttttcgtaccccccacaaatttttccctcctctccccttaaaaaaattgcgtaagcccggtggggg

SEQ ID NO: 436594 - DNA, 122 bp, Homo sapiens
gcctgggcttggccccagtagacatatgagaacaggtgactgccagaaccacccagagggcgggaagcctgctgttgccaggtccaccatgtgaatcacaatgactgcatgaggtcacagaa

SEQ ID NO: 436595 - DNA, 122 bp, Homo sapiens
gccccggctcgctaggctttgatggctgcttccgctccccataaaggcctgtttcatggccgacgccggcatgggctttacgtctgccctcgggctccctgcgggctgcagagggcagcggt

SEQ ID NO: 436596 - DNA, 122 bp, Homo sapiens
cccagggggcggcgggctgaggagcagtgcggggctggatgatgagtggtctggcgtccccgatggagtcttctcatcctccgagctgcctaacaccgacttgccgctgccattcagcgggt

SEQ ID NO: 436597 - DNA, 122 bp, Homo sapiens
ctaaggttgatctggcggctgagcgggcggggcgctcacctggacactcgcagctcccggcgtttccagaacctcccgcggcgtcgcccggtcagctcggcgcctcctcccttggcgactcc

SEQ ID NO: 436598 - DNA, 122 bp, Homo sapiens
gaagggaggcaagagctcagttttatattgagacattacgccggctgaaggcagagaatgcgtttccctgccaggacctgatgcaatccattcaagccaacaagtttggagagaatgttgag

SEQ ID NO: 436599 - DNA, 122 bp, Homo sapiens
tctaaaacatattctgatctgttgctttccataacagttctcacgctctgcagccagaggcgtgggcaggaaatatttggcactttattgcgatgcaaactacagggattataaattggaaa

SEQ ID NO: 436600 - DNA, 122 bp, Homo sapiens
ggactcttattttgaagggcggcgggtgaaggctcggagcctcctgagtcacccggcgggcgaggtataaagcccgatacctgccccgcgcccggtccgcggagcccgctgcagctcccgct

SEQ ID NO: 436601 - DNA, 122 bp, Homo sapiens
agcattgctggttctatttaatggacatgagataatgttagaggttttaaagtgattaaacgtgcagactatgcaaaccaggcccagtctccagtgtggtaccgttgctcctgcatcgcagc

SEQ ID NO: 436602 - DNA, 122 bp, Homo sapiens
gaggcaggagaagctgggcctggagaggctgactcgaggaagttttgcaccgggagaggccgccgagaggacggagctgggcccggggaggccaacttgcagctcttccaggcccacttcca

SEQ ID NO: 436603 - DNA, 122 bp, Homo sapiens
atgaccaaggaaccccgcccccggcccgcctccctccgtttaagaagccaatctgaagagcgctaaggccagacaccctcgagggagaatctaggggcagggctgcaaaactgggcttggaa

SEQ ID NO: 436604 - DNA, 122 bp, Homo sapiens
caatttcctgtgtttgcaatgttgaaattttttggtgaagtactgaacttgctttttttccggtttctacatgcagagatgaatttatactgccatcttacgactatttcttctttttaata

SEQ ID NO: 436605 - DNA, 122 bp, Homo sapiens
cgatgttgccggcctcgggggcagccggctttcctggcagtggccagtggtcctgagtcccggcagaaaagcagcagccacgatgcgaaccctccctctcctcacacctggttattcccttg

SEQ ID NO: 436606 - DNA, 122 bp, Homo sapiens
aatgctcattaatatttatgagatgatcaaatgaagattaaaaaaagccaaggcttatagcggataaatagcttgtacaaggtcacatggagagtggtgtagctggcaattagttcaggtgt

SEQ ID NO: 436607 - DNA, 122 bp, Homo sapiens
ctcagatctcctcctgatctacccagctgtcctttcctggagcagggagtgttcctctgacgggatgtctcactcggcatcgggagacccttgacgctgtcattgcagggcccgtggcatct

SEQ ID NO: 436608 - DNA, 122 bp, Homo sapiens
cactctttttgtggaatctgcaagtggatatttgtctagatttgaggatttcgttggaaacgggattacatataaaaagcagacagcagcattcccagaaactactttgtgatgtttgcatt

SEQ ID NO: 436609 - DNA, 122 bp, Homo sapiens
tgtttgttacggctagagctgagctttcactcccagttccccactgctgtttgtcaccttcgcagacccgccgctgacttccacccctccggatccggcagggtgtccactgtgctcctgat

SEQ ID NO: 436610 - DNA, 122 bp, Homo sapiens
atgaatatgcaaataccacataattggcagccaatggcatgggttctggtcacatggtgccgatggtaggtgagcagacagaagttgtcagtgaacagagacggcgctcagtctggggcgag

SEQ ID NO: 436611 - DNA, 122 bp, Homo sapiens
tgttaggagaagcaatctcctcattcctgcgctgtggagatatatttctcagctagggcgcgagcagtgccagcactgcccccggtgaggtccctggcagcaataaaaatttttattgtgat

SEQ ID NO: 436612 - DNA, 122 bp, Homo sapiens
tcggggaaggagccgggagccagggggtggggccgcgggtggggccgtaggtggcgcatgcgagccgagctgtcataggacccggaacgcgccgagaggcgcaccgcgcggggcctgctggg

SEQ ID NO: 436613 - DNA, 122 bp, Homo sapiens
cgtccgatccaagcgccaaattcaaatttgcggccatcttgagcgggcggaattcagtcgcgcgcggtgcagtcgggaggtggaggcaccggctgcattgttttcgggatcgaggggtgagg

SEQ ID NO: 436614 - DNA, 122 bp, Homo sapiens
gcgctgcgtgttcagccgccaggctcttacctgcattacaggtggaggtgaggaagccaccggctttctgtcttgagcgctcccctggctgtggctgctggggccctaggcccgcgccccgc

SEQ ID NO: 436615 - DNA, 122 bp, Homo sapiens
ctaatgaaggctatgtttatgttggccttatcatagctatccaaccggatgccagatatccggttgctggccaagtagaaacttctatctttttttatcttatctagttaatctaggtactg

SEQ ID NO: 436616 - DNA, 122 bp, Homo sapiens
cagggtttagccatattgccaggagggtctcaatcacttgatctcgtgatccaccagcctcggcctcccaaagtgctgggattacaggcgtgagccactgcgcgtggcctcttgtttcttta

SEQ ID NO: 436617 - DNA, 122 bp, Homo sapiens
tgcagtgcttatagaactctccacatatgaattctgcgtaatttttcttaataataacagcgaatacgaattgaactcttactatgtcggaaactgttttaagtactttaagagtattaaca

SEQ ID NO: 436618 - DNA, 122 bp, Homo sapiens
aaagcctctaggttggttctgtaccagttgccaggaatttcgtactctaataggagggtccgcagacccagtgggagccgcactgcacctaaggacttcccaaccctggcggagctggaaga

SEQ ID NO: 436619 - DNA, 122 bp, Homo sapiens
ctcatcaatgactttaccataaagcagatgaggcagggagcattccttgtgaacgcagcccgtggtggcctggtggacgagaaagccttagcacaagccctcaaggagggcacgatacgagg

SEQ ID NO: 436620 - DNA, 122 bp, Homo sapiens
aggggactgacctgggccagctgagagtcgaggggcctccgggccctccctagccccgggcgcctgttcatcggacctaccttgaaaaggtgacagcggagggacaatgacaacggccaggc

SEQ ID NO: 436621 - DNA, 122 bp, Homo sapiens
tgcgtccctgagggtaggcttctaaaatggccgcttcgaggggcggccatcttttatggtcgaagctgtagggatgaaataaaccccagtctcctgtagtgctcctaggcttattaggatga

SEQ ID NO: 436622 - DNA, 122 bp, Homo sapiens
ctcctctcttgaacatcttttgagcgtgccaggcggatgccccttcaggccagtcacagccgtggctcctgtggacacatggagtgggagagaacatcccgtttctttctaactctagcctg

SEQ ID NO: 436623 - DNA, 122 bp, Homo sapiens
cttctgcggtgtgcttggctcagctcaggcaggaagccctgcctgaaaaggctgcaccttcggctgtcactctgtcctcattcggcccagcgtttggttacatcttctgtcactcagggcct

SEQ ID NO: 436624 - DNA, 122 bp, Homo sapiens
attctcccacccacttccactccccgtttccctccttcacccattcacctgagggcaagacggcctaacttcacacagagcccaaagatgcttattgaggatgctttcgacctggtggagtc

SEQ ID NO: 436625 - DNA, 122 bp, Homo sapiens
tccaggcctcatcactgaacagctgagcctgagaccccacttctcaccagccaaccccgacgagtggactcagatgacaacatgccacttacaagggacacagctaggtgttgtgttggctt

SEQ ID NO: 436626 - DNA, 122 bp, Homo sapiens
ggcagccttttgttcaagatcaaatggatgtgatttgccttgtggaggtggcatcctgcccgggcggaggaggggatggttcctggagctccatcttgaggatctgggaggccaggaagaca

SEQ ID NO: 436627 - DNA, 122 bp, Homo sapiens
ccctaaaatcggcccctccaaatcaaagtacaaagacttcattttcattatgcaaaggagcggcatcctctttgatctttaggggagtgagcagtagtgctgaacccactctcccggtttcc

SEQ ID NO: 436628 - DNA, 122 bp, Homo sapiens
gcttgggccgggacagagggatgttgtctacccacaggtacagctggtgcagcgcctcctcgtccacgctgctcgccattggcgtcctcacggcctggccgccccagcggtgccgggtcccg

SEQ ID NO: 436629 - DNA, 122 bp, Homo sapiens
cctttcccctttcattcttattccttagagttctgatgatcatactttgcctaggacattcggaggcccctgccatagtcctttcatcagcccttactgctttttgatccttttgtttttcc

SEQ ID NO: 436630 - DNA, 122 bp, Homo sapiens
cagacagccgaggcccttttcggcaccaggtgagtcggggtgagtcaggctcctgcaagtcgtaggtgttgcttccgtgctgagatcacgttctttgttttgttttgtgcccgtggcttgtt

SEQ ID NO: 436631 - DNA, 122 bp, Homo sapiens
agagaggggtccaagctccaaagagaagcctccagcaccagcctggggatggagctgcagcgacgaggaccgggaagctggaactacctcaccccgagcccagctcagcccagcccagccca

SEQ ID NO: 436632 - DNA, 122 bp, Homo sapiens
tcggtgaggaggaagatgggaagagtccaaggtcccagaaagaaccatcgcaggtgagcccggggcccccagctccgtgctcctgcaccccagggcatgcgtgccgcttctgggacggcctc

SEQ ID NO: 436633 - DNA, 122 bp, Homo sapiens
cggggccgtcgctcgctcgcgccggttgggagcggccctcctagtctggatttgtgcgggcggggagtgccgtgtgcagaactgtggccactttaagggaaaagacgcctctgccattcctc

SEQ ID NO: 436634 - DNA, 122 bp, Homo sapiens
gaacccctcccaccccgcgcggggccccgcttcactatcacactcctcgccttcctccaccgccacccgcacacgcgaatgacccagcaagcgctcccctcccgaggccgcctccccgcctc

SEQ ID NO: 436635 - DNA, 122 bp, Homo sapiens
gagtggggagaggcgggccccgagcagccaccccggtcgccggccgggtcgggcagctcgcgctcacctcggtcctccagcccgtcgctgaactggccgctctcgctgatccgcacctgccg

SEQ ID NO: 436636 - DNA, 122 bp, Homo sapiens
cggctgtggcacctgtcccctgaacgacgctgggcgctcctgcactctacacacacaagccggctgtggcacctgtcccctgaacaaccctgggtgctcctgcactttacacacacaatccg

SEQ ID NO: 436637 - DNA, 122 bp, Homo sapiens
cggccggcagggcagcatctaggtctatgggtctgtccgcctgtctggcggtcggagccccgcagtcctcagccgcccgcgccctcggcccggggcgcccggctgcgggcccgaagcgaggg

SEQ ID NO: 436638 - DNA, 122 bp, Homo sapiens
gacgtgtcctgataaaacatccttcccaatttacggggccgcgcttgactaatctgcctccgcgcgcacactgtctaatcatgccatcagcaccgcgagaaggggctcaattgggactccaa

SEQ ID NO: 436639 - DNA, 122 bp, Homo sapiens
gtaagaaggaatagaaactaagcagcaaccaagaatatcataagcctacctgtttccgcccggtttcgaaccgcggacctttcgcgtgttaggcgaacgtgataaccactacactacggaaa

SEQ ID NO: 436640 - DNA, 122 bp, Homo sapiens
actacattctggggaaagaaggctcagcagccacctgcttttttgcccgggtgggtggtccggccccgagccctcctgactctctcgccaatgcccagaggcgccgcagcgattccagggag

SEQ ID NO: 436641 - DNA, 122 bp, Homo sapiens
atattacaattatagaaccccattcatgaatacagagtctggtatcaaccaggattccagcgtaaactccatgaacaacctgttcctgaatgcaggagttctgtcccttcaaggaaatcacc

SEQ ID NO: 436642 - DNA, 122 bp, Homo sapiens
tgaactgcctccccagcccccttactgtattcctgaagcttcttatcatcttgcagaactcgtccctggtaaatgagccgttgtttttcagatgggatgctgacagaggcagcaatgtgctc

SEQ ID NO: 436643 - DNA, 122 bp, Homo sapiens
cccccaggtcccaggttggagaacacttcctctgcgaagaggtcggggctgggtcacctccgcggacaggacgggactagccactgcctgcatctcttcccccacgccctgagccccgcagt

SEQ ID NO: 436644 - DNA, 122 bp, Homo sapiens
cagtaatttaagctaacagtcattggttcttcacagtggcccaggagctatactggatatcgggctcaaacatgaatttgcaaatatccctactctaaagatgcttgtaatcaaatatgtct

SEQ ID NO: 436645 - DNA, 122 bp, Homo sapiens
cagggtccctaccgaggtcatgccctggtctgacccgcgggcagtgcagtggggctgtggcgagcagggccctcagcctgactgcatggctctgtccccgcctcaggccacggtcaaggccg

SEQ ID NO: 436646 - DNA, 122 bp, Homo sapiens
gaccttgccagcctcgttgccccagatgtcaggcttccagaggaactctgcagtgcgtgacgaacgtattgttgcatcctctgaagagctgagaaacgtcatcagtttgtgatgcctgggcc

SEQ ID NO: 436647 - DNA, 122 bp, Homo sapiens
cagtgatttgcaaggagcagtgtatcaagatactttgcattggccaggcatggtggctcacgcctgtaatcccagcactttgggaggccaaagcaggcagaccacctgaggccaggggttca

SEQ ID NO: 436648 - DNA, 122 bp, Homo sapiens
taaacccacagaatcatgaacataccaacatgtgttctccatgaaggctgaccctcccttcggagcttttgaggggtatgcccatagccccactgcccttcttgatgctctaacctcagccc

SEQ ID NO: 436649 - DNA, 122 bp, Homo sapiens
aaataatttaattgtacattttaaaataactaaaagagtataattgcattgtttgtaacacgaaggatgaatgcttcagtggatgtatgctctatttactctgatgggattattacacattg

SEQ ID NO: 436650 - DNA, 122 bp, Homo sapiens
ccgggacgcccgttgcgaggacaccctgggcctgtgccctcctactagcaccgccctcctcgtctgcagtagccaatcaacacgaggcttgtaggctgccgttcctcgattggctacggctc

SEQ ID NO: 436651 - DNA, 122 bp, Homo sapiens
tccaagtcgacaggaaagtggatgtcttggccccagagtgtctgcggcccagaagatgcccgtctcttagcctcccgcttgccccgaaaggctggatgtgggcaccacttggcgggcagacg

SEQ ID NO: 436652 - DNA, 122 bp, Homo sapiens
agcagactcgagcatgccaagttatgagacgatgataactctgccccgagcctctggggtcgtggccgtgggccggcaggggcgaggcgggcgtccagagggcggataaaaggggccgcgct

SEQ ID NO: 436653 - DNA, 122 bp, Homo sapiens
ttctcagattcttcttccacgagtatttttctacaatattctgatatgcattcctccccacgttctttctagtacttcttttacatattttattttctgagtcaagctcattatgtgtatct

SEQ ID NO: 436654 - DNA, 122 bp, Homo sapiens
ggtacatttgggcaggctgggttttggaagcaactcactccacgtcttgtcatacctgatcggcctggcgggtccctcactggaggtgggggtctctcactgggcgggggaggaagaggacc

SEQ ID NO: 436655 - DNA, 122 bp, Homo sapiens
gggcaaccggaccctggtcaggagggtgcagcacagcgacaccccctctggggctcgcagcgtcaagcaggaccaccccctgccgggcaagggggcgtcgctggatgcaggctcgggggagc

SEQ ID NO: 436656 - DNA, 122 bp, Homo sapiens
ccccctaggcggtgttcccggaccgcctcccgcacgcagaccctcttcgagcctgagccgcgggaccccgcgcgtaaaggcgccctcggcccaccccggccacccaaagacggcagggggcc

SEQ ID NO: 436657 - DNA, 122 bp, Homo sapiens
gaggggcaaggggcgggcgtggggttggactgggacgtgggactcggaccacggcctgggcgtgggcctaacgacgcgggaccggcccgccctcgccgctccattggccacatctgtgcaga

SEQ ID NO: 436658 - DNA, 122 bp, Homo sapiens
cgatgcgctgggcacactcccgtgccggctctttgtccagcggcagccgcaggcggtgcacggtgcgcgtctcacaggcctccagctgcagccggatgtctttgagctcggagatgcagcgc

SEQ ID NO: 436659 - DNA, 122 bp, Homo sapiens
taaaagccagctcctctcctttcggcttccccacggtgcctttcgggatttgtagtcagacgcgcttcagccggctctaaggagagcaaaggcaagactccaattcccagcatcccccgcgc

SEQ ID NO: 436660 - DNA, 122 bp, Homo sapiens
gggatccggggacctttgcctagagtggctgttggatggggtatccccttctctcctccccgcctcccggccgagcccagcctggggtcacttgcagccgcacccacctgccggtgcgccat

SEQ ID NO: 436661 - DNA, 122 bp, Homo sapiens
cagattctaagtatgaggggcaccgcgctttgtcggctgaggggcggggcgtgagtttctcgagggtcggggagaaggaattgtcagtcgcgttcggactcgcccgcctggcggatatcggc

SEQ ID NO: 436662 - DNA, 122 bp, Homo sapiens
ggctgctatcgttttagcacttcccttcaaagtactatccaacagggccccaaatagtatcgcaaatagcagctcctgtaaatattcaggagggtgtactgcgcacaagttgcagaggggag

SEQ ID NO: 436663 - DNA, 122 bp, Homo sapiens
ctacgggcgaccgcggacggcggcgcgcgcgttccccgcagcgctgaggcgagcctgcagcgtgctccactcagcatggtctggcagccggagaccaggcctcaccgcagcctcgccacccg

SEQ ID NO: 436664 - DNA, 122 bp, Homo sapiens
ggagatcaccatcccccatactccaacccaaggagagcctgttcccacagtggtggctctcgagagcagctgccctgcacttactgggaaagtctctggcctcagccactggggtgctcagc

SEQ ID NO: 436665 - DNA, 122 bp, Homo sapiens
gggaaacttgtaattacagctgtaatgcagtcacagtttgtaattacgcttgtgtgcgtgcgtgcgtgtctgtgagccctactggatccaagccccagcaggcaaggattgcacctgcttgc

SEQ ID NO: 436666 - DNA, 122 bp, Homo sapiens
gccccaggtccgtcccgccacctccctacagctcaccccagccagggcaaggccttgtcacgtccccactctgccgctctcgagttacccttgtcacggtgggcccaacccgcaggcattct

SEQ ID NO: 436667 - DNA, 122 bp, Homo sapiens
caacatggtgaaaccctgtctttactaaactacaaaaaattagcccggcatgatggtgtgcgcctgtagtcccagctactcgggaggctgaggcaggggaattgcttgaacctgggaggcag

SEQ ID NO: 436668 - DNA, 122 bp, Homo sapiens
tgatggggaatggaggattttgctgttttattgcagcccgcccccggagaaaggcgggctcggacgttcttgactttaggatagactggggaggggtgccgaggagcgttcttccctttacg

SEQ ID NO: 436669 - DNA, 122 bp, Homo sapiens
caccttcagcctctgaccccgtgtttctgtcttgctgtgtggcatccagctcgctgtctgcgtgtctctgagccatggagcccactgtggctgacgtacacctcgtgcccaggacaaccaag

SEQ ID NO: 436670 - DNA, 122 bp, Homo sapiens
tgaactcgtgatccgcctgtctcggcctcccaaagtgctgggattacaggcgtgagccaccgtgcctggccgcaaatgtcttatttctaattgctatcagatctggtaccaaaggagaattt

SEQ ID NO: 436671 - DNA, 122 bp, Homo sapiens
aggcacctacacccttccctcgacccgggtagggggaagttccacgaaggcccgtgggggcgccttggccaccttcccgcaggcgaacccgagccagagaggcccacagtcctcgccgcagc

SEQ ID NO: 436672 - DNA, 122 bp, Homo sapiens
ggcgggtgaggcgcgggacgaaggcagggtcttggggaggggtctgaaaaatgtgggggacgaggagtggacctcagcttgagatcagggcagggtctccgggtccctccaaggcaccgccc

SEQ ID NO: 436673 - DNA, 122 bp, Homo sapiens
tgcttccctctgcccagggactgggccatgcttcggtctatcagaggcattctactgctgcggccccttcgtgtaggtggaatattgaagctgggactcgtgggaggaagtcttgtattttg

SEQ ID NO: 436674 - DNA, 122 bp, Homo sapiens
agagtctagtaggaaagaaaattaatttgataattgtaattcagcaactagtgctaaaggcgtagattgcaacagaggacttaatcccaagaagaaagagttcaggggaaacctccttcagg

SEQ ID NO: 436675 - DNA, 122 bp, Homo sapiens
agagttgtgtgggccacttatggtggaaaccaaaatgttttccacttaccaagttgaaaacggtttatgttaaaactattttgcctgcaggttggacccgatcctgctagggagtctcctgc

SEQ ID NO: 436676 - DNA, 122 bp, Homo sapiens
cccaaagtgctgggattataggcatgagccatagcgcccagccgacttcttcaatatattcgtatatgtgaattgagccttccatttcttcctttacctcctctttcatccattggaaccag

SEQ ID NO: 436677 - DNA, 122 bp, Homo sapiens
cccaccgcccccatgattcagttacctccacctggtctctcctttgacatgtggggattacggagattatggggattacaattcaagatgagatctgggtggggacacaaagcctaaccata

SEQ ID NO: 436678 - DNA, 122 bp, Homo sapiens
aagctgcctgtctccctgaaatctggaggcgcactgacccgggcacgtagttatataactcgctattttcagctcaatgcagcaacatttcctgctactgggataagtttgagaagtgttgg

SEQ ID NO: 436679 - DNA, 122 bp, Homo sapiens
ctccaatgcctcccacagtacctagtaaaactgaactcctcaacagcctgcaaagccctacgcaattagcccctgccacctcttccctttgatcactctgcttcagcaatctggcggccttt

SEQ ID NO: 436680 - DNA, 122 bp, Homo sapiens
cacccatcgtgcaggggccccatgtgtgaatgtcgtctgcaccgtcgctctgtcagcgtccgtaggtctcccggatcacagtcctgcccccattctcctgggagcttcccagacaagtgtca

SEQ ID NO: 436681 - DNA, 122 bp, Homo sapiens
ctatagttaactagcgtatagggacgaatgaatgaccttaaagctcttaaccattggattcgatctcgccgtggaggcatggattccaaccctccagtgacggtcgtatttgtttctgtcac

SEQ ID NO: 436682 - DNA, 122 bp, Homo sapiens
gaacaccctccagtggctcctcctggcacttagaataataatcatgccctacaccttggccgactgggtcccatgagaactggcctctgcccacatctctgactgccccatcctcagtcacc

SEQ ID NO: 436683 - DNA, 122 bp, Homo sapiens
cagcctgttatcacttaattccatcatcagtaacctcataccccctccacactgtacccccgcagctttctgtttcatgaaatcaggtagggggcttttgcattttgttctttattgtctca

SEQ ID NO: 436684 - DNA, 122 bp, Homo sapiens
ctctgctcccaggttatgagcctccctgtcctggagagttctagcctgaagctcccttcccgagcagaagggccttgcctgcctgacctctaccacctacagctgaccactaccctggctta

SEQ ID NO: 436685 - DNA, 122 bp, Homo sapiens
cttcagacggggcttcctgagaaaaagttgatagcgtggtacccagaggtttgggaaaggcgtttggctgggggcctaccgccagataaaaagcattatctacatggcaggtaaagatggct

SEQ ID NO: 436686 - DNA, 122 bp, Homo sapiens
ggtcgccaacatcgatgtacaacattgatgttctacaacattgcttaacgcaaggggagacgctcctgactcagagtgtttaattgctcacctacttctttttctgccctctttggcttctg

SEQ ID NO: 436687 - DNA, 122 bp, Homo sapiens
aagcgccaggccgcacgcgcgcacgcgttcgccgcccagcggcccggcgccgagctgcagcgtttatcttgagccggggttccgctggccacctgggggcctcattgccccatcccctccgc

SEQ ID NO: 436688 - DNA, 122 bp, Homo sapiens
gaacatgctaattctaaaaatacagactcccttgctgtgaaagacctctcaggggagaaccgacattgaagcaaaacaatgatttcatccctcccgcccaccatcccccagcctgtgaacca

SEQ ID NO: 436689 - DNA, 122 bp, Homo sapiens
ctaagcctccaggcatccagcaaccctcggccgcgtgtcgcacacatcccgggtttcggacgagtgtgaagctcacggaaaagccaggtgggttctccaaggtggagccacagggggacagg

SEQ ID NO: 436690 - DNA, 122 bp, Homo sapiens
gaaatacctcctgctgcgacgcggccctgcatgtgcattaacctgcccccactttgtcaacgggtttggtaacactcactgccctgatggaactccattcccggtccccagcgcgctcccca

SEQ ID NO: 436691 - DNA, 122 bp, Homo sapiens
agccgcgcaggggccactagggaggggctctggcggggtcgcaggggcgcggtctgcgggcgtgggggcgggacctcgggggcggggcctgagggcgcgcgcacgcctccggcgcgccccct

SEQ ID NO: 436692 - DNA, 122 bp, Homo sapiens
ttccagtggaataacccccttctgaaaaatggtttcacccgctccttctctagaacgggtcgggccgctaccactgtccggcccggaggggaactgttttctccggaagtgacaacacgctg

SEQ ID NO: 436693 - DNA, 122 bp, Homo sapiens
gtgtaggggaaaatttttgcattgcctagagaccatacccttccaggttgagtctgattccgtggaagttgtttacaactttataagttatagataaataacaatggaaaataattcttatt

SEQ ID NO: 436694 - DNA, 122 bp, Homo sapiens
ccccggggtaaagcgagctctggagatcgcatagagaaactgtagtgtcctgggtccgagcgacgcccgcttcccgcaaccgggagagccgattccggccgctgccctcggggggctccgca

SEQ ID NO: 436695 - DNA, 122 bp, Homo sapiens
caacatcataagtcactgcagtctcgacctccgcggctcaagccatcctcccatctcagccggctgaacgtagctgctgggactccagtcgcttgcaaccatgcccagataatgaatgagtg

SEQ ID NO: 436696 - DNA, 122 bp, Homo sapiens
tatggatgacctggacgctgacatgaaggaggcagagtccgtgcggaatggctggaagcccgtgggagacttactcattgactcgctgcaggatcacattgaaaaaatcatggtcagcatca

SEQ ID NO: 436697 - DNA, 122 bp, Homo sapiens
gtactcttataagtacgagaaatagagtgataaacacagagactaaagtcccagtcattgcggaattacacaccagtgaagaaaaacagcaacaaacaaggaagtagaaggtagatataatt

SEQ ID NO: 436698 - DNA, 122 bp, Homo sapiens
ggggactgcccccaggcatctctgccccagggaccttctctccagccaggccctgcccagcgaccccctgcagctccgacactcgctgtagcaccgccccaaccaagctccttcccaggtga

SEQ ID NO: 436699 - DNA, 122 bp, Homo sapiens
gacgtgtacaccagcctctcagagaaaactccatccctacactcggtagtctcagaattgcgctgtccacttgtcgtgtggctctgtgtcgacactgtgcgccaccatggccgtgactgcct

SEQ ID NO: 436700 - DNA, 122 bp, Homo sapiens
gaggcagccgggggtccgctggggcagagtgcggagtgaaggggtgcactgggcactcagcgcggcccttgggaggcagggccgccccagcctgccctcctgtctgggaaggccgtccagaa

SEQ ID NO: 436701 - DNA, 122 bp, Homo sapiens
gcttagagaggctgttcgcttagagaggctgctcgcttagagaggctgctcgctcagagacgctgtggccagaacaagtcagacatgatctgcaggacccggttacccagggcttctgctgt

SEQ ID NO: 436702 - DNA, 122 bp, Homo sapiens
tggctgggggaagttgtcctcgcccggaatgggctgctttccggcggggagcgcggggtgcgcctggctttgtttatttgtaggatcgacggaaagcgagtgaccccggtttttaaatgggg

SEQ ID NO: 436703 - DNA, 122 bp, Homo sapiens
gaagagagcagaggagggtgctggggcttctggtgcatcctgtgggcacctcggatgacgcgagggtggagcctgaaacgctggcccaggaaatggaacagaagcctgttgtgggtgggagg

SEQ ID NO: 436704 - DNA, 122 bp, Homo sapiens
ttacgccccttctgtggaccccaaaccacaaaccatgactgcggtacctggtttatgaatcgccgtttgctcaaacacacggtttaacgttttaacaaagcctcggcttaattttaggggaa

SEQ ID NO: 436705 - DNA, 122 bp, Homo sapiens
ttgagcagactgggcctgatcttatttaagaattctgacatctcctagagtcacgtagaacgaaccctgaagataacaagggaggtgtgactggttggactccttctgagggcaaagaaaaa

SEQ ID NO: 436706 - DNA, 122 bp, Homo sapiens
tgcacaaagtcctgagaaatgactgcgaatgttcccattttattgatgaagaaacagcggcgtggaagctttcagtaagctgtgggtcaaaatccatattcaagcaggctcttccaggctgg

SEQ ID NO: 436707 - DNA, 122 bp, Homo sapiens
agtgtatacgtggctctcggtcttgtgcattttgtgacaaaggaattcccctttcaatcacgctgctctcctggagcccctggagcctctggctcaagcagcgcagtcggtctgtgcagtgt

SEQ ID NO: 436708 - DNA, 122 bp, Homo sapiens
cccctgtgggaactcctgctgggaacactgctttggaaacactaatatgtgttgcaggcccgtgaatatggcaccagagaagacggaggagggaagctggcctgtcaattaagcgaaaggaa

SEQ ID NO: 436709 - DNA, 122 bp, Homo sapiens
gtcccctgaagcaaggactgcggctgccacagactgctgaagagttggcggccaatctcacggtacacagagaatctcattgtgccgacatagtgtctgcagtcccttgccaggcagagccc

SEQ ID NO: 436710 - DNA, 122 bp, Homo sapiens
aggaggagactgctgacccagagcgcattacctaaaatctggtacccagagtgcacccttcgccctcgttggagttctctcctctctgccaagctttgctccgtgccagaggtgtgctccat

SEQ ID NO: 436711 - DNA, 122 bp, Homo sapiens
ttgtccggcccggggcgcgcattgtccgcacggtgtgtactcggggaggggcgccaggtgcgcgggcggaatgtagggtcggcgcggggccggggggcgggcccggggccggggggtcctca

SEQ ID NO: 436712 - DNA, 122 bp, Homo sapiens
tatcactcctagtttgatgatggaattaatttgtcaatatttcatggagttctgctgaaacgattgcaatttcttgggcaagtttcagaacgactagtatatctgtggtcatgtcatcttgg

SEQ ID NO: 436713 - DNA, 122 bp, Homo sapiens
gccccagccctgggggagcaccggcggggagggcagaccagctctgtctcaccttgctgtcggagtccacgcgctcatccacagagtaggaatcatagtagagactgaagtcatcacccacc

SEQ ID NO: 436714 - DNA, 122 bp, Homo sapiens
tgagcagtgggctgcttaggaagagaaggtcagagttcgcgggggcagaggcattcttgccgctggcccagtcactatgtagtggaggggcagacaccctcccgcaaattctggaaggttct

SEQ ID NO: 436715 - DNA, 122 bp, Homo sapiens
ccctccaggcaggcgccggccccgccgcccgcagcccagtctgctcccggcagccttgggcgcagccccacgtgaccccgccctacgccccgcctccgctccgcagcgacaagggctagtcg

SEQ ID NO: 436716 - DNA, 122 bp, Homo sapiens
ttgcccgctgtgctgtgccgccccgggtagatcaaagaccctctctggtcattggctgggcgcggtggctcacgcctgtaatcccagcactttgggaggcggaggcgggtggatcacgagat

SEQ ID NO: 436717 - DNA, 122 bp, Homo sapiens
gtggctcacacctgtaatcccagcactttgggagtttgaggcaggaagatcgcttgagcccgggagtttgaggtcagcctaggcaatgtagtgagaccctgactctattataagtaagtaag

SEQ ID NO: 436718 - DNA, 122 bp, Homo sapiens
cctcccgggacccggcacctctagccagggacgcgcgctcggtcccccgccgtgcgcccccggtcccgcgcccaggctcccgcccctggcctccttaccagccacttgtcgcccagctgcga

SEQ ID NO: 436719 - DNA, 122 bp, Homo sapiens
gaaaataattggtgtggggatatctgcggaggacttacctttttcctggacctcacagctcgttttcgcctcctctgggctcatggagacattttaaggcctaatcattgctttttaaattg

SEQ ID NO: 436720 - DNA, 122 bp, Homo sapiens
ggcacggctacagccacatccctgtcccctcggttcaaggatcggcagtgaggatgagaacggccaggcttgtctgtaaccctccccacagccccggcgatgactcgacaatgctgtagagc

SEQ ID NO: 436721 - DNA, 122 bp, Homo sapiens
ccctccctcccactcccagcctacagacaagcgcatctctgctgcattcatcgccgcacacgccctaaaaatgtcctcacgtgagtctgtgccagcctgcgcgcaaaccgtgagcccaccgc

SEQ ID NO: 436722 - DNA, 122 bp, Homo sapiens
ttctttcagctgaatcaagagtgcctgtccccatcccttctctcactcactgatcccaaacggaaaattcaggtgctgacacatcgcccatgcatccctatggttctttgcaagttgcctga

SEQ ID NO: 436723 - DNA, 122 bp, Homo sapiens
atgaagccctcccccgactttggcacaccctgttccggccagtctgtgaactggaactgccggacagtccgggactggccatcctagagtgcagagagcccaatcttgttatcaggtcagca

SEQ ID NO: 436724 - DNA, 122 bp, Homo sapiens
ggcacagtggtacggggccggaagataacttacctgaagaggcgatcaatccctgagaatcgcgggcgacccgttttttgtgtgcccgggtgcggggtgccgggacacggcgttgaaggcgc

SEQ ID NO: 436725 - DNA, 122 bp, Homo sapiens
gccgcagggctccctccccggccgcgctggctccccgcctccccgagccccagcctcacccggctgtcatcaccacattgtagatgaccaggtacgccgtggccaggggccccgggcccttc

SEQ ID NO: 436726 - DNA, 122 bp, Homo sapiens
ggggtgttcctgaagtagaggaccctcataaggcctctgaggcccagagaggggcagctccgggcctaaggtcacacagccagtcaacagagacctaatccagaggtctgcgggcaggagct

SEQ ID NO: 436727 - DNA, 122 bp, Homo sapiens
gggtgtgtgtggtgagtgtatgtttgtgttcactggaatatttgagtcatcccacaccaccgattttgagagccatgtaatgttatgcaagattctttgtattctcaagaaaaccaagtctc

SEQ ID NO: 436728 - DNA, 122 bp, Homo sapiens
acataaagttcactaagtcaatagctgctaggtaggcaccagtgaaaacctgggagcaaacgggaagagagtcttggcattcaagcatctttcctcagcccctacagagtttgtcatccggg

SEQ ID NO: 436729 - DNA, 122 bp, Homo sapiens
gcagggatttgccaggtgacttcacggagggtgtgtgaacaggcggcagctctgcccttgcgcagtcctcgtgaccgttcggccagtttaagctgattagatgtggtttgtctccacacagc

SEQ ID NO: 436730 - DNA, 122 bp, Homo sapiens
cccgggctgagggtttgcgtgcgggccgggtgcctgggggccccgggctgagggtgagcgcgccgcccaggtgccaggcggctccgggcagagagtgaacgcgcgggccaggtggctccagg

SEQ ID NO: 436731 - DNA, 122 bp, Homo sapiens
aagtacgacccacatgggaagtaggaagtgcggcgcctgagcttcctgtataaataaacgcgctgctaccgctgctggcgagctgtgccccacgctcccgctgcaacagtcccgggcatcgc

SEQ ID NO: 436732 - DNA, 122 bp, Homo sapiens
acagcaccgccctccggtggccgcgagtcaggagggctggggaagccgcccgagaggcagcgcccgagctccccacgagctgctgtgccattggaagcgccagcgccctcccctcggagtcc

SEQ ID NO: 436733 - DNA, 122 bp, Homo sapiens
ctgaagctggaggattgcttgagcccaggaggttggggctgcagtgagccatgattatgccgctgaactctagcctggtcaacagaatgagaccctgtgtcaaaaaaaataaaaaataaata

SEQ ID NO: 436734 - DNA, 122 bp, Homo sapiens
ggtggggtgggggtccggggatgctccctctatgagagaattgggtaaacatggcgaccgcggcgcccatttgcacacgctacacaaatgcatcgcattcccggttgtttgcagaaaattta

SEQ ID NO: 436735 - DNA, 122 bp, Homo sapiens
gcaagaatacgtgcgtgggtgcgtgtgggtgcgcgtgcgtatgttgtaggtgtctgtgcacgtgtgttgtgggggcatgtgcacacactcacgtgttgagggagaacataggaagcaccctc

SEQ ID NO: 436736 - DNA, 122 bp, Homo sapiens
gttcattcttctttaacattgtcctgtgctgcctgaggttcgtgaaaaatcctaacataacgaacaccaagatgtggggctctctggttccccctccacgacagaaccagcggtggacacgt

SEQ ID NO: 436737 - DNA, 122 bp, Homo sapiens
attccccaagccacacacacacacagatcacacagacaaagccactgacgtgggcacacacgggacagaggtgcacacaaactcacagtcacagggacacacaagtccccaccccaggcagc

SEQ ID NO: 436738 - DNA, 122 bp, Homo sapiens
ccgagaccagtgcactcctctttgactctgcaaccgcccagggagggcacgaaagtgggtcgcaaatcatggctctgctcctccaggcagggacagaatccaagggcccaagagagtcactc

SEQ ID NO: 436739 - DNA, 122 bp, Homo sapiens
cggcgcgcggacgcgtctggggcggttcgccttagccaagtggaaagagactccgcgccgcgggctacttaatagagggctgttcccagctctcagtttactcggttacgaaacgcctgaga

SEQ ID NO: 436740 - DNA, 122 bp, Homo sapiens
tatggcctttcagctccttctatgagatctaaagaggtggacattagggaattcctaaggcgataaaatgtttagcaaagaagcacagtgagtttctcaaggcagagacaggctgagattgt

SEQ ID NO: 436741 - DNA, 122 bp, Homo sapiens
agagtgtaacagaatgggaaggcactgtgggaaggaagtcaggaatcttgctgctagccacgccttgcagtgacttctcgtctgggagtgggcactgagtcctctcagtaaactaataagac

SEQ ID NO: 436742 - DNA, 122 bp, Homo sapiens
aaacagaaccccactgtgagtgagcacgtgtgtgaaggtgggattggcagctcagccctgcggagccctctgaagagcagtctgcattgtgtttggcagagagattcagagagccaatattt

SEQ ID NO: 436743 - DNA, 122 bp, Homo sapiens
aaacatcccagtcagggggaatttaacttacaaacatccatggcttctcggcaacctatgcgcacactcagaggttctcaggataggtgcagatctaacccctattctttgctttagaatgc

SEQ ID NO: 436744 - DNA, 122 bp, Homo sapiens
caggggagccctgaagctggggaagtgcttcagggatgtcctgaattgagacaaagggggcgggccccaaatcagccagtcattggatgcagagtgtccccaggaaggggacacagctccct

SEQ ID NO: 436745 - DNA, 122 bp, Homo sapiens
catcacaatgggctatttaacaggactagaaagcctcatatctttccatcccactgaagacgtggatcactttgtctgtctatccttctctgtcaggaacccctcactctctattcaggtta

SEQ ID NO: 436746 - DNA, 122 bp, Homo sapiens
gcggagctaggacctgccctaggaccctgccccattccctttccggaaagtctccatctccgagtcggggatcctggaaaacacctgatctccaaccacaagaatccctccagtatcatcct

SEQ ID NO: 436747 - DNA, 122 bp, Homo sapiens
gtctgcctggggcttagacgggattcgacgtaacagaagatgacgcttgagtgacagattcgtcagcgcccagaggaggaggacaagctggacccctaccctggttggggcttggagccata

SEQ ID NO: 436748 - DNA, 122 bp, Homo sapiens
agaatcgctggtgtcgcttcgcacccaagggacacatctcgggttagaaaggagaaacgacgtggatctaaaggcgaagcccatgctgaggacttttcaaaatggcctcttatcggccccac

SEQ ID NO: 436749 - DNA, 122 bp, Homo sapiens
gtcttctgaaagacagctgacaagagacatgcagggctgagaggcagctcctttttatagcggttaggcttggccagctgcccacagcttcaggccatcagagacagcttctccctgccaga

SEQ ID NO: 436750 - DNA, 122 bp, Homo sapiens
ttgcagagttggcctcctgtggaaaggagagcccagctccccagattctgcctgctggagcgtatacactcactaatgtaggacccagctgaggcccgagaatccactgctgcaatcactcc

SEQ ID NO: 436751 - DNA, 122 bp, Homo sapiens
gggcataaactggggaaccctatggcttctcttcccctcccggatcagagaaaagggtgccgctaaggctggaggttgtagaaatccaactgggtccccagacttccatttctgtgggcaag

SEQ ID NO: 436752 - DNA, 122 bp, Homo sapiens
actctcgcgataatacgggcgggctgaaggctggtcacatcttccctgcctaaataatcgcgcccggcgttgtggggcctaagactctcgcgagacaccgtctagcacttcccgcccgtcag

SEQ ID NO: 436753 - DNA, 122 bp, Homo sapiens
cttggcgtagcctctggggcacgaacagcagagagctgaggtcagggtccctgccctgcccgacagcttggacaggggaaaggccaagtcccagatgctgggttcctaggtcacttgggaga

SEQ ID NO: 436754 - DNA, 122 bp, Homo sapiens
attattaatatgagaatttccttttctttggcgttcctgaaaccttgcctgccccatgcccggagaaatccgttgcacaccgtctcttggagccctgcttgcagcctctgtggccctcttca

SEQ ID NO: 436755 - DNA, 122 bp, Homo sapiens
cccccacggggacaccctggccaccgccgcgcggacaccctcacgaggacaccccggccgcgcggacacctaccgcggggacgccccgaccccatcctacctgctgcgccccgcgccgcgcc

SEQ ID NO: 436756 - DNA, 122 bp, Homo sapiens
gcgaggggcggggtgaggaggcttgtcctcttttccgattggcccgctgagcgtctgtggcgcgcgcgcgcgcgccgccagcggtagcggaccttgagtggcagggggtggggggggcgccc

SEQ ID NO: 436757 - DNA, 122 bp, Homo sapiens
gagccctactgttctgtcctcccggggtttaccttcatccagcaccttccccttagtgagcgtatccggggcaccgttggaccaaagagcaaggcagaatgtgaggtgagtggggccagaat

SEQ ID NO: 436758 - DNA, 122 bp, Homo sapiens
acaccaccagggggacagggcatactgggacaccagcggaggggacggggcatagggcaccgtcaccgggacaccacaggggggacggggcatagggcaccatctccggtatgtggtgacac

SEQ ID NO: 436759 - DNA, 122 bp, Homo sapiens
cgttcgcagccaaagccactagcctagatctcgcacagccaggcccgccataacgcatcccgggagcaaggggtaagaccctccctgggactgcggctacctcgccttccttctagtctccg

SEQ ID NO: 436760 - DNA, 122 bp, Homo sapiens
gcagaagcgcgtcccgcgggagaggtggctttgaggagtgagctcccggtcccgcggggacgcgagtgggcccagtgcccgggctgccaggcggggcggggcggggccgggcgactgagagg

SEQ ID NO: 436761 - DNA, 122 bp, Homo sapiens
ggggggtgtccccatggtagttgacagcatggaggtcacagcgcgcattcagaaggacttcggcgatggcggcgctgcccgtgaaggaggcccagtgcaggcagatgttctcctcctgtgga

SEQ ID NO: 436762 - DNA, 122 bp, Homo sapiens
ccacaggggggtgagggttgcagggttgcaggtaccttatatcaaaggtaaaaggtacaccgtatgaaacccagagggaggcatacggtgtgctctctgaaatgcatcacttatttttcatt

SEQ ID NO: 436763 - DNA, 122 bp, Homo sapiens
tgcaaactcataaatcaatttctgtcagcctttacaaatttatcagttcttatgagtaaacgtgacagccaaatactatttaaatctataaagctatatctctgttagtgagctaaataaag

SEQ ID NO: 436764 - DNA, 122 bp, Homo sapiens
ctcctcccgccaagttcattgaaagagaacccatgtgccggtccagagcatcgctgcatccgtaagcagctagacctcagcttcctctgtcaccatggtgccggctcggctgggcccggcgg

SEQ ID NO: 436765 - DNA, 122 bp, Homo sapiens
gccaccctggccactctccccagagggagctggattatggcaaacccaagaggattagtgcgggaggccatctgcagagaggataattagcttaatggggttacacggattgttcctggccc

SEQ ID NO: 436766 - DNA, 122 bp, Homo sapiens
gcagtttcacgtaaactttccattttattagggtcaagttcatcatatcttgtccgtgctcggacgtcacctgctttaggtgcacccggtttaatagtgcacggccagctcccccgaatcca

SEQ ID NO: 436767 - DNA, 122 bp, Homo sapiens
ggaggaactggctatcctaaaggtgattttaaaccggggtagctagagcccaaagaagggcgaaaccaggactaactgccccatagcatgaggggcagcgcctgtaaaattacataggattt

SEQ ID NO: 436768 - DNA, 122 bp, Homo sapiens
gagctgagcgatctctgaggcgatcttcttcctgtgcccaggcttggtcaccccgatggccgtcaggtcctgccacacaaagtctggccatcaggcccctcccccgcctgctgggccctccc

SEQ ID NO: 436769 - DNA, 122 bp, Homo sapiens
gaagggtaggtgtaagggttccctaattcgtcgaaagaattctattgggtgactctcgttcgtcttctctatcctacactccacatactgaccctatattatccagactgtgccggggagaa

SEQ ID NO: 436770 - DNA, 122 bp, Homo sapiens
cggagccgacgtgttctcagctcctgggccgcagctcctggagtaggggccctcctttctcgggacccggagctggtgcttcctgctgctgtggggactgtggggggtcctgactctcaagc

SEQ ID NO: 436771 - DNA, 122 bp, Homo sapiens
ttccccgacagggctgctctcctggtgtcctggcgttcctctccggggagaaaaaccacacgttccacaggtgttcaacaagccaggcggaaaggagaacccagctctggggacgggagcct

SEQ ID NO: 436772 - DNA, 122 bp, Homo sapiens
tggcactgcgacagataccgagctgacagctcttcgttctctctccggagccgctcctcccgttgctggtacgatgtttctagcaccttgatgcggcttctgccaacagaacacccagccat

SEQ ID NO: 436773 - DNA, 122 bp, Homo sapiens
tataagtccccattgaatggatgaagtcttttctagattactcaagtgatgccaggaggacggtgagttctgtgaaggtaaggcagaaactgctttaacacatccctgctctacccgttcgc

SEQ ID NO: 436774 - DNA, 122 bp, Homo sapiens
gggaagggaattgcagatggcaaggctggtgatgcttgtggggcgggccctgagtgccatcgaggcgcctggaccttctcccgggggcagccgcggcctgaacgtgtgggggcgggctcgcg

SEQ ID NO: 436775 - DNA, 122 bp, Homo sapiens
ttttctctttcagatgcaaacaaaatcttacactcttctcctttggatacaatagagaaacggaaagaaaggaaggaacaagaggcctgtgttaagtcctgttgatgttaagtcctgttgag

SEQ ID NO: 436776 - DNA, 122 bp, Homo sapiens
tttccccttggaggagaggattaaaagttccaagaactggtgccgcccgtgccatttgggcgctgggaaggtgctcggcggcggggttcccggtcccaccatgtgcaccaacatagtttacg

SEQ ID NO: 436777 - DNA, 122 bp, Homo sapiens
atgttagattcaccccacagagatagcggcagagctggcagcggacggtctttgcattgccgcctccccagggggcgggaagctggtaaggaagcagcctgggttagctaggggtggggtca

SEQ ID NO: 436778 - DNA, 122 bp, Homo sapiens
agcgggtctgggcgatgctctctccggctctacccagtagcaactgcggtaaggacaggacgcagcgaaattgtaccagtgagtcagaggccaaaggaggaatcctggcccaacagcgcaga

SEQ ID NO: 436779 - DNA, 122 bp, Homo sapiens
ggcagtatgagagtcagacttgagcaaacatcaccaggcagggctgaggcctcttcagatcgtctctaccaaagcataacaaaggagactatgcagctgtggtggaaaattccctgatccat

SEQ ID NO: 436780 - DNA, 122 bp, Homo sapiens
acacacaccagcacttagcaagcaggcagtatcccgtggcacacacagccacccaaacaccgtccacacacaggcacaaatattacactcaaagttgtcacaactttctctgacacaaagag

SEQ ID NO: 436781 - DNA, 122 bp, Homo sapiens
acaacttggcgaatggagcgagaattggatttcagtttgccccttgctccgtcagccgcgcgccctgatgcagtgcacaaccttagctgctgtgcgcgatggggggcgactcctcggcctgc

SEQ ID NO: 436782 - DNA, 122 bp, Homo sapiens
gtcaaggccgcaggagggtcggcccgtttgggggagacaccctcttgccctacaacctttcggcagtatgtcacagcgctggggctcgaatccatggcctgacccgctcgcctgggcaagcg

SEQ ID NO: 436783 - DNA, 122 bp, Homo sapiens
cctggccaaacgtgggttattctcgttctcccttccccacactgtcgcagaggaggaagacgtcttggtcgccgttaagagctaaaacgaacgccaaggctctaagtggccctggggtccag

SEQ ID NO: 436784 - DNA, 122 bp, Homo sapiens
agaaaacaggggcagcgagcccggcgtcccaaggagccttgccaaactgggcatggagaacgggcctcctggatggccacccgcccagctgccaaagaggccggagagctggagccgggact

SEQ ID NO: 436785 - DNA, 122 bp, Homo sapiens
tgggggctggggttggtgcgggcttccggcttggccgcgggtgtctgcatcgttcagccccggggcttttgtgtcgggtctggcctggctttctgtccgcaagtttttgccctgctccgcgg

SEQ ID NO: 436786 - DNA, 122 bp, Homo sapiens
ggaacacctttcacacctatatcccagcattatgatgtgaaaagcagcctaaaaattaagcgctacattgctatgaattgtaaagtgtggaaacatggaataaaatacctcttaagctccat

SEQ ID NO: 436787 - DNA, 122 bp, Homo sapiens
ggttcaaggccgggttcctagacccagagtccattcgcagagcccaaaacatcctcttcccgtgccccgccgcgcggacccttagccttgaccgcccccatctcttctgaccccgtcttaca

SEQ ID NO: 436788 - DNA, 122 bp, Homo sapiens
tatcggagtctggcacggggcacataaggcagcacattagagaaagccggcccctggatccgtctttcgcgtttattttaagcccagtcttccctgggccacctttagcagatcctcgtgcg

SEQ ID NO: 436789 - DNA, 122 bp, Homo sapiens
aaggaaaggatttatgaattgaagaccaaattggaaaggctaattagggccagataacagcgctttcagtcccgggttaatgtgcttgagccttatgctataaaccactggttctccaagtg

SEQ ID NO: 436790 - DNA, 122 bp, Homo sapiens
gcaaggacccagggtaggccttggggactgctggcccaagcacgagtggcggggacacagcgccggacgcccaagaccctccccagtccgcctaggctggcatttcttggcccccaccagcg

SEQ ID NO: 436791 - DNA, 122 bp, Homo sapiens
ccccagggcttctccggccggcggcgccagctcccgcgcgctgaccctggcggggccccacgtgccaggtggctggacccgacccaggctccccgcccccactcgggccgcccgcccgggac

SEQ ID NO: 436792 - DNA, 122 bp, Homo sapiens
tgttttcataatagagctactactttagaggtttataacctggcaataaaaattagcttccggcaagaacttgacatacaagacaagacctcagcaagaaagtgatttttgagaaatcagat

SEQ ID NO: 436793 - DNA, 122 bp, Homo sapiens
ttttcaaggcacttttccaaagagtttgtgggggtggagtgggaagcggtgagacctccgcgggaggagactttcctgaacgctgttgaaattggacgcttgccttaggaggtggataggtg

SEQ ID NO: 436794 - DNA, 122 bp, Homo sapiens
cgaggatgtgctacagggagagcacctgagtgaccaggagaatgcacccccaattctgcccgggaggccctctgaggggctgggccccagtccccaccttgtcccccaccccgggggtcctg

SEQ ID NO: 436795 - DNA, 122 bp, Homo sapiens
aggaggaaacggacgttccaagatattaaatggcttgttcaaggtcacacagctcatgaacgactggttccaaagctccctgccctctccaccgcgcctggccgctcagagcccatgatgaa

SEQ ID NO: 436796 - DNA, 122 bp, Homo sapiens
gccaatcacaaggaagatgtgagcttcctgtgaagcaaagtgtcttggaccacttcagatcggtcaaagtcatagattcttaggactgtaagggctcctggagatcgtttagcccactttgt

SEQ ID NO: 436797 - DNA, 122 bp, Homo sapiens
ttcttaggtcggattccttagaggcagagcctgccagctccctacatgtgctgataccctcgataaccttttatatttctaaaatgcatcatagtttgtgaaggtttgggcacactatctca

SEQ ID NO: 436798 - DNA, 122 bp, Homo sapiens
agaaacctgacaagcactagctcagccagatggccaaggtcaacatcagcagcgatcagtcgtgtctatagcatggacacttgatatgatgtgatggaaacagcacatcacccccaaaccca

SEQ ID NO: 436799 - DNA, 122 bp, Homo sapiens
ccactagaggtcacagatcacaaaaaccctacagaaacaggaaaccgaacttcctgagtacgctacaaaacacagaaacctgtttcctctacacatctcaaactggcaaaactcagtcttag

SEQ ID NO: 436800 - DNA, 122 bp, Homo sapiens
acaaagaccaaaccagacagagattcacacaaaatacagcttgtccatcaggaaagttcacgtacacaaacgcatgacagctgctctaaatggtggtgaagataacattaaactgtttcagt

SEQ ID NO: 436801 - DNA, 122 bp, Homo sapiens
tttgtttttaagtcattgaaattatgagactatcattcaaatggaagcattatagttcttcggaaccattatgatctcaaaacgaaaggagaatgatacagatacactggctgaggtgtttt

SEQ ID NO: 436802 - DNA, 122 bp, Homo sapiens
tataaataaaaaagaaagaatacaaagattggctttgttctgatgttttacacaggctaccggtggttattagttttctgctcacatgtttgtgtgtggcgttgctgggatgtgccttgtgt

SEQ ID NO: 436803 - DNA, 122 bp, Homo sapiens
cacccctgggcaaaccctaggggcggggcccagaggcgaggggcttccccaatcagtctccgccctagcgccctggacttcggccccattccattgggtgagggtgggggcacgaaaagagg

SEQ ID NO: 436804 - DNA, 122 bp, Homo sapiens
agaacagacattaaatcttaaagctcccaaatctcttttgactccatgtcccacatcccacgctggaaggaagggtgggctcccaggactctggacagccctgcccccatggctttgctgag

SEQ ID NO: 436805 - DNA, 122 bp, Homo sapiens
ctgagcgggggtgtcccgtgaactgagtgggggtgtcccatgaactgagcgggggtgtcccgtgaactgagcgatggtgtcccgtgaactgagcgggggtgtcccatgaactgagcgatggt

SEQ ID NO: 436806 - DNA, 122 bp, Homo sapiens
gatcaccacggctgagcaatgaggtaacagcttgtcacggattagacgcagcgtgacttccgatgaacaggaattactgctcacaccgaaaacaccatgttctgcattcatttctgaggaac

SEQ ID NO: 436807 - DNA, 122 bp, Homo sapiens
gggcagacggcagatacgcggcagctgtgcaggggaggctagcgtgtggtggtgggtgggcggggcacacacctggaaggtcaggtgctgaccagggcagccttgtgtcaccctcgcagttg

SEQ ID NO: 436808 - DNA, 122 bp, Homo sapiens
cccgggctgggcaggcggcgcgggctcgggctgggggcggggtcgggggcggggtcggggcgggccccgcctgggttcggcctggggcttggggccccgggctggctccgccccagagcgac

SEQ ID NO: 436809 - DNA, 122 bp, Homo sapiens
gtttctcactcggaaagcgggcggaatcgaagactggaaagctgaggacgcgccacctctcgccctacgcgccttccagctggcagcagttgtcagtggaccagctggcggcagccgcgctc

SEQ ID NO: 436810 - DNA, 122 bp, Homo sapiens
gattggatgcggcggcggcggcggatcccggagagccccggagtgagcggagtagcgagtcggcaacccggaggtaggaaacaattcagttaacggaaagaaaatgtctctcttctctggct

SEQ ID NO: 436811 - DNA, 122 bp, Homo sapiens
cgagcaaccagcgcgacagctcgtccccgccccgtaatctcccggctattcggggcccttcgccgagatttctcccggaccagccccgggattggctcctgccgaacttcgccatccaatgg

SEQ ID NO: 436812 - DNA, 122 bp, Homo sapiens
gccctcgggcaggagcatctggcagagtggggggcgtggcaggcaccctcctttgcagggcgaggtggggcctctgcagccatcctggacaggccggggtggcggcagctttgcccacgtgg

SEQ ID NO: 436813 - DNA, 122 bp, Homo sapiens
tgagagagagaggctcaaagatgcttgagcaagatccctacgcatggacacacctgtggacgcagcagggaggcttaagggacaccccggggctgggaggagacacatcttggctcatagaa

SEQ ID NO: 436814 - DNA, 122 bp, Homo sapiens
tgtgagtgaagacgaatacttggaaattcagggcatcaccagggagcagtcaggggactacgagtgcagtgcctccaatgacgtggccgcgcccgtggtacggagagtaaaggtcaccgtga

SEQ ID NO: 436815 - DNA, 122 bp, Homo sapiens
gccagcacggctggggatcaaggcgaggcgggcgcgcccacaccttgtgggaagcggaggcggccaccgcgtgcaggaagggtctcccaggtggccggagaacccacaggcgtgtacggaca

SEQ ID NO: 436816 - DNA, 122 bp, Homo sapiens
gttgctggtcccgtgcccatgctgctaggggagcatggggtgcgctccgcctccagccaacgtctccgcatcggtgcccttgccatcgccgggggatagagcagccttgctttaccgcttta

SEQ ID NO: 436817 - DNA, 122 bp, Homo sapiens
ttgggcccagccgtggcttttattagactttgaagagcaccctaacggtgggtcatggggcggtcactactcatctctgctgttgttccacgtggcctctctcggccgctacgggaagaagg

SEQ ID NO: 436818 - DNA, 122 bp, Homo sapiens
ccactcagtttgagcttcatggctgctttgtttacttaagcaagcctgggcaatggtgggcgcccctcccccagcgttgctgccgccttgcagtttgatctcagactgctgtgctagcaatc

SEQ ID NO: 436819 - DNA, 122 bp, Homo sapiens
gcctgcactgctgccttctgtgtgcacagggcagtgtgctgggcactggattttatgtgccggcctgaagggctggctttgcataggagaggatctaatctaggcatctagtcttgggggcc

SEQ ID NO: 436820 - DNA, 122 bp, Homo sapiens
gcttgcctaatatgtgtgtgtttcctcatctgtgaagacagcactaacctcgtaggtactcgggaggctgaaggagttcatctgtggaaatcatttggcatgatgcctactcttattccttg

SEQ ID NO: 436821 - DNA, 122 bp, Homo sapiens
tctgcatgtgtagcttgttttagccttcagaggaaagttcccatatatagcactctatcacgatgttgacctgtatgaacatccagctggtgcagctgccaggaggctgaaaggagagttag

SEQ ID NO: 436822 - DNA, 122 bp, Homo sapiens
gctccgcccaagcccgatgcaggggcttgagccgctgtccctttcctggctgggctgtggcggccggcaggagggtcccctgggctgcggggtccccctggactgcgacgacgagaaccgaa

SEQ ID NO: 436823 - DNA, 122 bp, Homo sapiens
tttgcagatcttcaacaagaggacccaggagaaattcgccctcaaagtaggtctggggcccggggaggggaggcggggccggtcccgggccctggagctccacggcgtcgggtgcccgtccc

SEQ ID NO: 436824 - DNA, 122 bp, Homo sapiens
gccccacgctgcgcgagaggtgagcccgtgccccgcggcccccgcgcccgcgcgcgcccacgcccccagcccgtgcctctacctttgcaggaacgcgctcatgttcaacaacgagctcatgg

SEQ ID NO: 436825 - DNA, 122 bp, Homo sapiens
cgtaggtgcccgcggggccggcggccaggccagggggcttccgcggcagcagcccggggccggcggtggccaggccagccttgcccgcagcctccaggccccgcttgctccccttctcttcc

SEQ ID NO: 436826 - DNA, 122 bp, Homo sapiens
ccagttgctggctgtaatatggtaggctgggcaggcagtcttactcaccccacgaggccccgggtgtcagccgccagaaagcaaactccatgcttatgacacaaggtgcccaccttcagctg

SEQ ID NO: 436827 - DNA, 122 bp, Homo sapiens
taatttgttcatgaagtgttgaacttcggaggacctgccagcattcaggggatttcagcccgactcagcactgttgatgttgttatgtgaatttgttctatgacggttttgatggtcttggg

SEQ ID NO: 436828 - DNA, 122 bp, Homo sapiens
tctgaagttgagcctaaaaacagacgtgtgtgtgcctgcaagtctagataccgtctcgtgcgtgcatcaaaataaatcaccgggaaccgacttttagctgtgttaatctgctctagttttcc

SEQ ID NO: 436829 - DNA, 122 bp, Homo sapiens
tttgggaagcagtggtgtgcgtatgtgtgtctatatcaatattttatgtttataactctgcgtattaagtttatatagaaaaaaataatgtctttctttagtgtttgggggactcaatggta

SEQ ID NO: 436830 - DNA, 122 bp, Homo sapiens
gagttgccagggctggacgccgagtgggtgcggagagcgcacctgtgaccgacgtggaggcggcggggaggaagggttgaggtgcagcgcgtgggcggaatgggaagcccgccaggctggct

SEQ ID NO: 436831 - DNA, 122 bp, Homo sapiens
atctggttacgctagagagcagctgaccttgccccatggatggcgcgagttatgggcggccgaccttgccccggggatggcgcgggttgtgggcggccgaccttgctccagggatggcgcgg

SEQ ID NO: 436832 - DNA, 122 bp, Homo sapiens
ttcgactcacctgggaggtgatgagacccctcccgttcctacctgggaatctgggcatcccgggctccccgaagtgcgtcctcccgggacggccgccggcctggagggagtctttgcgccag

SEQ ID NO: 436833 - DNA, 122 bp, Homo sapiens
cctctcccctcttttctgtcatctggtttctctccagtcccccctttgctttctaccttgcgtcgcaaggcctgagtcgccctctcgcccagcccccagtcttcagcccagcgtctgtgctt

SEQ ID NO: 436834 - DNA, 122 bp, Homo sapiens
gcccctctgcccggccagtcgccccgtatgggagggaggtgggggggtcagccccccgcccggccagctgccccatcctgaagggaggtgggggggtcagccccccacccggccagccgccc

SEQ ID NO: 436835 - DNA, 122 bp, Homo sapiens
tccgggacccgcacctccggcagttcattcaggatccgtagtctgcccctaaccacccaccgtcttggcttcagggggtgacccctgcgcctgggtccgtaactccctaccctccgctgcgc

SEQ ID NO: 436836 - DNA, 122 bp, Homo sapiens
aaccccggcgcccgctctcgccggccggggacatctacaggtggggccggggccgggccgcgccgcctcccagtccccgccccatccagccccgccgctctggtcccgggataggtggcgcc

SEQ ID NO: 436837 - DNA, 122 bp, Homo sapiens
agctgcaaaatagggttaggaaaagtggactcggtgctcctctgcgccgcattcccgcagcgggatttgtgaaagcgaacttgagccccacactgcagaagccctgaggtcctgtctcaacc

SEQ ID NO: 436838 - DNA, 122 bp, Homo sapiens
cctggagggcggaacccactacagggctttgaatgttacccaccaaccttcccagggccccgctgccgcctctcaaggggaaaccaggagcacaaagctccacttaccgcaacttccgcgga

SEQ ID NO: 436839 - DNA, 122 bp, Homo sapiens
ggctggcgggcgagcagagaggcgcctcggtggcggtgcgctgtccagcatttcagcaagcggcggcagcacccgcggggaggcagagggtgcggggccgtgggggccgcggagctgccctg

SEQ ID NO: 436840 - DNA, 122 bp, Homo sapiens
tctcctgggttcaggcaattctcctgcctccgcctcccgagtggctgggattatggtgcccgccaccatgcccattaatatttgtatttttaggagagatgggttttcaccatgttggccag

SEQ ID NO: 436841 - DNA, 122 bp, Homo sapiens
gtacacattttaaccatgaggtttacctagcactcttggctccaggtttctatgagtccacgcagtgaccactctagaattcattagcctttgtggtatttatgttgctattcagtatttgc

SEQ ID NO: 436842 - DNA, 122 bp, Homo sapiens
agcttcaaaactgtctgcagacgtcaatttcgcccccctcccccttgtgagaactcgctacgtagccagcaactgtgtagtgtctacaaatgatgaaaacgatcagaaatgcgattaggtgt

SEQ ID NO: 436843 - DNA, 122 bp, Homo sapiens
gtccatagctcatcaatgatgactcatcttctacaacccaatggtgccatcatctttcatcgtccaccatccaacaccatcatcttccaccatccaataacagtgccactgctaccacccac

SEQ ID NO: 436844 - DNA, 122 bp, Homo sapiens
taaactaaggggtaactgaagtcctctgctctgtgtgaaggccaggggtgggggatgcggcggaggagaagtcggggtggagaggctgtggacaaaaaggatgagagggctagaggtggggg

SEQ ID NO: 436845 - DNA, 122 bp, Homo sapiens
tgcatcttcactcagctccacgcatcgtctcccttgagacctcctctctggcccaggtgtcgtttgaaagtgtgctgttttgttcccaagtgtgaagattcttccgttctatttcattgtgg

SEQ ID NO: 436846 - DNA, 122 bp, Homo sapiens
ccttctctgggctggtgattatgcaacatgtttgttccctgagcacacattgttctcaggcggccggcacggtcactaaaaatcctacctgttttagaatcttcctattagtaaataccagg

SEQ ID NO: 436847 - DNA, 122 bp, Homo sapiens
cccccgtctctactaaaattacaaaaaaatcagccgggcgtcgtggcgcttggctgtgaccggggcggggcctgccggctgcggcggaaccacaagcggtgcggggcgaggcgggcggcctg

SEQ ID NO: 436848 - DNA, 122 bp, Homo sapiens
gcagctaaaagttctttcctgcaaaatttcactgaggtccatttctctgtaagtttagagcggaattcctagaaatttcttataatgggatttcattatgagtatccatcagtcatcaaagg

SEQ ID NO: 436849 - DNA, 122 bp, Homo sapiens
aacggcctgcgtggcctttcgtgctgcggtgggaaagacgctgaagtggacgggactttacgacacttcgtcaagtcagcaggtcgtaaaacagcaggttgtaaaaccatctttaagatggg

SEQ ID NO: 436850 - DNA, 122 bp, Homo sapiens
agtggagaggcagccttacaaacctagagacccaattcttccaaagaggttaccccagaacgtgtgtgttggggctggggtggggtaaaaaaatgaacagcagtgcataggacttcactgcc

SEQ ID NO: 436851 - DNA, 122 bp, Homo sapiens
cggcctggacccgcgactcgtcctgttctgggctggacaggaggccggagaggactcgggcgcccaaggtgcggcggccggacgcgaagtggggcggaggggcctcccagtgccaggacccc

SEQ ID NO: 436852 - DNA, 122 bp, Homo sapiens
ggcggtgcaagcgcatgaatggacactggaaggccgtgcaagtttggtctgagccgcccccgctggcttttagagttagagtcccagcccacctgcggtggagcaactagcttcttgactgc

SEQ ID NO: 436853 - DNA, 122 bp, Homo sapiens
ggttcttttgtcgatgctactgcatttatagatcagatggccagtagtggtggacttgcccgaatctacgtgtccaatgacgacaatgttgatatgagtcttttcctttcccattttggctt

SEQ ID NO: 436854 - DNA, 122 bp, Homo sapiens
ttgtagagatgggggctctccctctgtggcccagggtggtctcgaactcctggcctcaagcgatcctcctgcctgggcctcctaaagattcagctgcttttggatcaaacgattggcttaag

SEQ ID NO: 436855 - DNA, 122 bp, Homo sapiens
accataatgagttatcaagcaccaacaactaagagaagcctccaaggcagccactgaagacgatggagatgtccaaatgaacaaagattatctattttcatcacccacaacagaggcagagc

SEQ ID NO: 436856 - DNA, 122 bp, Homo sapiens
ctgcaccctgagccggaatgctgggggaggagggggccgggggcgggagctgggaggggccggggagctccgggtagttttccccaagagtccacacagggagagacagcctaaggaagtaa

SEQ ID NO: 436857 - DNA, 122 bp, Homo sapiens
agagacttccttgccccttccactgtgtaagggcacagtgaggaagcaccacctatggaccggaaagaaggccttcgctactggtgtcttgatcttggacttcccagcctccagaactgtaa

SEQ ID NO: 436858 - DNA, 122 bp, Homo sapiens
tcatattgcatcaatgaccagcattaattaaacgttagttgtcgttgctatcaagtggcccggcagtgtctttctcagagacttgggcccccagcccatcagcctcttggcctttcttcctc

SEQ ID NO: 436859 - DNA, 122 bp, Homo sapiens
ccaggtccttcacgctggcctcttccctgccgggctgggctccccaatgccttcagagttcgttgtgccgagctctggagatcctgccggacaggtcctgcagatgcttcttcacctgtgga

SEQ ID NO: 436860 - DNA, 122 bp, Homo sapiens
caggtgccgagagtcggaggtttccggagaagcgatgaagcccagccagcccggaggtgacgtcactcgacaacccagtcgatgatgtcatcattggatgcgagaggggcggggcttggtag

SEQ ID NO: 436861 - DNA, 122 bp, Homo sapiens
ggcacccggcgaaggcccagcccccccgggaggtggcaccggcgcccggcgaacgcccgacgaccaggatgcccaacccgcccgtgaggtggcaccgacgcccagtgaaggccagacgacca

SEQ ID NO: 436862 - DNA, 122 bp, Homo sapiens
agaaaggttatgaaaaaccatttttcccaacgaaactcttctgccaggcggcataaggggcgcggccctccgctcttcagaacggctggtgtctgctttgaaaggtcctgactagaatctgt

SEQ ID NO: 436863 - DNA, 122 bp, Homo sapiens
cgaggacccacgacgcgtacgcgttacagtcctgtttccctagaaacggagctgccggcgcggaggtggctttgagattctgcgaaagacctgactgctcttcaacaattattgtgttgcac

SEQ ID NO: 436864 - DNA, 122 bp, Homo sapiens
gactgagtgcatgggcacttaataattttgatcttggaggcaggagggttaaaaccgcaccggcgttgtctggtgagcaagccactgtcactcagaaaggcagtggagaggaaggggtgttt

SEQ ID NO: 436865 - DNA, 122 bp, Homo sapiens
cccaaagtgctgggactacaggcgtgaccaaacgcccttggctctaacctgacttctaatcgcatcctgtaacctctgactttagtgatcttgacttctgtctgctgctatagactgaacaa

SEQ ID NO: 436866 - DNA, 122 bp, Homo sapiens
cacagagtgcatgaaatgcaccgtctccctgcctccccactcacacgtgctgcacacacgcggtgatcctgctggtctgttgggagtgaaatatgtcccccgtgactccctggtgacttcct

SEQ ID NO: 436867 - DNA, 122 bp, Homo sapiens
cagtcccgccccctcccccagccacgcccctcgccccgccgcgcaggccccgccccgtcccgccaggctctcggttctgccgacgcaggtcccgcccctctcgtagcctcgccccgcccgcc

SEQ ID NO: 436868 - DNA, 122 bp, Homo sapiens
gccgcccttcgctcggcgcgcactccagccgggcccagccgccgccgcccgcccccggcccgccccccgcaccgccccccgcaccgccccccgcaccgccccccgcgccgccggcccgcccc

SEQ ID NO: 436869 - DNA, 122 bp, Homo sapiens
catctgggaaatgaggtttttccaaacttaggatataagagggctttttaaatttggtgccgatgttgaactttttttaaggggagaaaattaaaagaaatatacagtttgactttttggaa

SEQ ID NO: 436870 - DNA, 122 bp, Homo sapiens
tgagcaaaatgattactccattaacaacctcaggcggagggccaacggcagacgcctgtgcggcacgggagcatctgagtccccagtgtctgatttttagataagaaaggaagtgtgttcca

SEQ ID NO: 436871 - DNA, 122 bp, Homo sapiens
ctgacgtgggaggattgctcaagcccaggagctcaaaaccagcctgggcagggccgggcacggtggctcacgcctgtaatcccagcactttgggaggccaaggcgggtggatcacctgaggt

SEQ ID NO: 436872 - DNA, 122 bp, Homo sapiens
tccccagccttgcccttccttaatatctcatcattccgcctttctcagtcattctgttctcgggttgtttagagacctttatggtttttactctgaaatgttccatggttcaatcaaaacaa

SEQ ID NO: 436873 - DNA, 122 bp, Homo sapiens
aaaacaaatatgtagatatccaggatctttctggaaggcaggtagaaacagcaacattcacgaaaatagggaacacaagaggaacagatgaaagaagaaggaggggtccaatttgagctgtg

SEQ ID NO: 436874 - DNA, 122 bp, Homo sapiens
atgcagctgcacactgcacttctattagggctatgtgtccccttgtttctttaatacctacgttcatcaaaccttgctcagatcctagtgaatcttctgatataactgagttaaatagataa

SEQ ID NO: 436875 - DNA, 122 bp, Homo sapiens
aggtggggggtgcagcactaggcgaggggggtgttgcaggcctgagccaggcaggggctgcgggtcggggtcaggtggtaggtgcggggtcaggcaggagagtgcggagtcaggccctgggg

SEQ ID NO: 436876 - DNA, 122 bp, Homo sapiens
ctcttgtaggaaacttcttgcaagtaaaattgacaataataattcccgtgccgagctcatcgcaggaagaggttaggcgggacagcccgaggcatgctggttgttgtagtctagcgttggcg

SEQ ID NO: 436877 - DNA, 122 bp, Homo sapiens
tttcctgtcccggcctgcgtggtgtgggcttgtgggtctttgagacccgaaaattgagagcgttttcgcactccagcggctgctcctggcggctctgcggccgtcaccatggtaaggaggat

SEQ ID NO: 436878 - DNA, 122 bp, Homo sapiens
ggtggaccagctcatccgcgacctggtgagtggccgtcgcctcccccccgcccatgcctgcgccggcccccgcccccaggacaaacccctgcagtgatttggagagtaactgtgtgccacta

SEQ ID NO: 436879 - DNA, 122 bp, Homo sapiens
tacaaggagagtgtctccaaactgctcaatcaaaagaaagtttaaactccgtgaattgaacgcacccatcacaaagtagtttctgagaatgattctgtctatattttatacgaagatatttc

SEQ ID NO: 436880 - DNA, 122 bp, Homo sapiens
ctggacacgtaagtcacaaggggaagggactggcttccaggggcaagtggtaggaggctgcggaaccatttcctcagatgtgaggacctaatgacaaccttggcagccagagaaagtatcag

SEQ ID NO: 436881 - DNA, 122 bp, Homo sapiens
tctgagcttgtaggcaaggatgggcaaataagggctttgggaggaggtagggcgggggcgcgctaaaactcaagtcaagtttgaatgttaggatgaagataaaggaaacaacccctggaaaa

SEQ ID NO: 436882 - DNA, 122 bp, Homo sapiens
cttgattccaggcagacataatttctattttctcctagttttattatttgcctatagcaccgtttctctaaaagacttttattcctaattgttataaaattctagctcaaaatttcttatca

SEQ ID NO: 436883 - DNA, 122 bp, Homo sapiens
atttgtataacttttaacatttgttctaccctctgaaaaccgtgagtgcagaagctatgtcgcattcactatgtctctgtagtgtttatatgcagtactttagttattttccataaattttt

SEQ ID NO: 436884 - DNA, 122 bp, Homo sapiens
cggcgggcgcgggcccgggggttcgcgggggcgcggcaccggctcaggcggccgcggctgcggtgtttttgtttaggatccaggaggaaacgtgcaggaacttctctgcctcggctccggtt

SEQ ID NO: 436885 - DNA, 122 bp, Homo sapiens
cctaacatacccactgagatcaggaaattaacattgtatacattaataccatctaattcacggacccagttcaagattctccaaaatagagaaatagaattaaatgcaataacttaaatatc

SEQ ID NO: 436886 - DNA, 122 bp, Homo sapiens
aaaattttgttttgttttgttttttaaaagcgaatcctataggccaggtgttgtggcccacgcctgtaatcccagcactttaggaggccaaggtgggaggatcgcttgaggccaggagttca

SEQ ID NO: 436887 - DNA, 122 bp, Homo sapiens
cccccgtcccgtgggaggttcctctccaggcgtgagaggacacggcccaattcaaggacacgtgccccgcggagtggcagccttgaggaagcagtcttgtggtctcctggccccagcgctcg

SEQ ID NO: 436888 - DNA, 122 bp, Homo sapiens
ggtccttgacggcgtggtagatgtgcaggaactggaggatcccgtgccgccgcacgtggtcggcatggcgcttggtttcctcccagctcagcggcgagccctgggacagcagccccatggcc

SEQ ID NO: 436889 - DNA, 122 bp, Homo sapiens
atgccgggcggccaaggccccgctaccctggccggctccgggcggaggaagaagaggaggcgcccagactggatacccgcctggacccggagccgcggcaccacccccagcccgccccacgc

SEQ ID NO: 436890 - DNA, 122 bp, Homo sapiens
ttctgagtcccctctagagagtacattgcacattacagttctccacagtggccacctctccggccccaaaagccaggtgaagaagctggcatgttcctcccggtgcagttacggacacattg

SEQ ID NO: 436891 - DNA, 122 bp, Homo sapiens
tccaagccccgagattcttaaaggagtaaattttagttacttctccaaggctcagagtggcgttcctgggattgagccatgctagttcccatagggtgtgggtgtcattgcacaatcagcag

SEQ ID NO: 436892 - DNA, 122 bp, Homo sapiens
ccgcagtgcccaggacggccccaccacggagaacaatccagccccagatgtcaacagtgccgacggagggggagaaatcccgctccagtgtgatctccaagcaatgaaaaacacagcacaca

SEQ ID NO: 436893 - DNA, 122 bp, Homo sapiens
gggacccagagagctaccgtagaaaattactccttcactcacaaggactcgcaccagcaacgccatgttcctcaataaccatttccgggtgaagagtgagtttccggtgtccccttttctac

SEQ ID NO: 436894 - DNA, 122 bp, Homo sapiens
ggtcataaacaatacatctcagcatattctatgagcaatacatctcagctgctgtctgagcggcacacagacctaccctaagaactgctctgtgtctgtcttccagccagactgcacattag

SEQ ID NO: 436895 - DNA, 122 bp, Homo sapiens
gacagcagcccgagatcccagtataaaatcctactcactcaattatcacctttgtattttcgaattggtatggggactttccaaaggtctgaaacaaggctctctgttctatatcatctaca

SEQ ID NO: 436896 - DNA, 122 bp, Homo sapiens
ttaacctgtttgtaaaacagggatgacccagtatttacaagattgtggtatttacaatgtcggagagaaagaacttggcacacaggaggcactcagtaattgttcaaccccttctcccatgt

SEQ ID NO: 436897 - DNA, 122 bp, Homo sapiens
tgggtgtttaggttgattccatgcctttgccattgtgaatagtgctgcagtgaatgtacacgtgcatttgtctgtataatagaattatttttattcctttgggtatatacccagtaatggga

SEQ ID NO: 436898 - DNA, 122 bp, Homo sapiens
aagaggtggctcaggcagccaatgtcacattggaaggtgccaccttggaagtggctccttcggccccagttgagccttcagatgaggcagccctggccgacagcttgattgcaacttcatga

SEQ ID NO: 436899 - DNA, 122 bp, Homo sapiens
gttttctactcagtttcattccactttctggtaaaagttcttttgcagtttttctgtctccgaaaacagtactttcgttttgggttttcaacaaattgctttcttggatcattaggatctat

SEQ ID NO: 436900 - DNA, 122 bp, Homo sapiens
gaaagcgcagaaggtgcgtgctccctggcacccagcacacaggtgttggggaagcggggacgaggcagccctggagcatggtttgcaggagtgcaagactgcaagcctcctccacggccacc

SEQ ID NO: 436901 - DNA, 122 bp, Homo sapiens
aaagtttctggatacttatacaattgctccaaggcatgaaaagcgagtgtctcccccaggcgcgcctcccactttacagaagcaatgggttcgaagtcgggaagctgcccggggcccgcaga

SEQ ID NO: 436902 - DNA, 122 bp, Homo sapiens
cggctaggccggctcgagactcccgggcgcccaggcgctgccgcccgcctcgccgccccacgccgaaggaccacgcgcccgccgccgccagcctctcagcgctcccatgatcgcccggtgcc

SEQ ID NO: 436903 - DNA, 122 bp, Homo sapiens
aggaccccaccataggcagaggcaggccttcctacaccctactccctgtgcctccaggctcgactagtccctagcactcgacgactgagtctctgagatcacttcaccgtggtctccgcctc

SEQ ID NO: 436904 - DNA, 122 bp, Homo sapiens
tcaggacttgtaggttgccctttactttacatttatttcttttccccccagtagagttaccggctgagcaagtgtcagctgtatttgttctcaaaccaggtaatacagtttccctaatacct

SEQ ID NO: 436905 - DNA, 122 bp, Homo sapiens
acgtaggacctggggcgggaagacacaggtgagagacgggcagggcatgtgctggacatgcgtacactcaaaccgagccacacacagacacagaacctcatacacacaaacgacacgtctac

SEQ ID NO: 436906 - DNA, 122 bp, Homo sapiens
cgcccggcctcccagggtagcttttgtagctgacattttttgacagcagagccgctctaacgctgtgtagattattctctggggacatgctgatccgcatcctggatactaatcaacatggt

SEQ ID NO: 436907 - DNA, 122 bp, Homo sapiens
aggcagttacccttttcacaaccagtgctgctgggggtgaaggcaacgggtgggtgagcacggacagtgtgagccacgtggccgggagctgggccagctcgctgtatgtgcacatcgtttcc

SEQ ID NO: 436908 - DNA, 122 bp, Homo sapiens
cgcgggcgagttccatgcctgtccagcgctgagagctgccggccaacttcgcggtctccacgtcgcgcttaacgtggcagcagcacgcacttccagcatctttttttagacagcatcttttt

SEQ ID NO: 436909 - DNA, 122 bp, Homo sapiens
gagagcatggtattactttcaatattgccgtaggtgtacacccacccggtgatattgatccgaatatccagagggtggagtatgacgttactcccaatatagcagtgggtgtacatccaccc

SEQ ID NO: 436910 - DNA, 122 bp, Homo sapiens
caatataaagagatctcaaaatcctagcattgagaaaaaagcaggttgcaagagaatgcacgcaatatggcagtgtgtgtaatatttacacagttatataaggttttgaaagacaaaaatat

SEQ ID NO: 436911 - DNA, 122 bp, Homo sapiens
aacagaaaagaaaacgaattagagagatgcatgcacctaaggacaagcctgcaggagccccgaaatagggtatcctctatcatgcctccaaatccctcaagaggcgacgccccacacaggct

SEQ ID NO: 436912 - DNA, 122 bp, Homo sapiens
gaggaggaaatcttaggagtctcaatgggagcaaactattaagccaaaggagcgcaaccccgttattctctcatctcccatgcccactttcccgaccagcgctccgcggcccacgccccagc

SEQ ID NO: 436913 - DNA, 122 bp, Homo sapiens
ccgaaaggagtttgtcttctctttcaacgccatggcgtcctcttccatgcactcggccggcgggggctcctactaccaccagcaggtcacctaccaagacatcaagccttgcgtgatgtgag

SEQ ID NO: 436914 - DNA, 122 bp, Homo sapiens
gcgccgccattttggattgtgtgagtttccgggacgttcggagggtggcctctctcccaccgggttccgcataccccaggcaccggcccgcatccaagtgtcaggttggagccgggaagcgg

SEQ ID NO: 436915 - DNA, 122 bp, Homo sapiens
gatatggtcagtgttcccccttcatctgattttatagtgttaaagcttctatgtgtgtatcggaaggggaaatagctggtcctgtggggaaaagagaagttttccttcttaaacagcagatc

SEQ ID NO: 436916 - DNA, 122 bp, Homo sapiens
gagctgcgggctcggcccgagcgcttctgcgtggcgccccgcgtgccaaccgggtcactccggtccccaccgtagaccccggccacgagcctcggcgtcccagcctctcctcgagtcctggc

SEQ ID NO: 436917 - DNA, 122 bp, Homo sapiens
gcggctcccaggcgcgggtcgggcgtgtaaggctggggcgccgggcgccagatcccggagcggggcttagggcaaccaacggcccgagttcagaccccgactcaaccagagtaggcgtggaa

SEQ ID NO: 436918 - DNA, 122 bp, Homo sapiens
ttatagcttgaaatgcccttttcaactctgaaacttttagagtctggcaatccttgagagcgtttttttcctcctgcttgggtgagagctttatctttgacctcattctatccatctgaaga

SEQ ID NO: 436919 - DNA, 122 bp, Homo sapiens
taattccagttcccatccataccaccgtagagaagttttgcatcttcagtgcatcaccaccggcctgttttgtcattcttctttctttacaatttacattattaaaatattaatttttagga

SEQ ID NO: 436920 - DNA, 122 bp, Homo sapiens
gaacgcccgaagcacccgctttgcagacgccacctgccccgtgatgaggctcagacagagcggccaagcagtcccctgacccacccagtacgaggctttcctgagctggccaaacgtttgcc

SEQ ID NO: 436921 - DNA, 122 bp, Homo sapiens
gccagtcgccctggccaggcagctacaacacagaaggcatagtgcgtgctatgctatgttcgcacaatcgctcaaaagaaaataaaagaaaaagacaaagtacaaaagagtaacagctataa

SEQ ID NO: 436922 - DNA, 122 bp, Homo sapiens
ctcccaagtcctgttccggccctggaagagctgctccgggcgccacactgggatcctgttcgccgagcctgcccctccacgccggccgtgcacagccctgccgataccgtgggtgcagctgg

SEQ ID NO: 436923 - DNA, 122 bp, Homo sapiens
cagctcagttctaagccgaggggctgctgccggacattctagggtctgatctggcgggctcgaagggaggacagtcactgcgacccggaaagctccgcgcttacgacgcccacccagaaaat

SEQ ID NO: 436924 - DNA, 122 bp, Homo sapiens
ccctgtccactctttccctgtttcctgtgttctcttccctggtgccctgttcatctgtttcggtctctttggctgcttgccctggcccccgtccttctatgctttaatgtggggcccatggg

SEQ ID NO: 436925 - DNA, 122 bp, Homo sapiens
atgaggtcttgctcagagttcatgtgagatctggatgtttaaaggcatatggcacctccccgctcactctcttgtgctcctgctcttgccaatgtgatgtgcctgttctctaccaccttctg

SEQ ID NO: 436926 - DNA, 122 bp, Homo sapiens
tttctatgacactgagttttgagttggaagccccagtttcctctgatagccctcccatggcgggggaggggaacgcagagtaagctctggccttgtcatttgggccctaggggaggtgtatt

SEQ ID NO: 436927 - DNA, 122 bp, Homo sapiens
tctctgggatggggagtgcagggtctaggcgatggcacttaccagcgcgaagtgcaccagcgcgtcgtagcagagccagatgagcgccccgcggtccgccgccccctgcccgcggcccaggc

SEQ ID NO: 436928 - DNA, 122 bp, Homo sapiens
actcctgcggtcactgtgagtccctgaacggcaccaatgggccggtagcgcatccagcaacgccctgatcatggccacgcacagggacgcacatgctttcacgaacgcacaccacacatgtg

SEQ ID NO: 436929 - DNA, 122 bp, Homo sapiens
aaggcatcggtttctaagttctcaaaacttacaggtgagcttctgctaagagtaaacgcccgcggctcgccgcccacggcctctctcttgaggtggcacctggtcctccgacacgcggaagc

SEQ ID NO: 436930 - DNA, 122 bp, Homo sapiens
tccacagaggagagatgtatggaccgggaggtgggaggtggctggcagttgatgggactccggagaaggtgagctgcacagaagcaaaggtggttttattatgcggatttatgcggatcaca

SEQ ID NO: 436931 - DNA, 122 bp, Homo sapiens
acaggttgatgttgttctccaggaagtggagtgggaggggggtggggtcactagggcaggcggggtccccggaagcctctgtccctgcataaagcagcctgtcctggcaagggatggtcatc

SEQ ID NO: 436932 - DNA, 122 bp, Homo sapiens
caagtgaacgcggtcagccttgctgtcagttggttcctggcttgcagtctcaaacctgaccgctgagagcacagacaattctgagtatagccccagtggtttaagaaaggtcagattcccca

SEQ ID NO: 436933 - DNA, 122 bp, Homo sapiens
aaagaggctacacagtccagcccaagtatctgccctcattaattgaggtgttgatccatccgatgacattcttttgtgtcacataattctgcaggcccataaacatactcatgtcctggtcc

SEQ ID NO: 436934 - DNA, 122 bp, Homo sapiens
ggggacctttgcggggaggcctcaggtcagcgccgcccttgcgatggcgggagagcagagcggccccagggcctctgagctccggccccggcacgtcccgccctctcctccgcttgcgggag

SEQ ID NO: 436935 - DNA, 122 bp, Homo sapiens
cggggagggggtgctgggctccaatggatggcagtgacagcagcagtcctggccccagggcgcagatgaaggctgtggtatgaccggcagcagggagctcctggctcatccagcccggccgg

SEQ ID NO: 436936 - DNA, 122 bp, Homo sapiens
cggccaatcagctgggaaaatcgccgaggtttgagctaacctcggagcgttcacaccaaccgggaggggacatgtgggccgggccaagttaatagtgccatggaaggaaatttaccgcggtt

SEQ ID NO: 436937 - DNA, 122 bp, Homo sapiens
ctcagatgatccacctgccatggcctcccaaagtgctgggattacaggtgtgagccacaacgcccagccgggattgtgggattttaaagggaaaggaggaaaattttgcatctcacgttcta

SEQ ID NO: 436938 - DNA, 122 bp, Homo sapiens
tgaggccggagacaatggaatttgcttacctaaaaagctccgccccttgatggcgtcacacgaaaccaaccacgccccatattgccgcatgcgcactcttaagaggtcgaacggggagggcg

SEQ ID NO: 436939 - DNA, 122 bp, Homo sapiens
tactgtttattcctgctcaaaggagggtgggggcaagtgaaaaagacatgtcttcatcatcgtattacttgatggtgactagaagtgcgggctgtacacagcattctcttccaaatggggat

SEQ ID NO: 436940 - DNA, 122 bp, Homo sapiens
tattattttttaaaagtaaaagtgaccctcccttccctatatttgaataagactggctggcgttcacagcgcttactatctaagcatgcacaagcttgaattaacttatatgaattcattta

SEQ ID NO: 436941 - DNA, 122 bp, Homo sapiens
cttggcctggggcggggcttggctggggtgctcagcccaattttccgtgtagggagcgggcggcggcgggggaggcagaggcggaggcggagtcaagagcgcaccgccgcgcccgccgtgcc

SEQ ID NO: 436942 - DNA, 122 bp, Homo sapiens
tcagcgcagccgccatcttatgcctgaagcggactgaggtcgagctaggcaaggagaacacggggcacagattgtggagctgactgagaggaggcctgagtcccgccacagccacttcccac

SEQ ID NO: 436943 - DNA, 122 bp, Homo sapiens
gtgtacgacgttgcgcagcgacgcgggggccttcgggaaatgtagtctacaactggaaaccggccggatcgtgtctgcgcaggcccagcagctaagatcgggtccggcgctccagaacagaa

SEQ ID NO: 436944 - DNA, 122 bp, Homo sapiens
gatagaatgtgcacgaaaggtttcaatgggaaattctaatttgaataaaaacgcacaaaacgcgaggaaagcctaggaacacatcagccgtatactttgccgtagagaagttaaggatgagg

SEQ ID NO: 436945 - DNA, 122 bp, Homo sapiens
tcccacttgagacctgcctggagtgacagtggaggaatgctcttccccaggctcaccccacggttcacaggaggaaatggccttctgcaccagtgggtgtgcctgcctgagacaccccagac

SEQ ID NO: 436946 - DNA, 122 bp, Homo sapiens
ggttcgtggggcttggagactctgctgacatgataccacagacaattcattacctccccgcggctgcttcccgcatgccaaaggggacaggatcaaagtccttgtctgatgacaaaaactct

SEQ ID NO: 436947 - DNA, 122 bp, Homo sapiens
tcaggattgtctcataaatgatgtgctgtggggcattggtgctggctacacatcaagctgcgaaatagccaagtttggtctggtgccttttcttctcttttttcacactgtaagcattaaaa

SEQ ID NO: 436948 - DNA, 122 bp, Homo sapiens
ctatttcctgggttttcattggcccagagccgccaagtttcctgggtaatgtagttcccacggcaccaacactagtaagcggcgtctcgcttcacctccaggttaaaagcccagagaagacc

SEQ ID NO: 436949 - DNA, 122 bp, Homo sapiens
ccaaaagcatctgtgagtccccaattcattgaacactagtatataacaatctccaaagcacgacattcttagccttttcagtcttgttgatagctttctaactgagggcatttcacaaggaa

SEQ ID NO: 436950 - DNA, 122 bp, Homo sapiens
aaatgatgaatgcacactatgtcattctgatgaagaaaccattgccactgaactacaggccgtcacagctggaagggattgaattcaactcactcgacacttgcccagttgttctggatgct

SEQ ID NO: 436951 - DNA, 122 bp, Homo sapiens
caaccttaatgaatttccagggaattacgctgagtgaataaaagttacttcccagccgggcgcggtggctcatgcctgaaatcccagcactttgggaggctaaggcaggtggattgcctgag

SEQ ID NO: 436952 - DNA, 122 bp, Homo sapiens
ctcagcctggctgcccctcaggatgaaaggcaagttctgaacgcagtctgagcaaaggcccgtgggcgctcccagtctcctagcatggaatgcatgtagctctggaagtcattcctgtgtct

SEQ ID NO: 436953 - DNA, 122 bp, Homo sapiens
tcctgcaggctcccgtccctgctggtgctggccacaatgtccccactcccagggtttcggcgtcccagccccctgcgcccaccgcgcctgcccgccagaatccctgtgcccttggtgcgtgt

SEQ ID NO: 436954 - DNA, 122 bp, Homo sapiens
cacgcctagccccaccgcgctcccggcgcggcctccgccctggtcccgccccccgggagtcgcccgccctgacatcatcccggttatgtaagagccgcggcttccggttccttgctccaccg

SEQ ID NO: 436955 - DNA, 122 bp, Homo sapiens
ggtggaggcgcacgcggctgtgtatgctactgggcgctgctggtaccagagtagggccagcgggggcagaggctgatttcagggctggtcctattaacctttaaaattaaaataggccaggc

SEQ ID NO: 436956 - DNA, 122 bp, Homo sapiens
ccccctggaggctctgcaggcggcaggcagccctccaggctaaagctggcagcatgagcccgccttcctgtttccttcctacctcccactcacctgggaggcccctcccttccctcgctcca

SEQ ID NO: 436957 - DNA, 122 bp, Homo sapiens
aaattgggctaacagagaagctttgaattcccatagttaatactggaggaaatgagtcatcggtgataagcaaagccacacacaatattgttggttcttattgactgaatttactttggttg

SEQ ID NO: 436958 - DNA, 122 bp, Homo sapiens
tgacttcggcgccccgcgagttgggtgtgtgcggttgggggcggcccagagtgtgccccacgcctgccagtcgggtaggccagcctccctggagagaggggggcctccccaaggtgggacgg

SEQ ID NO: 436959 - DNA, 122 bp, Homo sapiens
gtccctttcacagccaggacacgcctggatgagaaagcctgaggtgcctggcatgcccaccggtgccactctgcagcctccacccctggcctgagtccccctccatccgtcttggtggacac

SEQ ID NO: 436960 - DNA, 122 bp, Homo sapiens
tggctcctctgctcagaaatccctgtctgaatacaataacttcaagtctatggtcgtgtccggagctaaaggttccaagattaacatctcccaggtgagaagccttgtttttccatatacgg

SEQ ID NO: 436961 - DNA, 122 bp, Homo sapiens
cactgcgtccagccacaattaatgtacccccggaaacacgtcctgtgggacggtgagttccgcaacgcctgcgctcaccaggagtaggagtcattacgtgagcccttcgcggccccagcgtc

SEQ ID NO: 436962 - DNA, 122 bp, Homo sapiens
ggtgccaatctccatctcctccactcagtgggggctctgtttgcttttgctgtccctgcacggtggcctggaaactctctccaggcagtaaaccggagcaatcacaggactaaattcatttg

SEQ ID NO: 436963 - DNA, 122 bp, Homo sapiens
ccaactcctgacctcaggtaatccgcccgcctcggcctcccaaagtgccgggattacaggcgtgagccaccgcgcccggctgcaaagcccatttttctataggtaacctgtgctgcgcgggg

SEQ ID NO: 436964 - DNA, 122 bp, Homo sapiens
gagaagagtgagctgcgcatggaggtggacgacctggctgccaacgtggagactctgacccgcgccaaggtgtccgtgccttcctcaccccatacccaccctgactttaaaccaatcccgat

SEQ ID NO: 436965 - DNA, 122 bp, Homo sapiens
gggaagcaggtgacccgagggggctgctggagcaaccttgcattttcagggctgccctcccgggaaggggaatcgagatggggtctcggaagggaacaaagagcccacccattccgccccga

SEQ ID NO: 436966 - DNA, 122 bp, Homo sapiens
tctcaggtgctcttgaggacgcgagcgacttccctaggagcgaacttccgcgggcacggacgccagaagaggtaacagctcagtcttccaggggaggtcgggactggtgttttgtaaatgat

SEQ ID NO: 436967 - DNA, 122 bp, Homo sapiens
tgagaaaaaataaactgaggcacagctaagcccgtcgtgcccctgggcctgatgggccggcggggccttgcactgcctggtctaacctgtggctgctggtgaccaggctgtgtcccccggac

SEQ ID NO: 436968 - DNA, 122 bp, Homo sapiens
cgccctgcaccccgggtgggcttggcacacacctcaccgccatgagcggctgcagggccgcggcggcccccgttcctactgctacctacgatacacggtactgcgcctacctcacagacggc

SEQ ID NO: 436969 - DNA, 122 bp, Homo sapiens
cgtgatctgccctcctcggcctcccaaagtgctgggattacaggcatgatccaccgcacccggcctaattttgtatttttatagggatggggtttcaccctgttggccaggctggtctcaaa

SEQ ID NO: 436970 - DNA, 122 bp, Homo sapiens
cttcgcgttcgtcacctttgaaagccccgcagacgccaaggccgccgccagagacatgaacggcaagtccctggatggtaaggccatcaaggtggcccaggccaccaaaccggcgttcgaga

SEQ ID NO: 436971 - DNA, 122 bp, Homo sapiens
gccctcgcgctcgcgctccctcgcgccggcgccggctccccagcccaagccgggcagggccgggctttattaatatgctaattgtcctgctagtgggaggggagagccgtgtcaaagtgacc

SEQ ID NO: 436972 - DNA, 122 bp, Homo sapiens
ttctcagaatgccacggccttctgtctgcgctaggagcaagttctggttggaatggaaagcgagacctttcgcagttgccagcgccccccgtgctcagctgcaggagtaactcacttctctt

SEQ ID NO: 436973 - DNA, 122 bp, Homo sapiens
cagcagcggagcaggaatgcaaacccaggatctccgccgcgagatccaccccggcgcccccgagtcccgcagttcccggcttcaggacaaccccttgccaggtccaacccgagctccttcac

SEQ ID NO: 436974 - DNA, 122 bp, Homo sapiens
ttcgcatggtcgcttgaggcgttcctcctgtaagcagacgaatgtgcccgaggtaaaggtcgtaaagcagtgaacctcccaccagtttgcctctcagggtgcgtacgagagcccactcacct

SEQ ID NO: 436975 - DNA, 122 bp, Homo sapiens
gactccccgcggggcccgacctcctggaccgcactgatctgaacagggcgcacttcgacccggaagtttacctagacaagctgcatagagtgtgccctctggcccagctgatggacagtgag

SEQ ID NO: 436976 - DNA, 122 bp, Homo sapiens
gccgggccaatgggaggccgtcgcgggcagggacggggccgggaggagtcggggctgggccgcgccgaggcagctggctgactccagtttagccgccgccggagaggacgggcgccgagccg

SEQ ID NO: 436977 - DNA, 122 bp, Homo sapiens
gctaggtttgggatgaaagaagctgggcagatgcaaaatctggagagcgcgagggccgggcggtcagtcagcacccagactggcagcatgaccggtgagtgtccgggaccctgctcccgcca

SEQ ID NO: 436978 - DNA, 122 bp, Homo sapiens
atccgcgttctcaagcggaaaggacattttgcttttctgttggcaggattagtagccacgcgggtcgtccgcagcagtgctgtttttttggtttttcccttggtttcactaatgcgtgcatg

SEQ ID NO: 436979 - DNA, 122 bp, Homo sapiens
tagaacgtgaacaataaggaaccgttcaggatggccaaaccgccgtctgcgctgttttctcgccagggctcaggcctgggaacggaagaggttaaaatccagtggcttgtgtttcagctttg

SEQ ID NO: 436980 - DNA, 122 bp, Homo sapiens
ttctcttcggcacaattaattttgcaaagttcagaaatgtgccagacagagcccctggcacgcagtcaggactctacagacacaccttgagtaggaaacaggcttgtttgtttcatctgtga

SEQ ID NO: 436981 - DNA, 122 bp, Homo sapiens
tgcaggtgaccgctggtaattctctattggaaacttggtgtcttcattctccatcctccacgtggctccgaagccctgctctgcctcaggtccctgtgtgtccaggccctctatggtcatat

SEQ ID NO: 436982 - DNA, 122 bp, Homo sapiens
tgaagtggccccggaaggccgggatgagggtgactgtggccacaaatcccagcagcgagacgatcaaattgatcagcagcggcatgggcaattccgagaaggcccacatggtgaccggtcag

SEQ ID NO: 436983 - DNA, 122 bp, Homo sapiens
tctccaaagggtagtgttttctctgagttctttaaattaactaacatttcaatagttttgcggtttacaagctatcgccatggaaaaagggcctggtaaagtaaccaagaaatgttattaag

SEQ ID NO: 436984 - DNA, 122 bp, Homo sapiens
ctctctgtaggagtcctttgacattggtactgccctttcaaaacattttttaaaatatgccgtgaggactaagacttctccttttgcatctgtgacgtgatcttttttgatgttgcagaggg

SEQ ID NO: 436985 - DNA, 122 bp, Homo sapiens
tactgcaatcacacctcaggagcaaagatggccaagatctatttcaattcttagatatctcgaggaaccgcagatgactgtaactatggaagatagccaatctgtagtaatgaagaagcgca

SEQ ID NO: 436986 - DNA, 122 bp, Homo sapiens
atacctcggtccagatctccggattgtcgggggacgcaggactcttcgaggaaaaccagccgaatgagatcaaaagttgggggtggggggaggctgaacaaactcaggacctggtggcccac

SEQ ID NO: 436987 - DNA, 122 bp, Homo sapiens
caggtttcttctcttcattcactcacccacccacccacccatccatccaaccgcagcaagcgctgttctatgaggccacaacctgacccaaaggaccccgcccccatcggccgcctaaactc

SEQ ID NO: 436988 - DNA, 122 bp, Homo sapiens
gttcccctctgcagacggaaagtacacttccacgagctgaagccagcaggcagaggcagacgaacatctgccctagacagcctccagagaaaaagaatatattaaaaacaaatgcaggaata

SEQ ID NO: 436989 - DNA, 122 bp, Homo sapiens
actaatgtgagattatttacaatgtttatttgtgctgcttatgttttatagcagaaataacgatgtgttggattacaaggtgatgcttcagtatcaccttgtgaggttacataatgtactgt

SEQ ID NO: 436990 - DNA, 122 bp, Homo sapiens
agagatatttgtaacagctgaaaggaaatcctgacacaccagcctccaaaatcactaggccgcctttcagcccagggttccctcctgcctggggaatttggcccctttccaatggcagtgcc

SEQ ID NO: 436991 - DNA, 122 bp, Homo sapiens
gcaagttccttgtatttcctctacattacggttaaagcagacatttgtgcactaatctgacgcccctcccactgctgggagtcttggaacatgtccacttgtttttctcctagaaacaagac

SEQ ID NO: 436992 - DNA, 122 bp, Homo sapiens
tccatcttcctttttattccaccctagaagttgtcgttttgtttgtttcccagctggcagcgtggaattataattatagatagctgtaatatataatgagaaattgaaatccacaggcttta

SEQ ID NO: 436993 - DNA, 122 bp, Homo sapiens
accccatcccactccccgccactcaccttctgcttcggccacccggtgcggctccagcaccgcgcgctctcccggcacggttcccggagaaagtcccccaatcaccagctacggcacttgta

SEQ ID NO: 436994 - DNA, 122 bp, Homo sapiens
gtttccgaagcccctgaaccctagggtattgtgaaactagggctgggctgcggcctcccccgcccactggaagcggccagccctggatagcgtaatggtttttttttttttttttttttttt

SEQ ID NO: 436995 - DNA, 122 bp, Homo sapiens
atcccagcctaatttttcttgtgcttttgtttgtatcaggggatgtggctctaaatcagccggacatgtgcgtctaccgaagagggaggaagaagagagtgccttacaccaaactgcagctt

SEQ ID NO: 436996 - DNA, 122 bp, Homo sapiens
cattacacacagtggaagtgcagggctatgcagtgggaattcttacacgaggactgggaccgcaccctgtagcctttttgtccaaacatcttgaccttactgttttaggctggccatcatgt

SEQ ID NO: 436997 - DNA, 122 bp, Homo sapiens
gcccagccgtcccccgtcggctccagccaatccgcgcgcgctcccctggccgtctcccaccggatcaggtgtctcctctgcgcagactcctccacgacgccagtcggcgctggcgtagctcg

SEQ ID NO: 436998 - DNA, 122 bp, Homo sapiens
agggtacggagatgtccgggccttctcgtggggcttctcagcagtgcgcttcgaacctgacgtgatgaagtttagagaaaacctatgtgaggaaaacaggctccagctggccaggatgttgg

SEQ ID NO: 436999 - DNA, 122 bp, Homo sapiens
tgtttgatattctgagaacaaaagtgatgccatactgccattaagaaactgattcagactcgatctctcaacaaggtaagacatcaatgttcccatcaagagctgcccataatactgcagta

SEQ ID NO: 437000 - DNA, 122 bp, Homo sapiens
agggagggaggagggagggagggaggcagcgcttgcctggccctcatgatcccccctcctcgtctcttgccgaggaccctcagcgcagccacttctccaggcactcggcagagagaacgcgc

SEQ ID NO: 437001 - DNA, 122 bp, Homo sapiens
acccacagggctccaggccctatgagcaggacaggggtcagaggtcacatctgatttgctcgctgctgcgtccctgagatctgatttgctcactgctgcgtccctgagatctgatttgctcg

SEQ ID NO: 437002 - DNA, 122 bp, Homo sapiens
gaaaggcaacgtgcctctcccaggctctagggcctctccccagatgggtcccttcagagccggtctagaatcttcgggaacctctccatgggaccatttcatttgctaaataaaggacctgg

SEQ ID NO: 437003 - DNA, 122 bp, Homo sapiens
ctgaaatattgatatttcacaagcacttgccatcctcctctaaagctcctttgtcttctgcgtcttctaactactcacttgtatgctttgcctctctgtgggctcatttgagtgaatttctc

SEQ ID NO: 437004 - DNA, 122 bp, Homo sapiens
caagttggccaaattgacaagagcgagaggtatactgcgttccatcccgacccggggccacggtactgggccctgtttccccctcctcggcccccgagagccagggtccgccttctgcaggg

SEQ ID NO: 437005 - DNA, 122 bp, Homo sapiens
atccaagttcatctccacagctgcgtgcataacaaccatcaggaactaaccctgtgaggacgtcaaggcactgtgagcagccagagagtggtccaaacagcaggtgacacaggaattccgta

SEQ ID NO: 437006 - DNA, 122 bp, Homo sapiens
ctaactcctgacctcaagtgatccaccgacctcggcctcccaaagtgctgggattacaggcgtgagccaccttgtctggcccacgttggttattgaaaagatatgtagatctggcatgaaaa

SEQ ID NO: 437007 - DNA, 122 bp, Homo sapiens
tctctgcagtacctgaagctgcgggagcgaatgcagatacagaaggagatggagcggctgcgcttcctactgtcggatcagtcattgctgctgcttcctgagtaccatcagcgagtagaggt

SEQ ID NO: 437008 - DNA, 122 bp, Homo sapiens
ctcggttcctctgtaacttagactccagtgtgccgcgcagtgtgcgcaaattcacaaacccgcccgctgagttggtcgtttcggaatcccgagacttgaaacccaacgggaagacccttctc

SEQ ID NO: 437009 - DNA, 122 bp, Homo sapiens
aaaatgacacatgccatcttacagatatgctgtagactgtgaaaatgaaaaaaaaaacctcgtgtttagagtagacactgtttgatggattaggtaggttttcatctggactttgaaatgta

SEQ ID NO: 437010 - DNA, 122 bp, Homo sapiens
gactgtgcctgggaaacagcagtgcagggagatcagctcctgaagacgggacccctcccacggggtcgcagggctccgtcttctgacttggctgctgggcgctgggaaaggctggcagcccg

SEQ ID NO: 437011 - DNA, 122 bp, Homo sapiens
gggggtcgcttacaggtgtggccggcctggaaacggtggtgtggctggtgagggcggagtcgatcagggaaggatcaggactttatggcagaacagagtccaccaccgtgttcggaagaaag

SEQ ID NO: 437012 - DNA, 122 bp, Homo sapiens
gcagctttgctatagttctagaataaatgagcacaggaagaagacgctgtcatacgggaccgatccgtgtccacatgaagtcatcagatcggtatgggtgagtggcaggcaaatccggtgtg

SEQ ID NO: 437013 - DNA, 122 bp, Homo sapiens
ccttggtttgatgcccttttttttttccttttcatgtttatattttggtgcatttccccccgatatcaaatattaccttggtactaaaaaaatcaagaagggaaaatgcaggcaggagaacg

SEQ ID NO: 437014 - DNA, 122 bp, Homo sapiens
gggaccgggcaagagggtgggccggaagcggcatcaggccccgtgcccattggccagcctcgccaggacgctgcgacctgggacgtgcgattggctgcggtgcgccgcgtcggtgctggctt

SEQ ID NO: 437015 - DNA, 122 bp, Homo sapiens
ctctggggctggacccatgtgaaatggcggtcagcatccgccgtgtgagaaaggctccggcgtggatgagctgagctcaggagacctgggccatggcggctgctggtataggaggtgcagtc

SEQ ID NO: 437016 - DNA, 122 bp, Homo sapiens
acctctctcaccaaaagctgtggaacgagcaccgagtactgattccaggtttctggtccccggcctctctccgaccccagcacagctgctctttctgcccctcagggatgggggttagttcc

SEQ ID NO: 437017 - DNA, 122 bp, Homo sapiens
gggaggaggcggcggcggcggctagcgaggagacagagctgggtcctgcagtaggactcccgggagccaccattatggtgaagaggaagagctccgagggccaggagcaggacggcggccgc

SEQ ID NO: 437018 - DNA, 122 bp, Homo sapiens
gcctgcgggcagcccacgggccagcctggcggggtccgacggcggcggcggtggcggcagcgcccgatccagcggcatcagcctgggctacgaccagcgccacggcagcccgcgctccggtc

SEQ ID NO: 437019 - DNA, 122 bp, Homo sapiens
ggttgatgggtggccgggcctctccatccccagtgcgctgcgggggtcgctgggtggaggcgccctgttaactggcgcaggtgtgtagaatgaggacaggaaggggccctcacctgtagcag

SEQ ID NO: 437020 - DNA, 122 bp, Homo sapiens
ctcctctcccctgccttaccaccacaccaaccgggcttcaatataataattgtattatagcggaaggatttgcaagacatagactcttcctaagtagtactcaggggagcccaaaatcaaga

SEQ ID NO: 437021 - DNA, 122 bp, Homo sapiens
gccggtctctacagtctgttcacactggccaatcaagagccaggaagcctcctggagggccggaaactttccaaggcgcccgccgactggctgtattggggagggcggggccggggccccgg

SEQ ID NO: 437022 - DNA, 122 bp, Homo sapiens
ttgttgctgctgctgctgctgctgttgctgctgctgctgctggtgttgcagctgcttgggcgggataagcagcagcccttcctcggtgaggatgcaacactttttcttccagagctgcaaca

SEQ ID NO: 437023 - DNA, 122 bp, Homo sapiens
tttccgaaggcgtcatcaacattttggttctttaatagtaaccaaaacccgaaatcatctcggttctcagtatttggctctatgggaacaccttttcttttctctctttttttttttttttg

SEQ ID NO: 437024 - DNA, 122 bp, Homo sapiens
cgtgctgggagcggcgcggctggagcgcagcgccgaagggactggcagggctgaagtgtgcgggacagcaagcccccgaatagccccggctgccacctcgcaggacccaaggccacgcgcgc

SEQ ID NO: 437025 - DNA, 122 bp, Homo sapiens
atctgcgacctgatccgccaaggggacacacagtgagttagcggggcctgtgccctgatgcggaggagcagccgtgcactaagctgggctcgcttggtgcccgttgggtctccacgacgtag

SEQ ID NO: 437026 - DNA, 122 bp, Homo sapiens
taagtgctttcatgaaacttcccatcgaatcctcacaacgtcactggaaagaggcattgccgtctgcattttacttgtgaggaagctgagactggaagggctccatcatttgtagacagcaa

SEQ ID NO: 437027 - DNA, 122 bp, Homo sapiens
taacacaatgtttagcagcattcctgacctctatccattagatctaagtagcaccctccccgacagcatgacaaccgaaagtttctaaacatcaccccagctgagaaccaatgttctatcta

SEQ ID NO: 437028 - DNA, 122 bp, Homo sapiens
tttgccccagctggtggcgagccccacctgtcaggaaggaatgtgactgccacaatggggcggtgtgtgttctgcccagagccccatccctcgtgagcaacccccatgcagacacccagggt

SEQ ID NO: 437029 - DNA, 122 bp, Homo sapiens
caatgggcgcggggagggggcggaacgcccgcgctgagcagccaataggggtgctaggggcggggcgtgcggaccgcgggccaatgggggcgcggggcccgggtgcgccgcggcgctggggg

SEQ ID NO: 437030 - DNA, 122 bp, Homo sapiens
tgggcagtgagcacagcaggtgcccaacttaggttgggccccctggaaaacgcaggcacacgaacagtgacactcttgcacatgcacacacgcgtggacaggcacacgcacagcgacactct

SEQ ID NO: 437031 - DNA, 122 bp, Homo sapiens
agaaacacaagttatagtaggatctgtgttctgtgctttttccaaagagggctctggtaacgtcagtatttaaaggggaaagagcaagcaggagggagagaagaaaaataaaagaaggaagg

SEQ ID NO: 437032 - DNA, 122 bp, Homo sapiens
ctcctccctgaggtcttagaacagatacaagaaattccaggcgaaggtcccacaggtgagcgtgtgcctgcgagagccgtggccgctgcatagggagggccccgcggagtggggcggcagct

SEQ ID NO: 437033 - DNA, 122 bp, Homo sapiens
ccacctttccagtttgcttcaaatgccaaacgaccgtagaatggccgacgctgagttcttcggcagcttcttgtgtggttgtaagaggatcagcttgataattgctctcaattggtcattgt

SEQ ID NO: 437034 - DNA, 122 bp, Homo sapiens
ctgccgccccataccctctcctcttcccccttaggaatttgtgcagtactggaggggttgcggcaatgggaggcctgggtgggccgtgctgccttgatatggccaagggacccagtcaccac

SEQ ID NO: 437035 - DNA, 122 bp, Homo sapiens
cgccaccttccacccctgcgctgtgctgaccccaccgcctcttccccgatccctggactccgactccctggctttggcattcagtgagacgccctgcacacacagaaagccaaagcgatcgg

SEQ ID NO: 437036 - DNA, 122 bp, Homo sapiens
tgctgaatgcccgttctagagaattcaggggccccatcccgggtttctggggtgcccgggcggcctgtgctcgtgagctggggtctccgggcaggcaggggcaggcgggctcccagcgcccc

SEQ ID NO: 437037 - DNA, 122 bp, Homo sapiens
agagcacctcggcccgggaagaggagtgagccagggtcgagtagtgtcccccgatctcgccgcggcaactccggagaaatcccgggctgggcaaacagcccttaatataataatagcttgtc

SEQ ID NO: 437038 - DNA, 122 bp, Homo sapiens
gaacacagcggtgttcaaaggccacgtcctcgcacacaacacccagacctgccacgcagccggtactgtttcctgagctcatccgagcaagcgtctccacggggcaaagcaaggccttgagg

SEQ ID NO: 437039 - DNA, 122 bp, Homo sapiens
gaagcgcggctgctgggcggacctggggagactgcgaggtgcagtctgcgccgcggagtccggagcctagcgccccagagtccagagcaaagcgccccgccccgccctctgatctccccgtc

SEQ ID NO: 437040 - DNA, 122 bp, Homo sapiens
tccaggttctgctgagtggagaagccccagggatccccactaccccaaggcccatcaaggcgagagggaccacctgagccagcagattgagttttcttaatttgtttctaatcacatgttct

SEQ ID NO: 437041 - DNA, 122 bp, Homo sapiens
aaggctgaggcgacgcctcgacgacagcggaccggagctgcaggggcaacacattcagggcggggtgccccatttaggcctggctgaccggagtaagaaactacaacccccgaagtgccttg

SEQ ID NO: 437042 - DNA, 122 bp, Homo sapiens
cgtttccgggtagaaccccggatacccgtccacgtccacacgggcctccgcgttcagccgcgtccacacgacccctccagcagcggccaccaggacccccgagagccctgccgcgtctacac

SEQ ID NO: 437043 - DNA, 122 bp, Homo sapiens
ttgaacaactcaacaggaacttacatcgcagaggcccggggcattggcacatcttctccccgcaaggactgaggtaacaaagctacccattttaaaaacacttccttcccccaggtccaagc

SEQ ID NO: 437044 - DNA, 122 bp, Homo sapiens
ccggggaccccggcgggggccaggcccgactgcccagcctcggaaccctggcatcgcccccgagggagggagtcactggtggctgacagtgtttggtaaccacagaaaccgagatctgacct

SEQ ID NO: 437045 - DNA, 122 bp, Homo sapiens
agcaatcatcccacctcagcatcccagagtactgggattaaaggcgtgagcctttgtacccggactaattttttaaatttaagccagtttgaactgggttcactatcacttctgactgaaag

SEQ ID NO: 437046 - DNA, 122 bp, Homo sapiens
gtggactggccagagtgattggaggtgttttcctcgcgtcctccaagtctacggggccttcgcacctctgagtgcctgagagccccggcttttgcttgggacggaggtacgggaccacaaga

SEQ ID NO: 437047 - DNA, 122 bp, Homo sapiens
agaaaggggaggaggatggagccctcctcctgatcctgtagtggtagtaagaatcagcagcgcgggcaaggagtacggacgggagtcagaggcagagcgagggtgtgtggagggccggcggg

SEQ ID NO: 437048 - DNA, 122 bp, Homo sapiens
gcaggtcagcttcacggccaagcacgccaacaaggtcaaggtgctggacgcccccgtgcccgactgcctgggtgtgcactgtgacttccaccaaggtgaccccaagccccagctgccgtctc

SEQ ID NO: 437049 - DNA, 122 bp, Homo sapiens
taaaacttcccaaatacgttgtcttgaagttgttaatttctcaatcaagacgcagggtggcgctgcaggctaagttgtgaataatgagccctaaaaagctcgcgcgtattcttctgtgtcgc

SEQ ID NO: 437050 - DNA, 122 bp, Homo sapiens
gaaagggcagacccccttcaattttctgtcttttctgtggtgtgaaaggccctggctccccgctggctctgagctctgactccaggcaggccggggagagaacagtggatgggccaagacag

SEQ ID NO: 437051 - DNA, 122 bp, Homo sapiens
tcttaaaacttcaattcttcctctgcaaaatagagatactaatacaagttccttgtgagtcgttgtggaaacaaatgaaataatgcatgtaaaggagctaacactgtatctagtacacacag

SEQ ID NO: 437052 - DNA, 122 bp, Homo sapiens
ccggtggcgcaaggctggtcgcacttggttccgttccagccgggctcgcacgtcaagcagcggccctcggccaccgtgcacggctgctggcccttgcactggccacacctgggggaggggtc

SEQ ID NO: 437053 - DNA, 122 bp, Homo sapiens
aatccatctgagatgcctagctcgtatttgcattctggaagcctccatcgcaggggagctcggcagggtatgtgagctttgttggaggtgcggtgtttcattctgcagctgttgtgaggaca

SEQ ID NO: 437054 - DNA, 122 bp, Homo sapiens
ctactccggaggctgagacaggagaatggcgtgaacccgggaggcggagcttgcagtgagcggagatcgcagagattgcagagattgcaccactgcactccatcctgggggacagagcgaga

SEQ ID NO: 437055 - DNA, 122 bp, Homo sapiens
tcttcctgaggggagtttgaggagaagccccaggtctaactctgtggcagacaggcccaccgccctgcatctcgggacacagcaggcagtgtttccactgtaaacgcggggagagggaccca

SEQ ID NO: 437056 - DNA, 122 bp, Homo sapiens
gaaggaggaggcagcggctgtggcagcccggcaggagacggactctatcccgctggtggacgacatccgcttccacgtggccagcacggtgcagacctacagcgccatagaggaggcgcagc

SEQ ID NO: 437057 - DNA, 122 bp, Homo sapiens
ttagccattgccttttcacatgcctttcttcccacagctggacttctttgtcatatgtaacgtatcatgcggtgcacattttctctcctgtcgcccatgattgagaacagatgttatatgcg

SEQ ID NO: 437058 - DNA, 122 bp, Homo sapiens
aatgtattgcaacagtgctaaacagaagttgccctcctctttggagaaaattgcagtatccgagagctctttttaacaagggactacttttaaatgtgtctgatcacctcaaaggataagta

SEQ ID NO: 437059 - DNA, 122 bp, Homo sapiens
cccctgggctcggcagaaccaacagccagccccaactccaccccaaagcctggatgtggccgtggctccagagtgggccgcccctttcaccatctgtgcatactgggtcggagctgaaatct

SEQ ID NO: 437060 - DNA, 122 bp, Homo sapiens
gtcaaatgaagatgcccgtatgcctggcttctgcatccctgattgtggccagttgcctcacgagagcatcaagaacaatgtggaaccaatctctactcagcatacttgctgtcaggataata

SEQ ID NO: 437061 - DNA, 122 bp, Homo sapiens
agtggatgtttgtggtttaacaagcactttcaataaatacttggcagacggatgctggggcgggttctcttagaagaaatgccccccccattcccccggccccactcagctggaattgtcta

SEQ ID NO: 437062 - DNA, 122 bp, Homo sapiens
gcctggccgcggctctttccgttccaggaggcagacagcggagtgctgaggccgtgtccccgtgtggtgaataaatgcccgggagggcgggctgccttcagggctcctctctccgctcatct

SEQ ID NO: 437063 - DNA, 122 bp, Homo sapiens
catctgcctcttgagtacagctgcgccccgctgtgcgcccggtgggaggctggcagccaccgcagcccctgtgctcgctccccgctctcggtccggtctgggtctctctcggcgcggtccgg

SEQ ID NO: 437064 - DNA, 122 bp, Homo sapiens
cggagccggaggcaccgcacagcggaaagagggctccgcggcggccaggctcagctttgccgggaaaatgctggatttaactcccagtctgcgccaatctggctaaaaagcccgttgtatct

SEQ ID NO: 437065 - DNA, 122 bp, Homo sapiens
agctcctaaagctttatgatccagctttccttacctgcaaggtgagattccaaaagctgacgtcccatacattgagaaaagttctccagtaacaaccaaaagaaagtttctgaactttgtga

SEQ ID NO: 437066 - DNA, 122 bp, Homo sapiens
aaaaacaaggtaggggcctgctcgtgtggaccgtggggagggggctgctaggcagaggggcggcctggccgtctccaccaccgtcatcttctgcatcatggcagctgccgttagtaagcacc

SEQ ID NO: 437067 - DNA, 122 bp, Homo sapiens
cgctgttcttgtgtggctaaggagcactccaaaggtagctagttcgagttgaatcgtgcacgtgctgtaagtgtgaaatacacctaggtaccaaagagtccgaagaatgttaactagctcat

SEQ ID NO: 437068 - DNA, 122 bp, Homo sapiens
ctggagacccctagggaaagaacaaagcgtcctgccacggtgcaccagaggaaggtgccacggactgtgggtgcacgcgtgggacctttacaccccaacctatttctcagagaaaacccttc

SEQ ID NO: 437069 - DNA, 122 bp, Homo sapiens
gcagcgttcgtcccttgatttagagggctatgatttctacaaagtggcccgactggcccgcgaacacgcagcagagacgcggcctccacaaggtcagaactaagatgtcctcagagatcccc

SEQ ID NO: 437070 - DNA, 122 bp, Homo sapiens
ggctgcgcccagcactcgtgggccggcatgggttctgggtgggcggaggcttcttggccccgcacagccggcgggggcctgcggggcttgatggggggggcgacgagctccctctgggctgc

SEQ ID NO: 437071 - DNA, 122 bp, Homo sapiens
ttccaactatttcaaaaggtaaaattcattcttagctcccaggttgtccaaaaacagacgcgcaggatggccaagcaccagagtttatcgtttgcccataataatcgggttgattcggccaa

SEQ ID NO: 437072 - DNA, 122 bp, Homo sapiens
taatcaaagcagaaatgctcagttctgagggcaggaagcttctatgacagccaaagggatcgcctgcataatcttcatccctggcagacagattttgagacctggacaggcataattaactc

SEQ ID NO: 437073 - DNA, 122 bp, Homo sapiens
cgtggaacacggggccatagtggacagcgtgaatgcccacatggagacccccctggccatcgccgcctactgggccctccgctttaaggagcaggagtacagcacggagcaccacctggtct

SEQ ID NO: 437074 - DNA, 122 bp, Homo sapiens
tgggaaaggtgtttgcatagattgctagctatttagtgtgcaggaaaacagagcccccagcgtgcatggctttgtgaggggtgaagctgcatggtgctccctcagccccaagagagcgcagt

SEQ ID NO: 437075 - DNA, 122 bp, Homo sapiens
tggtcactgagcctcaactccacacatcttggggatctgctgcccccagagccaggcatccgaaaccccacagtctgcctccaagtcaatgataccctggccttcctggtgactcatgagca

SEQ ID NO: 437076 - DNA, 122 bp, Homo sapiens
ctctgcggtggcccgagccccagcggcctcaggtgagcgggcagcatcccgattccctggcggcctagaatggaatcgcaaggtttagagaaattaagggacctgggacttgccaccctggg

SEQ ID NO: 437077 - DNA, 122 bp, Homo sapiens
agttattttctcctcttgtgattacagcacattgcaagacatttttttccttttaataaacgtcctagtactctgagtttccctttcaattcatttaatttcaacaatctgtcaaaaaacag

SEQ ID NO: 437078 - DNA, 122 bp, Homo sapiens
aaatggatcactgacgctttctctgtctttccggaaatgcaaaacaggtgaattttcaagcgcttgaattgtctctcacacttttcagtcaagagtggggctataaactccttcctcatagg

SEQ ID NO: 437079 - DNA, 122 bp, Homo sapiens
tgcttcctcttgtgcggaggcacgggctccttctgctggatcagacttcgcggcaacctccgggactctgacggtgaccaacttattagaaaagggtaaagaattccgggtgggagactaga

SEQ ID NO: 437080 - DNA, 122 bp, Homo sapiens
catccatcttatactgatttctttaatgcacacttacatcccacttgctacttgccaggtcgtgctctgtctcatatgcacaaactcatctgaaaaaataccaggcctgactcagcctttca

SEQ ID NO: 437081 - DNA, 122 bp, Homo sapiens
atatatgtaaatgcaaacacatatacacactttttgacaaaagaataatggtaacacacacgaaccatttttgtaaacagattctatttggttaatagaagtattccttccatcaacctatc

SEQ ID NO: 437082 - DNA, 122 bp, Homo sapiens
caccccgcccacaccggcgccccctccacggcactgatgggccccttgatgacacaaccgcgctacaattcgcttcctgggagagttagtgggatggatggcgtcattttcccacatgagat

SEQ ID NO: 437083 - DNA, 122 bp, Homo sapiens
ccgcaagctcccagggccacccaatcacagggccagtcatccgttgagaccctgcctccgcgcccggcagccactccgtatcttcctcgcattatcgcagggttgggccgaggcccgcgcat

SEQ ID NO: 437084 - DNA, 122 bp, Homo sapiens
ccaggaaatgagaaaagaggagtgtttgtgtcggtagttgtcaatcttagctgacctgaacgggctgggatgaggtcctggcatctgtgtttagtgttcacattgtttgtacggacctactg

SEQ ID NO: 437085 - DNA, 122 bp, Homo sapiens
gaccggcgcgggccgccccctgctggacgccgcgcgcgcgcaggcacaggtgcgccccggcgcccgcacctgccctgccgcgctccgcttccacccgcaccgggccccgcggagtccggcat

SEQ ID NO: 437086 - DNA, 122 bp, Homo sapiens
gttggtggtttccatggagactcttcaaggcaggatggatagagtttccccacagtgcatcgaaaatctctccccaagtcccacagtacacgttcagatatatgctgccgcagagaccaccg

SEQ ID NO: 437087 - DNA, 122 bp, Homo sapiens
ccggaactggctatgggcgggccccttgcagttgacgcgggggcggggagtcagcgagggcgagcctactggagtttgccgggggtgggaagaaggtgggcctcgagcaaagccgctagagg

SEQ ID NO: 437088 - DNA, 122 bp, Homo sapiens
cattgtccatgtcttctgagaggtgtgaggtgagactcacctgacagctgagagcctggccgggagatccacgctgcagaggccaatgctggacttcccctcccctcttcaaccaggtaacg

SEQ ID NO: 437089 - DNA, 122 bp, Homo sapiens
agggaccccaaatccactgctaggggagatgccacagtgccctgccatggcaccactgctcgtgccaagcctgccccatcgacaccggccccacccaaggcaaaaccaagcagacccaaacc

SEQ ID NO: 437090 - DNA, 122 bp, Homo sapiens
tctgcgctgctggctcccccctccctggcttggccgcagcccggcgggggggtgcgggggcgggcaggccgtggtgtaaccccgtgactctcgtgccagccatgtactcggttgagatcact

SEQ ID NO: 437091 - DNA, 122 bp, Homo sapiens
tacctgagtctttccaaacgacaagccaagaagacctgttgaaagtttcctcttaagtttcgtggagagagactcaggtatagaaatatccttactgccacctgacctgaagcagaagaaat

SEQ ID NO: 437092 - DNA, 122 bp, Homo sapiens
atatctgaaagtttttttaattttcaattttttttagagatggggtctcactatgttgcccgggctggagtgccacggccattcacaggagtgatcatagtgcactatagcgtcaaactcct

SEQ ID NO: 437093 - DNA, 122 bp, Homo sapiens
gatgtacaaaggacagaggcagtcttctgacggccaggaaatgttgacttcacctctgttcgcggcagtttgtgaaactacctccttcaggtgtcagtctccacccttattgacttcttggg

SEQ ID NO: 437094 - DNA, 122 bp, Homo sapiens
cttgctcggaatcctgacatattcttgaagaaggggaaaaagacaccggatttgtcttatcgtttggagctttaaatataaatgactggatgttttctcaacatccttgtaggatggaaggt

SEQ ID NO: 437095 - DNA, 122 bp, Homo sapiens
catgtgcctggaccagctgatgtcaggacagagccctgcccaggagctggatggggcccccgagccggcccagccaggcgctctgtacccagggctcccaaatcctgcccagcatcctctcc

SEQ ID NO: 437096 - DNA, 122 bp, Homo sapiens
tcctcccgctgctgctgggtctcggctgggttcttcctgattctgaggttcccgtgtactcgctgagagcccgggacctccagtgctgctacttgccactggcttcagctgccaggcctggc

SEQ ID NO: 437097 - DNA, 122 bp, Homo sapiens
gctcactctgcaggcccgcgaccagggctcgcctacgctcagcgccaacgtgagcctgcgcgtgttggtggacgaccgcaacgacaatgcaccgctggtgctgtacccagctctggggcccg

SEQ ID NO: 437098 - DNA, 122 bp, Homo sapiens
ttcaaatcaaagaactcgtctgcgggagtgtctggattttgtgagttttgtgcctgtggccgagtggaagcggagaggagtgagagcgctgggcgacgcggccagccaaggcgaggccggtc

SEQ ID NO: 437099 - DNA, 122 bp, Homo sapiens
ttaatccatcacaatgagacgttctattctgggcaggcggcgcgagcagatgctgggcgccggcggaggcagcgtgcagggctggcgctcacgcaggccgccagcaccctgcgctccacccc

SEQ ID NO: 437100 - DNA, 122 bp, Homo sapiens
ccatttcttcttaataatataactaattgaaaacatggctcggtcaggcgtggtggctcacgcctgtaatcccagcactttgagaggccgaggcgggcagatcacctgaggtcaggagttcg

SEQ ID NO: 437101 - DNA, 122 bp, Homo sapiens
tggcacacgtaggtgatcagaaaacagctgtcttcctccttctttcagcccacggagaggcgggctgtgaacgcgctttgccagggggggatggggaacctgctgcgcctctcctggcgcct

SEQ ID NO: 437102 - DNA, 122 bp, Homo sapiens
gaggcggcgcgcggcgttgcccactggcctcggcatgggcctgcccacgcacccgcccagcgcgcgccggaccctgtctaccgccgttgaagggcttcccagccctagcagtgcgtactggg

SEQ ID NO: 437103 - DNA, 122 bp, Homo sapiens
ggtcttcgttttggaatcccgggccgggtacttgctttggtcaagactgcctttggtgcccgctgctttcccatgttgaacactgacaaccgaagcgtggggcatatcaattatttaagcga

SEQ ID NO: 437104 - DNA, 122 bp, Homo sapiens
gggcaaaatgaatgagaaggaatgagctcggagagaaaagcaagcaagtggaccttgggccgggaagggccggaacacatgcatcaccggagatacagctagattgttatcattaccttgaa

SEQ ID NO: 437105 - DNA, 122 bp, Homo sapiens
gaacccccttttccttgagagacgagttgggggagtcctccacgcattacccactcgggccgcaaaaactcccttctttagccctctgcccccgcccttgcttataagcctttgagaccgca

SEQ ID NO: 437106 - DNA, 122 bp, Homo sapiens
gggagcccgggggcggaggggcgggggttccggggccgataaatcttcatcaggcggcggcgggggggccattaggcgctaatgggaagatggaggggcctgtcggccgcgcgggccgggcc

SEQ ID NO: 437107 - DNA, 122 bp, Homo sapiens
aatccacgtcttcccaacaatccaagtcttccggataatttgggtcttcctgaaaatctacgtcttccaaaaaagccatgtcttccagaaaatccacatcttccaatggcctccaggtcttc

SEQ ID NO: 437108 - DNA, 122 bp, Homo sapiens
gaaagctagcggcactgccagaggcgaccaccgcggcagctgccccagcgacggcggagacggcggcggctgctcctcaccggcccgttgttccacccgcccccatcttccagacccccgcc

SEQ ID NO: 437109 - DNA, 122 bp, Homo sapiens
gcggcctcctgccctgggcgcctcttctggggaagcagtgaagtcacactgggccggatccgctgactcatgagaatgagactcttccccggtccccggcacaccctttgaaacttcccctc

SEQ ID NO: 437110 - DNA, 122 bp, Homo sapiens
tacgtcattttcgttgactgccaggaagtgcatggtcacgcctgccacaggtcttcagagcgcctgtgggcctgcatgggtccctcagtgagtaagtcttttccatctcatctttcccgcct

SEQ ID NO: 437111 - DNA, 122 bp, Homo sapiens
aagccagacgaccaccttgtggagttaaactccgtaaccagggagcaccacttccgctgacgtcattacggcgacacgtggatccaagatggcgacggcgatggtgagtgaaggagactccg

SEQ ID NO: 437112 - DNA, 122 bp, Homo sapiens
tagccaccttttaaattgctctttgtattttgtccatttagtttttagatttctgattcacggtagttttcatatcatcaaatgcttgtttgaatgtatttaattctgtttagagtattggc

SEQ ID NO: 437113 - DNA, 122 bp, Homo sapiens
aaggagaacagcgcagcgctggctttggggtctggctccagctctgccatctcctagcagcgggtcgctcgacaaatggctctgacagctctaggcctgagtgcacacgtctaagggcaagg

SEQ ID NO: 437114 - DNA, 122 bp, Homo sapiens
gtgatgagcaaggccttatggaaaccttaggatttactgttttatttaaaaacacaaaatcggaaatacattctcttggccggtggctcatgccagaaatttgggaggccgaggtgggggga

SEQ ID NO: 437115 - DNA, 122 bp, Homo sapiens
attcagaaattgaaaggggcttcctccctccatcagtttcttcaatgtattcgttatccgcgggtctagacctcccagcccgtctagacctagcggagcgaactcctggaacctgagggatt

SEQ ID NO: 437116 - DNA, 122 bp, Homo sapiens
acctgttaatgaagtcaatgactcctaccttagaggaagctgtgagacaggcagggtgtgcgtgcaatgctttggaaacagcgaagcgtcacgcaatcttaattctctctttccacccgacc

SEQ ID NO: 437117 - DNA, 122 bp, Homo sapiens
aaggggcccctgcttacgattcttcagattcctgtttactcatcttagctaaatccagttcgtctaagtgttcagccccctcccatttttatttatttatttattttttttttgagacggag

SEQ ID NO: 437118 - DNA, 122 bp, Homo sapiens
ccgcccgccccgcggccctgctccgccagggctcggtcctgcgccacaccccagccgccacgctgcctccgcctccggtgagctgacttgtctgccaagagaacacttatatactgttggtg

SEQ ID NO: 437119 - DNA, 122 bp, Homo sapiens
attcatatgaaaaaagaacggggccaaaagtccaaggccagtcagcgtgagaagaccgctcggcctccctcggagtcggggagttggaaccgcagactgagatcatgtggctgctggaggcc

SEQ ID NO: 437120 - DNA, 122 bp, Homo sapiens
cgcccccgccgcgccgctcgggctccagcgccgctgccacctgactccccctgtctcccgcggaagcgcgcctctctcctgacccacacccaacacggggagaaatgctgctgctctcgctc

SEQ ID NO: 437121 - DNA, 122 bp, Homo sapiens
cctccttttcgatctcgtgcaacacaaaacctgccccgagctgtgcgggggcctggcaagcgcagctgcggccccgggaagcccaatcccgcgggactgcggagcccacgcgctcctcaggc

SEQ ID NO: 437122 - DNA, 122 bp, Homo sapiens
tcccctgggagccgcaggcaaaacgcggcaagtggattcagagtttgcgggcccgggtgccggccgagcatgcgcagtggcgcgagcgcagcggctacgcgggcgcggagaggtagccgcag

SEQ ID NO: 437123 - DNA, 122 bp, Homo sapiens
gaacctcttcggctgtttccagacaccggagcacgtgtgcttcgtgatggagtactcggccggtggggacctgatgctgcacatccacagcgacgtgttctctgagccccgtgccatgtgag

SEQ ID NO: 437124 - DNA, 122 bp, Homo sapiens
ggatttacctatctgggacatttcatataaatggaatcacaccatttataagtgacctttcgtgtaactttttttttaacttaatgttttcaaggcatatccccattatagaatttattagt

SEQ ID NO: 437125 - DNA, 122 bp, Homo sapiens
cttttaacatcccaagacgctattgtttgcctcagtgggttcgttgcttctcttcgtccccgacaatctgttcctgtcttcacatatatatagatcccccctccctcaactgtaagccttct

SEQ ID NO: 437126 - DNA, 122 bp, Homo sapiens
cattgtcttcgggctacccctcaagctcctgttaatatcagtcacactgacattctcttccggctacccctcaagctcctgttaatatcagtttacactgacattgtcttcgttctgcccct

SEQ ID NO: 437127 - DNA, 122 bp, Homo sapiens
cccccgcggctcccacccagacgcctgccgcctccagccctccgggttcctcccccacgtcgccgcagcccgccccacccccacacccgcgtggcgttctctgccccgtctctgtctctctg

SEQ ID NO: 437128 - DNA, 122 bp, Homo sapiens
gttttgttggattgggaagtcggatggttcatgcctagggcctcaagaggaagggagctgcgtccctcagaatgacgttcagtgaaagctttctctagaagcacttggtagtctgatgagtg

SEQ ID NO: 437129 - DNA, 122 bp, Homo sapiens
cacactggtatctcgtgacatgatgatccccgagatgtctgagatctgtgcatccttgaccgatcccaaatttctgtatcacccatgacccctaaagactttttagagaattatattttgac

SEQ ID NO: 437130 - DNA, 122 bp, Homo sapiens
agactttgtaaggctcggcgcattgcagcaggcgtagtgcgtcctcgtacttgaagttctcgaagaacactcgggcactcagcagctggtcccctgcgggcgaggtggaggtgcgcagcacg

SEQ ID NO: 437131 - DNA, 122 bp, Homo sapiens
atggtccctggttgaactcctctccaaccatagtctccaatgcccagctgttttttttctcgatgttcagatgcttcttgtcttctctccttctctgccgcaccactctgctgctgtgccat

SEQ ID NO: 437132 - DNA, 122 bp, Homo sapiens
ggcctgagcatccgcgtcgtcgctttcgactcacggtccccgctcactggatgtagataccgtggaggccagaagagacgaataattcaaaaacctgaagtctctcctgcttgtgtttttct

SEQ ID NO: 437133 - DNA, 122 bp, Homo sapiens
cccttgtcttaaaggttaagtgccctgacctgaagacagtgtgagcacaggtggaggtggcgacaggaacatacaacctctgccacaaggccagggcctgcagtgggaaaattctatgtagc

SEQ ID NO: 437134 - DNA, 122 bp, Homo sapiens
ccacgccggggaagcagaagccgggcgcgcagtggagcaggggccgcacgctgggtaggccggtgcgtactgactgctgcatccctgcgggggggaggggggagaagcggcggggctgatcg

SEQ ID NO: 437135 - DNA, 122 bp, Homo sapiens
tccgacggcccgacgccgggcgggggcggggctgggcgggggggcaggcgccccggtctacgccgtttcccattggtcgctgcctcctcgcgtcatccctccgcgccggccgacgcgccagc

SEQ ID NO: 437136 - DNA, 122 bp, Homo sapiens
tattcgtccctacccggcccccgccccccgcccccccgactgcccctgccgtcgcctccccgtgggcaagtggtgggggcctgggcttacaaccacacgttctcctccaactagcatccctt

SEQ ID NO: 437137 - DNA, 122 bp, Homo sapiens
ggaagccggaaaagtgagtaccggctagtatcgcgagatcaggaaggtggccgagtgtgtcgccgcggccatcagggtaagggtacctggacttgcggctttttaggtcggcctggctccgc

SEQ ID NO: 437138 - DNA, 122 bp, Homo sapiens
tcaccacatatgccatgggcgtcaacatctacaaggaagggcaggatgtacccctgaaaccggatgctgagtaccctgaatggtgagtaggccaggctgtgtcatcctgcaatgactattcc

SEQ ID NO: 437139 - DNA, 122 bp, Homo sapiens
ctgcagattgcagaaggcatggcattcattgaagagcggaattatattcatcgtgaccttcgggctgccaacattctggtgtctgacaccctgagctgcaagattgcagactttggcctagc

SEQ ID NO: 437140 - DNA, 122 bp, Homo sapiens
gtatatttggcactagggggcgatatagcattgctttcagcccttcactgtcagcgcacacgcaaaataaatgaattcccgctaaggaaaatcattcccaacttttcttctgcatctcaagt

SEQ ID NO: 437141 - DNA, 122 bp, Homo sapiens
aacgggtagggccgtgaacagatgtcatcccaggcgaggtttccaggatgtgcgggcgtgcgtgtcatgcgtgtaaggacaccctgcacaccgggtaagccccgctgtgttctcatacccga

SEQ ID NO: 437142 - DNA, 122 bp, Homo sapiens
aggagtgggccctctggggatgctggggtttgacagtgtctccttggacttccaaagagacgtggatagatggtgggcagagagtttccaggtctagtacccagatgctaagcccctgcatc

SEQ ID NO: 437143 - DNA, 122 bp, Homo sapiens
ctggacagttccgtgctcttaatccttcctcgcctacggtctctgattattgatgcttgccgtgtgtcctaaaagggaccgcttccggtttatttgcttatgtatttattatctttatcaac

SEQ ID NO: 437144 - DNA, 122 bp, Homo sapiens
ccatccgatcacctgcaaagcgttgccttcgcatcctggccctcctccttcccgactccacggagacggtgtccttccaggtcgccaaacatcttttccaaaaagtgcatcctttttctgat

SEQ ID NO: 437145 - DNA, 122 bp, Homo sapiens
gcacccaggccagcggctgcggagggtgtactgggtcccccagcagtgccagcccaccagcgctgagctcgatttctcaccaggccttagctgcctttccgcggggcagggctcgagacctg

SEQ ID NO: 437146 - DNA, 122 bp, Homo sapiens
ctgaggacttggcagccattggctgatttgaaagaatacacagggtgtgccagctggtgtcgcttcctcttcaacatgtactgatgctgcagctgagctgctgcccagcccctggggagaag

SEQ ID NO: 437147 - DNA, 122 bp, Homo sapiens
tgttcactttaaaatggttctgtgaatttcaaatttaagaaaagtcttaaacgccatccacggggtaaaccggagtaacgacaatttggaatggagactacaaaacagcctgggtggcagag

SEQ ID NO: 437148 - DNA, 122 bp, Homo sapiens
gaggcgggcggatcacgaggtcaggagacctataccatcctggccaacatggtgaaacctcgtctctactaaaatactaaaaaaaaaaaaaaaaaaaaaaaaaaattgccgggcgtggtggt

SEQ ID NO: 437149 - DNA, 122 bp, Homo sapiens
tgccttcttccccgtctgctctcccaggagcgaccaccctgcggccccttcgcctgcacgcgacagccttcaaggtccccgcgctccgctgccctggagcttcacgcaccaggcggcgcggc

SEQ ID NO: 437150 - DNA, 122 bp, Homo sapiens
cttccccctttattcctccattcaggaaaacggcagtcactcgaatgcggaccccacccacgggatggctgccggtcacaccattcatcaagtttccccacaagttccacacgcaattctgt

SEQ ID NO: 437151 - DNA, 122 bp, Homo sapiens
agggtctcagaagagggaaatcggcacagattccgcttctcgccgttgcggggttccctgcgggcggcactgcgagttcctcacccgggcacgtcctcactccccgtgcccgggatgaggga

SEQ ID NO: 437152 - DNA, 122 bp, Homo sapiens
gcaccacgtccctaagagttcaggacctggggaggggtctgtccacacactcgggcgctccgcttctagaggggggaaatggctccggctaactctgaatttaaattaaaaaaaaaaaaaaa

SEQ ID NO: 437153 - DNA, 122 bp, Homo sapiens
agaggaaccacaagcaaacaccctctaggaggctctgagaaacagcagggcacgtgggtgcggcctgggaacagatcaggattgacctgcgtgcgagccagcttgtcacagtgatgtgacga

SEQ ID NO: 437154 - DNA, 122 bp, Homo sapiens
tcccggacaagtgagcgtttaactggcccagcagggcgactggcggtgtagtgcagtgtccgggcgtgaagcactggatcgctttagacgcttcatttcaacaaatgatcattttctctcag

SEQ ID NO: 437155 - DNA, 122 bp, Homo sapiens
gacccaataagggtggaaggctgagtcccgcagagccaataacgagagtccgagaggcgacggaggcggactctgtgaggaaacaagaagagaggcccaagatggagacggcggcggctgta

SEQ ID NO: 437156 - DNA, 122 bp, Homo sapiens
ggactgggggaagagggtctcagtgcagacagagttctggaaaagactgttgatatcacccgagccgcagggcaagctgggaaaggtagctcggcacagtccggctgctggactacaaatcc

SEQ ID NO: 437157 - DNA, 122 bp, Homo sapiens
aggctgaggcaggaggatcgcttgatcatagctcactttgaggctacagtgagctgtgatcgcgccattgcactccaacctggatgacagagcgagaccctgcctaaaaaaataaaaaaaaa

SEQ ID NO: 437158 - DNA, 122 bp, Homo sapiens
taaggggtggctgagcgacccatattcaaataggtttggaaatgccaagtaaatacatttcggcattcatttcctgcaggaccgaatagatgaatcatgaatgccacaactctaaaaagggg

SEQ ID NO: 437159 - DNA, 122 bp, Homo sapiens
ggccaggctggggtcttggtggagggcaagcaggaaccagggacagacgatggagctctgcgtgtcctccctcatggagatgcccccagctgggtgaaatgaccctggtcggtgctatgccc

SEQ ID NO: 437160 - DNA, 122 bp, Homo sapiens
tgccccgccgcccggaaccacagtggtctcgcttcccacccaagacccaacctgccctcccgtcctgggccgccagcccagaacccgcaaaccgggagaccctaggaccccgcgtgcctgca

SEQ ID NO: 437161 - DNA, 122 bp, Homo sapiens
gtggggagaaggccctgaagaggctgaagctagcggtggaggagttcgtgcacgcgacttcggaaggcgaggctcccgggggttgcgaggggcgcggcgccccggtgagctttcgcccggga

SEQ ID NO: 437162 - DNA, 122 bp, Homo sapiens
gtagatggtttggaaatgtttctggcgtgtgaaagtgaatattttcctagattggtataccgagcatgtcctcactgcaatgtggctgcctcccgttgtcggtgatgattacacatcttccg

SEQ ID NO: 437163 - DNA, 122 bp, Homo sapiens
tatgcaacaattattaactatattcatcatgctgcaggtagagctccagaacttattcatcgtaagtgaaactattttgattatatttcccttagtgtattgtgaactcttctttgttcttt

SEQ ID NO: 437164 - DNA, 122 bp, Homo sapiens
gcggcgcccggggggcagcacgtgcagctcctccaggtagcagccgtggaggctgcggctcgccgtggacagcgccttcaggatggtgcccgactctggaggagagggggagccagaccaag

SEQ ID NO: 437165 - DNA, 122 bp, Homo sapiens
gtgtggcagacgttctgttggctttcaaaatctcaaccactcagcatttcccaggttccacgctgccactttgtagggctttcagcaagactgtggaagactgagtggtagaataatgaggt

SEQ ID NO: 437166 - DNA, 122 bp, Homo sapiens
cagaggggagtccaaaagcttcagtgcaggaggaaggcagtgagtgttagccctgacctgcgctgagccctgagaagaaagcttccttcgcccgcgtcctcccgctggctgagtcagccagg

SEQ ID NO: 437167 - DNA, 122 bp, Homo sapiens
cccgggccggcatggccccttgctcactgcatagtgggtgaccatccggggcatgacagccgagtatgagctgaaactctgactgccacacctggagcctggctggaaagagtggtacgaca

SEQ ID NO: 437168 - DNA, 122 bp, Homo sapiens
agtatatagctcatgtcccagaaccagccacgtctcctcgtcgtcgtttcaccgcaacctcgccagcaatgagtattttcatttaaaaatgtttttgtctgctggctatgtgattgcagagg

SEQ ID NO: 437169 - DNA, 122 bp, Homo sapiens
catttaaactgtgagttggaaacctggattctagctttcaatctaatgatgacaggcaatcggggataaaatttcaattcatccctctagtccagctgtaaactacactaaaaaatgcttga

SEQ ID NO: 437170 - DNA, 122 bp, Homo sapiens
cctctgccatgaaggcctgtttctttgagctgggtgttgagagctgctcagacatgcagccgtcatcaacagcgtcctgtaaacctggagcgtcagcccagcacgggaaaagaagcagcagc

SEQ ID NO: 437171 - DNA, 122 bp, Homo sapiens
gagacggggtttcaccgtgttagccaggatgatttcgatttcctgacgtcgtgatccgaccgccttggcctcccgaaatctgatttttaataagcagaccatggcattccaagccacacttt

SEQ ID NO: 437172 - DNA, 122 bp, Homo sapiens
caccaggcctgtatctgctccctgtgacttctatgggttagctggaatgtcctgtatctccgcatggtctggcgttcaaacctgcctaggacaggtagtgtggggacctacctttttggtcg

SEQ ID NO: 437173 - DNA, 122 bp, Homo sapiens
ttcttgggttgcgggctcttctgaatttcccaaattctggacgtgaacgcgggcctctttcgtcaccagaggaaagtgtaaaacaaaagaaaagaaaagtagccctccggttcctttcccgc

SEQ ID NO: 437174 - DNA, 122 bp, Homo sapiens
aggagcaaaaagcacagaatcaaatgacgacacgttccacagggccaggtgggctttctgcggagggcgtggcggtggtggcagcggttctgggagagggaaaccccagcgccacttgtcta

SEQ ID NO: 437175 - DNA, 122 bp, Homo sapiens
atgcgatcctaaaggcttgggacttctggggaagtggcggcttttagcccctgcgggagccgagccgggccgggggaggagggatggtgctgtttctgggatgagtgcgagttgggggccga

SEQ ID NO: 437176 - DNA, 122 bp, Homo sapiens
gctaatcaaattcaacccatttttcatgtaccaggcaaagtcccactcttctaggagggtcgcctgggcacccatgagcttcttgagggcccagcctctgtttcagccatctttgtggccca

SEQ ID NO: 437177 - DNA, 122 bp, Homo sapiens
gtggctcggctgcaatacgggtttcttattaaaataaaatctctgactaaatctacctttcggatgtaggtactgtgagcagccacctgctgggagcacctgccatgggaaattactttcac

SEQ ID NO: 437178 - DNA, 122 bp, Homo sapiens
aatatccaataaccagagtgcagaaagcagctcgcccttagagaagctgtggctagaatccgtcagtctggctctgcggggcctgatacccagggcttcagctgtcactcagatgtgggggg

SEQ ID NO: 437179 - DNA, 122 bp, Homo sapiens
gtgcggccaggtccttgttctaatctgtccggtgcccactaattacagtccctcggtcagcgcctggcacataaagaggcttggctcaccgctgctgctgaatgaggaaagtgcttctcctg

SEQ ID NO: 437180 - DNA, 122 bp, Homo sapiens
aactctctcacatgccttttgaatgagtgaatgaactaatggacaaacgaatggtgctttcgtaaagcatacttttgtgcttatggctccatagagattaacggcccaggctttagaatcag

SEQ ID NO: 437181 - DNA, 122 bp, Homo sapiens
ctggggaaagggcagttccaacaacctttcatccagaagcctgcacagccaatgcgaatgcgccccgccaggacttcttccccgaaaatctgccttccagactcttttctgaggcaggaaag

SEQ ID NO: 437182 - DNA, 122 bp, Homo sapiens
aagaacttggcactcgtctcagtaatctgagatagcagggtttggcgtccatagcaaccacggcgacaggacgcgctcgagcaagaaccaaaaagcgagaacaggtacaaggccaaactttc

SEQ ID NO: 437183 - DNA, 122 bp, Homo sapiens
cagatcaaactcctaacccagcatgaaagataaactacaactcccggcaggccttgcttccgaactgcgtcttataacctcggctcaggcccaggcccagaccgctccccgcccccgccacc

SEQ ID NO: 437184 - DNA, 122 bp, Homo sapiens
ccaactaggggtggccgtcatgctggggctaaaccacacctccatgtctgaattcatcctcgtcggcttctctgccttcccccacctccaactgatgctcttcctgctgttcctgctgatgt

SEQ ID NO: 437185 - DNA, 122 bp, Homo sapiens
ggggtggggggtggggctcctacagggacaagcacaatccactctgccctccttgggatgcgggaacttcgtccgcctcagcctctccctgcctgtctcaggacttaagtcgcatggacccc

SEQ ID NO: 437186 - DNA, 122 bp, Homo sapiens
tggagaaactgcaagagtcgcctgacctggtctgcagcctgagaccaaacaacgcgagggcggccttacctcgcgaatcctcgggaccccacaacgcacccaaagccggcagggagggtggt

SEQ ID NO: 437187 - DNA, 122 bp, Homo sapiens
tcttttctcaggtggcacccccccccctacaagccggccgaccttccggggagcctggagcgagaccggctctcgcctggtggggttaatatatctcgctggggcatccaaaatgttctacc

SEQ ID NO: 437188 - DNA, 122 bp, Homo sapiens
gaaactaacaaacacctaatagggtgaactttgaccactgacagaaatgagacaaacacccgtaggcagatcaattcctttcctcaaccatttcaagatggtgtgattctatacaactcttc

SEQ ID NO: 437189 - DNA, 122 bp, Homo sapiens
gctgcgatagaattgagtgcagaagactgagcttcgtgtaaacacaaggtcaccagggatcgtaatttcaaactctcccctccccctcgctccctccagccaccaaagtatctgaacccaga

SEQ ID NO: 437190 - DNA, 122 bp, Homo sapiens
gcctcgcgcggacgcccgggcggggctgtgcgaggggtggggctgcgggaggccctggagcgcggcggtgatggcggggccggtgaaggaccgcgaggccttccagaggctcaacttcctgt

SEQ ID NO: 437191 - DNA, 122 bp, Homo sapiens
actgggaaagccaaaagacccaaagatcacaacctcaggggcatcctcaaagaccaagaccgctcataagctacacagagaactgttcccctcccagccaccgcctctgaattgcagcccac

SEQ ID NO: 437192 - DNA, 122 bp, Homo sapiens
acccgaaccaagtaggaaaccccgggtcccatgactttgtcgttgggatgcagccagccccgcgtgggcttattgacaaagctcccgtggcgggtccactcctcgcccccaagctggccccc

SEQ ID NO: 437193 - DNA, 122 bp, Homo sapiens
ggcaaagctgtggctgcacacttaaataaaataaagcaagttttcactggtgatggggcccggtggacacagagggccaggctgcaaccacagtgagacccgggccacgggaacgccacagc

SEQ ID NO: 437194 - DNA, 122 bp, Homo sapiens
tcaccgaacgaggcgggagcctgcttccaggtcctgtcccagggacgccacagccctcctcgtgtctagagtctaagtccctgtcggagtcgtgggcccggacctcccaccagcggctcccc

SEQ ID NO: 437195 - DNA, 122 bp, Homo sapiens
agaccctggacccctcaatgacaaggaacacagtcccccgaaatcctggaaaagccatcccgttactggacagagaaattaacatctgtctctgctgcgtcctctcgggtgtctgtgacggt

SEQ ID NO: 437196 - DNA, 122 bp, Homo sapiens
gctgagttggcctcttctaatacgagaccgagaccgggaagtgctggcagctgcccggagcgggtgcggcagcccccagcataaaatattcatggagacgcaactccaagcagagaggctgc

SEQ ID NO: 437197 - DNA, 122 bp, Homo sapiens
gcaggtatgaaactccaacccatgagagctcctatgtgggctgaacccagcaaagctatacgggtgaggctgcctgagactttgagggcccaacctcaactccagtgtgttcagcacaagaa

SEQ ID NO: 437198 - DNA, 122 bp, Homo sapiens
tgcgcccgccagcctcgcccgcgccgtcaccatgagccaggcctactcgtccagccagcgcgtgtcctcctaccgccgcaccttcggcggggccccgggcttcccactcggctccccgctga

SEQ ID NO: 437199 - DNA, 122 bp, Homo sapiens
ccctaagactaattatgttgaacatcttttcatatgcttatttgccatctgtatcttcaccgcagtgaaatgtttcctgacgtaatcttcttcattttctaataatgctggttttttactgt

SEQ ID NO: 437200 - DNA, 122 bp, Homo sapiens
ccgccgagaaactgtgagcaagagcgtctgtgctgaaccatggcgccaccagagggcgcgcgatcccgccccaaccaacttcccgctgaggtgccagaagcagcgaggagcttcagcttcct

SEQ ID NO: 437201 - DNA, 122 bp, Homo sapiens
cctccgttcctctcgcgtccagttgcacactagctcgcttttattctgcctcttaaatgtcgctggaatctgtccccttgtctgtttcccctctgctccttccctggctgtgccaccatcac

SEQ ID NO: 437202 - DNA, 122 bp, Homo sapiens
ctcgctcgccgccaggctgtgcacacctagatcccattgtgagccccccgccaggctgtgcggtgctcagggacagaggctgtacctcatttgtctggactccccagggccagtcacggtac

SEQ ID NO: 437203 - DNA, 122 bp, Homo sapiens
caagcccttaaaaatatagacggctaatgtcttcagtatgtatgaaatatcccatatgctcggaaacaaaaggggctctgttattaaagtttcatttccacacgccccctcccctccctccc

SEQ ID NO: 437204 - DNA, 122 bp, Homo sapiens
gcccagtggcttgttccaaaaagttgtctttaagtcccaatgttgtaaatcaaggcccatcgttctgcttatctctattgtaattccagggacttcacgtggctttctcgctctttgtttct

SEQ ID NO: 437205 - DNA, 122 bp, Homo sapiens
tgtccccacctggtggcacggggccgcccttccttagcaaagtgattctctgacggccgtcgcagggaagaggcagcattgagcacccgctgttaagatgctcccttacggaagcgacttgt

SEQ ID NO: 437206 - DNA, 122 bp, Homo sapiens
ggggtgggccgggggcggggccgcgggcgtcggggaggtggcagtgggcgcagggcggggcgagctcagcggagggcgggtttgaatgtgccccggcgggagagggaagctgcagcgagagc

SEQ ID NO: 437207 - DNA, 122 bp, Homo sapiens
tgagcaatatgcaccagaaggatattctagaagagcagccgtacatagcttcaggagtttcgggagttagcaacaagtgaagtcaaaaccaggcaggcaggtgttttatattacagaactga

SEQ ID NO: 437208 - DNA, 122 bp, Homo sapiens
gcccgccctcgtctggcgcagagacctggctggaaagacacagcgtggcttcgattccggcgcctgcgtgtcaccagcccagggtggccgtggaagctggacccgagccgcaggccccccag

SEQ ID NO: 437209 - DNA, 122 bp, Homo sapiens
atcgcgggtcgctgcccggagctgtgcgagttcggtgctcagccccaacggcgctttaggcgggtcccctaggttctcgcccttgcgcgcgcagccaggacagtgtttctgcgcttcctgag

SEQ ID NO: 437210 - DNA, 122 bp, Homo sapiens
ttgtgtttccctttagtcaacacagagataatcactacttcacagggttattagggtgagcgtacttaaaacaagaaatgcgtaataaaagctttttcaactttaaggctgctctgatgtgt

SEQ ID NO: 437211 - DNA, 122 bp, Homo sapiens
gcatccgggtgctgcctcccgatgtttgcatctctcagaattcacaagtggaaatgccaacgcgagtgatgggatgggcaggtggggcttcgggaaggggtggagtcccgagggtgggtggg

SEQ ID NO: 437212 - DNA, 122 bp, Homo sapiens
gtagcattccaggttgagagaacagcatgtgcaaagaccctggagaaaaggggagactggcgagtatcgggaatgaaaaaggtccaatttaccccaagggatagaatgaggggacaagtggt

SEQ ID NO: 437213 - DNA, 122 bp, Homo sapiens
gctagaaatttaggattccattatctcatttctagtcctgatacaggatgctacttgggacgcaggggaggactgtttctagacctcaggcctgtgaatgcaggctccccgagtggacagaa

SEQ ID NO: 437214 - DNA, 122 bp, Homo sapiens
aaaatggactctcaagtctgaatgcttatctgctgttctcaatcacttaatgctccaaagcgtatgctgtgaatgtcaattctttagttggctgtcaaggtacttcccactaggcatttagc

SEQ ID NO: 437215 - DNA, 122 bp, Homo sapiens
cttaggaagtgagaagtcagattaccctagtcctctagggtgcttaaagctaactagtcccgtgaatgagaatctaacctatgtgaaaatctccagcctgtacctgtacagcatcagccctg

SEQ ID NO: 437216 - DNA, 122 bp, Homo sapiens
ctctccacgtagggtagtagatcgcatagcccagccggatcgcccagcaggagtgcagggcgcgcgtcggggtgtctccggcttgtgggtgtgcggttcgaaaccttagctggggtggggga

SEQ ID NO: 437217 - DNA, 122 bp, Homo sapiens
cctgagcaggtggaaatctaccccaaggcgggcaggcagggagaaaagccggccagcgggcgggcgggcagctcacctctggatagcaatccttcgctaacacttgcaacatcgcggtcttc

SEQ ID NO: 437218 - DNA, 122 bp, Homo sapiens
gtaccaccaggctatgtgggcctcaggctgaggagcagcaacccatctcaaggagcccgtcgcaagaggctcatttatgacttagtgaggaagctgggctccaaggagcagcctctcctggc

SEQ ID NO: 437219 - DNA, 122 bp, Homo sapiens
gacgcggcgccagagcccagctccggctagttttcccgggggcaggtgtagccttgggcgcggggccgggggaggggcaaggggcgggcgtggggttggactgggacgtgggactcggacca

SEQ ID NO: 437220 - DNA, 122 bp, Homo sapiens
cggaaaggtactgagtgctgagcccggcacaccaccacccaattccgcggcgtccacgtgcggcacggcaatacccagttccgcagcgtccacgtgcagaaaggtgctgagtgctgagcccg

SEQ ID NO: 437221 - DNA, 122 bp, Homo sapiens
gtgtagccactcatcccagacatgtagcacagtcagaccttgtgtgtacacccatagtcacgtgcatatgcccagagacaggtttgcacagacacaccccgtgagtcacacacagtccctcc

SEQ ID NO: 437222 - DNA, 122 bp, Homo sapiens
agatcctggacctagagaacaagtcccccgaacgctgagttggaggcgggacttcgggtgcgcgttggtgcgtcaacgtggtgggggggtgtgtttgtagggagagggctggagtaagttaa

SEQ ID NO: 437223 - DNA, 122 bp, Homo sapiens
agagacggaggagccggggtccagtgcaggtgagcggggttgggagacaggagagctccccgaggaggactcaactgtggggacaggttgagcaagaccatctgcgtttgggaaatccagcc

SEQ ID NO: 437224 - DNA, 122 bp, Homo sapiens
tcccttcttttagatgggactcgagcactgatcatttcagccctgtatctctcaggtcagcgtggttcagtttgctgtgcagagtccaggggagataaccacgctgtgcacacatgagattg

SEQ ID NO: 437225 - DNA, 122 bp, Homo sapiens
tgtctttggccagtcctcatggcctgagggtctttgccaactggatggtcagagaggcttcgggttaaggtgttctggggaaaaagtagatctttcttttagcagtcaaatcctcggcgagt

SEQ ID NO: 437226 - DNA, 122 bp, Homo sapiens
ataaagtggaaaatattggaggatgtgctcattcccttgaggggcatgattctggagttgcgtgcataacttctactcttcaaccattgcggagaacttaatcacatggtcgcacctggtca

SEQ ID NO: 437227 - DNA, 122 bp, Homo sapiens
ccaacttcagccagaaggaaaaaagttttccatttttattacattctttaggaaagttaacgttaaagggatgttcgtcactgaatactgttctttcctagcacagtcatgcactgttttac

SEQ ID NO: 437228 - DNA, 122 bp, Homo sapiens
gccgcacccggcgagacaggaagcgtgatttgctggtgtgatcagtcagttgcacctccccgccctgcaggactcagtgtgtccggcagacagtcctacctggttggctgctttaggtgggt

SEQ ID NO: 437229 - DNA, 122 bp, Homo sapiens
cacagaccacaggggcctcgcccagtgccaggcacagagcggagaaatggcaggtgggcacggctggtcaaccgcagcgaatacctgtgacaaggcctcatctttttttttctttttaaaga

SEQ ID NO: 437230 - DNA, 122 bp, Homo sapiens
ttagccagaaaaggggaaataagtctccctcgccggccaaatcatggcctttgtcgctttcggctccccattggctgcggccgctgtggccccgcctccttgagtggtgcggagctttgtga

SEQ ID NO: 437231 - DNA, 122 bp, Homo sapiens
tccagtcccctccccagctgctccagggtgctcgcagcacccagtcccggccatgggccccgtcaatgcagagccaccgccccaggggccctggtggacttgattagaaacaataagtgcca

SEQ ID NO: 437232 - DNA, 122 bp, Homo sapiens
gcggggactgagttgcagcccctcttccccgcctggctcttaggatcaccatcgcagaggcgagaggaaccccccgcgaggcagggagtaagagccagcccctcatcccccctggctcatag

SEQ ID NO: 437233 - DNA, 122 bp, Homo sapiens
catgacacctggcttggagcactcgctgctcgtttcaaaataacttttcatgagtgaacacgggatgctttgtgagatgtaggaggtgcagcagtcagcagcaaagtgaaagcctgcagcaa

SEQ ID NO: 437234 - DNA, 122 bp, Homo sapiens
tcggggcggggaggggcagggtgtcatgtgcggcgctggccacacggtggcgacagagaacgtgccgttctggtccagcctggcggctgtggggtcgaaatggggaaggagttggggtcgcg

SEQ ID NO: 437235 - DNA, 122 bp, Homo sapiens
agccaccccgaagtccatctcctcccagaggccagggtggtgggggtttgcagagaggcccggttcaggggtcagctctgcggggtaggcgcgggggcagggtgggctggtccacccttctc

SEQ ID NO: 437236 - DNA, 122 bp, Homo sapiens
tggaacccaggcttagagatgagccttcctgacattgtttgagcatctgggatccagctacgttcagatggctgggcttttccatgtactgagccaatgaatttcctttctctctttttaaa

SEQ ID NO: 437237 - DNA, 122 bp, Homo sapiens
agattagggagctgccttactcctccttttgtcagcatgctggctggcgtgctaggctcccgtggggagggtatcccggcatggcttactaggtggttaacgccagggcagttgggaggtaa

SEQ ID NO: 437238 - DNA, 122 bp, Homo sapiens
ctgaatggtttgcaaggcggatatccacgccaaggcctttggatcggccgtgggtacatccgtctgagccgttcctttccatcgcagagcggcggcctccggcggcgctctccagtcatgga

SEQ ID NO: 437239 - DNA, 122 bp, Homo sapiens
gcccggcagcgcggggccacctcaccgcgagctcctcccgcagcccggcccgggtcacctcgactcgccaggcttaactcaataaccacaacaccggaaaaggaagcaaaggtcgaagttca

SEQ ID NO: 437240 - DNA, 122 bp, Homo sapiens
ttgatgttcttcctgtatttctgagaggtgacagcttgctggcatccctcgctggctctccgcgcctcctcggcctcagcccactctggccgcgcttgaggagcccttcagcccgcagctgc

SEQ ID NO: 437241 - DNA, 122 bp, Homo sapiens
caatcgcctacggctcagtttcagtcagtggggccgggaattgcaagacgattcctgcgacgcggcgccggaatttgcagctctaatcagggcctgagcatcgtcgcctcccgccttctctg

SEQ ID NO: 437242 - DNA, 122 bp, Homo sapiens
ctgtcttttcttcactcaggatatcttggaaactgtttcatattagtatatttagagcagcgtcattctttttaatggctacatagcagtttagcgtgtaggtggatcataatttatgtagt

SEQ ID NO: 437243 - DNA, 122 bp, Homo sapiens
acactcaaccatgctgcaacacagacatgacagccggtaagttctgccaagccctgaatacgctttacactttctttttttgtgtgtgggggggacggagtttagctcttgttgcccaggct

SEQ ID NO: 437244 - DNA, 122 bp, Homo sapiens
gaaatctaggtggaagcctcattcatgcttacattctgagcatctgaagacttaacatcacgtgacaactgccaaggcatggcttgcaccctctagagctgcagcccaagctgtaccttggc

SEQ ID NO: 437245 - DNA, 122 bp, Homo sapiens
gccgagttgctgtcctcatggaactctcatcctagtggggcagagacaaggacggtgtaacgtgcccgggggtcagcaccacagacaaaacgcagggagcacggcacagtgtgggccaggga

SEQ ID NO: 437246 - DNA, 122 bp, Homo sapiens
ctctgccccgcgagggacaccattccccgtcgttgacgtgcattcctcttgttcatcgtgcgagactccccacccctgtgccaccggtctcggtgtctcccacactggagtgtccgtatttc

SEQ ID NO: 437247 - DNA, 122 bp, Homo sapiens
ggagagttcttggaactgagggttcctctcctttttagaccatagaggggaacttccaggcgtccgcatggcatctgtaaactgtggtggcgctggtgggagtgtctcttagcatgccactg

SEQ ID NO: 437248 - DNA, 122 bp, Homo sapiens
aggaaatctaagaatatttcttccacaggttgagactggatgttctttcacagtcaatggcgataacagcctgccgtcgctggcaccgccacagagagcagagacggatttctgctgttaca

SEQ ID NO: 437249 - DNA, 122 bp, Homo sapiens
acagcctgggacctgccacaaaggctggcgagggtggacacacacacacgcacacacacgcgtgcacacacagcgcagccacatggaactgtctgtctgtccgtccatttagtgagctcctt

SEQ ID NO: 437250 - DNA, 122 bp, Homo sapiens
gctgggtctgcacgtttagctcccgacacacctgctactccagccggcatgagtcacccacgcaggcattgcacggtgtacttgtcaaccacggattcagtggctcagcagcttgctctcac

SEQ ID NO: 437251 - DNA, 122 bp, Homo sapiens
tcgggcttgggacaggggaggataccagggccaccttccccaacccaggccgcgggggcccggcctccccgatgcagaccacagcgccctcacgggctgccctcaggccgcgcagcgggcag

SEQ ID NO: 437252 - DNA, 122 bp, Homo sapiens
tctggaggagctgccctgcagcccaagggaggtctcttccaaggaggagtgctgaagcttcgacctgtgggagccaaggatggttcaggtatctgatgagtactttcccagggtatttccct

SEQ ID NO: 437253 - DNA, 122 bp, Homo sapiens
ggggagtgactgccagcgctccccgcgcgatgtccaagcgggagccgccggagaaacccgcgccctccaccacgaccgactcggggagcagaccaggaaaggcggaccccgcaggactgttc

SEQ ID NO: 437254 - DNA, 122 bp, Homo sapiens
ttctttgtagtttctccaaattctttgtaaaaattatgaaagtaatttgcgaaaaataagcgaattgacatggaatataaggtgaataatacatttttaaaatgtagttgtgtataatggaa

SEQ ID NO: 437255 - DNA, 122 bp, Homo sapiens
tcatcagaggcggtccggccgagcctgcctagccccccggcgtggcctgacgtagctgatcggcccggaagtgctcacacgtgtgctccctgccctgctcctggccccttggccggccgggc

SEQ ID NO: 437256 - DNA, 122 bp, Homo sapiens
gtatcattcatacagtaaagacaccaatcttcagaggcagcgtagggaattcttacccatcgaagaccgtgaaccaccgcaggtccgatcggggagttccagcccctggcggcgcgctcaac

SEQ ID NO: 437257 - DNA, 122 bp, Homo sapiens
ctgcagggccaggtgaggggcggggcgggggtccgtctcccggtggggacttcggggaatcgggggtcgtttcgcctccctgagcccatttccagccctctgtccccgggatccccagaccc

SEQ ID NO: 437258 - DNA, 122 bp, Homo sapiens
gactgaggagccctttgtagccaggcagagctgtcaataaagtttcgtcgccttggtaaccgcaggcctcgcggggcgggaggggagagggatggcggtgcgcgcgcattcaccgcctccct

SEQ ID NO: 437259 - DNA, 122 bp, Homo sapiens
aagcctagagctcctgctcaagtctgcaagttccacactccccagaagcagcagaatatgcgaggagggccaggggagatcagagatgaagccaaactcctagggggttccacagctccccc

SEQ ID NO: 437260 - DNA, 122 bp, Homo sapiens
tccctatcacaccatgctctggtttcattcaagacggcattctgaggccctctgtaaattcgcccaccccatcccatattcctgcattcatttccattcattcaaaaacagcccttactcta

SEQ ID NO: 437261 - DNA, 122 bp, Homo sapiens
cggctgattcctgctgtctgggtggggtccctgtaaggctcaggcggctgactggggaggcgatcccaggaggcacagtggggaggggatagcagggcggaaagaggctgaatcacaaggag

SEQ ID NO: 437262 - DNA, 122 bp, Homo sapiens
cggcagcgaggaatcctggagcacagagaagctcccagctttgaaggtcttgcggtggtgcgtggcgggcaggaacccacaattccaaatacaaacggtcggcgcgagaagcgcttctgggc

SEQ ID NO: 437263 - DNA, 122 bp, Homo sapiens
acaagaaataactgtcctataagacaaaaacctctctctacggttctaggcgtaaccatacgtttgaattaaaagcacattggaacaacaacaacaatcttccagcacatctgtcatttaaa

SEQ ID NO: 437264 - DNA, 122 bp, Homo sapiens
gttgccacgctgcttggagcgctcatattctggatccccagcaatgtcaatatccagcggcgtgtccaggctgtggcccaggagggtctccagcagcgtgcggttggccagagtctcattga

SEQ ID NO: 437265 - DNA, 122 bp, Homo sapiens
accaggcacctgcttcagagctggagctggagaagcacggagccggggtggggctggacacgcacggagccggggtggggctggacacgcagccctggggcccgcctcattgctctggctca

SEQ ID NO: 437266 - DNA, 122 bp, Homo sapiens
tgcagggcccgcggccccagggcgcggagccgacgcgggaggaaccccgtggggcttgcacggtgcatcgtgcacacacagctgtccatcccaggtctggggtatccaacagctggcagggc

SEQ ID NO: 437267 - DNA, 122 bp, Homo sapiens
gacttctccgtgaagctcacaggcatgggtttttcacactatgacttccatttatttttgcggtaacaagcgcagctacttttttttttttttttttttttttttttttttttttttgcaca

SEQ ID NO: 437268 - DNA, 122 bp, Homo sapiens
caccttgtgttcctacaccccctagaggttgactactgctatgtttgggggctagaggagcgttatgctgctgtcctagttgaaacaagacagttcccccgatctttgtttagtttttttag

SEQ ID NO: 437269 - DNA, 122 bp, Homo sapiens
ttcagctacctccaactgctgaggaaccggttgcctaaaaggagccggcaaaagcgcctacgtggagtccagaggagcggaagtagtcagatttgactgagagccgtaaagcgcggctggct

SEQ ID NO: 437270 - DNA, 122 bp, Homo sapiens
cagatggaacaagaaagaggaacattttgacaagaaactatccctcttcccagtgaaatccggcctggccctcacccggcagctgcgaaccaccctgggcgagtcaagactctgtgtcatct

SEQ ID NO: 437271 - DNA, 122 bp, Homo sapiens
tttggcctggggctccatgccatccctggggtctgagcgattcagcccgtgcccccttcccgtctcatcctcacgcatccttggctgggtgcatgctgggtgtttcgagccacgcagaccat

SEQ ID NO: 437272 - DNA, 122 bp, Homo sapiens
gtagcccttagataactgtgttaactatcaccttgaatttaagaggaaaacaacaagagtcgtggtctgtatcctcacaaatcatccatgacttgagctttcagcaacctaggataagccgt

SEQ ID NO: 437273 - DNA, 122 bp, Homo sapiens
ccaggcggcctcgcccactgcaatgcaatctgggtggtttttccaggtccctccctgcctcgttccgcgcccagtccctgcccccgcgacgcccgagggcctggacgggtagctcggagtta

SEQ ID NO: 437274 - DNA, 122 bp, Homo sapiens
ccaggacagcgtgttctccccacagctgctgagttggcagaaccaaacttgccacccacccgtctcatttacagtaaatccagtgggttgcagaaataggacctgaaactgcctgagggcag

SEQ ID NO: 437275 - DNA, 122 bp, Homo sapiens
acatcacgcctagagaattacaggcagccgagtcaggccgggctaagctgcgaccggcagcggctgctcgccaaggactattataacccgcagccttacccgagctatgagggtggcgctgg

SEQ ID NO: 437276 - DNA, 122 bp, Homo sapiens
gaggaggtgaggccgagctggggatgtgcgggtttggggcccagaactgcaccgcagggccgcagaggcgggaagctggccggagaggagtgggaaggcgaccaagggcagcagcaggggct

SEQ ID NO: 437277 - DNA, 122 bp, Homo sapiens
gaacaatgacatcttgtaaaataaggcggtctctctgctatttgtcctgccccccatcaccggagggcatgagtttcctgaggatggagatgggactctatgttcagtttatatcccccagc

SEQ ID NO: 437278 - DNA, 122 bp, Homo sapiens
gagttccttctcccagaagagagcagttacatgaagcagcaatcacagaacggaagtgcccggccacaaaggctgccgtccttctcctcgtcccagtccatcttacagaatggctcccctct

SEQ ID NO: 437279 - DNA, 122 bp, Homo sapiens
ccctgccaaacggttctgcttggtgccatccatggagggcgtgcgctgggccttttcctgcggcacttggctgccgagccgagccgaatggctgctggcagtgcgatcgattcagcccgagg

SEQ ID NO: 437280 - DNA, 122 bp, Homo sapiens
acccaggggtgactcagcggtaggacaagtgccgccgatgtggtctagcttggggaaggacggcgggcgcctgaggagggcataacatccccaggtccggccagtctcgggttcctggggag

SEQ ID NO: 437281 - DNA, 122 bp, Homo sapiens
ctagacagctatctcgctttggagctgcagctaggtccagagtgggaaggaggctcgcgccggctttgccgctttccctgagggtgtccagttttgtgaataaaattagagaaatctgcggg

SEQ ID NO: 437282 - DNA, 122 bp, Homo sapiens
ccagggaggcgcaggagtggctcagcagagcgccccagccctctcccctcagtggtctagcgccagaggtgaggcagagaccacggtgaagtgacctcagagacccagttgtcgagtgctag

SEQ ID NO: 437283 - DNA, 122 bp, Homo sapiens
ccccgcccacccaccctaagccggcatttttcctgttatttgtgctccggggaagcgccgcggggttcctggaagagacacctattacctaggctcctgggggaagtgacagcccgtggatc

SEQ ID NO: 437284 - DNA, 122 bp, Homo sapiens
tccctgcaaagggcataaactcatccctttttatggctgcatagtgttccatggtgtatacgtgccacattttcttaatctatcattgatggacaagttttgctattgtgaatagtgccaca

SEQ ID NO: 437285 - DNA, 122 bp, Homo sapiens
aaagatgtgcagagactcttgaggggtccaggagaccagacgtgggtctggagactcccacgggctctggaaggcaccaccccattgtggtgcagatgaggggcctcactggattgtccctg

SEQ ID NO: 437286 - DNA, 122 bp, Homo sapiens
agaggagccagccctgtctctctctcctggccctgggggcgcccgccgcgagggcggggccgggattgtgctgattctggcctccctgggccggaggctctagtggaacttaaggctcctcc

SEQ ID NO: 437287 - DNA, 122 bp, Homo sapiens
tacagactccaggagatgggctgccgcacctctggctgcttgggcgctggcccacaaccccggaaggcaggagggaagcacctgccctttgtcaggctcctactacatgccagttctccccg

SEQ ID NO: 437288 - DNA, 122 bp, Homo sapiens
gtggagggcttcgaaaacgggggtgggggcgcccaagagctcagtgcccagccccgggatcgcctcctcccctcaggacccgcgagccctcggtgccgaggacgctcgagtggggccgcgag

SEQ ID NO: 437289 - DNA, 122 bp, Homo sapiens
ggatgagccgcagagatgcaccaagtcaaagaagccagataccaaaggccacatcttgtccgcttccacgcccacgcagtgtccaggacgggcaggtctggacacggaacgcagactggtgc

SEQ ID NO: 437290 - DNA, 122 bp, Homo sapiens
gctaattgccatccctggtttagcagacaatatgtactcaaaaagtgtctattatattaacgcacaagctccaggaggccatttgaaggaagtgttgtcctctctctgtaactatctctccc

SEQ ID NO: 437291 - DNA, 122 bp, Homo sapiens
tctacacacgttggccctgattataatgtagacacgtcaatgctgtcttagagctgtacacgctcttcacacattggccctgattataacgtagacacatcaatgctgtcttggacctgtac

SEQ ID NO: 437292 - DNA, 122 bp, Homo sapiens
tcgcccctccctcctcctcctccagcgtcctgcagctgccgcgcctgggtgtagtcggggcggagccagcatccaggccaggagagtaccccagcccctggagcctgggacaccttcctgga

SEQ ID NO: 437293 - DNA, 122 bp, Homo sapiens
ctccctgctccccaccccaccccaccccctaccttccgggtaggagaactcaaaacaactcgctgaccttcgggccgaccagctccgtcttccactgactccagcattccgttcaaacccag

SEQ ID NO: 437294 - DNA, 122 bp, Homo sapiens
ggaagaggtggacccgccgctcctggcgcagagttccggggttggggcggggtaggaaggcgggcgccctgccctaccctgtcccgggtctcccggaggctcagccccggaggagcagcccg

SEQ ID NO: 437295 - DNA, 122 bp, Homo sapiens
tttacccactcttcctcacagacatgttccccctcagagtcctgacactcacagtcatctcgccctggaatggtctgtccaaaggttcctgtacggctcattccctcacctcctttagatgt

SEQ ID NO: 437296 - DNA, 122 bp, Homo sapiens
ccgcccccgccaagagcccgggcagtgggcgtcgctgggcggggcggtggcgccccctcgcggctaagcgggcaggtgggcggctcccaggcctccagccactcccatccatctttctgtcc

SEQ ID NO: 437297 - DNA, 122 bp, Homo sapiens
cttggcggccaaggaaaaagcctggcatgttagagctggtgcaggactctccagggtgaccgagccacccagaagagggaaaagccattctccataacaaaaagtcaggaccggctgaaagc

SEQ ID NO: 437298 - DNA, 122 bp, Homo sapiens
agagttctacaagcggctgagagagctggggtatttatctttcactagtgagtgctgccccggtggtggctcactttccattccttttggcctgccctgtgtgcagctcagcaagtgcctga

SEQ ID NO: 437299 - DNA, 122 bp, Homo sapiens
ttctgctcacacctcaggcagtcggaggggcccggcggagctgtgttcgtgttgtcatggcgacggaagcagaccattagagcattacgaggaaatgagaagacttggggtcttgcgatcgc

SEQ ID NO: 437300 - DNA, 122 bp, Homo sapiens
cctgagggcagtggggatgggggagactgccaggtgctgagctcaggaccccggggaggccggctggaggtgtcaggtcctcctggccacaaaagcagcagccccaggggccttttcctcct

SEQ ID NO: 437301 - DNA, 122 bp, Homo sapiens
gccttcaggaggggggcagagatgacagccccaagacctgaaggtggactgagctgagggcgtcgggctcgccaggccttgggacgagtgtgtcggcacctgctctgggtggatagtgtccc

SEQ ID NO: 437302 - DNA, 122 bp, Homo sapiens
agagtgcggccggcttgccgagtcccaagcaggcaggtgagctggagggcggggatgtcccgggacaggccgcggcccctgccccgcagacaccggggccctcgctgtgccgggcacagacg

SEQ ID NO: 437303 - DNA, 122 bp, Homo sapiens
cagctccagcttcagctccagctccaggtcgggctccagctccagccgcagcttaggcagcggaggttctgtgtcccaggtgaggaggccccagaatctgaatgagctgcattcattccctt

SEQ ID NO: 437304 - DNA, 122 bp, Homo sapiens
ggaggcctgcacttggccggaaagccccctcccctcaagcccaggctgctcctggggagacggctggctgaggtgcaagctccatccgtccccgtcgagcccctagccagaccctgccgcga

SEQ ID NO: 437305 - DNA, 122 bp, Homo sapiens
acttgatgctgaagccctcactgggtggtggcgggggactgggcggccggtatggccggccgtgcagcacgtaggggcccaggtccttggcgaaggctccacgcgcacctccgttctgccag

SEQ ID NO: 437306 - DNA, 122 bp, Homo sapiens
ttagcagggaggtgctggtcatgtgacccgatgttgaaattgacaagctgctagctagtccgggccttttccccccccctttccttttttttttttcctcctctcccctccctcccggcttc

SEQ ID NO: 437307 - DNA, 122 bp, Homo sapiens
ccgagcagacttctgaacgagagcgagaagcggcccttcgtggaggaggcggagcggctgcgcgtgcagcacaagaaggaccacccggattacaagtaccagccgcggcggaggaagtcggt

SEQ ID NO: 437308 - DNA, 122 bp, Homo sapiens
gccgcctcgctctctctcccgccccccgagtctcgtttcagtcatccctttgtccttccccggattggcaggttttattattccgcctgaacaatccggccgcccagtggctgagggtcgct

SEQ ID NO: 437309 - DNA, 122 bp, Homo sapiens
cttcattgctccactcacaagcaagaataagatgtgtaacaagaataagatggaagtgagcgttgttgaacacctggataagaagtcaaagagagtagggtcttgagataatctcaccattc

SEQ ID NO: 437310 - DNA, 122 bp, Homo sapiens
agctcatggcctccttaggagcgaacccaaggaggacaccgcagggaccgagacctggggcggcctcctccggcttccccagcccggccccagtgccgggccccagggaggccgaggaggag

SEQ ID NO: 437311 - DNA, 122 bp, Homo sapiens
ctgtgtgaggacagcttcctccttggaactgtctcagtcaagatgagccactatgagaggcggtaagctccccgtcctcagaagtatgcaagccctggctggaggagatgctactcagaaga

SEQ ID NO: 437312 - DNA, 122 bp, Homo sapiens
acggccccgggtcacccgaccccggcgaggtcccaaagctctgcaagctgcacggcccgtcggagccacgctgagcctaccttcgcccagccccgacagcccggatgccgcgcgcccacggc

SEQ ID NO: 437313 - DNA, 122 bp, Homo sapiens
gtgtatatatgtgtgcatatgcgtgtgatttttttcccctttaaatcctgctgctcctgccgccgccgcagccgctgcaaacggaaagcaagcatgcgttcatcttttgtctttcattttac

SEQ ID NO: 437314 - DNA, 122 bp, Homo sapiens
agcagctggggagtgctcttgccgagatggaccgacagctcaggaggctggcagacaccccgtggctctgccagtccgcagagcccggcgacgaagaggtatgtggctcatagggctgtgcc

SEQ ID NO: 437315 - DNA, 122 bp, Homo sapiens
ctgccgaccagactgtccactgtaggctgttttatagggggctcccttcccttcgaatagcggccagaggtcagcagctgttgattcctttatggccaggttcaaacattaactcctgagag

SEQ ID NO: 437316 - DNA, 122 bp, Homo sapiens
agaggacccggaagcctatatctttccaaagtccaatttagccagagccagcgtaaacgtcgctctcaaatgtcacaagggaatcggggtccattttccacaatgttgtgaactcaggatta

SEQ ID NO: 437317 - DNA, 122 bp, Homo sapiens
tcatacaaatgtgtggccagaattcaagctaggttatatggaaatcctcaagaggccgggcgtggtggctcacgcctgtaatcccagcactttgggaggctgaggcaggcggatcacaaggt

SEQ ID NO: 437318 - DNA, 122 bp, Homo sapiens
aagaggacgtaaaaatggccctggaaaaagaccgggaaagcatgggacactggcgcattgcggtgttcaagtcccacagaaccgaggtgagttgggtgttgaaggaagcacggcggtcccaa

SEQ ID NO: 437319 - DNA, 122 bp, Homo sapiens
gcgccgcagccaaccgccgctgcctgagcgccgcgcccgctctcgctcgcgcctaagccacgcccaccgccgctatcgccagccaacccgtgtattgcaccgcctacagacacgccccttca

SEQ ID NO: 437320 - DNA, 122 bp, Homo sapiens
tgccctccaggactgtgagagaacaaacgtgtgttgctgaagcccggagtgcacgcccagcgcgtggtgctcgttaaggcaatcagagcaaagtgacccagcacccttctagagaaatggtt

SEQ ID NO: 437321 - DNA, 122 bp, Homo sapiens
gccgcagcctgcgtggggcccgccttagagcagctcgcgggtgtaagacctggggaggcccggaccaggcctgcgaacgcagggtccaggtgctggccttgcgattcgagaatctcctcccc

SEQ ID NO: 437322 - DNA, 122 bp, Homo sapiens
agagcagcgcgatggagttgcccaggtagccggagaccagctccgccacgaagaaggcgacggtgagcaccagcatgaagagcagccggcacgtcttgccagagtagcggcccatctcgcca

SEQ ID NO: 437323 - DNA, 122 bp, Homo sapiens
gagatgacttatgagatgcatacacaaaacgaaacataaaataatgttcagttggataatcgaagagtttaatttccccatcaggaacccaagtgaaaccgagggtttagataaggaaatgt

SEQ ID NO: 437324 - DNA, 122 bp, Homo sapiens
actgaggacctctgaggaccttgcgccagactctggagcaagcgcgaaatgaacaaaagccggccctgcccttgggaaaaatcaaacacacaatggccgctgagtgcacgctccgagcacgc

SEQ ID NO: 437325 - DNA, 122 bp, Homo sapiens
aactagtgcctttcacgtaacgattaactttgcttggtcggaaaccagctcatccacagacgctggaagccacttctctaacggggccagtggcgaatgtcccagcggataaacacacgtcc

SEQ ID NO: 437326 - DNA, 122 bp, Homo sapiens
ccatgggcagggccctccgggcttgtcttgatgccttatttaatacaacagtaggcacagcgtcctgggcacagacctccgggaggttagtgatgagagaggcacccactcctcacggggtc

SEQ ID NO: 437327 - DNA, 122 bp, Homo sapiens
ttatttatttttattttaattttgtagagacaaggtctcgtcccttccccagactgatctcgaacccctgggctcaggagatcctcccacctcggcctcccaaagtgctgggattacagatg

SEQ ID NO: 437328 - DNA, 122 bp, Homo sapiens
attcaacaaggactggaggaaaatgcatattaaaatacaaggaaagtctatgtgacacaacgggccaaacattaaggaagatcacactgagtgttgctaaacgtgggagccaaactgttttt

SEQ ID NO: 437329 - DNA, 122 bp, Homo sapiens
gagcgagaaaatcgctaaggccctttcagcccccgggacgtccgcttcctaccgagcacgcggtggcccaacaggaccacaaacgttccgggttgttcctgtgggagctcgcagggcacacc

SEQ ID NO: 437330 - DNA, 122 bp, Homo sapiens
cctcgcctcttccgcagggcggggccagccatgaaaggcggggcgggtctggccacggggcgaccgagatggcggcctccgggggcctagagggaccctgggcgtgcactcgcccttccggc

SEQ ID NO: 437331 - DNA, 122 bp, Homo sapiens
gaggccacacttggcacagcagcctgtgcactgggcgccaatggctactcataaatgtcacgctatagtgatgctttggaatgttaaatattgcactgggataaggagagagctggaaaact

SEQ ID NO: 437332 - DNA, 122 bp, Homo sapiens
gactcagtgcgcagttgagcaggtcgctgcagctgaatgcgggagccgagggcaccgccgcgggcgccgccggggcctccagactggccttccgcggctcggagcccgtcactcctgccttg

SEQ ID NO: 437333 - DNA, 122 bp, Homo sapiens
ctcacagatgctatataggctagctggggctctgcacatgacctccagaagtggacagtccggaagaggaaatgcacagggagcagggaaatgtgtaaatgtctaatataaattttttcctt

SEQ ID NO: 437334 - DNA, 122 bp, Homo sapiens
tggggtgggcacccggggagaagggaggagggatgaactatccagagaggaaggcacgcccggccccgacttatcggaataattgtctccattccgcttcggcggtgtctgttgtgtccatt

SEQ ID NO: 437335 - DNA, 122 bp, Homo sapiens
agggaacacgtcacctgcaattcaccacctctaccccaagctctaacagacatctcatgtcgaacaagtccaacagagaatggccaagctccctgcccagcttgccctcctgcagccttccc

SEQ ID NO: 437336 - DNA, 122 bp, Homo sapiens
aagaacaagatgtgatggcatctgctgctgaaaccctgatgaggaccaggccccctgcaccgctgtcagcctgaggaattaaagctttggtgctggggagagcattattcctctgaggagcc

SEQ ID NO: 437337 - DNA, 122 bp, Homo sapiens
ataacatttcttgttgatcaaaatgccatcaacaccttctttgctcatcagcaggactagcgtactgggggaacccacccccaatatttcaacgtaggttctttctataagtgtcagccggc

SEQ ID NO: 437338 - DNA, 122 bp, Homo sapiens
ccaccaggcacccggcccatccccggctcccatctagggatccacacccgggcgccgcggcgccgcggtttaaagcctgtgagatcccgcaacaacccggatccggaagcgcggggtcgcgg

SEQ ID NO: 437339 - DNA, 122 bp, Homo sapiens
gcaggctctggttgactgtgaccgcggtgatgcctcccatgccgctggccccaccacagccgccgcccaggccaccccgaaagcagctgctgcccacttgggagaagcttgaggagctgatg

SEQ ID NO: 437340 - DNA, 122 bp, Homo sapiens
gcagtattcacagtagtctggccctcagggactcctactccacaacagaatccagatggccggccttgagttccagaacttttcacttgtggcaagtttctttcaggcatgggtgctgtgct

SEQ ID NO: 437341 - DNA, 122 bp, Homo sapiens
gcttttccctcttcttggaattgccctctcccttttgctgactctccaactgggaagtgtcgcccagattggcacctcgaaatcgcctttcttccaccaaattgaagtttcctgcactaagg

SEQ ID NO: 437342 - DNA, 122 bp, Homo sapiens
tggctgcttcctgggtaaggtggcctgtggaaaatccctgacaactgtgtagagacatgtcgtgagggatggcagggagcatagtgaactaggtttgtggtttggaatcagggcccctgggg

SEQ ID NO: 437343 - DNA, 122 bp, Homo sapiens
tttctcagtagtttgtagggcctgtgcggtctttgaatttgaccttcatggttgacagttcggattgtttgtcattattataaacgattgcaaccctaatttcaggcatactttgtaaacag

SEQ ID NO: 437344 - DNA, 122 bp, Homo sapiens
actgggaacaagcaggaaaagttctcacctcatgaaccaggaagcgctagaacagcagtccgcattcccccaaactaatggagccaagaccagctatctaaccttttctttgtggaagttat

SEQ ID NO: 437345 - DNA, 122 bp, Homo sapiens
ctcacgattacctttgagtcaaaaaactagatttagactgcgttcttgtaactaaatgcccggggcagccctccctcaggcaactgcgtttagggttgggactcgagtggcaacttttgcaa

SEQ ID NO: 437346 - DNA, 122 bp, Homo sapiens
cttcctgttctcagccttgacaatgccctgaaacttgccgtgggtgaaatcacacaggaacgtggaaatcatgtaactgaggtcaatgaaagtgtcattaatggtgacaatatccactttac

SEQ ID NO: 437347 - DNA, 122 bp, Homo sapiens
tttctttggcacttgaagagggccatattgtttgcggaagccaagggggcctcaaggattcggagaaacgcccaggcggggagtcggccccacaccggggaggtgttgctggcgctggctcc

SEQ ID NO: 437348 - DNA, 122 bp, Homo sapiens
cctattttgagaaagcaacccacacatcaaaacctactgccacagaatggaaacaaggaacgtacaatgctctatacaggtagaaactcagagcattcagccagaggtgcaagagaacacca

SEQ ID NO: 437349 - DNA, 122 bp, Homo sapiens
gtgctcgcttagcccaccctgcagggatggctttccaggcgctgggtccagtgagaaaagcgtgtccggaattggttccttccggtgggttcttggtctcgctgacttcaagaatgaagtca

SEQ ID NO: 437350 - DNA, 122 bp, Homo sapiens
ttgttcaaagttaattatacctgaaagcaaccaaaatgcgcacgccaggcccacggaggccgattgccgaccagcgtagccggcccgcagcgccagagaagccgctcactccggcggagtct

SEQ ID NO: 437351 - DNA, 122 bp, Homo sapiens
tcaatgaaaaaaaaatgctggctatactcagtctgttgatttcatgactgggtcacaatccgtacttagaacatttgatttagaggtgataggaatctacaggccagccagactgaatttct

SEQ ID NO: 437352 - DNA, 122 bp, Homo sapiens
cacagacacacagacacacgcagacacacacacgcgcacacacagacacacacacacacacgctcactcacaggcaaacagatgcccttgggtagacttgtggtctgacagccgtacaggaa

SEQ ID NO: 437353 - DNA, 122 bp, Homo sapiens
accagcctgggcaccttccagagacgtgcacggtgatcccacgagccctgtgcctgcatccgcccagtctcacccagtaccctcgctcacccaggatgcatggcgcttccacgagccccttg

SEQ ID NO: 437354 - DNA, 122 bp, Homo sapiens
tgacagattttctacattgttctactttctgcctctccctcttccctggtctatagttaccgtgcatagtgacaggccagacagacagaccacactccccacttggctcagactctgtcctg

SEQ ID NO: 437355 - DNA, 122 bp, Homo sapiens
aaccagaggaggtgaagacacccaggagatcagagcagggctggggagtgaggagagcagcgcttagtgcttttgaatgatgaattcctgcccttagagacttagtaggtggcgtcatttcc

SEQ ID NO: 437356 - DNA, 122 bp, Homo sapiens
gggccagttctttccttcaccccaagactgctcagcagagccagactcatcttgctaccccgcagatgggcactacttggaatttatggtgtcacgactttcatttcaatctttatgggttt

SEQ ID NO: 437357 - DNA, 122 bp, Homo sapiens
cactcccaccccagccaggcaccccctagcccccgtccataccccgagccccggaccatccgccccgcagccctcagcctgcaaaggggtacttctccacatccacaggcctcctcccgcag

SEQ ID NO: 437358 - DNA, 122 bp, Homo sapiens
gacaactagagctcttcatgccagaggctcccgaggtacccatactgaagtataatgtgccggtgtgaatgttgccttgtaagtagtaccaatctaaggtaaaatgcatatttgaagaaagg

SEQ ID NO: 437359 - DNA, 122 bp, Homo sapiens
gctgtcggggtttcccggtgaagggcaggcaaacaaccggtcggtctgggcggagccgggcgggcggggcgagggcggagggcggagggcgcattgcctcatcctgtacattttactggaaa

SEQ ID NO: 437360 - DNA, 122 bp, Homo sapiens
ctcaggtctacagtccaaggtcaatcaggaagagtcgggcccagcatctgtcccaggcctcgccttttctgtgcctgactctgctcactgaggcaacagagtggggtatgcagatgccgagg

SEQ ID NO: 437361 - DNA, 122 bp, Homo sapiens
aagggcctttgctccttcttggaaattcaaagtcatgaaaaccagagcagtgagaacacccgtgaacccaggaagcaggatggcccctcctccatcagagaggcaaagactccccaaagagg

SEQ ID NO: 437362 - DNA, 122 bp, Homo sapiens
gcggccatgcggcggcgcgggaggcccgagagcggggctcaccctcctcagactctgcggcggagagccgagtgatgaataaatgagtaaccacatcaatatttaagtgttcactcggagcc

SEQ ID NO: 437363 - DNA, 122 bp, Homo sapiens
ggaaggcacggggaagatcagcttcaatgacttcctggccgtgatgacgcagaagatgtccgagaaggacaccaaagaagaaatcctgaaggccttcaggctctttgatgacgatgagaccg

SEQ ID NO: 437364 - DNA, 122 bp, Homo sapiens
acctaatcttgcgcgtgcgcactggcgacctgggctgcgagtgcggccagcgcgctagagcgcctcagggacctccggcttggggaagttcctggtcttgagctccaaggagattcctaagt

SEQ ID NO: 437365 - DNA, 122 bp, Homo sapiens
tagatccctttattctccagtggaaacttggcactgaggagtcccaggaggtgactcagtcggatatgtgaggccttagcaccactggccttgctgcttctgcactgtgtctgtcagggata

SEQ ID NO: 437366 - DNA, 122 bp, Homo sapiens
gggacccggacgccaaagctctggccgcagcactgaggtcaaagcaaacgccggctccagcgcacagaccagaggcacccgcagttctgtcccaaaccacttccagcaggggaggtgccttc

SEQ ID NO: 437367 - DNA, 122 bp, Homo sapiens
cccaccatgtcacccatacctgggaaaagctggcgagtgggtgcactgagctgggcaggtcgtgccactcggtaggccacatcagctggacagatgcctttcgctctccggacaccatcagg

SEQ ID NO: 437368 - DNA, 122 bp, Homo sapiens
atttccgtgagatcaacatttttagattccacgtaagagtgaagtcatacaggccgggcacggtgcctcacgcctgtaatcccagcacctggggaggctgaggcaggcggatcacgaggtca

SEQ ID NO: 437369 - DNA, 122 bp, Homo sapiens
gaaaaggatctacattattcagcagcctcgaaaatgttaagcctggatttaaaacacagccgtctggccagctgcctcgaatatctgacagcttagcaaaaagggccaaagctttccatagg

SEQ ID NO: 437370 - DNA, 122 bp, Homo sapiens
tccccacccgtcaggaaaaccttcccattttccagggtcaaataagacttggagcagattcggactgtggagagataggaaaataagaagagaggcgagttgaagaaggctctttcccttta

SEQ ID NO: 437371 - DNA, 122 bp, Homo sapiens
ggtaagaacgtgtccatttaaaaacaggctatagattgtcatgcagttttatctactaatcggctaatgcaccgccaaaaacaaacaaaaaaacccaaagggatgaaagtttcatccatcaa

SEQ ID NO: 437372 - DNA, 122 bp, Homo sapiens
tgagccgagaccggaaaaatgcctgggggagctgaggccgccggccaggtcatgcttgggcgtttttaaaagcgcatggaatgtgtttgccctccgcgtggaggttctatttaaaggcgctg

SEQ ID NO: 437373 - DNA, 122 bp, Homo sapiens
caaaacgagggtcacaattttcattcacagattgtatgtgtttacacacatactcacgaacgcttagcaaagttgaacctggagcaaatgtgttaatagcccttaaagggtcagtgtatgac

SEQ ID NO: 437374 - DNA, 122 bp, Homo sapiens
ttgcctttactttgaagactggttcaattcggagtggtagaagatgctcaagatgtagaacgtggaagccttttgagtctagagaagtctttgatgatgttctccttggctgctgcccataa

SEQ ID NO: 437375 - DNA, 122 bp, Homo sapiens
ccactgcttttgtggcgccgacaggtaatttattttatttacttattctggtttgttgtccgagtccccatagaatgctagctactggagggcagggatcttctgttgctcactgctttatt

SEQ ID NO: 437376 - DNA, 122 bp, Homo sapiens
ggacacatatttatatgcatcaggcctttattctgtgtttcaggaagcagcttctccttccgttgccattgtccctcctccagagctattccttcaatgaatactatttcctgcttctctct

SEQ ID NO: 437377 - DNA, 122 bp, Homo sapiens
gtcgcaacaggctgtcgagttcccggttcctggtggagagcccggcaggctgtttgttctcggacgtgtgcaaccgctgccggcggggctgtgggcgccgcagcgtggaaggaaggggtggg

SEQ ID NO: 437378 - DNA, 122 bp, Homo sapiens
taaataaaatttgttggaacacaaccaggctaattcatttagtattgtgatagctgctttcgcgctacactggcagttgaaacagttgcagagttgagtctttgccgcctgcaaatcccaaa

SEQ ID NO: 437379 - DNA, 122 bp, Homo sapiens
gcagcttttgggttttccttccccatgcccaagtccgtccgcctccccgcaccgtttccacggaattacctaagaaactgaaagctagcaactggagaagccccatgccggctccctgcagc

SEQ ID NO: 437380 - DNA, 122 bp, Homo sapiens
catgcgccaccaagcccggccccagaatgctaaacttgatcaggttcagtttcctccatccggcctcccccacagctaagcctcctctaacttcctccacagcggtgttgttctagcctcaa

SEQ ID NO: 437381 - DNA, 122 bp, Homo sapiens
ctgggggaagaggcgtggcggcgctgtgcgcgtgcacaaaagagagctgaggggcgggggcgctgcggcacagctggtttgagcaactgaactggaaacaagatgcaggtgagctaggacgg

SEQ ID NO: 437382 - DNA, 122 bp, Homo sapiens
aaaattggcttttcaaccttttacttttgacattcagccacttccccaggctctaattctcgcccgcactcctccctcccgccctactaagggttgccctgtgcgccctgcgagcccttcca

SEQ ID NO: 437383 - DNA, 122 bp, Homo sapiens
cccaacgcctagacaaagacagcgctgggaaaagttggaccaactggcacccccgcaaggcgaacagagcagtcccctcggccttcgtggccgagccggctacgcgctctcggagtcgcggc

SEQ ID NO: 437384 - DNA, 122 bp, Homo sapiens
aatatatccgcttctgactttcacctacatacagatttttgttttgccatgccgaaaacacgtggcaatccttgaactatttgttttacaaactgtgaatttacggtggtgttttttctctg

SEQ ID NO: 437385 - DNA, 122 bp, Homo sapiens
ctaatctgttttctgcctgtataaatttgctttttctaggctcttcttcataaacgtgatcgttcaatatgtcatcttttgtgtcgagcttctttaacaatgcttttgagattcatgcatga

SEQ ID NO: 437386 - DNA, 122 bp, Homo sapiens
gccagaccttgggagagaggaggccctgtcaactggcacatgggaaggtcaggaggcaggcgaaggccgctgggctctgggccctactgtcctcagtgaaatagctgctgaggatattttct

SEQ ID NO: 437387 - DNA, 122 bp, Homo sapiens
atgtaatcacatttaatctcgacctgtccaaacgtggaagaaaatgaaataaagtgcaagcgtaggtataacaatggaagatctctcactatgtagaagctcttttagcctcccctccccta

SEQ ID NO: 437388 - DNA, 122 bp, Homo sapiens
agagacgctcctcactttccagactcggcagccaggcagaggggctcctaacatcccagacgatgggcggccaggcagagacgctcctcacttcctagacggggtggcggccgggcagaggc

SEQ ID NO: 437389 - DNA, 122 bp, Homo sapiens
gaagggggagctggcagtcaagcttgatcacccggccaatcattgaatcagtcatgcctacgtaatgatgtctcaataaaaatgctggacactgaagctcgggtgagcttctatggttggga

SEQ ID NO: 437390 - DNA, 122 bp, Homo sapiens
ggccacctagtcttgcgccatgtctggccgttaccacagcttgcaggacctgtgtcccaacgcgggaaagacagcccgagccccgcccctccgggcccgggtcggcgcgcccagcctgccag

SEQ ID NO: 437391 - DNA, 122 bp, Homo sapiens
ctggagggggtggttctgggtagaagcacgtccgggccgcgccggatgcctcctggaaggcgcctggacccacgccaggtttcccagtttaattcctcatgacttagcgtcccagcccgcgc

SEQ ID NO: 437392 - DNA, 122 bp, Homo sapiens
ctctctccggagccctcattttttccccttgccccagggcccgcccccgcatcccctctccgcgcccgcaacacacctgggcgatgcggatccacttctccagccgctgcgccctctgcggg

SEQ ID NO: 437393 - DNA, 122 bp, Homo sapiens
ccagggtagcattagtcatgttgacagaatgtcattagaaacctgagcctcttccttcagcgctttaagtaattgcttagtgcgtaagttgttcaggaaatgagaacaaacttaacaatgca

SEQ ID NO: 437394 - DNA, 122 bp, Homo sapiens
gagctgcaggcttctaggcgctgggagggcgaagcaggagagccggttagtccatccccgcgctccgcaaacttttctaaccgggtaacaaagtgagcagcggtggccgccgcgattccttt

SEQ ID NO: 437395 - DNA, 122 bp, Homo sapiens
gcctggcaggagccaggggcttggtttgccttttgcattgcgagggcgtcctgcactcttcgggaacactgcggacagctgcgcatgcatcctcccagagccctgggcagtgaggggccctc

SEQ ID NO: 437396 - DNA, 122 bp, Homo sapiens
cagggccgccccattgggcggagactctcaggtgacctggaaggccttcggcctcggggtcggagccggaacggagcctgcagctccgccgttttccaccagggcgcgcgcctgcaccactt

SEQ ID NO: 437397 - DNA, 122 bp, Homo sapiens
cagcagctccaggctgtggtacaagcaagtcccacgtctggagtcatgtgacccagcagacgttgataacagacatatctgtggtgagaaaagacgctacgagtttatggcaagtcccaata

SEQ ID NO: 437398 - DNA, 122 bp, Homo sapiens
gaattatgtggtcagccagaaccaccttcataggccctgggaagctttgtgtctgagcaccgtttcctgtttacatctcagatgggaatctgagtgaaggctttgttgtcttcctttaataa

SEQ ID NO: 437399 - DNA, 122 bp, Homo sapiens
tggtcgggaaccacagtcaaagccacacaggtggtcagaggcagtaatgccagggactagcgcctgctttggggaagcacgggctgcttccttggtctgtcctggtgagacaaggaatggga

SEQ ID NO: 437400 - DNA, 122 bp, Homo sapiens
attctccctgggaggggcacacctcacccagccaagggctgcttctgactggacagagggcgtccaagatgcagacatggtgtgcaggcaggagggcttccactagccccccaggtgggagg

SEQ ID NO: 437401 - DNA, 122 bp, Homo sapiens
aagagggaaattgttaatcattaaacctaaacgccctagatggaatccgcgtctcatatacgggctctttgaataactctaagccgggggttagcaaaatgtggtcggtccctggagccact

SEQ ID NO: 437402 - DNA, 122 bp, Homo sapiens
gcccaagggaagctgaactccccgacgtctctcatggtagctctttctgttcttttgcgccgccttcaggcaatcatctgttccgcttgctctcccttcactcaactcggcttcagtagatg

SEQ ID NO: 437403 - DNA, 122 bp, Homo sapiens
cctgccattacggcccatgctaagacatttacccttagcaaaatggctctggttaacttccgaacctaaaatccccttgctaattaagtactatcctaattggagacggaaatgaacgtagg

SEQ ID NO: 437404 - DNA, 122 bp, Homo sapiens
cagggggcctggggctcagtgtttcagtgccagatggtccctgagcccagtcctgatgctcgcccatctacttaggaacaggttgcttctaagaatgagactgtgctctgcacatccagtgc

SEQ ID NO: 437405 - DNA, 122 bp, Homo sapiens
tatgcaggccggtggccctgcctgggtcatgtggacatggagcccgaaggccagccaaggcgcaacccctcagtgaagttgttttccgggtaactccttcccacgcagccccagctccctga

SEQ ID NO: 437406 - DNA, 122 bp, Homo sapiens
aaatgagacccacctgttgacctttgcccttagggtttcccagggtctgaattttgttgacgacattcccatgttgctatgtaatacggtcctccatgccctgtgtttttctgtaaactgat

SEQ ID NO: 437407 - DNA, 122 bp, Homo sapiens
ggaggagctcaggttccaggggtatgaagatgcaggcagaaactcccagaattgacgtttcggtggctagaaagtaggggtcattttctcattgatgttcttctgttcaactacataggtga

SEQ ID NO: 437408 - DNA, 122 bp, Homo sapiens
gtgtgcagataaaccagaccagtgcaagtcagtatgtgtacacatatataatagattcaacggttgctgtgggtaaacatccttcccataataattagtatttagcttcatggatgtctgca

SEQ ID NO: 437409 - DNA, 122 bp, Homo sapiens
tgaccacccccatctagactgtactctcgcggtatttgtcccgactctcgcggggtttagcgtggcattgggaggcccggcctgggggaggagacggcgttccgttagcggcgttggggttt

SEQ ID NO: 437410 - DNA, 122 bp, Homo sapiens
aaaaagttcttttgccttcattatcatattgcagagggcaaaacactaatgtgaggtaggcgctattgtttcctctaattcgaagatgagggaaaatgcttggagaggttaggtgagctgtc

SEQ ID NO: 437411 - DNA, 122 bp, Homo sapiens
ccctcccaagaccacctctgaggccgctcctgtgggagagtgcccacagcacagcctccacggccctgcctgagtgttttattggcagcccaggagtagttcaccacccccatcacagccag

SEQ ID NO: 437412 - DNA, 122 bp, Homo sapiens
tggcagcgaggggcagttatgggacggggggcgggtgggaagagcgcccagggccccctccgggttctcccacggtttcccgcatctgggcctggccagcgcctttgggaggaagggcctag

SEQ ID NO: 437413 - DNA, 122 bp, Homo sapiens
tggcgcatccccagctgaactgaagctcaccgagccttcgtgcgccatcgccaacgcggtcgcagcaacgctggtgtttctgctgcatccgggccgcgtaagccacctaacagtcgcctggg

SEQ ID NO: 437414 - DNA, 122 bp, Homo sapiens
taaatctgtagataatttggaaagaattggcatcttacctaaattacagattccaaaccacgacatgatataccactctgtatttaaggtttccttgaatactttaatcgtacacatccttt

SEQ ID NO: 437415 - DNA, 122 bp, Homo sapiens
ccagcctgtcacatcccagtccctgcctgtgtccgtgaccacactgccccactctctcagcgctctgtgtattcaggccctgggcaccagctggaggctgtgctatttgaggaggtgcccag

SEQ ID NO: 437416 - DNA, 122 bp, Homo sapiens
accgctcttctcgtgctccctcaggggcacgtggggcctgagtgccagggttatgaagggcgttctttgtaggtcccgtagctgagactgacaaacgtggtacccccttaggtggtgcagcg

SEQ ID NO: 437417 - DNA, 122 bp, Homo sapiens
aggctcccagggctcaggtccagaaagagctggaggctcctgagagcaaggggccctactcggccatgagcccagaacaatgcgagcttcacacaccgcaggtgtgtgcgtgtgggagcctc

SEQ ID NO: 437418 - DNA, 122 bp, Homo sapiens
tgcaaaaaataagttgcaaaacagtatggatacccagacctttttttcttttttggagaccgagtcttgctctgtcacccaggctggagtgcagtggcgcaatctcggctcactgcaagctc

SEQ ID NO: 437419 - DNA, 122 bp, Homo sapiens
tgggattcagaattcaagcatctcttttccttacattcaccttcacatacacctgctctgcgccagattcaggggtgcagaggccccgccccagggaccttcaggccggacagtgaaccagg

SEQ ID NO: 437420 - DNA, 122 bp, Homo sapiens
gcccggcgcgggccgctgtccacagtgggaggtgctgaaagcagggagcgggtgcgggggcggcgaggcggaccgctgctccgagcgcccccctcctcgctccgcggctcctccagccctcc

SEQ ID NO: 437421 - DNA, 122 bp, Homo sapiens
tccagcgcgcggggcttggacatcttcttgcctgcagcccggccaaggcccatggcagcgcgccccgcaccctcgccgccgccgccgcggcccggccaccaccgctgccgctgccgctgctg

SEQ ID NO: 437422 - DNA, 122 bp, Homo sapiens
ccgagggggcggggccgccgagggggcggcctcgtaccctagggaccctgcgtagcccggcgatccttggagggtccctcaggtggtaatggagttcgttttggggtctcagggtccctcac

SEQ ID NO: 437423 - DNA, 122 bp, Homo sapiens
attattgcccttcgttcgttcattccataaatatgtgcaaagcggctgctctgagccttccgtgggcagcagggcagcacagaggaggcctgagcggtggtgctggggagaggatggcgtag

SEQ ID NO: 437424 - DNA, 122 bp, Homo sapiens
caggggtgctggcccaaagggcagctgtggggtggctgcagtgctggtggctgcaccctacgcgcgggacctcatgcccagcctggcccggttaaccaggccagctgtatggtaatgggcgg

SEQ ID NO: 437425 - DNA, 122 bp, Homo sapiens
ttttgagaattttacttataaatatcaaaaccacatggactctggtgacgtcataattcacggtaaacctcagcttttaaaccagaggctcagacaatggtgtgagtcgctgactcactcgg

SEQ ID NO: 437426 - DNA, 122 bp, Homo sapiens
tttctcccagcaagtttacttgtaagcatctccatatactgttgtaaataatgatggtcacgtagtatcagtggctgtatgctgaactctctgcactgacctaccggcagacagcaacctga

SEQ ID NO: 437427 - DNA, 122 bp, Homo sapiens
tccgtctgctgtgcctcctgcaggcgaacctgacctgtttgcgcagccctcgctggtaagcgtgtcatctccaccggtgctgtttccgttggtgccgcgatggagagccttgggcacatgta

SEQ ID NO: 437428 - DNA, 122 bp, Homo sapiens
gagaatgaaaatgacttacctaaaggcttgggacccatgcagcaccttgaactcaggttccgtaactctcaccaccctgcccatcttttccattatatgcctgcattcactgaactctggct

SEQ ID NO: 437429 - DNA, 122 bp, Homo sapiens
gcagatgcagtaacatatttatactatgctctcacctggtataaatgttttgaccatattcgggggtggtggagggtgaggagaatgtttgcgcttctctttttgcagttagcccaggttgt

SEQ ID NO: 437430 - DNA, 122 bp, Homo sapiens
aatacaaagtagtagtggtattctgagagccaggaccctaaaagcctgcatatctgcacccgtgatgtttggcacagctcccttttggtatttaagtattaaaatagaaaacaccagtgaaa

SEQ ID NO: 437431 - DNA, 122 bp, Homo sapiens
aatctcactgatgcgattcagcacatgaacatgtgtctgccgaagcaagaacaatttagtcgttgacctgaagccctggctgcaatgaacaagcttcgttttcctaagcagaaggtagcgta

SEQ ID NO: 437432 - DNA, 122 bp, Homo sapiens
tgtcacggtcctgtttagagaggaaggtcggagaaaccagtgccgtggaaggctctggggcgttgacaggcgctgtccccagctcaccggctctatgaccctgggtaagttacctggcttct

SEQ ID NO: 437433 - DNA, 122 bp, Homo sapiens
cggtggcggcagttcctgctctaggctgcgagcggctggcggcttcgaggggagctgaggcgcggaggggctcggcggcagcggcggcggctcggcactgttacctctcggtccggctggcg

SEQ ID NO: 437434 - DNA, 122 bp, Homo sapiens
atatccaaggggaggggacgggagggggctttttgtaaaaatgcccctgaggtatagaaccggcaggcaggcaggctcggaacaaaacaccctgaaccagccacgaagactgctgctcccag

SEQ ID NO: 437435 - DNA, 122 bp, Homo sapiens
cgccctgggcgcgcgtcaccggcgcttcccaaaaagtcacattggctgtgggtcgggctgcgtcgcgcctttcctggccgcggtgcggggacctctgggaccgctccctccagcggactctc

SEQ ID NO: 437436 - DNA, 122 bp, Homo sapiens
cgacgttccgcattccatcgggttcccgcgccctactgggcttgtgcggcgcagtgcctgcgtgtgctttcgttttctcaaggccattctgataaaacatacgtgctggttccctttctttt

SEQ ID NO: 437437 - DNA, 122 bp, Homo sapiens
caatcgagtccacaaggtccgacggcgcaagcggacacgggtacccctgtgcgggatccacggggctctcctcacgcagctgtaaaggcgtgctgttggtgactcgctgtcagacacaggaa

SEQ ID NO: 437438 - DNA, 122 bp, Homo sapiens
tatgtcataaggaaataatcagacaagtgttcaaagatgtatttacaagaatgttcatctcgttgtttataataacaaatattggaatgaaccaaatgcctaggagaaatgattaagcaaaa

SEQ ID NO: 437439 - DNA, 122 bp, Homo sapiens
tgaaataaatgttcttggaaattcctacccggactggctagtccttgcggaagcagcgtccgggccctcgggtaacgtttgaagagctggcagcgtctcaggctgctgcgtggcgaaggggc

SEQ ID NO: 437440 - DNA, 122 bp, Homo sapiens
acgtgggcgtctgtgagttggattaggagtgtcttccttctgcccctcctggcgcctgggcgggcatgcaaagcacttctccatgctgctccttctccccactgctccccaaatcagctcta

SEQ ID NO: 437441 - DNA, 122 bp, Homo sapiens
atggccctgcctcctgctccttggagaaaaattgatcacatcaggcatcatcttctgtcacgtcctgactccacttcatttccactctacttcaatcactcccttgtggggactttgttgtt

SEQ ID NO: 437442 - DNA, 122 bp, Homo sapiens
cgggggcggggaggggggtttctgctctcctcctcactcctgagaactggggaggagacgcgccaacaacatcccaggctagggaaaggtttgacaaacctaccttcctatctgcactgatt

SEQ ID NO: 437443 - DNA, 122 bp, Homo sapiens
ccccccggggcctcatctgtccttccccagacaaagggcgaccagtgagggccgagtcttcggagctggaggagagagacagagacgaggggcaggtcagcttgccgggagacaggtgtggc

SEQ ID NO: 437444 - DNA, 122 bp, Homo sapiens
caaacctagcttccaaacgattgtgtacccgtgaccttgggcttgttacgcgcgatgtctcggaccctcctttatcttttctgtaaaagggggagagtagttcctaccttccagagttgtct

SEQ ID NO: 437445 - DNA, 122 bp, Homo sapiens
gaccagacggttcccaaagggcgcagtccttcccagccaccgcacctgcatccaggttcccgggtttcctaagactctcagctgtggccctgggctccgttctgtgccacacccgtggctcc

SEQ ID NO: 437446 - DNA, 122 bp, Homo sapiens
aacacaatgaaaagggcccaggacgaaccccaggaaaggtcactgagatcaagggtcacacgcagaaaaaggcaacagtgaggggctgccagctgcaacaggaatcaatgtggtcctaatta

SEQ ID NO: 437447 - DNA, 122 bp, Homo sapiens
ctgaagaagcaattcaaaaacttctgtccaactatgtacctgtcatctacatccagcaaacgacacaggctgccaacccctaactcctatccacggccagcatacagggagatcagcattgc

SEQ ID NO: 437448 - DNA, 122 bp, Homo sapiens
cagcagcggagttgtcagagcgcagagccggacagagcagaagaaccctcttggactggacgatttgggaattcaaaacttgggacaaactgtcagccttggtaagtcagcaaggctacact

SEQ ID NO: 437449 - DNA, 122 bp, Homo sapiens
ggccccgcgaggtgggagcccgggtggtcttcaccacaggctgtgcagacggtcaggcatcgaatgacctcgtcacgtccacctgcagcccagggcagtccaggaaaacgttctcgatgacg

SEQ ID NO: 437450 - DNA, 122 bp, Homo sapiens
atggcccttccggagccttggcccctccggcccttgggctgtttttttccgcagggtggccggtgttgtttcagtttggggacttttgtttttgacagacctcagtggcctgtgcctcatag

SEQ ID NO: 437451 - DNA, 122 bp, Homo sapiens
ttggaaaacgcagtacagaggggatgaaataaataattcttaaaggtgcttgagaagcagcgtagtacaaataagaagaaataagtaatttgggctgggcacagtggttcatgcttgtaatc

SEQ ID NO: 437452 - DNA, 122 bp, Homo sapiens
gttttccagttttaccttctttccaggcggtatcctttgtgcatgcctactgtacattttcgacctctttccgatggaatgatctaagatgaaagtaaactttttaaatgtttaatcattca

SEQ ID NO: 437453 - DNA, 122 bp, Homo sapiens
caaaggcggattctgcccgtgtgtgttcctttgcgggggcgggggatgggggtagcttcgcgggcaaagatccgatgagagagaggcagagaaaatgagaggcagagacagaggcaaaggca

SEQ ID NO: 437454 - DNA, 122 bp, Homo sapiens
acatgttgctaggcatgagtaaactgattttaaatattcctcacaatgaataagagaatacggcaaatctgttggatgaggaaagactgcaatggcttttagttgtcattagtaccatggta

SEQ ID NO: 437455 - DNA, 122 bp, Homo sapiens
aaccacaactccacgctgccttaggaggcatcagcccactttccccctggatttagaaagcgaaacaggaagaagaggtcctgggggaagacaatgtatctgttaccgtgtctgaaaacaga

SEQ ID NO: 437456 - DNA, 122 bp, Homo sapiens
gggctgtggcacagagattccatctgcagggctgggggcagccgagaatggcacctccaacgcccacggcaggggcccacccgcctgcctcctccgggaccaccgggcctggctcctctcac

SEQ ID NO: 437457 - DNA, 122 bp, Homo sapiens
gctttccgcaacgctaggggagtgcggtaagagcgcgtggctggctggctgtccccggagcgtgcatgatgcttcggaggaaacatttatttaagaaaaacaaaacaaaacagaatgatttg

SEQ ID NO: 437458 - DNA, 122 bp, Homo sapiens
gtcttcccctccagatggcccgtgtgttgttttcgggccggggctatttctcatttatttcgcacccccggttcttagtgccctgtaggtgctaaatcagcatttgtttcatgagtgctttt

SEQ ID NO: 437459 - DNA, 122 bp, Homo sapiens
gggaaaacccaaagctatgtggctaaaactcctgctttggggctcagggttcagggggtacgctagactcctctccccattcgattcttgcatttggcagacgagtcacccgggcagtggga

SEQ ID NO: 437460 - DNA, 122 bp, Homo sapiens
gcgacccacggagggtcagatccgcaaaatatttctctctgtttctttagactcaaacagcgctgggaaagtttcaaatatttggggcctggagagctaatgttctcattctattaaaagtt

SEQ ID NO: 437461 - DNA, 122 bp, Homo sapiens
cttggggcacatgtctaggagcaggatctcgatctggtggcagaggggcagcagctgctccgtctggcatacagtaggtgctcagtaagtctgcggggcaggcaggacaagcctgggttgga

SEQ ID NO: 437462 - DNA, 122 bp, Homo sapiens
tcatgacattggcaatttcaaataggaagcaatcccattgaaaggttgtgaacaccctttcgagatctttctccttgtgggccccgcatacttgcaactacattctttctcctgaaccaggc

SEQ ID NO: 437463 - DNA, 122 bp, Homo sapiens
gtggaccaatcagatgtggagcgctgtttggcgctgccatttgagcctgggctgaaactgcgggtgtgacccccccgtggtggctccgggtgtctgcagtggagctgggggcggaagcatga

SEQ ID NO: 437464 - DNA, 122 bp, Homo sapiens
ccctcccgcagccggccccgccctcccgctcgcggccccgcccccaggagcttggccctccgccaaccacaccgtctggccccgcccgggcggagcgccccgcccccttcccgaccaggccc

SEQ ID NO: 437465 - DNA, 122 bp, Homo sapiens
attcacattttagcacaaacgtttgttgacatcaaacgatcggttggtgggcagtcctaccgcaccaaagcctgaactggcaaaagtgaaaaccccagagttctgggtgcacgaagcatgtc

SEQ ID NO: 437466 - DNA, 122 bp, Homo sapiens
tcccagccccagggtgctctccgcggtcggccatttatcggtgaagcaacagccccttgacgtcaagcttgacgcattggagataaagtccaaggaggtgaactaacctttgaacgtgccag

SEQ ID NO: 437467 - DNA, 122 bp, Homo sapiens
ggagctcagcttgattttgttttatcttattttcccccacgaggcgccgcctgagtggggcggggtgggagtgtgccgagctttgttgtgacttgtcgccaagcaaacgcggtgtcagcttc

SEQ ID NO: 437468 - DNA, 122 bp, Homo sapiens
ctaagcccctcattgcccgggccggcagggccggctggccgctcagagtgcagggccccacgaacccacacccacctggaactcccgctggcccgcaagcaccacgtgcagccccggttccc

SEQ ID NO: 437469 - DNA, 122 bp, Homo sapiens
ccccccggcggctgcagggaggacccggaggtggctcagcctccgcggactccgggaaggcggtgcccaccgccccgcccccactacccgccgctccctccccgccccttccgctcccggag

SEQ ID NO: 437470 - DNA, 122 bp, Homo sapiens
ccctgtacggagacagagggaaagggtctccaaggccaagagaggaaacccggagtgaagcggataccagctttatatgaggaggctggaggaggcggtgtctgatctgcatagggcttagg

SEQ ID NO: 437471 - DNA, 122 bp, Homo sapiens
cccagacggtcctcacttctcttttccctagactgcagccagcggagcccgcagccggcccgagccaggaacccaggtccggagcctcaacttcaggatgttgacaacattgctgccgatac

SEQ ID NO: 437472 - DNA, 122 bp, Homo sapiens
gtgccgcccacgggagggtcagcggggagccctcacccccacacctctctcagaacatgccgaggcacaaaaaagagccgagcaggacccatgagccaagtcataggcagaaccaggacggg

SEQ ID NO: 437473 - DNA, 122 bp, Homo sapiens
gcggccccaggtggggccgtgtggggtgcggtgggcgccgtttctggtttctgagatctccgctcctcgcagggagcggggcggggtgggcggccagggtagctccgaacgcagggtccgcc

SEQ ID NO: 437474 - DNA, 122 bp, Homo sapiens
aggtcggcagggctggtggggaggtgacctagctgggcgtccgggctcgcgagggggatacggggaaatggggccttctccggggctgagctggttgggccgctgcaggatggtcccgcgcc

SEQ ID NO: 437475 - DNA, 122 bp, Homo sapiens
cgagggcgcgcaggcaactgttccacggagaggcgctccgtttccaacgtccatcagcgacggcggtaattagggctttccaaccccaaatgtgggcgtgattgtgcaaaagaccttacgac

SEQ ID NO: 437476 - DNA, 122 bp, Homo sapiens
cggagcggcctttggcgactgcgccgcccctacaaggccgcacacccctcgccagcactccggcagcctcgcacaagacggagcccacgcaggcttctagttttctaaaccaaaaactgcac

SEQ ID NO: 437477 - DNA, 122 bp, Homo sapiens
tgaaacgtaattaaccaaatagtcctttaataggcaattttcattgtcattttttgaaggcgacttcgtattactgtattctcgatgcgttgggattctagcttatctctgcaatctaaaca

SEQ ID NO: 437478 - DNA, 122 bp, Homo sapiens
tgccgcgcacaggcctcggggtcggcgggagcacgatggcggccgctaggagactcatggcgctggccgccggcatctctccgcgcctgcagccgctgggtccccgcgctgctgggcgacag

SEQ ID NO: 437479 - DNA, 122 bp, Homo sapiens
ggaatattgaacataatcacctctcattccagactatgttaggtcttaatggtgggaggacgcccgagtgctcggcccgtttcaccccgaggaggaaggacactgggtcatgacgccatcag

SEQ ID NO: 437480 - DNA, 122 bp, Homo sapiens
ctcgctcgccggcttgggggtctctctcctacgccctccgggccttggacaccccctctccggcctcacctcaggcgccttagggcccctggcgcccacggcagcctcatctggcctggcgg

SEQ ID NO: 437481 - DNA, 122 bp, Homo sapiens
atgcaagcccctcacccgggaggcctacatatttccaagttagagatgaaactgcacccacgatgcagccctcattcacacccggccctgcagcccgcccctggggcgtggtctcccctggt

SEQ ID NO: 437482 - DNA, 122 bp, Homo sapiens
cgtgcggtgcttgcaggccagcacgagttccgggtgggtgtgggctcagcgggccgcactcgtagcggccggcccgtcctgccggcctgggcaatgaggggcttagcacccgggccagcggc

SEQ ID NO: 437483 - DNA, 122 bp, Homo sapiens
aaaaccagtgcagacctggatcgggagactgtgccagaatacaacctcagcatcaccgcccgagacgccggaaccccttccctctcagcccttacaatagtgcgtgttcaagtgtccgacat

SEQ ID NO: 437484 - DNA, 122 bp, Homo sapiens
gacacgatgcttgtgactggctgagtgggggcagcctcacgggcaaagctttcaaccttccggatctgcgctagcgccgggcagtgttggagctgaattaaattgcaggacactcgggtggt

SEQ ID NO: 437485 - DNA, 122 bp, Homo sapiens
caataaggtctttctatccattcttgagctccatgtttaccgcagagaggaaaataacagcgactggtagttttgcccagagattgtataaaagaggtcaggaagtcaggcttggagatgca

SEQ ID NO: 437486 - DNA, 122 bp, Homo sapiens
gcccatcgtgcccgccactctacaccctgggggtgaacatgccctgcaaagcagattcggcgtgaggagactctggaaagtctacaggcggtgggaaactgtttcgggatctctcattttca

SEQ ID NO: 437487 - DNA, 122 bp, Homo sapiens
gatggatcatttgaggtttggggtgacagatcaactgagatccacttacacttctgaaaacgcaagaacactttagaaattaacaacacttaaagctttttacatcatttgtaaataactgg

SEQ ID NO: 437488 - DNA, 122 bp, Homo sapiens
cgtgagccatcgcacccggcccatctagcacttttgtgattagcgtagcaccaaggctaacgtcttggtgttcataacgttcgtgttcatgaaaaatgtaaactgaaggaggaggaagctgc

SEQ ID NO: 437489 - DNA, 122 bp, Homo sapiens
atcctgttgaccatgtttgtgaaatatcatctgaatccacccggtttttcatttatcacacggtgaccatttacttcacaacttggtctctttctcaggatattgtaatagtttagacttga

SEQ ID NO: 437490 - DNA, 122 bp, Homo sapiens
ccctgtgttgtggtccagtgtgatggactgaactttatccttctgccaaggctggtggcacgccatagtgggtacagggcaccagttttggaatcaaacacacactgatttgaatttgtcag

SEQ ID NO: 437491 - DNA, 122 bp, Homo sapiens
ggtgtgggaggagcacggcacaaggagtcaagcctcctgcgttctagcccaggctctcttcgcacagaggccttaggcaagaccctcccccggatggagaccggattccgtgaatttctaaa

SEQ ID NO: 437492 - DNA, 122 bp, Homo sapiens
ctttacatttaaaatctgctgttctgtctctcacaaatgcttggagaagattctgagaggcgcacacgtgacatgtcaagtgaccttgccaaagtccttgtgccataaaaggaggaattgaa

SEQ ID NO: 437493 - DNA, 122 bp, Homo sapiens
ggtgtgtcctgcaagggtcaggagacggttgcaggccagaaggacgtcccagtgacgtttcggagtcttgcagcctgcaggggtccatgtggttacccggaacaggaaccgtgggggtgctt

SEQ ID NO: 437494 - DNA, 122 bp, Homo sapiens
gtcctcgtgtggatgctgctgtggacgtctgcgtcgtcctcctgtggatgctgctgtggacgtctgcgtcgtcctcgtgtggatgctgctgtggacgtctgcgtagtctcgtgtggatgctg

SEQ ID NO: 437495 - DNA, 122 bp, Homo sapiens
tccctaagcacacacatgttgtcaacaaagcatgtgctagttgccattcccagaacaatacgggcctggccatcctctggaaaaaaaaaatacacattctttcctgaatactaccctacgaa

SEQ ID NO: 437496 - DNA, 122 bp, Homo sapiens
agctctccagcgccggaggaggcccggaggcccgaggttcgcagccccaggccccgagtccgctcaggacgcctctctctgaggatcccgggcccaaaccaaagagcaagtatgatttttag

SEQ ID NO: 437497 - DNA, 122 bp, Homo sapiens
ccaagaattccactgatcatttgatcagcccattactaggaaacaggcaatatcagcacccgatctaaaggcaagcctatttcatttattaaaacaccaacaagagagattaatcaacaaag

SEQ ID NO: 437498 - DNA, 122 bp, Homo sapiens
gttaggcttcaggaataagggaacagagtgtaaaacagggagaaacgtttccttctgctccggcaagcccacatttgtgggaggaagtggaagaactcccacgtgtgcagcagggctgggca

SEQ ID NO: 437499 - DNA, 122 bp, Homo sapiens
agcctcacacaagcaaggcctgtagcaaggctggactgacgattctcaggcttaaactggcgctgtttcaagatgaggcaagtgctggatctcgttccttgtccaattccctcctgataagg

SEQ ID NO: 437500 - DNA, 122 bp, Homo sapiens
aaaaaaatgagaactcaactttctagagcaataactcttctcgagggcactagcacaaggcggtagtgattttcacttttaatatattacatataatactacaaaaagactgaagttttaag

SEQ ID NO: 437501 - DNA, 122 bp, Homo sapiens
gtcttggctcattccttccgagccggcaccacctgcaagcccgcctcgggcctggggcgccgcgctccaggcgctgctaccccggtgtctgctcacactatgcccaatcccctattgttttg

SEQ ID NO: 437502 - DNA, 122 bp, Homo sapiens
atggactaaaacaagggcagagctgggttcttggtccacattaagcacggtgggatcttacggggtgggtattctgaggaattggttatttcaaattcagggcacactaatggggtcattcc

SEQ ID NO: 437503 - DNA, 122 bp, Homo sapiens
aagtaatccacctgcttcggcctcctaaagtgctgggattacagtgggcgtgagccatcacgcccagcccagttgactgtttagtgatgtaccaaggcttagggaaaagcctgaaatttctg

SEQ ID NO: 437504 - DNA, 122 bp, Homo sapiens
ggaagatatccttttgagaaaagagaaacagttaccagatcgcaggaggtggggccagcacgtccccctccagccaagccttggtagctgagttgtcactgcagtggaacctgtctctgaag

SEQ ID NO: 437505 - DNA, 122 bp, Homo sapiens
cccgtttctctttccctcccgggcctgggcttggactgccaattgctgtgcactctgtcacgcctcactgttccgtcctccctataatctggctctctaaggtggtcgtccatggtccctca

SEQ ID NO: 437506 - DNA, 122 bp, Homo sapiens
gggagattagctgaatatggtctgccggaagtaaacgcatatgttgatggaggattataccgagataggtaacacttggggaagaaatttgagctttggagggggatattctgtaccccttt

SEQ ID NO: 437507 - DNA, 122 bp, Homo sapiens
agctcgggcctttccgggttggctccaagcggggcctgtcacctactgcagagcgcgagccggaggcccagggcttcctccatggattcctcatctgcctcctgagccccgctccctgcgag

SEQ ID NO: 437508 - DNA, 122 bp, Homo sapiens
tgctgggggcccgtcccacccccacgttccgagcactcataattgagaagagagggaaaccgagtcccccgagccagggacatttcccaaggtcacaattagagctagggctgaactgagac

SEQ ID NO: 437509 - DNA, 122 bp, Homo sapiens
gcgcacgctcatccgctacgccaacctgggcaacgtgctcatcctgcgcagcgtcagcaccgcagtctacaagcgcttccccagcgcccagcacctggtgcaagcaggtgggcggaccggga

SEQ ID NO: 437510 - DNA, 122 bp, Homo sapiens
ggactgggggcacagcagtgagcagaaaagaccgggtcctgccgcatcgacggcaagtctcgctcgcatgcgtgtgcgcagtgggggagcgggcaggccaactgtggtcacagaaaccagtg

SEQ ID NO: 437511 - DNA, 122 bp, Homo sapiens
ccaagtgggttctggctggagtagccttgcttctccagatttagcatcctgcagagccaccgagaaaataaaaaagctgggcttggaggctgcctagagggacaggtgggtgaagggtcacc

SEQ ID NO: 437512 - DNA, 122 bp, Homo sapiens
accgcgaaggtctgcagcttcactcctgagccagcgagaccacgagcccacctggaggaacgaacaactccagacccgctgccttaagagctgtagcagtcaccacgaaagtctgcagcttc

SEQ ID NO: 437513 - DNA, 122 bp, Homo sapiens
ctccctctctcaccctgggctctgggacgctggccctgcttccccagagagcgatcgccccggacttgtgcctgtgttccggcctagggcagccggaacctcccgatatccccagaggagtc

SEQ ID NO: 437514 - DNA, 122 bp, Homo sapiens
agcaagtgcaagtgtgagatttagagattctaagaggggaagggccagaggtcttgaaaacgaccttcattcgttcattcattcgagaagtttgcgagggcctccgtgtcctgcgtttagtg

SEQ ID NO: 437515 - DNA, 122 bp, Homo sapiens
gtccccttttccgacccgcacttccccggggcccgcgggctctggggagaagcggagccacgatctctgtcccccaggggaaagaaaagcccatgatcccgtgggtgggcgagactggcggt

SEQ ID NO: 437516 - DNA, 122 bp, Homo sapiens
ccctgttccatacgccagagcccatccttgccctccccttatcgcccactgctgtcggcccgaatccacttcccaaggggcaagcccccaagggcaagtccgtgcacctgggagccctgcgc

SEQ ID NO: 437517 - DNA, 122 bp, Homo sapiens
aggcccgtggccttccgattcgctccatggcgtgggttgcagcccgtcacgcacggccgccgggcccgaatccaccttggcgccttccctagcccgaggcctcagccccaggcctatttcac

SEQ ID NO: 437518 - DNA, 122 bp, Homo sapiens
gctgggtttaaacccagatctgagcccggtggtgcgactgtgaacaagtttccgtagcatcgttgcctcatctgtaaagtgggcatcataatactcacctcagagtggctgtgtgcatgcgg

SEQ ID NO: 437519 - DNA, 122 bp, Homo sapiens
tctgtggcttcccctgctgggtggtgtcacctctttctctgctttcagagaaacccttcccgcctttcctcagagtgcttcccaaactgaggtcccatggcacactgtcctgggaggcgttc

SEQ ID NO: 437520 - DNA, 122 bp, Homo sapiens
atgcctcccctgggccggcggcagaacccgagacccccgcaggttctaagacagcccccacgccccccagtgcgcacgctcagtccaaccccgccgcgcaccgcccaccgcgaacatccggc

SEQ ID NO: 437521 - DNA, 122 bp, Homo sapiens
tccagttccctgtttacaattgtacacttcgggattttgtgacacatttcaacactggaccgatcagacctctcccttagccattggtctgcactgtcttttctgcccatgacccagtcagt

SEQ ID NO: 437522 - DNA, 122 bp, Homo sapiens
ccctgcagttctcaatcccagtcccaagaggttcattacgctaacggaacttctgtgctgcgtgactgcatggctaatttgcagccgctatccctccagctaaaaaatgtctagacagggag

SEQ ID NO: 437523 - DNA, 122 bp, Homo sapiens
gcagttcggactatactgccgacctggctggctggctgtgtctgtctgtctgcctgactccgcgcacctccactcccgcctcgctgcttcagccacactcagtgcaactctgagcccttatc

SEQ ID NO: 437524 - DNA, 122 bp, Homo sapiens
atatccagcacaccacgtgaaaaaattaacaacctcagtgcagtaagagatcatgaagaacgcaggctgaagtattttatgctcctgaatttataatgttcacagattaaatttattctttt

SEQ ID NO: 437525 - DNA, 122 bp, Homo sapiens
taatcccagcactttgggatgccgaggcgggtggatcacttgaggccgggagttcaggaccggcctgggcaacctccgtctggcaaaccccgtctctagtaaaaatacaaaaaaaaaaaaaa

SEQ ID NO: 437526 - DNA, 122 bp, Homo sapiens
ctaaactctaatgaaagccatgtggaagcacttcatctagtggaaagaactctagatgagcgatcctggaaacctgaatttgaattcagactgtgcttctgatagcagtatgaccttgggca

SEQ ID NO: 437527 - DNA, 122 bp, Homo sapiens
acattacagggctgagggcacaagcagctctaggaagcactagactcccagaggcgaggacgagaagcttttcaatgcaaaagcctctttctaaaacaccgtgttttaggcagcataatgca

SEQ ID NO: 437528 - DNA, 122 bp, Homo sapiens
gtggccattgtgttcgttgctcttatcggttcccatcccagttgttgatcttatgcaagacgctgcacgaccccgcgcccgcttgtcgccacggcacttgaggcagccggagatactctgag

SEQ ID NO: 437529 - DNA, 122 bp, Homo sapiens
atcaagcaatggaagcatgtgggatgggaccacagcgagcaactgaccaatgagagtgagcgaggcccgccctctacaaacttttggccaatgggagcactgagggccagccttcccccaca

SEQ ID NO: 437530 - DNA, 122 bp, Homo sapiens
gaggagtggtgctgcgaggggaaggaaaagggaggcagcgcgagagagccgggcagagtccgaaccgacagccagaagcccgcacgcacctcgcaccatgagatggcgacgcgccccgcgcc

SEQ ID NO: 437531 - DNA, 122 bp, Homo sapiens
tgtccagatcttggtgagtctctgtgcatcccaccccgcaggtcatgctccaggcacaggcgggccttgacctctgcttctccctcaggaccccgagggtaagcccaagaaggccaacatcc

SEQ ID NO: 437532 - DNA, 122 bp, Homo sapiens
gtaagattccaggaatgaactaaatgtttctctgagcccaaatcaactatcatctgaaatcgtggtgcagagaagaaaggtgcaattcctgtaaggctgtatttttccttcttctggttcat

SEQ ID NO: 437533 - DNA, 122 bp, Homo sapiens
ccgggccgcctggtacatgctgaggattgaggagatggtgcccatgaggcccactagccacggcgggaagcggccggcccacagcacgccccggggcagccagtgcacggcgttggccaggt

SEQ ID NO: 437534 - DNA, 122 bp, Homo sapiens
tccccgtatcttatctctgtcacactccagctggttcctgccctggatggctgcctgcgccgggattcctggctggacaaacaggccgagatctcagcatctgcccccactagcctcagaag

SEQ ID NO: 437535 - DNA, 122 bp, Homo sapiens
cagcacggtggactgcaacggcgtggtgtccctcatcggcggccccggctcccacatcggcgggcgtctcctgccagaggtgaaaattgataaggcagctaccgatgacagtgtaaggaaga

SEQ ID NO: 437536 - DNA, 122 bp, Homo sapiens
ttgacatgctttttgaaatggccagattactgacaagaagcaaagagaagatttagacttcggtctatcgttaaggtttttatttttgaaatctaaaatcctggctaaaggatttgaagaga

SEQ ID NO: 437537 - DNA, 122 bp, Homo sapiens
tccttcttgcctacagagggccggtggcctgttcggcaaccacgtcagctactaccaaagcgacggccggagcgccttcccccagaccttcaccactcagcgcccgctgcacatcaacaagg

SEQ ID NO: 437538 - DNA, 122 bp, Homo sapiens
aacccagaacattccagacatgtaaggctatcaatctttatcgtaggagagatgggaagccgttgaagggatttagataggaaactgacatgactttcttagtgaaattaaaagattactaa

SEQ ID NO: 437539 - DNA, 122 bp, Homo sapiens
cttgcaaaactattgtaaatgaaaacaacccctcacatatgggtcgtcagtcagttcccacgggaaattcagtgttatgttgagtggtcctgagatttccaggtaacctcactgcactcttt

SEQ ID NO: 437540 - DNA, 122 bp, Homo sapiens
actttctccataatcctcatgttcattttgccactgaagatatgaccttgttttatacatcgagaaaagaattccacctttccatcctaccaccctctgacatctaaataaactctctacag

SEQ ID NO: 437541 - DNA, 122 bp, Homo sapiens
tatgaagcattatattgataatgcatatatgaaaaattgagggtaatgaaacagatatatcgatgttagaatgattccatgtacagattgggaatatcaagactcttcttggagctctttga

SEQ ID NO: 437542 - DNA, 122 bp, Homo sapiens
cttggcgctagagtcagctacatggggctctgggcttgtgatcccatagtctagtttcctcgttttaataaactacaacaagccgggcgcggtggctcacgcctgtaatcccagcacttcgg

SEQ ID NO: 437543 - DNA, 122 bp, Homo sapiens
tacacacaaatacacacacacacacacacacacacacacacacacacacacacacctgcacgcacacaagctgcatgagatatactcaaagactcctcattggttttctgaaatttaaattt

SEQ ID NO: 437544 - DNA, 122 bp, Homo sapiens
ggcctcagttctcacttccattgggtgttgggttcctagatcagccaatcagtgtcgccgcggttcctggttctaaagtcctcgccggcccaccgggactcagattctccccagacgccaag

SEQ ID NO: 437545 - DNA, 122 bp, Homo sapiens
gagaagggaggggaggggaggggatagggggagggggaggaggaggagggagtggagcggcgggaaagatccctctgactgcccctgaggccctggaggaaggacactggtgagccccgcag

SEQ ID NO: 437546 - DNA, 122 bp, Homo sapiens
aattggggttcatgggattttcatagatgaataagtttaagcatattgtgttgaaggagtcgaaagaaatggaagtgatgtacccaagttaatgtagctggatagtagcagagctggaacca

SEQ ID NO: 437547 - DNA, 122 bp, Homo sapiens
cacagggagccacggggctggcgggtgcgccccgtggcgtgcggggttctccggggcacccgtgcacccacatgtctgcgtgccccaggggttggggggctcctgcctgcaaccctggggac

SEQ ID NO: 437548 - DNA, 122 bp, Homo sapiens
agtctgatttcctgcagcctgtgagctctgacgggacttccgctctctcgctccttccaccgcagagttttccgtggccaaaatcctgcccaagaccgtgaattcctcccattaccgcttcc

SEQ ID NO: 437549 - DNA, 122 bp, Homo sapiens
cagcatggggaagcgtttatagagaaagagagagctgcagcaggcaaagcccccgaaatgcggttttcatgtgaaatcaatttcagaatgagtgctggtcagctctcccaagtctcctcctc

SEQ ID NO: 437550 - DNA, 122 bp, Homo sapiens
cctgaggacccttcctcaaatcaacgaccggttcccatcctccaccgaccgttgacagggcgaccactagattatctctgcaacgcagagcaccgaggggccaaggccttcttcccgcccgc

SEQ ID NO: 437551 - DNA, 122 bp, Homo sapiens
caacttggagagtcgcatctccgacacgggctctgcgggcctcatgctcgtcgagttcttcgccccctggtgtggacactgcaagagacttgctcctgagtatgaagctgcagctaccagat

SEQ ID NO: 437552 - DNA, 122 bp, Homo sapiens
agaggtgactccatgtgttcccccagccaggggcctcaccagtcttccctgatccactctcgcctgtgatgaggatacactggtctcggtccctgtccctcagtgactggtacgccacattt

SEQ ID NO: 437553 - DNA, 122 bp, Homo sapiens
caggcaccccatcctctgtcggccttggccccggcacactaagcggctgcaccactgtctcgctttcgcctgttggccttggccctggcacactaagcggccacgccgccgtctcgccctgg

SEQ ID NO: 437554 - DNA, 122 bp, Homo sapiens
cagctgaggcccggcgagaattccagcatggctcgggcgggccggcagtgctgggggacccggcgcccccgacccccccagctgctggcccgggtgctaagaccctcactgcctggagccgc

SEQ ID NO: 437555 - DNA, 122 bp, Homo sapiens
tgttttttgctggatttatttatttatttaaaatgcattatagcatacacttaccacctacgtgccaggtgctgttctaagcactttataaatgctaagtcatttagcctcacgagctatca

SEQ ID NO: 437556 - DNA, 122 bp, Homo sapiens
gccccgacccaagccctgcagtccgcgcgcgtcaggggtgtgcgctggaggccggaaagtcgaatatcacttcccatcctgcatttgatgtgctttggggttgaaaaagcccttatgtggta

SEQ ID NO: 437557 - DNA, 122 bp, Homo sapiens
agagtcctaaagagatttgagactcgcgctcctgcactttctatcccacgcgcccccatccgaggggacctcacccctgggaagactccaataaatgcaacccggcgccactcgattccggg

SEQ ID NO: 437558 - DNA, 122 bp, Homo sapiens
ggaccctcctagcagggacttgatgctgaagccctcactgggtggtggcgggggactgggcggccggtatggccggccgtgcagcacgtaggggcccaggtccttggcgaaggctccacgcg

SEQ ID NO: 437559 - DNA, 122 bp, Homo sapiens
aaacgaaggaagaatgaatgaataatttgggaccccacctcccaacacacttccacatatcgaaatgcacacggaatgaggtacatcttctaaggagagtggcattgaagagtaatcaaaac

SEQ ID NO: 437560 - DNA, 122 bp, Homo sapiens
tagctatggttgattactggacacttatgcacggaggaacataaaccgggtttacattcccggctttaaaagcccagattaatcgccctgggctggttctgtcacacatagggatatatttt

SEQ ID NO: 437561 - DNA, 122 bp, Homo sapiens
acaggcagctcaggggagcgtcctgcatcccctgaagccatgtctgattctaacaaggctcgagtaatcctttcctagctcaagaacctttctttagagtgttagagaaagaaaaattctta

SEQ ID NO: 437562 - DNA, 122 bp, Homo sapiens
aggggagaccttaagtcaaagaaatttgtgattggttgtgagtggacatataggctgacccgctgcacagaccatcacctggacatgaatgaaacaaaatagaaaagccagtttattgtttt

SEQ ID NO: 437563 - DNA, 122 bp, Homo sapiens
ctgggtccccggttacagagtgggtactctaagaaggagttcatcctattatagtccatgcgtcaaggccgcaggagggtcggcccgtttgggggagacaccctcttgccctacaacctttc

SEQ ID NO: 437564 - DNA, 122 bp, Homo sapiens
ctcacggcgccagccagccgctccgagtgcaggccgctgagcccacgcccacccagaactcgcgctggcccgcaagttccgtgcgcagccccagttcccgccagtgcctctccctccacacc

SEQ ID NO: 437565 - DNA, 122 bp, Homo sapiens
ataggaattggaaccaacaaacatggccagactaaaaccggagacaaaaccccacatgcccgaactcctgaagtggctcagagctccgggagcccagggggcgccttttggctctgccttcc

SEQ ID NO: 437566 - DNA, 122 bp, Homo sapiens
tctccctttctcccggagagtttagagaagactctactcctctacctcttgtggagggcccgacatcagtcaggctcgcccactgtaatccggaggcctaaccatctccgtgatgctgtgct

SEQ ID NO: 437567 - DNA, 122 bp, Homo sapiens
gagaggagggtgcctgagcttgaggctggttcaactctcaaagagctagcaaggctgggccgagggcggtggctcacgcctgtaatcccagcactttgggaggccaaggcgggtggatcacg

SEQ ID NO: 437568 - DNA, 122 bp, Homo sapiens
gtggcgggggagagctggccctgcaacagatgagacggtgaggtctgcagtggctgggcccggcccacccccgcactgcccatcgctcagcgccacccacctcgtcactccgtgcccgctcg

SEQ ID NO: 437569 - DNA, 122 bp, Homo sapiens
gggtggctctgacagccccttcctgtgggtcctgcgtccttgtgtggagtcacgcttgctcggcagctgctcacttcctccggttgttttgccgctcggctctcccgcccgtgggttttcag

SEQ ID NO: 437570 - DNA, 122 bp, Homo sapiens
taggaaaatctcagtgcttgagggtgttttgtctgctgtaggttcaagaacatgaagactcgggtgactcagaagtggagaatgaagcaaaaggtaattttccacctcaaaagaagccagtt

SEQ ID NO: 437571 - DNA, 122 bp, Homo sapiens
agagggagctcagagagccggagctcaggtctcctaggcccagtgggtcgaagcccactgcgaaaccctgcgccatggcggctgggctagggcggcaccctacaggtccagaaggaatctgc

SEQ ID NO: 437572 - DNA, 122 bp, Homo sapiens
tcttcatgcgaagagaataagacatagacacacacacaaaggtaagaccacgtgaagacacggagaaggcggcgtctgcaaaccaaggagagaggcctcaggggaaaccaacctgctgacac

SEQ ID NO: 437573 - DNA, 122 bp, Homo sapiens
ccgatttttgtcgggtcctaaacaaaaatcaaatgtgttgcgctttggaactctgggcatcgtgggcaccaggctgacgggggcggcggggatggcgtttcttggcgagcgggtccctcagc

SEQ ID NO: 437574 - DNA, 122 bp, Homo sapiens
ccccacgcatttcctgggagggtcgcggcgacaggcagggcaggtgggcgtcctccaggccggccgagagggccagggctctctgaactctgtgctgcggacccctacggtccaggcggccc

SEQ ID NO: 437575 - DNA, 122 bp, Homo sapiens
tctgacagatgcatggctgatttggactggataaaagaaaaaagggcaaataagacaatgcgtaaaaaaaactgaaaagagataggaaaagtaaaagatgtattgtaaaaagttgcctatct

SEQ ID NO: 437576 - DNA, 122 bp, Homo sapiens
ctgccggacttattctagcggcggcgccgggagaaaggaggctgcttccctagccgctgccgctgtcgccaggagagccatgagctcatggacagctcccagaaatatgtctatatgcacca

SEQ ID NO: 437577 - DNA, 122 bp, Homo sapiens
gggttgcttatggatatgtcatgagagtagaaaaatgtgatcatctaatttcaggagctccgtccctgccacagaatgttcccacttctgcaggagttaggcagctttgcttgcttgtctgc

SEQ ID NO: 437578 - DNA, 122 bp, Homo sapiens
ttacacaaaagcacatgcatttggcaaagagagtgcatacattcttattgcatcatttttcgttatgtgctcaattgccttatggtcccctagagggtctacttaacatgaattcaacaatg

SEQ ID NO: 437579 - DNA, 122 bp, Homo sapiens
agccgtgagggcctctggctgcaactcgcgagggtcggctttccctgggtctccgccctacgggagacagtgaaggcgggagcaaggccccaaccgagaaccccaccccaaacccgggggcc

SEQ ID NO: 437580 - DNA, 122 bp, Homo sapiens
tttccctcctctccagtatcagacgttaaaacaaagcaagccacagtgtgtgtccacagacgaccttggaacgaaaagctgccctgtttgggatcaatgctcagggaacccagtccactccc

SEQ ID NO: 437581 - DNA, 122 bp, Homo sapiens
gtctatgcccgtcctcattacgttcttgaggaaactgaggctcaaggagggcgcgggatccgttgactgctgatattagccaacatctcttgagcatttgccttgtgctgggctctgtcagg

SEQ ID NO: 437582 - DNA, 122 bp, Homo sapiens
ccggcagacgggtgccttgatggcctcctctcctcaagacatcaaatttcaagatttggtcgtcttcattttggagaagaaaatgggaaccacccgcagagcgttcctcatggagctggccc

SEQ ID NO: 437583 - DNA, 122 bp, Homo sapiens
aagcacctcaaatctcagggcatcaccatggacgagctcccgctcataggtaggtctgggcggggggtcagggggtggtgcctgccctcctgcccccagatccctgcagttccctcacagtc

SEQ ID NO: 437584 - DNA, 122 bp, Homo sapiens
cagacagtggcccccacctgaaatccattttttttccttgtcagtgttataatgacacaacgttgtgtgaaatgatgttacatgaggacctgctgtaatcaaatgagctgaagttcaccaaa

SEQ ID NO: 437585 - DNA, 122 bp, Homo sapiens
agaacaaacacctagtccagggccttctgcctaacatgtgctcaatgacatttgtagaatcgaagttactgaatttgatttaattcaaacaatacttgctcctgcagaatcccaacctactg

SEQ ID NO: 437586 - DNA, 122 bp, Homo sapiens
tggggtcccaggatagcccggccggggtggcatgctcctctgtggggaccaggagtaacccgcagcacccctgggtccaagctgggctgccgggtaagtggggcccagaggcccgctgtaga

SEQ ID NO: 437587 - DNA, 122 bp, Homo sapiens
cctcagctccatcactgtctcgggctgaaagccaaaggagggaagggctgggttagtgtccgagagtcaatcggaaacagcacatgaggactacaggaaaactccatggcttgcaaacaggc

SEQ ID NO: 437588 - DNA, 122 bp, Homo sapiens
gagggtatgtgcagaagtctgtcctggtttcagtgttcagcggtgtgtgcagagaaaagtcgtctggtacatgcggtgtgatgctctgggcaagcacagcacctcagtagagcagtgatgag

SEQ ID NO: 437589 - DNA, 122 bp, Homo sapiens
tagttggccagtttctaaattaaaatagaggtagctttgctgctgtcagcggcgtgtgtacggaccagtttattccattcctaaggaccagactgtcagcgacaactcgcattgcgtgagcg

SEQ ID NO: 437590 - DNA, 122 bp, Homo sapiens
agcctttgcgacctgctattctcaccggatcttgtatctttatgatagattactcgcacccggccttctcttttatctcagagagtgtgacccagtgtcacagctccagcaagcactttcac

SEQ ID NO: 437591 - DNA, 122 bp, Homo sapiens
agctatgagtagcataaaaaataaaaagaagatactgtgactctttaataccctagaggccgtagtcttaggatattcttactgtagagatgaaaaaacagggcttcattaacaaactgaac

SEQ ID NO: 437592 - DNA, 122 bp, Homo sapiens
caaatgtaaatgctacacccggttactatcaaagtacagggcataccattgagactgactcgaagcaaaatacagtacaaatttattgactccaatcattcttagtcaacatttaagcaaac

SEQ ID NO: 437593 - DNA, 122 bp, Homo sapiens
tcgcgccccggcaggccccgtccgggtgctggagtgagactctcgcgctggcctctggagcgcggggtgggcgtcccgtcaccctgcgcccagcttccccggcccgttcccgcagggccggc

SEQ ID NO: 437594 - DNA, 122 bp, Homo sapiens
tagatttgcaacacatcggaaaaccgggggagcaccccgccttatccgatctccatgctccgcaagggccttccgggttttaggacaagcttctcaatgtcccgtttcgctgggtttaggat

SEQ ID NO: 437595 - DNA, 122 bp, Homo sapiens
agccttgcccaaccgggccaactcagcgtcggctgtggggcggggccccgcccctaggcgcgtcatccaagggagagcggtccctgccctgtgaagttgccaaggagggaaagggtgggagc

SEQ ID NO: 437596 - DNA, 122 bp, Homo sapiens
caacttcaaacgaagaaattggttgtgtacaaaaaaaaaagtagaatttcattcagaatacgtttggagacttcactaaattggtgtgactgatgcttttttgttttgctgacagaaggcac

SEQ ID NO: 437597 - DNA, 122 bp, Homo sapiens
cgttaccaccgatatcaacgccgtcgtagtcgccgcccttaggtctccgcacccttagctcgggccactcaaccccgcaagccggcctcctagcctgggcagggagctgtgcgagcaacgaa

SEQ ID NO: 437598 - DNA, 122 bp, Homo sapiens
catctcaaaaagaaaaaaaaaaaaaagagaaagtgcctcataaactgtgggtttttaattcgctccaaaccagatatgaagatcttggaggggaagatgaggatgaggaacagagatataga

SEQ ID NO: 437599 - DNA, 122 bp, Homo sapiens
gtttgtttttggttttgagacagagtctcactctgtcgcccaggctggagtgcagtggcacgatcacagctcactacaacctctggctcccaagttaaagtgattctcatgcctcggcctcc

SEQ ID NO: 437600 - DNA, 122 bp, Homo sapiens
aactcaggttcactacgggatggcttaggccagggaacagcatgtgcgaagttcgaagcccgagaagtttggaggagcggccccaggcgcaggcgggtcccgcagcggggcccgtgccgccc

SEQ ID NO: 437601 - DNA, 122 bp, Homo sapiens
acgccacaaaatccccatgtcaatagcaccaccccttccctctgctggaggatacaatcccgaatggatttctgttcaatctgctgtagctccagctcaacttgctttgaatagtgacggag

SEQ ID NO: 437602 - DNA, 122 bp, Homo sapiens
aaaatcaatattgtgaatctcttcttgcattttgttttcattttttgtaaagtggatgtgcgttgaaagcagtctaggaggacatacgctaaaatgctgagtatctctgaatggcagcattg

SEQ ID NO: 437603 - DNA, 122 bp, Homo sapiens
tctgcaaaccctgtgctatgactcccaagttgtctgtgccctgccagtgacaggaagaagcggagggaagcggtcaccgcccagagatgtcctctgctattcgggccagggcctagtcttgc

SEQ ID NO: 437604 - DNA, 122 bp, Homo sapiens
atcttcaaagtcagcagtaaggggcaaagttcttctcatgctgccatctctctggttttccgcagccaagaaacagttccccaattttaagaacttgtgatgagattggacccacctggata

SEQ ID NO: 437605 - DNA, 122 bp, Homo sapiens
gtcccccagatccccaggagctacctgagcctgcaggaggccgtgctggcagagcagcagcgccgcagccgggacgacgacgtgcagtacctgacggacaggcagctggagcagctggtgga

SEQ ID NO: 437606 - DNA, 122 bp, Homo sapiens
acacagacagaatgagagttgtcacctgagccactctgggatccgagcaagccaggcccacgaaaagcataaagtcacagtaaaactggtcaatgtggttggggccacagaacctcagctgg

SEQ ID NO: 437607 - DNA, 122 bp, Homo sapiens
gaatgtcacatagctgcaatcatacagtgtgtagctgtcccagattggcttttctcttagcgatacggatttcagtttctctgtctttttgtggcttgatagcttatttctttagtgctgaa

SEQ ID NO: 437608 - DNA, 122 bp, Homo sapiens
agggctttggcgtttgggaataattatttaacagcagcttgtttgcactttggaacacctcgtgcttccagagccggcccatcctgctggggaggggagaggtcccagcgctgctgtctggc

SEQ ID NO: 437609 - DNA, 122 bp, Homo sapiens
ctgcctctagactgtagtgtaagggcggggatgggaaatacgggtcgttctgtccccttgcggaacaagcatttccaacaaccctcgtttgtgggaagtgttgaatcgtatttggggcggga

SEQ ID NO: 437610 - DNA, 122 bp, Homo sapiens
gaacataggcagcagctgtcagtatttccccagtaactcttcaccacatgccatcgtggccgattaaatataagaggaccctgaatccgtaaataattcctttcaatgtttttccaattcta

SEQ ID NO: 437611 - DNA, 122 bp, Homo sapiens
ccctcctgtgatattgttcgccatatccagtgggcgagaggatgatattactctcgatatcgcaggggctgcacacactcatgtgatattatttgcaatatccaggggtcgataaaatgata

SEQ ID NO: 437612 - DNA, 122 bp, Homo sapiens
ataacttttgtttttggctttctggaaacctacagactgaggtgtaggccatatcttacacgggtattacatcagtcaggaaattggctgttgaacaagtttttttatcttttcatgaatga

SEQ ID NO: 437613 - DNA, 122 bp, Homo sapiens
ccagtgtctccggagaatgctattctcctacatttccgaacaggttatcaacgcacagatcgatcactgcctctgtcccatcgctccctgaagtagctctgactccggttccttgaaagggg

SEQ ID NO: 437614 - DNA, 122 bp, Homo sapiens
tcagcagtaaaccccaggacacaggcagtgaccctagacgagcagggcaggtccaggtgacgggaggcgtgccacgtttctccatcccgaagttcttcttggtttttatcctaagtactgat

SEQ ID NO: 437615 - DNA, 122 bp, Homo sapiens
agcccacgtgggttcccagaccaccaactccggccgtgagacttccgggttgtgttatcgcgagaactgtaactgactttgccgctgaggggcggggttgcaagagaaacccagcgaagagg

SEQ ID NO: 437616 - DNA, 122 bp, Homo sapiens
gatcccggccttcctgtctccgtgcccagcactgtcctcagatcccggccctcctgtctccgtgcccacacatcctcccagggagctccccaaggggagaagccggtgaaattgccccagtg

SEQ ID NO: 437617 - DNA, 122 bp, Homo sapiens
ccttacccgtgaacagagctggtagcaactaaacggaaaacgctgtgaagactacatctacgtttagctacctaatgtccatgccgcaccgacctcctaaagggaattcttaataatgggag

SEQ ID NO: 437618 - DNA, 122 bp, Homo sapiens
gagaaaggagaagaatgacgtgtgtatttgttcactgcttccaccaggagcgcctgctcccgcaccggccgctccgagccccggtcatcgggctgggggagtgcctgcacccgtactggctg

SEQ ID NO: 437619 - DNA, 122 bp, Homo sapiens
gcaacctgacctgtttctcctactcagaaacttgtgctgactggaggtgcctaaagaccacgttcgacttagcacacctggcttaagaggagccccctctctgctgtttgaccttgtcaccc

SEQ ID NO: 437620 - DNA, 122 bp, Homo sapiens
tctggccgaggcttgtctcctaaaaatagccccggtgtggggatccgtgcgcggatgtcccggcgagtcccgggctgaaagaggcggctccgggcggcgcgaagcgctggtggcgggcccgg

SEQ ID NO: 437621 - DNA, 122 bp, Homo sapiens
acagtgcggagcgcaatgatgataagctttacttcttcttccgtgagcggtcggcagaggcgccgcagagccccgcggtgtacgcccgcatcgggcgcatttgcctggtatgcattggcaga

SEQ ID NO: 437622 - DNA, 122 bp, Homo sapiens
aggctgccagcaccttcccagtgaagaggaaaacagtcaaggtgctgaactggaagaacccggaatgatttcaaatgtgacttgagggtgtcttcattccacagtattgctggtcaactaga

SEQ ID NO: 437623 - DNA, 122 bp, Homo sapiens
gggagtccagcctgcaagagcggcaccgagtcctctaatacttactcgcagccaggagcccgtaaggacacagagaagcaagcctctagctgctggaacagatgtccccagctccaagaagc

SEQ ID NO: 437624 - DNA, 122 bp, Homo sapiens
gtccttcctgttcttctcggcctgtctcctattcagatttctaagccaggagtgaacaagcgccaatgctatctacgtgtgccaggtgccgcaaggcaacaacgccttaaaagaacaaaaga

SEQ ID NO: 437625 - DNA, 122 bp, Homo sapiens
tcagggataacctgatgccacatgaccaaaagaaaaagccaacctctaagacccccttgccgagaacgttgtcttttacaaattcttgaaatatgatttggcgagtttctagtaagagtgac

SEQ ID NO: 437626 - DNA, 122 bp, Homo sapiens
catgtgcacacttaaacaggctttaaaagaagcatcaagtgacttttctacacctgtttacgataccaaagtgcctggagtgtttcagggacttaatttctttaatccctcaagtgcccaaa

SEQ ID NO: 437627 - DNA, 122 bp, Homo sapiens
cgggaccgaggaggggcagcgccaggaaggaggagggggcgacccgggccgagagacgggcgccacactccagggtagaagggacccttcgctcaggacaagcgattgtgtcggggtccggg

SEQ ID NO: 437628 - DNA, 122 bp, Homo sapiens
ctctcttcatgcaaacatgagagctatgaaacacctgttagaactgatatcccaggtgaccgtatacaattcatctatgaagctcaatttgtcaagaaacagcataatggttttataaaatt

SEQ ID NO: 437629 - DNA, 122 bp, Homo sapiens
tcctctcagggaagtttatcccagatcctctatagcacattttattctgttaccacacatcgtgctaatgttacaaaggcaatattaatgttttaccactggtgccaacatcaaatgctcct

SEQ ID NO: 437630 - DNA, 122 bp, Homo sapiens
acaggtgagatgttaaaaataaattaatttcatgctcctgaggagagagtaatgtgaacacgctgctggagcagttgtctcacttgtcctggctggcctgcatatggaaggaccagcggtag

SEQ ID NO: 437631 - DNA, 122 bp, Homo sapiens
cgcggaagcgcaccccctcctctccgcgcgatggcactgccggccgagcgtcggggaccacgacttcggagcaggggcgggctcaggcctgggctcatccactcagccccgcggagggggag

SEQ ID NO: 437632 - DNA, 122 bp, Homo sapiens
caccagcaatctgcttccacagcaggactccagtcccagactgggccaagctcggggcttcgttgccaagccttaacaagtatgtggagagcacacagctctgtaattctggagataacagt

SEQ ID NO: 437633 - DNA, 122 bp, Homo sapiens
gaaaaaggaattccaggttttcatcaggctgaaattagttacaaatgaaggagattaactcgggtgtgctgaaaatctcagcctcagcatccctgggaaaagcgcctccaagagttccggct

SEQ ID NO: 437634 - DNA, 122 bp, Homo sapiens
aaagctctggcttgtggggactcatcattccttcttcccaggccacaaacatcccaggagcggccgcatcccagcctccagcccggcgggaaggggacttccggttagaggggggtgttctt

SEQ ID NO: 437635 - DNA, 122 bp, Homo sapiens
gggccaaagggaaggcacagtccctgaggccaagcttgcatagtatgatcatgtaaaacacgaataccaatttaatatagagtcagcagtgcaagctacatcacagatggaataagcccaaa

SEQ ID NO: 437636 - DNA, 122 bp, Homo sapiens
ccggggttgtagggcagcatgtgtcaggagcttgggctcgagcgtgcggggcactaattgcgagtgcagtggccacaggctcccgggcaaagtggtcaggagcccattcccgccacctccgt

SEQ ID NO: 437637 - DNA, 122 bp, Homo sapiens
tggatgttgatattcatcaggtcagctggggcccaagacactactcttctgccaacaggccgcaatcctctgcattagagagagggtaaagattgagggaggccctaacttcaaaccttcta

SEQ ID NO: 437638 - DNA, 122 bp, Homo sapiens
ggcctttgtgcaggggccgagccctccaagggcagcattctactaagtgttcatccggggcgttttgaggtgaaagtggtcacaggccctcagatcactcatggcgtcgcctcatcccttcc

SEQ ID NO: 437639 - DNA, 122 bp, Homo sapiens
ctgcagtgcgttggtgtggagggacagctcccgaagctccgttagcccgttgaaggcacccggggagatgaagctgatctgattgcggctaagaatcaggacctgcaactggcggaggttgc

SEQ ID NO: 437640 - DNA, 122 bp, Homo sapiens
gccaaggcaggactgcgtggggactgatggagggctctcagcaggcagtgctgaccagcccggctgggagctatagatagctctgagctcacccccagtgtgtgggatgggccctctgggag

SEQ ID NO: 437641 - DNA, 122 bp, Homo sapiens
ttttaattcctcccgtgggatcatgaggaaccgaagctggcagagtcccaggaatatgcccgctccccagaagcaggagggaatgtcaagggcacggagagggtagggctgggctgtgctgg

SEQ ID NO: 437642 - DNA, 122 bp, Homo sapiens
aggcttctttaaaagtttatggatcttgcccagagctggagtcggagcccccgaggctgccgccgagagtgcccgcgagcccgtggcccagccgaagctctttcccgccgcctctccgcgcc

SEQ ID NO: 437643 - DNA, 122 bp, Homo sapiens
gtttgagtgtgcaggggtgagtggcagagacattcaccacggcagggcccattctgtcatcgggtggtcactgatgcaaagccatgcttggccacagtccctgccctggcagtttggtgaca

SEQ ID NO: 437644 - DNA, 122 bp, Homo sapiens
ctctcggaggggctggtctaggaaacatgattggcagctacgagagagctaggggctggacgtcgaggagagggagaaggctctcgggcggagagaggtcctgcccagctgttggcgaggag

SEQ ID NO: 437645 - DNA, 122 bp, Homo sapiens
agcaggacaccaaggcagaaatccacatcctgaaagaaaggcaggcagacaccagatcagcgctgtggggaatgtgtcctgcacacactctgcttcccgctgactgatggtccagccctccc

SEQ ID NO: 437646 - DNA, 122 bp, Homo sapiens
aggatgctagtggcaccactgccactgcatttcctgttggcagcagtgagcagtgaaaaccgaagcggcagaaggcagtggcagcaggcagtggcagcaggcagtggcccaggcagaaatag

SEQ ID NO: 437647 - DNA, 122 bp, Homo sapiens
ctgccctggctgccccaaaccccagatgcccaaaaggccacgggtgagctgagaaatggccggtgcgtgggggcgctggctccactctggcctgggatgggtgacaccccaatggcagagca

SEQ ID NO: 437648 - DNA, 122 bp, Homo sapiens
agccaggactcagggaagcgtgagccggccagtgcgctgaggacagtattgctctccgcgcgacgcgtgggaagcccctggtttctagcggcctgtgcctgcctttcaatcaccattcccat

SEQ ID NO: 437649 - DNA, 122 bp, Homo sapiens
gtccgcgtgcccggaactcctcccccgtgcccgggaccccgcccgccgcgcgtcacaaagcgccgccgcctcaccctcgtaggacgagcgccactcggccttgtgcttcttgtgcttcttgc

SEQ ID NO: 437650 - DNA, 122 bp, Homo sapiens
ccggtcccacagcgaggggaggaggccctctccggatttggtttgtatttcctttggctacgtggcagtccttgctaccaaagtagatcatgacctgggaagtatgtggaagtggattctgt

SEQ ID NO: 437651 - DNA, 122 bp, Homo sapiens
aaaatgaaaataacatatttggaatagaactttcaaaaagtccagaagggtaacattgtccggatgctgctgtgagccacaaggctagatataacacaaagacatttggttctaaaattcct

SEQ ID NO: 437652 - DNA, 122 bp, Homo sapiens
tccctttccaaagcgcggccggggccaggggagggcaaggcctgctgtgccctttgaccccgtgcgaaaacggcgaccctctgactataggggtgtggcccagagccacttggccagttagg

SEQ ID NO: 437653 - DNA, 122 bp, Homo sapiens
aaaaagatcagctaaatagtttttagcccagtaaaatacattggagtcactggtgagaagcgttgggggaaaaacacgtttgcttctttagttctgatagaatttaaacaatgcagcactgc

SEQ ID NO: 437654 - DNA, 122 bp, Homo sapiens
ccatccccccaaaagggaatgacccttgcagtccctgcagccccgtgaagaccagccctccgttctcctgcagccagcaccagcccacacgggctccaacgctggggagctggttcacgcag

SEQ ID NO: 437655 - DNA, 122 bp, Homo sapiens
ctgactgagctggccacagtgctaagaccaagcctccacccagtcctgcctcagtgtggccgtctacatgaggtgggcactaaagacccatctgggaagctattggcccaccgggacttggc

SEQ ID NO: 437656 - DNA, 122 bp, Homo sapiens
tcggccggagttactgagcggcaggctctctgatggagatgggtgctttcagacttaagacgtgaaaacaaagatcagccactcatgaacgaactcaaggctcactgagatgcaactgccat

SEQ ID NO: 437657 - DNA, 122 bp, Homo sapiens
gactacttcttgtagaatctaaaccaatcttctcacacacctacctgattccacagccaacgagaaggtcggaaaacaggatgcaaggctgggtgccaaggcaacacagcactgaggggagg

SEQ ID NO: 437658 - DNA, 122 bp, Homo sapiens
ttccgccatcccaggcacccttttgctaggatatgagtgaatctttacagtccctgctttcgtggaccaatggccaagcagccttccccacttggccctgggtttggctggtacgccctgca

SEQ ID NO: 437659 - DNA, 122 bp, Homo sapiens
cggaagtgcagcatcagctgcaccatggcctcgatgtggtggtcggcgctgggtgtggtacgcagcaaagccgggaagcgcaccttgtctcgcagctcatcgctgatggcgctgtaggtgat

SEQ ID NO: 437660 - DNA, 122 bp, Homo sapiens
gtgggggaagacctcagccacagctgtaagcagctctctgccagccacatggccggggaccgaaaaactcccgtgggagattttggccccaacccacacaggccaatgcaagaggccaaggc

SEQ ID NO: 437661 - DNA, 122 bp, Homo sapiens
ggctctgcgctggcaccgggctgggggggcctggccttcctccttccggcctcgcccaggcgccttgcacctctctggtgactctcagcccccacccggccccacaggcagctccgctgggt

SEQ ID NO: 437662 - DNA, 122 bp, Homo sapiens
ttttctggcttacagacacactcctgcatctgcaggaaaggcgtgagaacccccaggcaccgggatgttcgaagcacacacagtcacatgtctcttcaggccagactctgccaccaggcgtt

SEQ ID NO: 437663 - DNA, 122 bp, Homo sapiens
cttgaaaggatgtttggagggatggatggatggatggatggatgggcaggaaattatagacgggggcaaactgccaaaggctacagtttagttggcagcaaaaaaatcgtttctgagaacgc

SEQ ID NO: 437664 - DNA, 122 bp, Homo sapiens
gcctgcttttacattccctcactataagtagctagttcacacaaggtagccacccatcaccgttactacatagtttagaaacatatggtatagctttgccatgccaacttctaggtattcac

SEQ ID NO: 437665 - DNA, 122 bp, Homo sapiens
ttcctcaccttcatctacacagttcccttctcacaggcctactacctctgttctctgttccgttgagggagccctgcaggagcatcccgcaccaaggctactcccaagcctagccaatgggt

SEQ ID NO: 437666 - DNA, 122 bp, Homo sapiens
cagcgggcatccccgtgggagtgtgggcggcgctgagcacgagcacctggggctcctcgacgcagtgtggacggaccactcgcgcacactattgatccacgttagccagcacagcagtgtgc

SEQ ID NO: 437667 - DNA, 122 bp, Homo sapiens
accgcttcctcctcggaaaaagaatcgtttcctaaactggaactggaactaaagcccgttcggagatccaaaaatctacaatacagaggttatttgtaacctggcgtctccaggctggtgag

SEQ ID NO: 437668 - DNA, 122 bp, Homo sapiens
cttcctcagtgagatctgtgaatacctaagacttgaatgcatggtgtgactataaagccacgcctgagttttcttaaacactcgagaacttataaattcaagaagtgctgtctttcaaagtc

SEQ ID NO: 437669 - DNA, 122 bp, Homo sapiens
gcctgggggcgtggtgagccagggccggtgctggggcgcagagcagggcggctcagattccgggaggggcggggagatcgggttgctgggcgatcctggggtgctggaggcggcgcggcgcg

SEQ ID NO: 437670 - DNA, 122 bp, Homo sapiens
gctgcggttcagcactttttccgtttacgtatgcggggtgaaagtcggcttccaggcgttcgatctccagccttccagctcacagtaattaacacatagcgacttcaatgggaaaacctgtt

SEQ ID NO: 437671 - DNA, 122 bp, Homo sapiens
ccccagcccagcacgtcacttcagccaggcgcaggccccgcctccagctggctctgcctccgccagccccgccccaggctctgacaagtctagcttcggttcccgccggcctcctgccccag

SEQ ID NO: 437672 - DNA, 122 bp, Homo sapiens
tgtttgccctccccttcccgccagacaagggtgagaaatcctttgaaacaggctgcaaggcgcttccgaagcaggttaagttggggattgggaaggatcatctctgccctcgcctccctcca

SEQ ID NO: 437673 - DNA, 122 bp, Homo sapiens
cacttcccagatggggtggctgccgggcggaggggctcctcatttctcagacggggcggccgggcagagacgctcctcacctcccagacggggtcgcggccgggcagaggcgctcctcacat

SEQ ID NO: 437674 - DNA, 122 bp, Homo sapiens
tgtctcagtggcctcaaagccacctaggcaagacctgaaaacctgtttcccccagagggccggccacctccaaggtgacaggaagaccccccacttttttcccagggtagccagaatccctt

SEQ ID NO: 437675 - DNA, 122 bp, Homo sapiens
tttggatgtagtcggcctaggacttcatagatacataagccgattcacaaccaaccagctcgagaaaccgcggaatatcggcttagagcctgccatggcgaatcggctacagcgcggggacc

SEQ ID NO: 437676 - DNA, 122 bp, Homo sapiens
tggaataagtccaatctagttggaaggatgagaaaacagagacagcttggctttgtcactcgctgaccccatgaccacaacactcagctcactgctgagcactcacatagcccaggcctctc

SEQ ID NO: 437677 - DNA, 122 bp, Homo sapiens
agcctgatgggttcctgcgccctctccagcttcttcctgtgcctcacacactgaatgcctcgagtactcacatttccagggacttgataacctctggacttttgacggtgcagtttccttgc

SEQ ID NO: 437678 - DNA, 122 bp, Homo sapiens
gcatgggctactaagcctggataattttttttcttttttgtaggaacaggggtcttgctacgttgccaaggctggtatgaatctcctgaactcaagcaatcctcctgcctctgcctcccaaa

SEQ ID NO: 437679 - DNA, 122 bp, Homo sapiens
ctcaccgacctgggacaaacacccgagacgggccgaattccagctcgcaggtagtaattccgcccctcccctccccgctccgtcgcgtccagtccagctcttctagccctgccccgctcctc

SEQ ID NO: 437680 - DNA, 122 bp, Homo sapiens
actctggttcctctcggcggcctgctgatgccctgtgtgcatctatcacatccatggcaccggcctttcctgatcccagagcaagggcgcccagcggatcttcacgcatgtgaatggctcct

SEQ ID NO: 437681 - DNA, 122 bp, Homo sapiens
gcagggaatacccaaaggtggcggcgctaaggctgagagagttgcccccattccttcctccgccatcttttatcttcctcatatttcccttgatggggactaaggggctatgggcaagggct

SEQ ID NO: 437682 - DNA, 122 bp, Homo sapiens
ggttccgcgaggggcggagcttcccgctctgccctcgggcaggtgagccggagcctggcacgtgggcctgggtgtcctgacagccctggcccccgccgcctctgtaccagggagagcgcctg

SEQ ID NO: 437683 - DNA, 122 bp, Homo sapiens
gaaggggattgattaaccaagaccttcttctcctggttgcttttctaatccttctaggttcgggggcagacatgaggttttccccattttgttattggagcagttactacataccttaaaca

SEQ ID NO: 437684 - DNA, 122 bp, Homo sapiens
ttaccctggccgcgcggctactgtagagtgggctggcggcgagcgggcggggcggtatcacgcgggaggggcggggcccgctcgtcggctgatcgcacgattgtgacgcgccgccggaggca

SEQ ID NO: 437685 - DNA, 122 bp, Homo sapiens
gaggaagacggcaaactcgcctggtgaggaggcttcgtccaggaactcagtgaggtcctgcgtgtccaccacgtggtctgaggcgatggtgctgctccggtcaagagacagggcctcctcct

SEQ ID NO: 437686 - DNA, 122 bp, Homo sapiens
tttttaagttggatagaattactgcccggaaacctctacgctctctccccacgaatgcggcgagcgagctgaatgtccttgggcatgatagtcactcgcttagcatggatggcacacaggtt

SEQ ID NO: 437687 - DNA, 122 bp, Homo sapiens
agcggagtccagagtccccgtcgaagagatccagatcatccacatggagcgactcctcatcgaggaccactgttccctgggctcctacggcctcaaagatggcgatatcgtggttttactgc

SEQ ID NO: 437688 - DNA, 122 bp, Homo sapiens
gcagttacaaccagagcctcctctctgcgtgggagtgaggctcggtccttcccctgaacacggtgacagggatctctccacaggtagagatgacaccattcctcctgtaacatggtccaatc

SEQ ID NO: 437689 - DNA, 122 bp, Homo sapiens
aggccccacaacagccatcccagggcacctcctgcctggtggtgagggcaggctccccgacggctggcgtacagtctggtggacgcgtcacaggctcaatctgatcccctagcctgtggctt

SEQ ID NO: 437690 - DNA, 122 bp, Homo sapiens
ccgtgctgtgtacgaggtactcctcattaggtgggtagcactcaaggttgcctgtctgcacgtccaacttagcgccgcacatgtttctcctagcttgaaggacacggctggtggccacatgt

SEQ ID NO: 437691 - DNA, 122 bp, Homo sapiens
tcttcctgcttgacttaaactttctaatgctatcccttaatttctagattcagaatttcccgtgtcctggggttggttcgatgccctagattttaacaccagtttctccctagctcgtcaca

SEQ ID NO: 437692 - DNA, 122 bp, Homo sapiens
aggagcagggaccctctcttacctctcaagctccagcgcgtcaagctccaggacactccgcgtttccctggaggcgccaaggtcaggttcttataaccaatggttggcgcctacctgggcag

SEQ ID NO: 437693 - DNA, 122 bp, Homo sapiens
ttgctgaccagacagcactgaccatcggcctcgagagatctggactcctttagcccaagtcgcttctagttgctgttgacacattcaccacctgcttcctgctctgccagagccactccagg

SEQ ID NO: 437694 - DNA, 122 bp, Homo sapiens
ctaggggccgaatctgcctggtctgctgggaggcctaggggccgaatctgcctggtggggcgggaggcctaggggccgaatctgcctggtggggcgggaggcctaggggccgaatctgcctg

SEQ ID NO: 437695 - DNA, 122 bp, Homo sapiens
tgagcctgcgcccggctgaggcctggctggcaagcatcctgagctgtgcccgcaggggcccgccctccacgccagggctgtccagccactgcagcatctgcaggagcaccttcaggaagagc

SEQ ID NO: 437696 - DNA, 122 bp, Homo sapiens
atttgaatggcacaaggatggggaccacctgttcgggatgttactgaaatctgtttcttacgtttttagaggcttcgtgacggagttatcagagacattgagaggcaaattcggaaaaaaga

SEQ ID NO: 437697 - DNA, 122 bp, Homo sapiens
cccgtgttctgctgactgtgcccaacatctgtagtggcaggttttccctcctggtgtcctcgacctccactgcatgaggcagccttagctcttcttcccacataatgagggctgaggtttag

SEQ ID NO: 437698 - DNA, 122 bp, Homo sapiens
agcgcacctgggcccagtgcagaggagcttcgctctcctccgtccggattggtccagccgcgtcgccgaagttgtcaggccacgcccctccccgaaggaccccgctgtgattggctgtggct

SEQ ID NO: 437699 - DNA, 122 bp, Homo sapiens
atcatatctctgaaccttctgcattgaaccaaatggcataagttaagtggcttaaggtgacgtaagtcactgctcttttaaaaaatttgtaccaacacactgttcatgtatacattatatat

SEQ ID NO: 437700 - DNA, 122 bp, Homo sapiens
agtgactcagggggaggtgggtgggtaaggtcagggcttctgattatgaggcatttcttccgttcctggcgctggaccgaggaagccctttacggatggatgccatccttacgctcatttta

SEQ ID NO: 437701 - DNA, 122 bp, Homo sapiens
caaatggagcttcattcatccattcagtgttcattataaggggcctctctgggccaggctcggctccgaggtgctgatgacaagtccccattctaagagaccttggtgaggagagacagaaa

SEQ ID NO: 437702 - DNA, 122 bp, Homo sapiens
gaaactcaacaaatagatgtggacaagagaacatcttttacatctccacagctttcaactcgctaattggtgaatattaaaaatatttttccaggaaaaaagaaaaacaaacaaacacacct

SEQ ID NO: 437703 - DNA, 122 bp, Homo sapiens
atgcccggggctcctgcaggctgggaccctccacccatagtcctgtctcctccctcttgccggcagctccaagaatccctgtcctgggtatagtataggaccctgggccggaagggacaact

SEQ ID NO: 437704 - DNA, 122 bp, Homo sapiens
gaggccctgctaaggataaccaaaaaagggcatggagcaggctggttttggcagcgtgcacgcagtttcagagctttttaggtcttgggttttctgatgagtgatttcctgagcatgcctag

SEQ ID NO: 437705 - DNA, 122 bp, Homo sapiens
gaggacagacatggaaaagtcagagaagagggccagtgcttgccaccgagcacaggtaagcgtggaagaaacatgaagccccatgaggattgtgctgaataaagaatgtgaacactggaaac

SEQ ID NO: 437706 - DNA, 122 bp, Homo sapiens
ggtccttctgtcacaggccctgcagtagcagaggggctcctgtcctgctcctgtgccccccgcagcacctctgcgcgcccgccccaccgcctagcgcagagccccagcccacctcttcctgg

SEQ ID NO: 437707 - DNA, 122 bp, Homo sapiens
tcaagtagcaaagtgcactcagccctcccagcaaggagtctgccactcgcgcttgaaggacgtgtttgaagagctgctttcccagtgggatgctgccttaaagtcttgattccctggcactc

SEQ ID NO: 437708 - DNA, 122 bp, Homo sapiens
ctgctgcagctcctcagaaagcatttggaggaggttgtcatgggctacacagctcccctgcggctttgctggagccctcacatccatgaggtaatgaatgtgaccctctcacatagccagag

SEQ ID NO: 437709 - DNA, 122 bp, Homo sapiens
cgcgcgtcagaaatcctacccgccttcttcacagtacttgtgcgcaaaggacaggatgtccgaggcacgtccgctgccatcacaaatcaccacagggatgggaggctcttcttgcaggtatt

SEQ ID NO: 437710 - DNA, 122 bp, Homo sapiens
tttaggggaatgaggggcaaaaggggagaaatactgctaaagaacatgagcataaaaatgcgtgcgtttcagtgtttaagaaggcttgataaagaatgtcacttttttatttaactgataag

SEQ ID NO: 437711 - DNA, 122 bp, Homo sapiens
ttcagtgctctgaaagctggggggaaagcccctgagtagtaagtatgcaacccagggtgtcgggtgctttcttgtggtgaaacaagggtgtcaaaactgaggggactctccaaggtcctaat

SEQ ID NO: 437712 - DNA, 122 bp, Homo sapiens
tcctggaaccaatcccctgtggatcaagagagaagactgtactattctccattttacagacgagactgaggcccagagaggtgaagcaaattgcccaagactacacagcacagacctgtaaa

SEQ ID NO: 437713 - DNA, 122 bp, Homo sapiens
gccccctctgcctgtgtttgtgccaacagcacccgcgctgccgcgtcgggttccggcggccggagtcacacatgatgtcacagacaatgacacaagccggtgtctcattccgacacagcgtc

SEQ ID NO: 437714 - DNA, 122 bp, Homo sapiens
gggcgggacgaggtgcgatcgccggctcgccttcgctacgcccttgtgatcttggggccacggaggccaccagggcccggccaaggatcggatgccactcccaacctcccagagccgcgccg

SEQ ID NO: 437715 - DNA, 122 bp, Homo sapiens
cacatttaccctagagaagttctttagtaaatatagtacttgatttacagaaattcagtgcgtatgactgtttctggatatatgtattgtgttaagtgggatcctttctccatagcatgaag

SEQ ID NO: 437716 - DNA, 122 bp, Homo sapiens
cccgaaggtctccgattggacgctctgtaccaatcggaggctggagcgggccctgagaggcgcccgactccgcccccgcactggccctgcccactgcccggtcagcctcgttgctatgggga

SEQ ID NO: 437717 - DNA, 122 bp, Homo sapiens
tgcttacttttacttaacaatttaaaacattctgtagttacagtagtccctgcttatccacggtttcactttccatggtttcagttacccatggtcaactacagtctgaaaatattaaatgg

SEQ ID NO: 437718 - DNA, 122 bp, Homo sapiens
cggggactaaggactaaggctgggccaggattctggggttctaggggctctgcctccacacgccagtgcctgtctgttgagttcacttctctctaaaatctcattttacaccacgacccagt

SEQ ID NO: 437719 - DNA, 122 bp, Homo sapiens
tcctggcttgtctcactatgaggcaaacagtggccccaggccaaggacgctgcatgctctcgggctgaaatatgagccgggctcctgggagaccagcaaagcctaaacaaacatctgggccc

SEQ ID NO: 437720 - DNA, 122 bp, Homo sapiens
caaattaatatgatcgttgttctgtcttgactccttccttgggcttttcgtcggccatggcgagcactgaagtctcctcagctgccgcttcacaaaagaggtaccaggtccgcaccaaatga

SEQ ID NO: 437721 - DNA, 122 bp, Homo sapiens
aaagttaaaaaaacccacaacaacaaaaaaggaatagccaaaaggtgtccaaatgtccatcgatgaacgaatggataaaccaaatgtcgcatatctatacattgcaattattcagccataaa

SEQ ID NO: 437722 - DNA, 122 bp, Homo sapiens
caagacccccatccccacctccccctggctttcaaaaaaaggcacaggggacaggaagtgcgatttatacccccaggcctcataggacagtactaaagggtggcagaggagaagctgggaca

SEQ ID NO: 437723 - DNA, 122 bp, Homo sapiens
gaaaacagcagaaattcgcctgaaaagggcattggatttcgaggcaactccatattataacgtggaaattgtagccacagatggtgggggcctttcaggaaaatgcactgtggctatagaag

SEQ ID NO: 437724 - DNA, 122 bp, Homo sapiens
cccaactaggggattgtagtgtcctctctagaccagtgggagggagccaatcggactacgcggaggatataaatcgcacagtaaaggttttcttggaagattatctggaaagggaggtggga

SEQ ID NO: 437725 - DNA, 122 bp, Homo sapiens
tggggaaaggggtgcggggtgggggtgaagggaacggggaggaggaggaggccgcgggaacggccgcagactccgcacccaccaccagactgtcgccgactgacgctccgaacgggcggcgg

SEQ ID NO: 437726 - DNA, 122 bp, Homo sapiens
aggcaaaggagttgacttctgtaattctgtgccagtcactggtcaggtttgtggatgttacggtgacttgtaacccagggcggggaggtggctcctgttccctaggctgaggccagggctgg

SEQ ID NO: 437727 - DNA, 122 bp, Homo sapiens
gcccaattagagaagctaaaatctcatttgttgcaccatgggagccccctgaaagcacaccgttttggcctcattacagtatttttaactttacaaaaacaatttcattatggaaattaaag

SEQ ID NO: 437728 - DNA, 122 bp, Homo sapiens
cctaatgagatagggtgctagtgaaactgacataatttggtacctaactgaatacagtaccgaactgaatacatttcccgcctcccactacctcacccctgtattcagttaggcaccaatta

SEQ ID NO: 437729 - DNA, 122 bp, Homo sapiens
cggagtgatgtctgggtctgcagcagctaagtcctgcctcccgagcttgggcactggaaacgctaaggatctctctttttccagatctgtccttgagaagcaaccaaattctctccacagtc

SEQ ID NO: 437730 - DNA, 122 bp, Homo sapiens
gctgttccctgatcatcaactcaggacagcagtgagtggcctggaatgagccctggtgggcgcctgcctggctatctctctcaggtcctgcggcaagccccagaatgcagagaacaaggagc

SEQ ID NO: 437731 - DNA, 122 bp, Homo sapiens
tcccttatactggattcttttatcacacaagaaagccatcacccagccaagggcaggacccgcatggggacacaggacagatagatcttcttggggggattttgggagataggacagccctt

SEQ ID NO: 437732 - DNA, 122 bp, Homo sapiens
gtcttccaatggcaaggcagcattatcacagttgggctcccattggctctgagatgtgggcggggtcaccactcctggagctgccactagctccaccccattccatgcaaatgaagtcaaag

SEQ ID NO: 437733 - DNA, 122 bp, Homo sapiens
ggatggaggggagccctctgctcatcacagaggtgtccggggtggaggggagggtgcaggcgaggcctccgctcatcacagaggaacatgtgcgttctgccaccagagaggaggaggctggg

SEQ ID NO: 437734 - DNA, 122 bp, Homo sapiens
ctgggggctacactttgagaatcactactatcagtaaattaagtgattgttctaggtgtccgtaggctggtgatgtttggcatcatctgaaacaggctgagaaaatacaagcctggaattat

SEQ ID NO: 437735 - DNA, 122 bp, Homo sapiens
ttgagggaagcgactctgcacacggatggcaggagctctgtgccctcaagcctgccaccccggagagcttcccagggcctggagcccaaagtgccattgaagtcgcagtgggaacaccttgc

SEQ ID NO: 437736 - DNA, 122 bp, Homo sapiens
gatgtaatgcagctgcccttctccccacacacctgaacttcagatttcacagctgtagagcgtgtctcttaggcccgacatgacgcccggcggcgcagcccacgtggaagccgtgctcgcac

SEQ ID NO: 437737 - DNA, 122 bp, Homo sapiens
tccaggacatgagaacatacagctgcttcatccctgaagtctgatctcagtacacaataccggtcattagctatctctcccttagcctgcagtacaagtagctaatttctgcatttaaacta

SEQ ID NO: 437738 - DNA, 122 bp, Homo sapiens
agccggacttttccccgcccccatcggctcgcggcgagaacggccccgcgattggccacacgcgttccctagcctgagcgccagggctcctcccaattcgctgctggcttggctccgcccca

SEQ ID NO: 437739 - DNA, 122 bp, Homo sapiens
aggacctacatggaggggttttcaggaggagagtcaggtcagattttcagttttgataatcgcttggcctgctatgaatttgaatgatccaaggcctggggcaggtagaacatgaaagagat

SEQ ID NO: 437740 - DNA, 122 bp, Homo sapiens
agggtaggttagggtatctgtcttgagccttctatcaaaagttgtggttctggccgggcacggtggctcacgcctgtaatcccagcagtttgggaggtcaaggcgggtggatcacttgaggt

SEQ ID NO: 437741 - DNA, 122 bp, Homo sapiens
ctgttgtccaatctttgaggactggatctgttgattgttcgtgtttatatctgctgcaagcgcttagtgcagggccaagtgtatcaaaaatgcccactgtggtggcccaatccatgtgcacc

SEQ ID NO: 437742 - DNA, 122 bp, Homo sapiens
gagtcgcgttctctgttttgctgttgctgctgcctttgtgacgggatcgctttctcccatcgaaccttctagttgcttattgcaggtatatacgaaagtgctgaattttgtgtttgcatcgt

SEQ ID NO: 437743 - DNA, 122 bp, Homo sapiens
cttggttatacttagaagtgggcatgtagttggtatcacagttgggctgtggggttttatcgtagtagggatgtttccactttagtgacctcagatttagggaaggacatttggcagtgatt

SEQ ID NO: 437744 - DNA, 122 bp, Homo sapiens
cccgcccgcctctcggcccccatcccggtctggtccactcccacccctccaaccccatgccggccactgcagtactcacaccgcacgcctgggctctgcctctggcccgggttgggggcggc

SEQ ID NO: 437745 - DNA, 122 bp, Homo sapiens
cctgcgcaccacaccggggtcgagctttggggggcaggaaccgcggcgggtgggatgccgcgcctgcgcacggggtcaagcggggccatagtggaggcgcctcgcctgcacaaagcgcacct

SEQ ID NO: 437746 - DNA, 122 bp, Homo sapiens
caggtcccaatccctgccccacggggaggcagctgaggcccggcgagaattcaagcgcagcgccagcagtgcccagcgcactctccgcagctgctggcccgggtgctaatcccctcgccgcc

SEQ ID NO: 437747 - DNA, 122 bp, Homo sapiens
gaaaagagttgcactgtgaaaatgtcgatttgtttccatgttgctcttaagtcgcgtactcgtgctggttgacggtttgtaagaggcagcacccggcaggagggaagcaaagatttaggtgg

SEQ ID NO: 437748 - DNA, 122 bp, Homo sapiens
ctgagtaaagctgcaggtatcttccttgccagtttataagaatggaatcaaagcatttgccgctgaatgagagttggtgtgtgagcgttatatgaggaataaggagctcggcacacttaaaa

SEQ ID NO: 437749 - DNA, 122 bp, Homo sapiens
tgccgacctggacttcggctccgactatttctccgtctataccgatcccgatctcgactacgactacagagggaaacaactacagtcatgcccacatcatgtttaggccaacaaccaagtgc

SEQ ID NO: 437750 - DNA, 122 bp, Homo sapiens
gatgggattcagttcagcggaaaacatgccacttacagagccctgctgggtcgtgtggggcgtgcagagggctgagcctccaggagtttgtaggtccttcataccaggctatgtgctttcag

SEQ ID NO: 437751 - DNA, 122 bp, Homo sapiens
agggccccaagtggcacatacacactgtgcagaggcatggggtgcaggcgatgggaacgccgcctcggtccagcgtgctgccctctgtccctctcctcttcctccatagcaactggagaaca

SEQ ID NO: 437752 - DNA, 122 bp, Homo sapiens
ctccatggacctgtccagtgtcctcgtggatgtttgagcctgtgcatgtttgtgaccggacgagtgcaatcattctctgagtgtgtgtcccctgtgtgtgtagctgtgcatgggtgtgacct

SEQ ID NO: 437753 - DNA, 122 bp, Homo sapiens
gggagcgcattttccggctgagatgtcgggactctgcttccccaaccgaacgcgatcacacgggaaactcttcgcccacaacagatgagatggccaaaggattgctgagtgcgcacacgcaa

SEQ ID NO: 437754 - DNA, 122 bp, Homo sapiens
tctaggctctggctccacactttttcttctggtgttttctgagttgagatggttcagactcgtgtttaatgaggttgtccatttgagggtctttgtgggcccagtaaacactggtgtagaca

SEQ ID NO: 437755 - DNA, 122 bp, Homo sapiens
aaggccgtgctgcaaaacctaaagcgcatcctggctaaggtgcaggagatgcgggaccagcgcgtgtccctggagcagcagctgcgtgagcttatccagaaagatgacatcactgcctcgct

SEQ ID NO: 437756 - DNA, 122 bp, Homo sapiens
ctctcccaggtgtcagtccggaggaagtcctgatagaggatgacgtctgacctctaccatcgccatttttgctccaactgaggaaactacaggggaagtggggattggatccagttagctac

SEQ ID NO: 437757 - DNA, 122 bp, Homo sapiens
gtgagtttttgttttctccgaactggccttattattattaattattccttcagcacctaccgggaaagcgagaagaaagcaaagggcatcactccctacccacgaaagactcacaacatccc

SEQ ID NO: 437758 - DNA, 122 bp, Homo sapiens
ccagcacgccggggcgggggctgggccgcaggagccgctctctgggctgccgggaggctccgctgagagtccccgggcggcccctcccctcccccccccccggcggcccgaagccgcgcggg

SEQ ID NO: 437759 - DNA, 122 bp, Homo sapiens
gggagccccggcttccacccgtgggtcccccttggtgccctgcgaggaaccaggctgggccggggcagcgggaagaggtattcaaggagccataattattgtaaagaggagagtttaagtgt

SEQ ID NO: 437760 - DNA, 122 bp, Homo sapiens
aggattatgaccttattcattctgctggcaaaggaattccaaacaagttccctccttttccgagtatttcttttccctactgcaaaacctgcataagctagaggaaaagaaaatttaattaa

SEQ ID NO: 437761 - DNA, 122 bp, Homo sapiens
caaacttagaagcctggtacacaaggccctgccagacccagcctctcccctctatccccccgtcagccacacacagcgccccagtggctgtcccaagtcagtctgcccttgccattaagccg

SEQ ID NO: 437762 - DNA, 122 bp, Homo sapiens
cccgccggaacacccgggccctctggtgacacgccccctttccggcaggctactgggctccgcccacacacctcccggcctggttcctaaacgccagctcggagcaatccccttgggctgga

SEQ ID NO: 437763 - DNA, 122 bp, Homo sapiens
gcgtgaccgcgcagaagggggcggctgccgcaagacagaacagactagaacctccccggccgctggctcctcccacccaacggtctcgtgacctcgggtcctccgcctgctcattcctactc

SEQ ID NO: 437764 - DNA, 122 bp, Homo sapiens
ttaggcagggagctgcctcccgagcacatagacacgctggcctggagaacagcaaggagacgcccaacctacacactccacacaggacacagaggcccgtgtctgtggtccccgaccctgag

SEQ ID NO: 437765 - DNA, 122 bp, Homo sapiens
cgagaagtgttgtgagctaattcatttgaaagcctctgtgccaacaggcggagcagaaagcgcaggccgctggagttgatcccaacaagcaatcttggaactctttctgaatttatacgggg

SEQ ID NO: 437766 - DNA, 122 bp, Homo sapiens
ctgagtcaaaccactcagtgcagggacccctgggccttgatttggggtcctcctgcagtccggcctcactcaccccgagttcaggctctgcagaggtaaccccggtgggcagggagagaaat

SEQ ID NO: 437767 - DNA, 122 bp, Homo sapiens
cagagcgagaatgtcatcatagccaagacttgaaagaaaagcaaagatggataaaacaagcgcctgggacttttcagatggcaatggtggcaggtggtggtgccgtataaaaataactcttg

SEQ ID NO: 437768 - DNA, 122 bp, Homo sapiens
aaaaaagggcaaaactccagcagtgctgggaatgactggatatctgctgggcagggcagacggcagccatcttcaatggttgagcctccccttcattctcaaggaggctttcttttatcagt

SEQ ID NO: 437769 - DNA, 122 bp, Homo sapiens
ctgccggagtctgcgctagttgtgacgcatactatagcgctgttttcctgcactgataaacgaaaagcaatccaccaggtctcggcagctaactttccggcactacttatgcccgagcgtgt

SEQ ID NO: 437770 - DNA, 122 bp, Homo sapiens
tttctgaaaggagatgggactgaaaaaacgacttttaattgcatatgctctcccgagccccgagctttttggagatgtggtggctgcaccctggatgaccaatagaccagagaccctgaggc

SEQ ID NO: 437771 - DNA, 122 bp, Homo sapiens
agcgggcaggtggcatcgggcagcccgcacacacgccccactgaccaggacccctctgagcgggcacagccagggcctggtgttctggccgccagtgctgcctccactgcctagaccatgct

SEQ ID NO: 437772 - DNA, 122 bp, Homo sapiens
gctgctgcccagctacaggtagggctgcattggtccttagtacacaaaatggttattctacgtatagcagtaagaatccattacctacagattctagcccaatgactccattcttaccaaaa

SEQ ID NO: 437773 - DNA, 122 bp, Homo sapiens
attctactttttcatctctttgcttgtgttctggcttgggaatgaaatacaaaggcctttcgtgggggtagtgagtgattaggccaatgaaatgaatgctcgtgaggttctctctctctctg

SEQ ID NO: 437774 - DNA, 122 bp, Homo sapiens
agggtgtgcagacgcgctcccagacaagcatgttcaagccaggactgattctgtgggccccgtgtcctctccggctgcgtcctgccggtctgtgtgcatcccgcaccgtgtgcaagaatgtt

SEQ ID NO: 437775 - DNA, 122 bp, Homo sapiens
ttggaagctataaagagccacgttaggtgttggcagagcggccggtatagtcctcatacccgctctctcatgcttccggacacagtgaggctgtggttgccatgttggtgactggcagagcg

SEQ ID NO: 437776 - DNA, 122 bp, Homo sapiens
tggtggtcgtggaagaccgctgccttcaccctcccgctaaccagcttgctgccccccactcgggtcatgccagcgcctccctgagccctcgggcacaaataggtgaacgaccacacccgcct

SEQ ID NO: 437777 - DNA, 122 bp, Homo sapiens
cgcacgcgccggtcggctggccgcacccacgcggcgcagctcccaaagttgcagacagcccggcgaaccgcgcaatgcgcttcttctgcctgcagcagagaaaaggaaagaaaactccgcag

SEQ ID NO: 437778 - DNA, 122 bp, Homo sapiens
tccagggtatattgtacaaggccccagtcatgaatttatggactgactattataacagttcggtgtattttttggaggggatgcatataacctttggggtgattttgcatctccttggagag

SEQ ID NO: 437779 - DNA, 122 bp, Homo sapiens
acccctgtgtgtggtgtgtcctgcgtggcagtatctccttgtcccgtgtgtggggtgtcccgggcggtggtgtctccctgtcccctgcgtgtggggtgtcccgggtggcagtatctccctgt

SEQ ID NO: 437780 - DNA, 122 bp, Homo sapiens
ggtacaccctatgtaaatgaagaggatgaagtaaagttacagttacaaagttattaatggcgggcatacgccctatggagaggatatttcccgttataactgaagtgtgaattggccttatg

SEQ ID NO: 437781 - DNA, 122 bp, Homo sapiens
ggcctggaggggtttgggggcaggacctcaccttcggctgcccaggtgagaggggccgctcgcccagctgcagggacggcgcaggagggaagaggcaccagcactttgaatgcggagctcac

SEQ ID NO: 437782 - DNA, 122 bp, Homo sapiens
acctcaagtgatccacctgcctcggcctcccaaagtgctgggattacaggcgtgagccaccgggggcgcccagcccctaattttagtcattttaataggtgtgtgatatatttcgttgtgac

SEQ ID NO: 437783 - DNA, 122 bp, Homo sapiens
gaccctaccttattgcagtaatttgtgaagattaactcaagaactctatgtacattagttcgctagggctgcctaacaaaatacaataaactgggtggtgtaaaaaataaaaaatttattgc

SEQ ID NO: 437784 - DNA, 122 bp, Homo sapiens
cctcagggagaaacacaagggtatttctgtctggggcggcaggacctcatgtggtctccacgtggcaggatcctagaatcacggggtggcagtacatattttcccctatggctttaagaaaa

SEQ ID NO: 437785 - DNA, 122 bp, Homo sapiens
catatttgtctacaaagggattggagtccaaggtgcattgttacagcttgtgggttccatcgaaacatgacacctagttattcccatcctactttgtatcttgtgaccacagaaccctccta

SEQ ID NO: 437786 - DNA, 122 bp, Homo sapiens
aggcacttcctggttacccatgatatgagaataacctttaaactatttccatttctgatccgggctggaaacaggaaatgcattgggtacagctttaaacaacaacaacaaaaagggaccaa

SEQ ID NO: 437787 - DNA, 122 bp, Homo sapiens
accttgtgatccacccgccttggcctcccaaagtgctgggattacaggcgtgagccaccacgcccggcctagcagtggttttctcaaacgagtctggatcagattcacctgaagggcttgtt

SEQ ID NO: 437788 - DNA, 122 bp, Homo sapiens
ccaggccccggccctggcgggggaacacgctgaagcgcacggccgtgctcctggccctcgcggcctatggagcccacaaagtctaccccttggtgcgccagtgcctggccccggccaggggt

SEQ ID NO: 437789 - DNA, 122 bp, Homo sapiens
tttctgttaggggattggctccagctccattgtccctcccccatcattcagtagtctccgcgaaagcccttagagccggtgttgctccacaggaagccaagaagcacacaggaaaaggagct

SEQ ID NO: 437790 - DNA, 122 bp, Homo sapiens
ggcacaccaaagggcaaagatgaatgatccacaagcaccccctgctgcaagggaacagggcgcagccggaaccggcgacggtggccgcgtggcgccgcggacttccgcagcaagccctcccg

SEQ ID NO: 437791 - DNA, 122 bp, Homo sapiens
gcggactctgagcatcattccgctgggcccagtggggcctctgaagggacccgccttgcccggctccagcccaagacctgaggcatgcgcaccggctggccggctactttcttgaccggcca

SEQ ID NO: 437792 - DNA, 122 bp, Homo sapiens
acttttatccagctctaaactttatttcctcccagaagacactccccagggcagaaatagcgaccatggcgaggtggtaaacctgtctgtccccctcttctttctttattatttttccccct

SEQ ID NO: 437793 - DNA, 122 bp, Homo sapiens
caaggcacactctaacctctctgagtgtgaacgctgcttcccagaaatccgtccccatcccggcagaattatctacatatggaaatgagcctggatcttcatttgctctgcggctcttgttc

SEQ ID NO: 437794 - DNA, 122 bp, Homo sapiens
atgtagtttgaggaagtctaatttagaattcacaggccatggatttagtccctgctctgccgctatacactattctctgacaataggcagcctagaccaaggattcttagacttgagtgagt

SEQ ID NO: 437795 - DNA, 122 bp, Homo sapiens
atttttaccacatactgccctgcagcctggggccctgcccctggactgaggcgcagctaccggaatgtgctgtgctagttcacacatctgggcccttgccggtgcagctctgtctttacctc

SEQ ID NO: 437796 - DNA, 122 bp, Homo sapiens
gaacagtcatttccctaaagaagatatacaaatagccaataagttcataaaaaagatgatcgacattattagggaaatgcaatttaaaaccacagtgaaggctgggcatggtggctcacacc

SEQ ID NO: 437797 - DNA, 122 bp, Homo sapiens
tcagtttcttggtatattttagcagagtgactggcacatagtagatacccaataaatatacgcacatttatgtgtggggagaaagctaacttcaacaaaaggctgtatagcagagtggtgaa

SEQ ID NO: 437798 - DNA, 122 bp, Homo sapiens
tccttcggcccagggccactgtcctgcagtggtgagaagcctgtctccacttggtaggaccgtaattaaccagtctggaagcttccgtcaagctctgtatagaatcagccccaggcaaggca

SEQ ID NO: 437799 - DNA, 122 bp, Homo sapiens
tggcactaagaggttccttccagctcttcccctgactttcaggcagactcttctcaaggtcgggaggtgctgctccaccctcacatcagagcttcccctcccctctcttcatgtttcaccac

SEQ ID NO: 437800 - DNA, 122 bp, Homo sapiens
ggcactcgggttgagagcagagggacccaggctgagccgcggccggtagagaccatggctcggggacgctctctagctcgcccgcttgctccgtccctagttgatgatatttgatttgacct

SEQ ID NO: 437801 - DNA, 122 bp, Homo sapiens
tacagccagataactgagtacatgatttacaggaataaatgagagtcacctgtggctgtacgtttgtgtaagtccacatactttttacgtaggttgttatatttatgaattgtgctacctac

SEQ ID NO: 437802 - DNA, 122 bp, Homo sapiens
cgccgcggtggaggcgcgcgagggggacgcggccggggatgagcggattgcgggtgaactcgccgcccgggggccccgcgaagccgtgagccgctgcttttctccgagtcgccgccctgccc

SEQ ID NO: 437803 - DNA, 122 bp, Homo sapiens
tataaaataaggctcttgtttcctacatagagaatgcctgtagggtgaggtggcaggaggcggtaggagaaggactccatctgtcaaaagtgtggggaagcaccaggaatagcagcagccat

SEQ ID NO: 437804 - DNA, 122 bp, Homo sapiens
tgaactcctgacctcaggtgatctgcccgcctcagcctcccaaagtgctgggattacagacgtgaaccaccatgcccggccaaatgtataattctttatgggctgtgatgagggaaataagt

SEQ ID NO: 437805 - DNA, 122 bp, Homo sapiens
tcctgatttgcttctttaaggaagtgcgagaaggttaaagatgtctgtgatctggccaaacgaggttcacaaatgctgttttcatatttgtggttttggtgtttcctcttacacatgtgtct

SEQ ID NO: 437806 - DNA, 122 bp, Homo sapiens
tgagagactgaccggttggagatgacgatggcgtcattaaactcgctgcgacagttgtggcggagggcggtgcggcccccgttagtgatgactgcgttactgccgtgcagctgatggaagcg

SEQ ID NO: 437807 - DNA, 122 bp, Homo sapiens
cctgatgaatttttaccagctgaacacctgtgtaaaatatggctcagatcaaaaaccttccgtcacaaccatctgatggtaaccaccatatgaggcagtgtatcttagtagttaacaagaac

SEQ ID NO: 437808 - DNA, 122 bp, Homo sapiens
ctggacgggcggggcaggcgtcctggttgtgacgcacgccaccgcgggcgtgcgcgtccccgcttagcaccggccctcagtgcgcttgcgccactagatgacccgccccctcgggctgtcgg

SEQ ID NO: 437809 - DNA, 122 bp, Homo sapiens
tgctaaataaatgctccgttcacccttgtgaagtttcctatgcctcactcgcgccagcaccgttcacagtgcccactggctgtatttatcgctgacataaggatgaggcctggaattgcatt

SEQ ID NO: 437810 - DNA, 122 bp, Homo sapiens
ccaaaagaaaaaataataatcttgacaaccccacaataccaagtgttatgaagtggaacacgtaggacttacccactgccagtggaactctaaattgctataactacttagtcaaacaattt

SEQ ID NO: 437811 - DNA, 122 bp, Homo sapiens
ctcggccttcctcgctctcctggtgccaggacccgcacgcacaaggttcggaagttttttcgcagtgtctgacccctgccggtcccctgtatttaccacctgaccctctagcgcgcttagga

SEQ ID NO: 437812 - DNA, 122 bp, Homo sapiens
gtgtgtggctaaagatagtgtgtgagcgcctggacagatggttaccctgcctaggccatgcgtgtgtgagtgtgtgtgggtacctcattctgctttgtgtaaattcagcttatccgggagct

SEQ ID NO: 437813 - DNA, 122 bp, Homo sapiens
aagggctttgctttgtgctggccggaaagtccagctcctccctgaggacgacagaccccccggcgatcaggaccctggccacttctcagactttagcgcatccactcccagcaccccgcaag

SEQ ID NO: 437814 - DNA, 122 bp, Homo sapiens
attattcctttcctgaatcgtatctgagccaaaggccctatatggccaagattccctgttcggtgatgaaatgccagcacatgacattctttctaatgagtcacagtcaataaaaaatgttt

SEQ ID NO: 437815 - DNA, 122 bp, Homo sapiens
ctccagatgatctcaatgcttgctcaagtttgagaaccactgaaccgcagtatgactctccgtgtcacctggctaactctgcctcactttcaggtctcagtgtagacaccacctcttctagg

SEQ ID NO: 437816 - DNA, 122 bp, Homo sapiens
aaatttgcaccattttcttgccttctcgctcccttgttgtttattattgttctttttttgcgatgggtctctgttacctaagctggtctgaactcctgagctcaagcgatcctcctgcctcg

SEQ ID NO: 437817 - DNA, 122 bp, Homo sapiens
cgccgcagtcccgccggcagccgccgccaaccaccaccatcaccaccaccatgcgctccacgaggcgcccaagttcaccgtggagaccctggagcacacggtcaacaacgactcggagatct

SEQ ID NO: 437818 - DNA, 122 bp, Homo sapiens
ttactaggtcttgggctcagagatggtttcaggtcggcgttccaaggcgctctcctccaccggaggctcgaagtaggagttcagagccctctgaaaaacaaaggcacaagggatgaggtttg

SEQ ID NO: 437819 - DNA, 122 bp, Homo sapiens
tccgcccccggctccgcaggtcgccaaggtgggctggaatctgtggccaggcgcggagggcggggtctgcacgcgccccgaggtcaccgcggcctcccccggacccgccccgccgacccccc

SEQ ID NO: 437820 - DNA, 122 bp, Homo sapiens
aactgttgtacttgcaaatgacttacccggatcacatgatgcgctaaatgtagggtgggccggtgggtggaggctgccgagttgcgagccccggtctagtgtggggagcctcgccaggcccg

SEQ ID NO: 437821 - DNA, 122 bp, Homo sapiens
ctacacggtgacagtgccagattcctgctttcccgcgaccaagcccccgctgccccacgccgcctgccactcctgctcagaagacagtggctctgacgtctccagcatctcccaccccactt

SEQ ID NO: 437822 - DNA, 122 bp, Homo sapiens
cattttcagacctgaatgtcgtgaccagttagcagtatctcaacagttcttccagtctaacgtgatactctaggtgaaaattgcaggttctgttctgaactcataatcttaagctgctgaaa

SEQ ID NO: 437823 - DNA, 122 bp, Homo sapiens
gcagaaaaacctaaatagtcccaagggaaagtagcactacaggactgaaaagtccagcagcgtgggatgatgcggccacatcctgctctctgtttttcccaagcagaatgaggagagccagc

SEQ ID NO: 437824 - DNA, 122 bp, Homo sapiens
ttccctacctgtttgtggtgtctttcgggggaccccttggcaaggcagctgcggctgagacggaggtagccccccagaaccaagatctcctcggcagttgggtaccgcttcttcccagcccc

SEQ ID NO: 437825 - DNA, 122 bp, Homo sapiens
ccaactgtctgcagacacagttctttgagtttctgcatgacatctgcagtccgcactgatcgcgggagcctacccgactcctttgctctaagctctgtgaatgtgccaggaataacctccaa

SEQ ID NO: 437826 - DNA, 122 bp, Homo sapiens
tcggcttcgcggcggtgcaggcggcggaggcggaggcgcaggctcttctttaggacctggcgagcccaggtctaagcggcggccccgcgaggcccttgcacggcgccccgggtcgaggccct

SEQ ID NO: 437827 - DNA, 122 bp, Homo sapiens
aaggagggagcctctcttggaactgtgagctgcctgcactgcccgcggttgggggaggggcgatgcaagcactcactcacttggctactcctggctagtgtcttgctagtttgcgcgcaccc

SEQ ID NO: 437828 - DNA, 122 bp, Homo sapiens
gctgatgaaagcgtctgcgtagcggccactcagactgtgtcaaatattcctccggcgtcccgccccgggctctctctgcaaaggcccaacctcctcacagatgctccgctgcctcgttcagc

SEQ ID NO: 437829 - DNA, 122 bp, Homo sapiens
ataatctccagagtgggagatgatattactcacaatatgacaaacaggaggtgagtccagcgcggatcctaagagccaggggggcaagaggggctggctcttactccccgcatcgcgggggg

SEQ ID NO: 437830 - DNA, 122 bp, Homo sapiens
aggtttcatgtgttggccaggctggtcttgaacccctgaactcaggtgacccgcttgactcggcctcccaaagtgctgggattacaggtgtgagccaccacacccagccatagacaagttgc

SEQ ID NO: 437831 - DNA, 122 bp, Homo sapiens
tagtcagggagtctccgccctcctcccaggtttcctcctcccaggcgcctcccctggacccgcccccatctgcccaagataattttagtttccttgggcctggaatctggacacacagggct

SEQ ID NO: 437832 - DNA, 122 bp, Homo sapiens
ggtgatgaaagtgctctggaattaggtagtggtgatggttgcacaactctgtgaatataccgagaacctttgaactgtacactttaagtgggtgaattatatggtgtatgaattatagctca

SEQ ID NO: 437833 - DNA, 122 bp, Homo sapiens
ttggcaaatcctactacctctgctctgtttgctacgattctggtggaatatctccttgatcgcctgccagaaatgggctccaacgtggagctctccaacctgtacctcaagctgttcaagct

SEQ ID NO: 437834 - DNA, 122 bp, Homo sapiens
cttgtattcaacccccacaccctgcaagaagtaaggatgaccctgacttctgacacctgacgttggctttgcctgtttctgaatttggttgcagaatcactcagcatgttctaagggcagag

SEQ ID NO: 437835 - DNA, 122 bp, Homo sapiens
tactgccaggctgacacccatcctccctgtgagcagcgcctagaaacacctcccagctgccgcctacttgcccaggctcaccctgccctacacgggcgcaccgcctcagggcttcctgaaac

SEQ ID NO: 437836 - DNA, 122 bp, Homo sapiens
ctccgtcagccgcgcgccctgatgcagtgcacaaccttagctgctgtgcgcgatggggggcgactcctcggcctgcgagcagagaggaaagttcagattcttctaacatagagaaccagcct

SEQ ID NO: 437837 - DNA, 122 bp, Homo sapiens
ctcccctctcccccattcacgccactcaaaagcacactagaggggttttgagatgaaatccgcacacttctcagagccttcccagaccaatgcgcggatgagaacgtgcccattgcggggat

SEQ ID NO: 437838 - DNA, 122 bp, Homo sapiens
gtgtttctattttccattcatacagtgcaataacattttttaaattgcaaaaatggataccgaattataaagacagtagtgcttttgaaacaaatgttggctggcatgtgaggtaatcatag

SEQ ID NO: 437839 - DNA, 122 bp, Homo sapiens
tcccgaccacttaagagtcattcacaggctcagaccccggcttcctaatttccctccttccggaagatgcgttggccttggcggctcccaggcccaagttatcaggcacactttgcggtcca

SEQ ID NO: 437840 - DNA, 122 bp, Homo sapiens
aattcccaatgttggaggtggggcctggcaggaggtgtctgggtctcagggcgggtccctcgtggcttggtgctgtccttgcaatagtgagtgagttctccggagctctggttaagtgcgtg

SEQ ID NO: 437841 - DNA, 122 bp, Homo sapiens
ccagagcaggtggtaggtcagagacccaggaccaagcaagcatattctaactagaacattcgctcttaaatcactatgctctactccctccagaatatcagaagtgttactgaaaatacata

SEQ ID NO: 437842 - DNA, 122 bp, Homo sapiens
cggattcggggaaccaggggaccctctgcacggtgagggtcgaggcttcgtgtggagcctcgccgggcagagagcctcggcccctgggatgatcgttaccttgggaagaggagaaggagtgg

SEQ ID NO: 437843 - DNA, 122 bp, Homo sapiens
cagcacaggtgtggtgctgactgttcctattcactacctgtgctctggataggtgagccccgggtgctctaagtgtacgcaagaatagtggtaccttcaagcataggtacactgtcagatat

SEQ ID NO: 437844 - DNA, 122 bp, Homo sapiens
tgtggtcctcagctgctccatcaaagccttaattgaccttttggcattgctccttggtctcggggcaggcgccgtcgaacgggatgcacaaaagcacagggatcctcctcacctgcggcgtc

SEQ ID NO: 437845 - DNA, 122 bp, Homo sapiens
ctgactgaatgtaacgacactggaacaacatactcggtcagtgctcatggatcaagcgaccgtggtcactgtgaaatactccacctcagcaatgcactcatggttctgaccatcagaactat

SEQ ID NO: 437846 - DNA, 122 bp, Homo sapiens
aggcacccccgggtggccttgttgtctgtttcctggccgagtttgtgttttgctggctcgcggagttttctcctggctacaggcgagggctgcgcgtttcaggaaaaaccgagcgggcactg

SEQ ID NO: 437847 - DNA, 122 bp, Homo sapiens
cttttgggtagatggaggggggaaagagggtggccagtgggagaagggtaaagagagtggcgagccggaaagagaaaaggttttgctaaaagacgataggcagaaaagaaagtgtagaaaga

SEQ ID NO: 437848 - DNA, 122 bp, Homo sapiens
cgtatacagtcagggccagaacgagaagccgggggatcccgtgtagagtcagggccagaacgagaagccgggggatcccgtatacagtcggggccagaaggagaagccaggggaccccatct

SEQ ID NO: 437849 - DNA, 122 bp, Homo sapiens
agggcctcggactcttgccttagcagaatcaccaggcagagtcatagagatagaggcttgcgtggctttgctgacacagcttgcttgcctcaagaggcttctgtgggggccagggtggaatg

SEQ ID NO: 437850 - DNA, 122 bp, Homo sapiens
ctttgagcacctttcccagaatctcaggaatgtatagacccccgccccacacttcatacccgccctaggccttggtgatgaggcccctcacagcttgtgcaatggcatccctgtcgatacca

SEQ ID NO: 437851 - DNA, 122 bp, Homo sapiens
gttggtgggcctggagcaaagctccagccagggagaagagtctgtggcaagaacacaggacggctgtgggtctggtcactcaagagtcaggcacttcctgtgcttcaggccccctgcagaaa

SEQ ID NO: 437852 - DNA, 122 bp, Homo sapiens
tgatcacctccactcctataggtatgagacagagctggccatgcgccagtctgtggagaacgacatccatgggctccgcaaggtcattgatgacaccaatatcacacgactgcagctggaga

SEQ ID NO: 437853 - DNA, 122 bp, Homo sapiens
gaaggtactttaaactttcacaactttattaaccgtggctgctcccattatgattttgttcggcagtggaagtttcacctgcttctccagagcgcttggcgtctttgttccaaatttccttt

SEQ ID NO: 437854 - DNA, 122 bp, Homo sapiens
tcttcaaagggcggagcctgtgcagtgagcgtttggccacctggtcgcacaccgagtgctcgtcagcgcgcatggcctgagcgttctgccctgacactcgctggcctctgggcgcttctgtc

SEQ ID NO: 437855 - DNA, 122 bp, Homo sapiens
cccgggggacgtccgcgggaggcttctggatttcttcgccttgggctgcgatttctgaggcgctgctctgcctattccgagctgggccagccgggggcagggggcaggtcgcgagtcccgcg

SEQ ID NO: 437856 - DNA, 122 bp, Homo sapiens
caaggagagagccccacgcctgcgcactgcgagcactggaccggcgggcggggcggggagcgcctttaacgcggctctgctagtgttcccacccccgccgggccaaccccgtgcgcaggcgc

SEQ ID NO: 437857 - DNA, 122 bp, Homo sapiens
tggctctcattcactatcaggcaaggagagaacaaatggtgattaaaaccactatataatcggattaccatttttaaaagaacatgtctgatgaaatgtgtcagacagacttacacaatagt

SEQ ID NO: 437858 - DNA, 122 bp, Homo sapiens
ggagatcccagacctggaagaatatgcacatacacaacttagcggcacttggggtggctgcgtccatgtagaatcggcttctgacgagttaactaaaaaggataaaggggccaggcgccatg

SEQ ID NO: 437859 - DNA, 122 bp, Homo sapiens
taaataaaaataaagattagctgtcaaacgtagtaagtctgagaggttcaggccacatgccggcttatcattgatgtttctactcaaataccaccttccctgagagaactttcctcgccccc

SEQ ID NO: 437860 - DNA, 122 bp, Homo sapiens
gggctatttattggattccctcatcctgtaacacaaagcagttgatatttttgcacaaggcgcaatgcctaccaccccatcaaattctgctctgtgggggactgctgactgtgctactcaga

SEQ ID NO: 437861 - DNA, 122 bp, Homo sapiens
gtggattgcacaactccagggagtaccgattcattcatatagttatctgaatggtgctcccggacattggactgtgtacaacttgcacatatgtttggagtggccctggttgggggattgag

SEQ ID NO: 437862 - DNA, 122 bp, Homo sapiens
aacaagcctgtaacgtgacagatctgtatcccaggggctgatcatagagaaaccacaaagcgatgttttagctgcgtcgagtcctcaacacgggggacttccagcctggtaccaggatagcc

SEQ ID NO: 437863 - DNA, 122 bp, Homo sapiens
ggctgccgggtggtgctgaacctggcgccaacgtgcagaatccgccggccctgcgcgctgcgctccacgtaggtcaggagtacccgcggcgccccattcccaaccctccgggggcacctggt

SEQ ID NO: 437864 - DNA, 122 bp, Homo sapiens
actaactcgaagtttcgaaaacaaagcacaaatgcaggatgttgagtcccaactcctttccgcttcaagtcacctcaccactggagactccgttctgaccagttttaagcccctgtcctctt

SEQ ID NO: 437865 - DNA, 122 bp, Homo sapiens
acctcgacctctggaatctagggtctgtgttcttgagcatctctgctgcagacatgcgggcgctggtgtctgaacgactgccctttttcagcagcagagctttgaagttgtcactgctggtg

SEQ ID NO: 437866 - DNA, 122 bp, Homo sapiens
caggagcggggtgacgaacaagatcacgaaggacttgaacttggagacatagctcagcgccgaggccatcgcgcgggagggagactggcgggcgagacgagtgaggggcagctagaggcgcc

SEQ ID NO: 437867 - DNA, 122 bp, Homo sapiens
tctgccctccaagtggaccctctggggcccactttttcagcttccacagaagtgagagcacgcggggcccgtctttctgtgcctgactgactccacttcacataaaggccccgctcccccga

SEQ ID NO: 437868 - DNA, 122 bp, Homo sapiens
ttttcctcccaccaaggctcaacagcttatattagcttcgaaagtaaagctacaaaccttcgcagggagtgtcatagctcacaaaggcaatatagtcccacatagcaaaacaacaaaactcc

SEQ ID NO: 437869 - DNA, 122 bp, Homo sapiens
ggcattcccgggcagattcctggcttggggactaatgccccagaggctccaggttacccacgggctcagggatggctcccacggggtgtttccagttcccgggagagtcgagtaaggtcccg

SEQ ID NO: 437870 - DNA, 122 bp, Homo sapiens
ctctggttcgttcaacaaatgtttattgagctcctactacctgccagacccgcagcgtgccgggtgctcgggataccacagtgaaggagatgtggtccccagcatccctagtgggtaacagt

SEQ ID NO: 437871 - DNA, 122 bp, Homo sapiens
gccctcagggagcagcattcacaatgcatcaggaatttttggaattacaactgtgactaacgcctttaagcaactgtcagctggctggccccagggctacatcctgcaatttgcacctgtct

SEQ ID NO: 437872 - DNA, 122 bp, Homo sapiens
aaacctatagtgtcaagctggcagaattttgtaactatcttgaccaatggagtataatcacgtaatgccatgtgccttccaaggctagatgataagaacaccttgcactttggccttgccta

SEQ ID NO: 437873 - DNA, 122 bp, Homo sapiens
gatgctaaaggttaagatgcaagaacacgagtgtcaagttctggttccagactacatgctcgtggccactacactctgctgctgcctcatattctatatgccttgtacactgtaactccact

SEQ ID NO: 437874 - DNA, 122 bp, Homo sapiens
ccacccccgtcattatccctcctcaaccccccaacccaccctccgcgccctgcttcctcacgtcccccagccagccccagcgtttccctcggcctcggctggccccctggccacccccagcc

SEQ ID NO: 437875 - DNA, 122 bp, Homo sapiens
tggaaggggcaggcatttatggtttgatgtaagcgcaagccagaataataattgtgttagcgatggcaagagtcactgaaccagtgtggacaaaacaaaatgtttgaatgagttactggctg

SEQ ID NO: 437876 - DNA, 122 bp, Homo sapiens
ggctttgccgctcagccctgggctttccagagctttctaggggtctcctaagagggcaagcgggtggtactttctgtattttaatattgtgttagaatctgggacatctgattgctgaaatg

SEQ ID NO: 437877 - DNA, 122 bp, Homo sapiens
ccggcccagctaggaaacggctgcggtagggacggactgattgggtaagagccagctcgtcgctctgttaggattggttgaatgagtcttttcgaagtttgcagcatccaatagaaaggtgg

SEQ ID NO: 437878 - DNA, 122 bp, Homo sapiens
agcaaaatgcacaaagacgcagagagggggaggtacccggcgcggcgccacgcgcaggtccgggttcgcagacccctggggtcagactcccgccctggggccccgccctccccctcctcccc

SEQ ID NO: 437879 - DNA, 122 bp, Homo sapiens
ggcctcctcagagctggaataaatccaggtattttccccctggcttgcatgacctcacctcgcctacctcatttcccacctctttctctggttcactgggatttcttgctgttcctcaaaaa

SEQ ID NO: 437880 - DNA, 122 bp, Homo sapiens
ggcggcccccggaggcgggtttctttgtccctgactcccgctgggcgcgaaggccgccggcggctaacagaaacccgagcccgcgcaacggagctcaggcttccacgtgcggccccgcaggg

SEQ ID NO: 437881 - DNA, 122 bp, Homo sapiens
gacctttggggttcacatgcccagggcaaacctgccccccacaggatggtcccaatgagccgccgtagtttaagttctcacaggcaaggcccgacctgaagcactggctccagccttaggga

SEQ ID NO: 437882 - DNA, 122 bp, Homo sapiens
caggagcggggttccaggctgagaccgggcctcggcggcgccccttcctgccgggagtggcgcatcccaggacccacagacaaacagggccagccagggtcacccggagcgcgaaggccggc

SEQ ID NO: 437883 - DNA, 122 bp, Homo sapiens
ggtaagccaggcatgaagatcacaaggcagaaacatgccaagaagcatcttggcttcttccgcaacaacttcggagtccgcgagccgtaccagatcctgctggacggcaccttctgtcaggc

SEQ ID NO: 437884 - DNA, 122 bp, Homo sapiens
cgccccagttggtctcacagttgcactgccagggctccacacaactgccatgcacgcagccggggtaggggacacactcatcgcagaacctcccttgccagccgtagctgcacctgggggaa

SEQ ID NO: 437885 - DNA, 122 bp, Homo sapiens
gcggccgccaccccgagccagccggggagccggcgagaaggccaggaagctgtatggcagcgctcctactcacctcacaggccgactcccgaggcgcacgtcgctggcgggctcaggcagca

SEQ ID NO: 437886 - DNA, 122 bp, Homo sapiens
gtcaggcctggacgcgctcagtctgttgactcagtgcgggtgacccagctgggatctgtgcgagggcgcggccgcgcgcacccgcgcgctcctggcgcaggcagagctggcggcgccgaagt

SEQ ID NO: 437887 - DNA, 122 bp, Homo sapiens
gctttccatctcagcgtccgacgtggactgcgagcattaccttgccacacaccgggcacccggaaggctccttcttgtaacggaccaggttctccccaccggcctccaggtcctctcgcttc

SEQ ID NO: 437888 - DNA, 122 bp, Homo sapiens
gggcggccctgggctcccattggctcccccgggtcgaagggggcggggcctcgggcgccgcgcttcctcccgccgtggcttccgcgtcgcttcccggtcagctgcgtccttagcgggagccc

SEQ ID NO: 437889 - DNA, 122 bp, Homo sapiens
tttcatggggcctgatatggggctctgtgattccaagggcagcacggctgggtggaaaatcgcagtgagaaggtcatcaaggtgttttccacgctagaagcaccctcaactcaagttaaaca

SEQ ID NO: 437890 - DNA, 122 bp, Homo sapiens
gggggcagcagggaggagaagttggcccccaaactggacggccctcacctcctcaccatccgaccaagagttgtctgggtctggagcaaagcacaacggggtctgaaactttatgtcatttt

SEQ ID NO: 437891 - DNA, 122 bp, Homo sapiens
gggaggctgtcgcaaaggctcctttgtgaaaggcacttgcaggttcagaagccagcttggcgcctcctctcgcccgttccccgaggacacctggctcttctgggcagcccagctatctccgt

SEQ ID NO: 437892 - DNA, 122 bp, Homo sapiens
gcgtggggatccattgcttccgacgctactcctgccgggtcaccacaggcgcacgtgttccggcagggcgcggcttccggtgacccagctccgccctaagccccatcccaagccccgcccct

SEQ ID NO: 437893 - DNA, 122 bp, Homo sapiens
ttctaggtaccaggaatccaagcaaagatgtttgggagacacacaggttacagataactacggtcagtgtggtcagtgctatgacagaaagacatgcctcaggaatgcgcctaatcaaacat

SEQ ID NO: 437894 - DNA, 122 bp, Homo sapiens
ttggtgccagtcaagcaaagagtattatgatggaaaagaccagtccaagccccatcgctccggagtgggagccagtgttcttgctaattgtttctttctgcactaaccactcagatgtctaa

SEQ ID NO: 437895 - DNA, 122 bp, Homo sapiens
attagagtccagatttacaccaaaaaggaccccctttttcctctccggaccacgtgaccccgcccacgtgacgtcccctccgccaatggccgggccgtctccccacggctcccggtaatgtg

SEQ ID NO: 437896 - DNA, 122 bp, Homo sapiens
cctgacctcaagcaaccatgaactcagctattaagaaaatcacatttccagggcagcagccgggatcgatggtggcgctttctcctgtgcccacccgtcttcaatctctgttctgctcccag

SEQ ID NO: 437897 - DNA, 122 bp, Homo sapiens
cagtagcctcatttaaaggacagacgtggctagtgcaggtctagaacgtgtccatcactgcggaacgtactgagacttcctgcgtcggtggaaacattccgtcatctacaccggccagtcct

SEQ ID NO: 437898 - DNA, 122 bp, Homo sapiens
ggtgtgcctggttcctcagtgtttatattttcaaggcgtttatcattgtgcacttagagccgctgtgattgggactgattgttgggaaccagccttactgattgaacccagaagggtataat

SEQ ID NO: 437899 - DNA, 122 bp, Homo sapiens
ttttttttttttgaggggcggaggtggtcatttttatgttccctgggcaaagcgagcagccgtttggcttataaaatagcaacgactgcagtggcccacactgtcatcacgaaatgccgcct

SEQ ID NO: 437900 - DNA, 122 bp, Homo sapiens
gaggctggggggagttcctcgccggtcccagcggtagggcttggcggccgcggagggaagcgggcaggtccccaggccctggccacggccctgcgccccgctgggctccccctccccaccct

SEQ ID NO: 437901 - DNA, 122 bp, Homo sapiens
gtagagatggaggaggtccttcttcattctattgtaacctcccaatgggttcactttgtccgcggcctagacacagccgatttctcaagacaggggaattgcaatagagaaagagtaattca

SEQ ID NO: 437902 - DNA, 122 bp, Homo sapiens
cggcctacaaaatggagtcgcagccgtcaactcgccctcggcctttttgcggccctttcacgacagagccgggcccctttacggtcacgccttcggcaagaccaggtagcgggcgcgtgcac

SEQ ID NO: 437903 - DNA, 122 bp, Homo sapiens
ctgtgccgtctcagtgcgacccgcccagaggcgcgtgacacgggcgcatcccagcactggcgatgggagctctgatcactcgggtcagctggggtcaaacaggctgctccactggaaagcca

SEQ ID NO: 437904 - DNA, 122 bp, Homo sapiens
cagcccgcgggagtcagcggagacccgaccagcactatccagccctctgcaccgcccccgcggcgaggtctggaccaagtcgcccctagcaacaacagccgggccggctttctcaggccatg

SEQ ID NO: 437905 - DNA, 122 bp, Homo sapiens
gcccgccgccactcaccgagtagccgtcagcaacgctgaacactgtgaccaccttgctggcgtcgcacaccgcgaggaaggcgccgtcgtgggagtaggccacgtcggtcacggggcccttg

SEQ ID NO: 437906 - DNA, 122 bp, Homo sapiens
gctgcgacggcagagttgggcccactgctcttgggcggcagcacggccgtgttgctgatgcgctgtgtggtgagctgccggccaccagtgcagccaggaccgcaggtggtgtttcctgcggg

SEQ ID NO: 437907 - DNA, 122 bp, Homo sapiens
ctgaggcgcgagctaggggccgcggcaggggcgcgcgcaaacgctttccagtggggattgcgcgcacgcgcaccagcggggcgggaaacgtggccgctgcgtggcggccccgcccccacacg

SEQ ID NO: 437908 - DNA, 122 bp, Homo sapiens
gacattctggaaaacaagaataagaagctgtagcggcgcctgtaagtgggccggagcaggcgcagcttggccacctcccgccgaaaggcaaggaaggaccggctgcgacacgaggaagaagg

SEQ ID NO: 437909 - DNA, 122 bp, Homo sapiens
tgacttgtctacccatattctgccctccttctcgtttccagtttaacacgaggtcatattcgttcttaccagccctgtgttgcctccagccggccctcaggccccagggttctaggtgcttc

SEQ ID NO: 437910 - DNA, 122 bp, Homo sapiens
ctccccacccaagggctacttcctgaccaagatcttccacccgaacttgggcgccaatggcgagatgtgcgtcaacgtgctcaagagggactggacggctgagctgggcatccgacacgtac

SEQ ID NO: 437911 - DNA, 122 bp, Homo sapiens
gaggccacgtgaaaagacggtgtgtggaaacaggtgggacccactgctaagctggatgcgcgagtaggacaaaaaaattggcccccactcccgggcctcacccagacacaaaagaaacgtcc

SEQ ID NO: 437912 - DNA, 122 bp, Homo sapiens
cagactccaaaaaaatctggctgtttccaaagttccccgatgacaacaacatccaagtggcgctgggaagtaattggagcaggaaagggatgtggaggggagaggagatgaagccagaggtc

SEQ ID NO: 437913 - DNA, 122 bp, Homo sapiens
cctagaactcccagaggccctgtgtcctccattcccccacacctggctggcaggaagctccggcagaccacgtgcatgtgcctgcacctgctttatgggagaattgagccctggtgacattt

SEQ ID NO: 437914 - DNA, 122 bp, Homo sapiens
cgccttgcttcggcctcagttaagcctttgtgggctccaggtccctggtgagattagaaacgtttgcaaacatgtcccggatcgaaaagatgagcattctgggcgtgcggagttttggaata

SEQ ID NO: 437915 - DNA, 122 bp, Homo sapiens
gggcctagaaattctgccacaagacgctcgcacctcccacccctcatggggcaaggggctcgccaggccctctcagagcgggagaaaagcacaggccaggtcctagggaagggggtggccgt

SEQ ID NO: 437916 - DNA, 122 bp, Homo sapiens
cgggcgccttttccagactgccttccccgcgccgtacgggcctagcccggcctcgcgctacgtgcagaaactgcccatgatcggccgtaccagccgccccgcccgccggtgggcgctctcgg

SEQ ID NO: 437917 - DNA, 122 bp, Homo sapiens
gttcatggggtaaggttaaggggtgggttctgggaggagggtaagactgtagtgcagattcgagacctagggaggtggggccagtttctcactcaatgagcctgcctgttgtttagctctat

SEQ ID NO: 437918 - DNA, 122 bp, Homo sapiens
ttgtcgttgctgctcactgtgcttttcaagatttcgttctggacagaggaaaggcgagggcgagaaaagtggaaagagaaattcagagaggatacctggttccacaccaacccggagcttcc

SEQ ID NO: 437919 - DNA, 122 bp, Homo sapiens
gcccgggcgcacccgggagcgcagggcgccccacgccgcagccgcagccgagcgcgccggcgcccgcctcccccgcccggctcgcaggccccggctcctcaagccccgagggccgcggggcc

SEQ ID NO: 437920 - DNA, 122 bp, Homo sapiens
gaggcacaggggccacagatcaacccacagaccccaggaggtctgctgctagagcggggtcggagaagggccaggaagcagcggtgggcaggaaaggagggcaggaagggaggtctaaggtg

SEQ ID NO: 437921 - DNA, 122 bp, Homo sapiens
tcaatcactagaacggcaagattctagcagtggttaagtttttccacagccgaaggacaccgtcaaggtctgccttgcatctgtcactcacacctccaggatctccgtcaccccaatccccc

SEQ ID NO: 437922 - DNA, 122 bp, Homo sapiens
cttctcatggtttctagcttgtccctgctcactcactttataatgatcttcccttcttcacggccttccctatggatttcaagctctaccactggacatgaagacaactacgttaaacacac

SEQ ID NO: 437923 - DNA, 122 bp, Homo sapiens
gttcttgaagatcagaatcgtggtctctgtgtgtggggggtgtgggagagggttgagaggcgtattgactgaaaaggagtactggggttttctgggatgtaataatgttcagtgttttgacc

SEQ ID NO: 437924 - DNA, 122 bp, Homo sapiens
ctttgcaactgcccaacctccatggagctgattcattagggcaaagtacagcccagataccgcagcccaggacccgcctgacttgacgaatttgctcagaaccctgtcagagactggcgctt

SEQ ID NO: 437925 - DNA, 122 bp, Homo sapiens
agggtcgcggcacgctggaaagcagtttggtgatgtcacatcaagtcagcagatgtcttacgtcccagcgatcccacgcgcgacagtcatggaaacacaggtgcacagaaagagctgcacaa

SEQ ID NO: 437926 - DNA, 122 bp, Homo sapiens
gaacccattacttgaaggggcggccagccaggcccaggcctggcctccaggcttcagccccgcccttcagatgcaccacgtgcctgggccttgccccagctcggccccgcctcccaaaccag

SEQ ID NO: 437927 - DNA, 122 bp, Homo sapiens
gtacccgcctccccgcctgccagactgaggaacgccgagcctgcaggtgggaaacagaaccggatgcgcgccttaacagttgtccgtttagcaggaggttttgagctcccgcgagcttcttc

SEQ ID NO: 437928 - DNA, 122 bp, Homo sapiens
cagactgagatcatgtggctgctggaggccaggacgaacgtcgggaaatggagactcctgcgttgctggtgggatgtggtgcagccgcttccaggagcaatttggtgtcccgtcctaaagct

SEQ ID NO: 437929 - DNA, 122 bp, Homo sapiens
gggggcctgtctacataagtttctttctttaatccaaagcttgagcaatcctggtttgtccgggtctgtaccagttttaacattcaagtcctaggtcctgcaaaaccccttaataccacgcg

SEQ ID NO: 437930 - DNA, 122 bp, Homo sapiens
tggggccaagaggggccctgagagggacaccgggtggacagccccaggggcctccttgctcggccagccggcatctccccctgctcccagcataggagggccggtggcctgagtgctctgct

SEQ ID NO: 437931 - DNA, 122 bp, Homo sapiens
catcttggaatattttataacaatataaataagattctggtttgcttttccttttcgtctcgtaaaggagagagaagtgcagagttcgattctgtacaagggggcagcggcagaaggccggc

SEQ ID NO: 437932 - DNA, 122 bp, Homo sapiens
tcaccactccacgccatccgcctccaaagcccggcactcacctgccccgcgcggcaggcgcgccgcacccagcagcagaacccctagcagtgcgatagagaccccgcagttcaggccggcca

SEQ ID NO: 437933 - DNA, 122 bp, Homo sapiens
cacggtacgtgctgttgaactgctcctcccgcggctttgtcttggcattatgcacctccacgccatccacgtaccagttgaactggacctcggggtcttcctggctcacgtccaccaccacg

SEQ ID NO: 437934 - DNA, 122 bp, Homo sapiens
tgcaaggcctcagatctttctgctatgagtccctcatcgttgacttgggaccacagacttcggctagaaagctcactgtcatgctggatgagggcatggctcaggcaccgtggcttatcgtt

SEQ ID NO: 437935 - DNA, 122 bp, Homo sapiens
aaaaagagtgaaaagatggggaagaagaaggaagagaggagtgagatgccagaattccttcgtgtgcctccagaattcccaggaaatgctcatgatgttagctcatatttgctgaagtccag

SEQ ID NO: 437936 - DNA, 122 bp, Homo sapiens
tcggggggccactgggaattcagtgaagagggcaccctataccatggcagtgcccggcgacgctgcacgagtcagggacaagcccgtccacagtggggtgagtcaagcccccacggcgggcc

SEQ ID NO: 437937 - DNA, 122 bp, Homo sapiens
tgagtttagggaaggctatttcctcttcagagaaagatacctgctaaagtcgcaggtcctcgagaaacttgctttacgtctctgagccttgttttccttttcaaaaaatctctcatgcttta

SEQ ID NO: 437938 - DNA, 122 bp, Homo sapiens
acaaagagatcgatcagaattttcttgcctcctcggacggcatctgacctggctaggttgcggggatctgttggagagagaagcgtgtcatggatcccgcatcgaaaacagccttgaagagg

SEQ ID NO: 437939 - DNA, 122 bp, Homo sapiens
agatgccccagggagcgggccgaagtgggccggcaggctgggcggccgcggtcggctctgcgaggctgctggttggcgtctgctggcggctcagctcagcctcacatccttctccgtcccac

SEQ ID NO: 437940 - DNA, 122 bp, Homo sapiens
ctctgcgatcctgtcgcctagtactgagtgaaggggtcttcatcctaacagacggatgcccggttagcatccttgggctctctaagagtccatttctgtgtatatttgcatctttttctggt

SEQ ID NO: 437941 - DNA, 122 bp, Homo sapiens
gctggtcgtgccgccggattcccgcgcggggcggggctgccccgcccttggctccgcctccgccccgtccccgcacacctggcccgcaggtagccggcaccaggagccttagagaagctgta

SEQ ID NO: 437942 - DNA, 122 bp, Homo sapiens
gccgcgtcgggggaggacaacaaagggccgcgggcggcgggcagtggtgtcccagtctcccggtgcttccctgaggctgaggcgcccggcctcccgcccgccgcgctccagatgaagtgtga

SEQ ID NO: 437943 - DNA, 122 bp, Homo sapiens
ggtctggctctgttgcagaggctggagtgtggtggcacattctcggttcattacaacctccgcctcccaggctcaagcaagccaccctcccacctcagtctcctgagtagctgcgactacag

SEQ ID NO: 437944 - DNA, 122 bp, Homo sapiens
cttgactagaagtgtggggcccttatcgctgagtttgtggtcccccttttctctcagctgcgtgacttcctgttggtctacaatcggatgacagaactctgcttccagcgctgtgtgcccag

SEQ ID NO: 437945 - DNA, 122 bp, Homo sapiens
gaacccagcatttgcccaggagacgtttttgagcaagcctcttttggatgagcatttgaacgggcagaatggtattccggcaaggcattcatcagcaaggtcttctattcttacaagcttat

SEQ ID NO: 437946 - DNA, 122 bp, Homo sapiens
acaggtgaatgccttactctttccacgagccaggcctttcctttgcatgacgcagaccggcggctgagacccgtcctgaggccccgcctttcattcggtttatgtggccccgcgcagttcac

SEQ ID NO: 437947 - DNA, 122 bp, Homo sapiens
ggcgcacgccgtgcgtcccgctggagacaacctgaggtctccgagctggtgccccggctacgcgactgaatcccgaacgcaccccagatttggagctgcacacccaaacggcattggtaagt

SEQ ID NO: 437948 - DNA, 122 bp, Homo sapiens
ttctcacatccaactctggaaaatacttaggctctgcgctcatgatgtggttggatctctcgctctacttctttgcccagttagctcagcaccatctatatgtctcttttgtgagggcaggt

SEQ ID NO: 437949 - DNA, 122 bp, Homo sapiens
tgtggggcggagaaccccagccaatcagtggtgctagcgtgaaaactgcccaatcaggtgcgcagctagagaggaagaggcgggctcttcaatatggcaaggccttcgtctcctagcttcta

SEQ ID NO: 437950 - DNA, 122 bp, Homo sapiens
aaaggagaaaaggaagttacttcagaccacgtgatccattccgtgctggccccacagctccgcccctgtccacttccaaattagcccgcgttttctgagctaccagagttgtgcactgggtc

SEQ ID NO: 437951 - DNA, 122 bp, Homo sapiens
tccgcgaggcagggagcactggggcagggtcgtgggcaaatagccctctctgcctgacctcggttggcaaccccgactgtctggcagatggtggagtacaaacgggccacgcttcgggatga

SEQ ID NO: 437952 - DNA, 122 bp, Homo sapiens
gaggggaggagggtgagcacgtcctcagagggcagacccagcgaggcgtcgtggcagctgcggccgcggagacgccggctccgcctcttgcacacgccccctcgcctgaggccccgccccgc

SEQ ID NO: 437953 - DNA, 122 bp, Homo sapiens
gggcttgttggctgagtgatctgcagaggagaaagcagccccagctctgcccagaggaggcgctgaagtgggacaagcacaggaaagaaggggaccagtctaggaccccaactcgactcact

SEQ ID NO: 437954 - DNA, 122 bp, Homo sapiens
tccccaaacctgctcagttttcctattgaagaggaaatctaccatttcctgcccaagcagcgcctctgggcccagaggaggttttggtggagtggacctttgacctgctgaattgggggtct

SEQ ID NO: 437955 - DNA, 122 bp, Homo sapiens
ggggtgggggtactaagacctcctctcccactcccgcccccggcggcagtgcttgagttgcggtggaaagtcacagtccgtgcacatggcaaggaaaatgaaacagctctctggttctagca

SEQ ID NO: 437956 - DNA, 122 bp, Homo sapiens
actcggtcgcagctaaagcccggagcgtgggatccgggcccggaggaacgggatggcgaacgcgagctgcgccgcggccaggagcccgccgcaccgggcatgctcagtggcgcggccggctg

SEQ ID NO: 437957 - DNA, 122 bp, Homo sapiens
ggagtggcggcttcgcggacttcttcaccaggtacagcgcaggctgcatgggactcggggcgggtccggggccggggccggagccggggtcttggtgggagtcggagccggagccggagccg

SEQ ID NO: 437958 - DNA, 122 bp, Homo sapiens
ctgatctttacttacacagaccagacaatccgactctatgactgccgatatggccgtttccgtaaattcaagagcatcaaggcccgcgacgtaggctggagcgtcttggatgtggccttcac

SEQ ID NO: 437959 - DNA, 122 bp, Homo sapiens
aaactgaaaagtgaggttctgtggggctcacaaccctgcagcgaagactccgaggctgaacgtcaataaagcgtttactaaagcgccttaaaaaatgggccgcggggctgggcgcggtggct

SEQ ID NO: 437960 - DNA, 122 bp, Homo sapiens
ccgcattcgcagacaggcgggggacatcgcggccgcggcaagctagagatgccgcctgctcgagcaaccttccacctgcagggccggccagttctactcttccaggatcactctcgtctcac

SEQ ID NO: 437961 - DNA, 122 bp, Homo sapiens
ctttaaaaaatgttgttagtttttttaattcatcgagcagaaatgatgctcttaaacgtccgcctgtaacatgatgtttgctgtttgtattgtagtgtaaagaactggccaagtccaaagcc

SEQ ID NO: 437962 - DNA, 122 bp, Homo sapiens
caaggtgctgggacaacctgcttctcctcactcttcattttcttaatttcctgggaagaacgggtcagcctatttctttcaccctataagaaatagcatatgtgtgaaatatgttctcatta

SEQ ID NO: 437963 - DNA, 122 bp, Homo sapiens
ctctcctggtagcagtctctgcccacaacaaaccttgccttctgcccttaaggaaaatggcgcctggcatagatgcgcttccggccacggagccaaacagaacagaggaggcaagaggccgg

SEQ ID NO: 437964 - DNA, 122 bp, Homo sapiens
tgttttagactcttaccatcacattcatatttatactatgctagcagtttgaaattacaacgtacaagtagatatctatccttctctggaggaatagactgtaacttactgcactgttccca

SEQ ID NO: 437965 - DNA, 122 bp, Homo sapiens
ggagccctacctcctggggctgtacttcctccccttcggcttcgggcggttctgggcatccgcccgacactctgctccctgctgccgccgtgaggtcagtctggattgaggtgcaacgctgc

SEQ ID NO: 437966 - DNA, 122 bp, Homo sapiens
gcttgatcattgccaggacagtcttggttagtccacctacctcaagcttgttactgccttcgatgagcatctaagcctgacaatatccccatattttaagctttgagtagttctgcaggata

SEQ ID NO: 437967 - DNA, 122 bp, Homo sapiens
acccaggagtcgggggaggccgggtagtggctcgtttcatagttcagttcactgtagggacgggcagctgagtagaagtcaacgtagttgccggtggacttgagacccaggtgcatggtgta

SEQ ID NO: 437968 - DNA, 122 bp, Homo sapiens
aggccccaacccgacccggcccagcacgcagcacccaagggcggctggaagcgcaatgcgcgtgcccagtacagcgctattcagtctgcaggctttttgaggatttcaacttcaaagaacgg

SEQ ID NO: 437969 - DNA, 122 bp, Homo sapiens
ggtgggctgggtccgaggcccgcggaccgtccgaggggggcctctgggttcgaggccgcccgcaccgaccagtgctgtggctcgggcagttcaccgccctctcgggcctcagtttcccgccc

SEQ ID NO: 437970 - DNA, 122 bp, Homo sapiens
tggccctttctttcttaatttcagaatgtagtcttgttaaaaccgtttccctccctttcccgcctcacactcccttatactatgcacatttatctaactgtacacttgttaaacttacacta

SEQ ID NO: 437971 - DNA, 122 bp, Homo sapiens
gttcatcctaattgagctgaacactagtcgctgggttccacggttctctttcatgacccacggcttctaatagagctgtaacactcaccgcatggcccaagattacattccttggaatccgt

SEQ ID NO: 437972 - DNA, 122 bp, Homo sapiens
tattcactgtatgccttggcatctcctctcacaccagaaagtttaaaagaaaaaacacagcgacaaggattcacttgggccattttggaacccatttatattgtgggtgttactctgggctt

SEQ ID NO: 437973 - DNA, 122 bp, Homo sapiens
agcgccttccccccatcgcctcccctcgtccctccacgtcgatggtggtgaagttggcggcgccacggagcgcaaggcaccaagctgtctcccttgcacccagctcctctctggccccggct

SEQ ID NO: 437974 - DNA, 122 bp, Homo sapiens
acagtgcggagaggggcggggaggcggggacgtgcaaaggaacgtgacgtgacgtcagcgcgtcgccctgccgccctcagcccactggtacctggaaggagtcttattcagggattaggtta

SEQ ID NO: 437975 - DNA, 122 bp, Homo sapiens
tagattatttttgggggacaggtggttctggtctgttcagaggacctgcagagagcccagcgtgtcctttgtttccttttttttcctctttctgccccccttccccggtcaagatttctctc

SEQ ID NO: 437976 - DNA, 122 bp, Homo sapiens
gcggccctccctctagcggcggtcaaggagtctgtctctctctttcacttggtgtgtgtgcgctggcgcgtttatgttgggaaggttgatcactaagagagcttacaaatatctgtaggctc

SEQ ID NO: 437977 - DNA, 122 bp, Homo sapiens
cgctgtggacgcggtgacgacactgtggggacggtgaggacgctgtggacgccgtgaggacgctgtcggggcggtgaggacgctgtcggggaggtgaggacgctgtgggggcggtgaggacg

SEQ ID NO: 437978 - DNA, 122 bp, Homo sapiens
cacgtgtgcctgaagtcccgagccggcagcggggctggacgggtggcccctgggttcccgcgccctccagagtgaggccgctcgtgcatgggccattaaaggagtcttcagccggagaaagg

SEQ ID NO: 437979 - DNA, 122 bp, Homo sapiens
tcgaaccgcagtccatctgtaatgtgggacgctgcttcgcactgaaaaggtgtgaactgtcgatgcacacggcaacttggatgcatctccaagaaatggcggtgatgaaaaaaattcagtcc

SEQ ID NO: 437980 - DNA, 122 bp, Homo sapiens
aaaattactctcgttgccaaaatactctgtggtgtattggagagccagccaccgccgacccgcccctcgcccttgggcatatgctactacttaatattgccttgcgtttctgaaaggatctg

SEQ ID NO: 437981 - DNA, 122 bp, Homo sapiens
ggggctggggcaggcagtcttcattttctgctttcctctttagctgtactttcgagtcctcgtcactgtggtccctagagaaatctcccaactgcatggtgtccagcaggttttcagccata

SEQ ID NO: 437982 - DNA, 122 bp, Homo sapiens
ttggaggcagccagagctggggctactctcagcttccaccaagtacaaaccatgcaaccccggatgagtcattggagcagtcacagcccgggattcctccccgtctaaagcagggcccatgg

SEQ ID NO: 437983 - DNA, 122 bp, Homo sapiens
gcagggagcccgcggcagcaggagtcaccatttgtcaggaattcaattaggtgagagagtcgttattaattttataggctttcctggtcggaggaggctgtgctgggggtgagatccggggg

SEQ ID NO: 437984 - DNA, 122 bp, Homo sapiens
cacctctagtcctagctacttgggaggctgaagtgggagaatcactttaccctaggagttcgagaaggctacagtgagccgtgagccactacatggagccactacattccagcctgggcaac

SEQ ID NO: 437985 - DNA, 122 bp, Homo sapiens
gaaaaattacttaaagatgacaggaaaaggatttctatgtgcccacttactgagacaattcgttcagctggaaagaatccctgcgagctttccttagagcccatggaagagccaactgcaaa

SEQ ID NO: 437986 - DNA, 122 bp, Homo sapiens
ctgcaggatacagaaccttgcccaccccaaggagcccccacccccgccccggccccctcgcgctgctccggcctgtgctctgaccggtgaacccgcgcatcgccccccagaccgtccacacg

SEQ ID NO: 437987 - DNA, 122 bp, Homo sapiens
attcttgagatttatggtgcaccttattgatcaaatttatctggactttttttagttccccgatgtgtccctatcattaaaaaaaaaaaaaaaaaaaaaaaacccctctcaagacatgctta

SEQ ID NO: 437988 - DNA, 122 bp, Homo sapiens
cccaggctggagtgcagtgctgtgatcatggcttcctgcagcctctatccagggctcaaccgatccttccacctcagcctctcaagtaactgagactatgggtgcccaccagcacctccagc

SEQ ID NO: 437989 - DNA, 122 bp, Homo sapiens
gagttgctgggctgcggtcgtgggtgggactcgccgcagaagcaagtgccagtggcccggcgggggtctcctcactcgcgctcgctccgactagcggcggagggactgcggcaggacgcgag

SEQ ID NO: 437990 - DNA, 122 bp, Homo sapiens
tgccccaggacactgtgctcatcactttacatctcatttcatctataagactctatataacgtcatttccactttacagctgaagaaacttaactttaagttacataacctgctgactgtga

SEQ ID NO: 437991 - DNA, 122 bp, Homo sapiens
tacgtttccctgcaaccctatggttaacatttccttccaccactaggcaaggaaggcctgcgacgctccccgtctgagcatggtgctaaacacagtgcctagcacccagtaagcgcacacgc

SEQ ID NO: 437992 - DNA, 122 bp, Homo sapiens
gccagggagacgttgggcagggagctgctgccgtccaccgcctgccggcacacggggcagcgcagctcggcatccaggtggcaggacagggaaaccaggcagcccttgcagtaagagtggcc

SEQ ID NO: 437993 - DNA, 122 bp, Homo sapiens
caatttacacttgcacttccacatatggccttcaattatgtcatcaggataattacttgccgcaatcataataagttcaatggtttcccagggatggaactctcaaagcatcaaggcgcttt

SEQ ID NO: 437994 - DNA, 122 bp, Homo sapiens
aagctccccaggcccagctcaggcctcacggtggcctctccaggctcagctcctgccctccgacagcgtctccaggccccaaacggcctccggtcggtgggctcctctaggcccagcttggg

SEQ ID NO: 437995 - DNA, 122 bp, Homo sapiens
tcccgtgctgtctcagctacgccgagtcgttggctcagggcggaggattttcctattggccgcgttatttgaatggaatggaggataggtcgtgaagtaggtgctgctggttgatctttcta

SEQ ID NO: 437996 - DNA, 122 bp, Homo sapiens
tcgacctcgtccaaggtcgctgccgcccgcgcctccctttgggagggccctcgttgcacccggaaaatgggtacacaccttaggtcgaattacctggactcagccccaggaaacaaaactgc

SEQ ID NO: 437997 - DNA, 122 bp, Homo sapiens
ccctcccgtcctgggcttgagcctggtttcacaggcctctctggtggcagtggtcgccagcgacccgtgttctttcctcacacccacccacttgagcgtgccatcacgtgttctagcacaaa

SEQ ID NO: 437998 - DNA, 122 bp, Homo sapiens
gggttcctgggaagggcgctggggtgtcgagcaccttggccatcctaaacttaaacaccacgcgggctcgtaattaatccttcttgaaggaacgctgctgattccctcgacattaccaacaa

SEQ ID NO: 437999 - DNA, 122 bp, Homo sapiens
acactgttgctgagctggagtgcagtggcacaatctcaggtccctgcaacctctgcctcccgggttctagtgatgctcataccttagcatcccaaagtaggtgggattaccggcaagcatca

SEQ ID NO: 438000 - DNA, 122 bp, Homo sapiens
ggggaagtgcccaggaggctgatgacatcactacccagcccttgaaagatgagctgttcccgccgccactccagctctggcttctgggctccgaggaggggtggggacggtggggacggtgg

SEQ ID NO: 438001 - DNA, 122 bp, Homo sapiens
gtcttgaactcctggcctcaagtgatcctccgcctcccaagtgctgggattgcagtcatgcgccaccgtgcccggactacaaggtcaccattatttacaaagtctttaaactttgttagcca

SEQ ID NO: 438002 - DNA, 122 bp, Homo sapiens
tggcagcggcgggggcagagagacgggtcggcgctggggacaaaatgcctcaacgcgtaacggacgccagccacccgacagggcggggccacggccggaagtggcggagagtgctaagaatc

SEQ ID NO: 438003 - DNA, 122 bp, Homo sapiens
ctcagccgacccgagggcgccgggctgggcgggcggagtcgggccgtgggggcggggccgcgaggaaggcttggcctagcccaggccctccgcccatccgactcttccggcccttggaggcc

SEQ ID NO: 438004 - DNA, 122 bp, Homo sapiens
tgatgaacacgcggaagctcacgtagcttgctgtgccgtgagtagtaagccctttgtctccgcctccggggtctcatgtcttcttccagggtccacgaaacaggaacgagttgttagcttgc

SEQ ID NO: 438005 - DNA, 122 bp, Homo sapiens
agaggtattttgcttggcgacacttgtagccattcaggggaggaggccagagtccccagacgggttcagccccagcggtagcagcagaagcagacactgcagagctgcgcccgcacaccacg

SEQ ID NO: 438006 - DNA, 122 bp, Homo sapiens
tttttttttttttgtgctggttgttgttgttgtttaaagtggcggaaacaagacaggaggcggcttgggaaaaagtggagcagaaatggaaaaatacaaactcacccgctgcaaatggtctc

SEQ ID NO: 438007 - DNA, 122 bp, Homo sapiens
gaaaaaaaaaaaaatccaaaacactttcggtcccaagcattttggataaaggatattcaacgtgtattttcagggccagtgccttggatcatgctttggaaaacagtagtggcatagttttt

SEQ ID NO: 438008 - DNA, 122 bp, Homo sapiens
agcgtgtgaggcagcagcggcagcccgttgtcgtaagcctccttgagtgtgtacacgggccggggtcttggccgcgcgtccagcagcagccgctgcagctcacccagcacctgcagccagcg

SEQ ID NO: 438009 - DNA, 122 bp, Homo sapiens
gtaaggatccctctgcctcacaaggcctggctgagaggctctggctgagcacccccagcacgttccccaactctggagttgaaatgaggtgggactgtctgcctgtctccactttgtgaggc

SEQ ID NO: 438010 - DNA, 122 bp, Homo sapiens
tcttcggtaaagggtgtccacctctccctatggtgtggctggctagcccgggggtctctacgctgcttggtctttgttaacggagatgaaggcagtaatttttcagtaacaggtttcagata

SEQ ID NO: 438011 - DNA, 122 bp, Homo sapiens
atggccagaatagcttccgagtcagccggaagtgaccctctggaacggttgccatggcagcggctgggcgtgctgcttagcaggggaaagatggcggtgacgggctggttggagagtctgcg

SEQ ID NO: 438012 - DNA, 122 bp, Homo sapiens
accgttcctctctcgggcacagccattgtcaccattctgatcgatgacatcaatgactcccgccccgagttcctcaaccccatccagacagtgagcgtgctggagtcggctgagccaggcac

SEQ ID NO: 438013 - DNA, 122 bp, Homo sapiens
gcaaggtgcttgaaagagatatgcacgcgccgtaatgggatatcgacccgaccgggggcgcgggccgccccattaccggccgctttccgccgctaagcacatttccccttaactgtaatcga

SEQ ID NO: 438014 - DNA, 122 bp, Homo sapiens
acggctgggctattacaaccccttctacttcctgagccccagggccgcgggggcttgacccgggggcagctgctggcatcagcacccctgctacagtcacgggcctgggaccctgggttcct

SEQ ID NO: 438015 - DNA, 122 bp, Homo sapiens
tttatgtatatagatatctttgggggggtgagtaccacagaggcacatagttctgaagcacgagctaccaaaagtttatgcttttaagtataaagcctgtagttgtctcctgctatcagtaa

SEQ ID NO: 438016 - DNA, 122 bp, Homo sapiens
cggcttccctgccgcctcttgctatttataaagaggtttccattcctgatgaccgcctgccggcctgccagccttcagggcgagcggttccccacacttgccgctaggtggcgccctctccc

SEQ ID NO: 438017 - DNA, 122 bp, Homo sapiens
ccacactctgtttattcattcatctctgaatggacgcctgggtagcttctgcctgccggccgctgtgaaaatgctgctgtgaacctcggagtacaaatatttcttcgagcctctgctttcaa

SEQ ID NO: 438018 - DNA, 122 bp, Homo sapiens
gccttaaaaaaatttagaaaaacttttaaaaagttgtaaaagccaaagcctgcaaggcttcgggaagcagatatgctcatgcattaatgaaagcagcgtaaactgattcagtcttcctgaag

SEQ ID NO: 438019 - DNA, 122 bp, Homo sapiens
ttcttttgagttcatgcatgttatcatacttgtccaaggtttagttcttcatctttaaagcgaggatcattgtgtctactgcaccaaggataaactaggatcatgtatgggaggcacttggc

SEQ ID NO: 438020 - DNA, 122 bp, Homo sapiens
aggattgtggattgtttctgccgccttggttgcccatactgggcatctctgcaggcgcgtcggctccctccacccctgctgagatgatgcactgcgaaaacattcgctctccccgggacgcc

SEQ ID NO: 438021 - DNA, 122 bp, Homo sapiens
gaacgaatcctaccttcaaccggaagtttgcataagaaatgaaacttggtttacttggaacggaagcaccaacttgaaatacactttttaaaaattgtggttagcaccagaaaataagttat

SEQ ID NO: 438022 - DNA, 122 bp, Homo sapiens
cgccgctgtgcttactgcttcttagggcagaaagcgagggcgctgtgctcatgacccacccgcgcgcatgggagcagcgggggggagggctccgggaggcgcggggcgggctcggggctgcg

SEQ ID NO: 438023 - DNA, 122 bp, Homo sapiens
tttgggtttgctttttgaagaaatattattctggctacagcatggagaaggaatggaaaacggacaaaaccagaggaaagaagaccagtttgacagctgtggctatagcctgggaaaagagg

SEQ ID NO: 438024 - DNA, 122 bp, Homo sapiens
tccaggttggcgatggtctcctggcagcggcacaggcaggccttgatggacttcttccagcgctgcgagtcgctcgtgggcacgtagccgtccaggttgctctccagcttcccgaccgaccg

SEQ ID NO: 438025 - DNA, 122 bp, Homo sapiens
tgagcgcgcggcccaggctgcaccagtctgctccgccgcgccggcccctttgtctaggggcgagcctgttgttgtggctgctgctgttcaggatgtcccgggtgggaacttggaggcgtccc

SEQ ID NO: 438026 - DNA, 122 bp, Homo sapiens
gtgcagatggtaacagggtaactgggcaggcacctcccaaggaaggaacggaaaagaacccgtggaaatgtgacactaacaagaaaaaaaagtacaagagcacttaagccacaattaaatgc

SEQ ID NO: 438027 - DNA, 122 bp, Homo sapiens
ctcagtctctcctggaatccaacttaagaagagccctgcccggcctgcactcaccgtcagcgcactcccacgcgtgcacacaggggtagacagtcacggcttctgcactggataactgacgc

SEQ ID NO: 438028 - DNA, 122 bp, Homo sapiens
ggaattcagttttgcgtggcaggtactcgaggacctgtgggcagcaggcaagcccagcagcgcccgtgcagggtcctgtgggagacgccattggaaagctggtgtgggcagcctgtacctgg

SEQ ID NO: 438029 - DNA, 122 bp, Homo sapiens
tgagccagtccgccgccccgagggctccggaagcagcgggtgctcggcccacgtcgcctgcgaggccccgcactgggagcagtcgaaggaggagtctttattatttctatttcacctatgat

SEQ ID NO: 438030 - DNA, 122 bp, Homo sapiens
cccgcccggctcctacggaaacgccggctctcacgtggaggtcacgtgacggatgctgggcgggaccacgcagctttgttttgataccccgggtgtggaaatacaaacacgtggtctgagtt

SEQ ID NO: 438031 - DNA, 122 bp, Homo sapiens
taagaaacccagcatttctcttttgtttatttcagactcactgttctgtgaagtcagccacgttaatgcaccaccaggaaaactggcaaagtctctggcttcatgggcttaaacaactcttc

SEQ ID NO: 438032 - DNA, 122 bp, Homo sapiens
ggtggtcttgggaaatccaacatttgggcgggaaaacaaaaatgcctatctacctaggtccgtggacacaggcccctgatggagccctagccagggaccatgccctcctctacccagcactt

SEQ ID NO: 438033 - DNA, 122 bp, Homo sapiens
ttccgattctaccctggcaggacaaccctagctcctcgtacctggcgtggcccgaccaatcgtctgccactcagttgacctctgacctgttagtacccgcccctggagcgccgcatccggta

SEQ ID NO: 438034 - DNA, 122 bp, Homo sapiens
cccctcctccagctcctacctcaacacgcagcgctcagcgggctgccagagtgagcttcccggaccacccccaagcaccctggggcctcaccatccttcagggtccctggggcatcctagag

SEQ ID NO: 438035 - DNA, 122 bp, Homo sapiens
cggcgggcggggcgggggtgggtgggcccggcccctccgattggtcgacggcgagagagacgctcccgcacgccgccagctctgattggcccagcggtaggaaaggttaaaccaaaaatttt

SEQ ID NO: 438036 - DNA, 122 bp, Homo sapiens
cacagcttatcccaggcaccctggcaggttctcagagcctgcctcctccctgtttatatgcgtacagcctggtaacccccaggcatgcaaatatacaatctgtaacaacacacagcctgaca

SEQ ID NO: 438037 - DNA, 122 bp, Homo sapiens
tccgcccgcagatctcgcaggggtggatgtacctgaaaccagagacaagctcaggatggccgcacagcctcggggctccacggcagcgagggcactttccccagcaccttcatctgcaaagg

SEQ ID NO: 438038 - DNA, 122 bp, Homo sapiens
cagcagcctctcaaattattacgctgctttaggatttgacggtgaccatggacaacgcaacgtcaggtgggcttttacagactatagactggcgatcttaaaccccaaatgtcccgtttact

SEQ ID NO: 438039 - DNA, 122 bp, Homo sapiens
gggggatagttacatgactgacttgtgaaacagctagaattttaacatttgaaatgaacacgaatctcccttgctagagcttaaatgacccttgactaaacaaggtaacaaggaggcaatgc

SEQ ID NO: 438040 - DNA, 122 bp, Homo sapiens
gttcgtgtgtgtgtatgcatgggtgtgcatatgtggggggggtgtgtgagtgcatgagtgcgtatgtggaattacgtctgaatgtatgagtgcatgagtgtttatgtgggagggtgtgtgtg

SEQ ID NO: 438041 - DNA, 122 bp, Homo sapiens
taatcttcaccgtagctcgtagctcgtactgttgtgaccgtatttccccccgtgattgcccgactgcttgagcttgaacctcttgtttctaactgccttgattttaggaatcttatgtggga

SEQ ID NO: 438042 - DNA, 122 bp, Homo sapiens
agaaagggcctaattgagtaagagagcgctgctgctggaaatgccaaggaacccttcctccgacctggcttcctcggcacaagcgagccgggtgagtccggctgcagccgggcctgtttacc

SEQ ID NO: 438043 - DNA, 122 bp, Homo sapiens
ttttccagttttctctcacaaacaccaccctggttcactacaaccaccctatcagctggacgttcagatcatgtgaaagctgaggaaagagaagttcggacagactagacaccctgtgcggt

SEQ ID NO: 438044 - DNA, 122 bp, Homo sapiens
tccacacgaaacctgtctcccagggaatcagccagtccgatgagctgggcgttcccaccccgccctccgaggcccccacagtcctgtccccgccgcagaggctgccccgcacgcgccgggcc

SEQ ID NO: 438045 - DNA, 122 bp, Homo sapiens
tatgtatttctgtggtatttttgtgaatggagttggaagtttgcggtgctttttccttctcgctagtattcactggcagtattctgtagttccttacaacggggcctttgggaccactgctc

SEQ ID NO: 438046 - DNA, 122 bp, Homo sapiens
ggttgcggcggatgcctcgcgggccggtggctatggaggcggcggcggttgatggttgaccgttggctccggggtgggggtcgccgttcgagtgatctgctcagacccgaccagagggcgcg

SEQ ID NO: 438047 - DNA, 122 bp, Homo sapiens
attcaggccgcgcccacccggcatgggggtcacgtctgcacccttaatcgcgcgcacctgcgctgtcccaggacagggaaggcccgttacaactgggcggcctccgccacaggcgctgtctc

SEQ ID NO: 438048 - DNA, 122 bp, Homo sapiens
tgtgcaggcagcctgagaaacagaagatggtgggcgagaggaggactgactaggaaagggcgaacatcttcctgcctggccactcctttcagaaacagatctgatgctgtcacttgtttact

SEQ ID NO: 438049 - DNA, 122 bp, Homo sapiens
gctctgctaagctttggggtaccaacgtcatcttcaggtgacctgaatctttcccttaaccgtacagtttctcgatggaattgtgtgatcagaaggtggaattctagtgataggcgacctca

SEQ ID NO: 438050 - DNA, 122 bp, Homo sapiens
aaggcatgttaatatttgataagaagctaaaggcgcttcaagcggctgggcacagggatccgatcctggaggcaccttctttgcaaccccagaccccatcaccggaagaccccctctgccag

SEQ ID NO: 438051 - DNA, 122 bp, Homo sapiens
acagaactgtaaaaagctactactggagaacaataaaaacccaacgataaagaagaacgccgagtttgaagatcaggggtattactcctgcgtgcatttccttcatcataatggaaaactat

SEQ ID NO: 438052 - DNA, 122 bp, Homo sapiens
aagtgaggagcgtctctgcctggctgcgaccccgtctgggatctgaggagtgtctctgcccgaccgccaccccgtctgggaggtgaggagcatctctgcctggccgccccgtctgagaagtg

SEQ ID NO: 438053 - DNA, 122 bp, Homo sapiens
gcgcgagcggcaagttccggcgcggcctgtgtcgtcgccgctactcactgtcatcgctgccgtgcctcagccacttctggtcacacctgcaccgcaaatagttgccttttcctttcaactgg

SEQ ID NO: 438054 - DNA, 122 bp, Homo sapiens
ttttataatgcttattttgcaattcaggaaactaatgttcgaggcttaacttattcaaagcgattacttgaagcaaaagcttcatgaacttgcccagggttattctgctgctgagggggaga

SEQ ID NO: 438055 - DNA, 122 bp, Homo sapiens
aaggaaaggaaagaaaagcaggaaaaaaaaaaaaagtcaggggaacatttttgtcggctgcgcgactcgactacttttgtctcctgcgggccactgttgagccttcacgagacgtcactgtc

SEQ ID NO: 438056 - DNA, 122 bp, Homo sapiens
gattgcattatttaaactagaacagaaaatcaagattcactggattgccttttctaggtccggagaatttagctccaaaaatcaatcaagaactcaagagtaaatgaaagcttgagaggaaa

SEQ ID NO: 438057 - DNA, 122 bp, Homo sapiens
ctctaactgccttgagggtttcttccctgagggctgaacaaaaaccactgtggttccaaccggccctgacactggccctccctttcacagttctgacaaaacaaccgatcagcattccttcc

SEQ ID NO: 438058 - DNA, 122 bp, Homo sapiens
tagcatcaacttttcccattttaccagtttctttccttctgtcctagagaggcatgctcacgatcaatcatgcctgttatcattatcaaataaaataaagcgaaaaccctcaaagctctccc

SEQ ID NO: 438059 - DNA, 122 bp, Homo sapiens
agtctctactggaagtaggaacttggctgagcatctttgctgctctaagctccaggtcctcgtctctaaaagagaaataatggcacctatttcactaatttattgtgaggattgaatgaggt

SEQ ID NO: 438060 - DNA, 122 bp, Homo sapiens
accagtctctgtcttccctctttggctccagctgctttaattggctggggctgccagtggcgctgacatttacctggtgggaaggagggcctcctccctcttgaattgagatgctaaaaata

SEQ ID NO: 438061 - DNA, 122 bp, Homo sapiens
ccagccgcccaggtccccccagcaacggaggccccttggtcagcctcctcccgcgctctccgcagagcctctggtccctgctttgctgtctttggaggcctgctccagttgctttttttttt

SEQ ID NO: 438062 - DNA, 122 bp, Homo sapiens
aattgtggtcctccagactttggatgtgctcacattaggaagcttttggcaaggacttcacggatagcattgcaagctgaggatctgtataaaatgatcagatccaggattccactagttgg

SEQ ID NO: 438063 - DNA, 122 bp, Homo sapiens
ctcccccgagcatcgagacaagatgctgcccgggctcaggcgcctgctgcaaggtaagaacgccagcggcgggagagcggagggcatcctggggagagaagcagggcgtcccctctttcagg

SEQ ID NO: 438064 - DNA, 122 bp, Homo sapiens
ctcggagtatgtgtctgcacgaggctggcagggcatcgatccagctggtggggaggaggtcgaggcccggaacctgcaaggcctggtctgggacccacacaaccgtaggagacaggtcctga

SEQ ID NO: 438065 - DNA, 122 bp, Homo sapiens
agaccgcattacaggacattgctttccagaagcgcacagaagaaggctgcctgccccgggcggaggaacctgctggcccagaccagacccggcatctctgaccgtggtcccattagggacaa

SEQ ID NO: 438066 - DNA, 122 bp, Homo sapiens
tccaccgctctgtcctgcgcccggggctctcccgggaatgaactaggggattccacgcaacgtgcggctccgcccgccctctgcgctcagacctcccgagctgcccgcctctctaggagtgg

SEQ ID NO: 438067 - DNA, 122 bp, Homo sapiens
ttgagggctggcctcccagcgccccagcctatcaggggtgagccctgggtgacacctgtccgcggaggtgcagtggcctagcatttccagtacactctcaaccaacacccctgccccgccag

SEQ ID NO: 438068 - DNA, 122 bp, Homo sapiens
cattttacaggcagagtaaccaaggccgcgactgctggagagaagcggaaccggagttcccgtgcccattcctgttggaatctcctgtctgtgtgccgttctttaagatgggctggagagag

SEQ ID NO: 438069 - DNA, 122 bp, Homo sapiens
atgaatttcacatttgtaactatgattttggcagaatagaagattggctcatcagtgaagcgcagtatcttagctctagattctattttcatgcatcacagaagtgctatacggttaggtct

SEQ ID NO: 438070 - DNA, 122 bp, Homo sapiens
tcctttactaaaataatgcagactgctgtgagtttgttttatacactctttaacctccagcgaatgggcaaggggtgacaatccatgggaagaaaagaaaaatggcccaggaaccaaaaaaa

SEQ ID NO: 438071 - DNA, 122 bp, Homo sapiens
ggacgaacttggctcaccactcgcgtgcctgttggtgggggagggggccagaggacagggcgcggcccaggccagttccacaggtggctctgactgcccatggtttcgcgcgagtggtgggc

SEQ ID NO: 438072 - DNA, 122 bp, Homo sapiens
gcaaagctctctggagtcctgggcaacatgtaatgacagtggcaatggataatggctattcgtttttagccttttctccaactccccatctactatacagagcatccaggcaaatatagcag

SEQ ID NO: 438073 - DNA, 122 bp, Homo sapiens
aaaccacagcccatagacccgttgcctgctggcagggattccgcagcagagacgagtgggcgctcgtggtcactggggcacgagggagacatggcctgccggagggccacggccccgggtga

SEQ ID NO: 438074 - DNA, 122 bp, Homo sapiens
ggcagccaagctgctggggaagccgccgggacgggggctctggccgacaatgcaggtggccggtgtgcagatgagccagcgcgcggggtgcggccgccgggatgcccgatccgagtcgcgcg

SEQ ID NO: 438075 - DNA, 122 bp, Homo sapiens
acagcccaccccaggtcacagcccacccgggtcacagcccaccccaggtcacagcccacccgggtcacagcccatcccaggtcacagcccaccccaggtcgcagcccacccgggtcacagcc

SEQ ID NO: 438076 - DNA, 122 bp, Homo sapiens
acagcacaggttgcctttcagccccaggaaacatgcccacagagatcatggcatctcccccggccccatttgtgtagggcagacaggagtcctatcctgtggaacaccatgtgcctaccggt

SEQ ID NO: 438077 - DNA, 122 bp, Homo sapiens
gtgcagaggaccgtgccctgtggggacctgcctgcaggctgctgacagtgggtaccaggtcggcctttggccccggggtggggttggacaggcgggcgtctggtaggccctacgcgtaggcg

SEQ ID NO: 438078 - DNA, 122 bp, Homo sapiens
cactagagaatgtcaccacctagaaaacatgtggaggaagttccatcagaggcagccaaccggcccagctgggccttagctcagaggcagcaaaagttcatagatgatagaagacagtagag

SEQ ID NO: 438079 - DNA, 122 bp, Homo sapiens
tagaatggggtttttcatccctgaatggatctatgttctgggctcaggaacaagggcactcgctgttactctcaattttgttggagtttacacatgttgttagcttgatttcaggatttcct

SEQ ID NO: 438080 - DNA, 122 bp, Homo sapiens
ttaggaagaaaaccttaagagccggccgaagtctgccctggctggatggctgtgggtgtgcgcacgctgctcggggaattttggaagccgcggatggtctcccggcaaagttggaggcacat

SEQ ID NO: 438081 - DNA, 122 bp, Homo sapiens
aggaggcaaagggcagcgggctcgaaactacaggacttggaaagtcttaggcggagactgcgggggtggggggtggtgaggaggggccttccagggagctgattggtcgacgcggacggggg

SEQ ID NO: 438082 - DNA, 122 bp, Homo sapiens
tcctgcattagtcttctttgatctggaaccgttccttggcttttatatttattgaaatgacgttatttaagagtacagaccaggtattgtgtggaatatcctttaaagtgagtttgtctgat

SEQ ID NO: 438083 - DNA, 122 bp, Homo sapiens
agaagatggaataaaagaacagatagaagccaaaggagagaggtggtcaataattcccaacgggggaatgctgaaagaatggctttagaggtatataaaacctagggttaaactgtcctttt

SEQ ID NO: 438084 - DNA, 122 bp, Homo sapiens
atatactcctacaaaataagcctgtgtgtatgtatactttaactattggatgtttagcaacggcgtatttatccagtgtcaactgtgtaaaacacctgtttgcccatttgtgagcctacagt

SEQ ID NO: 438085 - DNA, 122 bp, Homo sapiens
ggagctgaggcactacagagactcagggactcgagggagctcgaaaggccgctcacaacccggcgtcgcccacgacgtcactgtcgaccgggcttctccatcatattccgacaccctttcat

SEQ ID NO: 438086 - DNA, 122 bp, Homo sapiens
aataaataaaatgttgaatttttacaagtcgttgttcccattccaatttttgaatgcaaccgcagcctcttacaaaacagccttgttaaactaatttgctgatattaaattcttaagtaaaa

SEQ ID NO: 438087 - DNA, 122 bp, Homo sapiens
tgacttcatttctcatactgctttggatcagcagccaccaattcaaaactctggggctagcgtgtctgactggttaagcccagatcacatccttgtactctagcttcaagggaggtgggaag

SEQ ID NO: 438088 - DNA, 122 bp, Homo sapiens
ggcgccaaaatgtcgttcgtggcaggggttattcggcggctggacgagacagtggtgaaccgcatcgcggcgggggaagttatccagcggccagctaatgctatcaaagagatgattgagaa

SEQ ID NO: 438089 - DNA, 122 bp, Homo sapiens
cggcctcccaggggtgctgtgctgggcaaccactcatccctggagcccctcgtatgccctcgctgccctccgagtgggctagccacccctgcagctgccggggagccagctgacctccgggg

SEQ ID NO: 438090 - DNA, 122 bp, Homo sapiens
ccatctcagatgacaaagagggaacattttgttggtaaacaaattaatcttttgaaaggtcgccatttgttttaagtttttatccagttcttgtcatctggaatcagagattgactgtcatt

SEQ ID NO: 438091 - DNA, 122 bp, Homo sapiens
agaagtctgagatcggggtgccagcagagttgggttctggtgaggcttctcctcttggctcgcagacagccaccttcttgtgttctcacaagacagtgctgtgtcttcacacaatggccatt

SEQ ID NO: 438092 - DNA, 122 bp, Homo sapiens
tcccatccttctcttagactgactctggaaggaccccgagaagtgctagaagtaaataagcgctcggggagggatgtgatcagcttttccggatccaggtctttaccggatacttctctgtg

SEQ ID NO: 438093 - DNA, 122 bp, Homo sapiens
tgagaaggaaggagcagggcagtgattgcttagtttatcctgggacgcgggagctgtccccgtggactgagtggcgcggagaggggatcactgagaccgggaagggtcatccagacaaataa

SEQ ID NO: 438094 - DNA, 122 bp, Homo sapiens
catgcccggaagagagcggaaaccaggcacaccattcacaagtaaatgaccaaggaaccccgcccccggcccgcctccctccgtttaagaagccaatctgaagagcgctaaggccagacacc

SEQ ID NO: 438095 - DNA, 122 bp, Homo sapiens
gtacccagacccttgggtgagcgcagaggtttccgggccctgggcacgcggctggcccagcgtgaccctgacgctgtggagcacacgccgctgtggctctggctccaagcagggtgaacgct

SEQ ID NO: 438096 - DNA, 122 bp, Homo sapiens
tctcccggcggcgggcaagccttgcgctgctccaccctcggcctgggcaccctcacttggcgctggccacctgggccagcctggggccatggtctctctgcagctgaggcccagtggcccct

SEQ ID NO: 438097 - DNA, 122 bp, Homo sapiens
aaaggaaaagccggctgggcatggtgtcattcacccccagctctgtgtcaaccagaagcccggcgccacaccctgccagcccatggccacctcccacgtgactgcagccgtggctgtggctg

SEQ ID NO: 438098 - DNA, 122 bp, Homo sapiens
cagccgctgggaagtgggagccggaggagggggcggcggtcagtgccgggcggcttcgggcgtcccctagaccagagtggtcatccccagctgtggggacattgtacaagaaagggttgtag

SEQ ID NO: 438099 - DNA, 122 bp, Homo sapiens
gactgtttgttacagcagctcggcctctctccctagctgatacaccaccctgcacactgacggtggtgacagtccccgtcctgtgcctgcgcacccatggacatctgtgccagatgcctgag

SEQ ID NO: 438100 - DNA, 122 bp, Homo sapiens
aacaaactatttctcaagcagattgtgacatgcgacaaaaagtggatttcatacgactaccggcaatgaccacctcagtggctggatggagaagaagctccagagcacttcccgaagccaaa

SEQ ID NO: 438101 - DNA, 122 bp, Homo sapiens
tggaattagcatgttgctcatttaatgttcaattccacccccgttccaccatccaaagtccgcagtccaggatatggtcaggaggtctggctgagtgcccagatataaagcttgtgatttag

SEQ ID NO: 438102 - DNA, 122 bp, Homo sapiens
atctttaacaagcctgtaacctctcaagtgaaagaacatgcacctgtcaagctcatagtgcgggatgtacacacagatgtgtttaataaatatctgcccacagggagattagaggtttgctt

SEQ ID NO: 438103 - DNA, 122 bp, Homo sapiens
tgtgtctctacctgccattatcctgttccaggctcccagcatctttcactgggatactgccgtaaccctgtaaatagtctccctgcttgtcacccttgccccactacactccagctgccagt

SEQ ID NO: 438104 - DNA, 122 bp, Homo sapiens
atggacctcacagaaggtgacagtgaggcttcagcctcagctcctcctgcagccaaaagacggaaaacacatacgaaaggcaagaaggagagcaagcccaccgtggatgcggaggaggctca

SEQ ID NO: 438105 - DNA, 122 bp, Homo sapiens
agtctcaaaaaaaaaaaatctacaaatccacttcatctttcattaaacacgaacctgggacgtagttagaatgtcttgaagaaaatatttcagtaatattccaagtccgtcgccctggcaaa

SEQ ID NO: 438106 - DNA, 122 bp, Homo sapiens
cttttattcggcgtagcaatctctgaagtaggtgctatccccatcgtacagtggaggaaacgaggcttggagagattaaatggcgtggccgggctctgtgactcagccctgtaatcccagca

SEQ ID NO: 438107 - DNA, 122 bp, Homo sapiens
ctacgattaaaggcatgggccactgcatgcagcctcatgcctggtttttgttttctcaatcgctatttgtttaatgaataatgaatgaatatgcattattagttcacaaaaacaaaaaagaa

SEQ ID NO: 438108 - DNA, 122 bp, Homo sapiens
actttcccctatgccagcaggatacttggtttgtttaggggcaaagaggaattgatgtggcgttgtttcaatcagtggttgaaaatgcaagtggtaaacattgaaaaatagaacactgcaaa

SEQ ID NO: 438109 - DNA, 122 bp, Homo sapiens
tttccccaggagctcccagcaaccttcgcgcttctccggagggtggggtctgccgcggcgcgggggcagcctcaccccacctcactgctggactccggagaaccatttctgggaccgggagc

SEQ ID NO: 438110 - DNA, 122 bp, Homo sapiens
cctgaatcctaacctggacgcattgttcccctaattcccagcagcagatctatgaattagcggtctgggtggcagcccattcttctttcagaggcccagaacaccgtgaaactatgctttcc

SEQ ID NO: 438111 - DNA, 122 bp, Homo sapiens
gaggaagaagggcagggtctgaaatgggctctgtcctacccccgtggccagaacaagaggcgggtgggcttcttgggtgtggagctgggcagaaacctgtgtctctcttcacagagtggcac

SEQ ID NO: 438112 - DNA, 122 bp, Homo sapiens
tctcagaaaacaaattacaaagtctccgtgaggttggaagtcttgcttccattatacagacgagaaagctgaggcccaggaaggtagtacttgtccagggtcacacaggaagtcctggtcta

SEQ ID NO: 438113 - DNA, 122 bp, Homo sapiens
tgacgctttcttccggcgcggaggaatgtgtaatgccccagagggcagaggttgtgcttccggtgaggagggtccctttcccttttgtgtatcagtgcactcgaaaacacgccgggcttaat

SEQ ID NO: 438114 - DNA, 122 bp, Homo sapiens
gtgtaacctgaacaagcttcttgcagatatctcttctggctgatttgaaaccccagtgaacgattggtgtgcagatggagcctcatgagggccatggtctattgcccagttcatgagtgtct

SEQ ID NO: 438115 - DNA, 122 bp, Homo sapiens
acacactcactaacacagttaccaagtgtttatgacacagttatcaaactttctgctcatcgccaatctaagtgaacatgatatcccatgtatatataatttactttttaaaattattagtg

SEQ ID NO: 438116 - DNA, 122 bp, Homo sapiens
tattccaaccacagacagaatgacctttgctgagtccttgaggttgacgcagcactttcccggacgtggtctcacataactcccccacggccctggataatgctgagcggtcaagtcaagac

SEQ ID NO: 438117 - DNA, 122 bp, Homo sapiens
cgtccccagcgtgtgttgccttatggtgccggcagagcctcagctatctgcctgggaagtcggatgtccttggagagaatttggaatgcagataatttttcttatttcttgagagcttactt

SEQ ID NO: 438118 - DNA, 122 bp, Homo sapiens
cggccaaaagatcaggacgactcgatctgggctggactccttctgcctgagcatctgatccgagcgtcggccgggctgggaggagccggcccccgggaaagatttcggactgggggacagga

SEQ ID NO: 438119 - DNA, 122 bp, Homo sapiens
cccgagctctgctgtgtggccatggtctaccccagctgccctctctgagctgtttccttgcgtgctgttgaaaaccaacagcaggcagtggctactctgtctctgcaggcgcctgagttacc

SEQ ID NO: 438120 - DNA, 122 bp, Homo sapiens
gtcatctgaggagccacctcgttgtaggtcaatgactggggcaagaactgtaccttgtttcgtcctttggctctttgcctgagtgagagctgccttcttcacctgaagctgagactgtagaa

SEQ ID NO: 438121 - DNA, 122 bp, Homo sapiens
aggacacttcttgtttacaggagactataaaacctttgccctgtcctcaactggggctgacgccattttaggcctcagcccgcctgcacccaggcgctcattaaaacagcacgttgctccac

SEQ ID NO: 438122 - DNA, 122 bp, Homo sapiens
gagtctcgcatttgcacccccttcttcgcagtccccctcccatagacttgctctgggaagcgcctctgcctccgaccctagccggaaccccttcggggccagagtttgaagccgtggatgtg

SEQ ID NO: 438123 - DNA, 122 bp, Homo sapiens
cagcagcaactgtgacctgctttagagatgacatcattgggtgtcatgtggctctttatacgtttcagcctcagaaagagataatctgtgaaagccacagagcctgatttctgctgtgataa

SEQ ID NO: 438124 - DNA, 122 bp, Homo sapiens
caggaacagctcctgcgcggggcgtggactgagcagtcactgagtattacgcaaattgcgcgagcgcacgggaaaagcgattggtcggtcaggagagagaggtgtgtcctggcgggcccgca

SEQ ID NO: 438125 - DNA, 122 bp, Homo sapiens
gtggcaccaggagcctgtgcctcgcagaccgctgaccccaggaagtaatggacaatgaggcgcagctgctgctgcctctctgggtttgtgctgaggccaccttctcggggccgttacaagcc

SEQ ID NO: 438126 - DNA, 122 bp, Homo sapiens
cgccagcggcgctcgccacccttggcacgccggagggaccgcctccggccccctgcgcggcgtttctcaggggactcccagcccatccctcacccagctgtccgggtcccgacgccttacct

SEQ ID NO: 438127 - DNA, 122 bp, Homo sapiens
ctcaacctgctgagcctgctgctcaccgcaagcttcgtgctgctgcccctggtctggctccgcccccctgacccaggccccaccctgaacttgagtgagtgtgaggcccaccaggggaagtg

SEQ ID NO: 438128 - DNA, 122 bp, Homo sapiens
aggggacaagtttggggcgtttattattcttcctcctagcaacgatggccagcccagccccgaggcagccgaaggccgttttggagcgtcgcgggctcccaggccttttcagggtgggcggc

SEQ ID NO: 438129 - DNA, 122 bp, Homo sapiens
gtgtgtgtgtgtgtgtgtgtgtataccttagttttatttaaaaatggcagagccacctagcgactcttcacctgtgttacagcatacatctctgtagtgatctgtggggtggacgccccctc

SEQ ID NO: 438130 - DNA, 122 bp, Homo sapiens
gcgaagagccgggccgcggaaacccgcgctcaagggcatttaactagttggaagccaaagcgaaagaccggagcgggggaccgacagcgcgggggtgctcggggccggccgggacactccac

SEQ ID NO: 438131 - DNA, 122 bp, Homo sapiens
tcctgtctgggcgcgcgtggctggcgggtggccggcggtcgagaggctgcggcgggcgaacgccgctggagtcgcccagactgcctcggatttcataatgaatctgaggaaggacaaagggt

SEQ ID NO: 438132 - DNA, 122 bp, Homo sapiens
atgggaggacacaggagtggggaaggcaaggagaaaagacaggaggtgggggcaaggccccggttacaaagggtttaaacagttgctttgccagtcctatgacttttccagcatcacttacg

SEQ ID NO: 438133 - DNA, 122 bp, Homo sapiens
aagtttgaaccagtctctaatgttgctgcaacttgctccccactctgcagatttcatcttcggcttcacaccctttgttggctctctgctgcctgtgggacacaagcctattcatgacctct

SEQ ID NO: 438134 - DNA, 122 bp, Homo sapiens
accaaaatgctactggataggaaaaagaagataggtgaatatggggacatggagagggcacggacgtgggcgggcagtggaatggcccatttatacttagggtcaagaactgggccaggcct

SEQ ID NO: 438135 - DNA, 122 bp, Homo sapiens
atgccagctccttctctctgtgccttccttctcacctcacagctgctggagtatgagccacgctcaggggagcaggtaccccttctcctaaagatgaagaggagcaaactggcactaagcaa

SEQ ID NO: 438136 - DNA, 122 bp, Homo sapiens
atcgggtctggcggggctggcagcggcgaggacccgggtctggcgctgtgggccgggagccgtggggcggcatggaggggctggttgtcgccgccggcggggacgtctccctgcacaacttc

SEQ ID NO: 438137 - DNA, 122 bp, Homo sapiens
ctggagccacagagcacgaggttgggctgaatctattcgtaccttttattggcttcactgcgcgaggaaattaaagatcctcccccacccctacaggccttcaaagcagagttttgggcatg

SEQ ID NO: 438138 - DNA, 122 bp, Homo sapiens
ctggtcctgtactgatcagtgaaggaaaccgtggttactgaggccctgttgaaaagtgcacgtcttgtccaataaatcacgctgcagttggtgtccatccctgagttgctggggtaagggtc

SEQ ID NO: 438139 - DNA, 122 bp, Homo sapiens
ggcaggcggttcggccaccggggtgcggggctgcggagaatcctagcggccgctacggaccgaagtttccaaagatgcggttccccgagtgtacaccgctcccggttgtaacatacacctag

SEQ ID NO: 438140 - DNA, 122 bp, Homo sapiens
gagtctgtctctactgagaacgcagcgcgtcagggccgagctcttcactggcctgctccgcgctcttcaatgccagcgccaggcgctcaccctgcagagcgtcccgcctctcaaagaggggt

SEQ ID NO: 438141 - DNA, 122 bp, Homo sapiens
cctgtaaggcaaatttaatgtgagaaatagaagggaacaaattaaccgggcatggttgtgcgcgcctgcagtccaagctactccagaggctgaagcgggaaaatcgcttgaaccgggaggcg

SEQ ID NO: 438142 - DNA, 122 bp, Homo sapiens
tgggcaggtgcggagttgggggcgggaagccaggattgggcaagtggagctgcctgtgaccggcgccacagggcccagagcaagccgcttgctggttcaaccaggaaaccgaggtgcagaag

SEQ ID NO: 438143 - DNA, 122 bp, Homo sapiens
gcacacaatgtgtctgtgatgcataatgcataccgccaacctagggcttattacaacttacgctggagcagcaaatggaattcggtcccaaagctttaatatgtacgcgtatgtgtgggaaa

SEQ ID NO: 438144 - DNA, 122 bp, Homo sapiens
cttgtgttactggcatttttaaaacctactttgctttagggtagtgatgggagttagagacggtggggatttatggcaaggggagagaactgactttttaaggaccaactgagctgaagctg

SEQ ID NO: 438145 - DNA, 122 bp, Homo sapiens
gttggctgcaggtctatgtgaatagatctttgttaaactctggagtaaaaatatgctgcccgtaggagccttgttgataataacgcttcaaatgcgttactcaccttgcaatcatcaaatgc

SEQ ID NO: 438146 - DNA, 122 bp, Homo sapiens
tcttctcctgtaactgaatgagaaagggttggggaaggcagcgctaggtgttcagattggcggtgaaagatagaaaggtgcctaatttcatggcttctagtctcaatgcgacaactatgggt

SEQ ID NO: 438147 - DNA, 122 bp, Homo sapiens
ggcatgcaagtggccaagttgcggctcacacaggatggaagttacgccagccccacgggccggcagatagcagcccagcctgggtcccccacccttcggttactgaattaacagagggtgac

SEQ ID NO: 438148 - DNA, 122 bp, Homo sapiens
cgttcacgcgcccgcgcccgcgcccgcgcccgtggccgcgcgggccccagctccacgcagcgctcacagaccgtgagcccgcagggcagtgtcaccggcttgtgcagcagccccgggcagcc

SEQ ID NO: 438149 - DNA, 122 bp, Homo sapiens
gcgccaggatcatatttatttaagcagcctgttaagttactctgtgtagcccagaagttccgaagaacacattttgaaaatcacaggtatgcacctcattttcatcaagcagtccccaagca

SEQ ID NO: 438150 - DNA, 122 bp, Homo sapiens
attcccagctcccagaaaaaaaccacaccagccctggaaaagcacaactctttttactaacgaggcctgggagaaagttctcccctatgtcctcatataccctgaagtatattagggtaaac

SEQ ID NO: 438151 - DNA, 122 bp, Homo sapiens
caactgcgttttgtctgagagccgatgggagtaagagtgtctgcagcttgtcgatgtgtacgcggttttatgcacttcttttaaactgtcaaaaggatgtctccgtgtacaatgtgtccgtg

SEQ ID NO: 438152 - DNA, 122 bp, Homo sapiens
agcagctgcaatttgctaggttttgtgctacacacagggtttaaagaagtgaacaagaggcgcatgaactaggcaacgcagggtctaaggccttccagaccagcatcccatgtagctgggac

SEQ ID NO: 438153 - DNA, 122 bp, Homo sapiens
ggtaaagcatgagaacatcagagtctggggcggcggcggtggctgcaacggtggctgtgacggtggctgccgctgggtttggctttctggatttttgttcagagtcgctaatgtatccccca

SEQ ID NO: 438154 - DNA, 122 bp, Homo sapiens
agcagagcttaagaagagtccaaaaagtacccaaggacatgtcggtggggattcctgtaccgcagcaagggagaagaaacaaaaataggggattgaaggagagaggataggcacttatgtag

SEQ ID NO: 438155 - DNA, 122 bp, Homo sapiens
agtcagcgccaggaggggggggacgcgggagctgggggagggcttggggccagggcggggcgcttagggggtctctgagagccgagcaacccttcagtccatgaatctggccctggggaaaa

SEQ ID NO: 438156 - DNA, 122 bp, Homo sapiens
atgccaaaatttccctgggcaaaggccacagggatggggcccgaggaaaggcagcccgaacgcgggggtgtgtcagagcgctttccctaggtgccctcccggggctggcatcctctctgctc

SEQ ID NO: 438157 - DNA, 122 bp, Homo sapiens
gaagcgggcgtgcaccgagaacaatgagtgctgccaccccgagtgcctgggcagctgcagcgcgcctgacaacgacacggcctgtgtagcttgccgccactactactatgccggtgtctgtg

SEQ ID NO: 438158 - DNA, 122 bp, Homo sapiens
ctcagacggcgatgggcggggcaagacgctggtccttcaggcccgagttgatgggcacctcgggctcatcaccgtgaagtcccctgcggccgaagggcggtggatttttagggtctctcccg

SEQ ID NO: 438159 - DNA, 122 bp, Homo sapiens
caaaatcaatgccatctagttaaactttttgattaagtagtggatccggtgtcctatccacgaagaggtgggaaaagcgatgtggagaagcaggcacgaacccatctggaatggaacatgtc

SEQ ID NO: 438160 - DNA, 122 bp, Homo sapiens
gaaagtggaatctctgtggcccatcttcaggatccaccaccagaaaacccgctacatcttcgacctcttttacaagcggaaagccatcagcagaggtaattagtcagtctctcttggacttt

SEQ ID NO: 438161 - DNA, 122 bp, Homo sapiens
ggggagcagagtgggcaggccgggggtgagggctcgcgctccgggagctgcacggggctgcgtggaaagagcgccgagcggtggcgtcgttgtcgccccctcctcgtcgggaagaatcgttt

SEQ ID NO: 438162 - DNA, 122 bp, Homo sapiens
cccagcggtcgtcatctgtctttttgaaggcaccacccttgttggggcacagcacacagtcggcgggccgggcccgcgactgcaggcagtggcggcagagccactggccctcggggatgtag

SEQ ID NO: 438163 - DNA, 122 bp, Homo sapiens
agcgttaccagaacctgtctccagtgggctctggcgcctatggctctgtgtggtgagtgtcgctgggcctggggccgctgtgggcagggtggcccctcgcgcccgagggccaggcctgctcc

SEQ ID NO: 438164 - DNA, 122 bp, Homo sapiens
ttttcctgaactctttgctggtgggtttgatggccttaggtgcctcctcattgctcgggtcgcctttgtcgtccatacctagcggtaaagtgtaagcacatagtgaccaactgaccacagaa

SEQ ID NO: 438165 - DNA, 122 bp, Homo sapiens
ggctccctccggacccggcgccccgccctccgccccgtgtccgcatgcgcgactgagccgcgggggtggtactgctgcatccgggtgtctgaagatccgatgaaataacatatgcaaaatga

SEQ ID NO: 438166 - DNA, 122 bp, Homo sapiens
cagagtcttctctaactcccccggggaaagggagactccctttcccggtctgctaagtaacgggtgctttttctaggcactgacgctaccgctagacaaaggtccgctaggcaaccggcgtc

SEQ ID NO: 438167 - DNA, 122 bp, Homo sapiens
ctgaatacctctcctacgactccagtgaccgtgagtgaacattgttgggaggagggctggcgggggcctgcaccgcatgttctgtctaccctgcatctcgttagcatcgtgctttgctgatt

SEQ ID NO: 438168 - DNA, 122 bp, Homo sapiens
agtcccccataaaaacattccttggaaaagctgaacaaaatgagtgagaactcataccgtcgttctcatcggaactgaggtccagcacattgcctccactttggcttattgtggttcacggg

SEQ ID NO: 438169 - DNA, 122 bp, Homo sapiens
cagctcctggggcgcctcccacgccctccctcacctgcggccttcggggcaactcgaccgcgcctgggcgcgccccacccgcccgatttccccacggcactccgcgcccccccagccagagc

SEQ ID NO: 438170 - DNA, 122 bp, Homo sapiens
cagtgggggggttctgtcttgggttctctcatgatggtgcagtcagatggtggctggaaccgggtcacctctagggcttctttactcacacatctggtacccagactgtgatgatcaaacat

SEQ ID NO: 438171 - DNA, 122 bp, Homo sapiens
tccaggggctcaccgctcgggttaaagtacctgttggacacattgatgatgtcatgagtccgcaggtgctgcttttccgctttgccggccaagtaaatggaagacacggcaatcaggtaagg

SEQ ID NO: 438172 - DNA, 122 bp, Homo sapiens
gtgtgcatgcctggagaggtgcatgtgtgggacagtcaggtcggcaggagtgcatgagaacggtgtgggcacacgtaagtgcacgatcacacatacaagtgagcttgagagtgtgtattcct

SEQ ID NO: 438173 - DNA, 122 bp, Homo sapiens
aaaatgcatttccggctccaccgcaagacgggagatttgtttgtgaaggagaaactggatcgggagtcactttgtggcaaagccgacccttgtgttctgcactttgaagtagtcctggtgga

SEQ ID NO: 438174 - DNA, 122 bp, Homo sapiens
actaccccggcagggagtgggggagcagcggatattccggggtaggaacggccatcgcaacgctgacagaggttgttttttaagaagcaaaactgttggcggcgacctgagcgctggaagcc

SEQ ID NO: 438175 - DNA, 122 bp, Homo sapiens
cacttcaccgacgtgaagaccacctttcattgtttctatgggtctcagcatccttccctccgtccagctctgttctcgccgcacaaatgtcatttctagcgtaccaccctccattccgcccg

SEQ ID NO: 438176 - DNA, 122 bp, Homo sapiens
gggtgcacaacccataatagaagggccgcacctcgccaacctggtagagctgcaccagctcgtttttgttcatgggcatgcggcgggctcttcggatttcgaaggcaggcaccaccagcgcg

SEQ ID NO: 438177 - DNA, 122 bp, Homo sapiens
aaccaaggagaaacaagaaaagatccaagaagttagcttagatccgccgcctagggcgcgcgcgccaaacgagcgccttggcgcctcgacatgacgcacttccgcttcatccggtggggaac

SEQ ID NO: 438178 - DNA, 122 bp, Homo sapiens
cactttaagtaccctgtctttaagagaggtgatccacttctaccacatattagtaattaccgaaaaaagaagttgggtctaatcatcatcagcaagtgaagtcatctactgtttcatgctgt

SEQ ID NO: 438179 - DNA, 122 bp, Homo sapiens
aggttttctcagtggatatgtgagtgtgtactgatggcaagtggggtggggaatatatttcgtgacagcagggcccctccaactctgaaaatggtcaggactttctttgttttacagctctc

SEQ ID NO: 438180 - DNA, 122 bp, Homo sapiens
ttagatatcgacagggcatgtgcagagcaatactctgtcttgcagtatgccagccacggacggggtttagacaaacggctgaatataaaactcttgcctacaagcagctcagcctagagggg

SEQ ID NO: 438181 - DNA, 122 bp, Homo sapiens
ggcggtgccgccactgccgccgccaccaccgctaccaccgccaccaccgccggggctacccgcaatgggaagctgccggcctcacagagcatgcgccactcctcgcacatgctcagtaactg

SEQ ID NO: 438182 - DNA, 122 bp, Homo sapiens
agggatctgagtgcaaaggcatttggtactcagttaggacacttgtgctgagccctcccacgtgcccggccaggccctcgttgcagccagagatggccctgcgggagctggtgtgtctcaaa

SEQ ID NO: 438183 - DNA, 122 bp, Homo sapiens
gccgacaaacccgcagtgcgctacgggaaggtcacctgacagttggggagaacggcagcccgcaggggccgatcttcggcgcgcctgcacagcgcaggcggaattggggcgccttttctcct

SEQ ID NO: 438184 - DNA, 122 bp, Homo sapiens
gccagcccaaggcctagcaacaaggcacggtgcagggcggaggccattgtttggggcttccgaggcagccagcaagagagagggagggtggactccatctgttctctgggctggagggctgg

SEQ ID NO: 438185 - DNA, 122 bp, Homo sapiens
cacagtggcggggaggggatggtcctggggtttgcatgggtgatgggacagttccagccccgagagcgggaagacgacgcggcggtggagctctaggaagggatggatgttatcaccgtgca

SEQ ID NO: 438186 - DNA, 122 bp, Homo sapiens
ataatttgaggcagacactcaaaaccaagaaactcccccatcatgtgttttacacattaacggttttattttgcacaagttatatttctacacaaatggcccagctaacatttatttagtgt

SEQ ID NO: 438187 - DNA, 122 bp, Homo sapiens
acgaggtgtccatgatgctcctagatctggaaaagtgactgtggcgccaagcgccgcggacgccagccggtggagttgttactcgtaccacgcggttgcttggcaacgccgccggaagtgac

SEQ ID NO: 438188 - DNA, 122 bp, Homo sapiens
tccactggaagatggagggctctgagcaggctggagccagtcagatagcaatggggggaacgaagagttagttgtgtcctggggattttactggggctatgtattgaaattaagccaggaaa

SEQ ID NO: 438189 - DNA, 122 bp, Homo sapiens
aaaaatgatggaacaaaggctctgaacaatccagaggagggtcgagggggccccgtgtcgcgtctgaggggattgacgcctgggcccccgcttctctgcataaataacattttttcagttta

SEQ ID NO: 438190 - DNA, 122 bp, Homo sapiens
tccccaggaagcaggagaatcgcccgtggggagatgcaaagagggctgccgtgtaataagcgacttctgccttgtaggtacattcactggcttatatgcagcgggcaggtctcactcttccc

SEQ ID NO: 438191 - DNA, 122 bp, Homo sapiens
gtgggaggggccggtgtgaggcaaggggctcatgccgaccttcctcagcgtgggaggggtcggtgtgaggcagggactcacgcctctgggcagggtgccagaggcatgagttgggcatcaac

SEQ ID NO: 438192 - DNA, 122 bp, Homo sapiens
cttcctcctagtagacctcagatgataaaaatatccatagacacagtgaagtcagtggcacgcctggctctctcagacaaaactccatgtgatcacatataggcagcctcagtgaggctgat

SEQ ID NO: 438193 - DNA, 122 bp, Homo sapiens
ctgatctggatatagcaggttttatcagattgattccaaaacaccaatagtctgcagtttcgtgttttccatgtttgaggagttctttctaagcttaccaggcgggctctaaaagaaggatt

SEQ ID NO: 438194 - DNA, 122 bp, Homo sapiens
gattcgccccgaaccctcgccccgccgccgcggccccaggcaggggtccccagatgcccgcggttcctacccgagaggtgaagcccgagcccagaggactcctcgccgcctcggagactgca

SEQ ID NO: 438195 - DNA, 122 bp, Homo sapiens
gtggatgctaatgagcctggcgacaatgccggccttcagaggggtaagtgcaatgtcggccggcatgttcccacaacagcctcaagagtagaatctgctcgttcatgccttcagtctcatta

SEQ ID NO: 438196 - DNA, 122 bp, Homo sapiens
ggcagcctccgccccctggagacttgggaggagcgagcgtgggtgacagtcttttcgcgacgagtgccctccgccaccctcgccacgcccctgctcccccgcggttggttcttccttgctct

SEQ ID NO: 438197 - DNA, 122 bp, Homo sapiens
gagcagacccccaacagaggttgcgagcagagccagggatcacagagttttatctgccctcggtacgctgatttccaaaacccagcctcatattctatactccaaagcgcactgccaggtgg

SEQ ID NO: 438198 - DNA, 122 bp, Homo sapiens
acttagcacacaggactgcacagccacccagccctctgcgggttcccagggggaggcgctcgagggtgaagtacaaacccatccccaggctgcgaaagaaaagtctacgagctggcctctgt

SEQ ID NO: 438199 - DNA, 122 bp, Homo sapiens
ttcccgttccttccctcctggacaccgccgactcgcgtgttgggggtggggtgggagacacgccgccagaaagacaggctctacccagccaaacctgcacctccgaggccgaaaagcctggg

SEQ ID NO: 438200 - DNA, 122 bp, Homo sapiens
ccagttcaaatcgctgtgtgggcttccccaccagcagggcctagcctcagggaggtatgccgagacaactggatatacattggcctccaaatccatgcccctggaggtggagaaaggaactg

SEQ ID NO: 438201 - DNA, 122 bp, Homo sapiens
actgacagctcagtaccccttaggggctgggctcagaacagaccctctaaagaatgaggccggagtggtagggccaggcaggacccacctatgcctgaggctgccgccgctgctgaaccctc

SEQ ID NO: 438202 - DNA, 122 bp, Homo sapiens
tcgtgttggcattgatctcctctcttggcatccggggtttgagatcgcggtgaaaactcacggatttaaggcagatagatcagattcggggttgaaggctccccactggagtcggcatagag

SEQ ID NO: 438203 - DNA, 122 bp, Homo sapiens
cttcctcctctgcccctgcccgccgcccacagctgtcagctgtccctcctggactgggcccgcccttggccccttgacgtttatttctgggcatctgatgcctagaatgtgggtgacagggc

SEQ ID NO: 438204 - DNA, 122 bp, Homo sapiens
acttcatttccctcatgggcttctccgggcaggagaggcgggtgggaccccatgacaccccggctcccattagctattcttcaggaacagcatcgttcaagagcatattcctttcctatcac

SEQ ID NO: 438205 - DNA, 122 bp, Homo sapiens
actgcgtccctggaaggtgaagggggtaaaccacaaagtcagaaactttgggaaaagccacggtcgcatgcacacctctcaaacaaggaaacaaactacaagaaagggctcagtcattgtac

SEQ ID NO: 438206 - DNA, 122 bp, Homo sapiens
gggaggagggatagcattgggagatatacctcatgccagatgacgtgttagtgggtgcagcgcaccagcatggcacatgtatacatatgtaactaacctgcacattgtgcacatgtacccta

SEQ ID NO: 438207 - DNA, 122 bp, Homo sapiens
ttcagcaggaatcagccctcagggaccgagaccctgcgaccagccccgccccacaggtgccggtcctgggcagcctcccttgcttaggccacactgctcccaagaagccaggatgagcagct

SEQ ID NO: 438208 - DNA, 122 bp, Homo sapiens
gcgctgagtgaacgtttccaggcctgagggcgggcggagatttttctcgcctgtagagggcgcagatcggcgtgcagagtaacccactctagttgtcccttccttaagcacttcctgtttga

SEQ ID NO: 438209 - DNA, 122 bp, Homo sapiens
ctccaagtacatgcccccgcgcttgttggcctcgtggcacttgcgttccttcaggcagggcgtgctcaccccgctgctgctgtgctccgacgggctgctctcgccactcgacttgccagagc

SEQ ID NO: 438210 - DNA, 122 bp, Homo sapiens
tcctgatggaagtcatgcatttactgttacagcagatttagcagtcagaacagtccaccacgccgcccttcatcccactcctccgagatgacctccgtatagggtcaggagcccggccgctt

SEQ ID NO: 438211 - DNA, 122 bp, Homo sapiens
tttaaacacatgggcctgtgtgcatcgctgctctgttcacagcaatgaatcccggaaacccggctgctcactaattacccagtaactatggaggtcccccgaaggacagacctgtgcccttg

SEQ ID NO: 438212 - DNA, 122 bp, Homo sapiens
gaaatgcacgctttgttcgaggttgtacggggcactgaccggaactttacactccaggatcgtttcgaaaaatgcttattcaatccacagtttaagttatgcaataattcgcttaaaagtat

SEQ ID NO: 438213 - DNA, 122 bp, Homo sapiens
atttctagtcctgtggttatattttttatatttgccctttgcttccatttgtttatcactcgactttatgctgatatagtgtgtttttgtaaattgtttcaaatcctttacagaatgagggc

SEQ ID NO: 438214 - DNA, 122 bp, Homo sapiens
acttcccggcaccagggggcgccagacactctattttacctaaaggagactggcttctaccgacaggaaggtcccttgcccccaacaaagagggcgtccaatgacgtaaaccaatccgattg

SEQ ID NO: 438215 - DNA, 122 bp, Homo sapiens
gtgtcatttccattcttttcctcctggtgaaaatgaacacccggtcagtgaccaccatggcggtcattaacttggtggtggtccacagcgtttttctgctgacagtgccatttcgcttgacc

SEQ ID NO: 438216 - DNA, 122 bp, Homo sapiens
cacctgacctggcccaggcccccttccccgggagcacagatgccaggatgtgtggattggcgcccttcttgggctgctgggccccgtggtctgctaattagtcacatcatttttggcatcgc

SEQ ID NO: 438217 - DNA, 122 bp, Homo sapiens
cgtgagacccaccgggacccgcgagcgggatcagggctgggggattagcagagccgcttgcgaggctgaccctctccaggatgccccatgtaaacctggatgtcagtttctgacgctttagc

SEQ ID NO: 438218 - DNA, 122 bp, Homo sapiens
ccctcactgttccagtctctctgctcagcgtccttcgccaggtgcttcccgggcacttagcgcattgccctcgaggaacgcttatcgaattgaacataaccgacaggactccaggatttgga

SEQ ID NO: 438219 - DNA, 122 bp, Homo sapiens
tcacacatacacatccaaccctgaaccaagccagctagagcaggttgttgggtgaaattacgaggatggggaggcctcgtgctcggccatccagatctcccctttccagtcctactgactct

SEQ ID NO: 438220 - DNA, 122 bp, Homo sapiens
aggagcaagggcagcatttatgcctcgatcccctccaggccagctgctttccttctgcagcgttcaggttcgtggccgcaggagaacggaggagaacgtgaacagtctgtgcgctcagcctg

SEQ ID NO: 438221 - DNA, 122 bp, Homo sapiens
atttccatccgtatctcacttagtcatctcagctctgtcctgactaacctccctaggcctcgcctcctcagtcttccaccacacatctccctggattctcaggctgccaaaactgccactga

SEQ ID NO: 438222 - DNA, 122 bp, Homo sapiens
actgcttcccctttctttcttcttcgccttctgaaggaccacaggttctctccttcacatcgtccccctttaaccccctcttagcagtcctctctcgggaagaaaacaccctatttctctcc

SEQ ID NO: 438223 - DNA, 122 bp, Homo sapiens
gcttccaaagaggaacaaaacaattcactgacaatgaagcaaatcacgcatataccacatcgcaaccccccttcctcaaatcgggttttaccccagtgtctccctgctcagatgccgcctct

SEQ ID NO: 438224 - DNA, 122 bp, Homo sapiens
cttaaatgtgatgcatcttacttttactctaggtaaaatcatgaggtcagatcaatgtaacggaagttgtattttaacatatgtataaggtggggagaggcagtttgagaactctgaaagca

SEQ ID NO: 438225 - DNA, 122 bp, Homo sapiens
gcctccaacttaacccttacccaaaaaaaggagactagagtttcctggcggctctgatgccggcctgcctccttggctgtctccccaggctgccctctggggacatttggtgctaactgctc

SEQ ID NO: 438226 - DNA, 122 bp, Homo sapiens
tatgtatgaaagtcatggatgtggatgttattttgtcagtggtctttctgttaaaatttacgtggtgtaagattttcttttcatgatggaattgccaaaaaggccagcctctagaacactta

SEQ ID NO: 438227 - DNA, 122 bp, Homo sapiens
tggttactattgtcttttgaaacttcaaaacctatcggaatgtaggccactaggtcagggcgtcatggaaacccttgtgtgcagggagcagcagacagatgattccccagtcccggaacact

SEQ ID NO: 438228 - DNA, 122 bp, Homo sapiens
gtacccagagctggtgctggaacgcgctctagatcgcgaggaagaggcggttcaccacctcgttctcacggccttcgatggaggtgacccggttcgctctggcactgccaggattctcataa

SEQ ID NO: 438229 - DNA, 122 bp, Homo sapiens
gcgcgccggagcctggcagaggcggagcgggtcgggccgaagccgctgcctgagcaggagcgaagcggcgctagcggccggtgtctccccgctcccgctgccttctctgccgccgccccagc

SEQ ID NO: 438230 - DNA, 122 bp, Homo sapiens
ggcaacatggccaaacctcatctctacaaaacgtacaaaaattagcctggcatggtggtgcgggcctatagtcccagctcttcggaggttgaggcaggaagattgcctgagttcagggaggc

SEQ ID NO: 438231 - DNA, 122 bp, Homo sapiens
cagaagtggacaaaaatggagccaatgggcttccagaccgggacattacctcaccagcaccggctgccattggccggcgcccccgccggggcgggctgttgctatgacagcccaggccggcg

SEQ ID NO: 438232 - DNA, 122 bp, Homo sapiens
gcgcgatagaggaaaggagcctggtagcgaggagagcggctgaggctcagtgcgcctgcgcggcgcggatgggcgaggcgtgaccgaggggcgaggcgtgaccgaggggcgaggcgtgaccg

SEQ ID NO: 438233 - DNA, 122 bp, Homo sapiens
tacaggtatgacccactgtgcccagctaggtagcagatacttatagaagaaaacagactgcgaaagcagctgtggttgcagatagttttaaaattatcttcattgctgttcagtgctgtttt

SEQ ID NO: 438234 - DNA, 122 bp, Homo sapiens
aacaaacccagtagccacagaaacgcccgtgtgcattaaaacaaaaagcctggagccagacgccatgactcacgctgggaatcccagcactccgggaggctgaggccagaggatggcttaag

SEQ ID NO: 438235 - DNA, 122 bp, Homo sapiens
attttgccagagtggcccacctgactgcttctctctgctgtgtgtatcacttgtattaaccgcgaacccagcaaagagagcaggagcttgggccgggcacagtggctcacacatgtaatccc

SEQ ID NO: 438236 - DNA, 122 bp, Homo sapiens
gaggcaggcaggagtggccgctggtttttcagacctcccagggaggccgaggaaatggcccgtcctggagtgggcgtggttctgtcttcagatggatgctggagggttgggctgcgtgggac

SEQ ID NO: 438237 - DNA, 122 bp, Homo sapiens
atcaaggaaacacaatcaggattttatgtgtgaaaacgcaaaagtgatggctcggcggtccgagctgctggtcccacttctgacaccaaaatgcatcccaacccccggcagtgccaagggca

SEQ ID NO: 438238 - DNA, 122 bp, Homo sapiens
tttcttagctaaatggtgatgggagaaatggtgccttaccaccctttgttggctgtcttccggacaagggagaaagttaagttagaacccctacttcgaagtgtttgcttgtgttagtttat

SEQ ID NO: 438239 - DNA, 122 bp, Homo sapiens
gtctcggggcccgggggccgggttccccccgcggcctcctcatcggctagccaccgagtccgccatcttcccagcagcccctagatagccgcccggacgccaatcccgaagcagctatcggt

SEQ ID NO: 438240 - DNA, 122 bp, Homo sapiens
gctggcaaactgaacagggtaggacacacagcggggtccaggcgtgagcactgtcggtcccggccacgagagagccagcaccaggtcctgtactgaccacagacacgtcactgccccaagac

SEQ ID NO: 438241 - DNA, 122 bp, Homo sapiens
gccccccgccgcgagctcccggggcggaggagccggctcggctttgattagcaacacttgcgggggccgcggcgcaccctgacagcccggcagctccgcgccaaaatggatgggtctcgggc

SEQ ID NO: 438242 - DNA, 122 bp, Homo sapiens
gaatgtggatggcagggcagcattttggaggtgaagccatctgcagatgcgtgtaccccacgagggtgagaagctccaagcacacccagaatctagggtgggggactgttcgcctgagcagc

SEQ ID NO: 438243 - DNA, 122 bp, Homo sapiens
taaggcaggatggggcggggtttgtgggggtcttggtggcaagtgagggtcccgcgcaggcgctacgtcccggcctgacttgctccctggaacggtggcagctcctgggaacgcagacccgg

SEQ ID NO: 438244 - DNA, 122 bp, Homo sapiens
acgctgacggtgggcgtccccgtggggtggggcatgcaacagccgctaacccctgctccccgactctggcctcagttctggtccctgggcagcgggcgcgaccacatgatggatgccatcgc

SEQ ID NO: 438245 - DNA, 122 bp, Homo sapiens
ccggggactagggatcctgaccacaatgactgtcctgctacatgaagtgccccacgaggtcggagactttgccatcttggtccagtctggctgcagcaaaaagcaggttggtgatgtctgcc

SEQ ID NO: 438246 - DNA, 122 bp, Homo sapiens
agaaggatgaaccacacatacaaacccatcacagatgaatgcaaataaaaaagtcagctccgaagttgggttctgagcagtgtagattctactgctaaggcttggactacaagccatcgatg

SEQ ID NO: 438247 - DNA, 122 bp, Homo sapiens
aaagggccggcgaggacagccccaccccaccataccttcaaccttcttgctgtgtcccagcgaggacagtttcactcccaccggaccctccaagcctcttgcccacggctgtgtcctggccg

SEQ ID NO: 438248 - DNA, 122 bp, Homo sapiens
tgcagtctggccccagaaaagtcctggaagtttctgggctcttggatgtctccttgttggcgctccaacttcagggtaggagtttctgggcagtaagatgataggtggggaaccctgggatt

SEQ ID NO: 438249 - DNA, 122 bp, Homo sapiens
agggcatccctgaggctgctaatcggaagacactttgctcacagtcaacatgtggttccccgatggttttgtgccccaactaccagaaagccctgctcccagccagggaccaggaacccggc

SEQ ID NO: 438250 - DNA, 122 bp, Homo sapiens
ggggaagaaggtggctgggggtggcagcagcggtgccactccaacgtccgctgcggccaccgccccctctggggtcaggcgtttggagaccagcgaaggaacctcagcccagagagatgagg

SEQ ID NO: 438251 - DNA, 122 bp, Homo sapiens
ccacctgcagtgagtcagggaagaatggagccccaggctgcttctgtactgatgcatgcacgcctgcacacacacaggaagggtgccaatctgggctgaccaaaggaagtgcccaggctagc

SEQ ID NO: 438252 - DNA, 122 bp, Homo sapiens
aaaaaatccgcaccctccccccgccccccacccccaagacagaacttcatgctttggctgcgtttctgagcttcggccggcagtttccgagcccatggagtcccgccgtcaagctgcggttg

SEQ ID NO: 438253 - DNA, 122 bp, Homo sapiens
ggcgggaaccgggactgagggcggtgcttgccagcgcaagttccaggtgagcgcgggctccgcgggccgcgcactcccgggcagtgaggggcttagcacccgggccagcagctgtggagggc

SEQ ID NO: 438254 - DNA, 122 bp, Homo sapiens
gcgaggcaaaggctgcagtgagccgagatcgcgccttgcactccagcgtgggtaacagagcgagaccctgtctcaggaaaaaaatacaagtggggttataaataaaatgagattaaaaaaca

SEQ ID NO: 438255 - DNA, 122 bp, Homo sapiens
atggtttgtaatatccgggggcggagaggggcatgatattactctcaatatcttgcgcaccgtttttgtacaccctctctgatatagtttgcaatatccaggaagggagaggatgatattac

SEQ ID NO: 438256 - DNA, 122 bp, Homo sapiens
cggaggcatttccagaggacctagcgaggaccaacttccggctgcgacttccgcgtcttccgagtttcgagacctgctgcttccgcccggagttgttgtgggctccagcagcgagtagccac

SEQ ID NO: 438257 - DNA, 122 bp, Homo sapiens
cgctgcttcgaggcgccactccggggcgcggcggcccggtctggcgctggcggctgcgcgcggccccaaggtgccgcctggcccacagctcctgcagtcctggtggcgacccaacggccgga

SEQ ID NO: 438258 - DNA, 122 bp, Homo sapiens
aggacctattcacacacgtgtgagcacgcgcgcgcgagcgcacacacacatacaggcacacgcgctgcctaggggaactcacagatcaagactgataaaaattacacggcaaggccctgggg

SEQ ID NO: 438259 - DNA, 122 bp, Homo sapiens
ccggggtgactcacaggtgaccccacactacacaggactgacggtgcctgcttgtgtgtgcgtaaggcatacacgggtgcacgcctgtttgtgcgctaggtgtgtgcacaagtgttcatgga

SEQ ID NO: 438260 - DNA, 122 bp, Homo sapiens
ggcaggagacagtcacttggccttaaatgcgcctcaagaaaaagtcggtccctgcaaaaccgcggcgacttttactcgaaaccagaggcggctgagctttctcacctcccacctcccttctc

SEQ ID NO: 438261 - DNA, 122 bp, Homo sapiens
ggagtccacgaggctcctggctggttgaaaaataatcacgtgcgaggtaggatagggagacgctcaggcaacagtgtgactgttcaggcttatttgacagatctgtggtccacacatgagtg

SEQ ID NO: 438262 - DNA, 122 bp, Homo sapiens
aacccagaagccatcaaggaaatgattgatcagcttgacaacataaagtttcacaagcaacgtcaaaagataacaaatgagtgtggggatcgcttatgcataagataagaatattgatttca

SEQ ID NO: 438263 - DNA, 122 bp, Homo sapiens
tcctgtaacgcccccaccttcgctccttccgccaagataattatcactttaaattgtgtgcgtgtgtattctcatttcttatgtgatggtaaaaatgcctttattttgtttggttttaatgc

SEQ ID NO: 438264 - DNA, 122 bp, Homo sapiens
tccgcacagcgtctagcacctcttccttccactcccggtggggctgcagccactgagccacgaaggagtccagcctggaggctggtgtgctatacagttcctgcatcagtgccatctctgtc

SEQ ID NO: 438265 - DNA, 122 bp, Homo sapiens
gctcatggggatagtccacaccacacgcatcctcggggagggtggtgcctctacctacatcgagacaactggggcctaccattggagcactctggtccttggttttggatagaacagagagg

SEQ ID NO: 438266 - DNA, 122 bp, Homo sapiens
cagaatagctcaaggtccccagtgcagccgctttgaaacaaaaccacttggtaacaggagcgcaggactatggcgaaaccgccaggaaagcttcctaaagagctcaaacaaaacaaaacaaa

SEQ ID NO: 438267 - DNA, 122 bp, Homo sapiens
gcacacattaaacacagcaaaagtctcaagtaaacaccattagagggtaatcaacctggtcgccttcccctgcctcccccagagcgccatcctgcccgcgaatgattaaaggttacttttag

SEQ ID NO: 438268 - DNA, 122 bp, Homo sapiens
gactgcaaactaacaatctgtatgtcgttcctcctcacacccaggatgttccgtaaagctcgctggaagttgcgccagtagtcaccaacgaattcttccggagtgaggttggcaaagcggat

SEQ ID NO: 438269 - DNA, 122 bp, Homo sapiens
cccagagggaagagcaaacaccatagaggaaagtgctcacagctggaggacatgggtgcccgccggggctcagccccaaggggggcacaagctgagagtaggcagggcccaggcttctgccc

SEQ ID NO: 438270 - DNA, 122 bp, Homo sapiens
ctggagttccagagagggccgaggagggtgcagccacggaggttggatcctctgctccgccgcctcgtcctcgtcccgcttctgctgggttccgctttgtccctggttttttcctttctttt

SEQ ID NO: 438271 - DNA, 122 bp, Homo sapiens
actttctgcgaaaagaagaaaacgtgactgatggaaaggggtggaaacgggagaaagtgacggtaaatgggaaggtgcagtgccttctagaggaaaattatatttcacaagtcctcttcact

SEQ ID NO: 438272 - DNA, 122 bp, Homo sapiens
gctgcgtgggtgtgcacacagtggcgtcacgggccacatgccgaggcgtgggcacagcaacgtggcactcagaggtcatccccacgctcacacacagagctaggcactccctgtgcccaggc

SEQ ID NO: 438273 - DNA, 122 bp, Homo sapiens
accccaggtgatccacctgcctcagccttccaaagtgctgggattacaggcatgagccaccgtggccggccaagattttaagccttctgagccttgaaattgaggaggttaaaaggaagagc

SEQ ID NO: 438274 - DNA, 122 bp, Homo sapiens
cagcgctgccacaggtgacttgatttctgcgacggtagcttagccacccggggccaatctcgaaacattcttattttcaagtcctttggactgggtgccatctggagaagggggaagactcc

SEQ ID NO: 438275 - DNA, 122 bp, Homo sapiens
gccggggacggcgacggcggctagcagcgggggagggggcgctggcgctcccgcggcggccgctcctctgtgtttgtgtttgtagcaagatggctgcccgcctcgcaccacgtgacgcggac

SEQ ID NO: 438276 - DNA, 122 bp, Homo sapiens
ggacggagagggaacaaaggggtctttgttcactggctcccggggcgtgggagttgcgctcgctctcctttcccggcgtcccgtggagaccgggaggctcagcgcctctcccagctctcagc

SEQ ID NO: 438277 - DNA, 122 bp, Homo sapiens
tccataagttgagaagtaactgaccctgggaagatgactcagagcatcagaaaaccagcacgtttctgcttctcttacaagccctggtcttgacagacacgattgccctttctatttacatc

SEQ ID NO: 438278 - DNA, 122 bp, Homo sapiens
gacgctcgagcccgcgtaacgtctgtctccgggacccggcgccgggaccacggcggagcgcgaggtggcgccgcccctccccgcagcccgcccctggaacgcgcatcctcctggcgagctgg

SEQ ID NO: 438279 - DNA, 122 bp, Homo sapiens
gagcctggcacacctgggcctgggtctccagaatcagcagctccatcttggtcttcatgtcgcccggcctccttcgcagctcgcccaggtcggtcacaggcggggccatgaagctgctgcag

SEQ ID NO: 438280 - DNA, 122 bp, Homo sapiens
agtccttctaagcagtccagggaaaccaatttaaaagcgaacacaacaaaactaacagaccggcaaaatctatctttgaagcgccgcgggaggcacaatttgggaacaggtgaggccatgct

SEQ ID NO: 438281 - DNA, 122 bp, Homo sapiens
taacacccagattttggctgatgactgcagggtcagtgtgagctggtcccctggctcgtccgtgcgccccaggcgcggtactgcagccccttcgaagctccggacccttcggcctccggggt

SEQ ID NO: 438282 - DNA, 122 bp, Homo sapiens
gtttcttccttccggtcggttcatggtctccctgacttcaggagtgaagccgcagaccttcgcagtgagtgttacacctcttaaaggtggcgcgtctgcagttgtttgttcctccgggtggg

SEQ ID NO: 438283 - DNA, 122 bp, Homo sapiens
aaattagttttaatattacctaaaatttggataaatttcctacagaagcatcatattgtgcggcctgataagaaaatgtttagaggcttctgcccgactgttttcactagcatagtacatct

SEQ ID NO: 438284 - DNA, 122 bp, Homo sapiens
atccttaaggcaaacttacccagcctctttgtttaactagccagtcccgttttgtccttacgagaacgtctgtgatactttctgctaatggttcgatgcagctttcttggtttatggtcttc

SEQ ID NO: 438285 - DNA, 122 bp, Homo sapiens
gccatgtgtaggggagagggaggttcctgggttggccacagcccccatggtggtacagaacgcatgcagggcggttgccctgtcctttgaagactgcacactgtgtgtcaggcagccctctg

SEQ ID NO: 438286 - DNA, 122 bp, Homo sapiens
acccacacccgctccttcctcctttgaacgcagaggctctggcgacggtggcaggagccacgcagagcggtggagcttccagcgtggagaggggcactacaaggacctgcctccatgcagct

SEQ ID NO: 438287 - DNA, 122 bp, Homo sapiens
caaccagatccagctctgaggtccgtgccctgagtagaaaagttcacacagcaaagtttccggagccttccctgacgcgccacgtgtccgtccataactggtcatcctccacatcctgtgag

SEQ ID NO: 438288 - DNA, 122 bp, Homo sapiens
ggtgtgggctaggcgcgctccgggtcctccgtgaattcccagtttccaggcagctgcgcccgggcccgcctccccgagtcggcccccacctctgcacgcagagacctctcctcacctcccgc

SEQ ID NO: 438289 - DNA, 122 bp, Homo sapiens
gaggtggggagagagaaacagagacacacagattaaatgcaggtccacacgccccacgcgcgggggccaccccaagcagatatgggcccttgaggccgagagaattagggggagcccggggg

SEQ ID NO: 438290 - DNA, 122 bp, Homo sapiens
acgctgtcaacaacacaaagtcgtagttgacgtcgaccatgagcacttagcaggagggcacgcacagggacttgtgcccggcggggtccagctcctgcaccttcagctgccactccatcctc

SEQ ID NO: 438291 - DNA, 122 bp, Homo sapiens
gatttgaggtgtatgcattttatgctgtaaagcgtggccagtcacaggaggattcaaaggcgaggagagatatgatcaaatctgcacttgggaaagcgcaccttggtgcgcatctggggata

SEQ ID NO: 438292 - DNA, 122 bp, Homo sapiens
tgggcagattatttattatgtccttgccgtgcctatgatctatggaggggcactaatctccgagcagggcctctcacattcccgctcttcgacagcgtcttaattaggccagaacgctgccc

SEQ ID NO: 438293 - DNA, 122 bp, Homo sapiens
cggagaactctgggatacaaatggatacacaaatccaaagcaaaagtctagacctgggcccgagaaacagcctcttaagccccccaggtgccttcttcggctcgtttgtgtgcttacctttc

SEQ ID NO: 438294 - DNA, 122 bp, Homo sapiens
ggaaaactgctttagcacattataaacttaccaatttgcttgtaaacgctaaccatttggcgccaaaatcctgggagggtcttttaaaccgttcttcctcaaagcaccgccccactttttac

SEQ ID NO: 438295 - DNA, 122 bp, Homo sapiens
agccttctgatgccccacctttaagctggttgcagcgttcaaaccagatgctactttccacgggctgctcccagataatggcatagtgcagtggggataataggaccaggccacctctgcct

SEQ ID NO: 438296 - DNA, 122 bp, Homo sapiens
tgtggcaccaggtgtccctctggttccaggaggctcatctctctgcctccagtccatgggcggcaggtaaatccttgccttagagaaagccacagacggtgctgcctggaatttgaggtggc

SEQ ID NO: 438297 - DNA, 122 bp, Homo sapiens
ggagccaaagcctggcaaggtcagatgcctctccagcaagatggcatattaacacatgggcgacttttgtcacaagctcaagtaaagtgggaacataccatggatgagaatagaaaagctaa

SEQ ID NO: 438298 - DNA, 122 bp, Homo sapiens
cgccgtgcacatggctggaggagcgtctctccgccactgcgcacattttgcagcctgcaccggccaacggtgagtcctctaggaagctctctcaacgtggcgccccatgcctgcctctggcc

SEQ ID NO: 438299 - DNA, 122 bp, Homo sapiens
tgagagtgcagccctcgcggctgcagcccggccccccggcgctcaaactcccggccccagcgtcctgggcatccgcagcgagtccctccccggtttccgggcccatttctgcctcccggggc

SEQ ID NO: 438300 - DNA, 122 bp, Homo sapiens
gggcaggaggcgcagaacaggctcggcggacctacctgcggagtcacggcgcgggcaccgcgctaggagagttttcaaacggaatcttgctttcgggagagaccgctctatctctctgactt

SEQ ID NO: 438301 - DNA, 122 bp, Homo sapiens
ccctgggaggagggagccagagaccagcaacagcgagagggccagggcgctgggcagcgacgaacccgacatcctccctagcagaagacccaacagcgaatgggccggggccagagccgggg

SEQ ID NO: 438302 - DNA, 122 bp, Homo sapiens
aattaatcagtaaaaggaatcagggtattttgctggaaggatggctgccgaggcctaccacgccggtcctcccagcggacgcgcggcccgggccccctccccacagcaggccggcgcgcgac

SEQ ID NO: 438303 - DNA, 122 bp, Homo sapiens
atcctcaggggtgttcatgccccatcctgttgggcatgcagcaggtgcttctcagtatgccgtggtccagtgctttatactgcccactttttggaggtcatccgtggtgctgggctgtagct

SEQ ID NO: 438304 - DNA, 122 bp, Homo sapiens
ccccgcactcggagcagccggcgggccctgctggccccgggcaatgaggggcttagcacccgggccagcagctacggcgggtgtactgggtcccccagcagtcccagcccacctgcgctgca

SEQ ID NO: 438305 - DNA, 122 bp, Homo sapiens
aaaaagttggaagatgtatacattaccttattaatatcccacagaaccaatatgctctgtcgttttgcaaattcataagtagtctgcctgcctattccatgcccagctccagtaatgagaac

SEQ ID NO: 438306 - DNA, 122 bp, Homo sapiens
ctgtgtgtatttagtcagtcataaccagcatctaaaaacaaaatagaatcgaatacagtacgtttatcacacacaacaaagataaataaaaggtaactttttgtatcagaggtatatctatc

SEQ ID NO: 438307 - DNA, 122 bp, Homo sapiens
gggccctgtagtggacccccaggcagagtgcccaggccaccctgcacaggcttcagcccccggtcctgccaggccactgccaggacccccacgggcactcctccaaggcctggtgcagcctc

SEQ ID NO: 438308 - DNA, 122 bp, Homo sapiens
cgatgagcactggatctaagcagaaacgcagagccgcccaagccaggtccatcctggccccgctctgcacctcatgccatgatgtaccgcacaggccttctgagagggttcaaatcccatgt

SEQ ID NO: 438309 - DNA, 122 bp, Homo sapiens
cgtcccgggacccccgccccctcccacgcgcccttcggaccccgccccggaccccgcccacgacccctacccccgtgagaccgcgaggtcccagcccgcagtgccccacccccacccccgcc

SEQ ID NO: 438310 - DNA, 122 bp, Homo sapiens
tggagggagaggtagagagtgaggcaaggctgggtggggcccccgaacaacgaggctgctcgcaccgggagtaatagggctgcgggaattcaaactggaagtcacggcagctcctgtgcccg

SEQ ID NO: 438311 - DNA, 122 bp, Homo sapiens
gctttctagactcaaccacggcgtcgccgctcgtcgagagggctgcccatcccggggacccgcccagcctggcccagcaaaatgtaccttagtagcctcaacctgtaccggagaaaacgcag

SEQ ID NO: 438312 - DNA, 122 bp, Homo sapiens
aagtgacagtctctaagctttgaggacactttcctcagccaccctggtgacttggcccctcgttccaggagaagctccatttgagccctccacctgacccctctggatgagcctctgctcaa

SEQ ID NO: 438313 - DNA, 122 bp, Homo sapiens
aatgtgaaggtgaccggccgaccccagcaagatgcagatactcagtgagacacacagcaacgtgaaagtgaccggccgaccccagcaagacgcagccactcacagtgggaggaaagcaagaa

SEQ ID NO: 438314 - DNA, 122 bp, Homo sapiens
gaaaggctgcagagacgcttgaggatcctgcagggaggctagggcggcagacggagggggcggaggttaggggagagtcccacagaggaactgcattagaaggaaagattttgataacgtct

SEQ ID NO: 438315 - DNA, 122 bp, Homo sapiens
cccggccagtctccgtctccggctatgcgcgggagtgcggcgcatgcgaggggagtgcggcgcatgcgacagcgcctgcgcagtcatgtcttaagaatcctttgcgctctcggtgcccccct

SEQ ID NO: 438316 - DNA, 122 bp, Homo sapiens
agggataaaaaacacgactccatgataagttagcagagtcacctgtaagaaccccactgccgagcagcaaagatagatcacgtcagcagcgaccaggtggaggatgtataccatgtagggat

SEQ ID NO: 438317 - DNA, 122 bp, Homo sapiens
gttgcagagagagggagatgacttttaattcgacaagttcagagagatttcttagtttgacgcgctcagcagggggtctttgagcgcctggcaatgcttcagcattctgagctttgaaagtc

SEQ ID NO: 438318 - DNA, 122 bp, Homo sapiens
atcagctcctccaaacatgcataaatgaggacaaggagaagccagtcactcctgactgcacggtcaagtgtgtgggcagttgaaattaaggtaaaaacagtgaggctgaacaaaatcacatt

SEQ ID NO: 438319 - DNA, 122 bp, Homo sapiens
gaagcggaggtgtggtggggcttgctgggatcatggcggggaatcactgcgagctcctgccgctggcccgtggcaggctcggggcggggttggggtggcttcttgtgcctcccttaaagcgc

SEQ ID NO: 438320 - DNA, 122 bp, Homo sapiens
ctagctccttctgggcttgatcggaggctgaatcccatgcttggaccgctgttccctattcgtggaatcattgaccatgatagcaggtctccgtctctttctcgctttccctattttcctct

SEQ ID NO: 438321 - DNA, 122 bp, Homo sapiens
ttttcagaaaacttattgagaaaatagaaactgtcggataggaactccttgatcatgccacggctaaatctacaaaacttctggccaggcatggaggctcacgcctgtaatcccagcacttc

SEQ ID NO: 438322 - DNA, 122 bp, Homo sapiens
cgatgaggtacctgagcttcgcggagattttgtggggcccggaccagaacctccacgctccggagtctcagcctagggtcctgcggccacccaacaactccctgaacgacctggcccagcgg

SEQ ID NO: 438323 - DNA, 122 bp, Homo sapiens
attgtgatcagagaagatgtttgatattatttcatttttctctaatgttttaagatgtgtcgtgtgacctaagatatggtgtgtccttgagaatgatccatgtgctgaggaaaaaaatgtgt

SEQ ID NO: 438324 - DNA, 122 bp, Homo sapiens
tatattcaaaggtaataaaatcagcatctgagagagacatctggattcccatgttcatggcggcattactcccaatagccaagacatggaaacaaactaagtgtcctaatggacaatttact

SEQ ID NO: 438325 - DNA, 122 bp, Homo sapiens
cagagcagttcctcctggggcctgcggtgtgggatcgcgtggtgaaccccacggtgcatgcgcctcaggctctagtttgaggcaggaaagcgcagcttgatgcttctctggagactgatgga

SEQ ID NO: 438326 - DNA, 122 bp, Homo sapiens
atgctccgcattccgggagccctctggcctgcgcctccctcccgccccaatgtggttccccgctgcctagtagcatggtcatgcccggcccccagcccaccacgctggcccgcagacccgca

SEQ ID NO: 438327 - DNA, 122 bp, Homo sapiens
ccggaacaaaactctcctggtcagacggtgaacaccccagagtgaggcctgtgggccacacgagcctgctgaaggggttaaccggcagtggtgccaagcaggaagccccgagacctgcccct

SEQ ID NO: 438328 - DNA, 122 bp, Homo sapiens
gattacagatgtgagctactgcgcccagccacagtttaagagttttatagttttagaggccgagaccggaggatcacttgaagtcaggagttcaagaccagccctggcaacgtagcaagact

SEQ ID NO: 438329 - DNA, 122 bp, Homo sapiens
agaaggaagaggctgttcggatgtggatcccgggatccagggtgtggtaaccgacttggccgtctctgatgcaggggagaaggtattgtgaactgatttgttagtaaacggcagcggttact

SEQ ID NO: 438330 - DNA, 122 bp, Homo sapiens
ttgtcaaacctgaggattcgtttttcagtttagccggagctgtgccgcaaacgtagctgccgacatccccacgacgcacccaagtggtggcccggaagctggggatagaaaagtggcctccc

SEQ ID NO: 438331 - DNA, 122 bp, Homo sapiens
cactccttacagctgggagccagcagaggagctagtgggccgggaaagccgtcagtcctgcgttttgccttggctggctgcgggcgccacttgaaacaagccagtcatgcctctcccaaccc

SEQ ID NO: 438332 - DNA, 122 bp, Homo sapiens
gcgcgcccctgctccggcgccgggagtagctggctgtagggatcagccgagcgaggtggccgagtccataaacacgggccatttagcaattacccccagggcgtgataattgcgctgggcag

SEQ ID NO: 438333 - DNA, 122 bp, Homo sapiens
caggcattttttaaaagcactattcttcttacagtcaggaaatacaggacactattacttcgcgggggaagacgggcactgggaagagtccacgccggcgaaggcaggcgaagacagggctc

SEQ ID NO: 438334 - DNA, 122 bp, Homo sapiens
cctggcggcccaggcattagcctgcacttccccggccgccgcttcacaactaaatcaccgcggaagcttcccagccaataaatcacctgcccaccgggcagagggtccctcccactccctgt

SEQ ID NO: 438335 - DNA, 122 bp, Homo sapiens
ctgttggtgcgagagcttaacctttattttatttccaaatgtgttttttattccgagtcccgttggtgtctatggtttcacttttctccatgagccacatgttaaagcctgccctgactaaa

SEQ ID NO: 438336 - DNA, 122 bp, Homo sapiens
ggaaggaccagtcaggcactagagggcactccaggtaggcacagcctcactcagtgttggcggtccaggcatatttgggagacgtgggtgcccctggagagcagctgagatgggactcaaca

SEQ ID NO: 438337 - DNA, 122 bp, Homo sapiens
acagctccagcatctctgtctgggctatcacaacagggcccttagcctcctattgggctccggcctcccacacttgccactcccacacacatgcacagtgcactcccacctggcagctagag

SEQ ID NO: 438338 - DNA, 122 bp, Homo sapiens
ctccgggaggtcaccgagcgcagctttaatacctgagctcgaaggccccgctgtgctcgccgacccccgtacctcgcggccgggcccttgggacccacagcatccttgtgaggcccggaggc

SEQ ID NO: 438339 - DNA, 122 bp, Homo sapiens
gggcttttctttgttgtggggagggggtcgggggatagtttgatttccattttctgaaaacgacagacttggattctgtttgtgtgtgcatattttatccagccttaagttataaagctcat

SEQ ID NO: 438340 - DNA, 122 bp, Homo sapiens
cggagcggcgggggttggagaggacaacgccaagacggctgggaagccccaggccagcagcggaagtccactcggcccgccctgcgactttgaaaccggtgccccggaccactccttggaga

SEQ ID NO: 438341 - DNA, 122 bp, Homo sapiens
ccggtcacattgctggctgctgcattaatcagaggaacataaatgggcggacggaggccacgcggccagggcgtgcgacggcccctaagagcccgggacgcaggaagcaagaagccacctcc

SEQ ID NO: 438342 - DNA, 122 bp, Homo sapiens
gttcctctgcctttcttcgaccaactttctcttgttgccagttcattacacaaaatgtagcgggatttttaaggaatcagagagactgatggagttcagggagatatttattatttaggtgc

SEQ ID NO: 438343 - DNA, 122 bp, Homo sapiens
agcaacactgtgttcttcccactgctgacagaggctgctcatccgtgcacctgtgccctgcgtcctcctctgcgtgcaccctgcgtcctcctctgcttgcgccctgcatcctctgcacgtgg

SEQ ID NO: 438344 - DNA, 122 bp, Homo sapiens
gactccgagaaatctattcgttcgtcccaagatctcagccagaaagagaaatccgcgcggcggcctcttctagctcgggtgctgggaggccccgtcctgatcctctgtcgccctggccgatc

SEQ ID NO: 438345 - DNA, 122 bp, Homo sapiens
agtggccataacggcgaccgccgcaccaccgccgcccaggacgaggctcttccggagccgcggcagggtcctctcgagccggaacgcccaccttctccagccagtgattgctggagcgccgg

SEQ ID NO: 438346 - DNA, 122 bp, Homo sapiens
actcgtagcagcctgagtagtcctcgcaggcctcctcggctctcggcctcgtggatgcgtcgcatttcccttgtgagttggtgcacgccacggtccgtttccacacccctttaccacagctg

SEQ ID NO: 438347 - DNA, 122 bp, Homo sapiens
caggaatgggatgacctgtgggatggcatcccaccctgagaggtccctgaggggcagacccgaaggtgggaaatacagagcttttgctgaactggaagataattcctggagatgaggcagtc

SEQ ID NO: 438348 - DNA, 122 bp, Homo sapiens
cgcctggccaagagttcccctttctttatgtgctcaccaattttctaacttttgccaatccgagggtgtgttttagtattccattgttttactttgcatttttctgattctcgatgtgttat

SEQ ID NO: 438349 - DNA, 122 bp, Homo sapiens
ccaggaacacccacactgtactctacctgggccaaaaagactcttctcgtgtgtcagctgcggacactttggagttgattagttccagtactgactactgccctaactgctgcagcatcccg

SEQ ID NO: 438350 - DNA, 122 bp, Homo sapiens
cttgcacttgagcgtgtgtaatcagatcacatgggccctcctggagattctcagtgcatccgggccagggccccaggaatctgcatttacatcagggattccaatagagggtcctaaacttt

SEQ ID NO: 438351 - DNA, 122 bp, Homo sapiens
cagttgactaaaagcagcaaagatgatgattctaagagacttccttccttttcctcggtacgaaaactatcctcattgtataatgcaggtactaaggttcgtgatctcttttaagctttatg

SEQ ID NO: 438352 - DNA, 122 bp, Homo sapiens
aagtgaggagcacctcttcccagccgccatcccgtctaggaagtgaggagtgtctctgcccggcacccatcgtctgagatgtggggagcacctctgccacgccgccccatctgggatgtgag

SEQ ID NO: 438353 - DNA, 122 bp, Homo sapiens
gccgccagggaggagcaggccaccctcctggccaaagccccctcattcgagactgccctccggctgcctgcctctggcacccacttggcccctggccacagccactccctggaacatgactc

SEQ ID NO: 438354 - DNA, 122 bp, Homo sapiens
aaaaaccaatggaaccctcgagcagttttctaaaaatgagcctttgataaaatagattttcgcttccagctataatggagtatctagtactgggctagccatcgtgctgtcaacgatcacaa

SEQ ID NO: 438355 - DNA, 122 bp, Homo sapiens
ctacaacgaggagccggtgagcatgaacgtgcagggtgattatgagccaattgatgccaccgggttcatcaacatcaattccctcaggctgaaggaatatcatcgtctccagagcaaggtca

SEQ ID NO: 438356 - DNA, 122 bp, Homo sapiens
gactcattttctgttaggtccattcttttgttcaagaaagtgaagcctacaggataaactcgtaactagtaagtggcagagctaggtctggagtgagtcactaaatttggtctctccacacc

SEQ ID NO: 438357 - DNA, 122 bp, Homo sapiens
taggaactggagactcacactattagggcactttgaaatcctaattcactcgcttgctttcgttatgacctcttcacccgtcctccaaaatatacacttaaaaagccagtcaatgaacatta

SEQ ID NO: 438358 - DNA, 122 bp, Homo sapiens
gctaggacttcaggtgcatgccatctgtatgctggctggctaattttttctttgtagtgacgaggtctcactatgttgcctaggctgatctcaaactcctggcctcaaacagttctctcacc

SEQ ID NO: 438359 - DNA, 122 bp, Homo sapiens
gtttgttttgagacggagttttgctcttggtgcctagtctggagtgcaatggcatgatctcggctcaccacaacctccgcctcccgggttcaagcaattctcctgccttagtctctcaagta

SEQ ID NO: 438360 - DNA, 122 bp, Homo sapiens
ccctctcttgcgcgccccctgagagttgtgagcccttaaaaaagacaggaattgctcactcgaggagcttggctcttgagacaagagtcttgccgatgcccccggccgaataaaccccttcc

SEQ ID NO: 438361 - DNA, 122 bp, Homo sapiens
gggggcattttattagagtacagggatatcagctttgggcagaagcagaaggcagcttcacgtaactcttcatggggggtagtggccgaatctttcggccagcccagccccccttgcggtgc

SEQ ID NO: 438362 - DNA, 122 bp, Homo sapiens
ctgtgggaggagggaggaacagaggccagactgaccctgatgtttcacatcttctcaagccgtgtgaagttctctctctctctctctctctctctctctctctctctctctctcatcctcac

SEQ ID NO: 438363 - DNA, 122 bp, Homo sapiens
cccaagcctttcgggaaagctcagggcgtgggggcagaggggctcttgttttcaccttctcgaaattagagccagcgtgctacaccttcttgcgcagggtgtgacctggagagccctgtgcg

SEQ ID NO: 438364 - DNA, 122 bp, Homo sapiens
agtattcttccaacgataatactcacatcgcagaacgcgaaaatcttctgtcaggaggggcgatcctcagagtcactgggctacacaccatcctggagttgcgaggggacagcacagccttc

SEQ ID NO: 438365 - DNA, 122 bp, Homo sapiens
atataaggaagagaggcagctcccaattgcagctccagctctgggcactgtgggttcacccgaagtctggggacacaaggacattactcattgtcaatctaagtaagccaggtcacagtgga

SEQ ID NO: 438366 - DNA, 122 bp, Homo sapiens
tgcaaagattttttacttgtacagctgagaagcaggtcacttagtttctcaaggaccagccggcctcagtgcacaactgaaggtcaagcgactcttacagccctgtagccttgccgtgtgac

SEQ ID NO: 438367 - DNA, 122 bp, Homo sapiens
gccttctgctgtttgtctccgggatctttaactctcctaaaaggggaaaactgtccagttcgattttgcttcctgggacataacaggtttttcaaaagtttgatgaaagcattcactaagga

SEQ ID NO: 438368 - DNA, 122 bp, Homo sapiens
atcaaacagccagacacccaaggccaaactcactaataaagtgagacattcagctcagcccggcggctgctgctgaaggtcttaaaaaaaccgcttactggggagttcttgataaactgtct

SEQ ID NO: 438369 - DNA, 122 bp, Homo sapiens
tgaaccgggtgtggtttggatttcggagctggagctttggaatcaaacctagcttccaaacgattgtgtacccgtgaccttgggcttgttacgcgcgatgtctcggaccctcctttatcttt

SEQ ID NO: 438370 - DNA, 122 bp, Homo sapiens
gaacacaccgtggagtgtcctgtgacagtcacttggagtattggccgatctcagggaagacgttttaattagaaatgctcaggattcttggccttggggattaaaccctcactgtccagatg

SEQ ID NO: 438371 - DNA, 122 bp, Homo sapiens
tgtccccaggtacttctgcttaaagtaggttctcctctcaaatatttttataatttcccccgactgtccttctttgcctcatgctatcggcaaacgtggctggtgcgctaacaacattagct

SEQ ID NO: 438372 - DNA, 122 bp, Homo sapiens
ggtcctggtaccgggtggggagagcggaaccctcccaaaacttggggcgcggggcggggccgtcgggcggtgacgtgaggggcggggccgggccccattggcgggcgggcaggggaggggcg

SEQ ID NO: 438373 - DNA, 122 bp, Homo sapiens
tgcagcctctccttttgtttccggtattacctgcccaggagcagaattccttactttctccggagagaggccggtccctgggagcgctgcccagccacccgcacgcctagccgccccgagag

SEQ ID NO: 438374 - DNA, 122 bp, Homo sapiens
cacggcgggggaagaagcggattacgcctcccgtcccctctccacctccggtcactgcgacgagtccccaaactcgcccgcggtcggagaacccgccgctgacccagattccgccgggcgaa

SEQ ID NO: 438375 - DNA, 122 bp, Homo sapiens
tacaatattattttaagtacagtatccaaccaggaccacattgcttatgctccaagacaacgcctctcatcttgtttgcacgtctctgttactcccagggctgaattcactttcttttattt

SEQ ID NO: 438376 - DNA, 122 bp, Homo sapiens
cggtggcattaatatctcactggggcccccaaatgttgtacttgagtgagttagagaaaacgccacactttgagatgaattgagagaccatttagccggcggccaagagacagctaatgctc

SEQ ID NO: 438377 - DNA, 122 bp, Homo sapiens
ataactcgtgttgagcacactgttcgtgttcctgcccctagttctctgggtgtgtggctgcgcggaactgctgggtaattctacccttcgctctttgagaaccgctaatgtgtttttcacgg

SEQ ID NO: 438378 - DNA, 122 bp, Homo sapiens
gctcggcatgtaagcacaaagctgatttctccttgttgtgaaatcgtctctagaatcgcacggggttcctcctctctctccctgcagctgcagataggagccgcggcctggccctgggctgc

SEQ ID NO: 438379 - DNA, 122 bp, Homo sapiens
gagatcaaactcgggtgggatatccagtcatgctgtctgctttgtttccaggggtcttcacggcttctctgcccaggggccagaaccgaggaggccaggagggctgctggggctaaggggtc

SEQ ID NO: 438380 - DNA, 122 bp, Homo sapiens
gggatggctttgtgccatcttgtgtttcttcagaccctgcctgagtttcaggagaatttgcgtgaccatgggaaaggctactgggctgtccaaatgctaccgtctctcaggcacctgacctc

SEQ ID NO: 438381 - DNA, 122 bp, Homo sapiens
aaggctgtcacagccctgtacagttcctcaacaacatgaactgtatcattacacaattgtcgtgactttaggtcacctttccttctcagataagccgcaccagggcagggatctcgtctgta

SEQ ID NO: 438382 - DNA, 122 bp, Homo sapiens
gaccttagcattccaccagcggagaacttcctggaactggcagctggcgctgctgggagccgcccttccctcccgccccgtgcggccactcacctgggggcagctggaagttctggatgttg

SEQ ID NO: 438383 - DNA, 122 bp, Homo sapiens
agcaccaaagtatattaccggtggaacatttccgagtcacagggcaccgaaatatgttagcggcagtggttctgtccaggtctgaagcaaactcaattcttgcctccgcagaagaaacgatt

SEQ ID NO: 438384 - DNA, 122 bp, Homo sapiens
gcgtgactctgggccaggcctgcctgagcctgggctcctttgggagtctagaagtagatgcggcaatggtggccccctcctggaagccaccccacagccatccctaccaatcacaagaaggc

SEQ ID NO: 438385 - DNA, 122 bp, Homo sapiens
agcatgggtggttctccctccaggaaagggggaggagggaccaggacctgagttgcatagcggctgcctggatgggcttagaagcctttttgagggacctccctgcccctatcctggggctt

SEQ ID NO: 438386 - DNA, 122 bp, Homo sapiens
ctgatcctgcctggaaagtcaacttggaagagccacaaatgtcctaatcctcttccaaaccgcctaagtaggtttatccagtgacctgtaaaaccaaattagtaaagggacactttaattcc

SEQ ID NO: 438387 - DNA, 122 bp, Homo sapiens
gcttgccctgcccatccccgtggcgggggcgtggccatggcgggggcgctccggcgggggcgggccctgggctcccgcccttcgggtcccacagtttccagccgccgctctcctcagtgccc

SEQ ID NO: 438388 - DNA, 122 bp, Homo sapiens
gaggcaggagcctagccccggaaggcccagcccgtcctcgtgctgtctccggccggtgctcgtgctgaggctctcctcgggcagccacccgggagcagacaccgtgtctttcctttttaaca

SEQ ID NO: 438389 - DNA, 122 bp, Homo sapiens
cacctacttttgggaatctgtagctgtgctttgagaattgccatcggtcatgtgttgcaccgttctctgtatgtttacgtcctttggactggcttctcccaggattcttttctgtttttgtt

SEQ ID NO: 438390 - DNA, 122 bp, Homo sapiens
ttctgtgtccagcttctttcacgcatcacagcgtttttagggtccatccatgtggcagcacgtgccagggcttccttccttttcatggctgaataatatttcatcttatgaagataccacat

SEQ ID NO: 438391 - DNA, 122 bp, Homo sapiens
ggcttgaggggacacttctggccttctatgtgcagggactataatttccctcaaatttatcggtgaaagaaaatggtcagttgagagttggcaaacatgtgaaaacaataaagcagaaagga

SEQ ID NO: 438392 - DNA, 122 bp, Homo sapiens
gcactgccagaggccagctaatccctctgcatctagcatcatctatgcctggataattcacgtatctcaccacacatgtatatcatttctttcttttgtaaatgtgcatgaatgttgttaca

SEQ ID NO: 438393 - DNA, 122 bp, Homo sapiens
agttcatttgtgtaataagattagggtggggcgggcagccttccctgagcgctatgtaaacgtcaagcctgatcaaaccaatctgtgagccccacgtaaatcagacaccacctcctcaagct

SEQ ID NO: 438394 - DNA, 122 bp, Homo sapiens
gaagcgcccctgcaaccaccggtcactaggtggcagcagcttgtctccacttggcttaaacgcggccaaccctccaagtcagaaagcgcagaccaaaccggctgcagccagctcccacctca

SEQ ID NO: 438395 - DNA, 122 bp, Homo sapiens
atggttcgtgggggccactttgcggcctttgaggagccggagctgctcgcccaggacatccgcaagttcctgtcggtgctggagcggcaatgacccacccctctccccccgcctgccacctc

SEQ ID NO: 438396 - DNA, 122 bp, Homo sapiens
cggggcgagggcagcctcgggcccagagaaaggtgcgtagcggctggaggtgccgatgcccggcctggccacccccgcccgacccgctcaccgccacggccgccgggctcagcgagaagctc

SEQ ID NO: 438397 - DNA, 122 bp, Homo sapiens
ggcgccgtggggtgggtgctcctggtgagaggagtccactccgtgcgtgcgggcggaggccggcccccgagagccgccgacatgaagaaagacgtgcggatcctgctggtgggagaacgtga

SEQ ID NO: 438398 - DNA, 122 bp, Homo sapiens
caaccagtgctctgtaaaatggaccaaccagtgctctgtaaaatggaccaatcagtaggacgtgggcatcacaaaataagggaataaaagctggctgccggagcccgcagtggcaacccgcc

SEQ ID NO: 438399 - DNA, 122 bp, Homo sapiens
ctagacgaccaagttctaaaatgtcccttttctggtgtacagaaataactagtgacccctcgcagctttccagccccctgccttaaacttgctcctaggcgtctctgggctcccgggagacc

SEQ ID NO: 438400 - DNA, 122 bp, Homo sapiens
acctcgtgatccgcccatctcggcctcccaaagtgctaggattacaggagtgagccaccgcgcccggccacacattgtaacattttatttcctcatgagggaggagtctgggtgaggttaag

SEQ ID NO: 438401 - DNA, 122 bp, Homo sapiens
acctctgccatgctgtctctgttccttgagatcagatagagcccggacagcaaagaagcacgtggccctgatattaagatacaagcatgccaacagcttgcattagtatttgtggaatggat

SEQ ID NO: 438402 - DNA, 122 bp, Homo sapiens
taaaagtaaatgctctttctcccgatttgattgtggcagcatggaggaatctatgtaaagcgcagtgccaaatttaacgagaaagagatgcgaaacaagttgcagagctacgtggacgcagg

SEQ ID NO: 438403 - DNA, 122 bp, Homo sapiens
gggccgagagagcgcccaacgaccgccggctccctccctgggcgcccttttcaggtactgcgcctggaccacactcgtcctacaccggcctcgcgagacaccatcactcgtgactgggtgag

SEQ ID NO: 438404 - DNA, 122 bp, Homo sapiens
aaaaatcctgagacctcctcccctcgcccttcatccacttcaggggaccgagtgtctccacggaacttcacaagggaggaaaagagtgaactcattattatttgtcttgtcttcgtttcaga

SEQ ID NO: 438405 - DNA, 122 bp, Homo sapiens
tagccctccaccccacacacagcccacatgccggtctccaggggccgtggctggagattccgaatcctaccggccgcttcccctgagtacactcccagctgaaggcgtctggctgggcctgg

SEQ ID NO: 438406 - DNA, 122 bp, Homo sapiens
tcgtgaggtaagaagccaggtagcaggtacaaaaggtgaggccgaccagagacctcctcacgcacatctgtcaactcgtccccttctcggggatccacggtgcctgcccaaatcccctggcc

SEQ ID NO: 438407 - DNA, 122 bp, Homo sapiens
gagctgacaggaagatggcgtggagtgagcaggagacgcgaccccactcccaacatgggccgtacgggcgcagtgtggcacgtggcatgggcacctacctctttgtcttccgtgagctttga

SEQ ID NO: 438408 - DNA, 122 bp, Homo sapiens
gccccgcctcgcgccctccggaaggcgggttagggacgcccggggctcagcttagggaggcgggcgccacgccacgaggaggctgccctgatagccggtgcaagtgctccttggcggggcgg

SEQ ID NO: 438409 - DNA, 122 bp, Homo sapiens
gaaaggtgtcaatatttggaatatctgcaaatctgaatgaaccaatattttttaactgatcggtgcatgatgtttataaactcacatacatggggtgaaagatgcactcaaaggacaaggtg

SEQ ID NO: 438410 - DNA, 122 bp, Homo sapiens
aattgatgctgagttcagtatttgatagtgtgttttctcagcattttattgttgtcactgcgggggctgaaatgaagttctgctctacttgtaccttgactggaatttgatgtgcagggctg

SEQ ID NO: 438411 - DNA, 122 bp, Homo sapiens
gatgctgaggagacaagggacgggggtggtgtcagggcgagtattgggccccagcctcgtcgccagagtgccaccctggctgtctcctggggagatggtggtgtcctcacagagggcctgcg

SEQ ID NO: 438412 - DNA, 122 bp, Homo sapiens
gaaattaagccactcaagtctcttaaaatattagctcctataggattcctccttttcattcgtttcttttccttttggtttttgtttttatttccttttcttcatctagaaaaaaaatggga

SEQ ID NO: 438413 - DNA, 122 bp, Homo sapiens
cctcaccggcggcgacctcagcctggcggaaagctccttgcctggaacgcagagggccttcgctgctgcggcccctggggactccttcgcgacggcttcccggggagggggctgaggcctgg

SEQ ID NO: 438414 - DNA, 122 bp, Homo sapiens
ccggtgttcgcggaggggtgataacagcatttctttcgctgtggccgtgagcctttcacccgtccctgccctcagactctccagaggtgacgttcctgttagcctgcgcgcccacccctcag

SEQ ID NO: 438415 - DNA, 122 bp, Homo sapiens
tgcgcctcagcctcggtcccgcctccagccctggccccgccccgccgctctccccttctccgcccctgccctggctccgcccccgcctgcccgcgcaccgcagaaggcctcctggaacttcc

SEQ ID NO: 438416 - DNA, 122 bp, Homo sapiens
ctccagggccacgttccagggtcgggtttggtggattcctcagtccctgccgccgcggggcgccctgggatagcggcggggcctcctggtgagcgcgcgccggggcggcctccgggaagtgg

SEQ ID NO: 438417 - DNA, 122 bp, Homo sapiens
ggttaggagttttgcaaatagctccgtcctcattgtcatgaaaatcttgaacaatatggacgctcatccaattatcaaagcaacctggggggcagagtctggcattgtgtgtacccattatt

SEQ ID NO: 438418 - DNA, 122 bp, Homo sapiens
tctaaaaattaaggaggtcatcatctaggtcttagccaactgtaatacagagttgaaacacgagagggcaacgaagattaaagaaaaaaaaaaaatcacagttggatcccataacctaaggt

SEQ ID NO: 438419 - DNA, 122 bp, Homo sapiens
cattctacccacgtaagtggcaggtgtggctgtcaatcacagagggaaccgacaattcaccgctcggggagtaaattgcctttcatacagcaaaggcaggtagccgcctaaaatcgatccac

SEQ ID NO: 438420 - DNA, 122 bp, Homo sapiens
ctagtgctcccacctgacagcctgtcctccttcagccttctcccttcctgaatggatacccgtcccagcccagcttgccctggagcaatttcatccatctatggactgtcatagggcctagg

SEQ ID NO: 438421 - DNA, 122 bp, Homo sapiens
ctgtcctgcagcagcaggaaaaatggtatgagaagcttcattatgcttggagcacattttcgtgccatttgccaatgctgtaaaattgtgtaaaaatgtcagctgagaactggaaataaaac

SEQ ID NO: 438422 - DNA, 122 bp, Homo sapiens
tactggcgagactccgccctgtgtcccggctggggagtgggactgaggatggtggtgtctcgggttttggtggtggtgatgctggtgttgctggcttagttatctccccaccccacgcccag

SEQ ID NO: 438423 - DNA, 122 bp, Homo sapiens
gtgcctcccaggctccgcacccctgatgctgcgcgggtgctgagcccgcttcggccgggacgatggtgaagtatttcctgggccagagcgtgctccggagttcctgggaccaagtgttcgcc

SEQ ID NO: 438424 - DNA, 122 bp, Homo sapiens
ccagctgccggcccgtggtatttggggacggctgttgctcagagacacctgggaataggccggggccgagatggcgctgagcactcggtctccccttcagacccatccatcagcagcggtcc

SEQ ID NO: 438425 - DNA, 122 bp, Homo sapiens
tttggagagaagaggggagtgaggcggtgtgtgcttggggctggtgtttgtcagtgtgagcgtgtaagagcacacctgcattcaagggggtttgtagtgtccgtgcgacatctgagggaggt

SEQ ID NO: 438426 - DNA, 122 bp, Homo sapiens
agggcccgcacgtgcagggtcgtgctgttctccatctcctggatggtctcgatcagctcccggttgagcttgctgaggaagttctcacggcttcggagctctcgcagagcggccctcccgct

SEQ ID NO: 438427 - DNA, 122 bp, Homo sapiens
caggcggggacctagtaccttccgtccagcgctccccgctgcccagagtcgccgccatatcggttcccaatcagcaggtccgccgagcctcccccgtgcccgaggctgaaagagaagggggc

SEQ ID NO: 438428 - DNA, 122 bp, Homo sapiens
ttgtcctataatctcaagtgaagctaatgccaagtgtggccagtgacagtcctgtgaacccgaatgtttagttgaacctgaaatgaccctgtggtagatgtttcaagtaccatattatgggt

SEQ ID NO: 438429 - DNA, 122 bp, Homo sapiens
gtgaaagtgtcttcccatcgacccttgcgctgggccccggggtccccggcgacccttattcgagcccaacacctgcctggggccgctaggtgttccccaaagcgggcagaaggcccatgagg

SEQ ID NO: 438430 - DNA, 122 bp, Homo sapiens
ctgtcgctgtcaggaggaagcacgaaaactgtttatggaatccagtcgacgttcaggcaccgcgcgatgaacgcaaacatgtctgagacttcctctatcactttggctgtgggcttccccgc

SEQ ID NO: 438431 - DNA, 122 bp, Homo sapiens
gagacccacaaaccagtccagtgtcccggccctcccttggactggcgtcgcgcccaggggcgtgccagggggcggcagagtactgcttgtcagttccaggtgcccttgccccagccttctgc

SEQ ID NO: 438432 - DNA, 122 bp, Homo sapiens
gagggggttaaattcactccactccaatccagtgagggaaaaccacgtcatccgggtgcccgctgccccgcagggatccacatgcaggcaggcagagccaggtgaccccggcacccggggag

SEQ ID NO: 438433 - DNA, 122 bp, Homo sapiens
ggaccagacactaggaaatctaggtctcttgatagagaggctatcacttatgttttgtggcgaaagaacatcagcatggttcacaatatattttgcccagaatgttcgttacccaggtacag

SEQ ID NO: 438434 - DNA, 122 bp, Homo sapiens
gccaacccgcctgcatttgagtgtctgtcaggcccggagcttgtagttgtggggaccaggcgtgcaacatccactgtgggtaccattgcaggcccgggctacctgagggccacagaccacgt

SEQ ID NO: 438435 - DNA, 122 bp, Homo sapiens
gttgaatgaggacagtgagggggctgaccttgccccctccccaccttccagccccggccacgccccaccataggatctcagagttaggggacagactccagtctccagtctagaaggctctg

SEQ ID NO: 438436 - DNA, 122 bp, Homo sapiens
gagcttgtcctcagcctcaacagaaaggtcagctgaacagactccaaggcagtggagggacggcagcccccagcactccactctgccatactgtttgggaaggaaaagctgtaaaccgatgt

SEQ ID NO: 438437 - DNA, 122 bp, Homo sapiens
accttgtgattcacctgcctcagcatcccaaagtgctgggattacaggcgtgagccactgcgcccggcaaaaatttttaattaatagagaaaatcaggggaatgggacattgggacagactg

SEQ ID NO: 438438 - DNA, 122 bp, Homo sapiens
gcagcttcactactaagccaacgagaccacaaacccaccaggaggaacgacaattccagacgcgtggctttaacagctgttaacactcaccgcgaaggtctgtagcttcatttctgagtcag

SEQ ID NO: 438439 - DNA, 122 bp, Homo sapiens
aggaggacaagaggcttttacaccgaacggaggtgatgtggacgacaacggagacgcagccgcacttcaccaagcggccggtccgaggggacatggcggcaacctctgcagcgtcagtgctg

SEQ ID NO: 438440 - DNA, 122 bp, Homo sapiens
cacacctgcagaggagggaagaagaagaagggcctcacatcagcccagcgggggatgttacgcccacagacgccccggggctcagttactgtctaagtgttagaaataaattttcggtgcca

SEQ ID NO: 438441 - DNA, 122 bp, Homo sapiens
cgaaccgaaagaacgcacaaaattctgtcctgaaaacacgaaaacctgagccagccgtggcgcactgaacttgcttctctgctgtaggtcgactgtgctaagaatttaaccattttctgctt

SEQ ID NO: 438442 - DNA, 122 bp, Homo sapiens
aaacgcgcccagcccgaggctggctggggttgttgagcgcggagttgacatctgaaggtccggtgtcggtccggtagaggctcaggaaagccatttggcaactttgagataggattcccgtg

SEQ ID NO: 438443 - DNA, 122 bp, Homo sapiens
tgtcgtgggcctcggtttggcccgagttgttgtttccatcggtaaaggggtggccggcagcgtccacaggctggatgggatggcccggactgggcacagtaggtgctcactaagtatccatg

SEQ ID NO: 438444 - DNA, 122 bp, Homo sapiens
tttttgtcagcccctcacgtgtttccactgcaaaggtgttcttcaccctgccttcagggacgcagcataaatccttagatttcctcacattgtcttccctcttcattcacccccctgggctc

SEQ ID NO: 438445 - DNA, 122 bp, Homo sapiens
caccctgtgatgagcccttcaggccttgctctagatgtcacttcagtggcatgctggagtcggcctccactggctggcaccagcttgcaccagcttgcaggagcacatgtttgcatctcttc

SEQ ID NO: 438446 - DNA, 122 bp, Homo sapiens
attcggcttctgctcaaggtcagaacaagccgttcaccagcgttgattttaccaacctttcggttattttggaaagccgaaagagaacgcaacagaggcaagaatggatctatgggatggaa

SEQ ID NO: 438447 - DNA, 122 bp, Homo sapiens
gctggggcatgccagcgtggctgagcagggcgcgggtggggcatcgctggccggaggtcccggtttgcaaagtgaccgagaagaaaaatcctgcatcaaaagttacagttgctgccgggagc

SEQ ID NO: 438448 - DNA, 122 bp, Homo sapiens
acccgctccgccccttccggcggcgcctcgcaccgcgtcggggtgagcgggtgcaagcgacgccccggcatagcggcaccattggacacttcctgcgctgcttcaatcgccgggattgcctc

SEQ ID NO: 438449 - DNA, 122 bp, Homo sapiens
agaatctaggaataatttagcactagctgtgttagactagaaaggaatgcctttaagaagcgggtttaaccattggaaactcaatggaggcttcttgaaaggaataggggaagaacagatgg

SEQ ID NO: 438450 - DNA, 122 bp, Homo sapiens
cccgaggatggtgaagaagcggccccgatcatgctcaaagagcagcacatcccgttgcagcgtcgtgccttgcaggggccggcaggtgagcaggggccgcagcacggctagcagccccgtgg

SEQ ID NO: 438451 - DNA, 122 bp, Homo sapiens
gtgctggcgtgcgttcattttcagcctggtgtggggtgagtggtacccaacgggccggggcgccgcgtccgcaggaagaggcgcggggtgcaggtcagcgccagcgggggcgcggcgcatgt

SEQ ID NO: 438452 - DNA, 122 bp, Homo sapiens
aacttcctccagccgaaaccaggggctgtagccagttaccccgggaagctgtgagcccttcgttagagagggtcacggtgaccagcgaagcacagtcctgctcaccgcgtccagcatggcgc

SEQ ID NO: 438453 - DNA, 122 bp, Homo sapiens
gagaccatgggctactgggttgctaagtgctggaaacacctgcatgtcccccaggcaccacggcagctctgagaagaggactctgtgaggggagggcggaaatggggaagctgggatacaga

SEQ ID NO: 438454 - DNA, 122 bp, Homo sapiens
acctgggccaggctgggacgaggccgcgcgggagggcgcgctgggcggacgctggggccgcggagcccaaccgcccttgtcctggacgccccttggcggtccgcactggcgggtgccctctc

SEQ ID NO: 438455 - DNA, 122 bp, Homo sapiens
tgggcgcaggcaggggagggctgcaggggcggggcgtgagctaggcgttgggccgggtgtcggcgctgggtccagctgtccatccgactgtctgtccatggggtcccgtgtgaggttctagg

SEQ ID NO: 438456 - DNA, 122 bp, Homo sapiens
ggctctgccgggaccaggcagccgcagggctgcgggtcgggggctgcaggtgaggggctgcgggggtgcaggtggggggctgtgggggtgctgcccggggatgctctgggggttctccccat

SEQ ID NO: 438457 - DNA, 122 bp, Homo sapiens
acccccggcgggagggtctgggcggtggggacgcctccatcgggcggctggcgtgcacgtcgccggggtcacgcggcctccccgacggacccgagcctcccgtggcgggggtggggcggcca

SEQ ID NO: 438458 - DNA, 122 bp, Homo sapiens
gagggcagagagaataataactatggggtgtctgccggcatgagacagactctagaaagccgagcaaggttgagggctgaagggatggagtaatgcttttcacagggccaccctggaggaca

SEQ ID NO: 438459 - DNA, 122 bp, Homo sapiens
tcgtctccactcccctataggggtcaaggccctatgtcctctcaaggtttgctgagaaatcgctgacatgaggtagaattgattagtaggagaaaaggcatacaaatttacttcacgtgtat

SEQ ID NO: 438460 - DNA, 122 bp, Homo sapiens
cgagggaacggggcagaggaaacctctcggcatcagccccgcccctggcgcctctgcctccgagccgctttcctggtgcctccgggtgctctgggatggttctggtctttgggagagtggca

SEQ ID NO: 438461 - DNA, 122 bp, Homo sapiens
gctgcaactttgtgacagcagtcctaggaaacaaatactcctgagacaaagagtcagcagcggaaaaacagagccaaagatgattgtctatgaaaacaaactcttcctgtttatgctgttgc

SEQ ID NO: 438462 - DNA, 122 bp, Homo sapiens
cagaggagaagcccagggcacccttcctgccaccccctcctgagccagtggacaggacatcgtgagcggtctgaaaactacagaaaaaaacagcgagtagacctggagaaagctttctagca

SEQ ID NO: 438463 - DNA, 122 bp, Homo sapiens
cgcaggcgcagtgggtgggtgcgcgtggggagcaggcgcgcgcagggggcgggaccgggccgaggttcccgcgcgcggcgagagtttcgggttttggttcgcagcgcctgcgcgcagaggag

SEQ ID NO: 438464 - DNA, 122 bp, Homo sapiens
agtatgagagtcacgtggctctgcagcgtgacggcgattgtcaacgtgggttcaggatcacgtaacagactacacagccagcccgttaactaattctctagggttagtttcgagctgtcttg

SEQ ID NO: 438465 - DNA, 122 bp, Homo sapiens
acctgccaacagcagagcgtaccatgctgcaaggagtaataaacaaggaattagaaaactcgctgctggagaacagtcaaattaaacacctttttgaaaggatgagcatgtatatattgcag

SEQ ID NO: 438466 - DNA, 122 bp, Homo sapiens
aaggcagtgaagccgccgcttcatattcacggagaggaagcatctgacacgtttgagctgcgtcctggtcacacttcagaaggtgcataaatatccttcaagaggcagagcaaatgttcatt

SEQ ID NO: 438467 - DNA, 122 bp, Homo sapiens
ccgcatcccagcgtcgcggagcctccaggcgcgggcaggcgagactggcgtgcagcgcgacggcctagtcccggcgtcccaccgtcccccactcccgcaggcgccgagccgattcagccgcg

SEQ ID NO: 438468 - DNA, 122 bp, Homo sapiens
ttggaatagttttaaggcgtgcaaactgtgagactagacaatttcacttagaaaatgaaacgtgcatgcagatgttattctcatggggatatatatctgcatctgtttgtctacaagtgttc

SEQ ID NO: 438469 - DNA, 122 bp, Homo sapiens
tgagagccgctcctcccaaggagccggttttgcttttcctgcctcctttcttggtgcaaacggtgatggtgcgtggcggtcctgtccaggtgtgtctggagtgaccgggttggccctgaggg

SEQ ID NO: 438470 - DNA, 122 bp, Homo sapiens
cagcgcaggtcgggttccggcgcgcggaagccctgcgaaccccaaatgtgtgcgctgagccgaggcctctaagcggtaggagagaatctgacctccgacattcttttcaagacacgcgccgg

SEQ ID NO: 438471 - DNA, 122 bp, Homo sapiens
ctttccccagcactgtgtggcccacgcgcctcccgacggccgcctcagccagcaagcaggcggctaggccagtcctagccaccacagaggccttggcttctccagggcccgatggtgattcg

SEQ ID NO: 438472 - DNA, 122 bp, Homo sapiens
ttgccttcttggtccagctgcctccagctcccttggaacccagttcctgcctcttttcttcgcttttcttattgtgctgttcgcttacaggctctggggtggtgccatttccttggtagcat

SEQ ID NO: 438473 - DNA, 122 bp, Homo sapiens
atagaagttgcttgtctagattggaagccatgtggttctgacgccaaggcccggctgcaacgtgcccgacgggctactccgggctggcagccccgcccttcttcggaaagctgacttacttg

SEQ ID NO: 438474 - DNA, 122 bp, Homo sapiens
gaggaggggtccctttttcattctggcctgaaccccactcgtcaggcggagcagtgggtgcggcgacaggctcatctgcgatccacctcgggccagaggggaccccagaggccagggcggca

SEQ ID NO: 438475 - DNA, 122 bp, Homo sapiens
ccatgagacagaatcttgacgtagaaataggcccacagctagtcccacctgctctgcctccggggccgggttatgattccactttgtgccaacccttgctgcagtgtggatttgactgtgtt

SEQ ID NO: 438476 - DNA, 122 bp, Homo sapiens
ggtgagccgcttcccaagaccatctcctgggagctctgccctcctcacagtccacgctgtcgctgtcatccacatcggctcctgtccgtgcaggggtcttgccccgacctcccttctgatcc

SEQ ID NO: 438477 - DNA, 122 bp, Homo sapiens
agccgcgggccggcgggcaggacagagccgggggaaggcccgcagcaggaggttaggcgtcgggaccaattcccgctgacccggagcagagccatccaggagtgcaggagccctgtgccgcc

SEQ ID NO: 438478 - DNA, 122 bp, Homo sapiens
aatcggggctgcgcgcggcgcttgtgggccagcgtgagttccaggtgggcatgggcttggcgggcccccaaactcagagcggccagctggccccacctgccccaggcagtgaggggcttagc

SEQ ID NO: 438479 - DNA, 122 bp, Homo sapiens
gggcggcttcacgacaggcgtgagaaggccatggccctgtgtgggtgaggaagcgcagtgcggctcccccctgcgtggtgggactaagaagagccccctgccacccgaaaggcgccctaaca

SEQ ID NO: 438480 - DNA, 122 bp, Homo sapiens
tgggcagacctcagacacgagggccatggcggcagggacgcagcatcctatgacatgaggcgggaggtagaaaagccagtggcatttcaagtggcagcaacagaggtctcatgtcatatcgt

SEQ ID NO: 438481 - DNA, 122 bp, Homo sapiens
caggaactctgtcttcggggagctctgttcttgagacgcgagtctgccgaaactcccaggcgaataaagccaaatccttccttaacctggtgtctgaggggttttgtccacggctcatcctg

SEQ ID NO: 438482 - DNA, 122 bp, Homo sapiens
atagaaaatgttggtcagaagcactacaagtctcccaataagagaatctaggagacctgacgtttaacacttaggcttttggagataaaagtttcagagctaaaattctatctaaactatca

SEQ ID NO: 438483 - DNA, 122 bp, Homo sapiens
aatgatccatattaaatacttagaaaggcacagataatccaagaaagatgtggaccaccccgcatcacagcagtgtggctctctcagaatgtgtagctctagctacatgtggctaagctgct

SEQ ID NO: 438484 - DNA, 122 bp, Homo sapiens
ccaagtgctgggattacaggcgttagccactgcgcccggccccagccaggcagttttaatcgagcgctcacaaccactgagacgcagtgaagcacccaccataaaatcccaggaggccgacc

SEQ ID NO: 438485 - DNA, 122 bp, Homo sapiens
gactaggaacaatttcagtagctttgccctgaaccaaacgagaaaacaaaagggaactcccgtatgacccacgtcacgtggtgcactcagagtgtgtgcggcatgatcctcggttgctcctc

SEQ ID NO: 438486 - DNA, 122 bp, Homo sapiens
tgccagcctgcggggcgaccgctcgggatcccggggccgcggccgggctcagccttcacccgacttacttcaacctggccgaggcggcgaggatttgggccaccgccacctgcggggagagg

SEQ ID NO: 438487 - DNA, 122 bp, Homo sapiens
gcgggggcggacgggggcgggcgctgaagccttggggtggggaccgggtgaggggcctgacggcagagtcggtccagaactgcccggacagcgacgcacagcgagggtgagaccccagcgga

SEQ ID NO: 438488 - DNA, 122 bp, Homo sapiens
aggagcccccgccggaagtcttcagcaccggggacaccaaaaagcagcccaagctccagccgccatctcctggtaagtggcggcgctgcagtcactggcccaggaaagcccaggcgcctggc

SEQ ID NO: 438489 - DNA, 122 bp, Homo sapiens
gaagaggaacaggctcagaagggcagaggcaggtatcaggctcactgcagatatcaggggcgcgggacactggcggcctcgcctccgcggcagggccgggccgggccgggctgggctgggct

SEQ ID NO: 438490 - DNA, 122 bp, Homo sapiens
gcatcgggcccggagcagtggaagtctcatccccatcctgagcggcctcttttctaggatcgagaggaccacactgcagcccaggacaaaagccccacggtagcacattgtccggcaggaga

SEQ ID NO: 438491 - DNA, 122 bp, Homo sapiens
ttgaattccgcagagatgtcatttctgaaaggcagacggagctccggcttgttcttccttcgcagtttttcctcctttctctccctgtcgtcctcctctcctcttcatttccctatcacgcg

SEQ ID NO: 438492 - DNA, 122 bp, Homo sapiens
ccctcgtgacggagggtcgccctgcgtgaacactggtttcataagctctaaggactgtaccggtcaagactgatgcaccctcagggctgggatcctgtgctgggcccatggtgagttccatg

SEQ ID NO: 438493 - DNA, 122 bp, Homo sapiens
ttcagagcatggtatgaaactcaggtgtttaagaacttatggagtataacatttcacatacgttacctcactgaaatttcacagtggtctcttaagttgaataataatataaaaaagtatcc

SEQ ID NO: 438494 - DNA, 122 bp, Homo sapiens
ggtcttaaccgctgcgcgagttatcagaaatccctggagccaaacactacgggggaccggcggaccaaaaggttcctaactcctttggacctccagggctcgcagaaaagctgccacttctc

SEQ ID NO: 438495 - DNA, 122 bp, Homo sapiens
gaagctggtgaggcagccgcacccagcattccacagccacactcagtggctccaaagcggcgcccgcggcggcactgatcccgcccggctggccccagctgaccctttgcaggaggctggtg

SEQ ID NO: 438496 - DNA, 122 bp, Homo sapiens
tggaggacgcccagcgggtgtccgcggagactggatggaaccgggttggaggacgcccagcgggtgtccgcggagactggatggaacagggttggaggacacccagtgggtgcctgcggaga

SEQ ID NO: 438497 - DNA, 122 bp, Homo sapiens
gagtgcgagagtctaaagacgctgccaggctggcgttaaaaccttttggttatgggaagacgacaactatataatagagccatagtgggggctgtgggattgactcaaatgatgggaggagc

SEQ ID NO: 438498 - DNA, 122 bp, Homo sapiens
tcgggggcctggctgagggccaccatacccctggaccagcttggggcccctgagccctgccggcgcttcaccaagcctcagtgggccctgctgagccccaactcctccatcccgggcgcggc

SEQ ID NO: 438499 - DNA, 122 bp, Homo sapiens
tttctgtttgccatcatctgcctggctgcggcaggaactgccgaggctgctgctgttgcgcggggaagaatccccggcagcgcgactggagagactggggaggtcgagctgtgcgcgtggac

SEQ ID NO: 438500 - DNA, 122 bp, Homo sapiens
attataagagatacactcaagtagacctcctgttccatatatatttttgctgtatttatacgcacacacatatatctatttatatacacacatatataaatttatatacatatataaattta

SEQ ID NO: 438501 - DNA, 122 bp, Homo sapiens
tgcgagaagtcatttgcgaggagtcctttggtttccagttacctcccccacaggcgcacacgctggctgcttgcgttggcagcgacacacatccatggtacggctggttttcactcggattg

SEQ ID NO: 438502 - DNA, 122 bp, Homo sapiens
acaggggtagccaccttattatgttgttctttgaaggataaacaggaaagaccattgttacgatgtgccttcattaaaatctttattatttacaggccagggagaggctagagattatggcc

SEQ ID NO: 438503 - DNA, 122 bp, Homo sapiens
aagaaatcatctagtgaaactttggaactgagttcaaaagcagaccatgaagcagttaatcgcttcttctctccctagtcacgctagactgtagtgagaattactgtaagatttttgcagct

SEQ ID NO: 438504 - DNA, 122 bp, Homo sapiens
gcgccgagtctagaaaaggcgcaccgcggccgggcagagctcccacacgccgaagggctccgagggggtcaggccaatcggcagccgtcaccccacaccccagcccatcaccacactcaagg

SEQ ID NO: 438505 - DNA, 122 bp, Homo sapiens
gcaagtgctgcttctctttgttatgctgtctcagacttgtgcggagtggaatatactgtgcggagtggaatatactgtagcagaagaaacagaaagtggttcttttgtggccaatctaacaa

SEQ ID NO: 438506 - DNA, 122 bp, Homo sapiens
gccctggctcatacctcatacttctctgctcctagagggtgagtctggatagacagcctccggcgtggtgccccctcctcagggaccaggggcctgtgcagaaagcctcctgggcatgcccc

SEQ ID NO: 438507 - DNA, 122 bp, Homo sapiens
atttataagagggttgcgcttgcgctgtagccgcccagcgacctgtgcgcggcgtctgagcgagctgcagccggaagaacattcggttgttgatattgcctcagccttttggagcattcttt

SEQ ID NO: 438508 - DNA, 122 bp, Homo sapiens
cagctgtggacgggctgttttcgcttttgtaaacgtgatggtcggaagcccagcaggtgccgtcgagttacagtgtttgcctctcttcctccagggagatgacagtctgtctgcagtcacct

SEQ ID NO: 438509 - DNA, 122 bp, Homo sapiens
gtgatctgcccgcctcagcctcccaaagtgctgggattacaggcatgagccaccgcacctcgccgggtaatgattcttgagacaagaggtggttaagtagcattattatgtaatgtttatat

SEQ ID NO: 438510 - DNA, 122 bp, Homo sapiens
aaaaatgccaacaattatctgggcctttagtgagtgctaatctttttgctggtggagggtcgtgcttcagtattgatcgctgtggactgatcatggtggtagttgctgaaggttgctgggat

SEQ ID NO: 438511 - DNA, 122 bp, Homo sapiens
cagggcaacaccaagcagcgcatcgaccagttcggggccatgtaatggccaggccaggaccgagggcagagagacgctctgcagcgggtgctgccgccctcacctccagcctcctcacgctt

SEQ ID NO: 438512 - DNA, 122 bp, Homo sapiens
cacgtccaagtccgcatctccagatgcagacgcggggttgggcacaggctgcagtgagcgcgcgggccaccagggggacacgcctgcgccttggcccgagctcgcggcagctgcggtcagcc

SEQ ID NO: 438513 - DNA, 122 bp, Homo sapiens
ctatgtcaaggactgtgaagcatctgagatcttacccacttgcaagctaccaaggtagcccgtcaggttcaagaatgctggcagaatacaggagagtcctgggtcagagacaaaggacttga

SEQ ID NO: 438514 - DNA, 122 bp, Homo sapiens
tcccgtggaactgcaccacagagtcatccacgcccagcaggacctcgatgttgtagtcatcgtccgcagcatgcctgcgtgccctccgcctcgagctgttggcgtgctcctctaggacgccc

SEQ ID NO: 438515 - DNA, 122 bp, Homo sapiens
aacaaatataagacaacttaaacatatttcaaaatgtgcaggctgcagacctccctgaagcgtttgcggggactactgttaaagataggaaagtcatattgttgctagaattgacaggaaat

SEQ ID NO: 438516 - DNA, 122 bp, Homo sapiens
tggagctgtgcggcgtacccccacccccagcccgggatacttcccacctccccgatcgcgcgatagctgcgcggtagctagcggcagttctcgcgagacccatcaccatggcagcggctgca

SEQ ID NO: 438517 - DNA, 122 bp, Homo sapiens
ctggtgaatacgtggctaatgttcttgtccaccttttgtaaagagacgtcaaggcccagccgcgaggcctggtccagaaagctttgaagcccacggatatctgagcagtgagagaagaggag

SEQ ID NO: 438518 - DNA, 122 bp, Homo sapiens
cctccgcaccccgcaactccgactttggcggcccccagacccggcgaaaccgtgaagtctcggcctcaggagccccccagatccatggtctcagattcgaaccctcagacctgttcgatctc

SEQ ID NO: 438519 - DNA, 122 bp, Homo sapiens
acagtggcccgagactgtgggaatccgaaacctcgcttctggctagccacaaggtctgggcgcgccccaggcagcagggtcttgactctgagcctccgttttctcatccgggaagtgggctt

SEQ ID NO: 438520 - DNA, 122 bp, Homo sapiens
agcagtcccctccccactcttgcccatgggtgactcttacccacagctgactagggccagcgcaaatactggaacctgtaacagaattaaaggtgaatgttctgagatgttgcttgtatggt

SEQ ID NO: 438521 - DNA, 122 bp, Homo sapiens
gagcgccctttgctaataagccaatcagaacgtgagacgctccggtggggcggtgcgcgtcgagcgcggggtggagtctgggtgacttggctggcgggatcaagtgcagctgcttcaggctg

SEQ ID NO: 438522 - DNA, 122 bp, Homo sapiens
tatataaggaggtggaagtggcagctgcaactagaggcttccctggctggtgcctgagcccggcgtccctcgccccccgccctccccgcatccctctcctccctcgcgcctggccctgtggc

SEQ ID NO: 438523 - DNA, 122 bp, Homo sapiens
ccagctggcaggcctcatgggcttccctccaggactggcaacagctgccaccgccggaggcgatgcgaagaaccctgctgctgtgctgcccctgatgctgccaggaatggcgggcctgccca

SEQ ID NO: 438524 - DNA, 122 bp, Homo sapiens
atcccccacccctgcctgctgtgcctgatggaggcgggggtgggtgaggaaggagggaggcgcaggagaaagggctcgtccgtggaatctaattgccttcactccccagccctgtctgaatc

SEQ ID NO: 438525 - DNA, 122 bp, Homo sapiens
ctctgcctttggggagcccagacggtggagaggctgctgaagggcactgcttttctgaatcgtgtggttctctctctggcccggcaggccagcttttccgagccggcgggagacccaggccc

SEQ ID NO: 438526 - DNA, 122 bp, Homo sapiens
ccaggcatgaaggaggaaggggcaggacggcaccaaggatggcagggagaactttggcctcggacctggctttggcacagcgcatctggggcctccccactccgtggctgccctcctgagat

SEQ ID NO: 438527 - DNA, 122 bp, Homo sapiens
ctccctctttatctaaacatatcctttgtagaagcctggttgagtaaagacatcgcccatcgtcacccctcaatttagcccccaccaacttctctactttcagaccctccccacccccactc

SEQ ID NO: 438528 - DNA, 122 bp, Homo sapiens
cgagtcgcaaagaggttaactaacttgtctaagggagctgggatttgaacccaggaacatcgtattctggcaaacgaattaggaagaaaaaaaaccaaaactgtttgcaaacacttttacgt

SEQ ID NO: 438529 - DNA, 122 bp, Homo sapiens
ctgcctcttggggcggggccctggggctggggctggggccagggccaggccgaggagccccggcggccgcggggaggccgcgcacttacccggagcctgggagcgcgggcgcggcgtgagct

SEQ ID NO: 438530 - DNA, 122 bp, Homo sapiens
cttttgaatgtgtcttctatggaagccctggagcctcccttctggtatttcatacactgccggtaccaagtatcctgggtgaaaccctccatcagacattgttggcaattccagtatggaga

SEQ ID NO: 438531 - DNA, 122 bp, Homo sapiens
cactgggaccaggagctgcccccacaaggaatgggcggaaggaaagggtgaccgagtgcccggccccgtgcccgtggctcaggaagacatgctgtgtttgcatttctgttgttcccagagcg

SEQ ID NO: 438532 - DNA, 122 bp, Homo sapiens
gcatggagggcatcatccacctttagacagctacttgcccacacctcatcgagctctgggcgttgtgccagcatttgaagaagcgatctgttgcaaagcgatccacacggagagccttagtt

SEQ ID NO: 438533 - DNA, 122 bp, Homo sapiens
gagaagctggtatttcaaaatggttaagaacacaaaccagtacgctgctcacgccgatcccgctccgctggttccgcacgctccgcacaccagcctgcgcgcaccatggggccaccgttcag

SEQ ID NO: 438534 - DNA, 122 bp, Homo sapiens
ccgcggttccaaagcgcagacccaagtgggacattcgctacattgttggcattccacgggcgtcacgtgaccccgcctcccgcgtcactctcggccgcataccagtccgggcggggcgcctg

SEQ ID NO: 438535 - DNA, 122 bp, Homo sapiens
taagaaaaggcactaagcttaacatagccctagcaactatttctaaatgccacaagagggcgatataactctatgacagcacatgggaaaacaatttttcgagttagaaaaattcctgactt

SEQ ID NO: 438536 - DNA, 122 bp, Homo sapiens
tccctcttcccttcccttttccactgtgttgccctcacacagctggcatgccatggatgtcgctcacccaagcccttcctaatgttgctcaccaaaacccctcccaccttgcccctgggacc

SEQ ID NO: 438537 - DNA, 122 bp, Homo sapiens
aagcagaaactgaaccagtatattatagatcatctttttgcacaaaagtctctgacccagcgtttcctgcctgtaggaaaacacatgtgaacatggttaacaactttaactcaagaaaatag

SEQ ID NO: 438538 - DNA, 122 bp, Homo sapiens
cactcctcagcccttgggtggtagatgggactgggcgccgtggagcagggggcgggcgctcgtcggggaggctcgggctgcacaggaacccacggaggcgggggaaggctcaggcatggcgg

SEQ ID NO: 438539 - DNA, 122 bp, Homo sapiens
aagaaagagacccaggcaccaggacaggagtcatagcagctggtgccgccctgggggttccgccttcccgagctgggccgataaatatgcagttttaccccgtctgcacacgggcacgcctc

SEQ ID NO: 438540 - DNA, 122 bp, Homo sapiens
cccaggaggagggggaataaagaaggtggaggatcctggctaccactctgaatccgataccgcttctcttagacctcagcgacagaaaaagggaagggtgtctcatcccccttcctcctctc

SEQ ID NO: 438541 - DNA, 122 bp, Homo sapiens
tacaaccagcactgaatcaacctgtctcagtagccataagtctgcataaaattttaattacgaacatcataagttggtcagagcacatggagaaaaattgattatgaatttatgatgcagtg

SEQ ID NO: 438542 - DNA, 122 bp, Homo sapiens
ctcagaagagggtaacagaagaggggcaaattagttgggtcttgaaaggcaagcaggagccgaacaagaagagaaaaaaggaagtgtcctctgggtagctggtggcacgggcctgagtggca

SEQ ID NO: 438543 - DNA, 122 bp, Homo sapiens
gctcagagacctgtgaagatcgaggaggatggcgcatatgctgccgcaggatggaaacctcgatcagagaaggctggggcaggtgactgggcttaattgcaaattttaacatttacttcagc

SEQ ID NO: 438544 - DNA, 122 bp, Homo sapiens
gaaacttaaattcagagaaattaagaatgatggagcagagcagggattgaaatttagacccgaaggcactgtcttcagcaattttattcagaaatgtggctcctttaactagatggctgtct

SEQ ID NO: 438545 - DNA, 122 bp, Homo sapiens
gtgggtgtgtgtgcgtgctcaccacacagttggcatcctgtggggcagctcagatacaggcggagcaaggccctgctggaggcacctgccctgcggtcacacagcacacacctgaaaccaca

SEQ ID NO: 438546 - DNA, 122 bp, Homo sapiens
cccccgccgtccgaggagaggcgtcctggggttccgtcccaaggtggaggtccccccgagcggttgctgattgaaaggggagtgtggaagcgccctgaggaaacacccgcctgccttgaaaa

SEQ ID NO: 438547 - DNA, 122 bp, Homo sapiens
tgcaaaacaccggcaaaaatcaaaaagctgggccggtgatccacctagataaaggcatcacgtacacatggccacaaaagggggtggatcaaataaagtccaaagagggggagttgtttaca

SEQ ID NO: 438548 - DNA, 122 bp, Homo sapiens
tgggtttaggatgctgcatttttgcccatggccttgattgaactccttagtcatttataacgtggttgggccggaaggcctgagaagatacgtaggtacaatcctcttttaaaaagaccaca

SEQ ID NO: 438549 - DNA, 122 bp, Homo sapiens
aggctccagacccgggacagagtgaggctcccagacccggacagagtgaggcgccagacccggacagagtgaggctccagacccggatagagtgaggctccagacccgggacagagtgaggc

SEQ ID NO: 438550 - DNA, 122 bp, Homo sapiens
caagtgcccaccagaggcaggtctgagcgtaggggtgggcccacccgaggcaggtctcagcgtaggggtgggcccacccgaggcaggtctcagtgtaggggtgggcccacccgaggcaggtc

SEQ ID NO: 438551 - DNA, 122 bp, Homo sapiens
cggtacgggctggtgaaagtggagacggacggcaggatggattcacttggccacatggcacgaagctgggaagacggacaccggtgagtggctgcccgggagggctggtcggggcgcggaca

SEQ ID NO: 438552 - DNA, 122 bp, Homo sapiens
gaagggcgcagagagaaaggaagtggcctggaggtcatccagatcccctaagcccaacctcgtgggccgccttgctttgaatgaagtttcagcttgcagggcgcatccccgcggcgcgtgga

SEQ ID NO: 438553 - DNA, 122 bp, Homo sapiens
cccgagaggcgggcagggctggggctaggggctgtccaggagtgttctggactgtcccgtcgccaccattcccacaggctgctcaggaccgaggctgagacgggcgaccaggacgggactgt

SEQ ID NO: 438554 - DNA, 122 bp, Homo sapiens
cacaccgatcctcctagggctgcggggggtgtgggaccagggcggtgcgctacgagactccgggccgtcctctgcctcctcagacttttcgagagaaaagttttcaaagtctctccaccttt

SEQ ID NO: 438555 - DNA, 122 bp, Homo sapiens
ccaactccaccaagcttagtgcccgccccaagaaagctcactgcagaggggattcctccacgtgcttccctccaaacctcccacctacccaattcctcctttcagttccatcccgagttact

SEQ ID NO: 438556 - DNA, 122 bp, Homo sapiens
ttcttgtctcactcgctcacacgccctcccgtctccctcctcctcctcctcctccgcgtgcgcgccccgtcgcccccgcccttcttggcagggcgcacccaccacggctgcgccccaggtcc

SEQ ID NO: 438557 - DNA, 122 bp, Homo sapiens
gagtcaccctgggacggcagtcgctgcactggtaatgagcacaacacacgcaatgcaaaacgaaagggtccctcttccaacttgtggagataccccaaagcagttgatgtggaaagtccttg

SEQ ID NO: 438558 - DNA, 122 bp, Homo sapiens
agctatcagtccgctgtacgaatgtacaaagatattcacagaaatggatggaacagagcacgtataaaggcagttggactcaggagaccagtttttcagaggacagagtggaactggtgagg

SEQ ID NO: 438559 - DNA, 122 bp, Homo sapiens
tggggtggggagaggggccgtgaccccatcggccaccactgggcacgcgtgaacactactcggacaggaaccgcaggggcacaccctcggacaaccactcctgagtcattctcaccaggctc

SEQ ID NO: 438560 - DNA, 122 bp, Homo sapiens
gcaccccggggacggagccacccactctcccaacaggtgtccagctggccaccggcctctcgtcgtcatcaaaacctcaggcccaggggaggtcctccagcccgggggcacctgaggctctt

SEQ ID NO: 438561 - DNA, 122 bp, Homo sapiens
aaaaatcccaggccacattctactccttctttagtaattgatgcttaaaacttctctctgcgcttataaaaagcatgacttcagcccagagccccctaagcctaggttatgcatacataccc

SEQ ID NO: 438562 - DNA, 122 bp, Homo sapiens
tatgccagcacgcccagcactcccaggatcagcaccagcaccaggggcccagccaccaggcgcagaagcaagataaacagtaggctcaagaccagagccacccccagggcactgtaggcagg

SEQ ID NO: 438563 - DNA, 122 bp, Homo sapiens
acggcaaacttctaagacctgcaatgagagttcaggcctttggcacaaactaagcagcttcgcctgctcaggctgggagggacagagagtgaggcacagggactctcaacttgggccaagct

SEQ ID NO: 438564 - DNA, 122 bp, Homo sapiens
ctcaactttgaaaatgtcagccgttatagttgaagaaatctgacccaagagacttcgctccgctgcaagatggaaggaagcttaagtaagacataaatttgtaatgaacttgctcacaacat

SEQ ID NO: 438565 - DNA, 122 bp, Homo sapiens
ctaggccctgcagatgcgacaacgaacgtagatgctgtcccagccacccacactcgctgccgggggaagaaccaggtaaggttcccgcacatcgccctccatgaagcaggagcaggagcctc

SEQ ID NO: 438566 - DNA, 122 bp, Homo sapiens
ggggttatcaattttccatcctaaaatgtctgtgcccttactacccaagcaaatcaatgtcgcatgttttagtttttttgatatagtagcatgcccccacttatgtaactattggctgtatt

SEQ ID NO: 438567 - DNA, 122 bp, Homo sapiens
ggtgatccgcctgcctcggcctcccaaagtgctgggattataggcgtgagccaccacgcccggctgaactaaatatttatggaaccctccttaatgcagatgaaaaggattaaagaaaccca

SEQ ID NO: 438568 - DNA, 122 bp, Homo sapiens
gactcactgctcccactctgggcaccaggaacccagataacaaaacctaggccgagtccccgagagcacaaaagaatggaagatatagaattgtgggtaagagacagaggaaacagtgagag

SEQ ID NO: 438569 - DNA, 122 bp, Homo sapiens
gccagaggcgggcaggcacgccctgactcagtgctgggctggcagcaagttgggcacacacgtgaggcccgggcacacgctggggagtggggggcagcggcacagacgtgtgtgcagagccg

SEQ ID NO: 438570 - DNA, 122 bp, Homo sapiens
gggcacgcgcgcgagacgacggggccaggggggcgctctgaggagccacaataggccagacggcacgcgcgtccacgagggggccgggagccgcgaagtggcggcggcggcgacgacgccgg

SEQ ID NO: 438571 - DNA, 122 bp, Homo sapiens
tataatacagattcataatttctcagtggattcctgtttttgttcagtgggataaaaattcgttatcagtatttattttgatcctcaaattggtccaggttaggccagtgagagccctttca

SEQ ID NO: 438572 - DNA, 122 bp, Homo sapiens
ttacagctcttaaggcagcgcgtctggacttgttcattcctccccgtgggctcgtggtctcgctgggctcaggagtgaagctgcagatcttcgcggtgagtgttacagctcataaaagtagc

SEQ ID NO: 438573 - DNA, 122 bp, Homo sapiens
gggctgcccggcaagggcgatggactgagctgcgggacggcggccgaggcccttgattctcgagcccgggccggggctggcgacggccccgagctacggcccctcccagccggaggaggaga

SEQ ID NO: 438574 - DNA, 122 bp, Homo sapiens
tcttgggtgaggtactctttgggttccctgtctgttaaaaaaattgtcctaaccgctaggcgcggtggctcacgcctgtgatcccaacactttgggaggctgaggcgggcagatcacttgag

SEQ ID NO: 438575 - DNA, 122 bp, Homo sapiens
agtgcaggttgaggtggtcgtgaagggtggacttctgtgtgaagcacttgccgcagatgccgcacgagtgtgacttgacaccacgatgcacgttcatgtggcggttgaggttgctgctgtgg

SEQ ID NO: 438576 - DNA, 122 bp, Homo sapiens
gtgtgtgtgtgtagagtcatttgtagtaaataacttctttaaatgagcttttaaaaataacgaaaaattgacacccttgctagatattgctgtgtgtatggtgtgttcataggaatgtgcta

SEQ ID NO: 438577 - DNA, 122 bp, Homo sapiens
aaagtccccacagtccccacagaggtatcaggatctctctctctccagctggctccagagcgcctggctgctccagagatacagacgcttctaactccatacaaggctggagaccagcagac

SEQ ID NO: 438578 - DNA, 122 bp, Homo sapiens
aggcccaaagcacttttttatagcccctagtttgctgttgtgtctgtttcctctacggcccgcacagcctgggtttgaattctggctctccatggccttgggcaagttggttaactttttgt

SEQ ID NO: 438579 - DNA, 122 bp, Homo sapiens
tccgaaggggagagtaaatcagtaaggctccacccatttcacaggaggcctagagaccggcgctcccctttcccctcccgccggacctgccaggaggtgggctggcgcggagggagggccct

SEQ ID NO: 438580 - DNA, 122 bp, Homo sapiens
gatattgatctgtatgccctgtccttgtcctgttttcatcagaggccaatacaaaagtttcgctgactctgtagagtgcactggggcccttttcatcttttccatggctgaaatagtttaag

SEQ ID NO: 438581 - DNA, 122 bp, Homo sapiens
tgaattaaagatctacttagttccaagcaccattcattcatttagcaaatatttactgaacgcctactatatggtgagctctgttcaaggggctggagatagaaaaatccaagcaaagtccc

SEQ ID NO: 438582 - DNA, 122 bp, Homo sapiens
ttctaagaaccatctagctagcagatactataattagctccattttacaaatgaaaaagccgaggctcgaagaggttaagtaaatggtctcaggtgacacaggaaatgcaaagcaagctaag

SEQ ID NO: 438583 - DNA, 122 bp, Homo sapiens
agcgggccctgcaggaccaaggcaaagttggccaggaagaccagcggctctaccgggccccggcacagcacggcagccgcagggcgggcgcggggcttttccggggggctcgcgctcccctc

SEQ ID NO: 438584 - DNA, 122 bp, Homo sapiens
ggtggcgtgcgcgactgcaaagtctggcatgcccaggttctgctccttgggctcctgctgcgtgagccgatctgcagatccagcaaaagacccgagagcggcttgaacgccagatgattcct

SEQ ID NO: 438585 - DNA, 122 bp, Homo sapiens
agggctcaagaagcgccggagcaagaggctgtacgtgaattaaaaacgccaccttgggctcgagcagcgacccgaaccagccccgtgccagcccggtccccagacccaagcctgaccccatc

SEQ ID NO: 438586 - DNA, 122 bp, Homo sapiens
accattaggggagttaaaaatgtacagcagtgacatgttctactccaatcacttgtgctacggctaccaaacatgtacaaaagacttctcgggtagttccagctgtggccatagccagttag

SEQ ID NO: 438587 - DNA, 122 bp, Homo sapiens
ttggtggaaaatgagaggcggccattgtgtctgactgcggaggcattgttcttccccagacgaggctggcctctttctcagctcccggtttctgctcctccagccatggctagcttctgagg

SEQ ID NO: 438588 - DNA, 122 bp, Homo sapiens
gagccagggagaaactcaggccgtgaaggtctccaaaaccctggaggcgtccccagattccgctctcaattgggtgggcccacaaggaacagagctctccaagtctcaggcctgggaggaga

SEQ ID NO: 438589 - DNA, 122 bp, Homo sapiens
tcacaccttatagatgaagaaatcaaggcccggaaagccccaattcatcagagatcatgccggggtggaaataaatattttgttgaccacccagtaggtgcccaaattaaataaaattgaaa

SEQ ID NO: 438590 - DNA, 122 bp, Homo sapiens
gacaccgggggaggcgggtggctctgcgggctgcaggcgcagtgtcctggtggagggccccgggacttgaacgaaactccgagaccgctggcgggggcatccgaaagcctcggggggagtag

SEQ ID NO: 438591 - DNA, 122 bp, Homo sapiens
ttccgcgccgatggcgagatccttgttcctcagatagcgttcatcgcccgtcgtggtcaacgggccagccgagtctggagtggttgcgaacccttctggctgcagatctggaggtggaggca

SEQ ID NO: 438592 - DNA, 122 bp, Homo sapiens
agttattctgtctttatacctgtaattacttcccttccttcccatcctttcttccccgaccgcccccccgcccacaaagatggtgccagtgggagtagagttgggaacaaggtttaatattg

SEQ ID NO: 438593 - DNA, 122 bp, Homo sapiens
tggggttggctcccggtttcgcgcatgcgtgcactgcacaaaccatttggcgggtttttccggccactcagttctgccaccgtcactgagaagctcagcggtagcttttgggaagcaggacg

SEQ ID NO: 438594 - DNA, 122 bp, Homo sapiens
tgaggggcttagcacccgggccagcagctgcagagggtgcaccgagtcccccagcagtgccggcccaccggcaccgcgctcgatttctcaccaggactcccaggggcttaggagtgcgggtg

SEQ ID NO: 438595 - DNA, 122 bp, Homo sapiens
ctgttggctcttcctgtttgctcaggccaaggcagcactggggtgacccacaccgagggccgcaccagtgggcaaagggccaggcccaagtttgaggtttaggggtggtgagtcatgctgga

SEQ ID NO: 438596 - DNA, 122 bp, Homo sapiens
cctaggcaaccctgcttgagtttctagttaacatcagtttactacctcagattctacccccgaccccacccccaaactgccagattccactccctccctggggcagaactttgtaactaatt

SEQ ID NO: 438597 - DNA, 122 bp, Homo sapiens
gcaagacactgtactctggaatgtgtgcgtcgatgcggactccaggcctcgccgccgagccggggtcattggctgaggctgtatggatagtgtcatccttattttgtcctgctgctttgttt

SEQ ID NO: 438598 - DNA, 122 bp, Homo sapiens
atttcttgacctcgtgatccgccctcctcggctgggattacaggcgtgagccgccgcgcccggccaaaactgtggagatctttattagaagagaggtgggtagcaggttcgagctgtattaa

SEQ ID NO: 438599 - DNA, 122 bp, Homo sapiens
cagtgtctgcagggagccgtcagccagtggaaagagtacatcgccaaggccatacctgcccgggcctgggtctgggccacacgcacatcagcaggacttcagaagccttgagaggggaggaa

SEQ ID NO: 438600 - DNA, 122 bp, Homo sapiens
aaagataagctaattgtctggtggttaattaactccagccaactaatgatctgaacttgccgcggatacccagccagcggaagtgcggttaactgcccgagggatgccccgaacaccggccg

SEQ ID NO: 438601 - DNA, 122 bp, Homo sapiens
cgcagccacgtccaatcagaggagtccggagaccgggggcaaagtcaaggagcatccggtcgggttctaggcgcccgctgcttgggtttaaatcacccgcgcttcgctgcacgcgatgggcc

SEQ ID NO: 438602 - DNA, 122 bp, Homo sapiens
agaatgcaagacagtggctgagtggagtaggggcaatggtgtgctggcagactggccctccgaaagaagaaaaggaaggaaaaaaaaaagcaagcaagccttgatggatttgccaatttctg

SEQ ID NO: 438603 - DNA, 122 bp, Homo sapiens
tgacacccaagacgactggggcccgggtggagttaagcgagcagcaactgcagttgtggccgagtgatgtggacaagctgtcacccactgacaacctgccgcgggggagccgcgcccacatc

SEQ ID NO: 438604 - DNA, 122 bp, Homo sapiens
ctatgacgacaagctggtgtacgctgaggactacatcatggatgaggagcactcccgcctcgcggggctgctggagctctaccgggccatcctgcagctggtacgcaggtacaagaagctca

SEQ ID NO: 438605 - DNA, 122 bp, Homo sapiens
ccctttttctaactgggagcactgctgagggggcgtctgggacttcttcatcttcatcatcgccccttccccatagggtactgcagggggcggggggcggggcttcggcggggcggggctgc

SEQ ID NO: 438606 - DNA, 122 bp, Homo sapiens
gaggggaacatagaaggcggccacctggctgatattagaggaaaacagctgcgaacagcacgggcctgagccgcaaaatgctgttttggtaaaaatcctaccacatccatggcagtcatttc

SEQ ID NO: 438607 - DNA, 122 bp, Homo sapiens
tggctgtgatgccttaggcaaatcagttactatctctatctctagcctttcatgtctcctcgacatggcgacatttaaatgatctctgtgtcctttcaattctggcaaatcctcaaattggt

SEQ ID NO: 438608 - DNA, 122 bp, Homo sapiens
caggcataagccaccgcacccggccttgccaatatttctttagaagtctatgttttcggccgggcgtggtggctcacacctgtaatcccagcactttgggaggctgagatgggtggatcacg

SEQ ID NO: 438609 - DNA, 122 bp, Homo sapiens
ttggcgagagcaaggaggcccggggctggctaggaccagggtgggggcagccggggcgctcgagaggccccccagctgcacagtcccgcagtggtctgggaactgcccgtgtggcacggacc

SEQ ID NO: 438610 - DNA, 122 bp, Homo sapiens
ggagggggcgggggactgggcgcagccctgctcaccttctggatggaggacttgccgctgcgccggagtcccatgagcagaatcctcggcttggagctgtcagcgccccccggaccacagcc

SEQ ID NO: 438611 - DNA, 122 bp, Homo sapiens
atttcagatgatctgcaggaggagcctagcagcaatgctgttcacaactgtactcgggatcgtctttgcggtcttcacacgctgatgcctcggccttttcccttcctattcaggggaaaaga

SEQ ID NO: 438612 - DNA, 122 bp, Homo sapiens
tatattccatgaagacaaaatagaagatgaacttctattcaccgtttctggaattctagccgccatgatggtctggtggtgactgataactagttttattccaagacatacctttacctctt

SEQ ID NO: 438613 - DNA, 122 bp, Homo sapiens
aggaaatcccttctgagaagtcagaggtcccagagttacacaaagccgttcccggcagcgcgaaacatttcagatgtggtgcagtgaaagcaaaggagtcctcggcggcaggtgagcaatgg

SEQ ID NO: 438614 - DNA, 122 bp, Homo sapiens
gggaaatgtatttcggaggcatacacaacagaggaaggtgtctgggggcccaggacaaaccggcagttgacagcgtagtggcttttcagaaacaagtcttgtcagaaatgtgactttttctg

SEQ ID NO: 438615 - DNA, 122 bp, Homo sapiens
gcgggcccgggcgggcgcaccagccgccctttgtcctccgcctccgggtcgcgggggccgcggccgcctccagcgctggccccctggccctcgccccggttccccgtcctgcccgcgcgccc

SEQ ID NO: 438616 - DNA, 122 bp, Homo sapiens
agagattaccatcctcattttacagatgaagaactgaggcttagttaattaacttgatcacggtcacccacctaacaagtggtagagctaggatatgaacccagaatttcctgattctaaag

SEQ ID NO: 438617 - DNA, 122 bp, Homo sapiens
gttctttttttattttcctggcaaaagagaccaaatgggtgtgacctgctcaggcatacccgctgcctgcagctgaatcacaggccttcattcgcttcctgttagctcagataagctgggag

SEQ ID NO: 438618 - DNA, 122 bp, Homo sapiens
gttcaggcggcttcccctccaggagcatctcgaaggcctgcagagagcgtgcaaagcagccgtggggaatggggaaaccgccttttcctgtggctgccgattctggaaggggtggccgagaa

SEQ ID NO: 438619 - DNA, 122 bp, Homo sapiens
ggccccgccctagcgaccgttgctaaggggcgtggctcagccgcacggaacccgagcccccggcgacttataaatatttgcgtattcaaatgaggcctggctcccgttgctatggcgcccag

SEQ ID NO: 438620 - DNA, 122 bp, Homo sapiens
atgaccgaaggctgattacgggccttttcactccaatatcctaagttaactggtgccagccgcactcagggctgcctaattgcaatttagcccagaaaattcctcccatttttgccctccag

SEQ ID NO: 438621 - DNA, 122 bp, Homo sapiens
acagggagcagagcagcaggcggcagagtccagggccccacaccctcatgctcacttccccgctgcccatgcacagagcatagcacatgcacctgagccacctggcactcctcaatctcagc

SEQ ID NO: 438622 - DNA, 122 bp, Homo sapiens
gagcatggcaggctccctgcctccctgcgtggtggactgtggcaccgggtaagagcagctcggcgcccacccccgctcctccgcggccccgctcccggcccctggcgtccacctcgcctgga

SEQ ID NO: 438623 - DNA, 122 bp, Homo sapiens
tggaaaaactgaggcataaagtgggtaaatacctcccccaaggtcacgagataaagataacgcagtcatcaaatattctgtctcctcaacatctgtcttactggaattcttgatggattggt

SEQ ID NO: 438624 - DNA, 122 bp, Homo sapiens
ctcaagttttattcctaagtggggaaccggggtgggagaggggagcccagacaggaagctcgccatttttagacacgttatattttgtccttgtgtgagaaatgttggatgggaaacacatt

SEQ ID NO: 438625 - DNA, 122 bp, Homo sapiens
gggacatggaggcacagagaagggatgcccttgccccacttcaccaggacgccctctgtgcgccccttgcccgctaacctagattcttaatcacaaacacggggtggcgaacctgcatttcc

SEQ ID NO: 438626 - DNA, 122 bp, Homo sapiens
accctcgggaggcctccaggctgggggacgggcactgtgggctgctggtgtagggccggacgctctctgacagtgttgcccctggcctccggcggcttcctcccaagctgggttggggctct

SEQ ID NO: 438627 - DNA, 122 bp, Homo sapiens
acaaagaaaccgccagaaactgaagcttccacagcccgccacgtcccccggctacggctacgctcctgattggatagttagtacggcccctagtgcccctgattggataccgcttcaggtcc

SEQ ID NO: 438628 - DNA, 122 bp, Homo sapiens
tgacgtagcgaggagcggaaaacgcggtaaccaaggcggccccaggcgcgcacttccgcccggccttccaccggtccaggtctgcccctccgcagcgatagttcacgctctcggcggggctg

SEQ ID NO: 438629 - DNA, 122 bp, Homo sapiens
gcacatcaacggaaggagacacaagcgactggacggcgagaggacatcaagggggcacgtcgagggaagggcacaccgacagacggccatggatccgcaggacaaggcagagattggccggg

SEQ ID NO: 438630 - DNA, 122 bp, Homo sapiens
ccgacctgcctggtcacgtgggtccagtggggcaaagtctcctggtggggtgcaaggagccgaggcgagatgggcgtcctgggccgggtcctgctgtggctgcagctctgcggtgagccggg

SEQ ID NO: 438631 - DNA, 122 bp, Homo sapiens
ccaaggtgaggccaggacatggttatcccagggaaggggatataacatgtctactgggagcgtttccagattgggacccaaatgcaagaatgatttcctgagaagcaggcttcaatcccaca

SEQ ID NO: 438632 - DNA, 122 bp, Homo sapiens
ccctcgcagcacttgccgtggggcgcgtgaaccatggctactgagtgaacgcaagagcgtcgagggcttttgtcctctgacaagtgcacactcccccaggcacccacgtggaatttcaaacc

SEQ ID NO: 438633 - DNA, 122 bp, Homo sapiens
atgtggggcccacacctggtgggtgtgagtgtggctgtgtgtcctgtggctctgtagccacgtgagacatgagtacggagtgtgtgcgtttcatggcgtgcgtatgcatgtgcgtgtcgggg

SEQ ID NO: 438634 - DNA, 122 bp, Homo sapiens
ttttctgaaagacaatttcctgagttagttctgctgttgggctcctccacatccaggctccgaaattttctcttgcctcagcctccatgaaacggagatttcgcttcctcccgttccccctt

SEQ ID NO: 438635 - DNA, 122 bp, Homo sapiens
cttcctccaagagcccattgaagaagcccagtgatgagacggtgagatggtttgagtcctcggtgcctgggtagcaggaagaaagacctgcatcctgcatctgtacttggggaagccagcgg

SEQ ID NO: 438636 - DNA, 122 bp, Homo sapiens
gagatgatgtttaggctgaaaacacatgccatttgaaaggccattttacatttctgagcacgccctactgattaaagtaaaagaagaaaagctttatgcaaggctaaagacacagctgcagg

SEQ ID NO: 438637 - DNA, 122 bp, Homo sapiens
aaaattttgtgtcaaatggagatccatactcagagacatcaacattctacagaaccacaacgaggcatcctaatttcaacaccatgttgttctacaaggctgatgtcctaactctggtgcac

SEQ ID NO: 438638 - DNA, 122 bp, Homo sapiens
ggtcagcacagcccctccctccctgtgccgtgctggccgtgccgcagctggtcacccgcacgaggacctcgagattgccctgcggactggcacttctcgagggaagtcatcgcagctgccat

SEQ ID NO: 438639 - DNA, 122 bp, Homo sapiens
caggaggcatctgagctgcaaaaggggcgaatgcgatgtagacacttgggccccgggactcgcctgtgtcatctgggctgggccccacaaacaccacaaacaccttttccaccacgcaatag

SEQ ID NO: 438640 - DNA, 122 bp, Homo sapiens
agtgggaggagcgggcctggcggccgtgggggcggggctgctccactaacggttactggtcgctgctgccgccgcgctcctcccccggctgcggcagaggcgcgcgcctgcgtcctgaggat

SEQ ID NO: 438641 - DNA, 122 bp, Homo sapiens
aaatggactaagacaatcaaagaccagcaatcctaataaatttctttaccatacccaggccgttttacccatccttgagtaaattaccttgagtctcccactgggatttactaagagacatt

SEQ ID NO: 438642 - DNA, 122 bp, Homo sapiens
atcccactcatgctctcagaatagcaattgactgcatgagtctggagtttaggggaagttcgggctgtaaataaagacttggacggataggcagttgtgtgctggtaatgtttaccaactga

SEQ ID NO: 438643 - DNA, 122 bp, Homo sapiens
taacattaccgttgaggggactaagtgcaacactacgcaaagcctctggcacatggcaggcgctaaataaaaatgggggcctctctcctcgggaaaagcgaacaggcggagacgatgaaggg

SEQ ID NO: 438644 - DNA, 122 bp, Homo sapiens
tatttgattttcaataaaagagttcaactgtaaggaacataacagagctactaaagccaacgtcttccatccttgtgtcgggtctccaaacgtcccccaaaattatctttaaaaggccaaat

SEQ ID NO: 438645 - DNA, 122 bp, Homo sapiens
gcgggctgggcgtgtcctttctgggaggggccttgggccatgcacctgaggccaccagctcgcccacgccgcccgctcacctgcacgcggaggttcatttaatccgtgcgtctatgcagcgc

SEQ ID NO: 438646 - DNA, 122 bp, Homo sapiens
ttgagaagcgtgagaactgccctccaataaggatccgaagagaagtaaatctaagccaatcggaggcttgaaagtagaggtgtcccgcctcgagccaaacggaccaataggaagtgcgggcg

SEQ ID NO: 438647 - DNA, 122 bp, Homo sapiens
aatatccacactctccactgctcccttctgggaactctctttgagggttcctgcagaaaacgaacgggcctctgaggaagctcgcccgaaggccgggccggggcccggctcctggctgacca

SEQ ID NO: 438648 - DNA, 122 bp, Homo sapiens
gttcatctctacagaaatggcaaggaccaagatggagaccaggcacctgaatatcggggccggacagagctgctgaaagatgctattggtgagggaaaggtgactctcaggatccggaatgt

SEQ ID NO: 438649 - DNA, 122 bp, Homo sapiens
acactttaccatacatgggaattactcagtgctggcgtcagacacattcctgggtagctgcgtagtacaggcacgtcattaccatataaattcttgacaactagaaacagcagtcggaaccc

SEQ ID NO: 438650 - DNA, 122 bp, Homo sapiens
cgcggcgggcggggcgcgtggggcgggcaggggccgggccagggacgcgcggggggcaagcgcggcggcggaccgggcgggaccgtagccggagcccagccgggactgtcgcgcgggccgcg

SEQ ID NO: 438651 - DNA, 122 bp, Homo sapiens
caaatggtttttgccattaaggaatttatcttgttgaggaggcaagatgtttcctgcacacgatataatcagagaatagttttcagtcaatatagtaaattagagaacaatttcaagttggc

SEQ ID NO: 438652 - DNA, 122 bp, Homo sapiens
ttagcagggaatataaactagcagagccaaaccaagtccacgttgtattccagaaactaccggttggaggcgttccagggaggaagagaggatctttcgcaaaaaaaaaaaaagaagaagaa

SEQ ID NO: 438653 - DNA, 122 bp, Homo sapiens
ctcagtgcacttcccccaactttcggccaaaggcccctcccccaggccctgtccgcccgccgcagtcccgacagttcccggacagcatcatcgtggtttccaggacaacaattcccgaccaa

SEQ ID NO: 438654 - DNA, 122 bp, Homo sapiens
ggtcgcgccgccagagggctgcgggagagggccgcggtcagggaagcggccgggcggtcccgcggaggaacatcggctgggctgacggaggagtttagtggggccgggggaacctgggcgga

SEQ ID NO: 438655 - DNA, 122 bp, Homo sapiens
tcccatcagctgggagaaagagcctcacctggctagaatccttgcaaaggcccagcacctcgtgagggcagctctgtcccttgcaaaggtcccgatgactgagagaaacgcggccccacccc

SEQ ID NO: 438656 - DNA, 122 bp, Homo sapiens
cggggggggtgggggtggggggggtggcggcactgggaccacatcagatacggagggaaccgggggaataagagcggccctgaagtttgtgctccccacggcccctgcacgctggggtcccc

SEQ ID NO: 438657 - DNA, 122 bp, Homo sapiens
tcctctcgtggcacagatgcgggctgtgatgttcagagatggcctgctcagccatttcaccgatggatgcacttccagcgacgacggccctcagggagttcgagtcctcttgagaacttgtt

SEQ ID NO: 438658 - DNA, 122 bp, Homo sapiens
tctctactaaaaatacaaaaaaatagcgccccagaagagcctcgtcctgggcagcggtggcgcggcggtcgctgtgatagccacggggctgggcggctgaccgctgggctaggagagggccc

SEQ ID NO: 438659 - DNA, 122 bp, Homo sapiens
atagtgagactcctatctctacaaaaaacacaaacaaaattagctgggtctcatgtcatgcgcctgtagtcccagctactcgggaggctgaggtgggaggatctcctgagcctgggagggcg

SEQ ID NO: 438660 - DNA, 122 bp, Homo sapiens
ggtattctgtataaattccaggatgtattgctttattttccagaacagccatcctcttcacgtctttatgttcccatgcccactggcattccacatgaaaacattttcatcagaaccaaaga

SEQ ID NO: 438661 - DNA, 122 bp, Homo sapiens
ccgagcggctggaagtgtggggagccgtgcccaggttttaccgctccagcaagtcgctggcggggcgacgtctcgggactccggctccgaaacgtaccctctctgtccggggctccaggtcc

SEQ ID NO: 438662 - DNA, 122 bp, Homo sapiens
cccgccctcgccccccgctccgtgcaaaatggtgtttaccaaagtcaatattggccgcggcgcccgcccggggcacccgggagcccctctggcctcccccagcccaaggctggatctgggcc

SEQ ID NO: 438663 - DNA, 122 bp, Homo sapiens
acaaaaaatatatatcataaagaacgggatgctaattgcattttcctagcaaaaatactacgtgtactcattttgaagtgagtgtaaagtaagatggagcaaggagttaattaccttaatgt

SEQ ID NO: 438664 - DNA, 122 bp, Homo sapiens
attaaatctatagttacagattatggtaaactctgagagagaattctgtcagggagaagccgcttttggttgcaggagggcacctctttgaaaattactcaccttcccgccctccactggga

SEQ ID NO: 438665 - DNA, 122 bp, Homo sapiens
aatctgtgtacctaattgggggaaaagttggctttagaaccagagaaactaaatgggaaacgtactttatgtttgtgctgaaatctgatgataagatttgaaaacattctttttcagagttc

SEQ ID NO: 438666 - DNA, 122 bp, Homo sapiens
gaaccctgtaatgcgccctcaacaggaggtgctgccgagggcccagaacaagacccggagcgcagccgcggcgcagccctgctgtgtgcgcattctgggctcctgcaccggctgctgatgcc

SEQ ID NO: 438667 - DNA, 122 bp, Homo sapiens
tgcgcctccgctcccagctcctctctctggggctctcctcctcccggcgtccgcatccaccgtaggaggaaatgaatgccttgcggtcttagtgcccgcacgtttgtccatcacccttttta

SEQ ID NO: 438668 - DNA, 122 bp, Homo sapiens
tgatgacaggaggaggcggcagtgaagtgctgatggaggaggtgaaggtgatggggtctgcgggggcagtgaaggccggctacaagaacacccactgcccagctcccagcagggctttgcag

SEQ ID NO: 438669 - DNA, 122 bp, Homo sapiens
cagctttgcacctgttattgtcatcttttttttttagatgaggaaagtgaggtacagagacgttaagcagcttgcccaaagtaaggcatctctgctaattgacagagctgaaattgaactca

SEQ ID NO: 438670 - DNA, 122 bp, Homo sapiens
tgcgtttgtaaacgttcctggctttcgtaggcattgaaggctgcgtctcagctttgctcccgtcctttgcagtaacctgtgtacgggaggctccgttgtttgccacctcacattgggatagg

SEQ ID NO: 438671 - DNA, 122 bp, Homo sapiens
tgtgtcccttgctaatttatctggttttttgttgttgatgtattgttttttttatagaaacgaaggcaacaccagattatgaatcagacatggacatcaactcttgtgtaatttgtgatcag

SEQ ID NO: 438672 - DNA, 122 bp, Homo sapiens
gtaatggagagaaggaggttctaaaaagaacggttaccatcacgtaggagttttgtatttcggacctcaaatctgtgtggacaataactggaacccttttgatattcaataactgaaattta

SEQ ID NO: 438673 - DNA, 122 bp, Homo sapiens
tgagaagtgaggagcccctccgcccggcaaccgccccgtctgagaagtgaggagcccctccgcccagcagccgcgccgtctgagaagtgagaagcccctccgcccagcagccaccccgtctg

SEQ ID NO: 438674 - DNA, 122 bp, Homo sapiens
ttcagccgtctgagcggagaggaggatccgggaagccggctgcggcgggaggagggaatgcgcgtgcgcgctggaccgcctcgtcccgttccgtcccaatcattgtaaacaggcagaggctg

SEQ ID NO: 438675 - DNA, 122 bp, Homo sapiens
tgcccaggcccagtttgacttctcagcccaggacccctcgcagctcagcttctgccatggcgacatcattggggtcctggagcatccagaccccccactggtggcggggccagtcctgcggg

SEQ ID NO: 438676 - DNA, 122 bp, Homo sapiens
gcctcgccccgcccccagggccaagcctcccatcaccgcgccgccccagaacacgctccgcgtcaccgccccgccccagaacccgccccacgtcaccgccccgctccagaatccaccactgc

SEQ ID NO: 438677 - DNA, 122 bp, Homo sapiens
gcccagctgcgtctggaagctggtgctgcggtcgtcgcgggccgggttgttgatgacccacggggcgccccaggcgggcgcgaggtagttgcggggcaggaaggcgctgccgttgacgtcga

SEQ ID NO: 438678 - DNA, 122 bp, Homo sapiens
ctgggccggccgatacagtagccatcctagacaaacccgtgcatccttggaagccctattcgcacctcgccttaaagggaatgggatgtgttatgcatagactcacgacctctgaaccaggt

SEQ ID NO: 438679 - DNA, 122 bp, Homo sapiens
cagtccggtcctgggggccctggaaggtggttgctgagcagcccgtgggaggcacggatccgccagctcacggcggcaggggccgcccaagtcctaatgaaaacacctagctcctggcaggg

SEQ ID NO: 438680 - DNA, 122 bp, Homo sapiens
caccgccatctttacaaggggaaaccgggactgcccatggtggcgcgctggcggggaggccgggcggcagcgcggcggcctggggtccggctttcagtttggctgggagagggaggccggga

SEQ ID NO: 438681 - DNA, 122 bp, Homo sapiens
ggacgtgctggacatcgagcagttctccactgtgaagggcgtcaatctggaccacacagacgacgacttctactccaagttctccacgggctctgtgtccatcccatggcaaaacgaggtga

SEQ ID NO: 438682 - DNA, 122 bp, Homo sapiens
taataacaaatcaaagtgggtatgagagttgggattagttttattctttgtacaggcttgcggacagtacaattctgggttttctgtctctaacagtctcaagaaaagaagagtatcatatc

SEQ ID NO: 438683 - DNA, 122 bp, Homo sapiens
agcttaattatatctttctcttcttgctaaaatgatgtgtaactacaatcacgggggccccgcataatttaaagaaattaaattgttcataattcctgatccaaataaccctatttttctag

SEQ ID NO: 438684 - DNA, 122 bp, Homo sapiens
tggcgggcttttgatggccacaatgcaagttacgcccaaagagtgtctctttggtcagatcgacaacgcttggcttcacgtttgcaagttaaacgggcagaaacccggctgaaactcccacg

SEQ ID NO: 438685 - DNA, 122 bp, Homo sapiens
cgattgaaagaagactcgcccgctgcccttcctccatgacaatgcgctggaaaatctccgcggatgtggaggccgtgtttggttttctctgtgtgtgtgttttctctaaagccataagtgcg

SEQ ID NO: 438686 - DNA, 122 bp, Homo sapiens
tttcgctgcatatttttcttactctttgttccctgactccagtgatttgataagaggaatcgacagagatccaaagaaaagcaagagacctcattaaggttcacttgaagcatgttctccca

SEQ ID NO: 438687 - DNA, 122 bp, Homo sapiens
ttattacaggggctacactggaggctggattgtggctcttcagtggagttactgatgtgacgcctgtgttgaacatcctgtgggggctcgttcattcctaagggatctttcagcttcgtgat

SEQ ID NO: 438688 - DNA, 122 bp, Homo sapiens
ggtcttctgccctgcccctgggtacagccctcggtgctctattcccgttccagtctgttgcgagttcaggtctattcaggattctggattacatcctaacgtgggcgagtttctgttgaacg

SEQ ID NO: 438689 - DNA, 122 bp, Homo sapiens
aggctggcactttctccaaatttcacgttcgtgcaaagacacagtcattcctttctacagcgtagagctcagagctgaagcagcctccagacctgctgtcatgggtatttaaggacctaaat

SEQ ID NO: 438690 - DNA, 122 bp, Homo sapiens
catctttttgttgtataacttattttgggttttgcttgtttgttttttgagacagggtctcgctgtgttgcccatgctggggtacagtagcatgatcacagctcactgtaggttcaattttc

SEQ ID NO: 438691 - DNA, 122 bp, Homo sapiens
gttcccgcgggccggcaggcggggctccggctctggcccccgcaccccgccggtcccgtgcggggcccgcccctgcctctggcccccagccccggacccggctcctccccagcagcgcgccc

SEQ ID NO: 438692 - DNA, 122 bp, Homo sapiens
gaaatagggcggactctggccctcggaggccagagaaaaggcgagactccagagaggcgccggacccgaggcagacattcccatacagccgggactccgagagcagccgtgggcgacctggg

SEQ ID NO: 438693 - DNA, 122 bp, Homo sapiens
agtaactccattttgattctgaagactttcactaccacatgtctaaaggtgctaaaaaaacggagaaaggggatgacaaaggatagaaaatctgagcccagactaaagggtttgtgaaatga

SEQ ID NO: 438694 - DNA, 122 bp, Homo sapiens
atgtccttttattgcggacttttcctcaattcaaccaaagatgtggttcttgtccttcctcggtcatgaagatttaggctcgcagatggggtctgaagggtgagcacagcagggttttactg

SEQ ID NO: 438695 - DNA, 122 bp, Homo sapiens
gacgtcaccagcggcagccccggaaagcggggcggggtcgcggtcccggcggagactctgcgcctccggcctacccgccccgcccccatccggcttcgctcgcgaagctgcccccactcgtc

SEQ ID NO: 438696 - DNA, 122 bp, Homo sapiens
accgcaggcagctcgggaggggctccctggcgagggggagctggtgcggggctgtctcggcgccccgtgaatccgtttgacccctcacctggcagtgagtccagacgcacggcccccccgac

SEQ ID NO: 438697 - DNA, 122 bp, Homo sapiens
acgtgtcagaaataagagacttctcacacacacttgaagtatctctccatgagtgtttaccgcttcctttgtgcagggctttgagtcctgtgtggcatcagacaggcctgtcttaagttcct

SEQ ID NO: 438698 - DNA, 122 bp, Homo sapiens
gtgaaagacctcagcggggaaacgctccgggccacgcccactccccttatcccaattccgcgtgctggtcccgcacacggtcatccggtttctgtcctgtggtctccagtcctggggcaccc

SEQ ID NO: 438699 - DNA, 122 bp, Homo sapiens
caaagccacccctggcaggctcagggctctggagcaagcccagccaccttggttgtggagcgggaatctctagcaaagatgcctactgtttcaccagtgcagtggaagaggagaaaatgggc

SEQ ID NO: 438700 - DNA, 122 bp, Homo sapiens
tctaccagtaggcttctagcacctgaattttcacacactgcaccacagaccttctccaaacgcctctccgaccccacagcttctgcacccagctgcgtccgccagcacgaggcgcagtagga

SEQ ID NO: 438701 - DNA, 122 bp, Homo sapiens
aggcgcaatcaccttccgtcatacacttctcagcagcttcccggtgaggctgctggttcacgaggggcgggagctcctagtcctgctccccgacggcatagctgcgaccggcaccacatggg

SEQ ID NO: 438702 - DNA, 122 bp, Homo sapiens
aggggtccgatggcactcactgcttggtgataggtgacagtctcactgctcagcgataggcgatggtctcactgctcggtgatagtctcaccacttggcgataggcgatagtccctttgttt

SEQ ID NO: 438703 - DNA, 122 bp, Homo sapiens
cagactaaatcgctcgcgcgagagacccggatggcacaaaggcgaggaggcccggcgcgtcgcacagcttgctgggagaaaaaggggcggtaacaaaagtttctataacaacgcaattcgag

SEQ ID NO: 438704 - DNA, 122 bp, Homo sapiens
caaccaagtcacctccagagctgactgctcctcagaagacctggcctcacctttgccctccgcttttattggggcattggggcttatgcaggaaacattttaaaaaagaacaacagcaagaa

SEQ ID NO: 438705 - DNA, 122 bp, Homo sapiens
tgccgctggctgaggaggaggatttcgacagcaaagagtgggtcatcatcgacaaggagacggagctcaaggacttccctccaggggctgagcccagcacatcgggcaccacggatgaggag

SEQ ID NO: 438706 - DNA, 122 bp, Homo sapiens
tgtcccaagtcctttcacagtctgccttcctcaaacggcccgatgcgcccccgtctttgccggagtaagcagaccgccagcagccggcccgcaggtcagtcgaccctctctggatgcaggtc

SEQ ID NO: 438707 - DNA, 122 bp, Homo sapiens
aactctggggacagtaatcagccttccaggtgactgtgatgcatgctaaagtttgcaaaccgctgccctgggagaaagcttgtcttctcgttatgctctaggtccctaaggttgagtctaca

SEQ ID NO: 438708 - DNA, 122 bp, Homo sapiens
cgcggccctcgggagccccgccccgccccggggatgccaagccgcccctccacctcgcagcggcgccggccgcccagacctgcccaccctcgccgggtcagccgcctccctccgccgcgccg

SEQ ID NO: 438709 - DNA, 122 bp, Homo sapiens
tgctctagaaaaagttattattactgtgtacattcatatattactctatgttactcttcacgcgtatatagccatggttctttccaaggaaattcccgcaaaaccagttgcatatgattatt

SEQ ID NO: 438710 - DNA, 122 bp, Homo sapiens
aagggcacgaagtgggacaaggtcccggtgagaggcacgacactgtcacctgcctcaggccgcgctcggtggggcgggggccaccagctgaggcccctcctgccgcccagacagctcggccc

SEQ ID NO: 438711 - DNA, 122 bp, Homo sapiens
tgtgaatgctgatgtggctgctgcagagcccagtctctccccggtgcagggcctctgagacgacgggactgtcctcagatggttggaagaaatgggttatcttaggcagttaggaaaagagg

SEQ ID NO: 438712 - DNA, 122 bp, Homo sapiens
cacacctgctgctgctccccacgacccgccggtccctagaggagcccatgacggaactcccgccacgcctgagactgttccccaccacccgccggtccctaaaggagcccacgacggaactc

SEQ ID NO: 438713 - DNA, 122 bp, Homo sapiens
taaatgtctcacaaaccaaaggaaggaataaagctcatgcccagcctcttctaaggtttacgtgagcaaaggattttagaagtcctttgcaaactgggaagttctatataaacgtgagagct

SEQ ID NO: 438714 - DNA, 122 bp, Homo sapiens
cgcatcttggccgccgccttccccgcgcggcccgatgaacagcggcaccggggccacctgcgcgagctggcccatgtgctgcaatccaagcaccgggacaagtacctggtgaggggcggggc

SEQ ID NO: 438715 - DNA, 122 bp, Homo sapiens
ctaagaaccctacctctttcttgctccaattaaaatattgaggtgactgtcatagctaagcgttgggaaaggctgggagcagggaagaaaggctctgaaacctactcagcactccacagact

SEQ ID NO: 438716 - DNA, 122 bp, Homo sapiens
ctcctagtgtatctctcactgataagtttgctcataaaaccagggccttatccagggccacgcttacagaactcccacggacacaccatgattaggaccctgctgctgtccactttggtggc

SEQ ID NO: 438717 - DNA, 122 bp, Homo sapiens
agggcagctcgggcaatccagagctgattgggctgcccagaacaaagctaggggctagaccgccccctgcagaaccgccctgtctccagagggtcaaagttctggaaagggctgaaaggtct

SEQ ID NO: 438718 - DNA, 122 bp, Homo sapiens
cgactagcttgcaggttcaggtggaacgcatagacgcgctcttccaacctcctcccctctcgcgccactcagctaagggccacgtctacgctagcacccagagcccctagctccctgccttt

SEQ ID NO: 438719 - DNA, 122 bp, Homo sapiens
aatttttcttaggaactggtaagtcaaaacaaaaagtcatattcctatagtttgcctattcggaagcaaggaatttgatgataacttcagatcagcaaagaaagtattcttattcctcaaga

SEQ ID NO: 438720 - DNA, 122 bp, Homo sapiens
ggggtgcgagtatgcgattggagaatatgtaactaatagaagtatcattttcccccagtacgatctttcaaggaaaaaaaaatccattgaaagaattttcaaagtgctgtcttcgtttggag

SEQ ID NO: 438721 - DNA, 122 bp, Homo sapiens
actctctgcagagacactcatagaaaatttaacaggaatcttgacctgttagaacttgctcggatggattacaatccttttgcctcagaagctgtcactaataaaagctgtttttaaagaaa

SEQ ID NO: 438722 - DNA, 122 bp, Homo sapiens
tgatcttttttgtgtgtgtgaccttggattagcaaatttatctgtctaaacctcaatttccgcatgcgtaaaatggggataatcatgcctaccttaaatgaaatggacctgccaggcaaagc

SEQ ID NO: 438723 - DNA, 122 bp, Homo sapiens
agaaacagaaggaggggaaggaggaggaggagagaaaagggcaagagaatgagaaggagacggggaagaatatgaagaaggaattaaatccaccagattgaaagggctcatgtggcaaaact

SEQ ID NO: 438724 - DNA, 122 bp, Homo sapiens
acactggctaaaatgagtgtggtccagtggagtgcctgggatttaaatagaagcagggtgcggggtgggaaggagagcttagtgacgatggaaactatgtgaagcatttcttgccaagatgt

SEQ ID NO: 438725 - DNA, 122 bp, Homo sapiens
cctgctattatttgcagggcaccagggagtgaggaatgcaaaggcgaataatctccaaagcgctttcagtgtagcccaataagcaaagggtcaggggtctgcgcagttatcacatcagtttg

SEQ ID NO: 438726 - DNA, 122 bp, Homo sapiens
agatgcatgtcaggaggggagaactttgaaggaaaaagaactgttagtgtgggtgaaccgcggagcgcttctgcgtcccagcggctctttaacacaaacctcaggtttagctggggacatgg

SEQ ID NO: 438727 - DNA, 122 bp, Homo sapiens
acacctgatctgaagcccttgctctccaatgaggtaatctggctagacagcaagcagatccgacaggaggaaatgaagaagctgtccctgctaaatggaggcctccaagaggtaaagcattg

SEQ ID NO: 438728 - DNA, 122 bp, Homo sapiens
cctgctccctccgccgagcggcgtctttgtgtgcgggggtgtgggaggcgagcgcgagtccgcgcagcgccgccgagtgcccgctccctcccagggcgggtgggggcctctccgcgccgccc

SEQ ID NO: 438729 - DNA, 122 bp, Homo sapiens
gagggaggtcagcgtgagcccctgcctcacactggcctctctcacgctgagggaggtcagcgtgggcccctgcctcaaacttgcctctctcacgctgagggaggtcagcgtgaggccgtgcc

SEQ ID NO: 438730 - DNA, 122 bp, Homo sapiens
gcttttccctcccctgcaggtcgggtctggggcgcgccccgcctccagagcttgcgagtgcgtgggtgaccatcctgggctgggttctgcagcatctgcccactccagagcctggggttgac

SEQ ID NO: 438731 - DNA, 122 bp, Homo sapiens
gactttgcctgaatatgcccagtgacagggaggtcaccactcggtaaggcacttctgttacggtaatcagtgaaacacttcatttgaattaacagggacttttgtttcttcctccccatgac

SEQ ID NO: 438732 - DNA, 122 bp, Homo sapiens
gtgatcaaagttacagaggcatgaaatggcatggtttgagcaggaaactccaaggggttccgtgttgatgaaacatctatttcaggcagggtgttgtaatgaataatgaagctgaagacata

SEQ ID NO: 438733 - DNA, 122 bp, Homo sapiens
tggcgctcactggtcccttgcagccacccctctgtcccagacccggcccgagggctggggcgcgtctggtgtgaggcccctgctcctttgcacttaacgctctagtcctctttctgagactt

SEQ ID NO: 438734 - DNA, 122 bp, Homo sapiens
gagcaccagggaggagggcccagccaggggagagggcgccccaggccccaaactagccagcgagtccccgggaccctcactcttggaccgctttccagaactccgaaccctgtcgcgggtcc

SEQ ID NO: 438735 - DNA, 122 bp, Homo sapiens
gagtaaggctcgaccttggccagacctgcaggctgcggaaccgggggcgcgcgggcgcagcgcagcacagcccggccatggagcacgcggtggccccctgcgtcctctacccagggactgag

SEQ ID NO: 438736 - DNA, 122 bp, Homo sapiens
tctccagcgccgcccgtgcctgacaacgcgcagcgtttcccagtacgacgcgtttgtgcgcgttcatctcgcttgagcttaatgccctccgtgagggtgggataggacaaagtgcccaatat

SEQ ID NO: 438737 - DNA, 122 bp, Homo sapiens
cttaattctttaaggagccacctgacctatgtcagactgtgatgtgagcaatacatacaccgttttaggcataagctagttagatgggattatttgctaccaaagcataatctagccttata

SEQ ID NO: 438738 - DNA, 122 bp, Homo sapiens
atcaggggatgcctgcaggaccagcgggaagactgggcacatcgtatggacagtcacccccggaggacccgggagcagcgaatatttgatcatcgttccagggactttctggaatgaatgaa

SEQ ID NO: 438739 - DNA, 122 bp, Homo sapiens
ggtggtcctgctgcctggggagcggcccagctgcctactgtggtcctgcttcctggggagcggcccggctacctgccgtggtcctgctgcctggggagcggcccggctgcctactgtggtcc

SEQ ID NO: 438740 - DNA, 122 bp, Homo sapiens
aaggagggtgcctgctgagaagttgaatcaacctgtgtcctttctgctgcccatggtttccgagtgtttcctatatgcaggatgctcctctgctaagcagagtacctggtaggatggagaag

SEQ ID NO: 438741 - DNA, 122 bp, Homo sapiens
atacacatttttggccccaacctgcatcgaccaagtcagaaattctgcagtgtgtgttttcgtaagtcctccaggtgactctgatgtactctcagggttcagaaccattgagagagagcagt

SEQ ID NO: 438742 - DNA, 122 bp, Homo sapiens
gtgtcacctttctcaaagctaagatttttccttattaaatgggagatcccagagtacgcacgttagagctgaatcgctgagtgtgtctgcagagagaaaggaaaacaccgtgagcctcagac

SEQ ID NO: 438743 - DNA, 122 bp, Homo sapiens
tttgccgcggccccgccgaccgaccgcttcactgccgccttcctgcattctcgcagactacgttgcggcgtcccctgctcccgccctgaggacgtcgcttttctggcactttcatcctatgc

SEQ ID NO: 438744 - DNA, 122 bp, Homo sapiens
cgcgagtctcagggtgcttagcactctccaggcccggcacccgcgggaacgggggacacgcgggacttcggcagtcccagtaacttgctttgctgttctgagacctcagcggggcggtcaga

SEQ ID NO: 438745 - DNA, 122 bp, Homo sapiens
agggcaggatatatcgcttcgggcccggcgggggggcacccggacgggggaccggggagccgagctcacgcgcccccaatcgcttcttgcccgcggactcgggcccaactggttggctgccg

SEQ ID NO: 438746 - DNA, 122 bp, Homo sapiens
gcaggtaaaggaacttgcccaaggttactcagctaaaaaaaaaaacaaaaaacaaaaaaccggcagaatttggactcaaaccccacaggttggctccagagtcctgcctgctcttagccctg

SEQ ID NO: 438747 - DNA, 122 bp, Homo sapiens
tgttaattacactaaacagttggatcagaaaagagatccaccaatagaaacccatgactccgtcacacacattttacttatttgaactcacttcacaagtttaaaggaatcataagttcata

SEQ ID NO: 438748 - DNA, 122 bp, Homo sapiens
tggaagcggcgcggagaatggcgtgttccgaggccagatttcttctggccagaggaccctcggcctgctcctgttcccgccgctccgcagctccagctccctcctaagctcgcccgccaggc

SEQ ID NO: 438749 - DNA, 122 bp, Homo sapiens
aattagaatgagttatcctaaaaagaggactaatccctcatttcagcagagctagtcattcgacaaatacttattgagtgtctattatgtaccagacacttttgtaggtactttagatacac

SEQ ID NO: 438750 - DNA, 122 bp, Homo sapiens
cgccagcgccgcaatcccgtcactgtattgtcctcctcggcaccgagcgatctgatccgccgagccagaaagacacccgatgggggagagaagcaaagtggaaaaaaaccgacgtccctgct

SEQ ID NO: 438751 - DNA, 122 bp, Homo sapiens
aggcagggcagaggcaggaccagatggccgtttgaggtgctgagcaaagctcccggtttgcgcggagaggtgagatcgaggccccttgggaggccgaggcttaaccagggctcaagcagagg

SEQ ID NO: 438752 - DNA, 122 bp, Homo sapiens
ggtgggcagtcccaggcgtccttccttacagccctgagcctggtccgggaaccgcccagccgggagggccgagctgacggttgcccaagggccagattttaaatttacaggcccggcccccg

SEQ ID NO: 438753 - DNA, 122 bp, Homo sapiens
ttcctgggccagtactgaggttgggcctccagtcctgactcgtgagctgagcctgggggacgccgagaagtcatgggagctgcttagagttcggctttctcagctgtgcgaaggggatgatg

SEQ ID NO: 438754 - DNA, 122 bp, Homo sapiens
tccgcgctaccgagtactttctactcccgaccaggcattgctctctctggagaccctcggcggtggttgctgtattttgacttggtgagtcctgggaaccgaccctcgggcctgggctccga

SEQ ID NO: 438755 - DNA, 122 bp, Homo sapiens
cccgcgccggaaggggcgcgcgacctcccgcgtcacctccgcagccgcgtcacctcctcgcgggctctgcctgggccctccaatcctaggccctctcgcggagtcccaatcacaggcccgcg

SEQ ID NO: 438756 - DNA, 122 bp, Homo sapiens
ggagaggcgggagctgtcaggccaggagggaaacccgtcgggcggcggttactatggacgcgctcacgcttagtaaccgaggctccccgccctccgggagacctccttggtttgggaggtga

SEQ ID NO: 438757 - DNA, 122 bp, Homo sapiens
ggctcctgagccggctgccaccaggggtgcgcgccagcggtgtccgggagcctagcggcgcgtgtgcagcggccagtgcacctgctctggccctcgccgcggtctctgccaggaccccgacg

SEQ ID NO: 438758 - DNA, 122 bp, Homo sapiens
ctgccgagagaagagtttctctggtctgtttttagccacgcttcctcagcaagtgatcaccgaaggaataagtgaacacggtgaatgaatggacaagcgcgttgggcccacctttggcacct

SEQ ID NO: 438759 - DNA, 122 bp, Homo sapiens
cttggggaatccacagtgggggtggctctggagcaggcaggatcacaggcagaggctctccgtgtttttcttcaccttgcctacttcaggagagagctgaaggagggcccggtgagatgcac

SEQ ID NO: 438760 - DNA, 122 bp, Homo sapiens
gtactataacaggaaatggcatttgtgctgagccctaagggatcatgagaatctcaagtacggaccaagcaggcagagacacgggcctctggggaggagaggaaggcaccctcggggcaggg

SEQ ID NO: 438761 - DNA, 122 bp, Homo sapiens
attcctcccgacatcactggtcccttggtgaagaccccccgagcccaggcatctggccctcggccccctggccccgcctcctgtcagtggactgtcctggcacgtgtggccctggcgcccct

SEQ ID NO: 438762 - DNA, 122 bp, Homo sapiens
gccaagtggcgacgtggtcatgcgcagaaagatccgtccggctctctgagcagagggtagcgtgtgggggcgggataccgacgcggctcggctgccgattggtcagaagaggatagaaaggg

SEQ ID NO: 438763 - DNA, 122 bp, Homo sapiens
agagaaagaccagtgtttgggcagcaaggcatcaacctggagggtacggacgccggagcacgcggctactcaggccgaaccccgacccggacccggcacgcggcctcggcgagggcgggcgg

SEQ ID NO: 438764 - DNA, 122 bp, Homo sapiens
caacttcagctactcacagacccagtgatgagcagaagagcaaggcacacagaaatgttgcgtctcatctgtctcatctacattaaatccaaatgcagtcaacaccaggctcccttcttcaa

SEQ ID NO: 438765 - DNA, 122 bp, Homo sapiens
tatttccctggatctaggagtccatatttacaggcaatgacattctctgctataaataatcgtaacagcagccatttcttacaggtgtattatgcccacatgcttgacatgtgccatcattt

SEQ ID NO: 438766 - DNA, 122 bp, Homo sapiens
gaggacatccaggagctgaggcactacagagactcagggactcgagggagctcgaaaggccgctcacaacccggcgtcgcccacgacgtcactgtcgaccgggcttctccatcatattccga

SEQ ID NO: 438767 - DNA, 122 bp, Homo sapiens
tttcgtgtgggtatgtaggggggctttatccaccaagctatgctctattagggcgccaggcgggcgaagcaaaggcagggatggcgggcggggcggcggcggaggtggaatgggcgcttttt

SEQ ID NO: 438768 - DNA, 122 bp, Homo sapiens
ctataattctgatcttaatcccaaaagatctactaagggatgcagtctcacataccttcacgggagtgttttcatttctttgaaagagctgctgaattctaaaccaaacagtttctgtgtcc

SEQ ID NO: 438769 - DNA, 122 bp, Homo sapiens
ccttcggcgcttcgggcagctctgtcctgcggcccaagctggggagaagacagcggcccgcgccacagggagctgcgcccggacccagactcccgccgcgcttctgcagagcggagccctag

SEQ ID NO: 438770 - DNA, 122 bp, Homo sapiens
gggtccttaacccctggtactggtcctgttaggaactggaccgcacagcaggaggtgagccgagggtgaaccagcatttccacctgagctccagattctgtcagatgagcagcagcatgaga

SEQ ID NO: 438771 - DNA, 122 bp, Homo sapiens
tggaggaatagttaagattgtgaataataggattaagtgagataatatatgtaaaagtcccgggtaaacaataaaagtctatttcaatggaatggattattataatactattttttcagtca

SEQ ID NO: 438772 - DNA, 122 bp, Homo sapiens
cccacggtacaaaatgaataagcaacacattgcagccttcagttaggaatgtcagctgatcgctagtgggatgccttctgaatccctggcaggctttttctttacctccagaattacatata

SEQ ID NO: 438773 - DNA, 122 bp, Homo sapiens
ctaggtcatttgcacatccataaattttagaattatcttgtcaatgtctctgaaaggacccgctgggattttggattgtaatcgtgttggctattgtgagacttttctcaaaaaggaattaa

SEQ ID NO: 438774 - DNA, 122 bp, Homo sapiens
gacttcttgatttcagatgtctgtgagagaagaaacgtctgttgttttaagccactccatcgtggtcattttgcatggcagacctaagaaacggatgccatcttcaagatcatttgaacagt

SEQ ID NO: 438775 - DNA, 122 bp, Homo sapiens
ccagcgtctccctggctctgtgtgaagcagccaaaccggttttcttccctggccgcaccacgctgactccctctgggccttgctcctggtgacgggggccctccctggccagctcagccctc

SEQ ID NO: 438776 - DNA, 122 bp, Homo sapiens
gggagagaggtgcgaggggagaagggaaagaggcagagcgcgggagaagggagccggcagcgggctcccagccacggagcgcacccctccgaagacccccgcaggctgcgggccccctccta

SEQ ID NO: 438777 - DNA, 122 bp, Homo sapiens
ggaatgtgcggccatatgggaatgccttgagtgtgtgagggccatatgggaatgcctgtgcgtgggggtggcatgagtgtgtgctgtgaggtgtgagtttggagagaagtataaataaatga

SEQ ID NO: 438778 - DNA, 122 bp, Homo sapiens
gcatgggatcccggaggttccggaccccaggccagtgtggggaggtgccgggggctcggacgcgccacgagccggcgcagagctggcgacccgtctcccagctccgctccactcccagggac

SEQ ID NO: 438779 - DNA, 122 bp, Homo sapiens
gagagagagagaaagagagagtcctaagggaaggagagatgtcaaaggagaggagtgcaccgaagtccccagtcagcaatgtctggtgcccgggctgaacattccagcttgcttcaaaacat

SEQ ID NO: 438780 - DNA, 122 bp, Homo sapiens
aagaaaggacaacagaatctctttcccgtttgcctgttcctgccagcatcactcctgtagcggcagtcatctccggcctccagcttctttttgcgctgtcactcccagttttgccacaccct

SEQ ID NO: 438781 - DNA, 122 bp, Homo sapiens
cggggagttggccaagcacgccgtgtccgagggcaccaaggccgtcaccaagtacaccagcgctaagtaaacttgccaaattgatgcctgcagctcctggggaaagtggaagtcagataact

SEQ ID NO: 438782 - DNA, 122 bp, Homo sapiens
cgctcctctgctggcgcccgcaacccgggagggagcggcgaggctccgaagggtgggattcgaggtctgaaccctcgagtgggcttgggttttcaggagccgccttttcttattgatcattt

SEQ ID NO: 438783 - DNA, 122 bp, Homo sapiens
ggtgatcaacctgcctctgcctcccaaagtgctgggattacaggcgtgagctcctgtgcccggccctgttatgccattttaaagctaaggaaactgaggcacagaaaaaggtaaaaaggtac

SEQ ID NO: 438784 - DNA, 122 bp, Homo sapiens
tatcctaggatgaaaaggtgaggaaggaaacaggcgcagaagtgttataagaaaccaaagcggccttttgagaagggatgtaagagcaggcccctgagcagtttcacttcctctgggcgccc

SEQ ID NO: 438785 - DNA, 122 bp, Homo sapiens
cctctgagggacacggcctccaagagctggctctgccctggccgccctccacagtcacggcggctccccgcatgctcctcgggacggagatctcctggcttcctcccgcttcctttcctctg

SEQ ID NO: 438786 - DNA, 122 bp, Homo sapiens
acaccttcgattcattctccaagcttaaagagctttgccctaaaaccagatcctctcatacgatgggacaaacagccccaatgttcttccctccagatctgttccaacctgtgtctggagac

SEQ ID NO: 438787 - DNA, 122 bp, Homo sapiens
gatgctgttgctgtgcctgggggtcccgaccggccgcccctacaacgtggacactgagagcgcgctgctttaccagggcccccacaacacgctgttcggctactcggtcgtgctgcacagcc

SEQ ID NO: 438788 - DNA, 122 bp, Homo sapiens
tgcatatcagttgagagaagcattgaaatgcagtagtacctggtgtgtggtgatgagaggcgtgcgctttgaagtttttggccaggagcaggactggactgcactggcccacatgtgaggtg

SEQ ID NO: 438789 - DNA, 122 bp, Homo sapiens
tagtcccagctcaggaggctgaggtgggaggatccctttagcccaggaggatgaggctgccgtgagccatggtagcaccactgcactctagactaggtgacagagaccatttctctcctcaa

SEQ ID NO: 438790 - DNA, 122 bp, Homo sapiens
cgctttatgtccactcttggcttgttgtcagcggcaaggtccgatgtctgctgcggagcccgtgagtgatggccattcctgccggcatttggtgttggcactgactctcctagctgtggggc

SEQ ID NO: 438791 - DNA, 122 bp, Homo sapiens
gaccctactacctctttcagttccagtgtcgcgtcttctcctcagcttcattgctcctggcgccctggccttcattggccatgtggtggagcttcactgcgaagacaggagagcgtctgcac

SEQ ID NO: 438792 - DNA, 122 bp, Homo sapiens
aagtgattcttaggccacttcaacctcccaaagcacggggattacaggtgtgagccactgcgccaagcccagagttgttttttcaaggagtaatttggtatgatgcaaaagattttgaagaa

SEQ ID NO: 438793 - DNA, 122 bp, Homo sapiens
tgctttccagctgtgaccatggcaggtaacgagcctccctgagtctccactgtcctctgccgaccaaatgggaatcataacagctcctcttattattatgcctgagacgaggcagccagtct

SEQ ID NO: 438794 - DNA, 122 bp, Homo sapiens
tgaaagtcaagtaatgaacaggctacacttcacttttgcatctctaagaggcactgtccgcggttcacctgctccttgcccagcgatctgcacggtggagagctgcttacctccgccaggta

SEQ ID NO: 438795 - DNA, 122 bp, Homo sapiens
aggtcaaggcaggaggacgctcggtttcccatctgcacagctgggcctgtccttcctgggcggtcctttgtccactgtcttcctgaggggagtttgaggagaagccccaggtctaactctgt

SEQ ID NO: 438796 - DNA, 122 bp, Homo sapiens
gggcgggagaaagaaagttcttttgcggccaccgggcccagcagagaggttccgcctggccgaggagaggcaggaacctttacacttccggttcactccccgctaggaccctcccccaactt

SEQ ID NO: 438797 - DNA, 122 bp, Homo sapiens
ttctttatacccttcctcagctttgtcctaatgggcttagcttttctaactatctccagccgttgagaatgttgacaggctcagcagttgcagtctctcactatatctttgtcattactaca

SEQ ID NO: 438798 - DNA, 122 bp, Homo sapiens
ctggggttgtcgcccctctttatgtctgatgttagacataggagtgagtgtgttgtcggccggtcaccttttcctgagccgcccccagcgctgcggaggagcagggcgcccctgagcctgac

SEQ ID NO: 438799 - DNA, 122 bp, Homo sapiens
gcagatgcagcccttgcccgcggggagctggttgtgctccatttgctaaattgtggttgtcgctcggaaaatcgtctccctgcagatgtggtttggtttatgtttggaggctgagaggagca

SEQ ID NO: 438800 - DNA, 122 bp, Homo sapiens
ctgtcttgccagtatggccaaaggcattcatttccgaggcagctggccagggctgagccgcggacaattaactgggccacagggccctgggctcacaaccttcctgctggatcctgaacaca

SEQ ID NO: 438801 - DNA, 122 bp, Homo sapiens
aaggctctgccctagaactttgctattccacccccaggagcgctgggtgggtgtagctggcgggttgcttcctttcaactttccactctaataaaatggtcagaatatacgtgtgtgcatgc

SEQ ID NO: 438802 - DNA, 122 bp, Homo sapiens
gcggggcccgggtgggcggtgccctgagcggggctcctagtgggcggggctctggggtggcggccgttgccgggctacgggagagcgcggagccctgcgctgggaggtgcacggtgtgcacg

SEQ ID NO: 438803 - DNA, 122 bp, Homo sapiens
ctctggcgccaggtagtgtcgcgggcgcttcctagtgcgggcactcatcctgccgctctccggtcggccatttattgtcttgtggggaagggctttcgccaagaaacttggtctgggttagt

SEQ ID NO: 438804 - DNA, 122 bp, Homo sapiens
ggctcagggagttccccccacccccgccctttcgcaatcgggccacatggctctatcattcgaatattccctagatttatggcaatgccgaggaacagtcgggtgctcccaggcgcccgcct

SEQ ID NO: 438805 - DNA, 122 bp, Homo sapiens
ctccctcttattactgggccgggcatccgccgcgcctcccgcaggtgtttgcctggagagcgcggttgcacctgccgcccctgcacatgcgcatcacccaggaagagctatgcctcacagat

SEQ ID NO: 438806 - DNA, 122 bp, Homo sapiens
tggaccaaacctgggcttcccatattttgggttgatctgggccttggagggaagagctttcggttttgtagaaatgatgtggataggaactggggtaggcacagtccatccagtctcacacg

SEQ ID NO: 438807 - DNA, 122 bp, Homo sapiens
gaactccatcataccggatgccaccgtttaaggatcctttgaaacttcttaagaattcaacgagatttttaacctgaaactgaagaatctggtactgtaagtgtaaagaagcttattttgga

SEQ ID NO: 438808 - DNA, 122 bp, Homo sapiens
ttccatgtgaaaaaaaaaaaaaaagagacagggtctcttgctctgtcacccaggctgcagcgccgtggcaagatcgataactcattgtagccttgaactcctgggccctggactgaaatgat

SEQ ID NO: 438809 - DNA, 122 bp, Homo sapiens
agaggatgtgaaacagcagcttcacttccaatggagatccggacagtaataaaacagtttcgcaatctcttcactaaatacatctttgtttgcatggtctatgtatattgtcatggggcagg

SEQ ID NO: 438810 - DNA, 122 bp, Homo sapiens
tacaatctgcatttcacttttttttttctgaagtaatctctgagaacattttgtccgttccgcatgtaatttttttccttgcatttttaatctctgccatgccaagaacacgtgaggaggta

SEQ ID NO: 438811 - DNA, 122 bp, Homo sapiens
ttgccgacacaccccagagaagctgtgctccgggcttagggcagcctgatttggccaaaacggagcgttggcatctgtgtggccaagggggcagtggccggcgggcggtggggcctgagaat

SEQ ID NO: 438812 - DNA, 122 bp, Homo sapiens
gcgctgtcggttccccacagggccgtgtaagggggccgaggcccgtttgggtctcctgtccgtccgtctgtccgccgagcgcttcccgcctggggtcgaccaccgggaggactccgcacccc

SEQ ID NO: 438813 - DNA, 122 bp, Homo sapiens
ccttttccaggctgcgccgggacctccactgaccaggccttcttcagaggcgcgggcccacgtgcatggagagcaccctcctactgacacgcagtccagtatcttttcgttctttttgggtt

SEQ ID NO: 438814 - DNA, 122 bp, Homo sapiens
gcggcgctttgtctcgctttgggtcaccaccacaggagcaacgatttcggggacggcacacgcctgtgtgaccgcttcccactccacttgggttccgtgagcgcgcggagccggaggagtca

SEQ ID NO: 438815 - DNA, 122 bp, Homo sapiens
catcacgtgtctgcactcgctttcctcggattcccggatgtgggtgagttcatttgctcgcgtgcaggggaagtctggagaaggcattgtttcaattattaaaagtgtgggggcagtgggcg

SEQ ID NO: 438816 - DNA, 122 bp, Homo sapiens
gaagcctttcctgtagccttctgtaggaattcttttggggaagtgaggaagccaggtccacggtctgttcttgaagcagtagcctaacacactccaagatatggacacacgggagccgctgg

SEQ ID NO: 438817 - DNA, 122 bp, Homo sapiens
cagcattattcctccaggaaggagcaaaacgcctcttttccctctctaggcctgttgcctcgggcctgggtccgccttaatctggaaggcccctcccagcagcggtaccccagggcctactg

SEQ ID NO: 438818 - DNA, 122 bp, Homo sapiens
gctcgccgacccagggcggtggcccgtgactcaggcccctcgtgggactttgggaggaagcggcagctgctccgagcggggcccgcccttcccatctcctgccgctcctccctacgcttttg

SEQ ID NO: 438819 - DNA, 122 bp, Homo sapiens
ccccgcccccgaccccgcttatttatttgtagggtttgcttttaaggatcggctccctgtcgcgcccgaggagggcctggacctttcgtgtcggacccttgggggcggggagactgggtggg

SEQ ID NO: 438820 - DNA, 122 bp, Homo sapiens
ggcgggcaagcggaaccctcctccttaaagatctcgcagtgaggttagggagctgctccccggctctgggaagccgctatcctgcccataccctcctttctctccgctgctgcccctgcctc

SEQ ID NO: 438821 - DNA, 122 bp, Homo sapiens
caagtcccattccattgattccctcccctaaaggtgtctgcaagggagagctctcctggacggacacacacaggaagagagggcaggtggctttcctcacagtgagagcatgctcgtgagtt

SEQ ID NO: 438822 - DNA, 122 bp, Homo sapiens
gcgtcgagtaacgtcattcgaaccccgtcgcgcccctttgtgcgtcacgggtggcgggcgcgggaaggggatttggattgttgcgcctctgctctgaagaaagtgctgtctggctccaactc

SEQ ID NO: 438823 - DNA, 122 bp, Homo sapiens
gcccctgccgtgcgcgccggactagttctcatagggtgtgttggttccctgtgggagaggcggcctgggaatcgggaaactgaggcacacacaaacagttgtttacttgctgggaacgactg

SEQ ID NO: 438824 - DNA, 122 bp, Homo sapiens
gaccctgctctggtcgcccagcgccgctccgagaagccggcagcagagtacccgcggtcgcgccctcgctgcttaacaaaggccgccccgctcggcccgccccctcatgaatagttaacaaa

SEQ ID NO: 438825 - DNA, 122 bp, Homo sapiens
ctatcgaagttggtatctcgacttgcccaacaccagggccagggcagtcttgctcctgaccgctgtgctggcagcccagacactgggacttcatgcacagggaggaggtgaccctcctgtag

SEQ ID NO: 438826 - DNA, 122 bp, Homo sapiens
ggggcacgtccagggcccggcaggtgtgccctggcagtagatcttccctgggaagtggagcgcgggccagccctcgctgttctgagcgagggcctgtcgtgtagtccacaccgttccgcgaa

SEQ ID NO: 438827 - DNA, 122 bp, Homo sapiens
ccctctgtggcagggagcggtgctgcccatcagtctggaagacacattctcagcacgtcacgctgcggccccacggaggccccgttccaagagtattggaaatgtaatcacaacagttttta

SEQ ID NO: 438828 - DNA, 122 bp, Homo sapiens
tttcctcccgtgcgcctccctcccttccccgccccgggccgcggctcctgattgtccaaacgcaattctcgagtctatggctccggccgagagttgagtctggacgtcccgagccgccgccc

SEQ ID NO: 438829 - DNA, 122 bp, Homo sapiens
ctctgtcctgctgacactctgaccattttcacacagctgtctgctcccaggaggcgatgacggggccctgccgggccgtgatgcctcgttggtacttcgacctctccaagggaaagtgcgtg

SEQ ID NO: 438830 - DNA, 122 bp, Homo sapiens
gatccgctgactttaaaactgaactaagtcaatctgatacgtttgatcagcggttacaatcgaaagttttaaaattagttgataggccgggcgtggtggctcatgcctgtaatcccagcact

SEQ ID NO: 438831 - DNA, 122 bp, Homo sapiens
ctcaacgccccactcgccggaacttccggccccgccccgggcactaggcgaggaggtggccggtattctggatcactgcgtgtcttggggagcttgggattccgcagcttggcggccgagag

SEQ ID NO: 438832 - DNA, 122 bp, Homo sapiens
aaggagcactgacttcagctactcagcaaaaacttactccttaaaatcacgagttatgagcgcttttcaatgagttctgaaggaatgtgtataccagcctctctctcttgctatctgggtgg

SEQ ID NO: 438833 - DNA, 122 bp, Homo sapiens
aggaacgcgcgggccttctcggctacagctcttctgggtttgtgctgccctcctggcaagcggtacgtggaagggcagagctgttaaaccaacagcccattgccttccagtgcttagtttgt

SEQ ID NO: 438834 - DNA, 122 bp, Homo sapiens
gtcgtcgcgcagcgatgacatcacccctaccgctctcctgaggggtcattttgaggcgcgcgtagaggactagaggactcattttaactttggtttggcgacagtgggaagcgggaaaattg

SEQ ID NO: 438835 - DNA, 122 bp, Homo sapiens
gggggagttaaaaaaatttctgagaaaactcggaacttgcgctccaggaacgactgcgcacgtggcgcggcggtggcggcgcggaggacccaggcgaaggcgaaggcgaaggcgaaggcgca

SEQ ID NO: 438836 - DNA, 122 bp, Homo sapiens
gactcttaatctggaactgaacgagatggagacctggatcatggggatttgggaggtctgcgtggatcgagaggaagtcgccactgtgtgcaaggcctttgaatccttcttgtctctgcccc

SEQ ID NO: 438837 - DNA, 122 bp, Homo sapiens
agcaacagtcacgaaaaaggcatctttcttctttcttgccatatatgacaagctctcaaacggatgaatgaaagtatgtaatttccacatcatgtggaaggttgatgccgcatgatgtgtgg

SEQ ID NO: 438838 - DNA, 122 bp, Homo sapiens
gaaagaaggagggagactgggcagctcaagttccccagaccgcacctatcagacggagggcggcccgctcccgtcagagcccgacctcggcggacaggggaggggatgggttgagaagcggg

SEQ ID NO: 438839 - DNA, 122 bp, Homo sapiens
ctcccggtgacagggagccggaaatgacgtagcacgttgacgcagcagcggcggcggtggcggcggaggggccgtgcggtgggtccgtactatcttttcccagtctcggttcgacgactcca

SEQ ID NO: 438840 - DNA, 122 bp, Homo sapiens
gcgggggcggtgggcctgggcgaccctggccgaagaatggtggcagggccatgttcacgacggagatgctttgagaagtgacaggaatctgagtggctcctcatgagaaccttccgacggaa

SEQ ID NO: 438841 - DNA, 122 bp, Homo sapiens
atcaaaattccttaacattaaagaaagtttctaacaatggaatgtcaggtctgagagacacgtgtggctgacaggggaattttctgaaatccctgaagacctataacaagccagtggcccac

SEQ ID NO: 438842 - DNA, 122 bp, Homo sapiens
gttgcttgggaatgcagcccaaagcgggtggtaaactccatttaaggctaaataccggcacgagaccgatagtcaacaagtaccgtaagggaaagttgaaaagaactttgaagagagagtac

SEQ ID NO: 438843 - DNA, 122 bp, Homo sapiens
aagagcaaacgaagcacggcccagcgccaggccagcccaagggtgccccgggggcccccgcgcccgcccgagccaggcgtaccttgttcttgacttcggccgagagcccataggaagggccc

SEQ ID NO: 438844 - DNA, 122 bp, Homo sapiens
ttgtgcatagtggagttaggcatgaggggagatggacccttggcatgagtaaaggagccacgaaagagtcaacattagctaaggagaaaacagagaaccaccattccccacatgcaaatctg

SEQ ID NO: 438845 - DNA, 122 bp, Homo sapiens
gcaaggccacaatggccatgctgagggtactggcatgggggctggggactgctcacctcacgtccagattcaccagggggtccagccaatccaggggggcccatgggaccagggggaccacg

SEQ ID NO: 438846 - DNA, 122 bp, Homo sapiens
ctaaagtcacatgtgcatttgaaagcaacagaacaaggaattctacaccaaatttcatctcgccaaaccatttttttcccctactcatgtaagttcctaaaatttcttgcttactctgcatt

SEQ ID NO: 438847 - DNA, 122 bp, Homo sapiens
gtctgtaagtcagagtccgcctcctggtccctaaacgctcattttaatcccacgcccctccgtgacacgcccctgctgtctgtctccaaggcaacgcccaacagtttcctctccgggattcc

SEQ ID NO: 438848 - DNA, 122 bp, Homo sapiens
gaacgcggcgggcagcaagccgggctctaaggatactcccgggagggccaggccactgggcgccgcgccagcgtccctccatcactccctcccttgtttcctcactccgccccggccttact

SEQ ID NO: 438849 - DNA, 122 bp, Homo sapiens
ggaagaaaatcgcccatttcagaataatttgggtttctgataaagaatgtaaactaaatccgcgtctgtgaatacgtttctgattaggaacttattgcgaggttcccttaagggagtgtctt

SEQ ID NO: 438850 - DNA, 122 bp, Homo sapiens
tcagaagttccctgagagcagaatcgcatcggcgtttgtgcaggacatcaggtggtagatcgcacaggcacaatcactaactcacaggcattaccttgtgcaggaaagacatggaacgcagt

SEQ ID NO: 438851 - DNA, 122 bp, Homo sapiens
ttggctccgaatgtcgaccaatggtcggcgaagcgggttgcttgccgcacggtcaatggccgcaaaccgggaggaaggcgggaagagaggaggtggaggcgggcctgggcagccgcgcgcgt

SEQ ID NO: 438852 - DNA, 122 bp, Homo sapiens
ttcatcattcactgtaactccagaagcctgaaaataaacacagaacagtaattcagaacacgtattttggttttaaccaaaattactgtttgcctagagaagactcactttagtctggacat

SEQ ID NO: 438853 - DNA, 122 bp, Homo sapiens
gtcgcccgccacccagcgcgttggtttctgcgcacgcagcttacagtaacgtccctggcgcgcttctgctccgcgagccctctggttaccccggcaggaacctgcttttcttcgccttaggg

SEQ ID NO: 438854 - DNA, 122 bp, Homo sapiens
taaactgaagcaaagaagtaacctggggcttgctgagagaaggcagtaggcgactggcaccgggactccttcaagccctgatgggcgggccagatacaaacaacatgaagataaaggccctg

SEQ ID NO: 438855 - DNA, 122 bp, Homo sapiens
ctggtgacacatagtgaactaaacagcagggctgggcaaactgctgtggcctccagcacacgcagggctcttgtttcagcctagcttctcatttcctgtgttccggcagccctgaccacctg

SEQ ID NO: 438856 - DNA, 122 bp, Homo sapiens
ggctcctcccttccccgcgggtgggagccagacttcattcattaatggtgccagtgaagacgcgaaaagcaccactagccaggcagtggggaccctagttacccagggagagcgagattcgc

SEQ ID NO: 438857 - DNA, 122 bp, Homo sapiens
ggagagcgccctatgtctgtggggcggcttggctgagcctggaagccacctgacctcccccgtcccttccctgccaggcatcgcatgcggaaagtccatgatgagctccgtgagcctgatgg

SEQ ID NO: 438858 - DNA, 122 bp, Homo sapiens
gtttcgcgtaaccaggctgacgctgaaaaccctggacctacgtgggcaggccctggggtgcggacatctattttgcccttcttagccgaggtactttagctgggatatgaagagtgaagagg

SEQ ID NO: 438859 - DNA, 122 bp, Homo sapiens
ctacctaatcagtccagctgttgtttcatcttccttcacctcctggagggatgttggatgcgatgtgcctggaaggttcccacggacccaacagccccagaggctctggggctgtagcccca

SEQ ID NO: 438860 - DNA, 122 bp, Homo sapiens
ccctgatgtccctgcctgtgcccaatgatccagtgatgtttacaccctcacactgctgggcgtgatgcagtatccgggaacccccccattcttgtgaatgtgttttcatcaaatgactaagt

SEQ ID NO: 438861 - DNA, 122 bp, Homo sapiens
ggcgtccccagggtttagaaaggctccccaggggcccaagctgccggcgagtgcagctcccgccggcgccacctctgcggtctggagcggcgaggacgatcccagagaggcgcccccactgc

SEQ ID NO: 438862 - DNA, 122 bp, Homo sapiens
ctcccaggttttccttatataatttacaaggacttccctggcaaactatcctttcttcttcgtttaaaaaatttcactttattatgttcatctttgatgtggaacattttttatggccttct

SEQ ID NO: 438863 - DNA, 122 bp, Homo sapiens
ccggaacgcactgcactaatgtggagacctcgagattctgcgaggtccctgccttgcccccgggttcacatactcatgcgcgggttgagggcgcagggatcgctgtgctgcttctgcaggtc

SEQ ID NO: 438864 - DNA, 122 bp, Homo sapiens
aatctgcagaatggcattttgtttgtgaattctcggatcgaccgcgaggagctgtgtgggcggagcgcggagtgcagcatccacctggaggtgatcgtggacaggcctctgcaggttttcca

SEQ ID NO: 438865 - DNA, 122 bp, Homo sapiens
atgaagaagtcttcaggggagattgtctactgtgggcaggtgtttgagaagtcccccctgcgggtgaagaacttcaggatctggctgcgctatgactcccggagcggcacccacaacatgta

SEQ ID NO: 438866 - DNA, 122 bp, Homo sapiens
ttttcttattctttccatcatctcagctttcttaaaaatgtcacagtggccctgctgtcccgtcctaatgataggctgcgcctagggctaattctcattcagccccagcgaacgcctctaaa

SEQ ID NO: 438867 - DNA, 122 bp, Homo sapiens
agactcagccctgagcacaagcaatgggaactgagctccccagccctgagggcccggaaacgacgctctgccacacagaagagccggggagctgtaactggctataagtcgagcccctggag

SEQ ID NO: 438868 - DNA, 122 bp, Homo sapiens
tccgcagttaaggaagcttttgcagccggacaggtcgcgaagcacacatggggcagggtccgcgctctccacacaaggtggggcgccggttcccagctggtggcaaacgggggcgcggggcc

SEQ ID NO: 438869 - DNA, 122 bp, Homo sapiens
gcctggtctattaagaagtttgaatgtctgaagccttcatggttgcctcaaacgtagtcacgcctggggtcggtgagtgctgtgcgtctcctgcacacggggctgtcgggcgcctgccttgg

SEQ ID NO: 438870 - DNA, 122 bp, Homo sapiens
ccccgccccacgcggcataggtgcgggggcggggcgccacggaggctcaggtgtgggcggcggggccggggcagcacgggttcccggaccgctgcctcccggcgttggcaactcctccacgt

SEQ ID NO: 438871 - DNA, 122 bp, Homo sapiens
aagatggtcggcctggtggtggccattgtgaagggttatgcccctgagagcgtgctggagcgcagctggggcacagagaaggtggacgtgcccaaggcgcccggactcggcctggtcctgga

SEQ ID NO: 438872 - DNA, 122 bp, Homo sapiens
ggagagcgagctgcactcctacctctcgaggctcattgcggcagagcgtgagagggagctcgaagagtgccaacggaaccataagggtgatgaagacgacagccaggtccgggcccagcagg

SEQ ID NO: 438873 - DNA, 122 bp, Homo sapiens
cgtgctgttggggtgaggctggggctgggaagccattctgctcccacccccactggacgccgatggtgaagatactgaggcccccagaggggcttgtccagacttgtaagtctagactcctg

SEQ ID NO: 438874 - DNA, 122 bp, Homo sapiens
ctggtctgacctgctaagaggctgtggccgtccccatattcgttcccgtagccggccattcgttcagctgcgcagcagcgtcacagtccgttctgctgtgtttctggccgaggctgtgcctc

SEQ ID NO: 438875 - DNA, 122 bp, Homo sapiens
aggcgatatttctaggggtgtacttgttggggtcagggtaaggctgcggagcgcggtcaccggacgtgaaggatttgaagggcgttgtaggggccagtggagagaggactggatgctctggg

SEQ ID NO: 438876 - DNA, 122 bp, Homo sapiens
tgggggcagagggtgtcccatgggtgccagcccctgccagcagctggaggaggctggcctcggacttagacttgagcaggtggggcgggcagctcaacagctggacaggggtgcggcggcgg

SEQ ID NO: 438877 - DNA, 122 bp, Homo sapiens
ccaggtgtcttaacaaagagccgcacctcggcgtgtcatccacatgagagagttggcagtcggagccaagagaaggacatttcatcccgagggtgggtgggagtggccatgccagggacgac

SEQ ID NO: 438878 - DNA, 122 bp, Homo sapiens
acagcagcattgctggcgaacccctggtctctcctgttccctttcactgaactagtaaaacgtgtgaaatagatactgggtattgggcactgtgctagggtcaagtcagcgttgggagtcag

SEQ ID NO: 438879 - DNA, 122 bp, Homo sapiens
gtacacgtggggaaagctaagcatctctaattgcaagcaccgtcttgcatttagaatggtcgcttgtagccttaacttagaaaaggagtctcgcccttgacctggtgtccttgtgttgcagg

SEQ ID NO: 438880 - DNA, 122 bp, Homo sapiens
gttcacatgcaacgaacaatgggacagaattggaaccagtgaagccggaactcactacaccgtcccctaagtgacgccaaaatgcactttctaacgtctccggagggaagtgcgcttgcgca

SEQ ID NO: 438881 - DNA, 122 bp, Homo sapiens
ggagaccgcggtccccagggttccaggcttccttgcctcccttgcccagccttttctcaccgtggcgtaacctaactcagcccgttcaggctcacgttaattcttctcacggagcttttctc

SEQ ID NO: 438882 - DNA, 122 bp, Homo sapiens
ctgggctgtggggtctcacagctgagggcccggtgggggtccagatattggagtcagtggcggtggccgggggaggagggtctgggcggttcagttttcgacgtaccaagaagtcaaggtaa

SEQ ID NO: 438883 - DNA, 122 bp, Homo sapiens
ctcctgggctcaagcgatcctccagcctcagcctccccaaatgctgggattataagcatgcgccactactcccggccttaatactttatttaggaatgaaggaaggcgggaacacccaaacg

SEQ ID NO: 438884 - DNA, 122 bp, Homo sapiens
tgaggggcctgttgaaggcctgtctggctagacatgttagttccccaagctcaaggctctcgtttgggagctcagggaaaaccagatttcaggaaagaaggctagctggcaggtcttttcca

SEQ ID NO: 438885 - DNA, 122 bp, Homo sapiens
tggttcgtggcgcagacctctattgtggaagtgtcatgatcgcattcttggatattgactcgattctatatgggtctctcgaatggaacccctgcgagtagctggagaactcaaccttctag

SEQ ID NO: 438886 - DNA, 122 bp, Homo sapiens
cagtgactatcgctgtgacctgtgtgctgggatagtaactgcggggcacagagtctggagcgaagcgaagccttctcagcgacttgctatttagcagagggactttgaaatattttgtgatg

SEQ ID NO: 438887 - DNA, 122 bp, Homo sapiens
taaccaaccagcaaaccaccatggcatatgtatacctacgtaacaaaccagcaaaccacccggcacacatgtacctatgtaaccaaccagcaaaccaccatggcacatgtatacctacgtaa

SEQ ID NO: 438888 - DNA, 122 bp, Homo sapiens
cccgctggacacgcggctcccaccagcacccccgaccgccatcgccgccatctttctcctcgcgctgtccacgccgggattccttgatactagtagccaatcacaaagtcaaactagtgccc

SEQ ID NO: 438889 - DNA, 122 bp, Homo sapiens
gaaagccagaggcagcgattccagatgcccgtccgcttccctttccccgaggcgttacgacgccaccacaaactgcgcagaagcgtactggggacggcgtccaattgggtaagagggttcgg

SEQ ID NO: 438890 - DNA, 122 bp, Homo sapiens
cagtcagggccgccatcaaacctcacttggatgtcggcaaaagctcccctgactggtcttcgcagtccattattgccctattctaatctaccttccatactatacacagatttacatttttt

SEQ ID NO: 438891 - DNA, 122 bp, Homo sapiens
atgggcaggcaggaaggcagactggtgagccccagcttacagctgcactgctgcccacagcgtgccaagttggaggccgccattgccgaggctgaggagcgtggggagctggcgctcaagga

SEQ ID NO: 438892 - DNA, 122 bp, Homo sapiens
aagcaagccgtgcttccatttaaaagctcctctttgttgcctcgacaagcaaggggtactcgatagcacttttcggttagattctaatagaaagaaagctttaaatttctctctcggaagca

SEQ ID NO: 438893 - DNA, 122 bp, Homo sapiens
atagcctaaccgttcagagggagaaaaaaaaaaagccttagtcgcgattctgagcaaaaacggcaatgcgacgccacgctctcttgagcctcggccaatcatcgcccttacaggaagtgacg

SEQ ID NO: 438894 - DNA, 122 bp, Homo sapiens
tcaggggcctgctcggaccgtcgtgcacctccgagcgtttctgtccggtccctctgggtccgtctggttttcggaggctttcctggaaaagccagcctgtggctacctcctttctcccctaa

SEQ ID NO: 438895 - DNA, 122 bp, Homo sapiens
tcagtgccctccataggctcctgtccaccggcaggcgtgctgcggcgttggtgagagccccggggcggaggctcaccatcaggcttccagcatatggtggataataatctctggcaacacaa

SEQ ID NO: 438896 - DNA, 122 bp, Homo sapiens
ctcttcgtacacgtactccagaaactccttggcctgcttcgacacctacaaaacaagcgtcgtcagtcagtcctggagaagcacctggctctccacacctgctcaaactaggaaccatagct

SEQ ID NO: 438897 - DNA, 122 bp, Homo sapiens
tggcctctgtgcggcggttcagcgctggcagcttgctcttcttaaggccgaaccagctggcgatgctgctggtgttgcggtgcttgacctcggcgccaggggctcgctcctggccctggagc

SEQ ID NO: 438898 - DNA, 122 bp, Homo sapiens
cgaatagatttggctgggaagggttcagccccatcgtgatcatctagcgtttaatgaacgcggctagtgcctggtggccttctagtgggctgagctactgcccggccggtgttgcggagcgg

SEQ ID NO: 438899 - DNA, 122 bp, Homo sapiens
ttaaaatcaaatcaagttcagagataaatacacaaatctctgctctacctacgtgatatgcgccctatgaatcacaaaagataattgttttagttgatacagctgttgtgtgttttgtacaa

SEQ ID NO: 438900 - DNA, 122 bp, Homo sapiens
ggggggaaacaaggggagctagaagttggcctcagccaatgggcggacgggccgcgggcccggccccctccttccctccggcgcggcccaatagaaatttactacaatgttgtggcgaactg

SEQ ID NO: 438901 - DNA, 122 bp, Homo sapiens
gcagctggcgtcttttaggcgcatggttcttttcctctccggcgaggggcggtctcggggcggacccgaactacaattcccagcatcctgcgcggcgcggggaaggaagcccgggagtgaga

SEQ ID NO: 438902 - DNA, 122 bp, Homo sapiens
taatggcgtccacggaagctgtgacgatgttggtcttgcagtggcgtgcagccacgatcccggcgacctcatccatgagcttcatggtcacacctgcggagaaagggacatgcggcagatga

SEQ ID NO: 438903 - DNA, 122 bp, Homo sapiens
acatatctggtgggacaaggataagtaagtcacctcatttctgacagatttactaatatccgtggtaaacagtttaaagagcttcaaaataaacatttgtggagttaggacttgaaagtctt

SEQ ID NO: 438904 - DNA, 122 bp, Homo sapiens
gacctagcccattcttgacctgaccggcagcgactccagcccatcctgaaccccacctaccgcagattctgcccgacccagcccacctaggaccttggcccaccacggaccctgcccatccc

SEQ ID NO: 438905 - DNA, 122 bp, Homo sapiens
tcctgtactacgtgtccttaaggttcatcaaacagaaaccaagtcaagactggtgattcacgccagacgtctgcccgctggtgggggacctgagcagacccttcaactgcactccctcctca

SEQ ID NO: 438906 - DNA, 122 bp, Homo sapiens
aactccattgtttggggccgctgcggctccagcaggagctttggactatctccgtggggccggcgaggctagttccccccgacacctcgctcacgtcttgtgctgggagatagttatcgctc

SEQ ID NO: 438907 - DNA, 122 bp, Homo sapiens
tccagggggagaagcgaaatccagtgccggggctgaagggaccctgggtcagctgccccacgggacgcgtggtcccgacggctctgggtccagacacgttcggtgtcacgggaaggagggga

SEQ ID NO: 438908 - DNA, 122 bp, Homo sapiens
tgacaactactagtttcatgactttgaactactcctaatgctcctgaacctcagttttctcgtcaaaaaattgtgtattatgataacacttaaatgtgctttttagaattggtgacactttt

SEQ ID NO: 438909 - DNA, 122 bp, Homo sapiens
cctcaggacagtatgctttatcatctggaataataaacacagacctggtggcccaaggagcgggcaggccatgggctgggggtgcagctctgtgatctgccaacaacgggcagcctgctgtc

SEQ ID NO: 438910 - DNA, 122 bp, Homo sapiens
ttgtaattgttaaaatgggaatttgggagtcttttgaatttgaaagaaaaaacaaatgtgcgggattgaggctcagaccctgtacaggcaaagaaaaagttaaaagtgaggaaaatgagaga

SEQ ID NO: 438911 - DNA, 122 bp, Homo sapiens
accccatacacagctggacaggtctgcaggaaccacaagggttggggagtggagaaggtccgtcctccaccctgaggattctcagtgtgggcctcagaggtgagcactgaagcacttacagg

SEQ ID NO: 438912 - DNA, 122 bp, Homo sapiens
ggagcgtgcatcctttgaaaagggacatcagtgactgcggtggcgtctaccctggagaaacgcagctgagggaggtggaggctcctcccgccgcagctggccggccccattcgggtcccagc

SEQ ID NO: 438913 - DNA, 122 bp, Homo sapiens
ccttggctcctccgctcaccaggatctgcatgacctccaggtcattgcgagacacagactcgtgcagagcggtccagccgcggttgcagcggtggttggtgtctgcattgtgctgcaccaga

SEQ ID NO: 438914 - DNA, 122 bp, Homo sapiens
cccagcgggggctgcgacatccatggccaccatggggcacctggcggggcgggggtctgccggcctctgggcaaggcccctggagcatctcgcccaggctttttataccttacaatgtaact

SEQ ID NO: 438915 - DNA, 122 bp, Homo sapiens
ggcgcagcagactgcgcaccatgcccaggcacagcaccgtggggcgcatcccgcagacctcgagttcatacagctcacccacggtggtgcagcctgcctgctgctatcgcagcaccaccgcc

SEQ ID NO: 438916 - DNA, 122 bp, Homo sapiens
tactcaggaagctgaggcaggagaattgtttgaacccgggaggcagaggttgcggtgagccgagatctcaccactgcactccagcgcctaggcaacagagtgagactccatctcaaaaaaca

SEQ ID NO: 438917 - DNA, 122 bp, Homo sapiens
caggcgggggggtgcttctctgaattcaaaggacacaagcagcagcagctgcggcggcggcgcgggcggctctggcagctacttctcccccttcttcacacccctgggctaagggcatcttt

SEQ ID NO: 438918 - DNA, 122 bp, Homo sapiens
gtctgattcctatatgcaaatatatgccagtgggcattcagcagagcttcagatgtcaaccgcaaacccatgtgacttctgctcctttatgtaacccagcccctctgcttagctcttccaag

SEQ ID NO: 438919 - DNA, 122 bp, Homo sapiens
tctttggcctcagcctgcacctggtccgtggtgacgccagaccccacctgcttcccctcgcgcagccaggacacctgaatctgccggggactgaaacccgtggcctggcagatgagcttgga

SEQ ID NO: 438920 - DNA, 122 bp, Homo sapiens
gcaggccagcgtgaatgggactggcaggagtcctgcggggacaggctgggggcaggccagcgtgaatgggactggcaggagtcctgcagggcagctgtgctggggaggggtcaccctgggcc

SEQ ID NO: 438921 - DNA, 122 bp, Homo sapiens
gattcttcccaatcggtgattccggggcaggcggtgatgggctccctccagtctcctggacgcagtcagctgacctgaaacagaaagctctcccacgacagcgctccctcccgaggcggggc

SEQ ID NO: 438922 - DNA, 122 bp, Homo sapiens
tcccctctggctcttccatagtgtaaaccacctggcccatcccacattgcttgggagaatcgttaactaaagctaaataacttccttctgctactctcggaagagcagtctgcccagttgcc

SEQ ID NO: 438923 - DNA, 122 bp, Homo sapiens
tcccgagacccgatgctttcgccagcgtctcggtctccaaggaaacgcgacgccgcctaccgagcgcctaaagggactaacctctcaaggcaaaatctagttcggcccgcttttcaattttc

SEQ ID NO: 438924 - DNA, 122 bp, Homo sapiens
gcccggtcaagtgcctgtccacttaccatgatgcaatgatggcactgagggcctccaggacgtcggcggcggccaggcgctgctgggggtcaaggaccagcagcttccggatgagacacacg

SEQ ID NO: 438925 - DNA, 122 bp, Homo sapiens
acagggtcaggggtcagtagggtccggagtgaccacctctcacctgcttggcccatcacacgcaggctcaggcccacaacccccacccgggcaccacgctgacccaagtgcacgcaccacag

SEQ ID NO: 438926 - DNA, 122 bp, Homo sapiens
tgtgctctccaaggtctgcgccggagccgccttccagctcttgtatcactatgtgcctcccgaaggcgacactatttgcataagccccgccccatcccgggcaggttgcacggctattggct

SEQ ID NO: 438927 - DNA, 122 bp, Homo sapiens
tgctcctacctggctactaaacatcgacttcggttcacttcacggatgttcagtggatatcggtcacatgccaggtccccagctacgcattcaaggatggataatatacatagcagcacatc

SEQ ID NO: 438928 - DNA, 122 bp, Homo sapiens
gacatgaaggccatttcagctttccctcttctaatcatgctttctaacctactgccaattcgctcctaggctgtcctcgataaggcatgccgtaggattacgggaacccaaagttcacgaat

SEQ ID NO: 438929 - DNA, 122 bp, Homo sapiens
aacaccctatcccctggccctccttaattaaaataagaggcaaaaatgttaactgtgcaccgaccacctctggggattaatctgccctgatcatagcacccgaggaagcaggttgctcaccc

SEQ ID NO: 438930 - DNA, 122 bp, Homo sapiens
cggggctgctggagtttgcagagacacggaggaggagagagcctgtgctttgcctgccgccgcggctgggggagatctggcttttgcaacagcccaccccctttgagatcactctggcccgg

SEQ ID NO: 438931 - DNA, 122 bp, Homo sapiens
ctctctggtaggtgctagggacgaccctatgggccagcttgccatgcccagtccccaggccgcacccaccctggctccctgggctaggggactggctcctcctgtgagtcgtgggtctggga

SEQ ID NO: 438932 - DNA, 122 bp, Homo sapiens
gtcacgcaagggatgtcagagtctggaggacaggcccggggtaggggctggtgcaggcagcgggaggcgcccggactcacccgatgacgtagaccaggaccaccagctggatcagtcggaag

SEQ ID NO: 438933 - DNA, 122 bp, Homo sapiens
attacaggcatgagccactgcgcccggccagcaagacttttaatggcagtcttgcaagaccgggtgtctggtaggcaggcacaccccgggcagttacagcaggtaattgatctcctagcaca

SEQ ID NO: 438934 - DNA, 122 bp, Homo sapiens
ggtccctctcttcctcatctcactcttcatctttctatccaattcctctggtcactaaagcgttagcagcctgcctccttaaaggcacagagataaacactgcaattatatagagaggatac

SEQ ID NO: 438935 - DNA, 122 bp, Homo sapiens
ggcccttccttgctgggcaagcactgaggtgggagtggagcatggaccccctcagtctggcgcggtgcgaggctggcctggctggcagcgcctcccggcggcactgttgccctgtccgcagc

SEQ ID NO: 438936 - DNA, 122 bp, Homo sapiens
agcaaaggacacattcggcctggcccaagccctgacgatttcagtgttgttttctgcacgcgcaaaacacctggggaccgaggggatggcagtggcatcctatctttgacagctctgaacga

SEQ ID NO: 438937 - DNA, 122 bp, Homo sapiens
taagaacttttcccaaagtagtctgaataaggaatcactgatgaacacagggccggcccccgccaattttaccaggaatttttctgaacaaaaaggaaaggatctgctgaaatctactcacc

SEQ ID NO: 438938 - DNA, 122 bp, Homo sapiens
cagtcagcagaagtttaggttttgaatgcatgctaaattcaacgctccttaaatgagagtcgacaaaagaatattcttcaagcatcttcccagtcactcttaagataataacttaactgttg

SEQ ID NO: 438939 - DNA, 122 bp, Homo sapiens
ttatacactgccgctccattctcagccgcagacgtgatgctaaaatcattttaactgcagcggttttcgcttggctttggccagtcttcaatttactgcagctggaaaaggattagccattt

SEQ ID NO: 438940 - DNA, 122 bp, Homo sapiens
tgagagagacactaggctcgggagagcgctggcctctccagtaaatggtggggatccgcacgcctcaaagggctgcgccccgggaccccagctgctccgctcctcacagcctgaccctgctt

SEQ ID NO: 438941 - DNA, 122 bp, Homo sapiens
aagtgcggcatggggcggtaccgctcacagccagccggctcccgccgcggcttcccaccccgggcggggtcccacttgcccaaacgcccccgaacgcccccgtgcacagcctcagccggccg

SEQ ID NO: 438942 - DNA, 122 bp, Homo sapiens
aataaataaagtgagcaacacctctttgcatggcaccctcccatcagccatccgggccagcgcctccagcaccccactgcccggctccgcggcaccccactgtccagcccctagcaccccac

SEQ ID NO: 438943 - DNA, 122 bp, Homo sapiens
acgatgcgagaagtggtggccccttaaaagctgctctatgaattcccaggcgccgcagcacggtctcaggatctcagcattcaggctcacttttctatgtactgttcatcctgagaaaaact

SEQ ID NO: 438944 - DNA, 122 bp, Homo sapiens
ggaggcgggaggcggagccccggggttgggagtgcgggggtcgcggcgcagagtgggagccggagagcgagcgcggctgcagccggcggcatggctagcacggcttcggagatcatcgcctt

SEQ ID NO: 438945 - DNA, 122 bp, Homo sapiens
tgtatctctcaccttctgacccatcttccacaccagccattgctggagcagccagctttgcgcaggtgtaaccagaaggtgccttgtttcagctgcactgcgtctctccatttctgccctgg

SEQ ID NO: 438946 - DNA, 122 bp, Homo sapiens
attgtgggagcgctgttctgctatatcacaggtcttgtccatgcccaggggaggcagttacgttacagtggttcattggggattatttcatttatgcctactaaagtgggcaagcctgcact

SEQ ID NO: 438947 - DNA, 122 bp, Homo sapiens
ggaaagagttcgcgggcccacgtcgtgctggggaatgacgcagctcactttttcacaggacggaaatctgggaagtgtttagtcagtttcacggtgacaggcaggatatcagcgggaaccag

SEQ ID NO: 438948 - DNA, 122 bp, Homo sapiens
gagctcactcatggcagcaaatgtctggctggggctgagtggactcgggggctttgtttccgtgggtgccacccacggaggtgatacgcgtggcgctctcgccacatgccatggcccgtgcg

SEQ ID NO: 438949 - DNA, 122 bp, Homo sapiens
gctccaaggagaagagggctgcacgtcggcagctcggcacctcacaggtgctggggggatcggccctgctgaaagcctggccatctggctggccgcacagacctgaaaggctttgctctgga

SEQ ID NO: 438950 - DNA, 122 bp, Homo sapiens
aaacaggtggtgcaaggtggaggtgcaccactctctcctccaggaaggcggtgacccttccgcagatgtctccgttggaaacaaataaagggagtatcagtcaaagcgcaattccccgattc

SEQ ID NO: 438951 - DNA, 122 bp, Homo sapiens
aaaacgagtaggatcaagatcctgaagcatttctctgaagagttgtaacagaagatggaacgtggctttaccagtaggatcctgaagacaaagcacaaagcaatggctcccaagaggtggaa

SEQ ID NO: 438952 - DNA, 122 bp, Homo sapiens
ttccacttggggaggaatccagcaaaccggatggaactgaggccttcatatcacagctcacgaggaactgaatccactaacaaccatgcgattgagtggggctcttcccattcaagtccaaa

SEQ ID NO: 438953 - DNA, 122 bp, Homo sapiens
tttgactttgatggtgatgagattttccatgtggatatggcaaagaaggagacggtctggcggcttgaagaatttggacgatttgccagctttgaggctcaaggtgcattggccaacatagc

SEQ ID NO: 438954 - DNA, 122 bp, Homo sapiens
gtgagggagggcttgccagttggtcttatgggtcctgtttgtggccaagtccaaggtcaccgagggtcccagagacaaccctacacctcctagtctagcctccaatcttttgcctggtccct

SEQ ID NO: 438955 - DNA, 122 bp, Homo sapiens
cttaaggcctacttcctgagttccttagacaaactctgaaattagccattctaggaagatcgatctttcctccagggatatctttaaatcaaagtttgtggttgttcaattgtttgtagcta

SEQ ID NO: 438956 - DNA, 122 bp, Homo sapiens
ggctgcggatccacccaggctaaatctgggccacgacttcccggggacgttttcttcgctcgggttcctctgttctgtgctacagccactttctcgcattgcccagaagtagaggaggatga

SEQ ID NO: 438957 - DNA, 122 bp, Homo sapiens
tgctaccctggaaaggagaagggaaagttatgctgagagcaccaggcacacgttgaacaccgcagtcttagaaacagcagagggaagactgccttctcaggtccccctcaggtgaggcaggg

SEQ ID NO: 438958 - DNA, 122 bp, Homo sapiens
cggtggcctggaggaggagccgggtaaggctgaagctggcgctgcggtaaagccactctgcgtgtccctatctgctccaggagcacagtgttccggaaaaataatggcctctcccacacacc

SEQ ID NO: 438959 - DNA, 122 bp, Homo sapiens
gggcgcgtcaaggtgactaggcatgcgggagatggggcgggggcttgagctgccgtggggcgcttagttttgagtccgggtggtgcgcctggctttggggacagcccggggcacgcgggccc

SEQ ID NO: 438960 - DNA, 122 bp, Homo sapiens
tcagtggagggcagagacacagggaagcattccaggccaacttttctgtgggccgtgcaacgccagtccctggcgggacctatagatgctatggttccttcaatgactctccctataagccc

SEQ ID NO: 438961 - DNA, 122 bp, Homo sapiens
acctccctgtgcagcttttcctaagaacgccagggcgtttgtatttcctgccaatgatggcggcttttcatgagccacgggggccgtcttcccctgagtacgtcggggcctcctgcgtttag

SEQ ID NO: 438962 - DNA, 122 bp, Homo sapiens
ccgccccggagccccctgggccccacctcctcgtcccgctctcggaggcctgcggcttcacggccagacagaaccaggacagaacaaccccagcccgttaccgctacctggcgcaggagaag

SEQ ID NO: 438963 - DNA, 122 bp, Homo sapiens
aatcacgtcagtagcagagggaatgtagcaactttgcaaaccagagattttcatactttccgcaagagtggaagccccagggatccacgtttctcctctcactaccttcctccttgaagaag

SEQ ID NO: 438964 - DNA, 122 bp, Homo sapiens
ggcagagcgggattagaaccccagcttcctgccgcccgcccggctggcctagctgcactgcgctgcctctctgcggctcatctgcgcacagaccagccgcctgcccgccctcctccccctct

SEQ ID NO: 438965 - DNA, 122 bp, Homo sapiens
aatctggtgcctgcccagccctggtccactcgttagaaattggagtggctgaccttaccccggaaccaatctgaattgtatctggaattggaaacacaggactgtgttctaatctaatctaa

SEQ ID NO: 438966 - DNA, 122 bp, Homo sapiens
aacaatagcggcaaatgaagtaatctgcaaagtctgtgaactcatttgcataattgatgccggtcccctgtaaatgaataatgaagataataaaagatgttgctaaaaatgggcacaataac

SEQ ID NO: 438967 - DNA, 122 bp, Homo sapiens
aatacactttttaactgtgccaaaagtgagcttctacaccaagtctatgcccagcagaggcgggagtcatttaaatgaatgtgtcagctgcccccagacaactctgcttcacaaggcaacag

SEQ ID NO: 438968 - DNA, 122 bp, Homo sapiens
gaagtgaggagtgtttctgcctggccgcccatcgtctgggatgtgaggagcccctctgcccgcctgcccagtctgggaagtcaggagcacctctgcccggccgcgaccccgtctgggaggtg

SEQ ID NO: 438969 - DNA, 122 bp, Homo sapiens
cctagcacagcacatcgccaagcccacactgtctaccctggtgtgaattcagagccgcagcgtgtgcggacggaactgcgagtcagtctccctaagtgtcgaggccccagagtctgacgcgg

SEQ ID NO: 438970 - DNA, 122 bp, Homo sapiens
gcatgccacactgcgtccccatttttgcatgtgcggaccttctgtgagagacaaagtcaccggtctccaaagcgtggggctttacagcctgcttgggacagtccgggagggttctgggatgg

SEQ ID NO: 438971 - DNA, 122 bp, Homo sapiens
ctatgaaggctgccgggcacattccacaccagccaccctccacctcgcatgtgcgtttatcgatgaaacgccacagtgggacctcctggatcaaatagtgcaatgatgtaaacgcttagtat

SEQ ID NO: 438972 - DNA, 122 bp, Homo sapiens
gcttccctcctccgagttcctgggcaaagctgagaccccagatggccctgcgggtgagggcggaagaagggaagagttaggggccgcccccatccatggcctctagctactggtctggaacc

SEQ ID NO: 438973 - DNA, 122 bp, Homo sapiens
ggctgccagctccgcggcccgggcaaaaggctgggactttactccgggtggcggcgaggacgagtctgtgctccatcagctgccgcacccgccgcctcccgcccccaaaccccatccccgcg

SEQ ID NO: 438974 - DNA, 122 bp, Homo sapiens
aagtgcatcacagatcacgcacgcgtccacacctcagaaaacactcactcattcctgagacgcaacggtgagtgaaggcttatttttggccacaggagattaataatgaagacaggagggcg

SEQ ID NO: 438975 - DNA, 122 bp, Homo sapiens
gcctgttaaccagcgcataatgccccatgttaaccatcctgggggatgtcagggcggccacgctgatgcactgcggtcgggcgcagcggcacagccttcagagccgccgccgctcggttcct

SEQ ID NO: 438976 - DNA, 122 bp, Homo sapiens
tcgcggctgtgttttgtgtctggtgtctgcgtgaggctgcgcgccgaccacctctgggtgcgagcccatgtgtgttcttgcaggaggctctttggacactataaatagaaagaccgaccctc

SEQ ID NO: 438977 - DNA, 122 bp, Homo sapiens
cagcaacacaggtgacccgagtgacaagcgggacgaagacaaaaagaaccattacaactacggctggtctttttactttggagctctgtctttcattgtggctgagaccgtgggcgtcctgg

SEQ ID NO: 438978 - DNA, 122 bp, Homo sapiens
ataaaacaagcaggtttatatttggaaagcagagggtctcagccaccagatcgctatgtccggggtaggtcacagcctttgtatcttctcctccctcaacagtggcttgaaatttgatccac

SEQ ID NO: 438979 - DNA, 122 bp, Homo sapiens
gggctgtggggcttggcagcggggagctcttctagcagtctcctccgggcttggggatgccgacactcctgcctggacccctggccagcccatcttgggcaggaggcagcggggcttggcga

SEQ ID NO: 438980 - DNA, 122 bp, Homo sapiens
cgacctgcgcgggccggaccccgccttgcacacgccttcctgtccgcctttccgaggccccgcctcccggccctcgctagcctaccgggccccgccccgtaccatttcctaacccccgcctc

SEQ ID NO: 438981 - DNA, 122 bp, Homo sapiens
aatgggacttctacttggcagatgaagggaactactttatgtagtgcgggcagtcagaaacgcagaagcgtccagggccctccttggtatcaaacaagcaaaaccctaaaatgcagagcaag

SEQ ID NO: 438982 - DNA, 122 bp, Homo sapiens
taatggctgttatggaaacctacttgaggttgtctgctaaaaccaactcagtgtgcaaagcgaaatacattttctacttcaatagctcctcatactgcatctgtctgtagagtttatttcag

SEQ ID NO: 438983 - DNA, 122 bp, Homo sapiens
catagagattcatctacgttttattttgacttcgacaaagaggaagccctgttcccattccgcagtcgctgcctgctctccgccccagtccctgccaccaggagtctgcactgggcctccgg

SEQ ID NO: 438984 - DNA, 122 bp, Homo sapiens
gggctgacctagggctccgcagagggcctggggcctttctccaaggccgtgtttcctctgcgtgtccggtctcggggcggggggctgctccagtctccctctgcctggcagaatgaggctgt

SEQ ID NO: 438985 - DNA, 122 bp, Homo sapiens
ccgaatccggccttcctggcagtcagtttccctgagtaagtcactctcctgcctcgccggcgccgggagctgtacatacatggatgtggtatagatctcttgatattattatttcccaatag

SEQ ID NO: 438986 - DNA, 122 bp, Homo sapiens
tcttttggcaacatggcgggcggagaagctggagtgactctagggcagccgcatctttcgcgtcaggatctcaccaccttggtgaggttttgcttggggaggatgcagagtgagctcaggag

SEQ ID NO: 438987 - DNA, 122 bp, Homo sapiens
tatctctgtaattaccttcatctgcccacagagattgtgcctgccaccctacaccacagccgtccagagactggcaggcctccgcctgaaggtctggagggtgagcaacctgcaagactcac

SEQ ID NO: 438988 - DNA, 122 bp, Homo sapiens
ttaatgtttaaaacatctaagccaggttaaaagttctaatagttctgactgctggtagaacggacataattcttcattgcgaggtgtccttgacagaacgcctcttgttattatagagatac

SEQ ID NO: 438989 - DNA, 122 bp, Homo sapiens
gaagaagaagagaaaaggagaatccgaagggaaaggaataagatggctgcagccaaatgccgcaaccggaggagggagctgactgatacactccaagcggtaggtactctgtgggttgctcc

SEQ ID NO: 438990 - DNA, 122 bp, Homo sapiens
tccattcccacccctttgctttgccatttgcaagagtctggaattgtcaggtctcagcttcgaaaagtcctggttccactgacaggacacattctttagtgggaattaagacctacaaagtc

SEQ ID NO: 438991 - DNA, 122 bp, Homo sapiens
agtgcgctgtgccttatgccttgagcctgtgcgttacgcccatcccgactgccaggactccgccccttgccatccaggctctggttagaacctggacgagcccctcctggtccccctgccct

SEQ ID NO: 438992 - DNA, 122 bp, Homo sapiens
aagtagtctgtaaaatcctgcaagattcacagtctctggtgtgaaacctcagaagtgagtcgttgtgagcctgtgggcagcaccaccaaggcaggctaaggggagggtgcagtaagtggagt

SEQ ID NO: 438993 - DNA, 122 bp, Homo sapiens
tgccggggctgttggagactgaagtagaaaaagaggaggggacgttcacaccagacgcctcgggacagtcccagaacacatgctgtcgaggccatggaccctggtgccctccccacctttca

SEQ ID NO: 438994 - DNA, 122 bp, Homo sapiens
tgatccacggcttccagagcagccaccgggatttctgcttcgggccctggaagctgacggcgtccaagacccacatcatgaagtcggcggatgtggagaagtgaggcttcggggcacggggt

SEQ ID NO: 438995 - DNA, 122 bp, Homo sapiens
ctcctggacctggaggccgagaggcatctctaaaacacagaagtcagtgaaaatgtgtctcgtgctacctgacgctctgtcctttcccgagtctgcaggcactgttcatgtgtcatttaatt

SEQ ID NO: 438996 - DNA, 122 bp, Homo sapiens
accgctcagaccctgccctccaacttgtattagtttggtccttcctcattgagataaattcgttctgcatgttgtttcctgtttgccagctgtccctggggattgtgggggtggtgacagat

SEQ ID NO: 438997 - DNA, 122 bp, Homo sapiens
aagggtgcaaagcgttcgttagctggagctgtgggcttcaaggtcagccgcgctgtgtggcggccaccactgccgttaaccacagtacacagggtgctcggtaagtgcagttctgcttccga

SEQ ID NO: 438998 - DNA, 122 bp, Homo sapiens
tggttttctttctcctaagtgcatgtgggaacccgattccctttggtaggtgcagtgaaacgttcatccgtccggtccacagaaacgcttgttcggctccctgacgattgctgagttgtctg

SEQ ID NO: 438999 - DNA, 122 bp, Homo sapiens
tttgtttttctttcttcctttcttaatgaagcaatggtcttttacaaaacctcctttaagcgcatccaacgcaataaaagctcaacatgagatctccttttcaatcataagtacctaacact

SEQ ID NO: 439000 - DNA, 122 bp, Homo sapiens
gcggcgggggcgctgccactggtgcaggagccggcactgctggtttagccgcgggtaatgcggcctgaattcgtgcagtctttgtacactcagcttgacgtcttggataaagtaaggatggc

SEQ ID NO: 439001 - DNA, 122 bp, Homo sapiens
tgaattcccataacccagaatgggagtttatcttccctgaaactggggacctggtgtgtacgttggggagacagtatagtgcacctttggatgtggaaggggaagggagtagccagaacctc

SEQ ID NO: 439002 - DNA, 122 bp, Homo sapiens
aaaaaaagtcctgggcagcaaggcctccacttcaccccctaaaggttgccccaagagcaccgtgtgactgctaaggtatttccggagtctaaagacgattattcaggtctcatttgcatacc

SEQ ID NO: 439003 - DNA, 122 bp, Homo sapiens
agaaatctgtgagcttcccacgtcttcccagcgggtgctagggcccgacagggggaccaccggcacaggtttcacctttcaggagggaggcaggctccggagaccccctcctcagcccctcc

SEQ ID NO: 439004 - DNA, 122 bp, Homo sapiens
tctgagaaagctaaagctaaacagctctatccccagcagttggtctggcattgccagcaccgggaactcatggcgagcctcctgccacagcgcaggcccgaggggaccccctgcccgcgctg

SEQ ID NO: 439005 - DNA, 122 bp, Homo sapiens
tgtctcaataaataaatttttaaaaatatggggccggagcgatggcctgggtctggagcccgcggcctccaccgcccacaataacaacaacgtgtagggagcagccgcggccagagccggag

SEQ ID NO: 439006 - DNA, 122 bp, Homo sapiens
aggcactcccaggttcagccgatccaggctcaggtggggaaactgaggtccccatcaactcgggcagcgctaagtgggactgcctagcttggcttctgaccttgggcttcagttatattttt

SEQ ID NO: 439007 - DNA, 122 bp, Homo sapiens
agtccgctgtatggccagaaccttgccaggacctcggtcactgcagttccagcaggcgggcgaccagtgtcaccgtcgtccggccaagccctcgagccagagctccatcgccttcgcctgcc

SEQ ID NO: 439008 - DNA, 122 bp, Homo sapiens
tctgagagttctcagacccccatggattttagaattttccagcctttcctccttcaccttcgcacaattttactttctcctgagatggccccagatctgcaagagacatttgagagaagcta

SEQ ID NO: 439009 - DNA, 122 bp, Homo sapiens
gggtaaaaaaaaaatcaccccctaccaaaatcagggggaggaagctccctgctccttgagcgatcacccagagcacctcgcaatctctgatcttcgaacccactgaaaaagcacagggcatg

SEQ ID NO: 439010 - DNA, 122 bp, Homo sapiens
tgccagagtagggacaagaagatagaatctctggacctgcgccagttatcttcacagagccgatctctgagggctttgaaaatcatgagcaggggtgtggcttgaattgtattgtgaagccc

SEQ ID NO: 439011 - DNA, 122 bp, Homo sapiens
gtcagactttagattacatggcactgacaacaaaaataaacagctccccctacacacacacgcacacaaaactggtcaagaagtggaagaatcaacctaggtatgcacacgaaggaaagaag

SEQ ID NO: 439012 - DNA, 122 bp, Homo sapiens
ctggtgttctgtggtagaacgcacagcgtcgtgcgagtgcacgttcgtgaggaggaaacacgccttggacaaagcctgcagccaggatcagaaagcgtaaataaagcaggtgtccgctttta

SEQ ID NO: 439013 - DNA, 122 bp, Homo sapiens
tagagctctttcactttcctgaggttattttgccctttctggtgttggtatgtctgttgccggccatgggcctcatgccttgaattcctgctcttgatcagggacaagggaggtcaagctct

SEQ ID NO: 439014 - DNA, 122 bp, Homo sapiens
cttccgagcgctccgacaggagcagggagttggggtgggtagctccgcaggtgcacgctgcggcccttagggcgacagcctcggaaaaggcgcatctccggctgtgggtttctcgggggcgg

SEQ ID NO: 439015 - DNA, 122 bp, Homo sapiens
acgggcttcccccgccgctgttgggcggctcatcgtccagcttcacctcgccgctgtccacgggcaggacctgcgaggagttgaccctcacgtcacgaatccaccccttgaagggctcccgc

SEQ ID NO: 439016 - DNA, 122 bp, Homo sapiens
ggcgactcgcgccgggtggggctgaaggcactgcggggtgactcggtctccaggctgcggcgctctgctccgggagtcagggagacctggcctggccccgtactgtcccccgtcccagcccc

SEQ ID NO: 439017 - DNA, 122 bp, Homo sapiens
tgagcacagcagctgctggcccaggtgctaagcccctcactgcctggggctggcggtcggcgggcaggcctctccaagtgccgggccgccgatcccaagcccacccggaactcgtgctggcc

SEQ ID NO: 439018 - DNA, 122 bp, Homo sapiens
atccagcactggcaataagccatggtgagatgttatgtataaacatattaagcttccctgcgccatggcataggttctatcttgccagagaccatcgctagcaatttagatcttaatctgaa

SEQ ID NO: 439019 - DNA, 122 bp, Homo sapiens
gggctccccgacttccctatggctgatgtcaaaacgcctcgcgggggcagcccaggggcacggccgctccgggggtcccctttcgtctggagaaacacagaggcccaccatcacctggccgc

SEQ ID NO: 439020 - DNA, 122 bp, Homo sapiens
ccctcttgtccataccagtatccccagcacctagcagtgcttggcacatagccagtgtgccggaaatacgtgttgaatgacgtgaatgtggcattgcgtgataaaaacggcacttcaaatga

SEQ ID NO: 439021 - DNA, 122 bp, Homo sapiens
gctgggaggtgacgctggtgggctgggagggaggggcggggggccctgagcctcaggccacggcctcgttaggacggagcctgaatccttaccaccaaccaccctggccggacagcccgaga

SEQ ID NO: 439022 - DNA, 122 bp, Homo sapiens
attggaagttggataaaaggcagaatgagtaaaggcagaaacagaagcaaggtgatggggcgggagagcaagaagcaaaataaaaggcagaagttgagcaacctaaacaaaaagtaagatta

SEQ ID NO: 439023 - DNA, 122 bp, Homo sapiens
cacggcctcccctcagcatccgggtttcggcctcggagcgccagggacgccacgaggacgcgccccacacttgcgcttctgggttccagcccccgcggcccccaacaaataaagaagggaaa

SEQ ID NO: 439024 - DNA, 122 bp, Homo sapiens
tttaggagcgcagctggggtggaaaggtcagaggcacttcattgctcacgggtgacagctcgccccgcgccggcccgcagcctccaggcgcgggacccggagctgcgcgtttgcagggccac

SEQ ID NO: 439025 - DNA, 122 bp, Homo sapiens
tttctttgactcagaagggaactccctgaccccttgtgcttcccaggtgaggcaatgcctcgccctgcttcagctcgcgcacggtgggcacacccactgacccgtgcccactgtctggcact

SEQ ID NO: 439026 - DNA, 122 bp, Homo sapiens
ttctattcaagttccagacgtccacatcaacaagcatcaaacacagagtttaacctgcatcgtactggcagtcaagatgcaagggctgtagtcctggttctgcaactcttttgatgggcagc

SEQ ID NO: 439027 - DNA, 122 bp, Homo sapiens
ggtgctcagcgccaatgctccaggtcaaagcccagttccccttgaaagtcaatacaaatgcgagcagtgctctccggagggagatgggcatgggcagaggctgttctcatccctcagccccc

SEQ ID NO: 439028 - DNA, 122 bp, Homo sapiens
ttaaaacacctggctgctctgtgaccctggtggtggcaaaacccgcgccaccctaggcatcgcccgtgggctccgaacgcgtcaacccaggccgtgagcgaagcctgcaaccagggcctgtt

SEQ ID NO: 439029 - DNA, 122 bp, Homo sapiens
tgatctcatcacaacctgagacacaggtcataatagagacttcggggctcattttatacccggtgaaccagccaactttcatgcagttgagaaaaggtaaactgtccagataacgtggctca

SEQ ID NO: 439030 - DNA, 122 bp, Homo sapiens
tttgtcatttcttcaggcatgtggccgacccgaccgggtctcaggtattccagatatgagcgatgtgccgattgcgcaaggctggaagcattgctcactcggagataccgaggcctgcttgc

SEQ ID NO: 439031 - DNA, 122 bp, Homo sapiens
catgaaaggcagttgggtgacgtggaaaatgccagagagcaaagccacaaccaaacaaaacgctaagactagaggatttgcagcctcgtcttaggaggagaaaaagtgccttggaaacagtg

SEQ ID NO: 439032 - DNA, 122 bp, Homo sapiens
atgaacaagttttggaaacggatagtgatgctggttgcacagcattgtgaatgcacttaacgccactgaattgtatacttaaaaggagttaaaatgataaatctgatattcttggactttag

SEQ ID NO: 439033 - DNA, 122 bp, Homo sapiens
tgccgcctcccaggatggcagtggtaattcagtcatgggacggacgacgtcagtgcagtgcgtgtgaaatacatcttggctcctgttctacactccccagagccagagccagtggagaaagt

SEQ ID NO: 439034 - DNA, 122 bp, Homo sapiens
ggccacattttccatcaaaaagtccctgttagaggcagtctaagaaagagagagaaagagcgaaaaagaaactttcctatcaaaatgtttcaattaagaagtagggtgtacgtgtgagggga

SEQ ID NO: 439035 - DNA, 122 bp, Homo sapiens
atttctaacttgcactataagaagcaacgatttgctactcactgttccgagttcttagcacggattaactcacgcatcacgatcttcaggattcaaacacaggcaggcagctccagagaggg

SEQ ID NO: 439036 - DNA, 122 bp, Homo sapiens
ttccccacaggatgccaggcagcgatgcaaggccaggttgccaccacacagtggatttcacggccacatccctacatctttcccagcaagatccatcctcatccaaggcttctgagatacga

SEQ ID NO: 439037 - DNA, 122 bp, Homo sapiens
tagggcttcaaagtctttaaaaagactttggttgtctgggattttaaatttgggcatatgcgtacaaaggagtagagaagagaggtctacagtgtggggttttggatcagaaataatttggt

SEQ ID NO: 439038 - DNA, 122 bp, Homo sapiens
aacgcgctctttaacccgcctcccagccccgccttcggccaatccgcatccgaggcgctgcgcgccccaggctgaaaagagagcccctgagcccgacagccaatggaaggaagaagagggaa

SEQ ID NO: 439039 - DNA, 122 bp, Homo sapiens
ccactcatgtgtgtcactaatgagatgacgaggcatttggctaagagtcatagtgacttccgctgtttccccaggcttcttttttttttttgagatagagtctcgctctgttgcccaggctg

SEQ ID NO: 439040 - DNA, 122 bp, Homo sapiens
ctagggacctcgtattcagctaaccagctcttgcttacttaactgccctgttttcagctccggatttctgggaggtctccccatggctaacttgtccctcccggcatcctttagcgctctgc

SEQ ID NO: 439041 - DNA, 122 bp, Homo sapiens
tgccgctgccgctctgggaggaagtggtggagctggcagaggaggtcaccgaactggtgtcgtccgtgtcatcagcagcctcatcatctgcgtcctgctctgccgagtgcagcctgtcatct

SEQ ID NO: 439042 - DNA, 122 bp, Homo sapiens
tcaccccaggtgtgtgtggtgtgcatctgtgcgcacctgtcctgagcctgccccgggaggcgcggctgacctggccacggcacaggcgggggtgcttgtgaggcaccagggctgctcaggac

SEQ ID NO: 439043 - DNA, 122 bp, Homo sapiens
cacgccaccttgtgacatcacagggccatgccctcggggctcaaggccagagaggctccgcgcttccaggacccgagagctaaagataatgaatgggagagagcgagactggaggaggtaac

SEQ ID NO: 439044 - DNA, 122 bp, Homo sapiens
tccgatggtggggtgcttggtcccacccattggtgcctccctagaccccgtggctcctctcggccactggggtccccaagatcctcccggccagggaactgcttgctggattaaccagctga

SEQ ID NO: 439045 - DNA, 122 bp, Homo sapiens
gttctcttgccctcagcatttgtaaaacatgatcaaccaggcaggcgagcggcctctgtccgagcagaatttattctgctgtgaaaagacacgtgtgggtcctgaggctcttgccggcttgt

SEQ ID NO: 439046 - DNA, 122 bp, Homo sapiens
agccagcccgggcctccagccgagcccacgtgggacccaggcgctccgcagggcgggcaccgggcactgggcacccttcctggccgcgcaccaccgctccagggcaggctcgggcacaacct

SEQ ID NO: 439047 - DNA, 122 bp, Homo sapiens
gttacctcgttgaggggacaaactgattttgggggtcggtgtttccaaccgaagctttaccggggcctcagtttgaaaactccagatctctaagctgccaggcccacagccaggaccccttc

SEQ ID NO: 439048 - DNA, 122 bp, Homo sapiens
aaaataacctcacagaaaggctagctggcggtagaagcggcactgcataccaacacaagacgttattttaagcgcgtgtccccacgagagaacccatccgatctactggagcaagcatctcc

SEQ ID NO: 439049 - DNA, 122 bp, Homo sapiens
attccataccatatctcagtcttaccaatcgtgactctctggccttgggtcctaggaattcgaaatttaaacaaattcctaagtaattctgatgcaagtagtccctgtgttctctgaaaatg

SEQ ID NO: 439050 - DNA, 122 bp, Homo sapiens
tgcatctccgaggacacatccttccatgactcctatctggctgtgtccccggatatcacccgacaggtgtttgggacttttcaccagagaacagtgggccacacccagaggaaaagtggcat

SEQ ID NO: 439051 - DNA, 122 bp, Homo sapiens
ctcacgtgaggatgtggcagtgcgcctgttggagctaggataggcatccctgtctgcctgcgcctgtcagggctcggataggcctccctgtccacctgttcctgtcagggctcggataggcc

SEQ ID NO: 439052 - DNA, 122 bp, Homo sapiens
gcagggccgggcctcttcaccgcccatctctcctcccggcccacttccctcactgcaacccggggaccgcctccggggatccacgccccttcccgagcctctgactcgcccagcccggccct

SEQ ID NO: 439053 - DNA, 122 bp, Homo sapiens
aaacaccgagtggtgctcgcttactcgccccctctagaaagcaccttgttcaggcgggggcgtccagacccgcacagaacgctcctcaaaccagcagcagctaagaggatgagactgccggg

SEQ ID NO: 439054 - DNA, 122 bp, Homo sapiens
gttcggagacaggtggtggctgcacgtagggaggagcccgttggggaggaaaaatggccccgactggtaaatgtgggtgtttggagtattgtttgttatcatcgatctcactctctgccagg

SEQ ID NO: 439055 - DNA, 122 bp, Homo sapiens
catgggaagggaaacactgttgctctgctttttctgtgtaggagtttgtaattgacacgccgtgtgaaaatgcggagaagatgtatattggaaatgccatgtacgggaattatgcagctgtc

SEQ ID NO: 439056 - DNA, 122 bp, Homo sapiens
tgaaggccccacaatcctgcagcagccacacgcacaccaaggagagctctcggccccactcgccccagaccggccctgggtttctcccgactgggccctgtactctccttcccttacctctc

SEQ ID NO: 439057 - DNA, 122 bp, Homo sapiens
ccagatccagcttcccagagattacagtcagctcatctggaaaggagcctgtgagatcggcgaagtcctagtgtaacacattccaaggaacacctctgattcattactctttggagactggc

SEQ ID NO: 439058 - DNA, 122 bp, Homo sapiens
gaattaataatttactgctgctgctgctctctcgacactgcccgatcaggcaggtggggccgcttggcttcctggggcatcactacagaccacagagtgcccggcctgccgggatcggccat

SEQ ID NO: 439059 - DNA, 122 bp, Homo sapiens
gaatctccaaggaaaacatcaagggcattttttggaaattgaggagtggttttgtagttgcggaaacatggagtgcttgaggaatgttaagagatgaaggtctgtgatggatggacggtgga

SEQ ID NO: 439060 - DNA, 122 bp, Homo sapiens
agatgaggtcatgcgggattagggtgagctctaaatccagtgtgtctctgtgtctgtattcggacacagccatatgaagacagaggcagagactggaattattctgctacaaaatgccaagg

SEQ ID NO: 439061 - DNA, 122 bp, Homo sapiens
cagccaacctttcggtttgcagaatgacggggcccgccgcggtgccggactgcctgtgcacggggccaccgactgcagcctgggttttattcttggcctggccctgaccgggagctggcccc

SEQ ID NO: 439062 - DNA, 122 bp, Homo sapiens
tcagaaacagcaaaccagagaaactgcctcgctagcaaattcatgggctcagaaaataaacgtcaagaaggctcagattaaaataccttttaaagataaaagactccagttcgcagtctcat

SEQ ID NO: 439063 - DNA, 122 bp, Homo sapiens
ggccaaagcaagtctcagaagcctgagcatcgtcccagttgtcaccaccggcctgggcaccgcttgtggcagatgaagcacgaggcctcctcagtaagggaagccctcaggtcacggcgtct

SEQ ID NO: 439064 - DNA, 122 bp, Homo sapiens
ggagaaagggagtgagaatgcataggaaaggaaggcgctggcagtcatccacctacccaccggtttcctgcacagctcaggagggcggaaaaacaaatgaaacattccgtaagtgttacttg

SEQ ID NO: 439065 - DNA, 122 bp, Homo sapiens
gggtccccgcgcctttgtgtatgtgctcgcgtctagggagttctgaacatgggggatgcccgggtccccgcgccttcgtgtacgcacttgtacgtagggaggtctgagcatgggggatgcct

SEQ ID NO: 439066 - DNA, 122 bp, Homo sapiens
aagaggccagtaagggctagctctggggaggagtggtgggtacccgcatgtgtgcatgtgcgtcctgcatgtgtgtgtgtgcatgcatgcctgtgtgtagggcctgtgtgtgtgtgcgcgta

SEQ ID NO: 439067 - DNA, 122 bp, Homo sapiens
gcggccatgaggaggaggaggaggaggctgggtgtcacagcttcaggccaccttggccgccgcctcggccccagtccctggcagccgcctccgcactccgccccgccctggctgcctctgtt

SEQ ID NO: 439068 - DNA, 122 bp, Homo sapiens
gtgtctaaattagtctgaggatcaatgagggtcaattcagttaggaattgaataatgaaacgtgtctctctgaattcccccggcaattgttttagtcatttatcaggccaaaattaaaatgt

SEQ ID NO: 439069 - DNA, 122 bp, Homo sapiens
ggtgcaggatataatcttgtggtgtgccttttttcaagcccgtcagaaaagcgcagtatgcgggtgggagtgacccgattttccaggtgccgtccgtcacccctttctttgactaggaaagg

SEQ ID NO: 439070 - DNA, 122 bp, Homo sapiens
ctccgcccctacccccgccagaggagatggtttctcccgccagcaggcggggaggctgggcggccggccgccacctgggccggagcgcgtcgcagccacctgagcccgccgagggcgcggcg

SEQ ID NO: 439071 - DNA, 122 bp, Homo sapiens
gatgcggtttcaccatgttggccaggctggtctcgaactctttgcttcaggtgatctccccgccttgtccttccaaagtgctgggattacaggcgtgaaccactgtgactgcccctcccccc

SEQ ID NO: 439072 - DNA, 122 bp, Homo sapiens
agctgccattgtggagaagttgtctagccttcggttccagaaaatccagcacagcatcaccgcgcaggaccatcagctcacgccgcatagctgcatcatcagcatggttgtgggccagctta

SEQ ID NO: 439073 - DNA, 122 bp, Homo sapiens
catgatatatacatgtatcatagcatcacattataccccattgtacgaatatatacaattcgtctttgtcaattaaaactaaagacattttttaaagtgtcagtggtttcttgaaagctttc

SEQ ID NO: 439074 - DNA, 122 bp, Homo sapiens
tttatgcttccccaacacaaggaaggggagataacagcattaggaggaaggggagagtctcggaagactctcccaggagctggttcttcgattaaatttgctctgccactccggtgccgctg

SEQ ID NO: 439075 - DNA, 122 bp, Homo sapiens
cagcttcattcatacagaaatgactcatcaggtgtttctctataaacttgcagaatttaccgtctgctaaatggaatggtggccggaatgtcctgactgattagctgttgcccatagaaaaa

SEQ ID NO: 439076 - DNA, 122 bp, Homo sapiens
accatacacttgattttgcaagtacagaaggccctgtggaatgtattaatcagagttaaacgctgtagacaggcgcgttgcagggcggcggccctctccccttggcattaccgacagccgag

SEQ ID NO: 439077 - DNA, 122 bp, Homo sapiens
ggcccagttctttctatggaagtcatgggttgcagtgttgttgagggagccggtggtgcacgtggtgaagacctggctctgtagccggccagctgggtccccgtcacacactcacacgtgca

SEQ ID NO: 439078 - DNA, 122 bp, Homo sapiens
gccggccatccggcgtctggcccggcgtggcggtgtgaagcggatctctggtctgatctacgaggagactcgcggggtgctcaaggtgtttttggagaacgtgatccgtgacgctgtcacct

SEQ ID NO: 439079 - DNA, 122 bp, Homo sapiens
ggtgggcacaacagaccctgagcgcgcatgcgctccgctcctttttttatgaatggggggcgggaaaagatcttaacccgtgattgctgggactggctcaagctccaccaggagccgtcgtt

SEQ ID NO: 439080 - DNA, 122 bp, Homo sapiens
aaaacaatttcgagcctacgttcacaagtttgccagaaagccctattattgacacagctgcggatctcagacatctgagttagtcagcaccattctgctggaggggattaagactggacgct

SEQ ID NO: 439081 - DNA, 122 bp, Homo sapiens
ttcttgtgccttggcctcccatatagctgggactacaggtgtgcaccactgcacctgcctcggcctcgcacaatgctaggattacaggcatgagccagtgcacccagcctgactatatcact

SEQ ID NO: 439082 - DNA, 122 bp, Homo sapiens
aggaaatttataataatatgacttttatatagtggggtatagggtatgtgtgtatgcacacgtgtttaaaggttctgtaagattttccttgaaaaagtttttgctgctgaaatagtgtgaaa

SEQ ID NO: 439083 - DNA, 122 bp, Homo sapiens
ctgtaaacttaattctttaatacatctcaacatgatgtatggtggtatcatcatcatcatcgtcaccatcatcaaagggaaaatactgaactcacacacacacacacacacacacacagaca

SEQ ID NO: 439084 - DNA, 122 bp, Homo sapiens
gtagtcctggcgggcgtgggcccttgaggtgtgctgggagctgtggtccgggtcggcgggcgcgcaagttggctagtctctgcggccacctccggaagggtccgccggctgtgctggtgagg

SEQ ID NO: 439085 - DNA, 122 bp, Homo sapiens
gggaactgagccagggtagaggcagggcgggcccggcagcgtgtgtttgggatttgttgccgtggtttccccggcactcagctctgcctccgccgtcccctcccccaagggtttgttttgac

SEQ ID NO: 439086 - DNA, 122 bp, Homo sapiens
cttagtttgactacatctgcaatggccctatttccaaatgtggccacattcacaggtgcccggggccaggacttcagcatatctttcaaggagacaccaccaagccacaacagtggaggaac

SEQ ID NO: 439087 - DNA, 122 bp, Homo sapiens
agaaagcgtctgctctctaggacggtaaggatcctctacaagggcacgtgcagatccaggcgctggagcgtcaggcatgggcaccattttcatgcttcaactcaaactccaggtggtagtga

SEQ ID NO: 439088 - DNA, 122 bp, Homo sapiens
gcgccccgcctttttatcaaatacttttaagaagtaaaaaagaatgagggctgagcaagacgattggagctgactaccaagatcactggtgacctttgaaagtacagtttgaatatactgat

SEQ ID NO: 439089 - DNA, 122 bp, Homo sapiens
ctctgggtccagggtcctttctgctccggcactgggggctctcaagaggtggggctgccacgtgggtggcctctccctggagctgagcccaccctgggggaccctggatcatgcccctttgc

SEQ ID NO: 439090 - DNA, 122 bp, Homo sapiens
aaattgctggcagtgggtgtgaggagagccctaatattgagtgaacagaggtgcagccttcgcgttggctgctgtgaatatcagcaggttcatgaactgcccagcagagctacaagcttcga

SEQ ID NO: 439091 - DNA, 122 bp, Homo sapiens
tcgggctggggcgggccctatcgggggcggggcctgccgggggcggagccggggtgggggcggggcccagcgggggcgggaccggaacggagccgtgcggccccgcgcgctcgcagtctgtc

SEQ ID NO: 439092 - DNA, 122 bp, Homo sapiens
ctcccccaaccagatgtgatgaggggagcaagcgtcccctgagaagcgtctgggctccctcggggcagctgcggtggggagctccggctctatccgcagggctttctttagtccctagtcag

SEQ ID NO: 439093 - DNA, 122 bp, Homo sapiens
ggcgtgcggaggcccgcggccggccctggcccctgtggtggcagcagctggctggcttcccgggcggctacctccagctgcagctgtcggtgctatttgcagctctccacatcctgagagct

SEQ ID NO: 439094 - DNA, 122 bp, Homo sapiens
ggaacgctgggctgggaaccatccaatcaggcacgcaactggagcggacagcacagcttccgggatttggcggggcctttgtctctcgctgcagccggcgctccacgtctagtcttcactgc

SEQ ID NO: 439095 - DNA, 122 bp, Homo sapiens
cggcagcccttggggaccacaggcctgaccagggcctgcacaggttaaccgtcagacttccggggcattcaggtggggatgctggtggtttgacatggagagaaccttgactgtgttttatt

SEQ ID NO: 439096 - DNA, 122 bp, Homo sapiens
tcaccgaccggttttatcccgctgaggccctgggagatgggtctggcgaggctcgtaggccgcggattggctggctgggtgcaggggggtgcgggaaggggaggattttgcaagggggacat

SEQ ID NO: 439097 - DNA, 122 bp, Homo sapiens
ccagcggaaagctaggggccctgggagagcgccggggcggagccgaggatgccaccttggcgacgcagcacctccttctttgcgccgccctttcctcttcctttagtcctccctcctgcgga

SEQ ID NO: 439098 - DNA, 122 bp, Homo sapiens
tccttaggcacactagctgtgtgattaataaataaaacatttctgtcatgtagaaggttccgttgggcaaagctggtctaaagcaaggtcctgaggttctcagcagatcatttgttttacgt

SEQ ID NO: 439099 - DNA, 122 bp, Homo sapiens
tgggatggttttttacttgcagctgcaagatacgccagcatctcttggatcagagcccttcgtgaagtaagggagaattacaataggactgtagctcaggccaagggattaatagaaagatt

SEQ ID NO: 439100 - DNA, 122 bp, Homo sapiens
gccgcctaaccaaacaatgcacagaaaggagaccctctgctcctgtgtttttctatcagccgcaccaagggcttggtttcctggcaacctgccacggtgccttccctccgcggaggctcgtc

SEQ ID NO: 439101 - DNA, 122 bp, Homo sapiens
ccgcgcctggccgggaacttctttcttcctgtcaagctgcatttccagttcttgggtgttcggcatgggtgatttgtagattaagaattaggccattcaaaggcaagggaggagacccctct

SEQ ID NO: 439102 - DNA, 122 bp, Homo sapiens
ccagccgggaggcggcgggcgggcaactccgggttggtcactcggcagccggcagaggtgcgcagaaggcgcacagaaccaggcactcagcctcaaggatgtctgggtctctgctaagggac

SEQ ID NO: 439103 - DNA, 122 bp, Homo sapiens
agcattctgctttaataaaaagggttcactgggcaaaagcagttacacaaatttgtaacccgtgcctgacatttcactaagaatccgatcaattccaatgagtacattcagttcagtgaaga

SEQ ID NO: 439104 - DNA, 122 bp, Homo sapiens
accatggcgtatcggctgtagtgttcatatagtcatggtgaatcaccatggcgtatcagccgtagtgttcatatagtcatggtgaatcaccatggcgtatcggccgtagtgttcatatagtc

SEQ ID NO: 439105 - DNA, 122 bp, Homo sapiens
tcccttgagtacccttctccacgtaatcgttgatctgtttcttggcctcttcggtgtccccgaagttgacagtgaaggcttctgagtggtacaactttttaacatcctccaaaaacttatcc

SEQ ID NO: 439106 - DNA, 122 bp, Homo sapiens
aggccttgaggatgcagagaggtttgcattggcaaaagtctcggcatctctcatttttcccgtacatgcaccaccaccgctgcttcctgctgtagcccctctccgccaagaggcattcccag

SEQ ID NO: 439107 - DNA, 122 bp, Homo sapiens
aaaactccgtctcctggcgcaggacagccccaaacacctctccctgcaagtggctgtgcacgtggcccatggtgttgttatagatcccgtcacccacgaactccagcactgcactataaaga

SEQ ID NO: 439108 - DNA, 122 bp, Homo sapiens
ttaacttcacaatccacataattagcattgccccaaacctttcaagtgctggaatgctggcgtccactagtgcctcatttctttctaaacctcattccacatggcaggggaaggtcttagga

SEQ ID NO: 439109 - DNA, 122 bp, Homo sapiens
aatcagaatcgaggccgggctttggcgggaggtgggaacgctgtggccattcggatttggcgcgagcgcggctggagtttgctgctgccgctgtgcagtttgttcaggggcttgtggtggtg

SEQ ID NO: 439110 - DNA, 122 bp, Homo sapiens
gttaaattgttccataaattagttgttttacataaaatttggaactacgatctgggaggccgaggggctgcaccaccagtaagtcgctgactcaaatgggccctttaatccccaaacccaaa

SEQ ID NO: 439111 - DNA, 122 bp, Homo sapiens
gaatgctgatttgttttcctaaaatgagagagactaaagccacgtgccaacgcaacacagcgggacccttgatgagaacctggatcagggaggagcttgtcaatggcatcgtcgggccattc

SEQ ID NO: 439112 - DNA, 122 bp, Homo sapiens
gactgcacccatcacagacctccagagcaggacccagcacaaggccccagcccagcatcccgggtgtgtctgtcacgtgcccatgtggagccaagaataaccagagccactacaaaggggag

SEQ ID NO: 439113 - DNA, 122 bp, Homo sapiens
gagattaaatcacactccatgatactcctgacaacaaatagcattttaaccagtaatttacgataagaagattttcaatcagtgggctaagcccttccctggtgatttaagaaactgccagc

SEQ ID NO: 439114 - DNA, 122 bp, Homo sapiens
ccagttgttgcacccactgagtgaggccatggatacagagtgagggacaggttgcaggagcgccgtcaacaggatgggtgcctgggactaccagggggctaacatttggtgacagctcttcc

SEQ ID NO: 439115 - DNA, 122 bp, Homo sapiens
cgggtgacatcacgctcctataattttacctccccaaaccagctgccggagctgtccaaccgggctagaaggaagccggcaggtgcccatgtcctgagcactgaaagcacaagtgaaagtca

SEQ ID NO: 439116 - DNA, 122 bp, Homo sapiens
gaggcgatgggggggcgggggaagttgtggtgccgagggatggcaaggcaaccttacagacgacaggaggcgctctcaagtgggctcctctgcggatcccagcgtctcagggacggctccgc

SEQ ID NO: 439117 - DNA, 122 bp, Homo sapiens
agacaccagctccaggctgcaagtccataacaagaccacctgagctgtgggtgtcgttctcgccaccaaatcagagctgcccttcaaatgggcacggttagggacagcagagcggccgtggc

SEQ ID NO: 439118 - DNA, 122 bp, Homo sapiens
gcctgcgtcccagtactcagggagcccgggtcaccatctgtcactgtgccgcttgttctgcgccaaggaaaaggaacgtcaaagaggagatgctggtccgagggcaggaggatgagagggct

SEQ ID NO: 439119 - DNA, 122 bp, Homo sapiens
cgaggaagaaaaatacaaaccatttacatccaatgatttccctgcttgctgcccaggaatcggagggtttgtttcttgaagttcccgtaaacgtctgtagacacttccgacaagcagaattt

SEQ ID NO: 439120 - DNA, 122 bp, Homo sapiens
aatttcattcttagggaaaataaactccccagtggaagagaaaggacaaatcccttgattcggcggggctcctgggccctccgctggcaccagctgcaccctctccacagcaccctgggctt

SEQ ID NO: 439121 - DNA, 122 bp, Homo sapiens
ggagagaggtggtagggagcagccagccggcaaaggaaggagggggaaaaaaaccgccaccgggctgacttccacctcccagtggtgagcagtgggggcccaaacccagtttccttctcatt

SEQ ID NO: 439122 - DNA, 122 bp, Homo sapiens
gggccccacgtgcgccccttggcctggctgtgagctctccgcaggagtggggagcgtgggcgttgggccccacgtgcgccccctggcctggctgtgagctctccgcaggagtggagagcgtg

SEQ ID NO: 439123 - DNA, 122 bp, Homo sapiens
taagtctgtgtgtaaaatgagtagaaaataggtcttttaaagaacttaactcattaattacgtgctaccattcctgagaggaaacatggggtcctggggaaatggagtaggtgaggaagtag

SEQ ID NO: 439124 - DNA, 122 bp, Homo sapiens
ggctgaatttggggagctagactttagttagaaaacttcagacaggatccactcattttacgaaaggcaacagaaacacacgtcccacagagtagaagcccttgattttgagtgattcctgg

SEQ ID NO: 439125 - DNA, 122 bp, Homo sapiens
ggcggcgtctgaacagcaccctgggatcaggcagcgcacgcttcccacatgtgtcttgctcgttcactaaacaaatatttgtgcttggcaccagttgatatgttggcattgtgtttcatctg

SEQ ID NO: 439126 - DNA, 122 bp, Homo sapiens
ccagcgaggcgaggctggtataggaggtgcctttggcccggtgtgactccaggatggcttcgaacacacaactgaaagagtcaggcccatcagccgaggggctcgtcccaggtagaaagggc

SEQ ID NO: 439127 - DNA, 122 bp, Homo sapiens
ctttcccacttgttaaaatcggcatccctccctccctctccaacctcccagccactcctccgccccaccatgctgtgactctgcctggtacttagggggaaacggaagtccaggcaggaact

SEQ ID NO: 439128 - DNA, 122 bp, Homo sapiens
gtcgttcagggtaatttccattttagtaatttccgacagcggcagaacagtttctacttacgattggtatgcatttttattattagccatagtattcattttgggtgagtacgtctttgtta

SEQ ID NO: 439129 - DNA, 122 bp, Homo sapiens
ctcggccgcgctcccggccactcagagcccctcgagtcgtagccgagctccgggcctcgccgcagccctccccacgctgggcgccccgctacctggcgctgcttctgcgctgggtccccgca

SEQ ID NO: 439130 - DNA, 122 bp, Homo sapiens
aggcccgacgagcttccggccgggtctttgcccttcactggccgcgtgaacatcacggtgcgctgcacggtggccacctctcgactgctgctgcatagcctcttccaggactgcgagcgcgc

SEQ ID NO: 439131 - DNA, 122 bp, Homo sapiens
atttcatctcagagcctttacacagaccaagttcaaaggtcacctctacttccacagtttcgactcaccaaaatagattgagatacttctttctcccactgagccatacttgggcatccatt

SEQ ID NO: 439132 - DNA, 122 bp, Homo sapiens
ctctgcttgggacgtggattcctttaccctcctcctcgcctgactacttctgacgcgggtcgtcaggactccgcttgggtgtcacccgtccaggaagcctcccttaattaagggccctcggc

SEQ ID NO: 439133 - DNA, 122 bp, Homo sapiens
tctctggaaggtgttcaggtcatctgcactctcgtgggaaggagaggccgacatactcttcggtaaccttttcctgaggcacaggagaaagcatggagcacagagtgggccccagaggaagg

SEQ ID NO: 439134 - DNA, 122 bp, Homo sapiens
ggggttacacggctgggagcggggaggctggtaggtgccggcgccggaaagagactaggacgggaagcctagccctagccaaggaagtaacttggggatgcgtggtcattgctgtcctgatt

SEQ ID NO: 439135 - DNA, 122 bp, Homo sapiens
ttgactggatgggcaagaacctctactgggccgacactgggaccaacagaatcgaagtggcgcggctggacgggcagttccggcaagtcctcgtgtggagggacttggacaacccgaggtcg

SEQ ID NO: 439136 - DNA, 122 bp, Homo sapiens
gggtgggcgctgggccaagaaaaagacacccgcgtattagtggctccgatggcaagtccccgaatgctggcctccaaccccaggctgccggctccccacaagtctccagaagtggccctgga

SEQ ID NO: 439137 - DNA, 122 bp, Homo sapiens
gcgataatggcagtcgtgagactgttcagaatactatgcataaggctctatgctaagtgccgtaccccgtcattgccttgattctcacgccaccctacggccagaccttctcttctccatgc

SEQ ID NO: 439138 - DNA, 122 bp, Homo sapiens
tagaagaggtgtggaagcagaataggtttggattttagacaggcaaagctgtgagggacccggcatctgcatgcctttaatgaacaggtgaggggggccatgagggctaaggagtctcctgg

SEQ ID NO: 439139 - DNA, 122 bp, Homo sapiens
cgggtcccggtcccggctcgtcaagccccagctttatggtggctcctcagcctcccactacgtgggtagaaagtttccagccacgaaagtgaaagtgaaatgcaaatcaagcctaccgggag

SEQ ID NO: 439140 - DNA, 122 bp, Homo sapiens
gggccgaggtgatgttcacaggtagcgtgacccccgggagtgcgtctgtgctggtcaggccgctgcttccattacaagggaagtgcacccgatttttgtctaccggtgggaccaggaccatc

SEQ ID NO: 439141 - DNA, 122 bp, Homo sapiens
cctccgccatcagctgtactgcctcacgctccttccccgcgttgtccatgtcgcccgccgcggccgccacagccccctcagccggctcgctgtgcgcccaggcgccttaaccctccctctgg

SEQ ID NO: 439142 - DNA, 122 bp, Homo sapiens
cagacagagcaaagtggaaaagaagcacctcccttctgactcctccaccgtcagcctccccgactttgccgaaatagagaaccttgcgaatcggatcaacgaaagtctgcgttgggatggaa

SEQ ID NO: 439143 - DNA, 122 bp, Homo sapiens
gagtagaaaggccagtgagacacaaagccaagagaatttccccagccactctggtctccacgagccagtcctggcactcagaatgctgaggttagagcaagggaaattgccaaccttcggcc

SEQ ID NO: 439144 - DNA, 122 bp, Homo sapiens
tgagagtcttggccttgattttaaattgagttcaattaacaggattttggttttccaccccgttccccagctacactcaggtgcatgggtgtggagccaacttagaaaattggatttaatca

SEQ ID NO: 439145 - DNA, 122 bp, Homo sapiens
ctaaaggccataaatcaattggtattaacgctagaataagaaccataaattggccgggcgcggtggctcacgtctgtaatcccagcactttgggaggccgaggtgggcagatcacgaggtca

SEQ ID NO: 439146 - DNA, 122 bp, Homo sapiens
ttacacaaagtagctctttaacgttaatatattttacaaataattactacatatctacaacgttccagatacagaagaaatggccaaagaaggtattttaggagatccagattataatgaac

SEQ ID NO: 439147 - DNA, 122 bp, Homo sapiens
ttctccagggtggacacaggcttacgtgtggcgcaggagtgctctgtgacgtacacaaggcgcatcccacaggtggatgcagagaggccagagaggggaggcacctggcaccatcccgttct

SEQ ID NO: 439148 - DNA, 122 bp, Homo sapiens
ctttaagacaggactcctcgggatttggccctgggacccccatggccctccctcccctgccgccccctactggaacctgcatcccgccatcgccacagctgcagcaggattccccctgccac

SEQ ID NO: 439149 - DNA, 122 bp, Homo sapiens
cgtgatctgcccacctcggcctcccaaagtgctaggattacaggcgtgagccaccacgcccggcataggcactgttttaagagctatactcaaatcaattcattaagccttcataaccccaa

SEQ ID NO: 439150 - DNA, 122 bp, Homo sapiens
aaatcacacccgggatctcggacgcccggggcttagtgctcggtgatggaggagaaggggcggcgggctctctgatcctctgcaatcccctaaccggataaaggcgccgggctcccagccgt

SEQ ID NO: 439151 - DNA, 122 bp, Homo sapiens
ttttttctttgctaatcgttgctcttatcactctaacttgtcctgaaccatccatggctccgcaaactttgtgagggaaggagcttgcttgtgtagaatgtaggagtattttcattgtctat

SEQ ID NO: 439152 - DNA, 122 bp, Homo sapiens
ggcaattttcgtcttcatagtgtggaaggagggcttgccccagtggcgggaaaacaaaaacgaatagagcagcttcttcagagctgcagacgtggggggtggggaaatacctaaagggtttt

SEQ ID NO: 439153 - DNA, 122 bp, Homo sapiens
aaaatcatttgactcctggggacacagatttgctgccacagaggctgatggacaaccaggcggagagagaaagtgaggctggtgttggtttgcaaaggtaatccaaagggtgtagtccccag

SEQ ID NO: 439154 - DNA, 122 bp, Homo sapiens
acttgggaagcacaaggggtcagggagttccctttctgagtcaaagaaaggggtgatggacggcacctggaaaatcgggtcactcccacacgaatacagcccttttctgatgggcctaaaaa

SEQ ID NO: 439155 - DNA, 122 bp, Homo sapiens
cagaaatagcccggaaccaacaggcagagacgtgggttctaggcctggctttggcactgacggtgtctggcctgacggtgtttggcactgacggtgtggtctggcctcggttttccggtcaa

SEQ ID NO: 439156 - DNA, 122 bp, Homo sapiens
cttttcagtaaattctctctctgcgtggtgagaaaacaggcctggagaggctctgcgacccgcttaggaccacagaactcggtactaggaaaactcctattttaaaatccagccctgggtgg

SEQ ID NO: 439157 - DNA, 122 bp, Homo sapiens
agctctatgggccaagagcctaaaatttaatgatcttgttttggggatttttgattgtatcgttatttgtgagtcaataggtcaatcaatagatgaaaaaaatgcacatcatggaccagtga

SEQ ID NO: 439158 - DNA, 122 bp, Homo sapiens
agctgctcagcgtcccagcttctaaccagctcctatggaatccaggtgcggcttaaatctcgcacactggtcccctaaactttcaaaaccacgtttatgggcaaagccctgccggctggttg

SEQ ID NO: 439159 - DNA, 122 bp, Homo sapiens
ccacccaacaacagatcctttcaattgcctgtggaatatatactaagagagaccatattccggactatttaaacaaaatcttaacacatttacgagaattgaatcatagctcgttctctgac

SEQ ID NO: 439160 - DNA, 122 bp, Homo sapiens
aagaggattgatggttgccagggctgggatcaacggagcacagggcgtttttagcagtgacgctgctctgggcaatactgtaatggtggatccacgacactgtacatttgtccaaacccata

SEQ ID NO: 439161 - DNA, 122 bp, Homo sapiens
ttttggtcaactaattcttaaacaattttgtatgttaacttttctaaaatgatcatagttcggttattgtctctgcacaagaggaagaaagcttttctcagttaagctgtatctctcttcag

SEQ ID NO: 439162 - DNA, 122 bp, Homo sapiens
agtattcctaaaaaatatacactccactcacatgtggatacttcctaaaaacaggcagtgcgtgagcactagtgaggggcattgtgactgcactgaacacttacaactgtgaggtgaataaa

SEQ ID NO: 439163 - DNA, 122 bp, Homo sapiens
acgggggaggcgaagagtcaaaaaatgttgtgcctgggacaagtggtctggcgcgggaggcgtgtgcctggctctagggggagacaggaacttttttacgagagaaaaaaatcctaacgcaa

SEQ ID NO: 439164 - DNA, 122 bp, Homo sapiens
tcccaccgcgcgccaggcggaacagcgaggtcacagagtgcgcgatgcagcctctcagggcgcagtgaggcagcctttactctgcttgtctaccgttaaagaaactgaggcccagagaggac

SEQ ID NO: 439165 - DNA, 122 bp, Homo sapiens
gtgattgcactaaagcaagttggcaaaacatcagacagcaggtaccatggctgcctgtgacgggaggctccggctgacttcctaattgggccaaagcacctcgagtgccctgaagttcactt

SEQ ID NO: 439166 - DNA, 122 bp, Homo sapiens
ctgcacgcccatgctgaaggctctcaaggcttctaaggcttcagaagcaggtggcaaacacgaagacactctcgaatttcccttcaagaaaggactgatgttgcccagcctttcccacattt

SEQ ID NO: 439167 - DNA, 122 bp, Homo sapiens
ggtagcaggacactctcgtgggaatcctaaggacgccagagcacaccgctccggggcagccgagctggacccacaggtgtgactacagcgcaagccagggccgcccctcccagctcccgggc

SEQ ID NO: 439168 - DNA, 122 bp, Homo sapiens
gttgggcatggtggctcacgcctgtaatccaggcactttgggaggtcgaggtgggtggatcgcttgaggtcaggatttcgggattggcctggccaacatggcaaaaccccgtctctactaaa

SEQ ID NO: 439169 - DNA, 122 bp, Homo sapiens
gcggatcgtcccttgttcgctctctttcatgcactctccttttgtgtggaattatctaaacgggagatccctggcagctttatgctaatgcgccgaacaaaggcaacggcccgcgggcggga

SEQ ID NO: 439170 - DNA, 122 bp, Homo sapiens
ggggaagggggtcacccggggaccaggcctagccccgaacaggcacagcagtgggaagtccgtgccctgcctccttccagaggccccacatgctgcctctgccctcgggcccccaccaaccc

SEQ ID NO: 439171 - DNA, 122 bp, Homo sapiens
gttcccggggcgtctttctgctgcggtcgcctccgaggaagaggagaaggaaggtagcggcgccctccacaccaacttagggacttgttctcagccggcgagacgcagtagcccccgctcaa

SEQ ID NO: 439172 - DNA, 122 bp, Homo sapiens
agcgtgggaactgggacctcggggacccagcgcggcggctgtcagctctggggtgaggtccgcgagatctgggcgcgagggcgcgggaggggttggtggacacaggctggggagggcgactt

SEQ ID NO: 439173 - DNA, 122 bp, Homo sapiens
tccgagccaggtgccggatataatctcgtggtgcgctgttttttaagccggtccgagaagcgcaatattcgggtgggagtgacccgattttccaggtgagtctgtcacccctttctttgact

SEQ ID NO: 439174 - DNA, 122 bp, Homo sapiens
tgtgtggcgaggccttggagacagacaggcccacacactccctttcctcgtgagggtcaccgacctgcctacttgggaacgacatagacctgacagttgtgtttgggggtggaggttgatga

SEQ ID NO: 439175 - DNA, 122 bp, Homo sapiens
taagggacgtgcggaatcgcggccccagcggctgccaggcatgatgggagttgtagtcggcgcggctgcaaggcatcaagggaaatgaagtctccacagatttaaaaactgttggccgggca

SEQ ID NO: 439176 - DNA, 122 bp, Homo sapiens
atcagaatcttcctccgggagccaatgggagagcacattacaaagagccaatcccagcgccgctgtcactgttatggtcctgtcagggtgccggcgtcgtggtgcttgggtggtcgccacca

SEQ ID NO: 439177 - DNA, 122 bp, Homo sapiens
attaggagctgattagattagcttagtgccttcagagactaatatcatgtcccttgtggacgagtttgcatatgccatgttccattcacagattaagactggtttaggccagctagcttgca

SEQ ID NO: 439178 - DNA, 122 bp, Homo sapiens
agaactggcaggagtgggggcctgagttggaggtgccggggacaggcgctcggggcagcccgcgccttgccgaggtccctgccccgtcccggccggcctggcttgtcttgtcagtcactggg

SEQ ID NO: 439179 - DNA, 122 bp, Homo sapiens
gagcctcgatcaggtaggagagctttcagaggcccccgctttcccaaaccttagtttccccggtctgacttgttcctcacaactttttaaaggtctttctcctttttgatcagagaatgctc

SEQ ID NO: 439180 - DNA, 122 bp, Homo sapiens
aggaggctggggagcaagggtgccgggctcctcatgccgggtcaggtctcccaggagtgccggctcccagggccactaggcccaggcctgcgcgaggagggagcgcgcgcctccctccaccc

SEQ ID NO: 439181 - DNA, 122 bp, Homo sapiens
gaggctggctctgtggatacaaggcttccgcgactggcgaggcgacccagacctgacaggcggcctcgcggcacagacacaaagcaggcagacgtgttccaggaggcacccgacgtctgcag

SEQ ID NO: 439182 - DNA, 122 bp, Homo sapiens
ctcacatgacatcatggaaacctgaacaaaggcacagaaccacagatttcccaattcttgcgaaggaagcaattcatgttccttctgggtgaagctgctgctggttgggtatttatccttct

SEQ ID NO: 439183 - DNA, 122 bp, Homo sapiens
cattaccacgagctccccctgttgcccccgtactcaggggtggcccagggcagagtggatcgtgggcctcaggccccgccctcaggaatggcaggcttggtggtcaccccgacgccaggcgg

SEQ ID NO: 439184 - DNA, 122 bp, Homo sapiens
gccccgggccaatgagagtagcggaatttctttcattcagcgcggggccaggctcctgcccggaaaggggcggggcgccgcgccgggggtggggccgccgcgcgcggggggagagggcgggg

SEQ ID NO: 439185 - DNA, 122 bp, Homo sapiens
gtcaggaagtgttatgaatcgagagtggcctttgccaaggagccgcgcccgggcggagaccgggcggcctgcagccaccccgcctcgcaccccccgcgcccctaatccgggtacagaagaaa

SEQ ID NO: 439186 - DNA, 122 bp, Homo sapiens
cttagcggcacccacacacagcctactttccaagcggagccatgtctggtaacggcaatgcggctgcaacggcggtgagtgctgagccggtgaccagcacactttgggcttctggacgagcc

SEQ ID NO: 439187 - DNA, 122 bp, Homo sapiens
caaacttgtagataagctataaatgctttcttataattcagctgatggtccacctacccacgcctgtgtcccgtccttgtgtgctggctggaggagagactgtgacaggtgagaccagagtt

SEQ ID NO: 439188 - DNA, 122 bp, Homo sapiens
caattgtttatgcgatgagcacagtcacagcgcttgcagaacaaaagcatcgaagagaggcgagcgccggtccacctcctgcaatcacaggcatcatttcaatggaaggcaaagaaggtgta

SEQ ID NO: 439189 - DNA, 122 bp, Homo sapiens
ggctgtcccctgccagcacccatgtcctgtgaccccaccccaccaagatcccatggtttccgggaagggcctactaaactagcttgagtgatgaggctagaaaggggctgggaccaaggttt

SEQ ID NO: 439190 - DNA, 122 bp, Homo sapiens
ccggactacgctttggaagtgccagtttacaccaggctcgacagtcgagccacttggatccgagagcccatggtccagctggaccacccagcctgctcaggacacccgcctcgcgagtggag

SEQ ID NO: 439191 - DNA, 122 bp, Homo sapiens
ggatagggagcagggcaagggctgaaagctcactctcgggtactgtgcacagtgcctgggcgacagggtcattcgtaacccacaccccagcaacacgcaatttacctgcggcaacaaacgtg

SEQ ID NO: 439192 - DNA, 122 bp, Homo sapiens
gagagggggacagaaaccccactcccctcagttctctcctcacttccaggtgccctggtgcgattaaaagcaaagccttagaatgtagctcttgagacagagatctgggaagacagagcctc

SEQ ID NO: 439193 - DNA, 122 bp, Homo sapiens
aggcctgcccaagatctatgcccgcgagggccctgacccttactcggtgcgtgttgaggacggggcagggactgctggtggcacagtgcctgccaccattgggccagcccagcccttcttta

SEQ ID NO: 439194 - DNA, 122 bp, Homo sapiens
aaggctgacggcgtgtgctccaccgtggccggcagtcggccagagaacgtgaggaagaaccgctacaaagacgtgctgccttgtaagtcggggcttccgtagggagtcggtgcagccttgca

SEQ ID NO: 439195 - DNA, 122 bp, Homo sapiens
cagtcggccctgcaactccctctgcacatctttggaatctccaggagttatggggcggggcgaggagctaacccagccctggctcctcctccccagggagccgaaacttctatacttctctg

SEQ ID NO: 439196 - DNA, 122 bp, Homo sapiens
ttgaaagtgaaccactaggtttcagaaagcaccaggcagttaaaacagagtttactccctcggtcactgtaggtcttcagtcattcatgagaggtgttaaagcacctctaacaagtgcaaga

SEQ ID NO: 439197 - DNA, 122 bp, Homo sapiens
tagatgctgctggtctgtgttttcctgtcaccgtgataaaccatcgctggcactcagacccgtggtgctcaccgcagcgacctgaaacaaaatggagaggagcatccctaaggactaccacg

SEQ ID NO: 439198 - DNA, 122 bp, Homo sapiens
acatcattgaactaaaatgcacaaacctttatttagcagacattggctgaatgtaattctcgttacatagctcagtgtgtacgtgatagtgcaggtgatagctgaacattttatagctctga

SEQ ID NO: 439199 - DNA, 122 bp, Homo sapiens
cgcgaaacctagtgctgaagtaggcgcggacgtgcccggtgcctggcgcgtggtagcaggcgcccggtgccccggccggcgaagaccatggcgttcatggtgaagaccatggtgggcggcca

SEQ ID NO: 439200 - DNA, 122 bp, Homo sapiens
ggtagttgtttttttaaaaaaaagtggcggggttgggtggcctataatcaggttgccgagcgtgcgtgcatccatttcccattgcacctccttacaaggtggggagataagtagagcaagtg

SEQ ID NO: 439201 - DNA, 122 bp, Homo sapiens
cactgcaaaagcacaataaaccagtagttgagccagaagaggttttgttgtttgaggcaacgttgtaccctctgtgatgagtgacatggtagtgctctgtgagtttgcttacacaagccaga

SEQ ID NO: 439202 - DNA, 122 bp, Homo sapiens
aggaaacccatatccttaccctccttgggactgaaggggaaccccggggtgcccacaggccgccctgcgggtgaacaaagcagccacgaggtgcaacaaggtcctctgtcagtcacagccac

SEQ ID NO: 439203 - DNA, 122 bp, Homo sapiens
aatttgaagccaaaagttaaaatatcttatttcacaactgtaattgctggatgccctgcgcgcagttgtggagcagccctaactccaccaggccaagcctgaagcttcctgcggcgcgagct

SEQ ID NO: 439204 - DNA, 122 bp, Homo sapiens
ctgaactctgaaatctttgaggtcagggagcttgcctcattctattttgtattcccagtacgtgacacatggctggacacaccagaaattgtccgatcaagtttgtgggtattaagagtggt

SEQ ID NO: 439205 - DNA, 122 bp, Homo sapiens
aggcccagccccatgcccacagctcctccagaccctgggtgagccggaccccggtgagcgcgggccccttgcctgcaggccccaaccactggcaacattgtgctgctggcgcagccgagctg

SEQ ID NO: 439206 - DNA, 122 bp, Homo sapiens
ccttctttcttggcaggtggtcctggttggcctccgatggctgggggatcgctggcctttcggaagtagtcactcagcaggtcatcccggcaactgggagtgtcctacggagaagagagtga

SEQ ID NO: 439207 - DNA, 122 bp, Homo sapiens
aggcgggagccgagaagtttcccagacggcacccgcgggagcagagctggtcggcctggccgctcctcgccgcggactcctcgggtgcccgtggacagcagcccgtgccaggcccgcagcgg

SEQ ID NO: 439208 - DNA, 122 bp, Homo sapiens
tcgaaggatccaggtcagctgcagccgtcggccggggcggggtgggctgggtgggatccgcgcggccgcagtccgggccccgggccgccgccggctcagaggctcggcagatgcccgccgca

SEQ ID NO: 439209 - DNA, 122 bp, Homo sapiens
ccgctccttcccgcgccgccaggaatagcggcgtctgctcctgtacagaagagccagggccgatatcagggaaggccacgcccacaggactgggcctttctgccttcacttgcgcgaccact

SEQ ID NO: 439210 - DNA, 122 bp, Homo sapiens
cggaaaactcattgtgccaaaagctttctgcttaggcatgttaagtgagctgaaagtatgcgtgaatcctagaacaagcatgaacttttacaggtagatacatcattttgaagtaaagactg

SEQ ID NO: 439211 - DNA, 122 bp, Homo sapiens
ctggtcacctggccgtgctgggtggagctgggtggggtctcactgcccagtggctgctgtcggctatagggcaccctgttccctgcccttccctgtggcacagtttgccccgacacttcctg

SEQ ID NO: 439212 - DNA, 122 bp, Homo sapiens
gatggtgccgtgaaacctcgaaggtgcccagtagacaagtagagtctgcctccatatcatcgaatggggagcttagcggaaggttctggaacctgtggagtgtggtgatggatgtggcaggt

SEQ ID NO: 439213 - DNA, 122 bp, Homo sapiens
gctgaagtgaactgcctgcttcctgagctctcatgcccctgtcctaggattctgtgtgcccgccagcctctaagtgagacaatgtgcttcttgaagagaccccatgtcatgctcttttcctg

SEQ ID NO: 439214 - DNA, 122 bp, Homo sapiens
tcttaaaaaaaagtgacaatgtcacttctgctcacagtctgttgatcaaaatgaggcaaacggccaaacctgatgcctataggttgaggaaattgtgtatttgtgaatagtaatagcacagc

SEQ ID NO: 439215 - DNA, 122 bp, Homo sapiens
ttaataattccgccagtgggcggcagcacaaaggctggcctcttccccactgtcagtggacgggcaccgccactccacatacccgggacaagtcgtctgtcttccagcacctcgttctaaaa

SEQ ID NO: 439216 - DNA, 122 bp, Homo sapiens
gaccccttttcacctggctgcctcccctgtgccccaaggctcctggggaaatggcccagccggttcacctgtgtcctggcctctagtgagcagcttagccctgggtgttgctaaggagtatt

SEQ ID NO: 439217 - DNA, 122 bp, Homo sapiens
cgttcttctctgtctctctgtctcagtctctctgtatccagggattctctttcccagcagcgccagtgcgactccatgggaggtggggccggggcgcgtctttgagagaaggggcgggtgcc

SEQ ID NO: 439218 - DNA, 122 bp, Homo sapiens
taacaaatgtgttggcaaatccctggttagatgcacttcctggtgttgagatgaacacgtcgatttttcaccaatcgatgaagccatgctctgcaatgacaatattaatgtgatccgaccct

SEQ ID NO: 439219 - DNA, 122 bp, Homo sapiens
ggctgtcaccgcgtgcctcggcgttgttcccacggaaggcggaatgcattttctgcaaggcgcgtcatggctttcatctccgaggagctccggcagggtcagaagcgttgctctcgttcacc

SEQ ID NO: 439220 - DNA, 122 bp, Homo sapiens
ggtgctccaagacccagccacgtcaaacagagtcacactttgtacacacctgtgcacacacgtgcacacacagaggccagtagggaggataagaggggcctgaatgtgaccggcgggccttt

SEQ ID NO: 439221 - DNA, 122 bp, Homo sapiens
aaaaatcagttgaagagtgtcagcaggtgcttctaggttctgtgctgtgagcccccaggtcgtggagtgtagggctctggatctctctgtacacgggatagaaacacagtcacgtggaaatg

SEQ ID NO: 439222 - DNA, 122 bp, Homo sapiens
ctccacccccactgccaaacccagctacatcccacttctacctctagtcttggctttgtccgcagcagggaatgtaacctttgacaatgtcccaccccctcaatgggtctgtctcctcattt

SEQ ID NO: 439223 - DNA, 122 bp, Homo sapiens
ttatgtcatgaatgcataaaatatatgtagatattagtctatttatgtgttaacctacttcgttatcagactcctggtccactgtaggctactacttttggggagtcaaaagccatgtgtgg

SEQ ID NO: 439224 - DNA, 122 bp, Homo sapiens
tcaccctgctcctccggggtgggcagcagggtgctggggggccgcgggaccttggccacccgcttgggcagcggctgtttgcgcttatgccccagcctgccctcgcctgcaccccagcccgc

SEQ ID NO: 439225 - DNA, 122 bp, Homo sapiens
ccctcagcatccccctctgtggggccagggcggcttaggctgtgggaccggcgcttaggtcgaggcgggtctgggggagtggcagggggcccggccaagtaggagaaggcccagggtgcgcc

SEQ ID NO: 439226 - DNA, 122 bp, Homo sapiens
tctcaaaaaagaaggaaagaaagaaagaaaaaaaaaaacactcgcagtgtttactcctaacgcgtggaacttgtgtcgacatccacccccggttactgcatactcagtcacacaagccatag

SEQ ID NO: 439227 - DNA, 122 bp, Homo sapiens
ttgtgagtgctgtgtttcctctggttaaggaaaacatttatattctctctccttgcccagcgttcctgggctcccggagtcgctacccaggccgggcgcacggggaggcctggagcgggagg

SEQ ID NO: 439228 - DNA, 122 bp, Homo sapiens
gggcagcccaagaagggcaaggagcagctggaccgtgccctggacatgagcggagccgcccgaggacaagggcacttcctcggcatcgtgggcggctcctcggcgggggtcggcagcctggc

SEQ ID NO: 439229 - DNA, 122 bp, Homo sapiens
gctgggattcacctgtgagatccaaaaccagccctctcgttgctgcgtgttcatcgcagccgtaataacggtggcagacacactgcaaatggctcctggccaccatggcggaatctggctga

SEQ ID NO: 439230 - DNA, 122 bp, Homo sapiens
aggagacctgtctgggcaacggtttcaggacacgcggtggggaaagcgactagcctccggcggggcagggcgggctgtccttacctgcagaaccaccggccacgatctgccgagaagcctcg

SEQ ID NO: 439231 - DNA, 122 bp, Homo sapiens
aaggtcctctgcaccagaaaggccgcctatggcacagaacccctgccctacttcccccagcgtcagggaaaggaaaggcaaagaaaggaaagacgaaggaaggagacctacctagctgaggc

SEQ ID NO: 439232 - DNA, 122 bp, Homo sapiens
agttcttcatttgatgaaaagatcctttgtgatactttcattagctatgactgaagtgaccgaagtggcctctggacttgagttttgtgcttttgtttgtttaatcatcctgggttgtgtgt

SEQ ID NO: 439233 - DNA, 122 bp, Homo sapiens
gttaattgccgttggggacgcccggccgtgcgctttcgccggctaacgtcgcctgtgctccgagcctggtttgctcacctttgaactgcaaagggatcaagttcagcttgagttccctgcat

SEQ ID NO: 439234 - DNA, 122 bp, Homo sapiens
gggcctcagtaggcgtctgcacgctagctgaaatagagcaaaatgcccgacttttgggggcggggctcctggcaacagcactctaggcgcaggcgcagaggcgacctccaggcagggccagg

SEQ ID NO: 439235 - DNA, 122 bp, Homo sapiens
ctgcggaatctgttcttggtggaagcacaggtccgtgtcgctgctgtggttgccgctgtccgcggttcaacacggagtccgccccgcgggtttcagctgttggtcgttctgaggggcctttg

SEQ ID NO: 439236 - DNA, 122 bp, Homo sapiens
ggcggaggtgagagcagccaggctctctgctcctcctctgtatcaagcatccagtgccgtcgtcacacaatgtgaatgtggagtcacgtgtagaataacaaagaagcagcttctgagcaaag

SEQ ID NO: 439237 - DNA, 122 bp, Homo sapiens
taaagaaaaaaaaaaaagcaggaccaattgcaagatgtgatgttgtttgcctcatttacacgtaaggatgttgaagctaatgctgtttgatctcttgtgtcaatcagctccctttgcccaga

SEQ ID NO: 439238 - DNA, 122 bp, Homo sapiens
atgaaaattaatgccaattgattatcagaaatctcctttttttggaatttaagggaaagacgtatgaaataatgttaaatggaaagagtggaccacactattggatatcttctatgtataac

SEQ ID NO: 439239 - DNA, 122 bp, Homo sapiens
catttcagccatttccaggtccaaaccccacggcagccccctccccaaaactctggaaggcggagacctaaggcgacaggtctgcacagttcctcacaccagtggacaaaagtatggtgcga

SEQ ID NO: 439240 - DNA, 122 bp, Homo sapiens
tcggcgcagcggcttcaaactgcttcctgtgctatgccagaagcagtatagaattgtttccgtcattctcccatgaataatcccggcccgacagaggaggaaattgaggctcaggaggggaa

SEQ ID NO: 439241 - DNA, 122 bp, Homo sapiens
aagcaggtttcgccaataggaagcgctcttaaagcggcagtgagggtggctgcgtgtttccggaagacgtggcggctctcgcctgggctgtttcccggcttcatttctcccgactcagcttc

SEQ ID NO: 439242 - DNA, 122 bp, Homo sapiens
ctcaaggcacacatgtcaaaaactatttatcgattattttggtttacccccaatctcatacgcctgcatacgcctgttaatacagcaaggttgtaggtgtgttgtgttgttgtgcgtgtgtg

SEQ ID NO: 439243 - DNA, 122 bp, Homo sapiens
caggtgccggcttccccatctgctaggggaaggccgcctctgcccctcacagcccggccacggcagagaggaggtgggcagggagacaccagcatgtgctctgatccctcggcagcgtggtg

SEQ ID NO: 439244 - DNA, 122 bp, Homo sapiens
ctgaacgcagaggccttttgtctccagacagagagcagcgcctgcttttttccactctcacggggcacggcactgggtcaccagcgagtctcagcctccagcgttagggggatgggaggaag

SEQ ID NO: 439245 - DNA, 122 bp, Homo sapiens
gcgcgggcgccgctgtcaccgccgccgccgccgcgcccgccccgcccgccgccccctgcacgcgccttccccgcgccctgcacacgctgctcctgcacccgcacccgcagggcaccggcgcc

SEQ ID NO: 439246 - DNA, 122 bp, Homo sapiens
cccactccgggttctcgttcaccacatcacccgtagtggtcgtccactccttgcccaggccgcccacgtacagacgctcgtccttcactgccagccattcggccttgaagcctggccaagca

SEQ ID NO: 439247 - DNA, 122 bp, Homo sapiens
ggcacggaggcgacgggctgctccgaagctggagggtttctgcttgggtcagagggatcacgacctcagcagagccaggagaggttgggtgacacccactgcgtattgcacttgactcaaaa

SEQ ID NO: 439248 - DNA, 122 bp, Homo sapiens
cctcgcctcacgcctcctgcccaaatatagaaaccgacttccttgtcctagagctcggagcggcggccgccctccctcgctgggctcccgaggcggcgctccccaggcgggcgcggggacgg

SEQ ID NO: 439249 - DNA, 122 bp, Homo sapiens
gaggctagggcagggggtgaacagggcagaaggctggatcaccccaggcagggggctgggcggagccagtgaggggggccacagaggactggaacacagggaattgatggaagagcaaattt

SEQ ID NO: 439250 - DNA, 122 bp, Homo sapiens
tgtattataaagtatttgccatggtgacaaagctgggagaaacatcccattagccacagacgggctacagactgttctgattatccatgtccaaaactcagtctggctacagctttgtgtta

SEQ ID NO: 439251 - DNA, 122 bp, Homo sapiens
gtccgatggttcctgaatggacaggaggaaacagctggggtcgtgtccaccaacctgatccgtaatggagactggaccttccagatcctggtgatgctggaaatgaccccccagcagggaga

SEQ ID NO: 439252 - DNA, 122 bp, Homo sapiens
attaaccaccaactcccagtggcaggcgaactaagcataaatgtgtggctcctcacccgtcgagccagcgacaaagaaaccttgtaagcaacctgagccgtgctttgtacatttggcagtgt

SEQ ID NO: 439253 - DNA, 122 bp, Homo sapiens
tggtgtatcgaaacacgcactcacgtcactgcaggggtctcctgggagctgcctgcagaccgaaggcagggagagcttcgcctccagtgcagagacaacccctgctgtgcttatgagcacct

SEQ ID NO: 439254 - DNA, 122 bp, Homo sapiens
tggctggtaccctggccctgctcagtcattggcagggacttccctaggggtgtggccttgcgttgaaagctgaagcacacagcctgaaggaactgacagatggagcttatcagctaatttgc

SEQ ID NO: 439255 - DNA, 122 bp, Homo sapiens
tgaaaatctgtgtctgcttggtggggatggtggagttgcgctttatcagggcagtcatcacgcccccagccgtctccagccccagggacaggggagccacgtccagcagcagcaggtcctgt

SEQ ID NO: 439256 - DNA, 122 bp, Homo sapiens
tatgatttctgcagcgtgagtggcaggaccaggacagacgcagctgcagggcacacctgccggtcatctggctgctctgctgtgcacctggttctgtgggccgtcctgggaagagctcctat

SEQ ID NO: 439257 - DNA, 122 bp, Homo sapiens
tttgagtccagaagagactcactaggtctcggcataatgaaaccagggcctcttggtcatcgaatgcccctcagagctctcagtctctctaagcaaactctgtacaaatttttaaataacac

SEQ ID NO: 439258 - DNA, 122 bp, Homo sapiens
tatatcagtttgatgattttcgggcgcggtcttgtggatgcgagtcctctcagggtcgttcgtgaggccccagggcgtgggtgcgccccccgccccgcggccttggtgcggcctccccgtcg

SEQ ID NO: 439259 - DNA, 122 bp, Homo sapiens
acggcacaaagtggccggtacgcggcaggtgcatgggaagaaactgcggaatgaaacaaccgcgagctaagagatggggcagcgggagaaatgaattcgagttccgcctcctaccaggaaga

SEQ ID NO: 439260 - DNA, 122 bp, Homo sapiens
ggctgccagctcgcgtatgtagctgcccaggggcgccgcgtgtgtggccagctcacactgcgatagttgggagggggatagcagcagcccctccaggccaaagcacaggaagttttcagctg

SEQ ID NO: 439261 - DNA, 122 bp, Homo sapiens
gtgaggctgggcggagaacttgccttatgcggctgcgtgggcatgccggaggtgagcatgcgcagtagcgggggcgggcacgcccgcggtgagttggctgcgccggagaggattctaaacag

SEQ ID NO: 439262 - DNA, 122 bp, Homo sapiens
ccccacctgcctagcggacgggtgcaatccccggcaagcccgcagggggcgcgcagagcacgtcgtccggggagaactaaaactacatttcccagcatcccgcgcgccgcagacccacttcc

SEQ ID NO: 439263 - DNA, 122 bp, Homo sapiens
gcgctgcccgcggctcaggcttcccaacaggttagctatactgggatccacccggcatttcgcaggaaggggtggggggaagacagagcgagagggggagagaggctcacaagaggacagag

SEQ ID NO: 439264 - DNA, 122 bp, Homo sapiens
gcctgctgctgccatccatgcggctccaacggccggtcctgggtgccttatataggctggcgggccctcccccgccgcacctgcctgcgccccgcggtccagccccttaatcaccactgccg

SEQ ID NO: 439265 - DNA, 122 bp, Homo sapiens
gtggcgggtgggttagatttcctccttccatgcagtggacagggatgtgggatgggggcacgaagccatggacaagtggataactgaccttgagaagatgtagaggtcaccacagagggttt

SEQ ID NO: 439266 - DNA, 122 bp, Homo sapiens
gcacgtcctcgttccacacgctcacgccgatggagccagtggccccccgtccggacacgccgaggctcacggcatctccctggcttctcgtctgaacccgccccaggtcggtgctttcacac

SEQ ID NO: 439267 - DNA, 122 bp, Homo sapiens
ggggtcccaggtgggtacaggtgggagggcgaacctgcgggtagggtgggcccctccccgcgggctcagcatctgtgcgcctccagctcaggtgcgcgggaggaaggcagcggcctgccgcg

SEQ ID NO: 439268 - DNA, 122 bp, Homo sapiens
attgtgactcgttattgtttttacactgttattttaatgttactttaaaagttttcggtccggagaaaaaccttgtttgttgttgttgctgctactgctgttggtttttggtagagacgtga

SEQ ID NO: 439269 - DNA, 122 bp, Homo sapiens
gcggtgggtggggccgcgagacttggtacctagccagcgggcggagcgcggagggggtttcgcttcgggctaagggactgtagttgtgacagccaggaaaccgagaacggaatgccaatact

SEQ ID NO: 439270 - DNA, 122 bp, Homo sapiens
ctccacccttccagtccagtcccaatccccgtaaaatacgatgagtgtggtgggacacagcgccgagaatgcagggcctgggaacagaggcgggagggctcacctgaacacactgctggtag

SEQ ID NO: 439271 - DNA, 122 bp, Homo sapiens
cctcctcctggtactgattgctcatggctggggctttttcccagggcgcagagagcggatcgccggctgcctctcccggagggtgggatggatgggtgtgtgttgggggtggggttagatag

SEQ ID NO: 439272 - DNA, 122 bp, Homo sapiens
cactgcaccctgccttccaaattaaaaactttttaaaacctcgtacctcgccgtgggcggcgaccgtcgcggactcgccgggaagacggccccacggagccgggaacaccgcccgctgttcg

SEQ ID NO: 439273 - DNA, 122 bp, Homo sapiens
ttcctcccgcctctcgcagtgcatctttcatttgcttttctttgtaaagccagggctcctcgactgcctcccaggaagtcctgcgctctggcgcgccgcacctcgcctgccgcagagcggcg

SEQ ID NO: 439274 - DNA, 122 bp, Homo sapiens
cgccatcatcccttccgcagagttggctgccaagccgacacccacagattctgcattccacggcttcccagcatcctgctgtctctgcgtggaggaaagggtgctgcgaatcccagtttaga

SEQ ID NO: 439275 - DNA, 122 bp, Homo sapiens
ctgcctgacgctcggcatccactgcctcacacagccctcccccttcatcctgcatttccccggccccgactctctatgccaggcagtctaggtacctctgtgggaaaggagagagtaggtga

SEQ ID NO: 439276 - DNA, 122 bp, Homo sapiens
cttaggttcctcccgtgttgcaagcttggttcatctgtgcaggctccggtgacatgatgtcgaactgggagccatggcagctgaaaaacaacgaacagctttgtacataaaagatgatacag

SEQ ID NO: 439277 - DNA, 122 bp, Homo sapiens
gaatatcaggcttgaccagtgcttctcaaacttggacagatagatgaatcgccagggtatcgtgtttaaatgcagattctgattttataggtctggaaggggccaaagaatccacttgtctg

SEQ ID NO: 439278 - DNA, 122 bp, Homo sapiens
cgccgtatctcgccgggtgccacgcactccgctgcttttccagtcctcgttgatccgtctcgaacctagatatctggaatagggatcgaggagataggagccaccaccacctcggacagatg

SEQ ID NO: 439279 - DNA, 122 bp, Homo sapiens
gctcagggacccctgcccccactaccatcctgccctggggggacaggctctagaacactgcgtggggctcagagtgggcctagctgtaaaaggacaggggtccttctccagccacgcccact

SEQ ID NO: 439280 - DNA, 122 bp, Homo sapiens
gcagccctgggagccaccaaggtgcactcagtggccttctaggcttcggttcctgctccgcgccccgcagaaaccgcggctggctggccaggggctcttccaacttccagcgggagcaggtg

SEQ ID NO: 439281 - DNA, 122 bp, Homo sapiens
cctgcgctcccagcagggccaagaggacctcgcgggcaccagcgtccgggcgggaagggacgtgtgcccaagcctcgcctcctggccctcagtgggctgggacgcccttgatcaccggcgca

SEQ ID NO: 439282 - DNA, 122 bp, Homo sapiens
aatctcttggccaggattcagatatgcgttttgtgaccaggggcaatgaacttggcctttcgaagcctcagtttctcacttggaaagtgggaataacgcttacctccccggtggctttgaga

SEQ ID NO: 439283 - DNA, 122 bp, Homo sapiens
ctggctgatgtgcatgtgtcggctgaaccccgggatctacccgcagcaagtgtgacgccccgaagttcaggcaaccctcgcctctgggaccccgcctcgcctctgagacaccccccaacccc

SEQ ID NO: 439284 - DNA, 122 bp, Homo sapiens
gctgcctgtggttcttctcgtggctggctaacgggctgtgaggggagaggcagccagggacgctagcactggccgccatcccccgggggcagttagtgagacccaccctgcccccaccctgt

SEQ ID NO: 439285 - DNA, 122 bp, Homo sapiens
tgtgttggccgggctggtctccagctccgaaccacgagtgatccgccagcctcggcttcccgagttgctgggattgcagacggagtgtcgttcactcagtgctcaatggtgcccaggctgga

SEQ ID NO: 439286 - DNA, 122 bp, Homo sapiens
cttttgggggcagctctgtcccgaatggtgagtggtccagactctagaaaggggtttggtcgcttgagcccggattgaggcttgggacctttgctctcttgctggggacggaagggggcgcg

SEQ ID NO: 439287 - DNA, 122 bp, Homo sapiens
tttcttacacagagcaagaaagctaaccttaccaaagtggaaataatgttctcttgttaccgccacgtcaatggagctacagagagttcacctaagcttcctcattctttaaaatgttaaag

SEQ ID NO: 439288 - DNA, 122 bp, Homo sapiens
ggtttctgtttaagcctggaatttgctctcccagaggatcaaggaccatgttgaggcagtcgggctgtggaaagctctgtggcaccccagcacacttttgatttcaacagcattgtctctag

SEQ ID NO: 439289 - DNA, 122 bp, Homo sapiens
gataataaatttctgttgtttcaaggaagcagtttgtggtaatgtgtttacagcagtcctcggagactaatacagcacctaattcagcactggaggaggaggacaagaatggaaagtctggg

SEQ ID NO: 439290 - DNA, 122 bp, Homo sapiens
gcagcagcggaccggcgggagacggcggcttgggagctggctgtgctgcaggtgttgggtcgggtcgggtcgggacgggcgggagaggacgagacgggtcgggataggttggggcggggcgg

SEQ ID NO: 439291 - DNA, 122 bp, Homo sapiens
tcattccacagcatgtctgcctggatgtcggatggtcggaggacacacagcgcctgtcaccgaggaccttcattccacagcgtgtctgcctggatctcggatggtgggaggacacacagcgc

SEQ ID NO: 439292 - DNA, 122 bp, Homo sapiens
ttgtggaagagcatgtagggttttgataatcatgggatgattctgaagtaattttaaatgcgataggaatatatgagataatttcaccagagaataacatgatagtgtttccatttcaaagg

SEQ ID NO: 439293 - DNA, 122 bp, Homo sapiens
cgcctccctcctctcccccccgccacacccctacccccggcaggcgacgtccccgcccctcgaccatggcctggtgaagaagccggccaggcccgatcagccccatccccgccgcacgagcg

SEQ ID NO: 439294 - DNA, 122 bp, Homo sapiens
catggaatggtagacatggaagcacctacagtaatacactccgtatggatttctcaaacacgtatgtaaaaacataaatgaagttctcaaaaaaatgagatgtcctgtcttaaatatttgca

SEQ ID NO: 439295 - DNA, 122 bp, Homo sapiens
gcactcctcagcctttcagcggtctgtcgatgggactgggaggcgtggagcagggggcggcgctcctaggggaagccgggccgcgcaggagcccacggcggtgggctgggcggggtggggcg

SEQ ID NO: 439296 - DNA, 122 bp, Homo sapiens
ctccttctctgcttccttccttggagtttcttgtgtgagagaggaaagggctgcccaggccgcaccacaggaatcgtgagaccataactggggctgttttaagcctgcaggggtgtggaagt

SEQ ID NO: 439297 - DNA, 122 bp, Homo sapiens
cggagccctgaggcagtcagcgtcctccaggctagggaaaggcgtggttttccttccccacgtctcccgtaaggcactgctgccagcccagtactactgcgtcttggcaaggctggaggtgc

SEQ ID NO: 439298 - DNA, 122 bp, Homo sapiens
cggaagctgcagcctgagacatctgggatttggaactgcaaggaaacggcgcatgggaggcgtgtgcactttgcgttgatagcctgaacctcaggatgtcttaggggctggtgcatgtcgcc

SEQ ID NO: 439299 - DNA, 122 bp, Homo sapiens
ttactctcataggaaacgtgtccctgatcaccacccctgttaagcattcccacgtgctgtcgatctttggaccagtttctagcaaagttgtgtttgaaagatactctattaaagaagactgt

SEQ ID NO: 439300 - DNA, 122 bp, Homo sapiens
cggtgtgatcctgaaggagggtttcatcctcctctcatttcccactggatcggcaggaagcgttagcagggtggacatgccacagagcttccagatctggatcaaaggtggctgttgctgaa

SEQ ID NO: 439301 - DNA, 122 bp, Homo sapiens
attggcaagaagcagttaatttaaagatgctcttcctatctgtggatgtgttggtaactccgagttgtaatgagttcatgaaatgtgctgttatttttgtaatctcaataaatgtggattga

SEQ ID NO: 439302 - DNA, 122 bp, Homo sapiens
gggagcgggttccacttggcccagcaaggatgagagcgttgcagtcagccgcctcagggacgcagggcacaggggacccactgccgccactgctgctcccgcagcctggcgccactgcccac

SEQ ID NO: 439303 - DNA, 122 bp, Homo sapiens
gagctgggtaagtggttaaaaaaaaccccgtgctttctgccctcagacagtttagagtctcgtgaaaatacatattgtgatatataatcaataaaactttattgaaagaatgaatcttacat

SEQ ID NO: 439304 - DNA, 122 bp, Homo sapiens
tttggaactgtttccttgctttactgggatcccctggtggaaaggggtggggggttggggcggtaaagggtgctgatgatttgccacaggagggaaaaaaccttcctttccttgatttgcag

SEQ ID NO: 439305 - DNA, 122 bp, Homo sapiens
ggctctgggttctacctgctgcctggctgacggctggttgaatgctgtgtcagcgacgagcgaccctgacttcccacacaccggccaggccagggacggtggcaggagctttttcatattcc

SEQ ID NO: 439306 - DNA, 122 bp, Homo sapiens
gctgatggaagagtcggcagagcaggcacagtggcgcgacgagatgctgcgcatgtaccacgtgctgaaggaggcactcggcatcatcggcaacatcaacacgaccaccatcagcacgcaca

SEQ ID NO: 439307 - DNA, 122 bp, Homo sapiens
ctggggctgcaaagctggccagctgctgggggggcagaggttgtctctcgttctgtacctcggtctgtgggtgaatgtggctgtgtgttgtggaactgcatcataacactgtgagtcatcca

SEQ ID NO: 439308 - DNA, 122 bp, Homo sapiens
gttggggagcaaaagcatcgggcatagcatcgggcacaaaaatgctgagaaaagcaactgcgacggagacagcactaggcaccctcctccccccattttcccctccccatcggtttgctggg

SEQ ID NO: 439309 - DNA, 122 bp, Homo sapiens
aggctgggatcttaatgcagccagatgcatgaggtcccaagtactcaggctcctgcggagcgtccattgagtgatgggcaatggaatttggtgggatggaaatgtttctctaattatctgag

SEQ ID NO: 439310 - DNA, 122 bp, Homo sapiens
cagcccaggcgcgtaagggtgacgccatccgggtctccgttcagcccaggcatgcaggcgcgaagccatgcgggtttgtatcagtgcgctccacaatgctcacacaaccacgaggccacctt

SEQ ID NO: 439311 - DNA, 122 bp, Homo sapiens
cggcccagaccctccagtgcttccttcagagtgggagcctgtgctgcacttcaggggtctcggggtcagagaacgaggctctcactgcgggggaaggcagcagaggcgtctcgccagacgta

SEQ ID NO: 439312 - DNA, 122 bp, Homo sapiens
tggcgctgttactccactctgcgcgctccgcctgccgacaacttgaccccgctgacgtcacggccgtctgaatcatcaaggccattttcaaatcccattggtctagccgtcacatggtgaga

SEQ ID NO: 439313 - DNA, 122 bp, Homo sapiens
tgggctggctgggaacttttctccccatggaggggacccggcctcccatcctctctcccacgggatagctccccaaatgagggtgggatagagaagcccctagaatgaggggcggctctcca

SEQ ID NO: 439314 - DNA, 122 bp, Homo sapiens
ggctctcggctctgtcctcccgtcatcatgatctagtctggcatatcaggaagcttcaaacgcagactggagtggtttgagtctaatttagccctcatttaggccgcaggtaccacacaagg

SEQ ID NO: 439315 - DNA, 122 bp, Homo sapiens
ggtgacatcctgctactgacagtcaaaagaagccttcccagatgaaattttagtcctctgcgcagccatgctcttcttccagcaaaagagccatgtgcagtcgggtctgctccccatggggg

SEQ ID NO: 439316 - DNA, 122 bp, Homo sapiens
ctggcgggccgcgggtggcgggggccgggccgcggctccgggtgttaggagacaagatggcggcggctctcagaaggccggtctcctcctctccgccgtcctccgccccgccgctcgccgcc

SEQ ID NO: 439317 - DNA, 122 bp, Homo sapiens
ggagcactgtgggtcactgtggcagaggccaggcagggccagcggggctctggcactttgcgcagccaccgggaagtatctggcatcacccccactcacattccacgaggcatagcaagcct

SEQ ID NO: 439318 - DNA, 122 bp, Homo sapiens
gcacccggatccgcctggggcgggagccgcccccttcccgccgcaggcggcgcggggctgcgagtcaagtccaggactcgggccagtctctccggaagacaagaccaacctcgcgccgcggc

SEQ ID NO: 439319 - DNA, 122 bp, Homo sapiens
cgccgcggcgggagcaggctgggctcgggatgcgctcagccaatcagtgggggagcggcgcgcgcgggggtggcgcgcggaagggcagcccgcgcgctcccggccgcagggagtaaccgctt

SEQ ID NO: 439320 - DNA, 122 bp, Homo sapiens
cattttgagaggcaggagtcattgttgtatctgtttgcagacgaggaattagtttagggacgcaaagtgtctttcagccagttactactctgaatctgcctggactagatctctttctcacg

SEQ ID NO: 439321 - DNA, 122 bp, Homo sapiens
cgctgtcatctctctggccccgctgctttttggctggggagagacgtactctgagggcagcgaggagtgccaggtaagccgcgagccttcctacgccgtgttctccaccgtaggcgccttct

SEQ ID NO: 439322 - DNA, 122 bp, Homo sapiens
ctacccccagtagctcaatgcaaccgacgtttctgagcccccagaatctgatccagatcccggacatataaaccacgccaagaagacaggggctgtctctagcacattctctcgagggagtc

SEQ ID NO: 439323 - DNA, 122 bp, Homo sapiens
ttacacaatcaagagtcctgccctccaatggaggtggtcacaacttgatttaaatgcctccgtaattgaacatttatgtcttcgggataaaggagatgggggggtggagaaagagctaccct

SEQ ID NO: 439324 - DNA, 122 bp, Homo sapiens
gtccacggttgcccaccgggttgtgagctccagggacaggcgtgcccacggctgcctccccgtgtgaccagaatcactcaatgctgctgtcctggggcccgaagatcgcgtttgccattctg

SEQ ID NO: 439325 - DNA, 122 bp, Homo sapiens
aaatgccttaactattcacataaagtatcttgcttcaaaaggaagtcagagctacagtcacgagtggtttacagaatattttctgatagtctttgcttcatttcagtatcgtgccatgattg

SEQ ID NO: 439326 - DNA, 122 bp, Homo sapiens
tatctacctcatttttgatggattccttggggcctggtttttcttttcctttctacacatcgctgttcagagtgatggatggagttgtattttgaataaaatagctaagcatccttttgtga

SEQ ID NO: 439327 - DNA, 122 bp, Homo sapiens
cgactggtcagcgtcttccaccaagtttcacgctaccgccctgggcgccgccatctttaccgagccggaacacagtcacgtggctgagaccttggcctgacctgtccggaagtaggcgtggc

SEQ ID NO: 439328 - DNA, 122 bp, Homo sapiens
gcagctggtaggtggtgaaggtggtgcggttcctccggtgcttcttcttgggggcctcctcgcccggccccagacccccaccctcggttgccggcccctcgcccgggctcaggaacatggct

SEQ ID NO: 439329 - DNA, 122 bp, Homo sapiens
cgctgctcaaggtggagggaggctgtgcaccgggggtgtcggcatgggagcgctgtgttccgggggcgccgcgggtccctcctccccaggctgcttacgcgtcacaccagcagctctgattt

SEQ ID NO: 439330 - DNA, 122 bp, Homo sapiens
aattgcaggtggtgcaggtcctggctgggtcctgccatttactgcaggtggctttatctacgtagcaacagtgtctgtgttgcccgagctgctgagggaggcatcaccattgcaatcacttc

SEQ ID NO: 439331 - DNA, 122 bp, Homo sapiens
tgcaggggatatgctcctagtcccccccagtagatgcctgaaactagggacagtacttggcgctatatatactatgtttttcctatacatacatacctacaataaggtttaatttataaatt

SEQ ID NO: 439332 - DNA, 122 bp, Homo sapiens
ccccaggctacagagtaaaagtctgatggtaggatgtgaggtgagggaccttccttgacccggcacccacatgaggcaggactgagaacaccctgaggactgcccgggtggctggggtgctg

SEQ ID NO: 439333 - DNA, 122 bp, Homo sapiens
cctacagagcacggctccggcaattccacagctcaggcttacattttcccatattctggacgctggtgcccaccacgtgcaccaggcactggccagacagaactaccacccccagcatgccg

SEQ ID NO: 439334 - DNA, 122 bp, Homo sapiens
cacaactcttctttacgagggggtgtcactgtgtttccctgaaatattgaggtctcagatcgacaagctctaaatatttttcccccaaaccagggttcatttcaggacgggtctgcaaaatg

SEQ ID NO: 439335 - DNA, 122 bp, Homo sapiens
catctctttgtctccgatccctactggagggaagagccaggcctgggaatctgaagttctcgactccgcccatcgcacccacaggagctctagatgaccctggtgggcaaggaggcacccct

SEQ ID NO: 439336 - DNA, 122 bp, Homo sapiens
acttccactcaataaaactttccactcattcttcaagcccacgtgtgatccaattcttcccgtacaccaaggtaagaacccgggatacagaaagccctctgtctttgcgataaggcaggggt

SEQ ID NO: 439337 - DNA, 122 bp, Homo sapiens
tccccacagagctgccagggtacggcctcgcccagcggctgccccgcccttctcgctccacggccatcacatgcagagatgctgggtctgtcgggaaaggactatggctcacatgaaatgtc

SEQ ID NO: 439338 - DNA, 122 bp, Homo sapiens
taccaggacaacattgcgcgcctggaggaggaaatccggcacctcaaggatgagatggcccgccatctgcgcgagtaccaggacctgctcaacgtgaagatggccctggatgtggagattgc

SEQ ID NO: 439339 - DNA, 122 bp, Homo sapiens
tctacatccaccttgggaaaagaccccaagttagctctcagggctcgcggaccggaagcacgcataaacttctaccctgtccaatcataagcctcacgtgacctgccgcgtagggagggcac

SEQ ID NO: 439340 - DNA, 122 bp, Homo sapiens
cttcattaaggtcatgatgggagaaccacaactgagtctgcaaggcaggtctgaacacaccgtgctctcaagatggatctagaaactcaatcccactcttttcctctcttgttaaatatagt

SEQ ID NO: 439341 - DNA, 122 bp, Homo sapiens
tttttaactgtgagtttatatacacttgaagcagtatacatttagaaatggtctacttgtcgtttctttgattactacccatgagacagtattagtaattctggcctatgaaattggcaaag

SEQ ID NO: 439342 - DNA, 122 bp, Homo sapiens
gaagagggacccgccggggaacacctggagttggcaacaggcgggtcccaaggaggatggcgcggggcaggggcagaccgtgacggggtacacggtgccagactgggagatggaagcaggcg

SEQ ID NO: 439343 - DNA, 122 bp, Homo sapiens
acagctatgttctcttgcctctgggaaatacataaaatgcctagcaacagttcctggtggcggctggtccccataaacgccgctggtcggcccccaccccacctctataccacgacccctct

SEQ ID NO: 439344 - DNA, 122 bp, Homo sapiens
agaagccaggagagaggcaaggaaggacctcctggagagcctctgaaggaacccaccctgcggacgccttggtttggaacttctggcctctggagctgtgaaagaatcaatccctattgttt

SEQ ID NO: 439345 - DNA, 122 bp, Homo sapiens
acggtgtccttgggcagttctcggtggcctttgccgccaagcttccagggagctgctgggcgaaggctgagacccagcggccctgcctcacagtcacagagagaagagctccccacttggcc

SEQ ID NO: 439346 - DNA, 122 bp, Homo sapiens
aagaggtggctttttactccggggaacggtggcgagtgggggcttttgcctctcaaaatacgagcccctcacaactacccatgcacctgccaaacccggcaattaagcttcttacacatcca

SEQ ID NO: 439347 - DNA, 122 bp, Homo sapiens
gctcatgccccacatgttcaaatgcacagtgctggctgtgtggggtgtggggggtgggtgcgtgtgcatcagagactaagcaaggatggaaacaggcaggtgctggccttaggatgtgggtg

SEQ ID NO: 439348 - DNA, 122 bp, Homo sapiens
gcgggaggaggcgattgtgatgcccacgcgaagggtaaaggtggcggttatgtaggactgcgaagactatgcaaaatgcgatacggtttccctcatagcatcgccgctggggcaggggcggg

SEQ ID NO: 439349 - DNA, 122 bp, Homo sapiens
ggcacacatttaattctccattttgaaatttgaagtagtgcccccacaaattatgcagcccgttctgttctggaggaaccattcttatcagaacttggtgctggattgacttggagaaaagc

SEQ ID NO: 439350 - DNA, 122 bp, Homo sapiens
caccgaaacgttcttggaatcttctgagtctggggcaaactgggactgctgatcaccctacgtgggaccagctcatgtacacgctgccctacccacttggacagctgaacagcttgtctttt

SEQ ID NO: 439351 - DNA, 122 bp, Homo sapiens
cctgctctccgagtcaggaatctgattttccagcgtgccctgtaatgacggtgctgtcaccgctgtgatgtccgctgtgaggtggggacaggacctggaagtggggtttccaagtgagggtt

SEQ ID NO: 439352 - DNA, 122 bp, Homo sapiens
tttgacactacttccggtggtgacgtgtattcgcttcaccgggactaagttcctcctgcgcggtctatggcgggtaggtataaggaaagccaaaagcactccaagcgaggctgcagtattgc

SEQ ID NO: 439353 - DNA, 122 bp, Homo sapiens
cgcaagagcacaggtgcgtcctagaggcttcctcgggcacctccagcgagctggagctctcgcctctgctgctgtctcatgtggcgcttagcacactctcccacgtgcccattcctgactct

SEQ ID NO: 439354 - DNA, 122 bp, Homo sapiens
ccgagcgagccgggggcctgggagcacattttcagaccttcggtgggcgcctgaggggcccgcaagtattttaaaataatttttgaaagtgcggcgtggtgcccttgcgagagggaaacgcc

SEQ ID NO: 439355 - DNA, 122 bp, Homo sapiens
cagctggcccaaagctggagagggtgtccaggccacactactctttcttccagttcccaccgctcctcgatgtggacgcctccagctctgcacccagggcggcacctgctgtgctgttccca

SEQ ID NO: 439356 - DNA, 122 bp, Homo sapiens
tgaccagaggtcacttttatcaccatcttggtttcagtgggttttggcctgcttcttcaccgctgttttatcagcagggtctttatgacctgtatcttgcgataccagtcctgctgacctat

SEQ ID NO: 439357 - DNA, 122 bp, Homo sapiens
aacccatcaaaagtgacccacaaaggccggaagcggccacggggggtctaagaaccagcccgcgcggggcgcacttccgcggccgctctaggaagggagcgaaaggggctttcaactcggta

SEQ ID NO: 439358 - DNA, 122 bp, Homo sapiens
tttgggttgggggcttgctgtgcagatgtgttacagaaaggcgctcaatggaaggaaattcgtcttagaaagaagtaagggatatgtctcagagaatgagatgttgctgtgggtatttaaaa

SEQ ID NO: 439359 - DNA, 122 bp, Homo sapiens
gctgcttggccaggttctgcgcatggcccaaaatcccgaagcccgtgatgtcagtggcggcgtgggcattgaacgtgtgcatgagtcctgcagctgggagagagagggggcggctctgagaa

SEQ ID NO: 439360 - DNA, 122 bp, Homo sapiens
caagaatagaaattgaaaattttgaaagcatattttagtctctatataatataaatttagcgtaagtcaagctaagagattaaacctgatgtgcataagagtattttctttggatgcaaatg

SEQ ID NO: 439361 - DNA, 122 bp, Homo sapiens
gtagaaaacaccctgtccccgccggcgtctaggaccgtgggaaatttccgagcctttctccgttttctagagccccgagtgcgaacttccccagaacagatcgatcacagggtgatagggga

SEQ ID NO: 439362 - DNA, 122 bp, Homo sapiens
cactctcggctgcactttgaaaaggtacctcatttcttctggcagctccaggaggtaaggcgaaggaggagcaacctggtaggatctgcagactggacctggggtctggaaagtcagaaggg

SEQ ID NO: 439363 - DNA, 122 bp, Homo sapiens
gatggcgcggtcgggaaagaagtgggtggggctctgtggctccgggcttcctcaaaagctcgtggagatcaggtgtttcctgagatggagctgaactgagttctttccgtcgctcggcctgt

SEQ ID NO: 439364 - DNA, 122 bp, Homo sapiens
atagagggagaggagcccaagtgactgagaacgagccgagctcgctggcgccatggtgtgcgtgtggggtcaagtggtgtcagtgtgtgtgtgtgtgtgtgtgtgtctgcgcctagggtgat

SEQ ID NO: 439365 - DNA, 122 bp, Homo sapiens
cgggtttcttctcatcagcagcttcttaaatatgctgtcttgaatctagttattgccactcgaagccaaaagcatatttaaaaattgtcttgacatgtctagagtcctcactgtgagtatgt

SEQ ID NO: 439366 - DNA, 122 bp, Homo sapiens
ccttgctgaagtccacctgctccagggaccggctcaactgaggcaggggaggggggcagccgggagaggggcttcaaatcccaagctctacagggcctctctggggctcccagagcaccttc

SEQ ID NO: 439367 - DNA, 122 bp, Homo sapiens
gataatataaacgggcctgtaaacgttagctgtgtgggaggttacggaccccggcaggagcgcccaccgaaatcctgtccccagctgaagcaacacgacccgcatcagtttactttccagtt

SEQ ID NO: 439368 - DNA, 122 bp, Homo sapiens
tctggctatcttacgctttcagtgttccactgtcaattgcgtttcctagctaactgttctcgctctttagaatctctgctcttgtcaagttaaatatgcatgcctttcctatagttgactgt

SEQ ID NO: 439369 - DNA, 122 bp, Homo sapiens
cacaggtctaacaatcaagtctttagatggaaggaatccaggcaacattcttcaccacaacgaagaaacagataaaagatacccaattttgacttgatttcatgcatcatttggattttttt

SEQ ID NO: 439370 - DNA, 122 bp, Homo sapiens
ggcgccgtaagactggtagaaggcgggtccgtaggagcccatgtggtcagctgtgtttggcgagttcagggtcaaggagagagaaaaaaatgtgtctgtctcatccacaatatgtgattgtt

SEQ ID NO: 439371 - DNA, 122 bp, Homo sapiens
ggaatgtgttagaaaggcaaattttcctgccccaccccggatctagtgaatcagaaactccgggcatgcagcccagctgactaaggcctaataagctctctaggtgattctgatacatactc

SEQ ID NO: 439372 - DNA, 122 bp, Homo sapiens
tgcgtgtgcgcaggtgtctgggtggcaccgtgtgtgaccttgtgtagccgtctgcgtgtgcgcacggcttgtacatgcctgtgcacctgcgtgtctccatgctgagctgaatggttggaaga

SEQ ID NO: 439373 - DNA, 122 bp, Homo sapiens
cctccacccctcaaaaaaatcttatttttatcatttctctttacttaaaacatacttatccggtcgtgtttaaccaattcttaaaaaaaaatcacagaatgtttaacattcagtttcaaaga

SEQ ID NO: 439374 - DNA, 122 bp, Homo sapiens
ccccaaagcagggactcatgtgctttatcctattccagaatcatcttcagacagcccactcgcaatatcaggaggagaatcttccttactgcctaccagaccaacatgtttatcccatgcct

SEQ ID NO: 439375 - DNA, 122 bp, Homo sapiens
cttgttaatgaaaacgaagcgaatcttgacgccttaaaccctgtctagcctacttgattccgggggtggggctgtgggaatcgctgcccacccggaatcccgcctgccccgagcatggccaa

SEQ ID NO: 439376 - DNA, 122 bp, Homo sapiens
ggcggcggcggaggaggaggaggagcgggaggagcgcgggcgggggcgggggcccccgggcgggggaatatacaaagtgaagccacattgccaaacttgcagcagcgattgcagcagttgct

SEQ ID NO: 439377 - DNA, 122 bp, Homo sapiens
gtggggcgcgggggttggccggagggagggtccgggggtttcttgcacctgcgctcctgccgcgttaagtcagtgggaagcaagtgacatttccctttcacccgcccccttggaacttgctc

SEQ ID NO: 439378 - DNA, 122 bp, Homo sapiens
ggccacatcccagcccctatgaccgcggcggaggaacactcagcttggagtttacaaacccgtgtttttacaatggtcctcggtgaccggggcggcctggccagccctgcaggggccactgg

SEQ ID NO: 439379 - DNA, 122 bp, Homo sapiens
gcgggtcaatgctatggggattcctggaggggaaagtttcttcccttatcagctgttggacgacggagacggcacaaaggaaaaacaagaatgctcggacccatgggatgactgcagatttg

SEQ ID NO: 439380 - DNA, 122 bp, Homo sapiens
gctgcaaagtcctgtctggcgagtgccatcaagaggtgaagccggctgggcttctgggcccgctggggacttggagaacttttctgtctagctaaatgattgtaaaagcaccaatcagcact

SEQ ID NO: 439381 - DNA, 122 bp, Homo sapiens
tttcccgactacgattggctggtgtaattgtcatcacttgaaaaggcagccaatgagaggcgcggtcgcctcgctggtggaagccgagagctgagcgaagtgaggcgtgcggagccaaaggc

SEQ ID NO: 439382 - DNA, 122 bp, Homo sapiens
gaacaaggggaggctgaagaggctgggaatcacccacattctgaatgctgcgcatggcaccggcgtttacactggccccgaattctacactggcctggagatccagtacctgggtgtagagg

SEQ ID NO: 439383 - DNA, 122 bp, Homo sapiens
ttaactaactggactcatgtaacttgtggccgtgacatgtatgtctaaacttagctcaagcgtggctttgtccaccttgtgtcccaattctggtaactaggcttctattgaaagccaaaact

SEQ ID NO: 439384 - DNA, 122 bp, Homo sapiens
catgactgaccgcccagtgctctgtgcgggcgtgcggcctcatccccaccactccatctgcgtggtgagccttgcagcgtctgagagacaataataatatggcagctgccgcggaggtggcc

SEQ ID NO: 439385 - DNA, 122 bp, Homo sapiens
cgcaggagccagggctgggcccacttggcgggcgcgaagcccaggtacgggctggggtctcggggcggcagccaagtgaggctgcccacagtggtgatggccgcggcggcggcctcgccacg

SEQ ID NO: 439386 - DNA, 122 bp, Homo sapiens
cagaaatacgtcacaggaaaagggccccgatccagacccaaagagagggttcttgggtctcgcgcaagaaataactcagggcaagtccgcggtgcaaaataaaagcaagtttattaagaaag

SEQ ID NO: 439387 - DNA, 122 bp, Homo sapiens
tggaactcctgtgaataaagtaataatgtgcacactgatgccgggagggagatgacagtacgtgtgtggctttgccccagtgtggggacttcaggaaagtttcctggagtctgtgacttcta

SEQ ID NO: 439388 - DNA, 122 bp, Homo sapiens
gctgcgcgccccggaggccgagcgggccgggggctccgagaggcggtgcttgggaagcctcggggccgggaggagggggcttgcagcagcgggggcggccccgggactgagccggcatccct

SEQ ID NO: 439389 - DNA, 122 bp, Homo sapiens
caagagaggtcctaggtgcgggccagggatggagccagcccagagagaaaggggaaaacccggcaaggcaagagcctcagtctcgcccctgcctggcccgccaggctgtgagtggggcccat

SEQ ID NO: 439390 - DNA, 122 bp, Homo sapiens
aatatcaccacaatagatactataaatataaatacagggaaacacttaaaatcagtccagcgcttttttctcggccccttctttattgttggtccgggagtaaggctcgaaggccgaggagc

SEQ ID NO: 439391 - DNA, 122 bp, Homo sapiens
gtcacagtcgataggccccaggttgtattgatggagtgtgtaagtggccctctctcctgacggtcatgccgtgggtggaccacccacctcttcagcggggcgggtgcagcacccggatgggc

SEQ ID NO: 439392 - DNA, 122 bp, Homo sapiens
gagcgccctggcccggggcaaagagcagcggctaggggctgggggctgggggccgggacccgcgacccgccccaggcctcggagcgcggaggtggcagaggaagggaaaggccaatgtaggg

SEQ ID NO: 439393 - DNA, 122 bp, Homo sapiens
ggcctggagcgggcagaggacacgggatggagagaggtgccgagtgggccgagaggctcccgggcttttctgaatcccaggagaagagaatggaggagagatggtgcctcagaatcttccag

SEQ ID NO: 439394 - DNA, 122 bp, Homo sapiens
actacacctgactcacctcctctaggcctcaccccgccgtgggaggcaagcaccagtattcggcctttacaggtgaagacactgaaggccggactttactcactgaccatggttacaagggt

SEQ ID NO: 439395 - DNA, 122 bp, Homo sapiens
cctccttctcgccgtcccagtaggcgggggtggccggggctgcggagggggcgcggtcagcggcgcgcgggccggggcggcggtcgagggtcgaggggcgggagctggggggcgggggggaa

SEQ ID NO: 439396 - DNA, 122 bp, Homo sapiens
tcctctcctctactcaggtgtaggctgtccctgcctagttggtctgacagtagctccctgcgacttctcatatcacctccgactccccagcctcacctccacgggccctgatgcactggctt

SEQ ID NO: 439397 - DNA, 122 bp, Homo sapiens
atgcccatgcagcggtcggcatgctgatatgatctaaggtgagggcccagccaggtcagccgggagaaagtgaacacaggaagggcacacccaggaccccagggccccagaactcaggtgag

SEQ ID NO: 439398 - DNA, 122 bp, Homo sapiens
ccccggatctgaaacactggcccccgtcttatccacccaccactccttaagacatccaggcgtggaagggaagattcaggaaggttcaggaattctaccgactttggagcatgctctcccct

SEQ ID NO: 439399 - DNA, 122 bp, Homo sapiens
ccaccacgcccggctattttttttttttttttcatttttagtagagacagggtttcactgcgttagccaggataaaataaattttcaacatactgataagaaaatagaggagtttgaggctg

SEQ ID NO: 439400 - DNA, 122 bp, Homo sapiens
agtattcctcctgtagcctggctctttcttgcatcctggcacccacaggttcccaaggcgcggtggagggacactcgtaaaaggtctcgctgtgatcactgtctccagcctgctgaagctca

SEQ ID NO: 439401 - DNA, 122 bp, Homo sapiens
ggtttctgctcagcagctctacctgctggcagtgttgggcaaaagcaagggaggaagagacgacatcatttatcagatgaggggaagcatctctgaggctccagtcagcatccttagcttaa

SEQ ID NO: 439402 - DNA, 122 bp, Homo sapiens
tgcagacacagcccagagacaagcttcaaaaggacagctctgcctgggccctcagagacgcgcagctgcgtcagcgtggactctgggtggtgccggattgtggataatttgagggaatgcac

SEQ ID NO: 439403 - DNA, 122 bp, Homo sapiens
acagttcagtccacaacaacccccatccctaaatttacttagctttaaaacagatacaaccggcaagacaacacaacatgaagtgattagctgacaatgtggtgcagcctctggatgcttaa

SEQ ID NO: 439404 - DNA, 122 bp, Homo sapiens
gatttccccactgggaccattcaccacgactcccagatctctttcttccccttacctgagcggatttgttgcagggtccagactgcaagaacctagcgatcaggtaatacagctctggggaa

SEQ ID NO: 439405 - DNA, 122 bp, Homo sapiens
ggctccggctccggctccagctcgggtggcggtggcgggagcgggaccaggtggaggcggcggcggcagaggagtgggagcagcggccctagcggcttgcggggggacatgcggaccgacgg

SEQ ID NO: 439406 - DNA, 122 bp, Homo sapiens
tttgctcagagtcatcagcaagcaccgagctgcttcctgttaagcctttatggaaaacctcggagcttccgggagatccgtcccctgtgcggctcttccctgcactctctctcatccagttc

SEQ ID NO: 439407 - DNA, 122 bp, Homo sapiens
cttaggattcgtgcctgcgtcttcaccaggaccgatgccgcccagcccctccggctctcccggctcaccccaaggacatgggacggggtctggaggcactcatggtcatgacaaggggtgac

SEQ ID NO: 439408 - DNA, 122 bp, Homo sapiens
tctcaaatatctggtgatgctcgcaaatatctggttctctccttccaggcacatagaatacggcacagtctggtcctttggggcttgggcagggccgtgacacaggttctggccaatgattt

SEQ ID NO: 439409 - DNA, 122 bp, Homo sapiens
ttgattgtcaccttcctttagattgatttcctgtgacataatacctcacccctgccagtccgttcagcctgcctgcctccctgactctctccctccctgcctccctccctctctgtgcagct

SEQ ID NO: 439410 - DNA, 122 bp, Homo sapiens
cactgtagtctaggggtccagatgtttacccgaaggtatatttcacttgctgtgagctgacgagttgagggaataatcagaaagagagctccctctggaagtcgcagtcctgatgaggctaa

SEQ ID NO: 439411 - DNA, 122 bp, Homo sapiens
cctcattgggtcctgtttgggccattacaataatgtctaactggtgttatatgcattttccgctgctgccaaatcatcttttaaaactcacatcactccgacttaaaacacttcagtggttc

SEQ ID NO: 439412 - DNA, 122 bp, Homo sapiens
agttagacaagagaaactcatttacatgaaccgtacacacttaccctgaaggtaaccggacgagctacaccagcaaaagaaaattcttcctgtctgagaagtactaatatagcacaaggtgc

SEQ ID NO: 439413 - DNA, 122 bp, Homo sapiens
ctctggtggaacctgcagcgctttccttcctttctttaccgaaaagaagtctttcttgtacgtgcgtgagaatcagcagagcctgcactcctgttgaatgaaatgcaagtgcaatttgagtt

SEQ ID NO: 439414 - DNA, 122 bp, Homo sapiens
cagaaagctgaggaggcgtctggagtttttgggtgttaatgattctgcctgcccacaggtcgggtcttggggtctggagcgtttgggaaggtggttgaaggaacagcctatggattaagccg

SEQ ID NO: 439415 - DNA, 122 bp, Homo sapiens
aatcccccatatggtttaaatgtaatttgtgtcattgtgaaggagtactggcaatgcaggcgaattcattaggccaaattgggttcgctatgctcgacagtaacgtttctgaagatgaagtt

SEQ ID NO: 439416 - DNA, 122 bp, Homo sapiens
aaggcctgggtatttttagaaagagcaataattagtgtaaaatgtcacagaaatataatacgtttagattcatgtcagacaaaagttatttccaggaagcttctcaaagacaagaaaaggga

SEQ ID NO: 439417 - DNA, 122 bp, Homo sapiens
tacagggtaaccttgagaaagttacttaaacttgtcagctcggacgggcgtggtggctcacgcctgtaatcccagcacattgggaggccgaggtggacggatcacgaggtcagatcgagacc

SEQ ID NO: 439418 - DNA, 122 bp, Homo sapiens
cccaccgccgctctcgggggccgacttccgggggctgagccgttgaagcggaggctggggcggggggcagccggcgcggccggggcaggaggcgcaggtaagggagggggcctggagcttgg

SEQ ID NO: 439419 - DNA, 122 bp, Homo sapiens
tcaaactcttgtcaccgatgcattttcatctaattttttccataatgagagagaaggagacgcgttggtgactgcaatagggccacctccctcaaattacgttgctctctatgacccatcct

SEQ ID NO: 439420 - DNA, 122 bp, Homo sapiens
cacaggtcctggtattggaaagaggcagaggtacctcggaagcatgccatagaggttagacgggacctaagagggcatctggtccaaccggattcgtgttaccagcgagtaaactgaggcca

SEQ ID NO: 439421 - DNA, 122 bp, Homo sapiens
gagcaggctgcaatcgccatctgaataattctctgggattgagtttcttcctgaatgactcgattcacactggatgagaaactgtctctctccactaggaagtggaataaaacaactgactc

SEQ ID NO: 439422 - DNA, 122 bp, Homo sapiens
aaaacatttaggactatttaccgtatgccagtgctaggctctgagaatataaaaatgaaccgatacttactctttaggatagtggctcctgagggagacagatgtggcacaaatatttcaat

SEQ ID NO: 439423 - DNA, 122 bp, Homo sapiens
gcacaggcgccaatgccgagggctgaatgcgcaggcgcggaccggggactcgggagaaggcgcatgcgtggtcttgagggcggtgcttccggtcaaagcaccgcttgggggcggggcctgcg

SEQ ID NO: 439424 - DNA, 122 bp, Homo sapiens
gtaggtgatgtgtggagtggtgatggtgtatgtgaaaacccttggcttcctttacatgatcgtagtctgaaagatggagactacatggagaatgtctcaagaaaattcctcctttcacactc

SEQ ID NO: 439425 - DNA, 122 bp, Homo sapiens
atctttccaactgtggttctgctcacatgcttgagatgtcacccttattggttctctgggcgacggcctccaccaaatgggagctgacgggcagttggtggggcgggaagacgccaagaggc

SEQ ID NO: 439426 - DNA, 122 bp, Homo sapiens
tttttttatttccaggagagcaaataaagtaatgccttacctttagttccagaactattacgttgatattgctgattaagtccctgggtcttaagtgaaagtttttgctttgagctaaattt

SEQ ID NO: 439427 - DNA, 122 bp, Homo sapiens
ttctccacgatcggccacctcgcccaatctcacaggatagttacaggctgagttcggcagcgggacccagtttcctcctgagagaggtccaggtaaaggtttacggttgccacaggtcagtc

SEQ ID NO: 439428 - DNA, 122 bp, Homo sapiens
tggaaatagcgtcaaccaagatatgtcaaaagctagcacagctcacgtttgaaaacacaacgctgatgggtaccctgctcatcgtggaaagagctagacgcgattttccaggctgcgatttg

SEQ ID NO: 439429 - DNA, 122 bp, Homo sapiens
ggagagttcccattgaaattcattcgggagcctgttaacagctgttgtttccagtagggacgggcaacagagagaacaataaataactcaaatataaaatgcctttaccttctttgttctac

SEQ ID NO: 439430 - DNA, 122 bp, Homo sapiens
gcagcttagagggcaaaacaggatgcgcctctgctgtgaccaactgaccttcgcaggcaccgggccccgcaacttcctgttctcttagccttgaacttgaagccagggacagggacagaggt

SEQ ID NO: 439431 - DNA, 122 bp, Homo sapiens
gtattcctgttggtctcccagggacagactggtcttacttcagccagcagggcctccagccgccgccggagggcagcattctctcggcggagctgctggttgtcagccagtactgcttgcag

SEQ ID NO: 439432 - DNA, 122 bp, Homo sapiens
gtggccccgcagagcagggccggtgatggcgcgggccgggccggaccacgaggagcagaacgtgcgcgtgacgcgagcgggctggtgacgtcaccaggcacccggggcgatgacgcaagcct

SEQ ID NO: 439433 - DNA, 122 bp, Homo sapiens
aaacttggttgaaggccaggtgcagtggctcatgcctgtaatcctagcactttgggaggccgaggtgggcaaatcacctaagaggtcaggagttagattgcagcctggccaacatggtgaaa

SEQ ID NO: 439434 - DNA, 122 bp, Homo sapiens
tcctaaatcccgcgcggggagcgggctgtcagcggcgccagcggtgtgtggcggacccggcggcctctggtgaccacagcctggcgcccgcagcctgtaatggcacagcggccttcctgagc

SEQ ID NO: 439435 - DNA, 122 bp, Homo sapiens
atctcttcattggctatatatagcattatgcccagtaatttcaattagatgagaattcagcgtctgaaagttaagacctcagttgcttttccttctagcattttaaatcactggattaaaaa

SEQ ID NO: 439436 - DNA, 122 bp, Homo sapiens
cccgctcccgccacggggcatgggaggcaggtagcccagcctgcgccaggacacccgtggcgggcggaacccgccaaggaccgcgaagtccagagaaaggaagctgaggagctgcccgcccg

SEQ ID NO: 439437 - DNA, 122 bp, Homo sapiens
ccctgaaccgtcctgactccagccaccagccggtgtttggtggatcaggtcccggagctccgcagcctgggagccccacaccaggccggcccctacggccgctcagaaaacgcggcgagcgg

SEQ ID NO: 439438 - DNA, 122 bp, Homo sapiens
gttaggggaagacagtaatttatcattcatggaccagtagattgttgaaagttggtgaatcggattataagcttctagctaacacaaggattcagaattaggtaaacatctgaaggtttagt

SEQ ID NO: 439439 - DNA, 122 bp, Homo sapiens
ttctttcgagaagacttcctggttcaccataccaccattcttatactggcgcgtgcgtgccgtgcacacgtacacacacgcgcgcacacacacacacccctttctcccttaccctgcttcac

SEQ ID NO: 439440 - DNA, 122 bp, Homo sapiens
tggcaaacagatgtgacttggcaaaaaagaaagcagaaatcaccaggaagtggaggctgccgccagcagggcatttgaatgcacagccaaatgggcgtgatctctggtccacccaagacaga

SEQ ID NO: 439441 - DNA, 122 bp, Homo sapiens
cactgccctgagctgcttcttcacacactggtatttgtatctgtggtaaacccagtgacacgggggagatgacatacaaaaagggcaggacctgagaaagattaagctgcaggctccctgcc

SEQ ID NO: 439442 - DNA, 122 bp, Homo sapiens
tgtttcttattgattgcttggttgaggcgaaggagggaaattagttttatacccttaatgcgaaaagggcttagagctgctagagcttttgcctttagccagcaatgagtagctgacgtgct

SEQ ID NO: 439443 - DNA, 122 bp, Homo sapiens
tgtcacccagcggccctggcgcgggcagggagggggaccctcggcccgcggatccccctccgctcttcagcctgaagcgacgaggagaccagaaatgtcaatagttctgatttttaaaaatc

SEQ ID NO: 439444 - DNA, 122 bp, Homo sapiens
atttaaaagtgaaagaaagtaaccaattggttcgcagacaaccttttcccaaaaggcgggcgattcaaacccctagccccacctgctccgtttcccgcccagctggagctctggagcctttg

SEQ ID NO: 439445 - DNA, 122 bp, Homo sapiens
caataccagagcgggcacaattctcacggaaatccagtggatagattggagacctgtgcgcgcttgtacttgtcaacagttatggactggagtgttatgttttcgtattttgaaagcagaaa

SEQ ID NO: 439446 - DNA, 122 bp, Homo sapiens
ccaggtggctgcccttccaagtcccacactcttgtcctgatggcctccgaccccgggcctcgagcccaaccaaaggcaccgaaggagagaaaagccaactcactagggtgccctctccagcc

SEQ ID NO: 439447 - DNA, 122 bp, Homo sapiens
ctgggcggagttgctcgcagcttccctcacctctccgccctgcccccgcgcgttgcccttcgccagtgcctccctggtctgcccggcgtcgccctcggtgccccaggcatcggctgctcctt

SEQ ID NO: 439448 - DNA, 122 bp, Homo sapiens
cccatttccaattgccctgagacaagcagaatttccagaataatcttactgctttgaattcgactcaagagggagcctagagatagtgcagagctggggataaagatgggacattgtttcct

SEQ ID NO: 439449 - DNA, 122 bp, Homo sapiens
agttcttttaaaacacaccacaagtccaagagagctttaaaatgagtggccatggacgggcgtggtggctcatgcctgtaatgccagcactttgggaggctgaggtggatagatcactaggt

SEQ ID NO: 439450 - DNA, 122 bp, Homo sapiens
atccatggaccaggaaggacactgctgatgaagacccggtgagccaaacagacctgttcccgctgctggcggccgcgctgctccgaggccgcctgctgctccagcagctcccgcagctgctc

SEQ ID NO: 439451 - DNA, 122 bp, Homo sapiens
gctgcgtggttccatttctgggtcacatggaagcgggggagctgtgggcacagagatgagcggttcttacagaggcctggggtctttgaaggagtttgaagtgtgagctcgctgttttggct

SEQ ID NO: 439452 - DNA, 122 bp, Homo sapiens
ccaccccccgcccgctcccagcaatctgccgggaatcggcttctctccccaacccgaccccgggatccccaggtccagaccaccccaccggacacagctgccgggggcccgggacaagccca

SEQ ID NO: 439453 - DNA, 122 bp, Homo sapiens
agtcacgggtgaaaggtacgtgagggagcccatatgtgcttgattctgccacatgggtgacggcccaggtgtctgcacaccaggtcagatccccatggtggcaggtgtgtggtgttcctggg

SEQ ID NO: 439454 - DNA, 122 bp, Homo sapiens
gggatggccgctgcacctgtaggtcaaggcaggtccacagactacaaacgtctcttgacgcgtgcttagtcaaagcttaaaacaggaagtggtatgtgaagctgagtgtttaagcataaaca

SEQ ID NO: 439455 - DNA, 122 bp, Homo sapiens
gtgcagatccactgcagtgccccacctttaaccatgcaaattaggaaaaatacctagggtcgaggaaagaaaccagtgaatgcagaaggggcaggattggaaaacaaaacaaaacaaaacaa

SEQ ID NO: 439456 - DNA, 122 bp, Homo sapiens
gattgttgcaccaacaacaagagctttaaccgttgacgtcccttcctgctcaagaaacaccgtatgtcccgaaaggagcgatttaagctctcaaaatgatttattggtaaaaagcaaagcaa

SEQ ID NO: 439457 - DNA, 122 bp, Homo sapiens
gcagggggcgcgtggagagacacagagaaggggctgttcagctgggagtcctgcgtttgtcgtttctgtttcatctggcgtttttgaaaccaggtttttgtctagacgtccgagagctgcat

SEQ ID NO: 439458 - DNA, 122 bp, Homo sapiens
ccgcacgtactcgtcgtcctccgtgatgagaacattctccctgttgttctggatggcttgcgtggtccagttgagcgagccagtgatgagcaccctcttgtccacgatggcaaacttgtgat

SEQ ID NO: 439459 - DNA, 122 bp, Homo sapiens
ccacaacgatgctggatctggcatggtgggtagggggcagggcgacctgagcttggacctcgctgtgcccagcagcaatgactggaccccagggactctcaggtgtgatgtcacaaaaggcc

SEQ ID NO: 439460 - DNA, 122 bp, Homo sapiens
gatgggagtcccatcggtgaggggtctgggagggatgtgcacatgcctgtcaagcccgtccgggcaaggggctaggggctaataaggtgcgaaggagggggctgtaacggaaggaggaaggg

SEQ ID NO: 439461 - DNA, 122 bp, Homo sapiens
tccccgggcgggtccccacctggcctgtggcgtgactgtgagtcaggggtctggatcctccgaggcccgcaggatccgggtggatgggccacgtctctgcacgtgcagcctctcctgggtcc

SEQ ID NO: 439462 - DNA, 122 bp, Homo sapiens
cctgcaaaggagccagtgctaggccctgcacatgacaggcagaactcaaaacgtgcccctcgcttcctactcctggcttcctagaacaatcccatatgcatacatggaggtcctgtgtccat

SEQ ID NO: 439463 - DNA, 122 bp, Homo sapiens
tacagactgcaaatagagaagacattgttgtgcatttacaaccctggacagtaattcttacggccattggaagtgtaagaccatcgagtgataagccaaaaacaaaaaaaacaaaaaaaaaa

SEQ ID NO: 439464 - DNA, 122 bp, Homo sapiens
gacacaacaacgttcatggcatgcactgtcaggaaagccggaaagaacccaaatgcctgtcggtagcgaagcgggtaaatcatggtctgttggtcaagggaagctgttggcacagtggccac

SEQ ID NO: 439465 - DNA, 122 bp, Homo sapiens
aggcagggtcatctgggacacctggcagggcctttcccaacagaggtgatggggagtttccgaggcctgttgtttaaaggcaataaagactggtgtggatgtctcagcagcacgctggctgc

SEQ ID NO: 439466 - DNA, 122 bp, Homo sapiens
gtgcagtattcttttagtcctgtttctcataaatgttacccaaattgaggcgccgctctgcgcccggcaccgggggaggcggagggacccgcaggtgtcgggtaggtgcggccgccccgcca

SEQ ID NO: 439467 - DNA, 122 bp, Homo sapiens
tgcttggctggtgggggtgggggcctggagggcccctcaagaacctcctgctttgcctctcgtcactccagccccggccccggccccagcaccagccagacatcagaagcgaggagactggt

SEQ ID NO: 439468 - DNA, 122 bp, Homo sapiens
gtccaggaagtgactagtgaagtggaggtggaagattcagtcatgtcccttaatagtgttcgcttcagcaggaatgcatttgtataaaaggttgtagaagtaagggtgtgcagacagtactg

SEQ ID NO: 439469 - DNA, 122 bp, Homo sapiens
gatgtgctacctgtgctctccatgaagcacaccaaggaccgcgtggggcagaatctaccccgctgtggcattgagtgcaaaagctaccaagagggcctggcccggctaccagagatgaagcc

SEQ ID NO: 439470 - DNA, 122 bp, Homo sapiens
ctgtggcgactccggatctccacagccccagcgcctgcagagggtcagtgggtaggggggcgacgttaatctcagctcctctaagcccctggccctgcctgaaccctccccatcagctctgc

SEQ ID NO: 439471 - DNA, 122 bp, Homo sapiens
aagcctccgtacaaaaccgattgtgttcactgcaaacaagacaccctcttttgggcaacccgctttctcagcatgaagaagctttttatctcccttttcttctttttctattaaactttcca

SEQ ID NO: 439472 - DNA, 122 bp, Homo sapiens
cttcacctggtcaagttcacattcttcagtcccccgttttcttaaaactcaaatgagacccgattagacaataacaggaatggaaaagcctctcgtgaagatactctcatgaactgctctca

SEQ ID NO: 439473 - DNA, 122 bp, Homo sapiens
atactttaaacctcggatagtaccaaatgtgattgctgtcagtaggaacacatttgtcttcgtgtcttccacacacaaatgtaataccttttttatcttaactaagcacttaccgcacacag

SEQ ID NO: 439474 - DNA, 122 bp, Homo sapiens
caagccagagatctccccgtgggtcagcactgctcagagccagctacacagtcaggaaggcggaagtgagcagctgggataagctgatgtttacctggaaatcaaccctttggggggaccct

SEQ ID NO: 439475 - DNA, 122 bp, Homo sapiens
accgccccggctaggcttaaagagcaggcggggcagagacccatacctttggcgctgagtcgaggccaggaaggggcggtcgatgagagggcggccttagcattaggagtgcgtcggctgca

SEQ ID NO: 439476 - DNA, 122 bp, Homo sapiens
tttgccttcacctgcacaggaagggtgcacggaaacacgtcatttagaacatcccgggcccgaacatcgcgggccctaacatccaggtatccgtgccacttctccgtaccggtccaaggagg

SEQ ID NO: 439477 - DNA, 122 bp, Homo sapiens
aaatgcaggagacccttgcttccaacaagacaatcaaataacattttcaagagaaacaaacgctaacctttctttctatttgatttcatcctttctcttcttttctttgaaatgatccattt

SEQ ID NO: 439478 - DNA, 122 bp, Homo sapiens
gctttctgtttgtcactgctgttgaaccgaaacaaagctttcaaaggaaatacgtggtaccgtatggatttcagggctacaatgccattttgcaaaatgcttttttatcctcctctctccct

SEQ ID NO: 439479 - DNA, 122 bp, Homo sapiens
aatatcatcctctccgcctgaacctaagaaacaatatctcaggaacatgtacaccccctgcgatattggaagtaacatcattttctccccctccggatattcggaacaatatcacagtgggt

SEQ ID NO: 439480 - DNA, 122 bp, Homo sapiens
ctccttctctgtgccgagcctcttggtataggcggcttcccggaagcactccatgcacaccgccgtcagcttcaccacgctctcggccagcggcaccaggttcaggatggccccaaatggct

SEQ ID NO: 439481 - DNA, 122 bp, Homo sapiens
agaccttgattcttcccggaatcagtgccattccatggtgctcaatgacgtggttgactacgctacgcttattcagtagacaccgtgacctgcttcttctcagcgtcaaatgcagcctagaa

SEQ ID NO: 439482 - DNA, 122 bp, Homo sapiens
actacggagactttaattacccagggactgtgaagtggggaagagctgtctgtggaggagcgccacaccatgtcttagattcaggcaggccccggattctggtgacccattactctacggtc

SEQ ID NO: 439483 - DNA, 122 bp, Homo sapiens
ttcagctcttttgctggtacttaaggagttcttgggtcactctgcaggaacactggagcccggcggccccactctctttattggcagctctggcgtccttccatcacccactgcggcgtctt

SEQ ID NO: 439484 - DNA, 122 bp, Homo sapiens
agaggaagcgcatggatcgcatgatggtggagcacctgctgcgttgcggctactacaacacggctgtcaagctggcgcgccagagcggcatcgaggtgggtgcccgccagacgcaggcacag

SEQ ID NO: 439485 - DNA, 122 bp, Homo sapiens
tcactttattgtgttttctcccactgtttttggcttccctgcattgtcctgcctggcacacgccccagccatgttctctgtggcctatcaccgtgatgtcctcctgttttgggcatctgctt

SEQ ID NO: 439486 - DNA, 122 bp, Homo sapiens
tgaggggagaaatcaggaaatagttcctttaatattcgaaggccaggagccacgaatgaacgacccagacagtaacgggtaggacctgctgcccatggccccgcgcagcccactgtcctctt

SEQ ID NO: 439487 - DNA, 122 bp, Homo sapiens
ttccagccactccaagggtcctgaactccaatatctgtctctccaattcagcaagactgccgtgctctattcgagcgcactctacctatgccacaatccgcaaagtgccttcaggcaggtga

SEQ ID NO: 439488 - DNA, 122 bp, Homo sapiens
ttaggcactgccacttgtcatgatgttcttcctgcagtgagagctgggacatttggctcccgggaagcttggttccttacttccatttgaatttcatttgttctctggaacccttgccagcc

SEQ ID NO: 439489 - DNA, 122 bp, Homo sapiens
gtctcccggagggccagagtcggtgagcgctttttacctttcccagagatggatgcagagcgtgtgcgggctgctaaacgggggggagtgggcgggagttttctgtgtcgggtcctggattc

SEQ ID NO: 439490 - DNA, 122 bp, Homo sapiens
ccccgagccttcagagtgaggcattattttctcctctctcttgtcagatactgactcccacgcaggaaaaaggaagcaccttttgtcagatgctgtggccacttcctcttcagaaggctcca

SEQ ID NO: 439491 - DNA, 122 bp, Homo sapiens
tggtgccttgactgtgaccttttcacagtcactctggtgaacaacgacggggcctgctgccggggccttgcttgtctaggctgtgcatgtccaagccaagcccctccctccctgctgccccc

SEQ ID NO: 439492 - DNA, 122 bp, Homo sapiens
tgccaatcggcgtgtaatcctgtaggaatttctcccgggtttatctgggagtcacactgccgcctcctctccccagtcgcccaggggagcccggagaagcaggctcaggagggagggagcca

SEQ ID NO: 439493 - DNA, 122 bp, Homo sapiens
tgtggccaggctgtaggttgccgaagtcaaagaggaccatgtaggctgtaatgtaattgacgagcaaggcagcagcttcctcaaaggtcatggcctcaggaatcaggaaggtctggaccgag

SEQ ID NO: 439494 - DNA, 122 bp, Homo sapiens
agatttgaagcctttgtaaaaaggaacatcctctcccatcctgggcgtgctgccgggtatcgcagacggcccacgcccacactgcagaggccggcaccgagcccccgctccgccctctcttc

SEQ ID NO: 439495 - DNA, 122 bp, Homo sapiens
aatgcaacttaaaactagacacgattttcttcctttagaatggtatccattcccaaaagtcgtattctggcaatggttttaaaagtgtaatctggtggaaggtgatatgtatcaaagccttg

SEQ ID NO: 439496 - DNA, 122 bp, Homo sapiens
tcctcttgcacagaaaagctgattttaatcgttgtgattagttttgatgtaacgtttccgcgggcgatttctgcaaatggatggagtgtttctttgccaaaagagggaaaagcagcagatga

SEQ ID NO: 439497 - DNA, 122 bp, Homo sapiens
ctcattgcattccatctcctgctgttccttgagttccgtcaggtttgaggccaagaccagcgcagctgatctgtgcagtttggcaaagccttgcagccactgcaccctgcggttttgtaact

SEQ ID NO: 439498 - DNA, 122 bp, Homo sapiens
ttgcacgctcgggtgcagcccgggctgggggagtaggctcccccaggaattccagagccacggggggtgggaggagaaggaagccgtcgcagcgggggtgggaggaaggagaggggaggagg

SEQ ID NO: 439499 - DNA, 122 bp, Homo sapiens
taaagaaaacgcggcccaaatatgctgggaggagaagccagtggatctaggaggggccggcgttgccggctctgtctctgggctgacaacctggtttcagtattggtaagtgggtcaacccc

SEQ ID NO: 439500 - DNA, 122 bp, Homo sapiens
ccttcatgatgatttcactgtggaaataaaggttgggatgaaaggaaatcatcctgccaccggtaaccgggatggctgtgttcctccacctgccggatcaaggagaaagaggatggattcaa

SEQ ID NO: 439501 - DNA, 122 bp, Homo sapiens
tgcgttttcttcgcaggaagggtgagcctggcactcttctaattagaccttgccccagagcgcggggagcttgaattgagcgggagtttgccaagaaacacacaataccattagtaggatct

SEQ ID NO: 439502 - DNA, 122 bp, Homo sapiens
ggatgtccatttcgaagaaattggcctgtaatttgattgttctcccggaggtcccaaagtcgggtctaggtggaggcttgaaggcatatccttggatggggggcggcggcgcaggaggtgca

SEQ ID NO: 439503 - DNA, 122 bp, Homo sapiens
ccggtgggaatgcgcggccggcgcccgcaccccatttataggaagcccaggctgcaagagcgccaggattgcaaaaggtccaaagggcgcctcccgggcctgacctgtttgcttttctacac

SEQ ID NO: 439504 - DNA, 122 bp, Homo sapiens
actgctaacttaaatttgtttagtgtacactagcgcaagaatataaactttctgggtacccggggggtgtagtcttagaggaccccaaagcttttatgggatttacctctagacatctcacg

SEQ ID NO: 439505 - DNA, 122 bp, Homo sapiens
ctccttgcaccagactaaatctgtattatgtgatattgattcttccttctaaatattacccgttatctctttcctttatttctaccattatctttatctggctcagaattattgtcataggc

SEQ ID NO: 439506 - DNA, 122 bp, Homo sapiens
tctcttctcagtctaaatttacatgccctttgctcgcctacgcttttctagaccccaaatcggacctaatccttctcaagtctccccttactgtgcccattcctaagagccttagggcccac

SEQ ID NO: 439507 - DNA, 122 bp, Homo sapiens
tccatccaatccagcggttccacttctgagcgtgtgcccaaaagaactgaaagcggggtccggggtacactcgtgtcatagcagcattattcattataactcaaatctggaagcagtttggg

SEQ ID NO: 439508 - DNA, 122 bp, Homo sapiens
gacccctactgtgctgggctgaacattatctgtggttttgcaagtcggctttcctggccccgcctctcctttctggctgccacccaccttcaccccagcccctatccctccactttcctctg

SEQ ID NO: 439509 - DNA, 122 bp, Homo sapiens
gaaatagccaggccacgcggctgacagtgtagcgtgcacagtgggcgccctgcagggctgcgtggcagaacagttgagcaccttatccgatctgaactgctgactctgtcctgaggaaacta

SEQ ID NO: 439510 - DNA, 122 bp, Homo sapiens
gaggggaagctggctggggagtctcaggtgggtgtggccctctgactgctccagctgtggcgtctctgcagagccacatgactgagggtgtggagcgtgaaccaccatggctggtgagcccc

SEQ ID NO: 439511 - DNA, 122 bp, Homo sapiens
gtcacaccgcatgtgactaaaccaagtgaaacctaaagcagccacactctccaaagtacgcgctgctgacttatacacaagtgtgctaacaggccccgaagatccgatgcaaacgcgtggag

SEQ ID NO: 439512 - DNA, 122 bp, Homo sapiens
tgggcgacagagacaccccatctcaaaaaaatacaaaaaataaagtggccccggggcccacggtgctgggaattgatgtggtgggagagtaagactcaggctgcctctccgcgttctggggg

SEQ ID NO: 439513 - DNA, 122 bp, Homo sapiens
cactcggccgcctgccgtgcccgtctgcgcccgtgtcatcctcactcgggacgcagggaccgtttttaaatcacaggggcgtgtgtcagcctgccctaggacttcatgtctatatatttccc

SEQ ID NO: 439514 - DNA, 122 bp, Homo sapiens
ccctgtcaccacctcagctctgcccagctggcctttcaaatgcagcagagactgtttccccggccagcccaggagaccccaccaaagcttcttctcagggttcctgggcacgaagggctggg

SEQ ID NO: 439515 - DNA, 122 bp, Homo sapiens
tgctttgggggagaggagggtgaagacaggaatttattcattgagcgaatagttattaagcgcccactctattccagacaccgttctaggcattaggtgaacagcagtgaacaaaacagacg

SEQ ID NO: 439516 - DNA, 122 bp, Homo sapiens
atttgctcctttctctttggcatttcctgttggcttgaacagtgaagaaaaagccaaagtcggacccctacacacggcaagaacctcctgggggctgctgcccactggcccccactacccag

SEQ ID NO: 439517 - DNA, 122 bp, Homo sapiens
ggtaccgtctgcactacaggtgcaaagggcggggaaactgacagcgttactgtcctggggcggacccgcgggactactccctaagacgtttctcctaggtgccttctcctaggtgcttccag

SEQ ID NO: 439518 - DNA, 122 bp, Homo sapiens
gagacctgaggggcggccccgacgccctccagggctgagtacctacactcacacacacggcggcatttcctcacggtaaaacacgctcataacatcagccctgtaaagctgcaggccattaa

SEQ ID NO: 439519 - DNA, 122 bp, Homo sapiens
atttcctccctaagtatctaagacttaagggaagggaccaagggaagacttcacaggatccgaaaacagcaacttgtgtagatcagccgggagaggagctgggagtacagtcataacaagga

SEQ ID NO: 439520 - DNA, 122 bp, Homo sapiens
tcattctaatgacccatttcttcactctgcctcttaagaatatcaaatgtgggccaggcgcggtggctcacacctgtaatcccagcactctgggaggctgaggcaggaggatcacgagctca

SEQ ID NO: 439521 - DNA, 122 bp, Homo sapiens
gctctctgttcaattccctcaaggcagggatggatgactggcaaagttatccaagtgttacgtgagagaaagagaactatttcttttgtctgagtcctttgtctatctttttcttttcaagt

SEQ ID NO: 439522 - DNA, 122 bp, Homo sapiens
tccggagcgcgggcgccgcgccacgctgtcgagggcaccgtaaatgacgaggagagagggcgaagccaaacactggagaggaaaagttgagctcgtctccccggggagagccgggcaggttc

SEQ ID NO: 439523 - DNA, 122 bp, Homo sapiens
attttcggggaatcccggtaagggacagtcctgactcccgtcaggaggatgggacccacgcgtaaaatatcaggggttggattatcatgggtcaagaaatgaccaaagaacagaaagtgttt

SEQ ID NO: 439524 - DNA, 122 bp, Homo sapiens
tatatatatatatatatatatatacatgtttcatatgcacgcattgtcatatatagcccacggtatatatatgtttcatatgcacacattgtcatatatagcccacggctatattattatgc

SEQ ID NO: 439525 - DNA, 122 bp, Homo sapiens
acaccccactgggataagcaatgtcatctgctctattccatgtgcaagaagcatgacctccggtgtaggccaccaggcacactcatatccctggcacctagctcagtgccccttcattgtta

SEQ ID NO: 439526 - DNA, 122 bp, Homo sapiens
aggcttttctggggactcccttgccttcaagacctctaaggaaggagccgcttgacaaaccgagggcgatcagccccacagaccccatcagattcatgatcaccgacttccactctttgcct

SEQ ID NO: 439527 - DNA, 122 bp, Homo sapiens
tgatattatgaggccatcttgacctagccctctctggtgaagagtccttttcagatacttcgttcagtcttctcagctatgagtccctaccctctgaaagcttatattctatttggggaaag

SEQ ID NO: 439528 - DNA, 122 bp, Homo sapiens
tatgtttcccggaactctcttccagtaagatgggccacaagagacattttgcttgataaccggagggcggaagtgaagcagcagcacattgtttttacacttggaaggttggtgctggggca

SEQ ID NO: 439529 - DNA, 122 bp, Homo sapiens
cagtgaatcaacagcttagaaaacagctgtgtttccaaaatatgttggcagcagtctatacgtgttctcagtgatgtaataggagtcaggcactcacagaagctgacattatccataatgac

SEQ ID NO: 439530 - DNA, 122 bp, Homo sapiens
ccagcatgcggcggatcaggctctcacagtctgtggaggggccaggaggctgagccagggcggccgggacctcggctgcgctcccacccaccgccccacgtggtttgacacgccagggccca

SEQ ID NO: 439531 - DNA, 122 bp, Homo sapiens
ctcttcgagaatcacgagcaaagcacaaaagatgctaaaagaggggatattagagacgtacggcacaggaaagagactcgtcctaaggatgggggagagtttgcaagaagaagctagaatga

SEQ ID NO: 439532 - DNA, 122 bp, Homo sapiens
gggacccggggcgtgcgggtgctcacggtgcatggatgcggcctgagctattgctgcccccggctctgcagagcgcaggaaacaaggggaggcggagccctgggctccgggacggcaggtgg

SEQ ID NO: 439533 - DNA, 122 bp, Homo sapiens
cttggccctggcggcctccgccatcagactgggaatgtctctgattgggtggccaggaggcggtggccctcctccccgcccagctgaggggtgtcgtcttccgcgaagttagggtctcacct

SEQ ID NO: 439534 - DNA, 122 bp, Homo sapiens
tggtgcgtgccgctaagttgtgcgttccagggtgcactcgccggcgaggctgcacggcgccggtttcattgctaaaatccgacggacttgttgcagaactcgttttttttgtcgggaaaggg

SEQ ID NO: 439535 - DNA, 122 bp, Homo sapiens
gcgagtgggcctctgctcgtgggtggttctcgtggaggtcagctcccgcgtgtctccgctcgacagggtgcttgggcaggtaagggtccgctcagtagcccaaccctctctgtatgcagctc

SEQ ID NO: 439536 - DNA, 122 bp, Homo sapiens
ggaacacagatgaaccaagggacctgcactaatgctcctggaccgcaaggggaagcgcagcgagggctgttggtctagatttcttgaactttctgagcagcattccttccttctgggcatgg

SEQ ID NO: 439537 - DNA, 122 bp, Homo sapiens
tgggtagcgtcttcgctgttgcccttagggacggctgtgggcctgctgggggtgggggcccgaagcgccagagatggctgctcagcgagggatgcccagctccgccgtgagggtcctggaag

SEQ ID NO: 439538 - DNA, 122 bp, Homo sapiens
agggccccaggcagcccggcttgccatgggcatccagggcatggagctgtgcgccatggccgtggtggtgctgctgttcatcgccgtcctcaagcagttcggcatcctggagcccatatcca

SEQ ID NO: 439539 - DNA, 122 bp, Homo sapiens
tcctggctccgacgtagctcgcagctccccagtctcactccattccttccccacctggcgcgcacctgctcaagaccagggtcctgccaagcgctaggagggcgcgtgccaggggcgctagg

SEQ ID NO: 439540 - DNA, 122 bp, Homo sapiens
tcaagggcagcggtttcatgggtactcgtgtgcacctgtggagcagccctcccgtgtgcacgtgtatgtggctcccagcaggcagaccctgaactcagaggagccagcgcctccagggcggc

SEQ ID NO: 439541 - DNA, 122 bp, Homo sapiens
tattaaaaggaatgtaattaggttgtcatcctggggcctccgagccaggcttccgaacgccgtctttgttgaaagttttccagacgtcaaatatttgcagaaccaggtttaccaaaaaggtt

SEQ ID NO: 439542 - DNA, 122 bp, Homo sapiens
cccgctcctctcccgccgggcgggctcctttgtcttctgggctttcgtcgcgagatggaacgctgggtcagtgcatcccagcaaaacacgttaggagtaaacgaaggcctttccggggacct

SEQ ID NO: 439543 - DNA, 122 bp, Homo sapiens
ggccgtttgccctagagatgtgggtcctgcaccgcctctgtttggccctagagacctccccgggagctgactggggaggagagttggaggctgcagggactgccttctggggctgctgtgtt

SEQ ID NO: 439544 - DNA, 122 bp, Homo sapiens
agggggcggctctggtctccgatggctggagaaagcaagcaccaagcgtaggtagccgcgcgctggagtcgcgcgtttactcttttcccccttacttttaactagaggaggatggcaaaccc

SEQ ID NO: 439545 - DNA, 122 bp, Homo sapiens
atccttcatttagtacagaggaaggcatctacaaaaccgtgtgttgagtgccatgcctgacggtacagaacgatcgcgtcttcgagaaagaacagccaccctggaacggttgtcaaggccca

SEQ ID NO: 439546 - DNA, 122 bp, Homo sapiens
cggggccggactccgccggctgccaagccttaagtagttcggccgctcccgcgccaggcccgccgcccccaccgcccgccacaccggcccacagtgcgcccttgagcggctgtggccccggc

SEQ ID NO: 439547 - DNA, 122 bp, Homo sapiens
ccaggctcagcgtcttgctttcctcctggtagcgcagcagcgaaatgctcttcatgacgtcggctgccaggatgaagttcttgacgctgatcatctggtgtatgtagagctgcgtgtcgatg

SEQ ID NO: 439548 - DNA, 122 bp, Homo sapiens
ctcttcagggcacaggaagtctggtgccccctcggtagcgaggaagcggctgtaggcctccgagccaccctcggccagtgcatccaccgccaggcggtagtactctttgtagtgaggcggca

SEQ ID NO: 439549 - DNA, 122 bp, Homo sapiens
aatgagcggccggaggcaacaaacccaagaagcccacggggccttggagcactcaggccccggcttctcccgcgtcctccccttgggaagagcacgcggcgttgccaggccaaccagtagac

SEQ ID NO: 439550 - DNA, 122 bp, Homo sapiens
ccctggccctgccggcccggctgatacctctcggcctaatgcacctgacaccccgggggacgtctctgcaccttgctgggcccgggggcacccctgggagggagacaccccagtaccctgca

SEQ ID NO: 439551 - DNA, 122 bp, Homo sapiens
gacctccctcagcgtgagagaggccagtgtgagacaggggcccacgctgaactccctcagcgtgagagaggccaatgtgaggcaggggctcacgcctctcgaaagggtgccagaggcatgag

SEQ ID NO: 439552 - DNA, 122 bp, Homo sapiens
ggcctggcacccccagtcgcccgcagtctccttgtggtggcaccggcgtccccgctggagcggctggaggccaagcccaagcatgacagctgctcctggcctgggaaccgcaacaccgggca

SEQ ID NO: 439553 - DNA, 122 bp, Homo sapiens
tgggtgggggtttattttctcttggcatcacgggacagaagaatcgatgcataccctttccggctattcagaccttgcggggtatgaagttttaaagaggggtgggggcaccggcaggtgca

SEQ ID NO: 439554 - DNA, 122 bp, Homo sapiens
atgtcgcaataagaggtcacaggcaagaacactgggggtcccatggggcgcacacaagaccggccagcagagggtcacagtcagtccctctcctggcccagctccccaccacatcccagggc

SEQ ID NO: 439555 - DNA, 122 bp, Homo sapiens
gcaggcgagcagcgcagctctccagctcatggaacctgtgcaggctgctggcgctcaagccgtgcgagagtgagaacaggtactggagcagttgccggcttcgggacgtggcctcaccatcc

SEQ ID NO: 439556 - DNA, 122 bp, Homo sapiens
gaggacagtgagcgtcgcagaaaccacaacatcctggagcgccagcgccgcaacgaccttcggtccagctttctcacgctcagggaccacgtgccggagttggtaaagaatgagaaggccgc

SEQ ID NO: 439557 - DNA, 122 bp, Homo sapiens
aaatgtgggtttctttgcaactgcacaggttgtaggcctatgaagctggttgtaatccttcgtaatccttacaacacttctctgaagtaggaattgccattcttttcattttcaaaatgaag

SEQ ID NO: 439558 - DNA, 122 bp, Homo sapiens
cagaccgcactcagtgcctatgctggtgacaaaagaaacacgcaggcagagttagtcacccgtcaaggggagaagcctccgcgcccagcaaggacgctgcaggaccccctaccccgggtttc

SEQ ID NO: 439559 - DNA, 122 bp, Homo sapiens
gctcgcaggggacgcggcctcgacgtccccagccgccccacccgcgtcaccggtgccaggcggcacttccgtgccccgccgtcgagcccagcccctcccggcgtctcccccggcccccggga

SEQ ID NO: 439560 - DNA, 122 bp, Homo sapiens
tcctccgactgccccgccaaactgcgccttgccccgccagttgatggcctgcccgggctccggtgtctgtctgtctgtctgtgtgctcttccaccggcgtgttccctccgtgtcctctcgcc

SEQ ID NO: 439561 - DNA, 122 bp, Homo sapiens
cttctgtatttttccatagaactaaggtcttaattccttctatcaatcatgtgttttccccgtttgcattgaaggctccctactctgtcctgcagcagcagtccctcctgttggcagggctt

SEQ ID NO: 439562 - DNA, 122 bp, Homo sapiens
ttgaggatcaagcttgaggtgccaagcatgggatgcatttctgaaatatttgagtttaatcgtatatcttgaataccacttattattccagtgagatctgattgatgattaacttattgaac

SEQ ID NO: 439563 - DNA, 122 bp, Homo sapiens
cgggccttctctcgccccactcggcaccgccccgccccgccccgtcccgctccacggacgcgcccggacgctactggttcgcctttgcgcatgtgcaattgccctcgtaccgaactccgcag

SEQ ID NO: 439564 - DNA, 122 bp, Homo sapiens
ttccagataggaagtggggtggtcagcctactcctaaactatatgggatttttatagcctcgtactgctttctcagttgaggcccaggtgatggacatcactggttgcctttctaatagctc

SEQ ID NO: 439565 - DNA, 122 bp, Homo sapiens
gctcccagaatccctttcttagaaaaagcccatccgttgctctgtaagactaaccaagcgcgactttctcctccattgcggaaggaaaccggactgacccattcagcccagcaccaaatcta

SEQ ID NO: 439566 - DNA, 122 bp, Homo sapiens
gtgtttgttttattaaatcaaattatatcacccctctcctgaaaactctccgtggcaggccgggcgtggtggctcacatctgtaatcccagcactttgggaggccaagatgggcagattgct

SEQ ID NO: 439567 - DNA, 122 bp, Homo sapiens
aagcgcgcgccacggccagcccgggaccgcgggggagggcgagggaggcgcgcagccgcacgcacgcagtaggcagccccgccccgcccctcgaggcccaaggtcccgcccctcgaggctcc

SEQ ID NO: 439568 - DNA, 122 bp, Homo sapiens
gcatgtgggggggtccccttgcacgggctcactgggtcctcacagtgacttcctgtggctcgtcacccagcctttctagtgtgacgttacctccctgggcttacagaaagctgtcagagagc

SEQ ID NO: 439569 - DNA, 122 bp, Homo sapiens
ggcccgggcagctgctcctcctgggcccggggccccggacgctcggacaaagccaggcagcgttggcagccccagacccgaccccaaaggcctgagactggggtgactgggacctaagagaa

SEQ ID NO: 439570 - DNA, 122 bp, Homo sapiens
agcacagccgtgtctgcatccatccagaggaggtctgtgtggtgtggggcgggccaggagcgaagagaggccttcctccctttgtgctccccccgccccccggccctataaataggcccagc

SEQ ID NO: 439571 - DNA, 122 bp, Homo sapiens
cagccattttagtaatgcaggtctgtgatttgggggatagaaaacaaagtacctatgaaacgggatatctggattttacttgcagtggcttccaccgatgggccaatcttctcatttcttag

SEQ ID NO: 439572 - DNA, 122 bp, Homo sapiens
accctgtgtccctaggacacatggaaagttgctctattctgctcctacacagtgaaatatcggcagatgtatatgtttggttgttttcatgggacaggatcaattcaattggagctttcctt

SEQ ID NO: 439573 - DNA, 122 bp, Homo sapiens
ccactgcactccagcctaggcaacagagtgagaccctgtctcaaaaatcatcatcatcatcgctacatcaaagagttgtttggagattagatgagctgtcacatagggaaatgctgagcata

SEQ ID NO: 439574 - DNA, 122 bp, Homo sapiens
atttaccagaggcgaacgtcatgagcatagtgatcccattgggggttgatacagcagagacgtcatacttggaaatggctgcaggttcagagtaagtatttaaattggttacataagcaaaa

SEQ ID NO: 439575 - DNA, 122 bp, Homo sapiens
aaatagtcttaacaccccaattaaaatgcagcttgtgagattggattaaaaagcaacccccggccaggtgcagttgttcacgcctgtaaacccagcactttgggaggggtgggtagataact

SEQ ID NO: 439576 - DNA, 122 bp, Homo sapiens
ctcagttatctgtgcttcctccaaagatgatgaaggagagaaactccaatctagggagagcgcagaccatcttggcccctatgctgctccaggccatgcagggcccctgcgacgcaagcatc

SEQ ID NO: 439577 - DNA, 122 bp, Homo sapiens
cattctgcactccttgttcctctctgttgtccctgaaggccgcgtcctggagagcaggcgcgggagagcgcgtagagaggactgcttcctcctcacggctgcctggtgcccatcgcatggcc

SEQ ID NO: 439578 - DNA, 122 bp, Homo sapiens
agtccccagtgccctcccaggtgagtgggtgttggggcaggaggcgcagatggcacctctcgcctccccgaggcttgagaagagggatatgtgtgttcacaaagactaaagtagctgttaga

SEQ ID NO: 439579 - DNA, 122 bp, Homo sapiens
gcaccaccccagggccacattcacttgggactggattcgatacaatttcaaaacgggagtcggaattccttaggaccctctgtggacaaaaagctgatacccctgttaccacaaggattcct

SEQ ID NO: 439580 - DNA, 122 bp, Homo sapiens
actccagggcctcccagccgtgaataatctgatggttcctgaaatgactggggaagcagacgcttcgtatggcagttgaagagtgtgtgtctatgtgcatttaaaaccttctttctgtactt

SEQ ID NO: 439581 - DNA, 122 bp, Homo sapiens
cccagcagcattctccttctcccactggcccgagtcacgagctttgggcctgggctgccgcgggcttctctgagatagacttcggggtaaacagagctgcagctgccagccagccctgactt

SEQ ID NO: 439582 - DNA, 122 bp, Homo sapiens
atctgcttctgaaatgctgctcgctgaggctttgtttgctgctgatcgtagagaacaccacggcagacatctctgtccctgtcttttagtttcattttaatgattgagttgggctgagtccc

SEQ ID NO: 439583 - DNA, 122 bp, Homo sapiens
tccatgaattatcttatttaatcctcataaggaccctatgagataagcgccagctcaccacggtaccccagcttcctggtcaaattgtcctctttccctaaatagtttatgacctctttttt

SEQ ID NO: 439584 - DNA, 122 bp, Homo sapiens
tgtgtattgtttttccagttgagaaggttgacgcaggtgatgggctggtagccaaaagcacgcctctccaccaagtgaccatccttatctatcccagtataccgctgctctctcaggggcat

SEQ ID NO: 439585 - DNA, 122 bp, Homo sapiens
cgcggtccccgcccggcttctgagtgtttgtaaacgtctgacctggggccgtcgcttaaccgtttagttgctgggatggggcggcgttgggggtgcggccctgaaccggagggatttagaga

SEQ ID NO: 439586 - DNA, 122 bp, Homo sapiens
gctgtccacttcagagactgtatatacattggtcattctcccaagaatgctctccagcctcgtaggtatgagccagcccatatcattggcagggtgtgccacacagatgttcttttttgtaa

SEQ ID NO: 439587 - DNA, 122 bp, Homo sapiens
cactctggacactgtctccggctgccgctgagctgggaggctcctttccagcaggccacgcggtcaggggcacctcctgccgcagcacctgcccagccctctggggaccagagtgagcaaag

SEQ ID NO: 439588 - DNA, 122 bp, Homo sapiens
ttgtgctcagtggattgggtggtgtttttagtatggagcagaacagaattcctaggactgcgtgtgatgaaatgcaaggtcaaaaggaaaagacaaagcatatttcaaagatgagaaatatt

SEQ ID NO: 439589 - DNA, 122 bp, Homo sapiens
cataaaaggagaacaaagaatccagcacaaaattgggatgtgaacagctacgagcggtggcgaacccccctcagcatctctgcctgggctagaggtcctaatcccctgggtggggtttgagg

SEQ ID NO: 439590 - DNA, 122 bp, Homo sapiens
aacttgacaggttgaaatgtacatttactattaataataggggcagtctatgcatggatgcgtttttaaataggttacttgaacaaaaaaaatggtaaaatagatcagttaagaggacttaa

SEQ ID NO: 439591 - DNA, 122 bp, Homo sapiens
taactaccattaaaagtagtacaggtgtgcaaaagaaacttatctggctatggctgggcgcggtgctcacgcctgtaatcccagcactttgggaggctgaggcagactgatcatgaggtcag

SEQ ID NO: 439592 - DNA, 122 bp, Homo sapiens
gacaacatcttttcactcagatgtggtatttttatgtatttcaaaaaatagaagttccttcgatgtcagtaaacagtgtttctcgaaaacctgatgttaatggctgtgtgtgtactgtcaga

SEQ ID NO: 439593 - DNA, 122 bp, Homo sapiens
taccccccaagacagcagagaccagcacaacgatcccaaggaaggctgttggcttcaccccgcttaagtcctcaaagtcagcgcctgcagcatatccttgcccccaccacctgcctctagct

SEQ ID NO: 439594 - DNA, 122 bp, Homo sapiens
ggggagggggtggcgtcttcgctcctcaggcgctggcccggcgccaggaagccagtgcgccggggattgtctctgtcaactgcagcccagacccagtccgggaagttctgccaggcgctctc

SEQ ID NO: 439595 - DNA, 122 bp, Homo sapiens
tgctaaaagcaacaacaaaacaatgtcagttcctaaaagccggcaccaggctccctgggtcgggcacaggatctagcacagcgctccaacattgatccacaggaagtgaatgagcaaaggtc

SEQ ID NO: 439596 - DNA, 122 bp, Homo sapiens
acaactgcagcgccgcgggaccgcacgccggcttgcgcgagaccacgctccctcaccgcgcgggcaataagtcccgccccgcacaggccacgccctccgcgcacagcccaagctcgcggcca

SEQ ID NO: 439597 - DNA, 122 bp, Homo sapiens
ttggctccagcgggtagaactctacacgaaaaaataaacatctgcaacatcaaaaacacccggcttcaatctccatcttccctctcaacaccctcctatcatctgagcaaacactccttctt

SEQ ID NO: 439598 - DNA, 122 bp, Homo sapiens
caatgtccaacaaaaaaacaaatccagcgaggccagacaggataggggctccctggggtccgcccattttcgggatcaggtgactcgaggtttggtccttattttagtgcaggctcagatgt

SEQ ID NO: 439599 - DNA, 122 bp, Homo sapiens
gacggggtcagccaccggctcagcctgtgcacgcccacccctcccagcagcacccctctccggcccacctggctggcctgagtctgtggactggcactgcctgatagaactttcagtacctt

SEQ ID NO: 439600 - DNA, 122 bp, Homo sapiens
tgagattcaactgggtaaccgatggaaatggtcagcattagtcagaatctatgaccccttcgtttcatgctttaaattatagctcggcccagaggcctcagtgccgtggtgtgaacgtgctt

SEQ ID NO: 439601 - DNA, 122 bp, Homo sapiens
agtaagaaatttgggttttatgtgttcactcttgggatccctgctcaaggcgggctgacccgtactccaaggagacttccgcactgagcaatgacagtaaaagacccgtctttgagggtgtt

SEQ ID NO: 439602 - DNA, 122 bp, Homo sapiens
cgtcccttggcttccgccgcctggctgccggcagctggaaaggagacgagctcccgctcccgttcgcccccaaactgaggaccgagtggccaccaatgccttccctaggtcccagggtgcag

SEQ ID NO: 439603 - DNA, 122 bp, Homo sapiens
aaagtttaaactgattcttcctctgacagagaaaggcagtttcttaacagatagaaaacacgtgaaactggtggtcggtcacttcccaataagatctcaggagtggggagaaataacacaag

SEQ ID NO: 439604 - DNA, 122 bp, Homo sapiens
acaggtgccgccgtggctgctcgcacaacccctgcagctgcgatcccgcccagttagcctcgggggctgcacagcccagccccctcgcccagggcccaggggttctcaggccgcgcggcgag

SEQ ID NO: 439605 - DNA, 122 bp, Homo sapiens
ctctagtcagggccttgggcaagacattgggctctaggatgcaattggcaaatacgtccccgttactcaaatccttggcactactacaatgccctccattcttcagggctgagaattgacga

SEQ ID NO: 439606 - DNA, 122 bp, Homo sapiens
ataccctaggacgcttatgtaaacttccccctcccgcaggtgcacgcgcgggccacgaaacgctgggagaatatgaaaggccacctcttaaagaaatcatctccactctgcccataacaatg

SEQ ID NO: 439607 - DNA, 122 bp, Homo sapiens
atattttttgttctttttctttttttcttccaaaacaaacaattagagctctaggcccctcgccctccccactcccacccagaaccctcccatataatcgacaactgaaaacaagcgagaca

SEQ ID NO: 439608 - DNA, 122 bp, Homo sapiens
ccccgagcactgccggccaggccgggctcgggggccggagtgagggtgcaggtggggctccgggttctgcttcttgaaggcggcggcggggcgagaaatgcaaccgcgtgggccccgcctgc

SEQ ID NO: 439609 - DNA, 122 bp, Homo sapiens
ctccggccccggcttctgtcctagctgtggctcgctggtctcgagatggctgccttgccccggctgtttcatctgcattccaggcaggaaggtcgagaagggcacgcctgggcttttctttt

SEQ ID NO: 439610 - DNA, 122 bp, Homo sapiens
agccccccctcccaaccccttcctgcccggggcgggggaacgttttcgtttttccgcggacgctccgaatgggggagttgaggtgagcccccacccagcccacttctaccgtgctccgcttt

SEQ ID NO: 439611 - DNA, 122 bp, Homo sapiens
cgccgcagcagcacccggagccccagtcccggtttccccgcggtgccggagcccggagctcgccgccgcccaggcctcaggaatcgagtaagtaacccctgtttggccccgcgctcctctgc

SEQ ID NO: 439612 - DNA, 122 bp, Homo sapiens
cagggccctggagcactggtgaggacgtgaaggcggctgagccacactgcacggtgcaggcggtgctgtctcaactttgtcctctggccagggtggtgggggactcacttgtgtaacgcagg

SEQ ID NO: 439613 - DNA, 122 bp, Homo sapiens
gagtttgccagcgccccccagccaggggtcggggaagaccagtgaggctgggggcggagccgactctgctgccttcctgcccagtggctggggagacccaggctgagcctgggtgaaaagtc

SEQ ID NO: 439614 - DNA, 122 bp, Homo sapiens
atctcagtccgggagtcgacgacttttcgcttctggctagctgctcaagttgagacagtccggctctcagtggggagagaagggctctctgggatctgggtgtcagtaggtcagagagtgaa

SEQ ID NO: 439615 - DNA, 122 bp, Homo sapiens
acctccaccccatccaagaagggctgggaggcgggcagcagactctggggaggggaggtacgaggccagaggcagcttccagcctgggggctggtgaccacagcaccccccagggcagtcct

SEQ ID NO: 439616 - DNA, 122 bp, Homo sapiens
cgtgatccgcccaccttggcctcccaaagtgctgggattacaggcgtgagccaccatgcccggccctattcccactgttatgtagtggtacattgagccccagaggtgaagtaacttatcca

SEQ ID NO: 439617 - DNA, 122 bp, Homo sapiens
ctgaggccgccgcagctctgtggcaacaggaccatggctgggacggcgctcctgcccctccgacctggaggtcactgtttgtgagaggtggacaccttaattttattttctttagttcatca

SEQ ID NO: 439618 - DNA, 122 bp, Homo sapiens
ccgactcggccgacgagctccctcctgagcctcccgggccatctgccgggacggttacctcgttcggtgaagccggtgcattcaccacatcctctgctgctcctagcagggaagccggcggt

SEQ ID NO: 439619 - DNA, 122 bp, Homo sapiens
ctccccaggcaccggccagcacctgcgtttccatgaaaggtcccaccgaccacccacactcgcaacccaagcctggccgggccgtctgcagcatttctcagccaaaatagaaatcaggtgac

SEQ ID NO: 439620 - DNA, 122 bp, Homo sapiens
cgtgggtgccatcccagactctcgctgtaaacgagggagcggggaggagccggccagccccgaggccaggcttggactgggcgtcagaaatgtttctacagggtgacagcccttgagctccc

SEQ ID NO: 439621 - DNA, 122 bp, Homo sapiens
tgatgcacatctaataactctgccatctgtctctgctgctggctagctcccagcattgtacgcagctgcctgagaactcgactcggagaaaggggagggaaaggggagggaagaaaaaaaaa

SEQ ID NO: 439622 - DNA, 122 bp, Homo sapiens
tttaacaagttttcaaagttccccagctgttccaaatgtatacccagaggtgagtcctaccgtattagcccgatcaagtgtcactccagccctggtgagaggtctgctctaacaatgtggga

SEQ ID NO: 439623 - DNA, 122 bp, Homo sapiens
atgacaacacggtgagaagaaagtgatgtcatcatcattcctgcctggactaccaggcctcgtgcatctgaagagctgaccagcctcaagagtcccacaggcaaagcgctcaccgcagagtc

SEQ ID NO: 439624 - DNA, 122 bp, Homo sapiens
ccccacaaacacccttggctttcagatccaactttcttcctcataatatactagtcaccgcgactcccgcctcccggatttgaggatgggggagactttggcggcgggggtcagctgcaaat

SEQ ID NO: 439625 - DNA, 122 bp, Homo sapiens
gcgtcacttcgtttatgggcgccagagggcgccaaagcgaaacggcagcggaagagggcccgtcaggtggaaaaccctataaatgaaaggccctatgcataggtattaaatcagggcttaag

SEQ ID NO: 439626 - DNA, 122 bp, Homo sapiens
aggaggatgagaagggtacgtaggcgaccacaaatatgcctgattgaaaataaaatctggcggcggctcgcctctgacgactcagttcacaggcggccaggcccctcggcatctttttttga

SEQ ID NO: 439627 - DNA, 122 bp, Homo sapiens
ctggaggggcctaatgatagtgggcgagagacccctcagcctgtgccagcccagtgaatgcgtgccccagcccagccagctacccagcccctctctgtgtgcagccggagggtcctaagaat

SEQ ID NO: 439628 - DNA, 122 bp, Homo sapiens
ccggctgccgagcacaccttgctagtatcggaagaccacgtggatgctgtcttcgaggggcgtggcctgcagtactcccacctgggtctgcccctctaagggaatgagaatgaaatgagtag

SEQ ID NO: 439629 - DNA, 122 bp, Homo sapiens
cctctaatggtttgtggagtagacacaggttttcaaagtttcctttggtttctttcttaccggtagattttttttttttttgtaataaaatgcaatacagactcctggacccccaatgtccc

SEQ ID NO: 439630 - DNA, 122 bp, Homo sapiens
cagttctgaataaagcaaaacggacccctgcttacatggagctaacagaatgaaagaggacgcaaacaaaacaagaaataagtaaaataattaggcgatcacaaataagggaatggacactg

SEQ ID NO: 439631 - DNA, 122 bp, Homo sapiens
tggatgctttgtgcacacaggacaggtgtactgctccttatacaaagctggagacatccgcgggggcggcccaggaagaaccctacaggatgtgacctgggggtgccatcctggccctaaca

SEQ ID NO: 439632 - DNA, 122 bp, Homo sapiens
ggaacaatatccctggggggtgtccactttctgccatgtatgtagtcatatcaccccctccgccttggagtattattaaggaccatgtcacacgggggtgtacacttcctgcgatattggcg

SEQ ID NO: 439633 - DNA, 122 bp, Homo sapiens
agttaattcatgcggctctcttactctgtttacatcctagagctagagtgctcggctgcccggctgagtctcctccccaccttccccaccctccccaccctccccataagcgcccctcccgg

SEQ ID NO: 439634 - DNA, 122 bp, Homo sapiens
cggcctcccaaagtgctgggattacaggcgtgagccaccacgcctggcctaaaaaaagatcgttaaggaggcctgtacaggttcaagagtgtgaaacctttagaaaaatggaaacttaggct

SEQ ID NO: 439635 - DNA, 122 bp, Homo sapiens
gctgaagatcccagtagacagcttcttaaaccatggctttccctgcaggatttggatgggcggcagccactgcagcttatcaagtagaaggtaggggacactctctccccttcactggggtg

SEQ ID NO: 439636 - DNA, 122 bp, Homo sapiens
aaagagaggggaaagattacttagtttggttatacagttataaacaccatgcagtgtattcggtggactgtgctatttctgtttatcctttgggttttggtttttgttttttttttttttgc

SEQ ID NO: 439637 - DNA, 122 bp, Homo sapiens
cttagaaggaggggggccgagaccatggggagagcaagggacaccaaagggcgcttcgggcgcgccccgcacgggttctctgcccgaaacccaggggaaagaaaccccagcccgcaagtacc

SEQ ID NO: 439638 - DNA, 122 bp, Homo sapiens
tccacccagcaaagaatcaggccgtccttcccctgcaggggtcagtgctgccagagagatcgcaggggagttaaaatcactgtaaaaaaattgtgccccaggagcgtcatcctgcacagaca

SEQ ID NO: 439639 - DNA, 122 bp, Homo sapiens
tggagatccgctcactctcccgctggttgaaagcatacagcttataggggtcgtcaccaacgcgccactttttggcattcagataccgccgctcatcaaactggtcccacaggtcgtcccag

SEQ ID NO: 439640 - DNA, 122 bp, Homo sapiens
ggccggcagtttcgctttggtgggcgcggagcagccgcctgggccgggcaggagtaggagcgggaggaggaggaggaggagccggtgccgcggagctgccgcgtcccgggccgccgggcacc

SEQ ID NO: 439641 - DNA, 122 bp, Homo sapiens
agcaacttcctcagaacagcacacagatcacacctacacacacacaataatatctacaaacgcctatctcagcacacccatccagtacctatatgtgtgcacacgtactcatcccatcccaa

SEQ ID NO: 439642 - DNA, 122 bp, Homo sapiens
ggggaggcggcctcttatatggaatttggaccccggcgctcccctccaaggctggagtcccggccgcggccctggcgcagtccgccgcctcccgctaggcgctcgggaggaggaggagacgc

SEQ ID NO: 439643 - DNA, 122 bp, Homo sapiens
gtcagtccttgaatgcttcatcatcgtgttcaatgtccagaagtttcctctcttttaacacggaatgttgtgtggcttatgttctcagcatgttttcacacctatagtctcatctgcaaaaa

SEQ ID NO: 439644 - DNA, 122 bp, Homo sapiens
cgcgcgcgcgcgcttccgcagcgtgcgtgcgtgcgagtgtgcgtgtgagcgaggtgcgcgcgcacgacgcccaaaggcgggaactcctgtcccgcccgctgcctcattggtccgacctttct

SEQ ID NO: 439645 - DNA, 122 bp, Homo sapiens
gtgtatcattttttagaagagcttctgaaagcctcaaacatctgtgagtgtgctaagagccgttacaaaggtattttatacaatctatgctgagtcagctaggagttagcaggaggctggat

SEQ ID NO: 439646 - DNA, 122 bp, Homo sapiens
caaagcctcctaggccctgagtcaaaggtatagccgtgtaatatcccagtgccagctctccggctgcggggagcctggcgcaaagcttccaagccttccttgttcctttcaagagccgctct

SEQ ID NO: 439647 - DNA, 122 bp, Homo sapiens
caatctagtgagagccctcttgctgcatcatccatgcagaagaatacgagggtatgcacacgcctgggtggggagtggtggaaggggctgagcttagctttttatcaggaacctgccgcaat

SEQ ID NO: 439648 - DNA, 122 bp, Homo sapiens
ctcatggttctctaataagaacattttccaaggtgcagcaagtttcgatcttcaaaaacccgcagctactcacagtgtaagatgcctgtcggggtggggctctgggcctggaaaaactagag

SEQ ID NO: 439649 - DNA, 122 bp, Homo sapiens
atgagccactgcgcctggcccatttttcgatttttaacatgaggattaagtagactactacgcacatttgctaaaggcagccccttacatttctttttaagcagaaaatacttggtggttag

SEQ ID NO: 439650 - DNA, 122 bp, Homo sapiens
tagaaagacaaccaccacatgacctcacttagctgtggaatccaaaacaagggatctcatcgaggcagaaatagtagaatggtggttacagaggctagaagtttggggtaatggggagacaa

SEQ ID NO: 439651 - DNA, 122 bp, Homo sapiens
gtgagatgggacaggcgggaaatagcagccctggaagcagcaaggcagtaactttctttccgaactccttttctgcaagttagcaaggtaaacctcagtatgtttgggagtaccccacccca

SEQ ID NO: 439652 - DNA, 122 bp, Homo sapiens
gctgcgctggggggcggaggacagcgcaggagctgcagccgccgccttcgctggagcagccgaggggccggtgccacctttgctcgccccctcactaccatgtacagtgtgcgctgcaagaa

SEQ ID NO: 439653 - DNA, 122 bp, Homo sapiens
ccagaataacccaattgcccaacaggcagagagaccagaagggtaaagtgttcctctgtccggcatatgagctggatagagaaatgtacactaaataccctgcaaatcagaaaagccagctg

SEQ ID NO: 439654 - DNA, 122 bp, Homo sapiens
taaaatagagcccaacaaaagcactgaccagatctaatactttagctacagattttatgacgaggatagacctatagaggctggcatagctgtacagaggccacacaaaggcctgtgagacg

SEQ ID NO: 439655 - DNA, 122 bp, Homo sapiens
tccctccagcctgcgtcatggagccctgggcgtggctgcagggtttaaagagccgacccacgtgcccagcagcctcctcagatccgttctctgcgctgccagctcaggtgagccctcgccaa

SEQ ID NO: 439656 - DNA, 122 bp, Homo sapiens
gggtggtgtgggacagcgacctctcatcatatcgtcaacagccagaaacatagatacaaccggaatgttttctggagccaatttgctgtgtgcaggcctcagcgttccgtatcgttttgttc

SEQ ID NO: 439657 - DNA, 122 bp, Homo sapiens
catcacgagcgatctgttgtgcagcccgatcatcccccaattcaccaacagccttctcctcgcgaaacgcccgggaccatccgtctgaattacccacagggtgaggatgaaaggcgagggaa

SEQ ID NO: 439658 - DNA, 122 bp, Homo sapiens
ctcgggactgaaccccagtgtgtgtgtgtttcagggcacaagcatgtgtgtttcaggacacgcggggtgcaagtgtttcggggcatacgcgtgtgtttcagggcacaccgggtgcaggtgtt

SEQ ID NO: 439659 - DNA, 122 bp, Homo sapiens
cagtggaagtggtctggtgtgtctcacaggggcgaccagcagggggctgctgcccaccctcgggctggcccgtgcccccgtttgaagtagcggtggtggccgtgtgggtggtgcccgtctcg

SEQ ID NO: 439660 - DNA, 122 bp, Homo sapiens
cggagcgacgcaagggtcgggccccagccagccagggcaggtgggaggcggcgagcgtggcgggcacgctaagacccgccgcccccagacctagtgcctcgcctaggggaggccgaggacct

SEQ ID NO: 439661 - DNA, 122 bp, Homo sapiens
gcggggatagtggtgtgcgtgtttcacccacggagggcacaataaagcatcaagaaggcccgtacgggaagataaggcttgaaaggggaggtcgaggcacctgcggaaggaaaaaaattggt

SEQ ID NO: 439662 - DNA, 122 bp, Homo sapiens
taattcaaaaaatataaatcgtgaattgctggcaccaattttaaaaaacattagactctacgacaagatcctctcccttagggcacattcttaacagctttgacgtgtataaaaacgcagcg

SEQ ID NO: 439663 - DNA, 122 bp, Homo sapiens
tggcaccactgggcagcccgcctgtctttggctggtgcagccgcgggaggggcctgggtccgccagtcagggctgccgggccctgtctctgggaggcctgggcagatctgccgctccattca

SEQ ID NO: 439664 - DNA, 122 bp, Homo sapiens
tgactgcagcgcactcggcccgacgtgacctccacccctagtgcctgcgatctgactgcccgacatgacctccacccctagtgcctgcgatctgactctgcccgacgtgacctccaccccta

SEQ ID NO: 439665 - DNA, 122 bp, Homo sapiens
cttttaaaccacggcagtgagtttgaatgttatttcaagtgtgctggtgcactgttggcacgggggagagatgtgctcaaatccccactctgaaagatttcttaagctatttctagagtatg

SEQ ID NO: 439666 - DNA, 122 bp, Homo sapiens
tatgaggtgtaacactcgccacgaaggtctgcagcttcactcctgaagccagcgagaccacgaacccaccgggaggaacgaacaactccagacgtgccgccttgagagctgtaacactcacc

SEQ ID NO: 439667 - DNA, 122 bp, Homo sapiens
aacagcacaagctgccgggtcccagagacgccctagggtcagaggtcatctccgtggcaacggaaacttcccgcgctacggcggctccaacgggccgcttccgccgcattgcgtagcgaagc

SEQ ID NO: 439668 - DNA, 122 bp, Homo sapiens
tctcataggcagacagaacatggagcaggaataaaagactcccaccttctccaaggctgacggtaactgaccatgtaactacagtgtaactgaggggaccctgcatagacagaagatgggcc

SEQ ID NO: 439669 - DNA, 122 bp, Homo sapiens
tacctccaccaaagtcgcgtggaggttcccaggatgactccaccccggcgcgaaaacttccgaactcttcccgccaccaaaggttacctcgaggaagaggcggggaccttgggagcatataa

SEQ ID NO: 439670 - DNA, 122 bp, Homo sapiens
ccaactgttgctctagtgtgtccaagaggcagcatgtggagtcaaaaaagattattcggccgggcgcggtggctcacgcctgtaatcccagcactttgggaggccgaggcgggcggatcacg

SEQ ID NO: 439671 - DNA, 122 bp, Homo sapiens
cctggacacccagcaggtggagctcccgctcgaaggctgtgtgcacccggtggaaggactcggccgtgctggcgtccagccccacgtcctcgggcagctcgcggtgcttctcgtcgatgagg

SEQ ID NO: 439672 - DNA, 122 bp, Homo sapiens
agactcctgcgttcctgcccagactggctgtgcttcccctcggctgatcccttggccaggcgcatgggcatctgggcgggttggtccgccacccccggcctctcagcccctggacgagcacg

SEQ ID NO: 439673 - DNA, 122 bp, Homo sapiens
atgatattcttctataaacttaatttctcaatatgataccaattttctgcagttatcttccgattgtctcttacactaacacaatataagtttcataggtttcttaattcatcttgacattg

SEQ ID NO: 439674 - DNA, 122 bp, Homo sapiens
tgggtggcgacgagtcggcctcggcgttgatcagcaccaggtgtgtgcgaacagtggccgcggcggggtggagccttggtgagccccgcccccccgcgcggccccgcccccgcgcgtctcgc

SEQ ID NO: 439675 - DNA, 122 bp, Homo sapiens
ctcctggtgtgtcgtttgctaagacctttggaaaagcgcagtattagggtgggagtgacccggttttccaggtgctgtctgtcacccgtttctttgagtaggaaagggaattccctgacccc

SEQ ID NO: 439676 - DNA, 122 bp, Homo sapiens
ggaacaggtgagcactgcgcactgctcgcgccccggttcttgcgtcccctgctctccctgcgctctgagcggcctggcccccgcgggctcatcatgttcccttgggggctgagctgcctgtc

SEQ ID NO: 439677 - DNA, 122 bp, Homo sapiens
gaatctggaacaccagccagttgtgcgcactatgccctcagcgaggccgcagctcaaagacgagtgagacaagacccaccacccctgaagagctcactgccactcgttaattcatacattta

SEQ ID NO: 439678 - DNA, 122 bp, Homo sapiens
atgtggatgcctggaggcagcccacaccctgggccttggctgggggaaaggttccagaaacgtcatcacaacgatgcatttcatcagaactgagcacatgaatggggaggggcaggacttcc

SEQ ID NO: 439679 - DNA, 122 bp, Homo sapiens
ctttgagggatttgttaaataaatgtttgtatagcacataatggaataagtatttggaatcgtggtatagatatacatttgttggcacagaaaaaaatgttcagggtatatattccagttgg

SEQ ID NO: 439680 - DNA, 122 bp, Homo sapiens
gagcacgtcacttcctgttgccttaggggaacgtggctttccctgcagagccggtgtctccgcctgcgtccctgctgcagcaaccggagctggagtcggatcccgaacgcaccctcgccatg

SEQ ID NO: 439681 - DNA, 122 bp, Homo sapiens
tttttttttctcaagacggtcttgctctgtcacccagtctagagtgccatggcttgatctcggctcactgtgacctccacctcccgggttcaagcgattctcttgcctcagcctcccgagta

SEQ ID NO: 439682 - DNA, 122 bp, Homo sapiens
aggagggaagctgttgttggcggggtaggttacgttccggaaggctggtgccaactctcccggttggcaagcgggggagggcgctgggaaccgagcaaaggggagtggatggcacccgccaa

SEQ ID NO: 439683 - DNA, 122 bp, Homo sapiens
aacacagcagtatttcttaggccagacgaccagctcccagcataaagctgtagcccccagcggagaggaagctgtcctcctctacttcctctcttctaaagacaaacatcttgtgcaagaat

SEQ ID NO: 439684 - DNA, 122 bp, Homo sapiens
cggctgctggtccagctcccccgcctccgaggcaggacttgtgggagcaaaagtccgaggcgccgccgggactcctcccgtcccggcgcccagccaggccccgcccccaccccacatcccgt

SEQ ID NO: 439685 - DNA, 122 bp, Homo sapiens
aagtttgcctggaggctgaggggtcccggagagaggcggtagccagacgcctggagaccgcgggcacattggaaaagaaggaaggcagcggcccgccttcctgccttcttgtcggcgggggt

SEQ ID NO: 439686 - DNA, 122 bp, Homo sapiens
ctgggggaacccagggccgtctctgcagctgctggcccagatgctaagccccacactgtccgtggccggcggtgccggcctgctggccgctccaagtgtggggcccgccgagcccacgccca

SEQ ID NO: 439687 - DNA, 122 bp, Homo sapiens
cagggcacattggttccggcgggcacctcagggggagtgcggcaagcctggcggccgccgcggccacacagtcgcccacagcgcgctgacaattcacggacctgctcaacgagtgaggcgga

SEQ ID NO: 439688 - DNA, 122 bp, Homo sapiens
gaaggcaaaggaaaagaaggggcggcgggccgacgtcggcggcgaggaaggacggaggagcgccggagccgctttgctgccctccgcgtggtcccgtgcctccccgacaccatggccctggc

SEQ ID NO: 439689 - DNA, 122 bp, Homo sapiens
taaaccatacatacaattcttttttatgttgcccccaaaaaagctattctgtagcagcagcgtagttcggcactatgcgccctaaccatctagtacggggaaaacgcgggggtcgttgttta

SEQ ID NO: 439690 - DNA, 122 bp, Homo sapiens
tcacagctcaaatcttcctttctttttcggtcggcttctctgatttgctccatttttaatcgctcctcccccatcctccttgcccctggtcagggcaaacattaaacgctgtgcagctttaa

SEQ ID NO: 439691 - DNA, 122 bp, Homo sapiens
gacgtcacccggtgggcagagggcgtgtctgcctggggggcccgtgggagttctgcgctgcgccctgcgctggctcccggggatcgagcaccgcgagaggttgggcgcccggggccgcgggg

SEQ ID NO: 439692 - DNA, 122 bp, Homo sapiens
taactgtgccagacacaaggtaagcactcaataaatattaactgcttagaatctctctgtcggactctgcctctctttcattacagctgacatgaggttgccatctagtgggctccctgctg

SEQ ID NO: 439693 - DNA, 122 bp, Homo sapiens
taatccagtcttcatcagccatcactcttcctgtattttgttcaagaggcactaattgttcgcatttggcaggtttaacacttcctgacagagaggctattaaggggaagtattctccaata

SEQ ID NO: 439694 - DNA, 122 bp, Homo sapiens
cccaggggagtcatagagacagtgcttaactgccgctcacagcagcagtatgtgacaacacgtgtcaagtattgccaaccaggagaactcacctgagtcttggtgtccagggatcttttggg

SEQ ID NO: 439695 - DNA, 122 bp, Homo sapiens
caggggccgttggatttggccctcgggagagaactccacagcctcctccagtgtgtccggcggcggcagccagggagggtgccgggaccttcagaccacacagcaagcggccagatctcagg

SEQ ID NO: 439696 - DNA, 122 bp, Homo sapiens
aaaaaatgtgaacctcaaaagaaaaaagggcctgcacgcagagctcggcggattcccgtgcgctccgaagacggatattggaaagctgcaaaagtcaccagaaagaaacaggcaagcaaaca

SEQ ID NO: 439697 - DNA, 122 bp, Homo sapiens
ttggaaacatgatgagcaaggagaagcgagaggctgtcagtaaagaggacctggccagagcgactttgatcaccatcaccaacaacattggctcaatagcaagaatgtgtgcccttaatgaa

SEQ ID NO: 439698 - DNA, 122 bp, Homo sapiens
atcttcccactaggtagatatgtaatcattctatttcacatctttgcttcagcacaattccgtgctgacacatcttctctctggagggaagagtgtggcctggtggtagcagcacacattct

SEQ ID NO: 439699 - DNA, 122 bp, Homo sapiens
gtttagctctctgcagccccctcctgagccgtggggaagcttgccttcttttgagctatgcgatctttcttctgagcaagggacattttgggatggttccacctctttttaacttctttctt

SEQ ID NO: 439700 - DNA, 122 bp, Homo sapiens
acgtggacagtgttttccacttgccatgactctaccaagttccaaaaaggcccccaaacccgacttccaggcagcttccaacctgaggctaagtggataaccccctagagagcttttaaccc

SEQ ID NO: 439701 - DNA, 122 bp, Homo sapiens
attccaaacatagcagagtctacgctgggttccagcgagtacctaagaggcgaggctgcacgctgggggccaagtgggtgcgcctgtgtttgcagcatttgtgtcatcggtgagagagactc

SEQ ID NO: 439702 - DNA, 122 bp, Homo sapiens
ctggatgtcttattgctccttcacagtctgatgctgagatctcaagctatggctgcctgccggttaactcaaagaatggttttcatacctttttttttttcttttttttgagacggagtctt

SEQ ID NO: 439703 - DNA, 122 bp, Homo sapiens
ccaaaatgaatgacctaacaatgcaggtttctatcgcagtgccacaagccactgttaccccgagcacattttgtgacttcagggtgatttcactagaatgaaagtattgcagtaatgccttc

SEQ ID NO: 439704 - DNA, 122 bp, Homo sapiens
ttgcccagaggtatgagctgcatttctgcatatttaagctgtctttgattcattcctgcccgtttcttagttctgtttgcccaggtgcccgccccacccactagctctgaggcccctgaaaa

SEQ ID NO: 439705 - DNA, 122 bp, Homo sapiens
gtgcttacatgggggcacaaaattccaaatcagccacagtggggtgaggtgagtatgagacgcaggtgggttgaatgaaggaaagttagtaccacttagggctacaggaccctggggttctt

SEQ ID NO: 439706 - DNA, 122 bp, Homo sapiens
gagctattcaggaagcaggggtcctccagggctagagctagcctctcctgccctcgcccacgctgcgccagcacttgtttctccaaagccactaggcaggcgttagcgcgcggtgaggggag

SEQ ID NO: 439707 - DNA, 122 bp, Homo sapiens
cctgtctctcagggttccatccaggctttccaagcttctttatttttagacatacagtgacgctgagtggacttcaagtcaattttacctgaattgtgtatacaagagcatctgtcatgagg

SEQ ID NO: 439708 - DNA, 122 bp, Homo sapiens
acacgacggtgaccaagaggtcccgtcggatccggcccacacaccctgcctaggccaccccgccgcggcccctcaggtcgccctggccacactcacactcccagaaaactgcatcagaggaa

SEQ ID NO: 439709 - DNA, 122 bp, Homo sapiens
tccaacagtttcaacgttatgtatttcaacttcccgtctcagttcactggcgtctgcacccgttgccgagtgtgggtggctgagccctgggtgacagcactcgggaccacgcacccataccc

SEQ ID NO: 439710 - DNA, 122 bp, Homo sapiens
actgcttcttttacaagatatgcgccttagtttctaaaatgccaaataaatctatttctacgccaataaatttggcagattttttgccttttaaatgcattattaatcctctttttttttct

SEQ ID NO: 439711 - DNA, 122 bp, Homo sapiens
tcagtgctccccctcgataagggacagagctgtccacaccacccctcgccctctttgggacgctgcgcactctcgcagtggtagggcggagagctgtcaatcaaatgcagtgcctcacctcc

SEQ ID NO: 439712 - DNA, 122 bp, Homo sapiens
acataatctgccccattcccccggatgagccccggggagagtaagaggagtgcggcgtcacgaggaatcagaggagaggagggtgggtcccttcaagcctagtctcgtttgctggaatgtgg

SEQ ID NO: 439713 - DNA, 122 bp, Homo sapiens
tgaactggtttatctctaacgcaatcctcagcctcttgttttgcagagttctccgcgccacggcaacttgacgagctaggccacgggccacatccccactaatctgattggttctgacgatt

SEQ ID NO: 439714 - DNA, 122 bp, Homo sapiens
tctcagaacccgatccagagcagcagtgatgaaatcaccctctcctttaagacctggcagcgtaacggcctcatcctgcacacgggcaagtcggctgactatgtcaacctggctctgaagga

SEQ ID NO: 439715 - DNA, 122 bp, Homo sapiens
aatcctgcttagtctttgttcaaggctcagctttttggatgtgaatccactgagctggtgcgtaccttaacataaatatcctcctgttttcacccatgctggtctctctagtcctctgcatc

SEQ ID NO: 439716 - DNA, 122 bp, Homo sapiens
aggcagacgtataacacgcacaggtgatcagctctgtaccacccagatatataacatgagcgggtgctgagttctgtaacaggcagacatattccatgcacaggtgcttggtgatatgtcag

SEQ ID NO: 439717 - DNA, 122 bp, Homo sapiens
ctggggagtatgggctgcagctctgggatgctccaggggctagatttgttgaccttggaccgggctctccgtcgtgggcagatgaggaggggtgggaaggttggaggagaaaggctgggtga

SEQ ID NO: 439718 - DNA, 122 bp, Homo sapiens
acagggtcttctgcatgaggacacactaaggaaactgcatttccagagagagacacaccacgtaggactgaaaatggttactctaaggggattcgtgacaggtaagcatgggggagcgggga

SEQ ID NO: 439719 - DNA, 122 bp, Homo sapiens
agaggagagaataaagggagcagagattataaagacaagaagttttagcaataatagccacgtcttttctctgtgtagttttgaagcactgactcttgatgaagcagtcagtaataagcctc

SEQ ID NO: 439720 - DNA, 122 bp, Homo sapiens
agggcgaacggccgttccaggatttcactgtgaaatctgagggtggtcggtcacagtccacgtattcaccaagccgagcggtgggagggccgtgaaggcttcttagccagattcctcgattt

SEQ ID NO: 439721 - DNA, 122 bp, Homo sapiens
actgtcccgcaagaggggaatgcgcgcgatgtggcctgactccacgtccaccacgaaaagcgtgttacacttggtgccgcacaccacctgcctggagttcagccactgtgacgcgaacacct

SEQ ID NO: 439722 - DNA, 122 bp, Homo sapiens
cgccccgcccgcgtcaggctggccaggcttcagtcacaacacggtggggctccctggctgcgcccggcccggcagctacgggcccagcgcctggtggcggcgctgaggggtcgccgagaggg

SEQ ID NO: 439723 - DNA, 122 bp, Homo sapiens
cctgttgcttgctcatatgaatgtcagttcaagacagcaagagctcaggactgcggagatcgcatctacatcctgccgcgctctgtgccggcacagggtggttgcgaaaatcgtgcagtctg

SEQ ID NO: 439724 - DNA, 122 bp, Homo sapiens
gcctggggaagagattcacaagtgcccaaggagcccactggttgccaatgagcaatttctcgagcctttaattatgggccaatgaaaacaatgcctttagtgaactgctgcctccctttcac

SEQ ID NO: 439725 - DNA, 122 bp, Homo sapiens
acatactttgaaaaacctagtcatctgctctgttggatatatatgctggagcttaaggcacggatacataacagtgcatttctcagattacacaccaagaacagagagaagaaatctgctga

SEQ ID NO: 439726 - DNA, 122 bp, Homo sapiens
aaaaaaaaaaagtgatgagttgtgaggcaggtcgcggccctactgcctcaggagacgatgcgcagctcatttgcttaaatttgcagctgacggctgccacctctctagaggcacctggcggg

SEQ ID NO: 439727 - DNA, 122 bp, Homo sapiens
tgccagctgcgacattgccgtggcgagcgacaagtcctcttttgccactcctggggtgaacgtcgggctcttctgttctacccctggggttgccttggcaagagcagtgcctagaaaggtaa

SEQ ID NO: 439728 - DNA, 122 bp, Homo sapiens
cagttgcctcggttggaaatggggctccccggcaggaccgaggtggccgcgtgccatctgcgcgagtccctgggtccctcgatgcgcgggggcgactgctgccaccgcggcctcccaccggc

SEQ ID NO: 439729 - DNA, 122 bp, Homo sapiens
ggatgtccggcctgcgggcgctgccggggctcaggctgctggttgcggctcgcgcctgcgcgaatcaaaagccagaccagcgcctgccgctcgggacccacctcgtggggacggcagcggct

SEQ ID NO: 439730 - DNA, 122 bp, Homo sapiens
gtggtgatgaatacagcaggggcttccttcaaaaccttaaccttattcaagatcagaatgcgcaaacaaggtggaagcagggcagatatgatgaggatggcaaacccttcaatcaaagatct

SEQ ID NO: 439731 - DNA, 122 bp, Homo sapiens
gcagaagcctcttccacccccaaatttaatgcaacagcaggcggaagacctgcagggtcccgttcagaaaaagggccgtcagactgtcgagcctaagaataaaaagaccctgtttctcttag

SEQ ID NO: 439732 - DNA, 122 bp, Homo sapiens
cccgtttcctttgttcctggctgctgtggtgctggtcacgcttgggagcatggagacactcgttccttgtctctccaacccaccggccattggcccagatcacaggcacctctttggcagat

SEQ ID NO: 439733 - DNA, 122 bp, Homo sapiens
gggacccgagggctctaaggccaggaaagtacagtggggtagtgggggcagtggcaagaacgcagtccaagaggtcagtcacttctgtttgctgagccctggggttgtcatctgtgaacggg

SEQ ID NO: 439734 - DNA, 122 bp, Homo sapiens
aaagtccctgaagaggagcgaggcggctccgaggaaccgcggaggaagtgaagccagtcccgccactcttcagaccggccctccacctcggccaccgtcaccacagagctgaaggaggccta

SEQ ID NO: 439735 - DNA, 122 bp, Homo sapiens
ctcaccgactcattggcctgtagtgtctgcgtggctttgactgccgctgcccgcctgctgcgctctcgcccctcttcctgctcctccttctcttggatctctggcacctcctcctccccctc

SEQ ID NO: 439736 - DNA, 122 bp, Homo sapiens
gttactgggacggcacactccggccggctttttgtccgcactctacaagttcgcaaggcgcgggaaccccgcctctcgctgcttattggcccgaaagggctatgccgcccctcactgcccat

SEQ ID NO: 439737 - DNA, 122 bp, Homo sapiens
tgtggaagaggtggggcagccagcaactgggaggggagggaggcggggccgccggcggggcgcggtgaagaggcaggctgccagagtgcctggccgacaaattacccagcgtgagctcggtc

SEQ ID NO: 439738 - DNA, 122 bp, Homo sapiens
tggaaagtgcagcttccagcattttcttttcccacacgtttttcaaggctgccgtacacacgcccaaacatattcacactcgttcaccaaggagggagtaaactcaactgcagccgtgccac

SEQ ID NO: 439739 - DNA, 122 bp, Homo sapiens
acaccagaataaacggggccggcacacaacgctaaggcaagtcacgtatctgtatcggatcgtgaaacaatcactcttacggttggcaaaggttctgggatcgcaatttccccacctataaa

SEQ ID NO: 439740 - DNA, 122 bp, Homo sapiens
acggccgaggcgccacgcggggccgcggctcgccctggccacggaggaccggacctgttgcgcctctgtgagtttgccttatttctacctactcggtgtctttcggcacgccgacctgtttc

SEQ ID NO: 439741 - DNA, 122 bp, Homo sapiens
ggacaggacccatgagggaaatcttggggatgctctgagcagcggacggggcttgggaagcgcacccctgtacccgggctgcctccggcccgcaccccgccgctccccaagtcggctccgca

SEQ ID NO: 439742 - DNA, 122 bp, Homo sapiens
ccgattcagctaactcagcctatgtaccacctgattattctacatcaggctagttggccacgaacactggatcatgtcacccctctgcaaggtctgcatttggaggtggctgagtggagcta

SEQ ID NO: 439743 - DNA, 122 bp, Homo sapiens
atatgtccaaagtcataggctcaattcgtagaagtattagctctaggcctccccactgcccgacttaatatttcattgccaatataacttttgacaaaaaatataagagaattttaactgaa

SEQ ID NO: 439744 - DNA, 122 bp, Homo sapiens
gggatctgggcaggatggagctggcggggggcagttctggagggggttgttagtttagggcgtcgtttccagcaggttctatcatcgtctcttcatgccccactgttttgaaggcctgactt

SEQ ID NO: 439745 - DNA, 122 bp, Homo sapiens
atttcagcaaagtcttgagcctgtattctagtaccttttatcagccttgggtaagcagctcgcacggggtatataaggagaatcaactttctgaactgaaaaaaatgtaaatagtaaagtca

SEQ ID NO: 439746 - DNA, 122 bp, Homo sapiens
ggccgcgatgcgctagaacgccggccccgccccgaggcggtgcgcttggccacgccccttcgttggaggcctagtcacgcccctaaaggaagctccaccccatacccgtggccactaaaaaa

SEQ ID NO: 439747 - DNA, 122 bp, Homo sapiens
tctcatgagccctccgcacgcagagtttacgggcgagagccctgccgagccagggcaaggcgctggcacgtccagtcacagagccccgagccaggccaatcaataccactttcctgttttag

SEQ ID NO: 439748 - DNA, 122 bp, Homo sapiens
ttaagactttaaacatagtacattagtacgctaacagcaagctctggaaataaaaggaaccgcttgcatatttagggggctcttttgtaagccacaaaggaaatcacctgaagtcaaagctc

SEQ ID NO: 439749 - DNA, 122 bp, Homo sapiens
atagttttcttagaacacagccacctataatcctctgcatattgcatatggttgctttcacgctacaacggtagaatggagtagttgcaacacagatcttaggacctacaaaactgaatata

SEQ ID NO: 439750 - DNA, 122 bp, Homo sapiens
aatttggtagaacttggcaggtgggtaacattgtccttggcttggtggccgtgtgccgatcggcatcatcgtcatatctgtaaacgtgttggtccattttcattccagctctgttcttagcc

SEQ ID NO: 439751 - DNA, 122 bp, Homo sapiens
gtgctgaaggttcgagactggagtacaaggaagagcagggacttcaatgaagagtgtccccggctcaggtagtgcaaggcgtaacctggaagctgctagttccaaggaaccctgaatagcac

SEQ ID NO: 439752 - DNA, 122 bp, Homo sapiens
gggaaaggttagtaagaggggactagataggtatgctcatccttaaccttctaggagaaccggagccttaccatcaaacttcggaaacggaagccagagaaaaaggtagaatggacaagtga

SEQ ID NO: 439753 - DNA, 122 bp, Homo sapiens
tcctgcatgtttatcaagcaaattgaaaaacagcctgaggacaacgctatctgacttcaccgctgggtccagtccccagtcgccacgggtggagtgacctccagcacagtctcaatactgag

SEQ ID NO: 439754 - DNA, 122 bp, Homo sapiens
ccatgcacacgattgctgatcactgccatgctttattactgcccagatgtgtggatgatacgcacacgatcgctgatcactgccatgctttaataccgccgagatatgtggatgatacgcac

SEQ ID NO: 439755 - DNA, 122 bp, Homo sapiens
tacctaggaaatggctgtaaggggcctccagtgaggattccgtgtcaccctgaactgccccgcaggagagaagtggttgtgtgaactgagagcgcaggaaagacttccctttacccatgctc

SEQ ID NO: 439756 - DNA, 122 bp, Homo sapiens
ttctgtccacgttgccaggacttctccagctcaacacaccttggtttgtttaatgttacacgagggagaagatttagaggcagagacacatgctggctcaatcggcgaggaaatacgagcag

SEQ ID NO: 439757 - DNA, 122 bp, Homo sapiens
atagattcccaggcagcactgactacagcagaatcttgtctcggctcagtgggatgcgtccgagttcctaccctgcccccttctccttagaatgccttctccagcctctccttgagcagagg

SEQ ID NO: 439758 - DNA, 122 bp, Homo sapiens
ggcttacatatgaggaaatccactgcagctcgtgtccccaaatggtcccctatccagggccgttccgttttccgaatttacttcagattctccacagtccacacaaaatctgcccgcaggaa

SEQ ID NO: 439759 - DNA, 122 bp, Homo sapiens
gcacgagcacaaggcccacggcacagcccagcagtgtggtgaagcctgtgttgaaagcctcgggctctgggcgcggaaagtgcacgctcacgttgtactcgtgcgtctggttgtggtgcagg

SEQ ID NO: 439760 - DNA, 122 bp, Homo sapiens
aacagaaaaacaaataggacgatgatttcccaccgactccaggccagggtctcgagttgccggagcctgtcccggcagctcagcctgtcctgcgaggcagcccccatcctggccaggacatc

SEQ ID NO: 439761 - DNA, 122 bp, Homo sapiens
atcgcctcatttgcattcacgccacttcccattgtccaatcagattttggataccgaacgcggcgtttgagggccgtgcctataaataccgcatctttcatcctccagttctgtttgtttac

SEQ ID NO: 439762 - DNA, 122 bp, Homo sapiens
gtctctgcaggacctgttcgttcttctttgggctataagaaggcagaggatgagatgtcccgggccacgtctgttggagaccagctggaggcacccgcccgcaccatttacctcaaccaacc

SEQ ID NO: 439763 - DNA, 122 bp, Homo sapiens
aggtcccctgtactctttccctggggatggagctgggtgccggtgcaggcatcggaggagcggtgccggggaacccgcctcctcacctcttgcccctagcacggggcggtgactccagagct

SEQ ID NO: 439764 - DNA, 122 bp, Homo sapiens
gcgtgcagtgcgggcccggagccaacaggtggcacaaacgcatttgacttgggcatcgatcgccgcgcccgcccggggccgcacctccgccgccagcgtccctccagcccggccccgatgcc

SEQ ID NO: 439765 - DNA, 122 bp, Homo sapiens
tgctatcttgcccttctccctttcaccatggggtagcatagcaagaaggccctcatgagacgctgataccttgatgttggacttgccagccagcagaactgtgagaaacagatttcttttct

SEQ ID NO: 439766 - DNA, 122 bp, Homo sapiens
ccacatccccgtgtcttcctgtgaatagatgagcagcttgagggaagcggtcccacaggacgggcaagctttcacggaggggctttccattgaccatcctttctgctttgtcctgtaggttg

SEQ ID NO: 439767 - DNA, 122 bp, Homo sapiens
tccaccggctcttccacctcccgatcacttccaccatcgctgggggaagaacgaatgcaccgcgtggagtgcttccgccacaaagcagcacatcacctctgctcggagaccctgctggtgac

SEQ ID NO: 439768 - DNA, 122 bp, Homo sapiens
caaccaaaattaattttaaaagaaccagagttcaagtttcagccccctgggtctccctctcgctgtttcttgaagagcaggtgaggcgcccttgcttaaaagggaagcgcccaggaccggag

SEQ ID NO: 439769 - DNA, 122 bp, Homo sapiens
gctgttgtcccacccctgtcactgcagagagctgaggcaccatgcatgggggccaggggccgctgctcctcctgctgctgctggctgtctgcctgggtgggacacaaaggaatctcagcctg

SEQ ID NO: 439770 - DNA, 122 bp, Homo sapiens
actgatccgagagagttcgggcttcattcctgcctttgtttctatgcatagttttaaaaccggcatcttgaaacttttcttattcccccaactctctttcaaacttcggtcaaatcgagaca

SEQ ID NO: 439771 - DNA, 122 bp, Homo sapiens
acgtaaactgggatccctttccccttgtgtccgccatattggactctaactctggtcagccgcggcgccgggactgtggactcgcggttcctcccgcccagcggcctgccccgcagctcccg

SEQ ID NO: 439772 - DNA, 122 bp, Homo sapiens
gaagagaactgatgaagcaggagtggtctggtgacatttttctgacttgattggctggggcgtgtgatgtaataggtttcagtgcagccccttataggttttaaaatgaattccaagacacc

SEQ ID NO: 439773 - DNA, 122 bp, Homo sapiens
agcccagctccttagtggctctggtgtattgatcccgtgctgtgggcgggcgtgggtctgcggcttcctgtctgagggaatgcagtgccacggacagacttgatttgtttaaaggtggtttt

SEQ ID NO: 439774 - DNA, 122 bp, Homo sapiens
acccaaacgttcagagacccatctttgctttgcagggatttaagtaacgcggttgtgggacgtctgctcgttgccgcccccatcctcagccctttgaggggtctacccttgttttcctcctc

SEQ ID NO: 439775 - DNA, 122 bp, Homo sapiens
gccagccgaagggacgcaaggggaactggcaagccaccgttctccatgtggggagacggacgtgtcacaacccgcctggagtagttccaactctgtcgccacgaatcctagctcaggaaaag

SEQ ID NO: 439776 - DNA, 122 bp, Homo sapiens
ggaatgacttgggcatgggtgcaaatttggatcaatatctgtgacacactaaagatattgcgtattagaatggctgatatcataccaatgaacagctgaatctccacatgtcttaatgattc

SEQ ID NO: 439777 - DNA, 122 bp, Homo sapiens
gcccctgcactagtcggaaaaaaccgagaggtttctcttctcagggctgagtcaccagcacgcaggagaagagggcgaagcggccacccgcgttctgtgttcggagtcaggacgagaagcat

SEQ ID NO: 439778 - DNA, 122 bp, Homo sapiens
aaaaatttagctaattctccatattgtattgggaatactgaagtttttcctgtctcttcacggggcctggggagcgggggtgtggatttaatccatgtagtcacccactgttgctgattgaa

SEQ ID NO: 439779 - DNA, 122 bp, Homo sapiens
cgaagattccaggattctctgcgagcgagtgcttcagggaactacgccagagcgcgcatgcgtggggttgccccgaagcatcctgggacctgccaggctgagggagttgcgggccgcagctc

SEQ ID NO: 439780 - DNA, 122 bp, Homo sapiens
tgtcgtcaggactggagatctcacggtatcgcgagaacttgctgagcccgggattggttccgccgctccctgccagccaaccggattctctgggctttatttctgtgaatttacccatagca

SEQ ID NO: 439781 - DNA, 122 bp, Homo sapiens
ctgaggaatccagctggatccggtctgaggcggcgcggggccagcgggtggggttttgagcggctggcgggaaggcaggttcctggcatatgctcgcttgggttctgttctgcaggccgacc

SEQ ID NO: 439782 - DNA, 122 bp, Homo sapiens
gggtgatggagtgagaccccatctcaaaaaaaagaaaaaaaaagatgtgattttccacatcgaaaatttgaaagactaataaaagagttcatggccaggcatggtggctcatacctgtaatc

SEQ ID NO: 439783 - DNA, 122 bp, Homo sapiens
tgttgttgatgctgttattggcataatgatttactgattaaaaggagactgttgttcaggcggcaggactggcaactcagtatgtggtttgcttataaacctgtgaacacagaaatttctgc

SEQ ID NO: 439784 - DNA, 122 bp, Homo sapiens
gtggccgccgggcgctggggcgagagcatgcgcagtcgcggcactcgagtcacccggctgcgactcgctggccctggcgtctaaagcgtagccttaattacccggaagtgcggtcccaggga

SEQ ID NO: 439785 - DNA, 122 bp, Homo sapiens
cgggctcctgcgggcacccaggtttgtcccccccttcaggcccgggctctgggcctccaccgtccgtcactcagccgcagccgccatctccatcggtcgctcggaactcggcaggtgcgcct

SEQ ID NO: 439786 - DNA, 122 bp, Homo sapiens
tgacagccggaggttccagctgcgcgcccacagcccctcggtagcgccgccgactcgtggcgtctataggctgtttctgcgtcactcatgcatggaagaccaatcagagagcgtacttgtct

SEQ ID NO: 439787 - DNA, 122 bp, Homo sapiens
aatgctaccattttctcaaggttctaccctgctaggctgccaccacattcctaagaaccacgggaaaaggcatttgctcctccgaagaaattctcagactgatttttcactgtattgtcagg

SEQ ID NO: 439788 - DNA, 122 bp, Homo sapiens
accaccaccagcaggaagaagtccactgggtccccctgactttccaccagtgtcagagagcgcttgatgagctggttgaggacaaagctaatgccacccaataccagcagtgcctcaccagg

SEQ ID NO: 439789 - DNA, 122 bp, Homo sapiens
tgagaatagctgcccccacctgaatggatcactaaccttttttacctgtcagctgacatgcgactattgcacttgctggcctggctcaatgcctagatattcggtattgctccaaaagatag

SEQ ID NO: 439790 - DNA, 122 bp, Homo sapiens
gcgggagggaggagcggcgcggcgggggtgacggggcgcgggcgcggggtgggctgggggcgcggatcagtgggacggagttcggggttcggctccgagcgggcgggctggaagtgggggat

SEQ ID NO: 439791 - DNA, 122 bp, Homo sapiens
ctgcaaagagagaggtctcggccacgagaagcacctcttgtctcatggatatatgggatccgttgtgatcccgaggacaagcacgtctttccacgcctcaggagagctgtgctgcccaccgc

SEQ ID NO: 439792 - DNA, 122 bp, Homo sapiens
tggtggtgaggagggggtaacaaatgccccgggcgttatgaccctcgtggcgctggctgtcggaggcactggttgggtgcgcttggtcagagtcatgatgctttcgatgaaggaaaggcaaa

SEQ ID NO: 439793 - DNA, 122 bp, Homo sapiens
cgcgctgttctcagggcagttggagggaaatcatcactgcgaattctagtgaccacagaacgggtggtcgacctgcatcttaaactagtagagatttcccaggcagatgccgagcctggggc

SEQ ID NO: 439794 - DNA, 122 bp, Homo sapiens
ctgctctagggcagtggaaaactctgcagtgtccccatggggcagcagaccagaccaggacgcagagcagagcctggggagaggagaggctctgaatggcccacaggacttggctggtggca

SEQ ID NO: 439795 - DNA, 122 bp, Homo sapiens
gacgccaagctccgagatcagtgtctggagcttccagttttccagggtgacttgctccatcgtgtctttggatttcctgacactctcagacgtggctttctggagttggcccagattccctt

SEQ ID NO: 439796 - DNA, 122 bp, Homo sapiens
tgcttggccatgtcaggctgtggtcagcagggtccctgggcgctgacaggcctcacctctcggactccagctccgtctgctcctccagcggcaccgtgtgctgcctcagcctctgtctgcgg

SEQ ID NO: 439797 - DNA, 122 bp, Homo sapiens
agcggacctcgggggagccgctggacccctgggacttgaccctccctggggagcgggactcgatgtcggcctggtaggggactggcgtgaagggggaagaaaccttgacgccagcgtccccg

SEQ ID NO: 439798 - DNA, 122 bp, Homo sapiens
tcatctcgtccccagacatggctgcggcttgagtgggcttggcacggacgggaagtcagacgggtcaaccccagaccccggctgcagcgctgctcctgccggtacctctcccaccaccgcac

SEQ ID NO: 439799 - DNA, 122 bp, Homo sapiens
tcaaagaaaccctcctcaccttcagaggtcattgagaaacactgattaccgtgggagtgacgcagactgaatacagaaaatgaacatgcacacacagagacacagaagcacacacacagaca

SEQ ID NO: 439800 - DNA, 122 bp, Homo sapiens
cagcattttattagttcctctcaccaactttgtgaagtaggcactcttagccccattttccggaagtgagctagggggagttcaccctccaactgaggcccaggcctctctccagcctgaac

SEQ ID NO: 439801 - DNA, 122 bp, Homo sapiens
cgtctatggtcggggagggggagagcccacggcagctgagcggagggtctggcgcggtgacgctgcgcatccgggccgcgccgcgctcgccccgaccctaaaccctcacctgaaccctaacc

SEQ ID NO: 439802 - DNA, 122 bp, Homo sapiens
cagtctgcacgtgaacaggaacatgtacctgcacgtataccaggtacacgcagacagatgcgggccatccccagagccgccgacagaggtcgctgcgagacggtacccgcgccccacagtcc

SEQ ID NO: 439803 - DNA, 122 bp, Homo sapiens
cttgctcctacagactgtcccccattcccagggaggaaggagactagaatgagataccatcgcggcacccccatgcaccctggccaaagtggcaccagtgaccacaactgaggcagaagaga

SEQ ID NO: 439804 - DNA, 122 bp, Homo sapiens
tttttgcaacaatacctaactgagcctttcagacaggacaacggatgcacaaaagctcgacggaaattggagtaacttttggaggcccttgtagctgccgtcaataagcgtcagccccataa

SEQ ID NO: 439805 - DNA, 122 bp, Homo sapiens
acataaacctggcctctcagtttgtatttctgattcccaaatttgcttaaaaatataaaacgcaatgaagttagaattaaactccagtaactgtgtgtcattgtccacggaagagtgctcaa

SEQ ID NO: 439806 - DNA, 122 bp, Homo sapiens
aataaagacccgcatggccattcagagcctcagagaggactcagatgagaacagcaccaccgtacgtggtcaccaagccgcaaaagccaggcgtaagcgaacagcttccagcgtcttaatca

SEQ ID NO: 439807 - DNA, 122 bp, Homo sapiens
atcgctcactactgccccaaggttcagcccatcggggacatccccatcattgacaatgaacgctgtaggagaccatgtgctgcctgaaaaaaattggaggaagaaacccagagtgagcactc

SEQ ID NO: 439808 - DNA, 122 bp, Homo sapiens
agctgttgccaggttcccacgtggaccttcggcatgacccggccatggggaggcctcacacgctcctgcatcgcccacatcttgccaagccatggaaaacacttgggattcatatctaaatc

SEQ ID NO: 439809 - DNA, 122 bp, Homo sapiens
gcgcggaaggggttaaggcgctgagcgcggagccatctggccgggttggctggttataaccgcgcagattctgttcacgggactcagagttgaagctcctctcccttccgaacagctccgcg

SEQ ID NO: 439810 - DNA, 122 bp, Homo sapiens
agttccggccccgcctctatgttaatgacatgcagatatatgtaaatttgtacaagcaaccgctcaaacctttgggagcaatggggtgacacaggagcagttgctatggaaatccaaaagcg

SEQ ID NO: 439811 - DNA, 122 bp, Homo sapiens
gacgcgggcgagtgaggacagacttacaaccgtcctcggccgcgcagcacagggttcccgcgccctgtccctatgccccggggacacagggcaggaggctgaaaaagggactcagcgttaga

SEQ ID NO: 439812 - DNA, 122 bp, Homo sapiens
tcccggctcctgggagccagcgtctgcagagccctggcggcggagggcggtggagggcggcggcccacgtacacaacggcgccttccagctctgggaggcttgctccagagcctggaaacac

SEQ ID NO: 439813 - DNA, 122 bp, Homo sapiens
ccagccccgtgcgggctggtgtgcgccgcagttactaggcaaccctatcgcagacgcgggcggccggccaagttcacccaaagttgaagaaaaaatttgggggagagaaggtggagcgagag

SEQ ID NO: 439814 - DNA, 122 bp, Homo sapiens
tgagctaccatgtccaagacagtttgcaggacgagggctctgagcccacgggctacagagcggagctgtctagcgagggcatccgggataaccgcaatgaagagaaacacatcaccgaagcg

SEQ ID NO: 439815 - DNA, 122 bp, Homo sapiens
gcagaggcagcagcagcagcaagggtagcagcagcagtggtggagacattgctggggagccgggtgtgaacccaggcttcctagttttctttcccctgtgactccaccctgtttatgcccca

SEQ ID NO: 439816 - DNA, 122 bp, Homo sapiens
attgcaggtgggtgtataaatgaacacaaaactcatagagagcaatctgtcaatagttaccgaaaattacaaatgcatataccctttgaccttgcaattctatagctggagtttgttttaaa

SEQ ID NO: 439817 - DNA, 122 bp, Homo sapiens
tttttttttcttacatggtttgtttgaatctggatccattcatgttcagacctcacataccgtagacatctctcacatgtctttatgttttctccttgcaatttcttcctttttcttttctt

SEQ ID NO: 439818 - DNA, 122 bp, Homo sapiens
tctggggcggggacggatttagggtccgggtcaggccggggtcgccacctccggatccagcggtccagatgtccagccggctagtctgttagctctctcgagctcccggcctcacgcgcttc

SEQ ID NO: 439819 - DNA, 122 bp, Homo sapiens
atatgctaatgtgtatgtttggtgtagagtaagccccaaataaagactagccattgttttcgtggccattttttgtctgttgagaaactgttaatgcagcaactttctccgggttagagttg

SEQ ID NO: 439820 - DNA, 122 bp, Homo sapiens
ctgtagttggacctgaggtcagaggcggggcatcagaggctcaaggtgctgagaagccaccgggaaagcagccagcacaaagggcccaggaagccagcccccgagagctgagcgtgggggtc

SEQ ID NO: 439821 - DNA, 122 bp, Homo sapiens
gtaggcagcatagtgacatgtacacccttttgcttgttttaagcactttgattgcaactacggagaccagttggcatggtgtaaggctaggggacagggatcttttagaggctgttgcattt

SEQ ID NO: 439822 - DNA, 122 bp, Homo sapiens
ggccgagtctcccaaactctacttccctgtgccaagacctatgcctccccccagcctcaccggtgaagagaacgtcagtgccatccagcgtcgcgttctcgtctcctatttccacaattcgg

SEQ ID NO: 439823 - DNA, 122 bp, Homo sapiens
aggcctcaggagtggactcaagaaagccctctagctggctgtgcaggtcctatagactcccggagcctctgtttcctcatccctccatcccaacgagggatgtcctcatccctcatccctca

SEQ ID NO: 439824 - DNA, 122 bp, Homo sapiens
ccatgtaaaagcagtgaccttgtcttcttttgctatttcctctaacccttttatcatggtcggggtcctgagagctgctgacagatcttcctgctgccgagtgtctgaattcctgaatgctg

SEQ ID NO: 439825 - DNA, 122 bp, Homo sapiens
agcggaagttgcaatgagccaagatcgtgccgctgcattctgggcgacagagcgagactccgtctcaaaaaacaactcaccgaggtctcctgtagcccatatgggccagatacctgtagacc

SEQ ID NO: 439826 - DNA, 122 bp, Homo sapiens
tacggcctgcgtggagcggcgctctgggctgctcctcccatccccgcatggaaagttaggcgtttctagccacattaattcatcctaaaggaaaagaggcgacagcggagcagcgtgcgcgc

SEQ ID NO: 439827 - DNA, 122 bp, Homo sapiens
tggccacagcgggatggcactcagccaggttcagcttcgtgggaaaggtcccaggtgggccgggctagcactggggatgccctggctctgtgtctcggttgggtggctgactcctcctggaa

SEQ ID NO: 439828 - DNA, 122 bp, Homo sapiens
cagggagggcgacagggtccaggtcgtgctcataagtttggagctgtactctcagctactcggggctggtccttgattttggctgcgctcgcgcacgctcccccttttctggccgccaggtc

SEQ ID NO: 439829 - DNA, 122 bp, Homo sapiens
gcagagtcaaagctgcaaccagaatagcctgactcgcagagaactatggtgccagctgatcgtggcattcctagaagtgaaatagataagaagcctgccacatttttacttgatctgtgttt

SEQ ID NO: 439830 - DNA, 122 bp, Homo sapiens
gcccacccccatttagatctgaccccctcccccacgccactcctcccaactttaggcgggcgtctaaaattctgggaagcagaacctggccggagccactagacagagccgggcctagccca

SEQ ID NO: 439831 - DNA, 122 bp, Homo sapiens
tggtttcccagatagaccccgacccacactccgaagctgtatcatgaacgctgtggtgggcggctggtggggagcggggttgccgtcccactaccctctggaagcctcagccatgaagagcc

SEQ ID NO: 439832 - DNA, 122 bp, Homo sapiens
acgtttgccaggtggcctggaatgtgagggaagcctcagccccgccaggaacagagctggcgctgagttcccggctcggcccgggtcagaagcgaggaaagtttgccggcgagtgtcctttg

SEQ ID NO: 439833 - DNA, 122 bp, Homo sapiens
gataaggtatattttttaaaaaaattatttttccaagaagaaaataaaccagttaataaacgacaactcacagtgccaggaagtgagaaacaagtgtgtgataaacggtggagaatgggagc

SEQ ID NO: 439834 - DNA, 122 bp, Homo sapiens
accaccggagtggcccctgcagttggatagcaacgagaatcctccaggggtgcagggcgacggcttcggccgcaccgcgggctagccagggctgcgtgcccgcctctgaccctcagcagagg

SEQ ID NO: 439835 - DNA, 122 bp, Homo sapiens
tcgctggctcaggagtgaagccagggaccttcgcggtgagtgttacagctcttaaggcggcgagtctggagttgttcctcccgatgtgtttcgtggtctctctggcttcaggagtgaagctt

SEQ ID NO: 439836 - DNA, 122 bp, Homo sapiens
ggactttgaatgccaacgtcagaaagatgtttccgcgaaagcttctgtttagttaggcgacgttatcccgtttccaacgaaatcctcagagaggtccaaatatccaccagcagagtctacaa

SEQ ID NO: 439837 - DNA, 122 bp, Homo sapiens
ataataatagtagctacctataggcttgctcaaagttaaatgagttaatatttataaagacgcttaccacagggccaggcactgtgccagagataaaaagatgaatgagaaatagccccagc

SEQ ID NO: 439838 - DNA, 122 bp, Homo sapiens
agccgcccttacactcgtaggcttcatactccttgggtgcaatgatccagctgtcccagccgatgtcctcgaagtttacccgcagggaggtcttttgacagtggctgccagccccggcgctc

SEQ ID NO: 439839 - DNA, 122 bp, Homo sapiens
tctgggccctcctttccctggtcctgcaggtcttgctgcttgtcaggcctctcctccaaccgtctgccacatttcagaaaagctgagaaccccttggagtgaaaaaggaggagaaacacggt

SEQ ID NO: 439840 - DNA, 122 bp, Homo sapiens
gcccctgcccactgcaggctcagaagtgcctgctcctactgcctggcctctccctgatcccggagaccactctgatttctgagcaaagttgtggcccagtccaggtgctgtcatgagctggc

SEQ ID NO: 439841 - DNA, 122 bp, Homo sapiens
agcaaatgggcagagctcagcctgcagctgggagcggccgagcgggtgctgggccagagtcggggcctgtctgtgggtgaggggcacggcagcacgggcccacctgcacctacaaggcctgg

SEQ ID NO: 439842 - DNA, 122 bp, Homo sapiens
ctttaaagttgaaattgagatgaaggctctcaaaatcccaaagaacaatgcacagttatgcgtctgtttgccagggacagtactaccaactgatatcacaccaaaatccatttccatgccta

SEQ ID NO: 439843 - DNA, 122 bp, Homo sapiens
cgtgctgcctccggagctaagctaacctcactggatctgctggcgagggactgtgtgtcccgggcccaaatgggttactgctcttacacaagtcaagaccccgtgtcctcttagagctgcct

SEQ ID NO: 439844 - DNA, 122 bp, Homo sapiens
gggtcgcgcaccgctcctcctattgggcggcagcgaccaatagaatgtggggctcgcccgcgctgctacgtcacgtctgggaccgcggagtattccaggcgcctgcaactaaacgtggccgg

SEQ ID NO: 439845 - DNA, 122 bp, Homo sapiens
tgcagattcctgagctcttcctgttcggctctcagttaggtaggtttcagacacactagccgtgcccctgcctttcaaaaccacttggagctgtaagtgcccagctattctctatatccgag

SEQ ID NO: 439846 - DNA, 122 bp, Homo sapiens
cgcacaccgggtgtcaccctgtacatgcccagaagcggtggacacagtcagccagaaggccgaagggccggcctcaacggcacctctcctgggtgggtgtgctcctaccttgcagttttggc

SEQ ID NO: 439847 - DNA, 122 bp, Homo sapiens
cgggcgacccgagggccaggctggcttcgcctccgatccgcggagaccgggccagcgccacgaacaccacgcagggcgctccccgtccatggccctctgggtgccgaccgcggctcttcccg

SEQ ID NO: 439848 - DNA, 122 bp, Homo sapiens
tgggaggaagtggggtagggagcaggggatctggggaggtacctggatagcaggggactccgggtcctgaaatgttcactctttggtaggtcctgtggaagagcgcaggcaagtcctgactt

SEQ ID NO: 439849 - DNA, 122 bp, Homo sapiens
tttgattctgcactttgcgcgagccactcaggggcgggctgtaaagtcaggcttggctgacgtcagttgagtgggcgcggctagggcggttttctttcgcgtcgaccaaacgtgggccaatg

SEQ ID NO: 439850 - DNA, 122 bp, Homo sapiens
ttgcgcaccgcctggaagtcgccgcagcacagcaagaggtcgacaggccccgggccgcgccgctctgccagcgccagcgtctcatagatcttatccagctcgccgtggcagcagccagccac

SEQ ID NO: 439851 - DNA, 122 bp, Homo sapiens
cgcctcctggagtctgggacgagcggcggtccgaggagcagcccaggtggggcgagggtacggagacgctatttccctccgaactctgaagtagccaggtcagtgtcggctccgcgagggct

SEQ ID NO: 439852 - DNA, 122 bp, Homo sapiens
ccgagggaggtggcggggctcggcgggccgcaggcagcgggcggggcggtcacgtgggcacgcctggtccccagccggcgccacccgctcccaggccggcccttctgtctcgcggccccggc

SEQ ID NO: 439853 - DNA, 122 bp, Homo sapiens
ttaaagagcacatatgcagacacagactccctttctttgggcagaaagaagggtgggcaacgagcacattatgtaaatcatcttgacggtggacacagcagctgttggctgtcactgctgga

SEQ ID NO: 439854 - DNA, 122 bp, Homo sapiens
cctccccgctggccgggccaggaaggggctggtggctctttcctgtctagtctctccccccgcggctttctgtaacccgatccccgcactccgctcccagggaagccgccgccccgcgcgcc

SEQ ID NO: 439855 - DNA, 122 bp, Homo sapiens
ctcggttgtggcttgcaagtcccgctggcatgtgatttcccaaaggagccagtcttagtccgtaaccccttaccctgttcattgtggaagtccgggggcccaagggcagaaagggctgcagg

SEQ ID NO: 439856 - DNA, 122 bp, Homo sapiens
gtttgggtggtaaacaggtctgagatagatttcctgctctgccacttaagagctgggtgacgttggggagtcatttaatttttctgagcttcacccataaataatacatacatacataaaac

SEQ ID NO: 439857 - DNA, 122 bp, Homo sapiens
ttccccaacatggacagatccctgggtcctcaggagaacagacagcacacaagctgctcccggcttggtcctagtctccgggctgcctggtgaggttggcaggttggggctgggaggtgccc

SEQ ID NO: 439858 - DNA, 122 bp, Homo sapiens
cgcggggcttttccgtgacgtcagcgcccccgccgggagggggcggctctgcagcaaactcggagttgcagccacttggctaaatcagttactcgcagtcatgtgaccccttctctctccat

SEQ ID NO: 439859 - DNA, 122 bp, Homo sapiens
caggcgggcgccgggagctgggagccgggagcccagagttcggaacctagagttcggagccggctagggagccggcgttgtcgcggcgaggaggtgggcgcgctggagcaggagcggggccg

SEQ ID NO: 439860 - DNA, 122 bp, Homo sapiens
gcccgcgcctcggccctgccgcccgcggctcactcgaaggcccctccgctcccccgcaggcggcgctgcttcctgggaaccatgttcctaacggctgcgccgcggaccccaaggcgtccagg

SEQ ID NO: 439861 - DNA, 122 bp, Homo sapiens
cagtcaggaagcctgcctgcatcccaccacccagggcttccctgtggttttctaggccctcgttattagaggtgaaggggtgcccaaggatcactagacatttaaaggaaggtactagcgtg

SEQ ID NO: 439862 - DNA, 122 bp, Homo sapiens
cgcagagccccggccccgcgcggcccgagtgccacatcactgcgctggccgtccaaggtccgccgccccaccatgccgcccccgctgccgctgctgctccttacagtcctggtcgtcgccgc

SEQ ID NO: 439863 - DNA, 122 bp, Homo sapiens
gccgaccgaggccatccgaggccgaccgaggccaaccgaggcgccgcggggctgccgtatcgttccgcctgggcgggattctgacttaagaggcgttcagtcataatcccacagatggtagc

SEQ ID NO: 439864 - DNA, 122 bp, Homo sapiens
gagcctttgggaaaaataaaattgttgttttctaccagcccgcgaatattcccagtcgcccgtggcgacgcgggggtggggtcggcgctcaaggcagaaagcgcgaggcaggtgcccaggag

SEQ ID NO: 439865 - DNA, 122 bp, Homo sapiens
gcagcgagaaagaattgcagaggaagaggcaggggtttctgcgggagctgttctgggcgtcgctcctgtatcgcccaggtcctcccggacactgctgtcaatgggtatttggttctttcccg

SEQ ID NO: 439866 - DNA, 122 bp, Homo sapiens
ctcagggcgccgccagggggcgcaggggtctgtcccgggcgcgcgcgcctctcagagccccgacgacgcctcactaataacacaggggtattttcggatttaaaggcaatacatgatactga

SEQ ID NO: 439867 - DNA, 122 bp, Homo sapiens
agggtttgtgctcctattaataatctaatgctgctgctgatctaacaggaggtggagctccggcagtaacgctcactcccctgctgctcactgcctgctgtgcagcccggttcctagcaaac

SEQ ID NO: 439868 - DNA, 122 bp, Homo sapiens
tggaggcagccatcactaagccctaatggagtgcttcattaagatcgcttcaaaggcccccgtttacagactcggagattgactaatttacacattgtgggaaaattgctaccagctctgcc

SEQ ID NO: 439869 - DNA, 122 bp, Homo sapiens
ttgacactcaaatccttgctcggacctgaacgcacaaagtgcctcggagaagatgtgaagcgctgtgtgcaacagtgaggaattcgctaaccagccctggacttccgtttcctcgccatcaa

SEQ ID NO: 439870 - DNA, 122 bp, Homo sapiens
tctgcctttcagaaccactggggcagcacttctgcctccatggctctgctggtcatgggccgtacccccaaggatttgtggggcctggtagctggcctgggttagtcaagatcatgtccctc

SEQ ID NO: 439871 - DNA, 122 bp, Homo sapiens
gaccccgggagcgggggaccaccagtgggcagcatcacggccagccggcttcctggaggccgcgctcctttcctggagccgcacccccgcccggcccccgccggcaacacgtcaccgcctgc

SEQ ID NO: 439872 - DNA, 122 bp, Homo sapiens
gggatgtgaggagcgcctctgcccgccggcctcctctgggatgtgaggagcgcctatgcccggccaccccgtctgtgaagtgaggagcacctctgcccggctgccccgtctgggaagtgagg

SEQ ID NO: 439873 - DNA, 122 bp, Homo sapiens
aacgaaatcccaggaggccagttgagtagtttttttttttttttttttttttcctggtcccgaccatctgattctcattacttctacagctcgggaagtctctgctttggcattttataaac

SEQ ID NO: 439874 - DNA, 122 bp, Homo sapiens
gctctgaactgctctgtagaaaaacaaacaccacacaatgcaattgatgaatggcaggttcgcgataaatcccaatggttagtattaaaaatgcaaacactgtaacccttgataaaacagag

SEQ ID NO: 439875 - DNA, 122 bp, Homo sapiens
acggtcacctctcaaagcaggcattgcatattgctttgcagtaaacaagacccagcgcctcggctgatgtattagtccattctcatgctactataaggacatacctgagatggggtagttta

SEQ ID NO: 439876 - DNA, 122 bp, Homo sapiens
cctgcgcgccggcctgggggccctggcccggagtcccgccgagagagcgcgagtcagatgcggggccggggctctcagcagctctgcccgggaccccacaccgcctccctccctcctgtacg

SEQ ID NO: 439877 - DNA, 122 bp, Homo sapiens
ccaagcaccctgaggttgtcccagctggggatccgtagttgacttgacgtcgctgagcaacggaagagtgggcagcatttgctctgaacgctcgtgcgcgctaccgcccagacggaagcgga

SEQ ID NO: 439878 - DNA, 122 bp, Homo sapiens
tggtagcaccaaagaagatgtgctgtgggcggtagcggctccgcagggagaatgaagctccggggaacaggaagaagctgaagcccaccagccactaggatttgaaaggagacggttccggg

SEQ ID NO: 439879 - DNA, 122 bp, Homo sapiens
ggctgccgctcccgaccgaaccgcgggcggcgcggacggcgtcgcgcgagggacaaggtgcgcgaggcgcacgcatcttcacctccactgtcgggagttgacctgctcctcccgcgtggtta

SEQ ID NO: 439880 - DNA, 122 bp, Homo sapiens
acctctcctccccctcacctgacaggtgcagcggcctggctggggagcccgcccgctggccggccagggatggaagcgacaggaatctcattagcatctcaattaaaggtgagcagggcggg

SEQ ID NO: 439881 - DNA, 122 bp, Homo sapiens
agttaactcattagggttcccacctggtggaggctctgactggctaaagcttctctagaccgcagccccagagaggagtcctggaagctcctgaggcctctttggattgcagggactaggag

SEQ ID NO: 439882 - DNA, 122 bp, Homo sapiens
agacccagcttgagctgctggcaggcaggacactgagtggggccagcccagggcctgagccgactctatcgcactcccaggctgtccgcacatccctccccaggtcagaccatgtcatgcta

SEQ ID NO: 439883 - DNA, 122 bp, Homo sapiens
tgtgtgtgtgtgtgcatgcgtgtgtgcatgtgtgtgcgcgtgtgcacgcgtgtgtgagcgcgtgtgtaaatgcactcatgtgcattggcgtgcacacacgttcgtgcataagagatgggggt

SEQ ID NO: 439884 - DNA, 122 bp, Homo sapiens
gggtcgggcgggggtacccgggctgtttcttcctctgggtcttcctccgtcggttgagaacggtgtcccgggggccctcccagagagcagggactgccagggcaggccagggacccggcgag

SEQ ID NO: 439885 - DNA, 122 bp, Homo sapiens
atggccccgaggctccttcccacgtgcagtttgccaagtgatgcggcagccccatccccacgcagtgggtggcttgtcatgatgtctaatttttgttgggggcggaagttcatcagctcttc

SEQ ID NO: 439886 - DNA, 122 bp, Homo sapiens
cagtttacctctctgaccactcttacggtgtttgggggcaacaaactaaggatctagactcgctaaaccgctcgctgggtccttctctccccacaatgcaccggggccagcaggaaggccgc

SEQ ID NO: 439887 - DNA, 122 bp, Homo sapiens
aaacatcatagtattggcataaaaacccgacacatagaccaatggagcagaacaggcaatcgataaatagatccaaacatttacaactgattttcaatgaaggtgccaagaagacacattgg

SEQ ID NO: 439888 - DNA, 122 bp, Homo sapiens
ccggggcgcatgcgcggcccgccctatccgggggggggggggttaggccgcgtcacgtgacgggctcagcgctccgcagtcacgtgacgctcgtccgcaacctctgctgtcctccgcggcgc

SEQ ID NO: 439889 - DNA, 122 bp, Homo sapiens
agcctctttgcccaaattagttttggtgtggatggtatggggcagcgcaaaaaacactcacgctggcctctgcctgctaatgtgaacaggggaacccagcaggaaacagagcaacctgatct

SEQ ID NO: 439890 - DNA, 122 bp, Homo sapiens
gccgtaactttggctgagcgacttaacctctcctgtgcctcctccttcttatctgtaaaacgaggctcacggcccctacctcacagaattggcagttcctgtctcctaggtcgtaaggatgg

SEQ ID NO: 439891 - DNA, 122 bp, Homo sapiens
cctgtaatatctcactgtgacagcaggagcatcccagctgatcagtaggctggtgggggtcgcagcaacaacttccaggtccctcggaacatcagaaactagaaaaaaaagggaaacttttc

SEQ ID NO: 439892 - DNA, 122 bp, Homo sapiens
aacagggaaaatcaaccttgagtgatcaaaagaagggttgtgcctttaagcctggaggggcgctgcctccaaaagcataagcaactgccatccagggctggaaaaaacatgttgcagctgtg

SEQ ID NO: 439893 - DNA, 122 bp, Homo sapiens
ccgagtcttcacctgcgcggggatgcggcggaagcgtcgcgtcttcgcgagtggaggtttcgtgttcccgcggggttggtgtgtttttgaacttcacgagcttctcatcccccccgcaatcc

SEQ ID NO: 439894 - DNA, 122 bp, Homo sapiens
taatgccaaagaatgctttccagaaagattggatgcaagagtggcccaaatgggctagaacgcggacgatctgaactggtcatctgcaggtggacacagggctgggctcggagcatgaaacc

SEQ ID NO: 439895 - DNA, 122 bp, Homo sapiens
atcgtctccagcccacctgggtaattgagagcacgcgctccatcccaccatccttggctgcgtcacatccacagagtcctttttgcaggaaacataaagaaacccattggccggttcctggg

SEQ ID NO: 439896 - DNA, 122 bp, Homo sapiens
actcttgtgtagcccctctcacattgactagggctgacccaataggatgctgcaatgtgacggtatataactttcaaggataggtcataaaagacattgtgactctgccttggtctctcaaa

SEQ ID NO: 439897 - DNA, 122 bp, Homo sapiens
agcagtcagggaaggtcaagaagggtgatatctgaagcttgagcctagctggagcacgcccgagggtgggtgctttaccaagttccacatggtagcccctagagctgtgctgggcaaattgg

SEQ ID NO: 439898 - DNA, 122 bp, Homo sapiens
acagaagactacgtcgcgtgggccaaaggaaacagtcccgtcaataaataagcctctggccgacgcacctcacccttcccatccatacaagacctcaccttctccccggagccgcggaggct

SEQ ID NO: 439899 - DNA, 122 bp, Homo sapiens
gggtggggaggtgtgcaccgagcaggggggttgggggcagctttcacaagccactgcctccgctgactgaccttggcagactcaccttgggcagcttcctccctctgcagtgtctccccaca

SEQ ID NO: 439900 - DNA, 122 bp, Homo sapiens
gccggcctggcagatccatctgtgtgatagggtcttgctgtgctcatgcatcccctgggacgccacaggttcttgcctggagatctgctgcaggctgggaaggcagaggtactgaacatgta

SEQ ID NO: 439901 - DNA, 122 bp, Homo sapiens
ggcagccaggaagagcaaaggtagggcttccagaagccattttctggcagtctgggaggccggcagcccttctggcatactggcctgggctgccatgatcttgctggttttttattgttacc

SEQ ID NO: 439902 - DNA, 122 bp, Homo sapiens
cttaggagggcggggcctcggactgactctcgaatgtcccggatgtgcggtcttggaggccggcgtagcgctaagcttctcggcagcacctgcccaactctgtagaaggcgctcagtgtata

SEQ ID NO: 439903 - DNA, 122 bp, Homo sapiens
gctgcagacctcgatctacggtacataccaagcatttccactttttctgttatgtggtgacgtttttctgcttcttgtgggggggggggggttccagcatcaccagtggcacttcgtgtggg

SEQ ID NO: 439904 - DNA, 122 bp, Homo sapiens
gctttgaaggcctctatcaccagatgcaataaccagataaaattcctgttttttcccaatcgcttagttttttgttgttgttgttttttaactgagtagatcattctgacccagaactactt

SEQ ID NO: 439905 - DNA, 122 bp, Homo sapiens
ctgcgccagctccagcctcagttcacgctcaaggtcgtgcgctccaccgacggcgccagccgcttctacaacgttggccatctcaggtactagcccacggctggagaagggttgggagggaa

SEQ ID NO: 439906 - DNA, 122 bp, Homo sapiens
ggagacgagggagtgctgcaactctggaaaaacaagtcagctcttctgtggagctcgtcacgcattcacgggccttttgctatcattctgcctcaaaattgtccggaatccgccctctcctt

SEQ ID NO: 439907 - DNA, 122 bp, Homo sapiens
ttctgtgctttgggaggaaaactcatcttcaggtttttctccaacagaagatgatgatgacgttgtttagacactcaggaacagagattgcagattggcttaagagtgcgccctttattaaa

SEQ ID NO: 439908 - DNA, 122 bp, Homo sapiens
ccgcgctccgcagctcctgagggctttcgagcccagatggtcatctgagacgagaggtggcggcgaaggagagtctcgcctgtcacgctcccggagcaggggcttcatgaggtggccatgga

SEQ ID NO: 439909 - DNA, 122 bp, Homo sapiens
ttcagtcacccgccagtgccgttagagttaataaaatacgtcatcattttaaaactttgccggactcacagcttccgcccatcgtgcgcttcattttcactactgcagtgtcagaaggtttt

SEQ ID NO: 439910 - DNA, 122 bp, Homo sapiens
attaccattactttcattttactgatagggagcttaggcagagaggttagaatttgcttacgttgtacagaatggtaacttgtacagaatagtaacttaaagggccaggattaaaacccagg

SEQ ID NO: 439911 - DNA, 122 bp, Homo sapiens
gcgactgcggcgcggccacggccccgagcccgactcgcccttccgccgcagcccgccccgcggccccgcctccccgcagcgctgacctccacgcccggacccctggccaccccgacaagctt

SEQ ID NO: 439912 - DNA, 122 bp, Homo sapiens
catctgttctgccagctgctgttccttaggaaaagcgtttgaattcttgctgctcttcagcgctcatgcggctctgtgttagctcacccttccctttaaatgtttataatgatagaaatcag

SEQ ID NO: 439913 - DNA, 122 bp, Homo sapiens
aatctcctggaggatgcagcttggctaaaaataacttgaattactgagctcccaccctggcgcagaggaggggcctgggggctgcgggggcggcgcctggagggaatgttgccgcagccagg

SEQ ID NO: 439914 - DNA, 122 bp, Homo sapiens
actctccaacctccaactggttagtgattggtcttgagaaaaatcctcagcactctctctcgaatctgctttgtcctgactccatagattacaggattgagggctggtgggacaaccacata

SEQ ID NO: 439915 - DNA, 122 bp, Homo sapiens
ttaccacatccagaattttttttatttgacaaaccagaaatggaagacaacccatcagctcgtcttctgagctccttctagcgccaggaattccatagaaaccgcatattgtttgattcctc

SEQ ID NO: 439916 - DNA, 122 bp, Homo sapiens
tttgctgcttttaagcagcccaggcctgggacaggttcagacagaagcccaggctctgagcgctgggtgggagtcaggggggctgtgttacagaacagcaataggaagagctccgagcttgg

SEQ ID NO: 439917 - DNA, 122 bp, Homo sapiens
gcggggttgagaggggagctgggcctcaatgcgcaggcgccggcggaggggcggcggacccggctcctgccctccggggtctgtccccaagcctgcctgccatctgcccccgaaggcccccg

SEQ ID NO: 439918 - DNA, 122 bp, Homo sapiens
aaatattcatagtgaagcatggagaaaaaaagatagaaaaatacatgaataagtatgagacgtgcagaacatggtgaataggtctaacatttgaatttgcatttaacaagggaatgcattta

SEQ ID NO: 439919 - DNA, 122 bp, Homo sapiens
gccggtcatgcagaatattgcagggggaggcagcccgtgaggcttccacgacgctgagagcgtctatttaaacgactgtccttcatccgagggttcgctcctcccacctaagggtggatttg

SEQ ID NO: 439920 - DNA, 122 bp, Homo sapiens
cttgcctctcctggggtccctcgaacgccccagctaagaagggcgggggccttgccagggcgcgagcaacatgacgttcaaggtcttcctgtggcttctgtaaagaaatgttcacgtgggag

SEQ ID NO: 439921 - DNA, 122 bp, Homo sapiens
caccgctccggttcttccctgggcttccacagcagcccctgcctgcctggcgggaccccacgtccctcccgggcccctgtgagcatcttaccggacagtgctggatttcccagcttgactct

SEQ ID NO: 439922 - DNA, 122 bp, Homo sapiens
gtgccctccgtggccgggttaagaggaggtcccggagttctgctcacttcagccgtgtgccgggcactgcaaatcaggaagtgttggcgccggctggcgacctcccgcctggggccagggga

SEQ ID NO: 439923 - DNA, 122 bp, Homo sapiens
ttgttcatctctcttccagcactgaccatcctgtgttgtacagaagcgtttaaatgtgtccgtcctcctccaacaccagaagggaagctcccagagggcagtgctctgaatgtccctctcgt

SEQ ID NO: 439924 - DNA, 122 bp, Homo sapiens
ctaattgctctccgtgatggggagaaacttgttaaggtttcctcaagggagaaaagggagcgttacatgtggttaaaagggccatgttggaaataagatacggccgtctcaacacaatttca

SEQ ID NO: 439925 - DNA, 122 bp, Homo sapiens
tgtgttgcaatgccaccactgagcagctgaaagctttgtgacagtgtggggtgtcacagtcggacagtgactggtgagggtcactgtgaatggctgtagtgtgtgacagagcagaatgtcac

SEQ ID NO: 439926 - DNA, 122 bp, Homo sapiens
ctccttccccaggcgtctgaagctggcccagtttgactacgggaggaagtgcttagagatcgctcggctgacagagggcatgtcatgccggaagatcgcacagctggccgtgtcctggcagg

SEQ ID NO: 439927 - DNA, 122 bp, Homo sapiens
agccactaaacttgtagtacatgacgcccagagtccggcttcccgcatccgctgccaacgcgaccgccccagagaaggaccccgcctccccggctgtggtcccgagactcagcgcaaggacc

SEQ ID NO: 439928 - DNA, 122 bp, Homo sapiens
cacctcccagagcctggcgctcctagctactaatggaagttcccagaaggaagccctcgccggatgccactcacctggcttctcagtagcacctgagcctaagcccttcctacaccgcaggc

SEQ ID NO: 439929 - DNA, 122 bp, Homo sapiens
taggagtcatctctaccactttgctaaggcaaaccacaaaaatctgcttatacagtgacacgttccctcttattattctattcttttccctctgtagagcaggaatgcataggataagtggt

SEQ ID NO: 439930 - DNA, 122 bp, Homo sapiens
cacccgtttgttgtgtcagtgtagtaggggcactctcgccgccattaatgagagtgataacgctgatatcatagtcaatgcccggctccagccctgtgactgtgtagtatcctactgaggag

SEQ ID NO: 439931 - DNA, 122 bp, Homo sapiens
taggggagggcggtcggggtggcggtcggaaccgcatcctcttcccaggctggggaagcccgatctggcacggccgagggccccacagccctgctgagtggtgtttacagccccaagtcccg

SEQ ID NO: 439932 - DNA, 122 bp, Homo sapiens
ggagtcgccaggaacgtaaaggattttttaaaaatttaagcaggtgtttgctccaaggagcggacaactgcaggaggcaatttccttatctgggaaggggaaaaagcggagttgaggggagc

SEQ ID NO: 439933 - DNA, 122 bp, Homo sapiens
gaaatccaggctccagggtcagggaagatctgacccgggagaggattagggccctgctaacggcagcagtaacagcgggagtccttgcagcagggaggcttgcagagatcaagtgcacctac

SEQ ID NO: 439934 - DNA, 122 bp, Homo sapiens
ctggcccacccgtgagtcacggacagaacatgcagactcaggccttggtgacataagctccgcattgctaaaaccgcgtgacctcgagggctgactggcctgagaaccctggatggcgctct

SEQ ID NO: 439935 - DNA, 122 bp, Homo sapiens
actcggccatgcctctcgcgtttccgtacgaaaacatggcgcctcactgcgtgcggcgggcgactcttggctgggagccactggccacggagccccctgagcggtcatcggccatgttttcc

SEQ ID NO: 439936 - DNA, 122 bp, Homo sapiens
tgaaaacagagggtctcctatgcctttgaggagggtgagaacactgttttggctgcgtcccgggccatatgcagcgtatggtggccaatgaaaccgggcctggctcattctgttgcttgtct

SEQ ID NO: 439937 - DNA, 122 bp, Homo sapiens
ggacttaagaggcatctcaagggacaggaaggttctcataccatttgcccctgtctgccgcggcaccagaccttggcccagacaatcatcccaggatgtggtgtcaaactccggttctaacc

SEQ ID NO: 439938 - DNA, 122 bp, Homo sapiens
ttcatagtctcaaattcattctactctctgatttttatttctcccaacttactgtgtgcacgcaccccccctttttaatgacatttctctgatttgcactgccatcctctctcctacttcag

SEQ ID NO: 439939 - DNA, 122 bp, Homo sapiens
tcggaaactctcttctaacacttgcaaggtaccccttttacctataaaaggctctcgggccgcgagatcgccgtcagagcaaagccaggctactaccgcaggtaccaagacagtggcaccgc

SEQ ID NO: 439940 - DNA, 122 bp, Homo sapiens
ttaagtattttctttattgatgggaaccacacagactaaatgtatcagacttcccaagttcgtaggtcacatacctataacagaactcttttcctgggttttgtgacatttctaattgttgt

SEQ ID NO: 439941 - DNA, 122 bp, Homo sapiens
tgttgttgttttggtccttaaatgtgattttagctgcgagtaacgtgtcctcgctcctctcgcgctctctcggagggttttcagagaggtctcagtgcatccattttctcagatcctctcct

SEQ ID NO: 439942 - DNA, 122 bp, Homo sapiens
tggctggcggcaggtgagtgggtgtcgaggaaccgccaggcagcggagaaaacaggacgccgcagaaatcagattactcacctgcagctgctactacccagggctaataaaagcagagcttc

SEQ ID NO: 439943 - DNA, 122 bp, Homo sapiens
cccctcctcgggggactcttaccttaataggcaagaactgagagagggtgcgggaggcggcgccctgagtcctgtgggctgccctcaacccagccggccagtggagggagtctgacttctca

SEQ ID NO: 439944 - DNA, 122 bp, Homo sapiens
cctctctgttgccatcagcctgagtcatcctctatctgaaaaacttccaggactgaagttcgagttggaagcacgcgttctccttggtgaagtccgtcctgtcccaggagggctgcgctagg

SEQ ID NO: 439945 - DNA, 122 bp, Homo sapiens
taaagctaagaagccgcaagaaaattctagtttacgacggtcgtaatttaacaaacaaaccgggacttccggacccgaggaaggaggagcacggctccaccaacagggcatgcgcacatctg

SEQ ID NO: 439946 - DNA, 122 bp, Homo sapiens
catacttgcctttgagacagactgtccagtgggtgtgcaaggccatttcagaatacacaccgagaaaacaggagagtaggcagtgtgggttttgcggaaagacctcattttcatttcaaacg

SEQ ID NO: 439947 - DNA, 122 bp, Homo sapiens
taaatggccaaacgggagagttcattccctcactgcccccggcctgaggcctccctctagcgctttggcagagcctcacagggagcaactggcaaagcaggaatgtggtctgcagagcccca

SEQ ID NO: 439948 - DNA, 122 bp, Homo sapiens
attggggcggttgtctttctcccttccctaccgggaaagagggcacaggtgcgccgtcagcgccccaggtgagctggtagcactttgaagaccctttgtacccctacatccaggagcgacct

SEQ ID NO: 439949 - DNA, 122 bp, Homo sapiens
cagagcatccctggagcctccttttctccaccgtgaagctcacccacccccccgtccgaacgcaggtaagagcagtgagccccttgctggagaaagctctggataagcagcctctgctcaca

SEQ ID NO: 439950 - DNA, 122 bp, Homo sapiens
caatgctgtcattcagttatgcagaagctcatttgtgaaattctgtttctctgatttcttcgcaagtctcttaatggtcatttgtgttagattacatcaaactgatggatagccattggtat

SEQ ID NO: 439951 - DNA, 122 bp, Homo sapiens
ccggctccgccccgctcccgcgtgggcacaggcattgggctcccgggggttctccgcgcccgcccctgccggccctgaccagcctgtagtaactggcccctaggccgcagttctttgtcctt

SEQ ID NO: 439952 - DNA, 122 bp, Homo sapiens
cccgcctttctgccgggacgccaaggtccgtgggagcagcacgctggggcccttgtgctccggggatgcgaggacagtcattagttctgcagtaatcacagcgtccttcactttccacagca

SEQ ID NO: 439953 - DNA, 122 bp, Homo sapiens
aatgcctggaaaagtagtctgtatgtttgatgactctgttataccactttattccgagctcggcttttgtttttggcacatcataagtccttttaaaatactgtttgaataaatatggagat

SEQ ID NO: 439954 - DNA, 122 bp, Homo sapiens
cggccgcggaaggggcgtggtctcgggaggggccccgaggggtgggcggggccgggagtgcgagccggacggggcgcagcgaggggaccggttggtgaggtcctggaggctccccgccaccg

SEQ ID NO: 439955 - DNA, 122 bp, Homo sapiens
ttcagagcaatatttctctgatcacatccttttccttcctaccagttctgcccggggtttcgtgttgcttcccggattgtttggcaaagttaaccctcttcagggcacaaacgatcctaccg

SEQ ID NO: 439956 - DNA, 122 bp, Homo sapiens
ggggagccaggctcagaggatgcccctccctccagccagcccccggagtgggtgtgtgcacgtgtggggggcggggagggaggacatttgtcccgtgtctccgggaggggagcgcctttaag

SEQ ID NO: 439957 - DNA, 122 bp, Homo sapiens
cggagccaatttctcctgctgtctcagagggagaggagccaaggctgacccttggggctgcgctgaccctgggtttctcatgggagtgtggctggaaatggcttcatgggaatgcacctcct

SEQ ID NO: 439958 - DNA, 122 bp, Homo sapiens
tattctcacctttagtacttgagcagccacttcaagttcagcaggaatttatggagcactcgagcttctgtgatagcatcttctcctggttcttcaaaatccctgactgttctttttctcct

SEQ ID NO: 439959 - DNA, 122 bp, Homo sapiens
ggtgggcagtggtgggtgatgctgcctgaatcaccctggcaacagcctgcgccttaccctcgcttccttcctaggggcctcccctctcccccgggtcctgtttaccaggagataaagggccc

SEQ ID NO: 439960 - DNA, 122 bp, Homo sapiens
cggcctgcacagtccctagcggggggcactcggagggacacacccagctctgtaaggggccggggcgcgggcccagtacaggtctgcgcgcccgcagtctccgaacgctcacaggaccaggc

SEQ ID NO: 439961 - DNA, 122 bp, Homo sapiens
gctcaaagactgtaaattccttctttaattttactggtagtagccaaggcctgtgcaattcggctttcacccaatagcgcacactgccatgtcggccttcgaatgaggtagcgagtggtctg

SEQ ID NO: 439962 - DNA, 122 bp, Homo sapiens
gcaagaatttggtgactgaatgagtgataatgtgcttagtgcttttcaaaccacgggtttcgaaacttattagtgggttgcaaaatgcctctaatgggtctccaccagcattagaaaaagag

SEQ ID NO: 439963 - DNA, 122 bp, Homo sapiens
atgagaaaactaggctttgaaatttggcaaaaaaaaccacaacaacacttttaggcagggcgctgtgactcatgcctataatcccagctctttgggaggctgaggtgaatagatcacctgag

SEQ ID NO: 439964 - DNA, 122 bp, Homo sapiens
ccggatggcctctggccttggtgacggtgaggcccagctcccctcagttcccagccttcccggaaccccttgcctaacatcctgtgtggtaatcatgcctgttggccccattcagtcctgcc

SEQ ID NO: 439965 - DNA, 122 bp, Homo sapiens
ctcagaccccttcttgggatggttcggggaactacgagtttggaactcttgttcacacaccgaggcgcctgccccagagtttggacactggcattccgggagagcaggccttgcgggagtct

SEQ ID NO: 439966 - DNA, 122 bp, Homo sapiens
gactcatgagataccattgtgggtgattttggtaaacactgatacatggtagcaaagcagcgctcagtgtgtacagcaggatggagtcggactactcagcttggaatcctagctttgctttc

SEQ ID NO: 439967 - DNA, 122 bp, Homo sapiens
ctctgggcgcggatctggccagaagtgaatgcaccaacatccataactcctcggaaaagccggctgactcccctcgctcctttctcggatccgctgcctacgcctctggagcctcccggtaa

SEQ ID NO: 439968 - DNA, 122 bp, Homo sapiens
gtgtggttgtgtccgtcatgaagtgcagtgtttggctggtacctcgacatcgacgttgggcgagctttctctggggtcgtagtcatacagggccaccattctccgcgtcgataccgaatgac

SEQ ID NO: 439969 - DNA, 122 bp, Homo sapiens
cccgttttctatcgaccgatggggcccatagccaataggaagagctgataccgagaggcccggaatgagggggaggagctggcaaaacttggaggtgtgactagcactgccgaggcgtggtc

SEQ ID NO: 439970 - DNA, 122 bp, Homo sapiens
gaaatcccgactgtttttctttatattcatatgcaatacctctggccaccaattgagtggcgttttctttcacaccaagcaattcttcaattctctgtggatgacaactggatgtcctacaa

SEQ ID NO: 439971 - DNA, 122 bp, Homo sapiens
tgtgaaagaaaggggttataaaaattaaagtcaggcccctggcaaagtcctcggtccctccgagggggcatcaaggggaggggcgggggggctggcggcgagggggagggaagcggcgggag

SEQ ID NO: 439972 - DNA, 122 bp, Homo sapiens
gacttctggtgcgagggagaaccctatccaggtcccaaggtcttcccttgaagccactggcgcccaggagcggtgggccgaagacgtgccctaccctaccacaagggctgtgtctctacccc

SEQ ID NO: 439973 - DNA, 122 bp, Homo sapiens
agagaccacagtctggagactggggtaagcgctgttattgggttgggacttacgaactatcgatctttactggcgtttttgtgaatttcctgagggacggacatgcgtgtttgacctgccat

SEQ ID NO: 439974 - DNA, 122 bp, Homo sapiens
tatgtgttaaattttaataagaattttcttttttctttctcccaagccaaactggcaagacgcagtcaagaacgggacaatcttggcatgttggtctggtcacccaatcaaaatctgtcaga

SEQ ID NO: 439975 - DNA, 122 bp, Homo sapiens
ccaaatgcagagctcaagccccaattcctcgccaaacagcaagggcgtgagataccacggcggggcccagaatgcagaagagcaaatggaaacttccaactgcgcagccctgagctcctccg

SEQ ID NO: 439976 - DNA, 122 bp, Homo sapiens
atggtaggctccatttaaagagtgcctggtggcgcgcggtgtccttcttggagcagctctcggcgcccgcccgccggggtctcggcgatcgctgctcctcctcctccttctcctcctctttt

SEQ ID NO: 439977 - DNA, 122 bp, Homo sapiens
cagtgaatgctttgacattttgtgaatgcagatggtgctgagtgcttattctcatatgtacgttcttacatgtttgcacatttatgtgtactgccagtgcacatgtgtgagtaaatccaagc

SEQ ID NO: 439978 - DNA, 122 bp, Homo sapiens
cttcctgaagatggcctccgggcacgccttccagcctgacttggttaagaggatccgtgacgccatccgcatgggcttgtctgcgcgacacgtgcccagcctcatcctggaaaccaagggca

SEQ ID NO: 439979 - DNA, 122 bp, Homo sapiens
cccagacaagccaccgcagaccgcggcgaaatcagttaagctcttgcgtgcaccagttcccggagcagagtctgaaagtttttgtgtttctgtgcggctacttttaagtataaaaaattcag

SEQ ID NO: 439980 - DNA, 122 bp, Homo sapiens
aatccccattctcagtctgccccaagccctccaattccgagggcgctgtatgtataagctcgggcaggcaaaagtcgactgtgagaacacgccagcagagggcgctgtggccccatcagtcc

SEQ ID NO: 439981 - DNA, 122 bp, Homo sapiens
gcagagccgtagggttccacctgcggccatggggtgcttctagagcctccttcctttagccggacgtgatgcccccggcccacaaccatccccacactggccgagccccggatacctgtatg

SEQ ID NO: 439982 - DNA, 122 bp, Homo sapiens
atgttctttgtggcttatgaagaaataaacagtagtcttggtggctcttaggaatatatgcggtggggcttaagactcttgagaacgttgccagtcccagtgactgctctgagatgaggtca

SEQ ID NO: 439983 - DNA, 122 bp, Homo sapiens
tcttagttactataaaagtaaaaaattcctagcaagatgtttgcctttggaggaggcaaacgaagaatgtgagaaggagagcatctgggtaaaaggtacagagcttgtgacactttatgtga

SEQ ID NO: 439984 - DNA, 122 bp, Homo sapiens
agacataaattggtcacaatagaaaatcaattaaatgcagcatgtcaagcttgtggcctgcgccagcaattgaagaagggagaaggcagattttgcctctgctggagtaagctcatgatgtc

SEQ ID NO: 439985 - DNA, 122 bp, Homo sapiens
tagataattagtgcaagcctcagattaaagacccacagattgatgctgtccatagaaaggcggtgctggtggaatccttgggtaagaggaatccttgccctgatgaacagtgcacagagctg

SEQ ID NO: 439986 - DNA, 122 bp, Homo sapiens
aactgatgtcatttcccccttggcagacagcttcggctttgctgcgtctgagatatgtcacgagaaggtgggggtgggccagagccaggcagggggagtagcgaggagagcaggagacagtg

SEQ ID NO: 439987 - DNA, 122 bp, Homo sapiens
cagccctaaggcggtttttcctctatctcagtagatggaacatacaatcgggttttataccgagacattccattgcccagggacgagcaggagacagatgccttcctcttgtctcaactgca

SEQ ID NO: 439988 - DNA, 122 bp, Homo sapiens
agccgaggagaatccctttggtcctctaagctgggaagcgggcacgagcagcctcgttgccggcaagttggccacaaagtcacaaaattgtatagggcttgaccaacatcacaggagctggg

SEQ ID NO: 439989 - DNA, 122 bp, Homo sapiens
ctcccctccggctccgcgtcctgcctgtcttccccgggtcccaagtccgcccctgccccgcggagccttgctctttccacgtccagccccgcagccccgcagccccgccgcgccccgtggag

SEQ ID NO: 439990 - DNA, 122 bp, Homo sapiens
ctctcgggcataactgtcacgctgacaccagaacgccatacctgcaggcgtgtgaggaggcgcacgcgcagagaagcctgggagcgaacggagagcgacgtgggacaaacgtcatcaagggc

SEQ ID NO: 439991 - DNA, 122 bp, Homo sapiens
ggtgagtgaaggtgtccaggccacagacctgtcctgactctttgaaatgatgctgagacccggttatcccttgagccaggaatccttccccattggtaaatctctgacttacctttgccctt

SEQ ID NO: 439992 - DNA, 122 bp, Homo sapiens
tgggacccggcgcggggaggaaaagtgggagtcttgacccctccgccccctacgcacccacgcgcacactcaggctcgcctctcgcgccccgcttcccctgcaaggctccgaggccgccgtg

SEQ ID NO: 439993 - DNA, 122 bp, Homo sapiens
tgctgggcgccttggtgcccccgtaggggtcgcagaccatgcggcaggtgcccagcatctcgtagtgcgccgacgtgccggccgagctcaccagcaccgggatgaggatcaccagcagcagc

SEQ ID NO: 439994 - DNA, 122 bp, Homo sapiens
gccgcgtcgcagctgcagtgtcagcaagtgcagcctcagcaagcacaaccgctacctagacggcaacctgacagtttcaaactgcagggaggaattaaggaccgccctgggcattggtcctt

SEQ ID NO: 439995 - DNA, 122 bp, Homo sapiens
gtgctttagggaatttgcttcgatgcttcatgcctactacgcctttctctttaaacttcacgcttggggccctggctatgaaacagggatacctgaggcacaaaacctccctacctctcccg

SEQ ID NO: 439996 - DNA, 122 bp, Homo sapiens
aagctaagagatgacctgccctcaagtataatagcaaacaagttgacgggaggcagagatcggagcaaaaaactattcggtgtgagaagtgcctgggcctccaggaccaacaacagcagcac

SEQ ID NO: 439997 - DNA, 122 bp, Homo sapiens
ctctccttggctatttatagctgcgaccggccggcaattgcgtcagtcaggggcaggcttcggccggcgatgccaacggtgccaccagtccccctacattcccctacccttcctgggtagtc

SEQ ID NO: 439998 - DNA, 122 bp, Homo sapiens
caggagggatcagaggcggtgcccagcgcccaagccccaggccccacacccacacacaggcggcgacgcacccagctgcacacaaagacccagcgtagagaggcagacccccgacaggaggc

SEQ ID NO: 439999 - DNA, 122 bp, Homo sapiens
tgctgggattacaggtgtcagccaacgtgcctggccacccatggaagttttaaagagtatcgatactttggcctacaaatttctcccatgactactcaacatgtcttcgtttttccttcaaa

SEQ ID NO: 440000 - DNA, 122 bp, Homo sapiens
cttacatttcatgaaaagtacagaccatacccgtttagctagctgtgcaccttaactggtcgagaaggcgcgctgggggctgggtttgagggtgagcaaaaggcaagattattagtttgggt

SEQ ID NO: 440001 - DNA, 122 bp, Homo sapiens
cagcccccgcccggctccgctaatttctattttgacagtaactgtggcgagtgggcggcgcggcggggggcgcccgggactggcggaggctgcgggcgggagtcaggacccgacgcggaggc

SEQ ID NO: 440002 - DNA, 122 bp, Homo sapiens
agccgtccaggataggtgtctcccggatgctcagggtgccactggagttgtggccctgcacgcgggcattgcgcaggctctcccgtccgtgcccgccgatcagcacagaaggaatgtagtga

SEQ ID NO: 440003 - DNA, 122 bp, Homo sapiens
gaggaggccaaggtgcaactttcttccgtcgttccgaatccgggttcatcccacaccagccgcctccaccatgccaccgaagttcgaccccaacaagatcaaagtcgtatacctgaggtgca

SEQ ID NO: 440004 - DNA, 122 bp, Homo sapiens
tggggagactgatttgaataataataaaacgggtctcccacacagccggctttgcatgcccgtcttgataaatggttctgtctaggcagtgggcaagctgaactcattgggtggttacacat

SEQ ID NO: 440005 - DNA, 122 bp, Homo sapiens
cagatgccaggcccagctgaacctgtatattctgtgtgtgcttgtgtgtacctgtgtgcacgtgtgcacacgtgctccagtggttacctggtgagggttggtggctgagatggataattgaa

SEQ ID NO: 440006 - DNA, 122 bp, Homo sapiens
ggcgccgccgccccgcgccccgccgttgcagcgcctcctgggccgcgcgccggcgagatccgcacaaaatccagactcccggagcggctccctccagcaccgcggcgggcccaggaccaggc

SEQ ID NO: 440007 - DNA, 122 bp, Homo sapiens
aggccctgtcctcctcttcaaaagtgcccaccccggggccgcgcactgtgacgcccagtccggggacagtcagagatctgtcctcactagagcctggggcgctgtggctccgtatttctcca

SEQ ID NO: 440008 - DNA, 122 bp, Homo sapiens
tgttgtaagtgctacgatgagtgctgaatcaaatctcatatcccagagtagtcttcatggcgctgtcactaattgagctggtcactctagtcagtcacttctcagggacttatgtgtagcat

SEQ ID NO: 440009 - DNA, 122 bp, Homo sapiens
actcacggcacgtccttgagtgtgtggcgcagctcgcggccgaggttctggatgtacagccgcaggccctcctgcaccggctgccccgtcaggtgcacgttgtccaccgtcagctgtgcctc

SEQ ID NO: 440010 - DNA, 122 bp, Homo sapiens
cccggggcactgcagataactcagaagggcgccaaatggatatctgacatttgagggaaacggccaccgcagtatctgcaggacaccgcgtgaactactcgctcgagacagttcagcttcaa

SEQ ID NO: 440011 - DNA, 122 bp, Homo sapiens
agcgcgctggcggcgggcggtggcgttgcgcgcggggtggcgaaaggatgtgcgcgggatcgcgggggagggggagggagcgcgcgggctagctggaggcgggagggggcggagccctgtgg

SEQ ID NO: 440012 - DNA, 122 bp, Homo sapiens
gatggccggctttgggcaccgggggtgggggctacgctacgcgtgaagggcctcagtcctcgggctttagttcaggaagaaaatgaaagctggaggtctcgtgggcgggactggaggcggcc

SEQ ID NO: 440013 - DNA, 122 bp, Homo sapiens
agaccacacccaggcccgcacagagtgggggtcggagtcccacagctcaacaccaacccccgcattcagcctcttaccagccaggcccctgtggatgatttttgccatttaaaagtcatttg

SEQ ID NO: 440014 - DNA, 122 bp, Homo sapiens
ccacaaacctctttttcaaaacttccttccaagctaagcatcttttaataactgagccaccgaatataaagaaagcctttctcatgaccatctttatgccttgatttcaaaaaaattaaacc

SEQ ID NO: 440015 - DNA, 122 bp, Homo sapiens
ttgggggtgagggcccttctgctcctgggctgtgggggtggccctaccctgactgcacagcgccggacacgcacacatgcgcctgcggcagccgtgtcatcacacggacctggggcctggct

SEQ ID NO: 440016 - DNA, 122 bp, Homo sapiens
agactggggcaacgtgcatagccagaaagtactttcaggaaagaggaactaatagcaatgcgtaaaagatattcatgtctgcttggctataatatagggcctgtgctgggttataccagggg

SEQ ID NO: 440017 - DNA, 122 bp, Homo sapiens
ggtcaccgtatatatttaagtgcacagaattgaggtcttagagtgtctaattgcaaagggcggcagccactttcacaagtcagcatcctacggaggagtagctctgcagtccctcacttgcc

SEQ ID NO: 440018 - DNA, 122 bp, Homo sapiens
caagtctgatattctcctcaagatgacctcttgtcagtttgtttcctaatgtacttcttccgttcctctagtctcttgacacttctcttttctttccatctcttacttgctggctttccttc

SEQ ID NO: 440019 - DNA, 122 bp, Homo sapiens
tttgcccatattcattttgaagacctgaaatgaagttgaactataaattgctctaaaattcgtgaagcagggtgaaaaggtctttgctttgttttacatttaaatccagctgtctattttct

SEQ ID NO: 440020 - DNA, 122 bp, Homo sapiens
gcccggggccggcagggccggccggttgctccgagtgcggggccgccaagcccacgcccacgcggaactccagctggcctgcaagccccgcgcgcagccctggttcccgctcgcgcctctct

SEQ ID NO: 440021 - DNA, 122 bp, Homo sapiens
gcagaaaagagcatcactgccagctagccgccatggatgcagcagcctgaaacttgagagcgaaagtgagataaatgtcaaaggtgtttcaagccagacattttcacaattgtgaagaaata

SEQ ID NO: 440022 - DNA, 122 bp, Homo sapiens
tcccggtcagagccacggcgggggtctctcgagggcagcagtgtgaggggttctctgaaacgggaaagacacggtcgagaatgaagggtaggtggagcgtttctcggcggatggaaggatga

SEQ ID NO: 440023 - DNA, 122 bp, Homo sapiens
ggaccccggccctttgtgtgtgaattgtttatgcaccagtcatttttcactgtgagttttcgtgacactattttgcaggagcccatggaagtgtgtgagaaggggtcgcaatggagatcact

SEQ ID NO: 440024 - DNA, 122 bp, Homo sapiens
aagcgcagagggccgcgggtcacgtggtgggcggggtgggggcgtggcaccaggaagcggcgtccgcgccgggcccagagccgcagccgcagccgccgctacagtccgggccgggctccacc

SEQ ID NO: 440025 - DNA, 122 bp, Homo sapiens
gattctgggcatgggattaatatgtgacgtcaaacccagggttgctggccaatgcccccccgaccaggcccaggggctgaaaaatggatgttggaggctgggatgaacatgaatgtgtagca

SEQ ID NO: 440026 - DNA, 122 bp, Homo sapiens
ctcttgagaaactgccaaacatttgcattgccagcagtcatgagtgagaatttgttactccgcatccatcaccaacatttgatggtattgtctgtttttaatttagccattctagaggatgg

SEQ ID NO: 440027 - DNA, 122 bp, Homo sapiens
aagtaggagaagagcgagtccagctcgtcgggacagaagagggagtctcggcggaacttacgatccagggtgcccactgcaggggcagtgcgtgttcagagtgtggaacaggcccggggtgg

SEQ ID NO: 440028 - DNA, 122 bp, Homo sapiens
tggggtctgaccacctctgccctcctctccatgggatggtgggagtagtccgtgagctgacgaggggccactggcttgctgccttctctggccttttagactccaggcttcaccatccacag

SEQ ID NO: 440029 - DNA, 122 bp, Homo sapiens
gcggttggctctggccttgagaacccgaccttggggccctttgattggaagaacgtgcagcgcacctcggcattgagggcggcttcctcggggcgcggcgccgcccgcctctgagtgcgcct

SEQ ID NO: 440030 - DNA, 122 bp, Homo sapiens
cagggacagaacagaatgggctgatacagatccagtgccgcagaatgatggccccaatcccgtggtccagatcatttatagtgacaaatttagagatgtttgattacttccgagctgtcctg

SEQ ID NO: 440031 - DNA, 122 bp, Homo sapiens
tcagccagcgcctttgggaccgggacctggcgacggaatgccgaggacaccggtgttcgccgcgcaggggaaactgcggagcttcccgctgagccgtgtggggctttggtcacccgggtgga

SEQ ID NO: 440032 - DNA, 122 bp, Homo sapiens
gtgtctgcttgctcttcaagtacctccaccaagctaatgacagtccactttaggacatcacgggcctcgaggttacaactttcccaggtaaggagaatcccaggtagaggcagcaagtcact

SEQ ID NO: 440033 - DNA, 122 bp, Homo sapiens
ccccagggccaggagccagccttggccccagacatttgttctccattgtcctgagcacaacgctgaaaagcggcgctgaataaggatgctgggacgcaaagagggcgcccggggtcatctgg

SEQ ID NO: 440034 - DNA, 122 bp, Homo sapiens
aatggagaaggtattatttttgtttttatttttttagaaacaggttcccgctatgttgcccgggctggagtgcagtgactattcataggtgtgatcatggtgcactacagcctcgaactcct

SEQ ID NO: 440035 - DNA, 122 bp, Homo sapiens
tccgagccggagtccccgtcagacctgggaggcaggagtgggcggggcttgaggcttgcccgcaaggagggagagaaagcttcgggggcggcccctgagccccggttcaggattgggcagcc

SEQ ID NO: 440036 - DNA, 122 bp, Homo sapiens
ctcatcaactacaataatctaatgaggcaggagccttctcagtgatctccactttccagacgaggaaacagagacacgcagagaaagacagaggcttgcccgaagtcgcacagccagtgttt

SEQ ID NO: 440037 - DNA, 122 bp, Homo sapiens
acttgttcttaactagtgtatatattaagctctttgaaatgtgagtattatgggaaggatcgcagttgctttaaattatagaagttggcaagtccctgggagaaggagtgggaggttgttta

SEQ ID NO: 440038 - DNA, 122 bp, Homo sapiens
acaaaaaaaatttttttaaatgctggtgttgtgtccggaattggttcctgcaggtgggttcgtggtctcgctgacttcaaaagggagccactgaccttcacggtgagtgttgctgctcttaa

SEQ ID NO: 440039 - DNA, 122 bp, Homo sapiens
tctggatggtccagtgggcttcctctttggtgcatgtgtccaacgggacactctgcctctcgcctcggatgcagccttctagctggagagcagagacagcgtttgtctcctggccccacagg

SEQ ID NO: 440040 - DNA, 122 bp, Homo sapiens
aggagcccgagacgctggaagagtcggtactcctccgcttccggcgctcgctgcgctccacgctgctcccgccccaacagctgccgccgctcccaccgccggtgacacttccactaaaattg

SEQ ID NO: 440041 - DNA, 122 bp, Homo sapiens
ggccgcgcgcgcgcgcgcaggcctactctgggcgtggcctgccgctgcgtgtttttttcacggtttctcattctcggtcgctaggctttgagggtgctggggttgctgctgcagagaccaga

SEQ ID NO: 440042 - DNA, 122 bp, Homo sapiens
aattgcccgagaggtctgctatccgttaactgacactcggtagcggccgctgcggaatttcgaattgcgggaaacccgcagacttagtaaggtaaaagcgcagtaacacgaggtttccgtag

SEQ ID NO: 440043 - DNA, 122 bp, Homo sapiens
cagcatcatctccttgccatgctccaggtgtctgagcagccacctagtgcagtgacccatcggggcttcccttgtggcctccgcggtccagaacctctcccaggtgtgatggatcctccaag

SEQ ID NO: 440044 - DNA, 122 bp, Homo sapiens
ctggaggttggagtaagctccggacctccttgaccctcacgggagcactggggtcccagacgctatcctcggttatcttaaatccagaggctgtggaggcatggggcaaattgtgcccgcag

SEQ ID NO: 440045 - DNA, 122 bp, Homo sapiens
cggcggctccgggaagatggcggcccgggcgggtttccagtctgtggctccaagcggcggcgccggagcctcaggaggggcgggcgcggctgctgccttgggcccgggcggaactccggggc

SEQ ID NO: 440046 - DNA, 122 bp, Homo sapiens
tatgactccccatacagcaggaggcgtacacccatcctgggatattattcctaatatccacggagaggagaggctgatatgactcccagtatcgcagggggtgtacatcctgtctgtgatat

SEQ ID NO: 440047 - DNA, 122 bp, Homo sapiens
gcacactgaaccacgtcttcgccttctagaatttcctgagcagggctcactctggtgctccgagctcgtgtattccgttccacctgcctgatgcccttccctcccccttttctcccactgtt

SEQ ID NO: 440048 - DNA, 122 bp, Homo sapiens
atgtccaccacgatggtgaagatgaggacgcaggccagggcggacgccagccacgagggccgcgcgccgtccccgcggagcacgggctgggaggcgttgggcagcgcgctgccgttgccctg

SEQ ID NO: 440049 - DNA, 122 bp, Homo sapiens
ccactttcattcaggatcaactccacagctccaggagaacccacaatgcaccgcaacttccgcccccgaaagccccgccccctttccgaggtcagagggaaagaagaggaagctcagcggaa

SEQ ID NO: 440050 - DNA, 122 bp, Homo sapiens
aagatagatacttcaattcttataaaggtattaaaaacacatgttcttaaaccaaccctacggtactgatactatactttgtgggcttaaaacataactgttttgtgccacacaactgcttt

SEQ ID NO: 440051 - DNA, 122 bp, Homo sapiens
gcttgcttacgatggcaaggattacatcgtcctgaacgaggacctgtgctccttgacagccgcagacacggcggctcagatcacccagctcaagtgggaggcggcccggggggcggaggttc

SEQ ID NO: 440052 - DNA, 122 bp, Homo sapiens
aggggcctggaggctggtcagagacccacacagagaccatccttttcccttcccaagggacgctgccagcctctgcaagaagactacccaaaggctggtggatggcatggaaacatgagtgc

SEQ ID NO: 440053 - DNA, 122 bp, Homo sapiens
gagggcgaacgctttactatgccaaaacggcaaaggtgaggccccatgcaggaaagcacacgcgaggacatcacaggagccgtcccaggggaggaactgggggtgctgagtccttgtgtggg

SEQ ID NO: 440054 - DNA, 122 bp, Homo sapiens
acggctatgaggtggcagctgccgaggtgagcgcccagatgcctggatcctgtgggccaccgcccgaaccaccccctcattcatccatttatgagtagtttatcccagcagtgcttcgttcc

SEQ ID NO: 440055 - DNA, 122 bp, Homo sapiens
ctcgcgctccggttcctgcctcctccgctcggcgttgcagcctcctctcacccttacttccgcctgctacgccctgaaataccggaactcaccaacccgcccggatgtgacgtccctctgcc

SEQ ID NO: 440056 - DNA, 122 bp, Homo sapiens
acagtaggggtgcaccttcattccacaggcaatgttcagaagaagcaaattcgcctcagccggccgggtgtgttggctcacacctgtaatcccagcactttgggaggctgaggcaggccgac

SEQ ID NO: 440057 - DNA, 122 bp, Homo sapiens
cgggctcggggcagctgcgcggcgtccttggaggcaggtgctggcggcaagacgagctctcggaggatgctgcggcgcggggcgcgtcgcccccctcagtccaccagagcccggatacctca

SEQ ID NO: 440058 - DNA, 122 bp, Homo sapiens
ggtagggtctggtcaggcttggtggctcatgcctgtaatcctagcagtctgggaggctgacgtgggtggatcacttgaggtcaggagtttgagaccagcctgctgaacatggcaaaagctca

SEQ ID NO: 440059 - DNA, 122 bp, Homo sapiens
gtggagacatcagaggtcaaggtccaagcttaggaagtcttcatctggggactcaggaggcgcctcccctgaagaccctcttaccaggttgataatgatcccccgggggccaggagctgcat

SEQ ID NO: 440060 - DNA, 122 bp, Homo sapiens
gggcctggctcctaggagctggggctggggctgtggctgcggcgcccttgccccacctgccggcggaagtagcggatggcagagatggtgccgacgttggccagcaaggctgcaagagaagc

SEQ ID NO: 440061 - DNA, 122 bp, Homo sapiens
gaaggcagggctctgggcacactctacagggaggacggcttcagtcatggtgcatacacacgatgggctctgggcacactctacagggaggacggcttcagtcgtgcatacacacgatgggc

SEQ ID NO: 440062 - DNA, 122 bp, Homo sapiens
ggcggctcctgcggcggcggctgcggcagcgacggcggcggcggcagcggcagcagcctgcgcagtgccttctgggaacggaatccccagggctgcccctggcccccatggcgcatgcgcgg

SEQ ID NO: 440063 - DNA, 122 bp, Homo sapiens
agcgctgggctgggggcctccaacccggaacagaagccggccacaaccctcgctccctgtcgtcgcggccgttataggccgaaagcaaaatccaatcccgggccattgtgggcggattgcca

SEQ ID NO: 440064 - DNA, 122 bp, Homo sapiens
aagtacttctctgacatttcggtgattttgatcacggggcctttgctgcccttcttctttcgggagggggccttggagaggcctgatctggaggcagctacagggaacataaggggtagggg

SEQ ID NO: 440065 - DNA, 122 bp, Homo sapiens
ctgaaaataagatgctgcaactcagtaggtgggaataaatcagcacaaataagcagcacacgtactcattcctttgtgcttaaaatacttagttatgaatctctatgaaacctacatactgt

SEQ ID NO: 440066 - DNA, 122 bp, Homo sapiens
cgacgacatgggcttgtctccgttactcatccaagtttgtcttgagactgggctgtgagccggcactgcagtgaaacgccgcagatgaggaagtgcccaagtcttccttcgggaagttctcg

SEQ ID NO: 440067 - DNA, 122 bp, Homo sapiens
ggtccctaagagaagccgagcccggccccgcccccgccggccccgcctccttgtaggccccgcccccagccgccaagtcctgcctccggataggccccgtcctcacacctcccagccccggc

SEQ ID NO: 440068 - DNA, 122 bp, Homo sapiens
cactggcagaccagcacgagttctgggtggccgtgggctctgcgggccctgcactctgagcggcccactggcgctgccggccgggcagtgaggggcgtagcacccgggcccggcagctgcag

SEQ ID NO: 440069 - DNA, 122 bp, Homo sapiens
ttgcaagcttgtgaagtaggtagtatgtctttaattaaaaaaaagcagcggcagctcagtcgccccaagggacttgcccaagatggcccagctagtaagtgattcaggcaggattcaaatcc

SEQ ID NO: 440070 - DNA, 122 bp, Homo sapiens
gcttcttgccatccttcttctgggccttggtcaccgccttcttggagcccttcttcggggcgggagcagacttggccagctcgggcataatgaaacaatagtggcaaaaccaaaacaagaag

SEQ ID NO: 440071 - DNA, 122 bp, Homo sapiens
actagtaaccacactacgcatgcggccccctcttaagcagtagcagggctagtgcgcatgcgttgattaattcgggctgctcaagggaggaacaaaggagactggaagcccgggaaaagatg

SEQ ID NO: 440072 - DNA, 122 bp, Homo sapiens
gacggggcggcggggcagaggcgctcccctcacctcagacgatgggtggccgggccaagacgctcctcacttcctagacgggatggcagccgggaaaaggtgctcctcacttcccagactgg

SEQ ID NO: 440073 - DNA, 122 bp, Homo sapiens
gtgagaaacggccccaggaaattcccagggcaaggtcgttttcggagaacaaagtcctctcgccccctccccacgcctgcagcgagacaaaaagcctcagggaggtgagaggtgccgcaccc

SEQ ID NO: 440074 - DNA, 122 bp, Homo sapiens
agaggcgccagtaccagcatagcgcccccacgcgccgagtcggggaactgccgcgggggccggccccgcccaccagcgcctgcgcctgcgcagaggcaccgccccaagtttgttgtgaccgg

SEQ ID NO: 440075 - DNA, 122 bp, Homo sapiens
gctttgtactgtcattctgctcagtaaagcctacagccttttttctctcggtcgggtccacgtctctctctcttgccgcgggctgccgccaccccaaccctttggcgtggctaaggcaacaa

SEQ ID NO: 440076 - DNA, 122 bp, Homo sapiens
caaaattcagggccaagcccctacaacctcctccacaggcaccagtgctcgagagacgaccgccaagcaccccgccctttgcagcactcaccgaccatggctctggtgcagtccggggcgct

SEQ ID NO: 440077 - DNA, 122 bp, Homo sapiens
gtagatgggggcgggaataggtagacctcctaggagagcggtcacaagtcccctctcctccgcatggacaccaggaatgcggggtctggcggtgctgggcgcagggcgagaagatttgatgt

SEQ ID NO: 440078 - DNA, 122 bp, Homo sapiens
gcaacctgcgctgaagatgccgggaaaactccgtagtgacgctggtttggaatcagacaccgcaatgaaaaaaggggagacactgcgaaagcaaaccgaggaggtgaaacggagggacctgg

SEQ ID NO: 440079 - DNA, 122 bp, Homo sapiens
cgagtgtgggcaagggcagggggagtgggcgaagctgctggttggtgcctgaaatctgtgcgttgcccctttaattgtgtccccagccctcgggcgtttctgtccaacgcccacgtcagcaa

SEQ ID NO: 440080 - DNA, 122 bp, Homo sapiens
aagaaaaagagaaagtttctcattctctgtcacccaggcttcagtgcaatggcccaatctcggctcactgcagcctcaaagtcctgggctcaagccatcctcccacctcagcctcccaaggt

SEQ ID NO: 440081 - DNA, 122 bp, Homo sapiens
aggcgtgacgtgaaagggtcattgttcccacttgggcaaccactcagggagctggaggaccggcccagagcaggcttcatgccagcactgcagccctgcctgctgcctgtggccggtcgggg

SEQ ID NO: 440082 - DNA, 122 bp, Homo sapiens
tgcctcccctgcgctccactagggacggagctgtctctgattccctcagccggagagcagcggctcccgccgtctccagcccagcagtgctgttcttgctttcccgcccagccagagtggag

SEQ ID NO: 440083 - DNA, 122 bp, Homo sapiens
tccggagcgcgtcacggtagggcagagcaagcctgccactgcaggcgccgcggaaggaggcgggctgtgcgctcgggggagggagctagaaagcgccttgtgtgccggcggccgccaggcgt

SEQ ID NO: 440084 - DNA, 122 bp, Homo sapiens
ttttcaggaaaaggctgcacaagcacctgttggtgaggtcaccaggaaggaatctgcttccggcaggaaattgcactgggtgagctctaaggctcctaaactctaagattctcgtatgtgct

SEQ ID NO: 440085 - DNA, 122 bp, Homo sapiens
ctgacgcaccggagcccgcgggggcggcagagacccgccccggcccgcaggacaccccctcggaacgcgcggccccccggctaagtcatgtttaacagcctcagaaattatcttgtctccgc

SEQ ID NO: 440086 - DNA, 122 bp, Homo sapiens
cagggctaagagcaacatctgtcttgtcactgttgtatccccagcgtctagacatggtgccgagacataacaggtaccccacaaatgtttgtaaaatgactgaatagttgaaaaggaaatta

SEQ ID NO: 440087 - DNA, 122 bp, Homo sapiens
cagctccccagtttcagcttctccatctccccagacctaacgctgggatttcagacaactcgtccttatgaggccagggagtcacacactaggggacaccaccaagtgcccttgggacgggt

SEQ ID NO: 440088 - DNA, 122 bp, Homo sapiens
tgtataaaaagaattataaacatggcacatctgagggcaagtcttttcaagcctctgtggcgatgcactattccctggagcctttagagggcagcagcacactggctgactccagcggattt

SEQ ID NO: 440089 - DNA, 122 bp, Homo sapiens
atcctgcggctctttgtggagcagctgtcccacaagacacccgactggctcggctacatgcgcttcctggtcatcccactgggtgagcaccacgccgtccacctgggcctgggcacagatgc

SEQ ID NO: 440090 - DNA, 122 bp, Homo sapiens
tgagggctgggaggaggcttcagcctgagttactgagggcctcagtccattcagagcaggcgaggaggaggaagtgagtcagtgggcacagcgattcatgccttagaattctgactttcttt

SEQ ID NO: 440091 - DNA, 122 bp, Homo sapiens
gggaaaacttctgcagaaacatcaaccgagcttccgtcttaagcagccaacgagcagccacgcagcgtgctgctagcgggacgggaggcgacacgcgggcgcgtggccggctgggacagtgg

SEQ ID NO: 440092 - DNA, 122 bp, Homo sapiens
tttgatcaagtaacctttacagaaaagagttctgtatagcaaagctgctttcacgccgtgcgtgacttgcaaaaaacactaggttggtgtgaactattaattagtttttctttttttttgtc

SEQ ID NO: 440093 - DNA, 122 bp, Homo sapiens
ctgctgccgggcctgcttgcccctccccctccggtacctctactccgggacccgcacctccggcagttcattcaggatccgtagtctgcccctaaccacccaccgtcttggcttcagggggt

SEQ ID NO: 440094 - DNA, 122 bp, Homo sapiens
tgggttgggttgccatagtgacacgcaaagcgtgctgggaacgccctgcggcatgtcgcacgcgtacttcatacaccatagagtatggttccgggtctgctggctagagcgtcacttcttcc

SEQ ID NO: 440095 - DNA, 122 bp, Homo sapiens
agaggctcggggtggtctgggggcccctccgctgcagtctgcccgatccctgccgggccccgccccctgcctcaagcacttcccgctcgacctgcgcacgtctatggatggcaaatgcaagg

SEQ ID NO: 440096 - DNA, 122 bp, Homo sapiens
ccgcgggcgccgggaccggtggcccctcgctcttttctgccggcggcatcggcctgcgcacgccaggcacgcatcaagctccctcctgccgccggcccggaacagcccaactgccaggagcc

SEQ ID NO: 440097 - DNA, 122 bp, Homo sapiens
aggacgaaggtaaacattaggggcttcttctctagctgctctggcgtgaagtcctaagggcggctccggtgcccgccaccgccccctgccaggagaggacgcggtccggcggaagccgccgc

SEQ ID NO: 440098 - DNA, 122 bp, Homo sapiens
atatatgttagatgcttcaacaactagggtctacacttaatatactgacatctaaggatgcggccaagaaaagctgtaattaggctgaattttattgccaaagttgttcttttttcatttag

SEQ ID NO: 440099 - DNA, 122 bp, Homo sapiens
cttggccctgcccgagcggcccgatggggttggggggcgggaagaaagggtggcaaacaacgattttaaaaatccagtcattagtatttgtaggacgaagaagctgatctgacagttgtcca

SEQ ID NO: 440100 - DNA, 122 bp, Homo sapiens
gccttctctctgccaggcacagtgcaaagtgccaatgtacggtatctcatttattcctcacggcaacctctgagctacttgcaccctccttctcattttacagatgaggaaacagacgcaga

SEQ ID NO: 440101 - DNA, 122 bp, Homo sapiens
taggccccgctaagaatgtgggaaggtggtggggcggcgactgaagtcgcttccgattggcgttgtcccaaggaagcctgcgcggattgatcggcggcaggcctccaatagagcctgctagg

SEQ ID NO: 440102 - DNA, 122 bp, Homo sapiens
cagtcggcgagaagtagcagtactgtccccagccatgcgagagaagctccggggaggcagcggcacccgcggggagcgggacacctagagctagccattggcactcggacgccgtcccggtc

SEQ ID NO: 440103 - DNA, 122 bp, Homo sapiens
ttgctgctgtggttgaactgcttgccacagcgagggcacatgaagatgaagtgctgcgcccgcatgtggaagaccagcttctccacgccctggaacacttccgggcacttggtgcacttgat

SEQ ID NO: 440104 - DNA, 122 bp, Homo sapiens
cctgcgttccccttaccaagagaggagaggaccaccaggaccaggaacagcgagaggcggcgcgtctccgagcccaggcagcctagaagccgacgcacagggtttccagagccgccctgacc

SEQ ID NO: 440105 - DNA, 122 bp, Homo sapiens
gaccccacagttctccctctgggaacagcaggccccagcctgacgcaggtcctctccagtcggacaccaccaccatgatcccagctggtcctcagaggggctgctggcctccaaagcctgct

SEQ ID NO: 440106 - DNA, 122 bp, Homo sapiens
tcttttcccccaagtttcttgtttttcttcttttcactctgcttactccctcccatcgcccgttcgctcaggatgtgaggggatgcttagaaattccacagcccacgccagccgccagctgc

SEQ ID NO: 440107 - DNA, 122 bp, Homo sapiens
aagagggtcagggccacaaggaaggaccctgggaggcttcctgctacataatatgagggccgggagcataacaaaggattgccttatccatgattgcatcatcaaactgaagcctgagacag

SEQ ID NO: 440108 - DNA, 122 bp, Homo sapiens
ggacaagctttgcagagtggttcatggagtgaggtggtgggagatttctgaggtgcggtgcggtgaatggagcaaatcagaaccaccccttggacgttgatctcaagcttggctccagaact

SEQ ID NO: 440109 - DNA, 122 bp, Homo sapiens
ccccagagccaagagcaggtgtaagccacatgcctagtctccccaggggctaggaaaagccgccttgagaccaaggctgcaaacaaaagctggtagaggagatttcctagctgtttcagact

SEQ ID NO: 440110 - DNA, 122 bp, Homo sapiens
aggacacttcctgtttacaggagactgtaaaacctttgccccgtcctcacttggtgctgacgccattttaagcctcggccttcctgcactcaggcgcacccaggcgctccttaaaacagctt

SEQ ID NO: 440111 - DNA, 122 bp, Homo sapiens
gacgtcgaccccaacatcggcccctacgtcttcgagctgccctttgtcccggcggccgtgcggaagaactggaccatcacccgcctgaacggtgagcccgccttaggccacggggagggtca

SEQ ID NO: 440112 - DNA, 122 bp, Homo sapiens
ttggttctggcccccgctttttctaacatgtcttctgaatgcttcctttttccctgcacacgcatgtacttcgagcaccgactatagacatttagatcaggtacccagtgtctgtctcccac

SEQ ID NO: 440113 - DNA, 122 bp, Homo sapiens
agtgatccaccctcctccaccttccaaagtgctgggattacagaactgagccaccgtgcccggccctgaaaaccttgataaaggggctcattttctgggaaataaaattacaaggataacaa

SEQ ID NO: 440114 - DNA, 122 bp, Homo sapiens
cgacgtagatgagtgcacactgccctctagtggccagccagccggtgagctttcgcggggcgccgagttgctgcgatccgcagccaagtaataacagcaggttttccacatttccggcaccc

SEQ ID NO: 440115 - DNA, 122 bp, Homo sapiens
ctactgtatctgtgacaaactgctccacccaatttcacagaaataaatgaacaagggaagcgggcatcatgatatttcaaattgtgacagaactgctggaagtggagcatagaggggtggtg

SEQ ID NO: 440116 - DNA, 122 bp, Homo sapiens
cgactccagcctggcggctccactccgcccgcgagcccaggaagccggctccgcggcccgcgcccgttatccaggacacgctccgcgcccgccgcccgctgccctttccccccgctggcctc

SEQ ID NO: 440117 - DNA, 122 bp, Homo sapiens
gggaagagctgaaaatgattttaatgaagaagaaaagctgatgtttaatttcaaaactgacggtttgaatagaagggagaggcatgaatttatcttgattctaacagaaagcattgtatttg

SEQ ID NO: 440118 - DNA, 122 bp, Homo sapiens
gatccctctcagacttgtgagtccctgctggagtcagaagttttaggcgaatcccaggcgcgccaaggaaagtgctacaaaagccatccatcttgcaagcgttggtgccgaggcgcaacgct

SEQ ID NO: 440119 - DNA, 122 bp, Homo sapiens
taaatagcaactgtagtcagagggagagaggcccagggaggaacaataatctaactaagacgcttgacattggaaactcctggagggcagggcagagatcatgcaggagatttaacagcacc

SEQ ID NO: 440120 - DNA, 122 bp, Homo sapiens
agtgcactttccggtccctccaggtcagcaggctgcccagcagcggcgaggctgcagccacgcccaccatgtccatgaccgtggtcaccaaggagaagaacaagaagggtgaggtggggcag

SEQ ID NO: 440121 - DNA, 122 bp, Homo sapiens
cgcctccacctttgcgggttttcccgtggaggccagaggtctggcttggctgctcgttctcgttgggggaaaccgtccagacgcacttgctgcccattctttacatcctgggggtgaatccc

SEQ ID NO: 440122 - DNA, 122 bp, Homo sapiens
ccccgtgaggctcggtgctgtctctgtggggccctgtccatggggcagctcccttggtgccgtcctggctgccctggctgcccaggagggcagggagcagggcccaggggagggaggagggc

SEQ ID NO: 440123 - DNA, 122 bp, Homo sapiens
tcgctcccttgtttagacagagcaatcaaggagctgctgtccttgcagcggggaggccggcgccgcctgcggtcgcacacacctgaattcctgcaccggggcagcccttggccccccgtgag

SEQ ID NO: 440124 - DNA, 122 bp, Homo sapiens
tcctctcagttctaggcacgggcgcggaggtggattacctggagcagtttggaacttcctcggtaggtaccaggcaattccgcgaagcctcacccacagggtgtccgagagcagccacggca

SEQ ID NO: 440125 - DNA, 122 bp, Homo sapiens
gctctctcagaggggcagatgcagctggatgctgcccctctacccacagtaacacagacccggcactgacgtggtggctctcacagtggcacggacccggcactgacgtggtggctctcaca

SEQ ID NO: 440126 - DNA, 122 bp, Homo sapiens
ctgaaggagaggaggggcgagtcctgcagcttcatggaggacacttccagcttctcctgccgccgccacttagcccgtcggttctggaaccacacctgcaggagagagcacaggggccgtcg

SEQ ID NO: 440127 - DNA, 122 bp, Homo sapiens
gcccagtctgccatcccggggcgcctgccttgtaccgggtcccgcggagggcggccttggcgcctgcctccctggagcctgcagtcctgcagtgggtgagtgaaagcgagagaagaggagct

SEQ ID NO: 440128 - DNA, 122 bp, Homo sapiens
tcccccaacactgggccacggtaaagcggttcatctgtttcctcaaacctgaaacacagccgggcttttcagggctctaaggcccccgaatgtggtgggtgccccggagaaggacagggcag

SEQ ID NO: 440129 - DNA, 122 bp, Homo sapiens
gcagaacacctaccagagctgggcccaggccaggaaaaggcaccaattcccgagaaaggtcgcctagccccattggcgtgggctcagagatgtgcagggaggaagggggagagggcacgcca

SEQ ID NO: 440130 - DNA, 122 bp, Homo sapiens
caggatgaaatgcctagtaatgctcacatgttacacttaccagagatctgagctacttctcgggatgtaacttcctctagcaggagaaaaaaatagtgcatttggacagccttcacaattag

SEQ ID NO: 440131 - DNA, 122 bp, Homo sapiens
cagtgtttgtcagcgtctggaggcttcgaacccaccaagcaaagacccagtgcatctgtgcgttgcacagtcgcatctgtgaatccctgcatccctcctgccctgcctgccaagactgatgt

SEQ ID NO: 440132 - DNA, 122 bp, Homo sapiens
cagccacatcacccttccggggctcaggcggaagaggctgcatgtcccgtctgcccttctcgccctctccagccgtccggttgggcttgtcacggcaccgcctaccaagacgggcggttaag

SEQ ID NO: 440133 - DNA, 122 bp, Homo sapiens
cccagctcccacagaatcacatgcagtcatttcacactccagctgcctgccccgggctcacgtccctccccgccatgctctctttttgtacctggacagacacacagctggtggccagggcg

SEQ ID NO: 440134 - DNA, 122 bp, Homo sapiens
aggagactcttctgggagagatgatgatgaaccgaacgccaaggacttagcaggggcgaacgacgtcaacagatgtccctccagactccggcaccagccggccgagcccaaacgagttctcg

SEQ ID NO: 440135 - DNA, 122 bp, Homo sapiens
aggcaagtagatcccgggagcggtggaggggcgggactccacgtctcctaggaaccgctgcgcgctcactgattggctgatcgctgctcagccgccattttcaaatccccggatgacggcgg

SEQ ID NO: 440136 - DNA, 122 bp, Homo sapiens
ccctgccttggtcaacagtttgagtcagagagatgggggccgggcacaatccccaccagacgttcccattcacaagaccctgtgggggctgggagacgccctggggcagcagccctggggta

SEQ ID NO: 440137 - DNA, 122 bp, Homo sapiens
gcccatgccatgctgtcccccaccactccctcagacagaggtccgggagagagaaggagacgtaccgaggctggtcctgatccccttacacaggatgaatcctgttcctgtcacagtggggt

SEQ ID NO: 440138 - DNA, 122 bp, Homo sapiens
cagagattcctacacagtgtggcatctggccaggggaccctcttcccatgaaggcagagccggcatggcccccggccatgggcccaccagggtctgggctgccacaccacccaggagcagcc

SEQ ID NO: 440139 - DNA, 122 bp, Homo sapiens
gaaatctttcaccaaaggggctagaagggccaggggaggggtttttcgtacgctgttccccgccttgtgacccagagctgagtggtgtaattgaagaggagtatcttcagcgcctcggctgt

SEQ ID NO: 440140 - DNA, 122 bp, Homo sapiens
tcctcctgcagacgcagcggcccgtcggtgagggcctccttgttttgagcagtcacggcccgggacttgaggacaagctgagccccgcgcaggccagacttttccaaggactctacgtgttc

SEQ ID NO: 440141 - DNA, 122 bp, Homo sapiens
gaccaccaagtaaacagggagtactacggaaaattgcttccttgggaactccatatagctcgtggcttttacaattaaaataaaacatcaataagtctgatcttgtggaaagacacaaatgt

SEQ ID NO: 440142 - DNA, 122 bp, Homo sapiens
gctttctcagcccaaggggcctcttcctttgcagacctcctgctgggtgagaccttctaccgaggatttctctctttacctttagtttttggaaagcccttagctccatttgttacagttat

SEQ ID NO: 440143 - DNA, 122 bp, Homo sapiens
actcctgacctcaagtgatccacctgtctcagccttctaaagcactgggatggccgggcgcgggggctcatgcctgtattcccagcactgtgggaggccgaggccggtggatcacaaagtca

SEQ ID NO: 440144 - DNA, 122 bp, Homo sapiens
gagctcagtcctcggcttcgatccacctgcctcggcctcccaaagtgccgggattacaggcgtgagccactgcacccagccgagagtttttcttaaagctaattatgtccaatttagagggc

SEQ ID NO: 440145 - DNA, 122 bp, Homo sapiens
agaattctttttttttttttcctttaataaggtactaggttttgacaagcttgcatcatgcgtgagtataagctagtcgttcttggctcaggaggcgttggaaagtctgctttggtaagtca

SEQ ID NO: 440146 - DNA, 122 bp, Homo sapiens
tcaatgccagttggagcaatttcagtaatacttctgcaattagggcacttgagtggaattcgtaaaggtctccatatataaaagttaccagatgcctgaagaatgttttccaaacaatttct

SEQ ID NO: 440147 - DNA, 122 bp, Homo sapiens
cccaagatataatttactcactgctctcttgcaaacaaaagggccgtgatagcctggcaacgttgaagagcccctctcaaaatccccaaggaaattacaactgggcaggaattcaggagccg

SEQ ID NO: 440148 - DNA, 122 bp, Homo sapiens
cggagaactgtgctcacgggctctgtcatgaaccctgaagtggcagccctgctttatgcacggaccctgcagcatccccagaggtgactgtgaccccgggcactgctccgagcaggctgggt

SEQ ID NO: 440149 - DNA, 122 bp, Homo sapiens
ctggccaaaggctcggaggtgggctttgtgcaaatcactgttcagagtgcctgggacctccgggtgagcagggtgtggcaagagctgaggctggaggccagaggcagtgctgcattttgggg

SEQ ID NO: 440150 - DNA, 122 bp, Homo sapiens
aaggcctctcgaggttttcaaatgggcccccgaggcctgggagatccccgagtagccacgcgggcgccacttcagggacgcggggcggcggctactgtgggccgggagggcccccgcacggg

SEQ ID NO: 440151 - DNA, 122 bp, Homo sapiens
agagctggcctgaacccagtttcctctcacacctctcctcagtgtgcagtgcctgtgctgcgtttggggaaatggagtaaccctcccaactctcccatcccttcctcttctgctcacccatg

SEQ ID NO: 440152 - DNA, 122 bp, Homo sapiens
agcacccatgccttgtcctgggggcacttgcaacttgcttctttctggggaataaatttacgataatggttaacatctacttgagggtttactatgtgtgaggcactgaactgcttacttta

SEQ ID NO: 440153 - DNA, 122 bp, Homo sapiens
cctattgtgtggaaaacagacctgaacccatccacaggatgctgaagaatccacaaattacggcacgcattgacagtgcctatgtacatgggaaggaggaaactcagcctgcctggggcatc

SEQ ID NO: 440154 - DNA, 122 bp, Homo sapiens
gcgtagccacgctggcttactgagactcctgatctgtaaacaggactttggtggctacagcgccctctttagccagaggccagtagcacaggtcaataagggcgtgtatgcacccttcagaa

SEQ ID NO: 440155 - DNA, 122 bp, Homo sapiens
cttggagtgagtcactggctttagcgcctttgaaaatatatttgtttgtcctgctggaggcggcttccaggaaaaatgaggacacgacatgcagctctttggtggggttcccccccctttaa

SEQ ID NO: 440156 - DNA, 122 bp, Homo sapiens
ggtaggaatgactgcaaagttcaaaactgctttcaacagatacctattggtatggtgtcacgggtaggtaggatatggatccttcagaggcatgtactttgtgtcatgtgcagtctataagt

SEQ ID NO: 440157 - DNA, 122 bp, Homo sapiens
tgagactgtctttctcgttccttccaccgggccagccccaaccagggtagacccagcctccggcccctaggaacccctgctcggagcctccgtcacattttgcagtgccgtcactgtgcaca

SEQ ID NO: 440158 - DNA, 122 bp, Homo sapiens
ttggatgagacctgtcccgtgtttcaaccagttcagtttgccccgagagaaacccagagccggtgcctggcacatagtaaatgcctgataagccttcagtgagcgaatgtaaccccaaaggc

SEQ ID NO: 440159 - DNA, 122 bp, Homo sapiens
ttggagaaccctgaactaacggctccatgcacacaaatgagggatagaaagaaataaggacggtttcttaggaacactttaatcatggagatacttgaagacagtacatttaggcttataat

SEQ ID NO: 440160 - DNA, 122 bp, Homo sapiens
tgtccatgcctccatctgtgagagtttgttgtattcttggttgacccaggtgatcacaatcgcctgttactgacaaattagattaccatgcaataagtactctaagcagaaggtacatatgt

SEQ ID NO: 440161 - DNA, 122 bp, Homo sapiens
tggatttcaatgtttctccagtaattagatataatgtgctctctatataaaatttttgatcgtcacaactgggaagaagggaactctcatgggtagaaagcaggaatgttgctaaagatcct

SEQ ID NO: 440162 - DNA, 122 bp, Homo sapiens
ccttctccagttttttgggtcttccccttggtttccttcccagagttgtggtggttttcccggtcttggcagcacccttgtttttgcttccctttggtcggccccgaggtctcttaggtgtt

SEQ ID NO: 440163 - DNA, 122 bp, Homo sapiens
aaaaaatccgggatacatgtgcacaaactgcaggtttgttacataggtatacatgtgccacggcggcctgctacgtaggtacgcgtgtgccacggcggcctgctacgtaggtacgcgtgtgc

SEQ ID NO: 440164 - DNA, 122 bp, Homo sapiens
cctcccctctacgcagttacctcatcatgaaaggttgctcgtagacacgcaacgctttctcgcacaccatgaaaatcgaacctccccctctacgcagttaccccatcatgaaaagttgcttg

SEQ ID NO: 440165 - DNA, 122 bp, Homo sapiens
aacttttgtaccctagacacctgcttgccccaccctaatccaggctcaagttagaatgcacggattctggctactttgaagggcatctactgggggacaggtctgggaaacgctttctactt

SEQ ID NO: 440166 - DNA, 122 bp, Homo sapiens
acatgcagcaagaaggccggcacacagccccgcatcgtcttctgagcctgcctgctgcatcgcgcttgggtcaatccctggcccagctaagcatctgcagccaggggaggatgagactagga

SEQ ID NO: 440167 - DNA, 122 bp, Homo sapiens
tgcgcgcgagccccgcccctccctacccgcgcagggtgtgctagcgcgctcagccctctccggccggcttagtctagttcccgggcctcgctcggttccagaactttccagaaaatgccgcg

SEQ ID NO: 440168 - DNA, 122 bp, Homo sapiens
cctggggtgcctgcgcagtgccctgagggatgctttgtgcctggagagtgccaggacaggcggggaggagtggttccgggaaaggccctggcaggcagcataggcctgggctccagggcctt

SEQ ID NO: 440169 - DNA, 122 bp, Homo sapiens
cccgggcgcgaatctcgggagccagccttgcagtgggggcttctcggcccccagactccacgctgcgcacgttcctcccgcacgggccgtcctcgctgcaccccacggccacgcccttcctg

SEQ ID NO: 440170 - DNA, 122 bp, Homo sapiens
cagaaggaattacacccaacacctttttgaggcttttctgttgttgatgttttaaactctcggaggttgatgaccactgggttgaaacaaatgatgtagcatagaaaaatacattctttagt

SEQ ID NO: 440171 - DNA, 122 bp, Homo sapiens
gagcaatgaaggccccatggagtcctggattcggtgtggccttgcatccgtggtgcaccccgtgctggtggatggctcaggacggtaagcattcctctgccccgcatgatgactgagggtgt

SEQ ID NO: 440172 - DNA, 122 bp, Homo sapiens
tgtttatcagttaatagtcatagccccctgaggctgagactgcattgcccagtttacaggcgaggaaactgaggcacagcaaatcacttgatcaaagctcttagcaatagcagagctgtggc

SEQ ID NO: 440173 - DNA, 122 bp, Homo sapiens
gattttccagtatgaggtggtattctgggtgccagagattcctgacgtcagatttagtgacgatgaacactaagcatcgtttccaactgctcatagctgtggcagattgtatccttgttccc

SEQ ID NO: 440174 - DNA, 122 bp, Homo sapiens
cggcgcagcagctccagattcactgctctcccctgcagctccccgcgcccccgccgctgtcgctgcctcggtgtcccccagccccagtcgcgctcttaggacagcgccgccaccgccgcctg

SEQ ID NO: 440175 - DNA, 122 bp, Homo sapiens
cgcctgctgcagcgggagccggccgaccacacactcgggctgtgcattcaacatcgcctccgtcaactgtgccctggaagtgacttttgagtcgacaaaccaaaaactcaacagccagtaag

SEQ ID NO: 440176 - DNA, 122 bp, Homo sapiens
cagaaacctgctgtaatgattaatgctacaagtcagcagaaactatcatcaggccaggcacgggagttcacacttgtaatcccagcactttaggaggccaaggctggcggatcgcttgagct

SEQ ID NO: 440177 - DNA, 122 bp, Homo sapiens
tgtgcgctcaggtggagcgcggaggccaagctcagtctgacccaggaaccaccaggtccccggcaaaacacagggaagggtctaagccctgacgtccctccagaccccacgcccattcgcgg

SEQ ID NO: 440178 - DNA, 122 bp, Homo sapiens
gcctgaggcagacgcaggactggagagggtgggctcggttcttgtggccgacagctagcacgctccgagcacagcctcggggactgagcagagcccagctacaccccacttccatgcagaga

SEQ ID NO: 440179 - DNA, 122 bp, Homo sapiens
gtgatttgagtcctttaggagtaaatctgtatctttagctgtcccagaagtaatcacaggcgttcattgtctattcaatgacaaagtattgtgaactattctatgaaataataaaatatcag

SEQ ID NO: 440180 - DNA, 122 bp, Homo sapiens
ggcaggcagcatctcggaaggagccctggtgggtttaattatggagccggcgctgaccggcgtccccgccctccccacgcagcctccttggtgcggtccaacacatcaccgggcaagctgag

SEQ ID NO: 440181 - DNA, 122 bp, Homo sapiens
ctgacaatgataatgggcataaacacagataaatattaacaatttcagaatctcgccgggcgcggtggctcacacctgtaatcccagcactttgggaggctgaggcgggcatatcacaaggt

SEQ ID NO: 440182 - DNA, 122 bp, Homo sapiens
tttttaaaaaagaaagagggggaaacaaagaaggaaaatacaaagaaagaaggtagacaacgctcttgcatagcccgaagcccagagagaaagagttggctggcttgtgagaagacatgagg

SEQ ID NO: 440183 - DNA, 122 bp, Homo sapiens
agctgcaaagttggagccggaggagaatctgggtgctcctttcaggatgcagagtggcctcgccagccaatgggggaagggggtggaggaagcaggcggagggagggtggagaatggctgtg

SEQ ID NO: 440184 - DNA, 122 bp, Homo sapiens
tgaagaggacattctatacaccaggtgaatagttccatctgagcaatggcctgaaggagccggccatgtggacagtgggttggcagaagctacaggtggaggaagcgacaggtgcaaaggcc

SEQ ID NO: 440185 - DNA, 122 bp, Homo sapiens
gtcagttctctcgggtttccttgatcaggcttcctcaatgcccagaactttgggatacttcgtggtggctctccgggatccaggtggccaccgtcctccctggctctctgtgttgcccactc

SEQ ID NO: 440186 - DNA, 122 bp, Homo sapiens
tccctccgaacgtcgcggtctccccgaacatcgcggtgcccccgaacatcgctgtctccccgaacatcgcgatctccccgaacatcgtgatctccccagacatgcccagctgaaggcactca

SEQ ID NO: 440187 - DNA, 122 bp, Homo sapiens
tggcttactctttgatcgatactctcctgctttcccctagcccccacagttagactgtcccgcagcaaagcccagacagacatcctatcggtctgagaattccttatcaaaagcttcccgaa

SEQ ID NO: 440188 - DNA, 122 bp, Homo sapiens
cggcagcaccccaggccggatggacgcttgttcctggttctgtgccccgtgagcgctcaacgccctggtgtgttcactgaccatggtgcctgggctgcggcgccgggcggggcacggcggga

SEQ ID NO: 440189 - DNA, 122 bp, Homo sapiens
cataggcgggggtacacacacggcgacccggcgacgcttcaccacagatggccacccacgcggacgcggacaggctcacattaacaaacactggcatacacaccagcacccgccagagtata

SEQ ID NO: 440190 - DNA, 122 bp, Homo sapiens
ggagctgagttccacgtgctccgatctggtggccagacctgaagccctcctctttgtttccgtagcagatgcatggcttcccttgtgagttttagcaggtgcatctgagaggcagctcctct

SEQ ID NO: 440191 - DNA, 122 bp, Homo sapiens
ttacctccagcaactgcacgtagctcgccgggaaccagccacggagcccgtcctccttctcgccttcccaccagccgccgtccgggacctgcagcagcgtgatcagctcgcccgcggcgaag

SEQ ID NO: 440192 - DNA, 122 bp, Homo sapiens
caccgtcagctgtgcctcgtcaaacagccactgcaccacgaacacagggcctgcgggcggcggggctcagttcggcctcccctgacccccgctgctgcccccaccccaggctcacagctcag

SEQ ID NO: 440193 - DNA, 122 bp, Homo sapiens
gcccatcgccacgatagcggctccacggcgggcgcggagttgggagcggcgctcgagcagcggctcggtgccctggccatccacactgaggtcgtggagcaccccgaggtgaggcccctaga

SEQ ID NO: 440194 - DNA, 122 bp, Homo sapiens
tccgggctggcgcctgcagcaggacttcccgctcagagcccgggagtagctgttggcttccgggcgcgccgcgttgaatcgcggctgcggggtcgtcccgtccttcccggggggagcatctg

SEQ ID NO: 440195 - DNA, 122 bp, Homo sapiens
caccccccaccccccaaacaaaaatataccaccacttaaagaggtcctcgctttacatttcgaagaagggatgccagttcataaacagttttcggtgatttacttccctgcaaatgagttgt

SEQ ID NO: 440196 - DNA, 122 bp, Homo sapiens
atttactgttgtatcataaggactaggtcagagaaaagaagcaggaaaaaaatgtgccttcgtggaactcacattcaagtggggcagtgatgagaggagacaaacagcaaaatgtaataagt

SEQ ID NO: 440197 - DNA, 122 bp, Homo sapiens
ctcctcccagtcgctccggagcccgcggggaccaagagcgcgggggcagggagaggtacgcggtcttcgcctccaggcccgctgggactaaccgtgccctggggacatgccagttgccaccc

SEQ ID NO: 440198 - DNA, 122 bp, Homo sapiens
ggaagtcattcaggcgggaaggcttttgttacgccttaggtgtgtcacctgttctgaggccgaaggtcccatgaatgacttcaggtgttgttccagcccctaagataggtgtcaggttacaa

SEQ ID NO: 440199 - DNA, 122 bp, Homo sapiens
agagaatcacatcacatctcctatcatatcagaatcttttctattggaggcaaagagcttcgggaaacattttactgtcttgccactagattataacatatatcggattgattattctgacg

SEQ ID NO: 440200 - DNA, 122 bp, Homo sapiens
agcacgcagaccagggcttgtttttgctactctccaccccacctctggaggggtcattttcgggccgcggggttgtgggggaaccggcgggagctgttcgctggccaggcctcactggagta

SEQ ID NO: 440201 - DNA, 122 bp, Homo sapiens
cgactgcagcttttaatagtaactactgcgctctgatgaaaaagattgttgtttccgtaacgggaaaagtagctccaatccaaggacgctgccatagccctgaccaatgaatgtggaagagc

SEQ ID NO: 440202 - DNA, 122 bp, Homo sapiens
ccagcttctgcactggattttttctctgcctatttcaggtcagtgctttggaaagtcttccgtctctcctgcaatctccacttttccctctctactgctaatagcataaaagcatgctatca

SEQ ID NO: 440203 - DNA, 122 bp, Homo sapiens
tctcagaagctcaagctgcaccaagctcctccctcccaggcccctcattggctgtgagggcggtgggaccttggaatcctcgcagcttccctttgaaccttgaaaatgaggagagagcaaag

SEQ ID NO: 440204 - DNA, 122 bp, Homo sapiens
ggaaggaaaatcaaactttattcccctctgtgacttcctctgtgtgtgtgcatggggaaccggctccctcgagatggatgctgcattgcttcaggaggcaagcttcatcctcttgggtcctt

SEQ ID NO: 440205 - DNA, 122 bp, Homo sapiens
cctcactgcgccccatttcccgccccgcccgacccccaggtttcggctcaccccgggacccggccctagcccctgcccccagcccaggaccgggcccagccacgctcgcccagacactcgcc

SEQ ID NO: 440206 - DNA, 122 bp, Homo sapiens
aagccactgggggctgggacccggcagggccaggtttgggccgcgagggccgaggagcagcgaggtgcaggggctgcgagggccgagccgggcgctgagggtccggcagggggcgtggaggg

SEQ ID NO: 440207 - DNA, 122 bp, Homo sapiens
gtcagctccttttgctttcacaacatttctcgtcttgccctctatcacagtgagctgacccgcctcctaacgcctcatccgggcctccctttttctcttttttccctctcttcctctctcct

SEQ ID NO: 440208 - DNA, 122 bp, Homo sapiens
tcattattgcctcaggtataatacctgtatgtaaaaaaattctgataaacactcctttctcgttatactatacactacactttgatgctcattgacatccttggactgtgaaacgtgccagg

SEQ ID NO: 440209 - DNA, 122 bp, Homo sapiens
ggtccagaataggtgcgcggtaattcctggctttcgccaccggagggcactcccggccctcgcttccctgccccgcgcacggtctgcgatcggctgggcttttaagccttctccgcgccggc

SEQ ID NO: 440210 - DNA, 122 bp, Homo sapiens
aacccatggggaaactcacttccggggatccaggcccgacgagggcgttcccgggcacctcggtgactctgaaactcatatctacagcaaagcttgaacgtttgtaactgttcactttggac

SEQ ID NO: 440211 - DNA, 122 bp, Homo sapiens
tgggagaagatttaagggaatcaacaaggaatgttgggacccaccagtaacaatcagctgcgggattccacttccacccctaggcagagagagaaggggagggaactggaactgtgggagaa

SEQ ID NO: 440212 - DNA, 122 bp, Homo sapiens
catctcatatatataaaatggacacgtggctataaaacaccatataagagatgagtagtgcgttttattttatatgccaatctactttgtttaaaaaaggtctgaatcaggacttgtgaaaa

SEQ ID NO: 440213 - DNA, 122 bp, Homo sapiens
cataaaggcatttaaccctggtggcacttggggagctttgaaaaacaccgatgctgggcccgcccgaagagattccgatttaactgttctgggtgaggcctgggcctcggtattattgcaca

SEQ ID NO: 440214 - DNA, 122 bp, Homo sapiens
ccccatggcctggacacccagctgtcggagccggaggactaggccgcttccgtattggggcggagatagcggcagacggacgtctgctacggccaatagaagctcggaagggggtgcggcga

SEQ ID NO: 440215 - DNA, 122 bp, Homo sapiens
gggaaggctggcgcagagcgcagagatggacgcgcagagctgcagccctagcagacgctccgagtgtgtgctgctccgctcctccaggctcatttccatgaatgcagtcacagccagcccct

SEQ ID NO: 440216 - DNA, 122 bp, Homo sapiens
gaaggagggcgggagttcctgacaggaagtgtggcaatttgatcatgcctgaacaggcaacggggcaacatttttttctctgctcctaagttattacagcaatgaaacagtccaaaaaggga

SEQ ID NO: 440217 - DNA, 122 bp, Homo sapiens
tccaattgttgatgaaattatctcaacatataaaagaaaaattgatccatttgcctaaatcgttcaaatgattcgttagttcactggttcagtttgcctggtgtgttctgggctaaaattta

SEQ ID NO: 440218 - DNA, 122 bp, Homo sapiens
gcaacctccctgcctgattctcctgcctcagcctgccgagtgcctgggattgcaggcgcacgccgccacacctgactgcttttcatattttttggtggagacggggtttcgccgtgttggcc

SEQ ID NO: 440219 - DNA, 122 bp, Homo sapiens
ctcacaggaataaccccagttctttccaagccagggcagatcaccatgtaggaggccacacgtacacccagactgtcagacaacacaggcataggcacacatgcacacagatacacacaggc

SEQ ID NO: 440220 - DNA, 122 bp, Homo sapiens
acaaacagcaagggtatccgtgtggctaattccaacttaaacccaccggttaggactgggcggcctcatcaaagttcaggttggttttgccaccccccgatcactggtcaagtgaagcgtgg

SEQ ID NO: 440221 - DNA, 122 bp, Homo sapiens
ccctgcctttgccgactttgtgataaacctaccagataatgtgaggagggttggtgtccacgtgctcggggccttgggagccaccagcgctggctggactcagccgctgcgctctgctccct

SEQ ID NO: 440222 - DNA, 122 bp, Homo sapiens
caagccactggcttagagcagttaagagactacaactcccagcaagccgggcgagggccccgcccctccgcgtaccgccggcggccccgccccgcgaagcctagcactctccccaaacctct

SEQ ID NO: 440223 - DNA, 122 bp, Homo sapiens
tgtttttctaatctttgaacctaggttggagccggaacgctgctccttcactccccctcccgggcccagggacctggctttgcaccctccccacgaccccgcctgccagccccccacgcgcc

SEQ ID NO: 440224 - DNA, 122 bp, Homo sapiens
actcagtgaacccaatgggatggacaacctgactttttaaacctaagggttgggcctgaacgatgattactttgcccacgtgccttctaggtgccgaatgtgtgttcctgtgatattgacgt

SEQ ID NO: 440225 - DNA, 122 bp, Homo sapiens
gctcagcggctccgcccctaccgcgagcggcgctgggcggggctgcgtgcgtggcgtgtccgctggaccaggggacgggggcgcgccgcaggtgtaggagctttgcgcgcctacctggcggt

SEQ ID NO: 440226 - DNA, 122 bp, Homo sapiens
gactgggcattttacctttcactcaacacattcccatcgggcacccacccaggccaggcgcggtgctcccagtgacggaaatggccaggatgaacgagctctgccctcctgggccctcctgg

SEQ ID NO: 440227 - DNA, 122 bp, Homo sapiens
cctccactgtgccagcttctttcacttactgtttttgacactcacatgtaccgtcgtgggcgccggtgtgtctttgttgctgagtgccgtcccgtcatatggacgtgcgtcgtgggcgccgg

SEQ ID NO: 440228 - DNA, 122 bp, Homo sapiens
ctatccgacttgatcgtgcagagttggttcgcaccgcccagtgaggggaagctgttttctcgtcgattgataggctccgggtctgggtaggagaggctgccctgtatgaggtagcttgaagg

SEQ ID NO: 440229 - DNA, 122 bp, Homo sapiens
ccacccgagcaccgcactcttctccctccctgaaccaagccccaagcaaggcggcacctgcggcagttatcaaaagagaagcctccaactggtggagcatacaccgacacagccgccatctt

SEQ ID NO: 440230 - DNA, 122 bp, Homo sapiens
tggggagggagacaaaagggcccattgaaaacccagacaggcttgaactgtaagtcacaccggagagagggttgctgaggggaccctagagggaggcagtcccggagcacagctttgcttct

SEQ ID NO: 440231 - DNA, 122 bp, Homo sapiens
atgtttttacagcaggaagcaagagaagtaaagaaatgaatttttgtctgtctttccaaacgtttgctgtgaatagcatacctagaggagaaaatgaaactaaatgcttagtttgcgttttg

SEQ ID NO: 440232 - DNA, 122 bp, Homo sapiens
ctcgccagacccgcgggggaactagcaggcttcgccggcgagggagggccgaggtgcggccgcggagagggtgcccggaggtgcccccggcgtccggggaggctcggggggcgcccacagcc

SEQ ID NO: 440233 - DNA, 122 bp, Homo sapiens
tggatttccgctgggtgaaggtgagcctgatgcgactccacaatgacaaaacgtcctgcacgtgttaaaaactcaatccggaccagcttccccattcgcctgccagagcagcagttaacctt

SEQ ID NO: 440234 - DNA, 122 bp, Homo sapiens
ccgggcctccggacaccattgggacctgcaattgctgggacccggtcccgggaggatgcccgagagatgcccacagggccccgggcagggcagaaagccgaagccgccgcaggctgccagga

SEQ ID NO: 440235 - DNA, 122 bp, Homo sapiens
gtcacctgggatccccagccaagggtggagcagagcctcatgggtctggtggctaggctccgcgcgcccccccccaccccgtgtgctgggcaacccacgcccctggtgcccagcctgccgcc

SEQ ID NO: 440236 - DNA, 122 bp, Homo sapiens
caggccctgagtgacagaagatgtgatcagacactgggctgagtgaagactgatagcctgcgctgcagccttttcagccggggcttcctcttttagctgagccaggcccatcccatagggta

SEQ ID NO: 440237 - DNA, 122 bp, Homo sapiens
ggattaatatgtacccttttggcttccacaggccatccagaacatattttttcactccagcgtgcagtttctttgacttagcatctcactgtgggtctctttaccctttcgtttgaaagtac

SEQ ID NO: 440238 - DNA, 122 bp, Homo sapiens
acaactgagcagcagctgaaagagctctttgaaaaacaaaaattcaaatcacagtagcctcgatagaagctatttttgatgaatttctaggtgtttgggtcacagttcctacaaatacggaa

SEQ ID NO: 440239 - DNA, 122 bp, Homo sapiens
ttgtacgcctgggacggcccagcgtggaggggacagtgtggtgcctttttgttcaggcttcgctcaggtcagcctcaccctttcccggggcctccatgcggcagaagggctctgttagtgcg

SEQ ID NO: 440240 - DNA, 122 bp, Homo sapiens
ggacacccctagaaagtgctgttctcatgtcacctcctcattttccagggtaacagtattcgaatctcctgaggacagcccctcaaaccccaaagcccctcacctattacctcaggttcatt

SEQ ID NO: 440241 - DNA, 122 bp, Homo sapiens
ggaacacagagccaaaccatatcagggcagaaagctgtcctgaaacatggtaactcctgtcgtgagctcttttggttcccaaacactgaagtggggcacctgataaggtttccttgtgttcc

SEQ ID NO: 440242 - DNA, 122 bp, Homo sapiens
cccggaaaccacatttcccagcgtgccgagcgcctctgcgcaggcgcaaagagtttccctcgttgccatgggaacctcgccccttctagagtcctggccgcttgactcagctaagcgcgaag

SEQ ID NO: 440243 - DNA, 122 bp, Homo sapiens
gcgggagagcatgtgcctcctaggcagacactccagccccgccccgcgggcagggatctccgggacccaccttacgtgcagcagctccaagaagtggcaggatatgagctgactatgaaagg

SEQ ID NO: 440244 - DNA, 122 bp, Homo sapiens
aatggcagattcatgattatcgtttgtgtagaaaacgtgatttatgactttattttcagccgcttatacttcttagtgtttgcaagatgacagaaaaggcagtgccatcgtgcagagacagg

SEQ ID NO: 440245 - DNA, 122 bp, Homo sapiens
cggcgaggggatgaagccatttcaggttatgcacttgatcccaaagagttttttgtgcttcgctctctaagtgactcataagcagaattcagagaactgttctcattagaatcttgttccct

SEQ ID NO: 440246 - DNA, 122 bp, Homo sapiens
tctaccaactatgagcaggcaggggctcttgctgctctgctcagtataagacgcccaggacgaagcacctcgaaactgctccacaggcattcgttgaataaaccgactgtaaactcgactca

SEQ ID NO: 440247 - DNA, 122 bp, Homo sapiens
gggaagcctggggatgtgagagcatcctaggcctgggctgcctgtggccagtctgttgtccgggtgtctagtgacccctggggtaggggcagatgccagtctgggaagccggattgtttgaa

SEQ ID NO: 440248 - DNA, 122 bp, Homo sapiens
ggttgtcccgggagacgcggaggacgcgcgcaccgcgcacccgggcgccaggggctggaccgccgctcgctcccgcagccctacccttgcccagcgagccaagccgcagtcccagcccatcc

SEQ ID NO: 440249 - DNA, 122 bp, Homo sapiens
ctttccacctccctgaccctgtcggattcggatgagcccattgcaaggagaagacgcagccgtcaggtaaaaggggctgcgttgccaggtgaagtttccagtaaccggccgagctgctgcta

SEQ ID NO: 440250 - DNA, 122 bp, Homo sapiens
gctgctcccagggttgagttggttttatgtgtttacgataagttaggttcaaagcgcccacgtgcagtgccttatctatcctgccccggcctttcctctaaggagtccaaaggataaagcct

SEQ ID NO: 440251 - DNA, 122 bp, Homo sapiens
ctcccccctgggccggctcccaccagtcatcccctctggtcccactgcccacccccaccccgaccgcaggaccttgccgcccctccagtccagagggccgggtcaaccccctcggggaaaga

SEQ ID NO: 440252 - DNA, 122 bp, Homo sapiens
gccctccggggcctgaggtgggaaccaggagaggccagcacttctagacagcagctcagtcgctcgctccacctctcagagttccgtttccaatattctccccccattgtctggaatccaaa

SEQ ID NO: 440253 - DNA, 122 bp, Homo sapiens
atcctgttaacagaagatgaagttcaaggatgggcgaggtctgcccagggcaaccagagccgcatcacctgcaggtggggctggggcaggaggaagcgtcgggtgtgagggtgtgccgtgca

SEQ ID NO: 440254 - DNA, 122 bp, Homo sapiens
aaaattatccttttcccactgactactaagattgctttgtttgatgttagcttcaacagtcgtttttaatgttccctactaccgtgcaaagtgaaagctgcttgtatcaaaaattccatctt

SEQ ID NO: 440255 - DNA, 122 bp, Homo sapiens
ctttgatctttctgaaaagaacatagaagaaataatgacataagctgtcctctcactccccgcctcggctacctaacagggaagggccccatgtctggtggacacgtgactcacatgacctt

SEQ ID NO: 440256 - DNA, 122 bp, Homo sapiens
gaagcaggaagaggccgctggacctggacgggaggacgacacctggattactgggtgtggcgccttccaccaacagtgctggccacatgtgaacagcacctggtagccttggaggctgtgag

SEQ ID NO: 440257 - DNA, 122 bp, Homo sapiens
tctactgctcccaggccagcatgacatctgcagtgaccattttaacaggctggacaccctcgtgtccccctaccacttatccttggcccacttgccacttgtgccttacccagtggggaggg

SEQ ID NO: 440258 - DNA, 122 bp, Homo sapiens
tccagccccacgcccggaccctcggagcagtaaagcccggctcggtggcccagcctctcccggaggtctctggcctcggccagagcaataaggtggatcggtgcttcccacccttccagctc

SEQ ID NO: 440259 - DNA, 122 bp, Homo sapiens
gagcagcctgagttctcggtcagccgcggggaccaggtggcccgcatccctgtcatccggcgtgtcctggacggcgggaagtcccaggtctcctaccgcacacaggatggcaccgcgcaggg

SEQ ID NO: 440260 - DNA, 122 bp, Homo sapiens
agtgccctcaagctcccaggatttaggtacccacagaaaggcaggcggaaaaacaagtcccgagacaggaatgagtctgactgtttcgggtggaatggctaaacctggcgcccacgctcaga

SEQ ID NO: 440261 - DNA, 122 bp, Homo sapiens
cgctgcagcgcgcgggtaccaggggccatggggagcctgctcgatctcctgtagatctcccgggctggcctcgcacaaggaggggaagaaaatggaaccaccaccagaatatcgccctccct

SEQ ID NO: 440262 - DNA, 122 bp, Homo sapiens
tcttccctctaccttcagaggtacctgcagggttcttgatccagaagctgctgatgtctccgtggatccggactgtgatcttctggagcagcccatccacgctgaacacaagtggctgccca

SEQ ID NO: 440263 - DNA, 122 bp, Homo sapiens
tgagcccggccgccgcgctggggcgggggcggccgcagccggcaccgggcgaggccgaggcggtctgcccagactgctgcagccgcgcgccccgctaagctcccagccccgcgcatgcgtgg

SEQ ID NO: 440264 - DNA, 122 bp, Homo sapiens
aatcatggcagaaggcgaaagagaagcaagtcacgtcttacatggcggcaggagaaggagcgtgttgaaggaagtgccgcacttttaaacatcagatctcatgagatctcactatcacagaa

SEQ ID NO: 440265 - DNA, 122 bp, Homo sapiens
ggccgcgctgaagagactggtaggagagcgccgcgggcggatggaggcgactcttcgccccgcctgagctcaggaggggctagcgcggagcgcgggtcccgcctccagccgcgggagcggcc

SEQ ID NO: 440266 - DNA, 122 bp, Homo sapiens
ctcttgccaccagtccccatcttttggtttcttacaagtgaaagtggcccagcgccggagcgccttcccttcctacactttttcattcgggaagagatttggcacctgagctccgctctcga

SEQ ID NO: 440267 - DNA, 122 bp, Homo sapiens
gaagtacaatattcaggtagggtaagagtgaaaaagtctcttatgcatgttcctatattgcgtgctctgtccccatttaatatctgctagacaagtcacaaaggcctcccaggggatagcaa

SEQ ID NO: 440268 - DNA, 122 bp, Homo sapiens
gcccttcctcttgcccgttctagcctctaaattctgggctctgtattaccagtagatccacgtaagagcttgcctttccttttagaccggtgtgctgtattttggatactggcgctaccagt

SEQ ID NO: 440269 - DNA, 122 bp, Homo sapiens
ccaaagtggtccagcagtgcggcatctgcgcctccgcggcggcaggggccccgcagcaggcgcgctgggagcagcttctctcggggcctgccgcgtttatggcttcaatagcgccgctccgg

SEQ ID NO: 440270 - DNA, 122 bp, Homo sapiens
aaacaatatcaaacgcatggggcttctgaaaggacaggatcgttcagtaactttgctgagcgctttgtcctctcccgggacacgggaccggggcgtggggacctccgcctcggcgacccacg

SEQ ID NO: 440271 - DNA, 122 bp, Homo sapiens
gtattttggcccatgtaaacctgctttgaggagtctcgggcctgcggcacggaggtacaacgtacaggcaggaagggagaaaaaggagccactgatctggctgagaacaagaggaactcact

SEQ ID NO: 440272 - DNA, 122 bp, Homo sapiens
gttaatttctgcttcctaaaaagtttgatcagggtcataaatcactcggtccacccttgccggtcctgcctggttccccaaggttctctccccgcagcccgctgcaggggcgcagggtgagt

SEQ ID NO: 440273 - DNA, 122 bp, Homo sapiens
ataagagaaaaaagaagaaatgagcagcctggtaggaagatggggcagccctgaaaggctcggtgaatgtaccagtctgaagctaacactccgcagatctgggatgctgccctccaagatgt

SEQ ID NO: 440274 - DNA, 122 bp, Homo sapiens
gaggagggaggggcaagcagctgagaggcggtctcgggcccgaggatcctcagctccaggcgcggggccccgcggcccaggtggccggctgggcgtggccctcggaccggggttagggaccc

SEQ ID NO: 440275 - DNA, 122 bp, Homo sapiens
aggaagggctccagcgcacaccaaagctgaacctcggtcaccttctctgtgaaatgagcgcgggaatacctgtgtttctgggcagctgtgtgaacccggtgagaagcccagggcacatagga

SEQ ID NO: 440276 - DNA, 122 bp, Homo sapiens
ccgaaggtggcagccgcaaaaacacggcctcgaaagcagtttcgaggacgatggctcctgcgtcccgggagtcgccatgacgccgcggcctgtcccagacccggcgagggaggggaccaacc

SEQ ID NO: 440277 - DNA, 122 bp, Homo sapiens
cgcctccacatcccaggcctacagctgctatcccacgcaccctcccccgcaccccgaaggcgaccagcgcctggatgctgcctctctgcctccacacatccggccgctttccagaaggctcc

SEQ ID NO: 440278 - DNA, 122 bp, Homo sapiens
cgtgtcaccagctgtcctccctgtatctgcactctaatatcctcttctaaggacacggctcgtgctgggcttagggctcgtcctagtgaccttaccttgactcgatcgcatctgcagagacc

SEQ ID NO: 440279 - DNA, 122 bp, Homo sapiens
gtccgaggctccgaggcggccccataagtgtgaatttctgtttataaacggcgacgcacacgcaaacgcctacacacccaggcagacacacccggaggcgtgggggaacatattccagacga

SEQ ID NO: 440280 - DNA, 122 bp, Homo sapiens
gcttagtttctggggattcgggcggagacgagattagtgatttggcggctccgactggcgcgggacaaacgccacggccagagtaccgggtagagagcggggacgccgacctgcgtgcgtcg

SEQ ID NO: 440281 - DNA, 122 bp, Homo sapiens
aacaaacaaaaaggaatgttaagaaaagccaaacaccatttggcactctcatacacaggtcgggtcaccttggtccttgaaattcggaaaggggtgtgcctcagacgtcataaagtagtggc

SEQ ID NO: 440282 - DNA, 122 bp, Homo sapiens
gcttttaaatatgttaaagaaaacaattgcgagagaagagagaacacagacgacatgagacgtcctacaaaaggaggccccttagctattatgtcaggaaataactctggcctttgtcctgt

SEQ ID NO: 440283 - DNA, 122 bp, Homo sapiens
cacctggtccactagccgtccgtatccgctgcagcctgtggggcctgcgggccggggagccgatcgcgcttcagctcagcgcctttcctggtacttgaagggagatcgaccgtgttatattc

SEQ ID NO: 440284 - DNA, 122 bp, Homo sapiens
aagaaaatcaagccccttcttcagggccgattgaatttcgagcgttagccgcctctcgggcgctggctgataaacgactcctgaattcggctcaaagtgtggcgtttctctctaactcgctc

SEQ ID NO: 440285 - DNA, 122 bp, Homo sapiens
aaatctaattttaaacaatgtaacttccttttcaagccactatgagtctgagagattggccgtatggttaacaataaccccagcatttggggagatagaaaaatccaaaggatagatttttg

SEQ ID NO: 440286 - DNA, 122 bp, Homo sapiens
cgcagggaaaggggcgcggagggtatggagcccggtcatggggtaacttgctttaaccctcgggacgtcaatttcctcacatgtgaaatagaagaaggggggaaaaaagttgttgagaggac

SEQ ID NO: 440287 - DNA, 122 bp, Homo sapiens
cgcagctgctgagcaggattccagactggagactggcggcgcccgttgaaacatgactggcggttctgcggcttcacagcctcacatgttgctttgaataagagaacattccttttaatata

SEQ ID NO: 440288 - DNA, 122 bp, Homo sapiens
tgcaaagggcgggacaaggttacgagtgggtgcggggaagcctccctaacctgggggccgcgtcccagagctgcgagccacgcctcctctctcccgcccgccgcgccgccggactcttattt

SEQ ID NO: 440289 - DNA, 122 bp, Homo sapiens
tacaactcatcagtattaagaagaatacgctctaagtggaacaaaatcttgtttctccgtcgtgcatgaatgtatggcatatttgtgggaaataaatattactgttttgtggggcctttatc

SEQ ID NO: 440290 - DNA, 122 bp, Homo sapiens
ggaaacaggcaggtccctggtgaagccccaccttccatccggggaaggtctgaagtctggcggccgggctgctggtcccgtgatcagagtgggaacttgtggtgcttttttcgggccgtcca

SEQ ID NO: 440291 - DNA, 122 bp, Homo sapiens
tataccacccattaggtagaaaggcttgaataccagactaacaagtttggcctttatcttcgaaataatgggcaaccatagaagaaatcggagcatgtgagggtcaagataaaattttagtt

SEQ ID NO: 440292 - DNA, 122 bp, Homo sapiens
tagagttgggataatctgtggtcccccgtcctcccttagcacaaattcactcactcatgacgatgaaggtaatttgtgatccagacagaagagggagaaagagccacatccctatccaccaa

SEQ ID NO: 440293 - DNA, 122 bp, Homo sapiens
cctcggccgcacagcgctcgccgctacccacccggacccccagaaacgccccgccgctgccgctccgccgaggaccgccaggaaccccacttaccagcagcagctccctggggtgcaaaaag

SEQ ID NO: 440294 - DNA, 122 bp, Homo sapiens
aactgacgcttgtccttttctgtttaggaagcactggttttctttcgggacacaaccgaacgtgccaggactgcaggagccgctggattacagagcagcaaaccaggcatggcaggcggtgc

SEQ ID NO: 440295 - DNA, 122 bp, Homo sapiens
tccccctcctcgcgatgcagaggtgacacaggtcacagggattagggagattcggcttctcgggctaggaggccaaggccaggttgcctgtgcactagacagtgccctcccggaagcggatt

SEQ ID NO: 440296 - DNA, 122 bp, Homo sapiens
aggcagccagacagtcgatttgcagaggcagcttttctaggatcggcactggctcgaaagcgtcgtgcatggcggcaaggggagagttgccaccgccgtctcgcccagagtgttccgggccg

SEQ ID NO: 440297 - DNA, 122 bp, Homo sapiens
gggaagtcgtaggcctggaagccttgattgctgagcctcacagcctctgtcaggcggctgcggatccagcggtccaccaggctctcatggcctccgggcttggggagagagggtgtatcagc

SEQ ID NO: 440298 - DNA, 122 bp, Homo sapiens
tggggccccactttaccttgcccacatacaggggctccgtgcccgtgtactcctctaccacgaagaactggttccacacccagccgcgtttgacgcggccggctcccagcgcgccgtcctgc

SEQ ID NO: 440299 - DNA, 122 bp, Homo sapiens
tagtatttgggctacaagtgaggcattggccgccatcttgatatcaaatgccaggcaagccgctactggcgtcgctcggtaaccacggagacacccgtgcccctcccgtttctcatccttag

SEQ ID NO: 440300 - DNA, 122 bp, Homo sapiens
tttattgtttcagcaatgaaagagttaatatactaagcagcagagactgagatactgcaacggggatagtgttttctgtctctgtcatttgtggtttaagaaaaagggggtggtgttctgca

SEQ ID NO: 440301 - DNA, 122 bp, Homo sapiens
gagcagctgggctagggagccaggaaagtggtacctgggtcgccctcctcatacctgagtcgtgggatccccttggtatttggtaaacctgtataccaaggctccttctctctccgaggttt

SEQ ID NO: 440302 - DNA, 122 bp, Homo sapiens
tccggcgtgtaccgagagactggcgtccggtgtgcaggtggccacatggatcctggcagccggtggcggaacctgcccagcgggcctagcctaaagcacttgactgacccctcttatggaat

SEQ ID NO: 440303 - DNA, 122 bp, Homo sapiens
ctgtgtaagttacatattggagagaggaccgagccccccggagccccctccacctcccagcgcccagatcccagccggacagtgaaacgcacaatgtcaggagtaacgcggcttcacaaccg

SEQ ID NO: 440304 - DNA, 122 bp, Homo sapiens
tttttttccagtctcccagtagtgcctcccattggctgaacccagccagaagtcagctgacgtaagatcttggaaaatgcagcccacagcggggaagccccaggaagtcacaggaagaaagg

SEQ ID NO: 440305 - DNA, 122 bp, Homo sapiens
ccgccccccaccctttgcagcccgggggaggcacccggtgaaagggtgaactgcaaagtgcggggaaggagactagctccccagcaatctgcccctaaagcagaagtcacggggcttggcgg

SEQ ID NO: 440306 - DNA, 122 bp, Homo sapiens
tcagctgaagccagagctggctgcaggggacaccctgctcgctgcctactgactgctgaccgctgactgcctacagggacgccacgcaactctcagcttcccgacagaggtgttaatcttga

SEQ ID NO: 440307 - DNA, 122 bp, Homo sapiens
gaaatgaccgggctcattcagcgtttgtatcactaaaatgtagccctcaagaatggagcccggccaggcctatgccttccacctcgtggggcatcctgcccacgtggcagatgaagttgatg

SEQ ID NO: 440308 - DNA, 122 bp, Homo sapiens
aatttattaaaatggacagtgaaagaaaacagccaatttagttgtgaactggagaagggacgtgaggcatctgttgtctgcaatcttgtatgttgtggttgaccacaaaggcttggcatcag

SEQ ID NO: 440309 - DNA, 122 bp, Homo sapiens
cttcatctgaggaacctctctgctttttaggggattgcttcctctttctcagtctttgtccgtcctaactccacttatttcccatttttcccacgtttgcatcctgttttgctcttgcgttt

SEQ ID NO: 440310 - DNA, 122 bp, Homo sapiens
gggtatcacatcctccagggaatgtttggctgcgacctggggcccgacgggcgtctcctccgcgggtatgagcagtatgcctacgacggcaaggattacatcgccctgaacgaggacctgcg

SEQ ID NO: 440311 - DNA, 122 bp, Homo sapiens
accaggagactcaagggacccaagggagactggagtggctgctctgagtttgtggaaaaccgtgggcacaggaaggagttatgagctgtgaggactgcaatgagcccaagtgggagatggct

SEQ ID NO: 440312 - DNA, 122 bp, Homo sapiens
caggattttgtaaaccagctctgtgacctggcctataaaatgggtgcctaatctgtacctcgaggacctcaccccatttgtgtgcatagccccacagctttgagcccttccctggaggcttt

SEQ ID NO: 440313 - DNA, 122 bp, Homo sapiens
gggcaaatactgattcaagttgaacctctgccggtttcttgatgaagaacccaagctacccgcggcaggcatgtctctaggagggtggatggattcaaactgattgctgaattcgggcggta

SEQ ID NO: 440314 - DNA, 122 bp, Homo sapiens
acactggcttctctttgagccttgaagagcctcggggagggggcccacctgggatgcagccgcagccaccaggggctgggtcccaggtgggttcccttccccaagcgtcttcagtgctctgg

SEQ ID NO: 440315 - DNA, 122 bp, Homo sapiens
ttgattgagttcctcaaggactgagatcctgactaatttattccagcatctagcacaggacgtggaaatctgacttctaaactcaatttaagagatgattggctgggcctggtggctcacgc

SEQ ID NO: 440316 - DNA, 122 bp, Homo sapiens
gctttctctggctgttggtccatgagggttaggggtagtgagggaacaggagggagaagccgaagcccacccatttggcagcagtaaaaggccacactgggaagtcccaacccctttcttat

SEQ ID NO: 440317 - DNA, 122 bp, Homo sapiens
aaaagcaaatgtaaaataaagtttttttgtttatttgtttgcttgttgttttttttttaacgctacatttttattttgcagattctcaggatgatggagtgagtgatggaataggttgccaa

SEQ ID NO: 440318 - DNA, 122 bp, Homo sapiens
cacgttagtggcgttgggacggcgcttcctaaatttccgtccaactcatctgcttgcgtccggacatttgttaaaaatatttattcctggctgggagtggtggctcacgcctgtaatcccaa

SEQ ID NO: 440319 - DNA, 122 bp, Homo sapiens
acaggggagatgcaggcacagggaggacgcatgcaaggtgggacacatgcacaagggggacgcacgcacaaggaggacatgtgcacgggggggatgcatgcacggggggacgtacgcatggg

SEQ ID NO: 440320 - DNA, 122 bp, Homo sapiens
acattgtctgccccatctgcccaatgcctggagctgggatggagagggcccaggccctgccgctcacacgctgcctgcacctggacgctttctaacgcaccagctggctctgagtggcggaa

SEQ ID NO: 440321 - DNA, 122 bp, Homo sapiens
taaacttcccggaggcagcggtcgccagcgggttttgctgattttctgggacacaaacttcgcataaatttcctccatgccgaaagcggccgcagcaggtactgcaaaaagcaagcacagta

SEQ ID NO: 440322 - DNA, 122 bp, Homo sapiens
tccgcatgggcttgtctgcgcgacacgtgcccagcctcatcctggaaaccaagggcatcccggtatggccatctcccgccagcgaggagaccgcagccatcgccccacgagcccacacattg

SEQ ID NO: 440323 - DNA, 122 bp, Homo sapiens
taactacttttcattggtgagtgaggttccccgcccagaaaaggcgggggcgctttcacccgcttggcgcgccctcccctctgcgcacacactctgccgcgcacacttcactaccctccgca

SEQ ID NO: 440324 - DNA, 122 bp, Homo sapiens
cggccgcggcggcagcagcagcagcagcttctgaacgcgcctcaatgagagcggcggtggcggcagccgggccgagagacggactcgggctgactccagccgctgggagcgcgaggccatgt

SEQ ID NO: 440325 - DNA, 122 bp, Homo sapiens
gaagcagcaagttctacgttactaaggttttctctttgtctgccttcccccaacactctgcgttgactggaggtgactatgctattggggtatgtataagagagaagggagtggcgcagaag

SEQ ID NO: 440326 - DNA, 122 bp, Homo sapiens
cactgcctccagccggggccgagcccgacgccgctacgtgcggctccctcccgggcctcgcgtgcccccgcgccccgagcgactcccgactgcccggcacccctcccgtgggttcccacatc

SEQ ID NO: 440327 - DNA, 122 bp, Homo sapiens
gtcgagcccacacgcctagagacgcggccaggcacccccgccctcctcgccgcgcagtcgcgcacagtgagcaacagtccagcaccaacccggcttaactgcgcctgcgcactccaggagtt

SEQ ID NO: 440328 - DNA, 122 bp, Homo sapiens
gaggcggggccagggctgagtcctgccagcctcatttctctatccctctgagaacccagacgggcagagcctgggtaggagagcctggccccgctgtccccactgggtggagacaccatgca

SEQ ID NO: 440329 - DNA, 122 bp, Homo sapiens
tggacagcggactaccatccgagtctgttgcactattggggtctcggtcaaggtcagactcgatgtccgaggaagagtcagagctgatccgcaggcccccgagccccagcactggcaacggc

SEQ ID NO: 440330 - DNA, 122 bp, Homo sapiens
gacttcgcagctcttcaatttgtctgtaatatgcactgtagtcgcgaccagccctcggggcgttggtttcgtaccactgcttgatttgcacttcaagtttggagttggactgctccagggtc

SEQ ID NO: 440331 - DNA, 122 bp, Homo sapiens
gggctttcccagggccgtccgcccgcggaccctcccagctccccagagcccagtgaccctcgcgcagcaggagaaccccagacggaccccaggccctgcagcctgtcatgaacccgaggggc

SEQ ID NO: 440332 - DNA, 122 bp, Homo sapiens
tacatacaagttgcctggaaagactcagaagtgtgtaaagtgatgtcaccatatctaatacggtgaccaatggcaatggtcatatgaacccattggcatcagtcatgatgacatagtcaggt

SEQ ID NO: 440333 - DNA, 122 bp, Homo sapiens
agaggacaaaagtgaaacacagaggtaacgggtaaggtcaccttgccagtgggggcgagacgtgaacctaggcaaactgacacaacgcctgcactttcttgtccaaggtcacggcggtgtga

SEQ ID NO: 440334 - DNA, 122 bp, Homo sapiens
ttcccccccacccgcgtaggccgcattctgggagttgtagtccggtggagcgggggttggcgccgcccgcggacccagccggactccacttcccgtcgagccctgcgaccggcacccactcc

SEQ ID NO: 440335 - DNA, 122 bp, Homo sapiens
cgagccgcttatgtggaaccaccgcgtcctgaccttggaggtgcgagtctgggaaaggcgcgctcccggggggagcgggccccgggaaggcgacccctgccctcagtgctctctgtctctgc

SEQ ID NO: 440336 - DNA, 122 bp, Homo sapiens
aggcggaaaaaggccttcccaggcgcgagaagatgacgtcacagtagcccggccgggcgccgaggttgccttagggctctctgcccagtaacaggcatcgaacggtgcagactgaagacgcc

SEQ ID NO: 440337 - DNA, 122 bp, Homo sapiens
gctttaagaaccactgtggggactgcctgcgaaacgccttggaggccgctgtgtgagctgcggctccgggctggtggccacgcgagggtgtccgccctcttcgacctgcctggatttttgtg

SEQ ID NO: 440338 - DNA, 122 bp, Homo sapiens
catgccatgtgcgctgatgggcctcaggcaggatgcggaggtcaccccgagtcacagcggcgctggcagcctgggccatctccccgcagcgaacgtaccactgcggccgcagcagaggctct

SEQ ID NO: 440339 - DNA, 122 bp, Homo sapiens
caggcatggaggggagctgagcacagtggtttacatgagaagcacagtaagaaaggggtgcgaggaggtagtaaactggccagggccctggggacacctctgccctagaatctaaagaaaaa

SEQ ID NO: 440340 - DNA, 122 bp, Homo sapiens
tcgcggacaccctgcagcccttcccgacagcggcgaccgggaaagcaagaccgtctttttcgtccagcccaaattgcgaaaacggccacagtcccacaagtcccagagtcccagagtccctg

SEQ ID NO: 440341 - DNA, 122 bp, Homo sapiens
aacgcatgaagatacagatagagaggtaaaaaggaaccaggccatggagagccaggcgcccggaggcaagggaaggcatttgaacttgattcccagggcaatgacaagcaactgaagtgttt

SEQ ID NO: 440342 - DNA, 122 bp, Homo sapiens
atggcacagccgatgaaaacctcacgatgacagtagttgggacactggaaatggctagcacgtccagaggcgcaggatccagcgcagccatgcccattcggctcaccaaaaaaagcttggaa

SEQ ID NO: 440343 - DNA, 122 bp, Homo sapiens
ttggggagagaggggcggagggactggcgggctcttggcgtcttgggggaacgctgcaaccgtcgacgggcctgatcagaagatcgtctttctcccgtttcttcgccatcgctaccccttat

SEQ ID NO: 440344 - DNA, 122 bp, Homo sapiens
aaacacacagctgggaggggcgcagggcttgcagagctggctctgtgcccaggaaggacacgcactcaaaatcagccctgcagacacgcacctgggagccgcttccctcccttggcacgtac

SEQ ID NO: 440345 - DNA, 122 bp, Homo sapiens
accccgtcaccgcctgcgccagcgacacaccccctccctccgcctgcgtcgcggagtccccgaccctctctgtccagcgcgcagccgcctccccagtccaaagcggaccttctttgcctctc

SEQ ID NO: 440346 - DNA, 122 bp, Homo sapiens
cagttcccgccatccagtggcccacggctgcgggctccagggtctgaggctggggactaccgttgccgccgcagtccccatatcccgaagttgccttgctgcttgtgttgttttcgcagata

SEQ ID NO: 440347 - DNA, 122 bp, Homo sapiens
aactggaagaaactacagtgaaggaccgttcttacccgcctctgtttttagttcctgggccgtcactgagtgacatggtcctgccacacaatcccggtatgcggcttgctcaccacggggtt

SEQ ID NO: 440348 - DNA, 122 bp, Homo sapiens
cgctagcccctcacctcccctgaagccttttctaaccgctgcggcctccgtggtcccccacgcctgtgttcctgtaggacgtttacagttcacacgatgtctcatctctcggtatatgtctc

SEQ ID NO: 440349 - DNA, 122 bp, Homo sapiens
atccgcccgcctcagcctcccaaagtgctgggattacaggcgtgagccaccgcgcccggccggtgtaaaatttatcttagccatgtgtttcaagatgaacaaggttgtacatgaaacgttta

SEQ ID NO: 440350 - DNA, 122 bp, Homo sapiens
caaaatgacacactcggtgaccaggctctgatgccattccaagcatggccccacagctcccggcccagcctgcactgttcatgctgcttggctttgtgaacagttgcgtggtggcttctcag

SEQ ID NO: 440351 - DNA, 122 bp, Homo sapiens
gctgggaaggcgtcgggcagcaaagccgccgccaggaggcagcgcttaatcaaaaatgtccgggccgagggggcccaggataccggagtccccggagcgtctttcatctgaagtcttagcag

SEQ ID NO: 440352 - DNA, 122 bp, Homo sapiens
ggtgaaaaggtggcagaataggttcgttatcccaggccgtactgcctgtggcgtggggggcgggttgggggccctatccagggcgtcactgcccgtgttggggggctgcttgagtgtggtac

SEQ ID NO: 440353 - DNA, 122 bp, Homo sapiens
aagcctgattggtaagattcctttaagggctcagccccaaagagctttatcccatcccctcgcagactgaaaactaaagcctgcagagacctctgaaggaaaacctgtcccgggctctgtca

SEQ ID NO: 440354 - DNA, 122 bp, Homo sapiens
agtgctgcggcagttcttcagaagacacggggccaaatgaaacttacttaaagtggttatcgcgtttcaggctgatttgttcctagtaactacgttttggaaagcagctgtggactctcaag

SEQ ID NO: 440355 - DNA, 122 bp, Homo sapiens
ccctgaagataccgactaccctctgactcccctgcctggaagcccacacccgctctcctccggcaccaaggcctttccgaggtgtgcacctggtctggtactgagctggtgccctggacaca

SEQ ID NO: 440356 - DNA, 122 bp, Homo sapiens
gggaggcagaaataagggcggggtcagctcagccccacccccaccctccacctccgacctcgggggatgtgccactcactcgggaccccagacaccagcctcagtggccgcagcacccgaaa

SEQ ID NO: 440357 - DNA, 122 bp, Homo sapiens
aaccaggctctgggcttggcgcatggtgggcggtggcgcccacacctgggcctgggaacccgccgctcgggcatcactggctgccgcggcgaccggcgaggacacatgaccgaggagcgaaa

SEQ ID NO: 440358 - DNA, 122 bp, Homo sapiens
aggtggtgctcaccctctccacgcaagccgacaggtgcgcggcgccggcctcccacgccccgggagcctgcttaccaggcgacacccacatccatctggtttcagtcatgccagggacgacc

SEQ ID NO: 440359 - DNA, 122 bp, Homo sapiens
atttttttaaaatcctgtcagacttcacatattaatgacaacagcggctgcaaactaacacgcccactaacttgcaatatcagagattatcaacaagtcagcacttaacacgggcgtatgga

SEQ ID NO: 440360 - DNA, 122 bp, Homo sapiens
cagcctgaggatctcctccactttccccggtctggataccccgtcgcccccgacccccaccggcctggactctggggtcagccctgacccacaccttgcggctcctggggtcacccctgacc

SEQ ID NO: 440361 - DNA, 122 bp, Homo sapiens
aggatgaagtggcaagatagcttgagtccaggaggttgaagctgaagtaagccatgattgcgccactgaatcctagtgtgggtgacaaagagaggccctgtctcaaaacaaaacataacaaa

SEQ ID NO: 440362 - DNA, 122 bp, Homo sapiens
aagcgtgagaccaggcgcggtggctcacacctgtgatcccagcacttgggaaggctgaggcgagtctatcccttgaggctgggactttgagaccagcctgggcaacacagacatcatctcta

SEQ ID NO: 440363 - DNA, 122 bp, Homo sapiens
attcctcaaactcagccatggtatgatatgatgcggcattattataacagagaaaagtagcggtgtgctgaaggcagttcacacaggctggtgggccaaattgttacatttcaaggaatttt

SEQ ID NO: 440364 - DNA, 122 bp, Homo sapiens
ggcccctggaaacattcctcctttgccagcaggcacaatctaggccttgtcagcagagggcgctggagggacaccacaatgcctagcagatgtggggcattccacggttccaaggtgctttt

SEQ ID NO: 440365 - DNA, 122 bp, Homo sapiens
acacctcgggcggcttgtcagcagatgcaggggcgaggaagcgggtttttcctgcgtggccgctggccgcgggggaaccgctgggagccctgcccccggcctgcggcggccctagacgctgc

SEQ ID NO: 440366 - DNA, 122 bp, Homo sapiens
ttcccgcctcccggcaggcaggccgttaaccgtcttccggaagacgctgctagaaccctccggccgctcctgcccgccatcgtccccgaacgacactcgctcaggtacccactaacgtgcga

SEQ ID NO: 440367 - DNA, 122 bp, Homo sapiens
cacattgtgcaggccagcgagcccgggctgttcagcctgggcctgcgcacgggtgaggtgcgcacggcgcgtaccttgggcgacagggaggccgcccgccagcgcctgctggtcactgtgcg

SEQ ID NO: 440368 - DNA, 122 bp, Homo sapiens
gcgaaggctgctactggcggcgacagcggcggctgggctcgcggactgcctgcctctgggcgggcgcttggacctaatctccacgcacactgaactaggcggacacactagcgctgcgggag

SEQ ID NO: 440369 - DNA, 122 bp, Homo sapiens
gaatatctgttcatagtaagtgctcttaaatgtttgcttttgctcttaaattattgctgtcgctgcttctgctattactgctatgataactactactaactactgcaattgctgtcaccagc

SEQ ID NO: 440370 - DNA, 122 bp, Homo sapiens
cctccctccaggaggccagcatgatcctccatgatattgccagagccagagagaacatcccgaaatccctggccggaagcttaggcccaggggcgtctagcggccccagcggagaccacagc

SEQ ID NO: 440371 - DNA, 122 bp, Homo sapiens
cgtgtctgcatatatatacacacacgtgtatacgcacacacagagccacacatcactcaacgacagggacacgttctgagaaatacatggttccgtgattttgtcatcgcgcgtacatccta

SEQ ID NO: 440372 - DNA, 122 bp, Homo sapiens
agacagtaactaggcctgctctacagagggaaacgcaggctctgagagcctacatgtcttcgccgggagtgcttgtcccggagctgctcgcagactgggccgggggtgggctcgggtcggag

SEQ ID NO: 440373 - DNA, 122 bp, Homo sapiens
ctttttccaacttcaaagccagcagtctaacatctctcctctttgcttctatccttaaatcgtctcttttcctctgtctttgacctttgtcccccgtcttagataaggactcttatgattac

SEQ ID NO: 440374 - DNA, 122 bp, Homo sapiens
gtgtagccctcgttcattgggcagttggtttggatgacttggctgccctgtaccacgaggcgaggtggcccagggagagaagagggatgaggcgcagagggagtgggaggcccgtctgactg

SEQ ID NO: 440375 - DNA, 122 bp, Homo sapiens
caaatgcaagggcttaataacagccaacagtttaatattcgttgattgccacgtgcatagcgctttacatctattttctcatgcagtcttcataacagcccaagacctacctaggtactatt

SEQ ID NO: 440376 - DNA, 122 bp, Homo sapiens
tctgagtgtcacctcccgggtccagtgtcctgtgatgaagagcgctttctcagggcagcccgtgtgctgagggaccccggtcacagtgtgtgcacagtcagagagctgtctctgtggctagg

SEQ ID NO: 440377 - DNA, 122 bp, Homo sapiens
gaaggtagttagttctgaactgaaatgaaatcacccagggctccagtgacttccccaacccggccatcctgcaggagcagcgcgtaggcagcctcgagtgatagcctggtccaacggcccac

SEQ ID NO: 440378 - DNA, 122 bp, Homo sapiens
ctcagagaggttaacatcttttccaagatcacaaaaccatttaaagtgctacaacttgaacgtaagtctttgttttcaagtcccgagcttgctttattacatcatgctacagtcttaggaag

SEQ ID NO: 440379 - DNA, 122 bp, Homo sapiens
cccgccccgtgccctgactgctggccgcgaaccgagggcacgggcgcgggtgaagcggcccgggccaagggcttgactccagtgaccctactggccaccagtgtcaccagagggtcccagga

SEQ ID NO: 440380 - DNA, 122 bp, Homo sapiens
caccatgcctgcacctcccccccccaccccacccccggctccccaccctgggctcctgcgcggcccgagcctcccaacgagcaccaccccctactccacggcacgtggtcccatcgaccgct

SEQ ID NO: 440381 - DNA, 122 bp, Homo sapiens
cagcccagccaatcagcgcgctccctctgccggcccgaccggcgctctggtgacgcgcgacgtctgccttcgcccacggctcttgggcgacgacccctcccacactcgccgtgcttgttagc

SEQ ID NO: 440382 - DNA, 122 bp, Homo sapiens
cacctgacaacatccatcggcaacttcgtccatgaacacatcacgccggggactcaagcacgttaaactgctccaattggtagctaaacgagagattgcaaaacatgcctctactcaacggc

SEQ ID NO: 440383 - DNA, 122 bp, Homo sapiens
cggagagaaaggaccgctgccggggatagggcttccgccgagagcgccgagaagtgcgcacgcgcactgaccccgcgggccctagcaaccagagcagtgacagtagcaaccgccggaatggt

SEQ ID NO: 440384 - DNA, 122 bp, Homo sapiens
tcagacttaactacttctcgcaaagttggggccgaactttggggcttgacttgtcttggccgcctgtggagcgctgggtgtgggtcgcttcctctcctctcgtctcctcttcccgctgcttg

SEQ ID NO: 440385 - DNA, 122 bp, Homo sapiens
gggctgctgcaggacagggtgggaagagtctttaagggtgaagaggtgatgaaatgcttacgggttccaggttacatctatatccaggaatgactccaactcccttggcagcatgctgctgc

SEQ ID NO: 440386 - DNA, 122 bp, Homo sapiens
ccacgccgcttaattcgtccgttgcccaaatgacccctccgcgctccagagcggagatcgcggccgtacattttagaagagtgccatcaataccctcagagttgagctggggttaccactct

SEQ ID NO: 440387 - DNA, 122 bp, Homo sapiens
tatgaaaacaatgtgacctcctgtttgctcagaaaagtgaaaaatacagggcttggcctccggggtcttcagatatcagaggcatccaggagcacttggtcacggtctctgaatctctggaa

SEQ ID NO: 440388 - DNA, 122 bp, Homo sapiens
gcggaaatgtcacagtgcccccaggggagctgatggagacaacagagagctgaagaaggccggatccgatacttggctgttgcattgcgatgcctccatcgacacgtgatgacgcgcagcgg

SEQ ID NO: 440389 - DNA, 122 bp, Homo sapiens
cgccattcctagagcaaactgtccaacaatgaattattccacaccacatgccatgaaccacgccttactggattacatccacagttcaagaatgtgtgtcatggaattctccagaggaagtc

SEQ ID NO: 440390 - DNA, 122 bp, Homo sapiens
tgaccggcgtcccagtccgacccgcgcgctgcgcccctgctgagcggcgcggagctaccacgccctgccagactcgcccttgggtccctgtctgacgagctctaggcaatctgccctcgttc

SEQ ID NO: 440391 - DNA, 122 bp, Homo sapiens
tcagatgctgtgaagggcttgtgctgggtggtaaatagcacaggacttttccaagcccaccgcaaggcaggcgacgcgcataaaggcatttccatatttctgcaaactcacaaagtatgaga

SEQ ID NO: 440392 - DNA, 122 bp, Homo sapiens
atggaggtttttagtggcaaaacataggtacgggcaagaaaaaggctggctgtagatgaacgcctctgaaaaggctatgaaggaagttatccactttaaatacgtgagtgtaaaaaaaatca

SEQ ID NO: 440393 - DNA, 122 bp, Homo sapiens
gcggcacaccgcttccagatcccttccatcttcaccatctgcgtgtccttcctgcagaagcgcctgtgcctctccaactgcttggccgtcttccgtctcggcctcctgctcgactgcgcgcg

SEQ ID NO: 440394 - DNA, 122 bp, Homo sapiens
agccttctgggcacccctccggcttgcgcagggagcaaagggaccgcggcgccacctgcgcgcaccacgcgtgaaacgtgcggacaggacgcccccagaaagttctgccttccgcgcgcact

SEQ ID NO: 440395 - DNA, 122 bp, Homo sapiens
gagccggaaggggcgggcggcagcaaaagcccacggccccaaaggccccgaagcccaccgcggcgcccctagcctgccccggcggcccagccgcggcccactggttacctggctttcgatga

SEQ ID NO: 440396 - DNA, 122 bp, Homo sapiens
aaatcacaggctgaaaacctggagaaaggtccgcgacgccggggacacacgccgcagaggcgacgcccgcccggcccaacgtccagtctcgtctgtttcccgaggagccaatcagcacgcgg

SEQ ID NO: 440397 - DNA, 122 bp, Homo sapiens
gggctccagctgctgcaggagccgcggctgtcttgacttgaaagggcctctagtacacggcgcggtggctcagtcctgtaatcccagcgctttgggaagccgaggcgggaggatcccttggg

SEQ ID NO: 440398 - DNA, 122 bp, Homo sapiens
actattaaagaacatttgcatgatgcttcacaggtgacaaagccaggtcacatgcatgttcgtatttgaaggattcaatactcctgtctggcagagaggagaggtagctaagaacgtgggtt

SEQ ID NO: 440399 - DNA, 122 bp, Homo sapiens
ggctgccccttgcccggtgttggggtctggtcggttcgtgcggagcccgcgggcccgcggcggtttactagcagctgacgagcttgcctgtccatccagctgacttggaattagggtctgtt

SEQ ID NO: 440400 - DNA, 122 bp, Homo sapiens
gtggaggaaggcgcactgaactgagagtgaggacacggaagttctcaccctggctctgcccgatgctgcccaactcccctctctgagcctccaaaacgacagcgtgctgcacctcggagccg

SEQ ID NO: 440401 - DNA, 122 bp, Homo sapiens
catcctcccaggttcaagcgattctcatgcctcagcctcccaaatagctggaattacaggcgtccgcacacccggctaatattttgtatttttaatacagacggggttttaccatgttggcc

SEQ ID NO: 440402 - DNA, 122 bp, Homo sapiens
agcacaactggggcaaaaaggagcagctcaagttgtaaccatgatgattgtttcctgtgccggcttttcaataggaagttgtagattttaaaatctgggaagctgggaagcttactttgaaa

SEQ ID NO: 440403 - DNA, 122 bp, Homo sapiens
tctctttaacaaggacatttccttttcagcgaaagcagcgctctgatttaccaagtctggcggaccgcagcgctttaaaggaatgaggttccagcggtcgcgccaagcagcgtacgcagcct

SEQ ID NO: 440404 - DNA, 122 bp, Homo sapiens
gtcagcccattcaggactggattttcagaataagcctcaatgctgctctttgttagtggacgagggcatttatttgtaatcctctccactgtaaccccactgaaataaaacagaatgttaat

SEQ ID NO: 440405 - DNA, 122 bp, Homo sapiens
ccgcctcagccgccatcctgtagactcccgggggcctgcgtatgggaagatttggggtctcgaaccacacgctcctagcgagcgcgtggccgcacgcacacatacacgcatactgcaaaact

SEQ ID NO: 440406 - DNA, 122 bp, Homo sapiens
tccgtggactatatccgaaagttgcaacgagaacagcaacgcgcaaaagaacttgaaaaccgacagaagaaactggagcacgccaaccggcatttgttgctcagaatacaggtacgcagcct

SEQ ID NO: 440407 - DNA, 122 bp, Homo sapiens
cttggcgaggcgcagggtgcatctttcctgggacaagaatcggtctcccaagcccaacagcgcctgaagcgcatcccatgtccgagtacccccgaccctgtgcccacgctcaccacgtcgtt

SEQ ID NO: 440408 - DNA, 122 bp, Homo sapiens
cacaattcgaaaagagaaagagaatgagtgtttcatggtggccccagacagtttggtggccgcagaagttgagaaggctcaaatctggagatcaggtttgggttggagtcgtgcgtaaggga

SEQ ID NO: 440409 - DNA, 122 bp, Homo sapiens
tgaaagtgcaagttcatatctgcagagtcgatctcaaaaacgtgcttaatgaccgacaaacgcgctgcagtcctttcccatgaacccccgcaaacggagtccgtctcccagacccgaagaaa

SEQ ID NO: 440410 - DNA, 122 bp, Homo sapiens
tcagtctgtgtcccatgtgccacacaggtgggttgctgggagttcagctgcagacactcccgggtgcagtgttcaatatgagtgagggaaactgaaaaaggaaatgaagaaggggaaggagt

SEQ ID NO: 440411 - DNA, 122 bp, Homo sapiens
gcaggaaggggggtgtctcgcctacacccttgatcaggccccccaccagcagccccaccacgatcagcaggcagctctccgggacgatgcttgagatagtggggatcacatggaaacctgcg

SEQ ID NO: 440412 - DNA, 122 bp, Homo sapiens
tgacttccgggattgaattggctgggaagccggtcccatttcaacagagacctggggcagcgcggtgggcagcgggctgggccgagatcgagaccgggacaaggcagggaagagcgggatgg

SEQ ID NO: 440413 - DNA, 122 bp, Homo sapiens
tctgctgggtggggtccaacaccacagcgcagtctagtggccggaggagccaaggaggcgcggggtggagactgggccgagcaggggatagagatgaactccagaaaggaacagcgacttgc

SEQ ID NO: 440414 - DNA, 122 bp, Homo sapiens
gatcgtggtgagggtggctcctgggtcccctcgcggggagcagggtctggcactcaccagcgcgcacgactaggacttgttgaattaatccatcctcgcctttagcttttaggcctttgaag

SEQ ID NO: 440415 - DNA, 122 bp, Homo sapiens
agcctcaggacagctgagctgtggggctcacagctaccaagactcctggggcacctgcttcggactccacgtccttcgcctgcacatgttagcaccgttcctcccaagatagcagcagcctg

SEQ ID NO: 440416 - DNA, 122 bp, Homo sapiens
gcatgcatgctgagggggctgtcggcgggtgggctcactgagcggagaaggatgaagcggcgatacccccagcacgaggcttctgctgcacagactcaggcgctccctcccctggtggcagt

SEQ ID NO: 440417 - DNA, 122 bp, Homo sapiens
ccagacggcggccgagcccggccggggactgagggcttttgggaccctgcgggagcgcggcgcgcacaccgcactccccgggcaacagctggacgcgaccatatcccgggtaggggcggggg

SEQ ID NO: 440418 - DNA, 122 bp, Homo sapiens
acctcgggtcaaggagagccgctccccggccaaggaggaggccgccaagatgcccgcgcgcgcatccccgccccacagcaaggcggcccctggagacgtgaaggtcaaggaggagcgcgggg

SEQ ID NO: 440419 - DNA, 122 bp, Homo sapiens
cctgcctggggaaagcttgtggccggaagagaaaatgagcttcctaggacccctgactcacgacctcatcaacgttggtgctactgcttggtggagaatgtaaaccctttgtaaccccatcc

SEQ ID NO: 440420 - DNA, 122 bp, Homo sapiens
caaagaaccctggagaccctcaaccaggacacaggtgggcctttctcacctgggccccgccgaagtcgaccgtcctttcgtagggcgcacttttcagcaatacgccttccgattggttggct

SEQ ID NO: 440421 - DNA, 122 bp, Homo sapiens
ggcgatgaggatttgttcccccatggattcccttcctgcccagggtccgctctcgccggtcgagggtgcctaacaatactccttgccacaaggttcgcagccgaaaaggtccttcaagtccg

SEQ ID NO: 440422 - DNA, 122 bp, Homo sapiens
gagaatcgatgaccctggtttgctccagaccctgtgaactggtgatgatctgcaggaagtcgcttctgcgggaacagacagggtgttcattctctatggcgccatctttgtaaacactttgt

SEQ ID NO: 440423 - DNA, 122 bp, Homo sapiens
atggacgggggagaagtggccggtggtctggggcccttcagcaggggcctggctggactccgcaagctctaggcaagattctgcccaggagttcaccttttcgtagtaccaattctcaggga

SEQ ID NO: 440424 - DNA, 122 bp, Homo sapiens
ttctctaaaatacccatgtttgttaacaactgtttctatggcagcagagcccctggtggtcgggccctggggtggaggctatttagaagttaaagactgacagtacacgccaatagcagcta

SEQ ID NO: 440425 - DNA, 122 bp, Homo sapiens
ctactacgcggcgccgcgcgttgggggcatcgtgtggcggcccgggccgctcaaggctggcgcgctgagcgcccacctgcccctcgtggtgttcctggtcttctcggtgcgcagcccctcgt

SEQ ID NO: 440426 - DNA, 122 bp, Homo sapiens
cggagctgggggcggggcctgagcgcggaggggcggggccaggcctctgtggggcggggccgctgcgaggctggagtcgaaggtgctgagtcgtcgcctcccactgaagcctgggagcaaat

SEQ ID NO: 440427 - DNA, 122 bp, Homo sapiens
gtgtctgcagggttgaatggagataataacagggtttccatggctgatgtgagggctaagcgagatactgcgtctctagcactgggcacagcacgtgataaatcagccgactggcagcacca

SEQ ID NO: 440428 - DNA, 122 bp, Homo sapiens
actaatgactggaaccccgtaactgaaaggaaatttcttgtccccccgcaccccgccccacgccccaaacacacacacttctgaccataaacacaaaaggttggggctctgcaatcttatct

SEQ ID NO: 440429 - DNA, 122 bp, Homo sapiens
ttgagtggtgcaaaggcttaagggtgtaacctcagaatggggccctgaatcagctgtgggcgagctcctagagtatcttaattcctgcttcatctctttccattttgcagttgggcaaactg

SEQ ID NO: 440430 - DNA, 122 bp, Homo sapiens
ggagggagaactttatgtgttgcactgagggcagtctccggaaacgcgattcgcagcgggcgccggaagcggtgttgtgtctgcagctctggcagaggactgttccactagacacgctgaag

SEQ ID NO: 440431 - DNA, 122 bp, Homo sapiens
gtcactggactgccaccagagagaaagcttaaattggtctagactgtagtgtcaagactgcgtgcttaggtatatacttttagggaaaagctgtatccactgagagatgacatggttgaaag

SEQ ID NO: 440432 - DNA, 122 bp, Homo sapiens
agaggggcaccacacgtgggtgagcacacggcgtttgacgtcatcagctcgggacggctacgctgcgccctcccggcctcagcccctcagcggcggaaacgccagtcttcgctgtcccgcct

SEQ ID NO: 440433 - DNA, 122 bp, Homo sapiens
tctcagccgggggatctggctccacctacaggaatcagaaggcaaacctagtagacgcctcggcgtctgcaggaacccggtgggggctgggggaactttgataattgcctagagaatttcct

SEQ ID NO: 440434 - DNA, 122 bp, Homo sapiens
ttctggaagaccttctccagctcctccagctggaatgtgctgaaggtcgtgcggttacgacgcttcttgctcttgttcttggccaactccatggagtcagggagtcccggggaaagaggaag

SEQ ID NO: 440435 - DNA, 122 bp, Homo sapiens
tatctcaagttaggtaacactgcccaggtgcctagatactatgacatacaaactggcccacgtggctcattacccaatacttcttgctcatcagcatactcagccacttgcaggccaatctt

SEQ ID NO: 440436 - DNA, 122 bp, Homo sapiens
tgggtggctctcacttatgccaggcacagggtgaattcagggctctgggctatgaggggtcgactgcaaacccctgcagcagatgtgagctgcatgtgtgggcccctgtgtcagcctgtgct

SEQ ID NO: 440437 - DNA, 122 bp, Homo sapiens
tgagcaactgagcatctgggtggctggaaacccaagaacggtgcctagctcggctctgtccggcctcgagtcccctcatcccagactgaactgctgggggtgccctctggaggtttattcgt

SEQ ID NO: 440438 - DNA, 122 bp, Homo sapiens
gacagcgccgggaagatgagcacggaaggtggtggccgtcgctgccaggcacaagtgtcccgccgcatctccttcagcgcgagccaccgattgtacaggtagggtgtgcacacaggtacagc

SEQ ID NO: 440439 - DNA, 122 bp, Homo sapiens
tctctcctgcctttccttccgtttgctgctgtggcacctccatcacatgctctgtctggccgcccgccccccctctcttctgcccccgtgttgtggtcttccctctcgccgtcctcccctgc

SEQ ID NO: 440440 - DNA, 122 bp, Homo sapiens
gagttgggttccagagaccccagattgtcttcatttgcagttgccaggttccctgcagcccgggtctgtggatttcccgcggctcagcgcccgcagctcaggctccgtggagcccggcggca

SEQ ID NO: 440441 - DNA, 122 bp, Homo sapiens
gaggctaaaactgaagctcagagaggttaagtagtttgcccaaggtgacaccactggtgccggaaaacccagtgctccctgctgcttccccggggatatttcaggccactgacaaggcctca

SEQ ID NO: 440442 - DNA, 122 bp, Homo sapiens
agcttctcacaggtttccttttctggtttccgaagtgcgagatttaaatcaccggtggaccgccttgcagacctttaacttacgcgttgactttaggaaatggtccccaccccacccccaac

SEQ ID NO: 440443 - DNA, 122 bp, Homo sapiens
aagtttacaggaaattgcgcttttattgcgtcttctgtttctcacgcagtcctgagaagccggcagggcccggcttgtactttccttgcctgcgagcaggcaacactcaaaacagcagccct

SEQ ID NO: 440444 - DNA, 122 bp, Homo sapiens
ccccatttgaaatgctctctttagttcttactatgaaagtgagtccctgaagcctccaaacgcaacgaaatgtctctggagctcagaaagactggacaagcccgagacaggcccgcagactt

SEQ ID NO: 440445 - DNA, 122 bp, Homo sapiens
gcccctctccagcgccccctccccggcacgctgcggctggcgctccccagccccgcctgacgctgcagctgggccggagactcgccattggattaaaaatagcgtcgccagtccgccccaag

SEQ ID NO: 440446 - DNA, 122 bp, Homo sapiens
agaggaaaggcccaaccttgagtcttttacgccatctacctaggattgccaagcgagtttcgtgtgtttttttggttttaaaaggtggctttgaccaatcttccgttctcttggacacttat

SEQ ID NO: 440447 - DNA, 122 bp, Homo sapiens
ttctacagagataacaattattttgcttttcagaaggacgcatgctgtttcttagggacacggctgacttccagatatgaccatgtatttgtggcttaaactcttggcatttggctttgcct

SEQ ID NO: 440448 - DNA, 122 bp, Homo sapiens
atgcgatcccatttcctctctgggcctgcgtagtcccaatgccctcagcagctaaagaatcggtttcatggtttcacgcattttcctccagatctgtttcacgcattttccttctggtctca

SEQ ID NO: 440449 - DNA, 122 bp, Homo sapiens
cgggtcacagtcaggcttcggcagctcggcaggtgagggagcacccactaagagagtaatcgtggtaaaggaaggaaatgcactcagacatcttggcgccctgggagaggcaattcccttcc

SEQ ID NO: 440450 - DNA, 122 bp, Homo sapiens
ccgtccacgcggccaccggaaggacaaggtgttcaggccgctaggccgctccctggcaagcgattcccactcgcagcgcggcctcgaccctcgcccaagacgcgccctccgcgcccccaccc

SEQ ID NO: 440451 - DNA, 122 bp, Homo sapiens
cccccggacggggcggggcacgctggggacgggcagagggcggtggtggcgccttcctgccgagtccgaggccgcccccgccacccttctctaatccttgtaggtcccactttcccctgggc

SEQ ID NO: 440452 - DNA, 122 bp, Homo sapiens
gttttatgttttccgttgtgagtttctaatcgtaaagcatttgtttcccctacatcgaagcgctgatggggtcgagggcctttagtcctgaggtcgtaacgtgcgcttttttgtgacagtgt

SEQ ID NO: 440453 - DNA, 122 bp, Homo sapiens
actgactaaagtcattggttcatgacagaactgggccaggccagagctcttttcatgtgacgtttgatacttacccctacatttggaggtgccaccttccttgcaagggccttgcatttagg

SEQ ID NO: 440454 - DNA, 122 bp, Homo sapiens
agactctccaggcaggacaggcgagcttggtgaggtttgactcatgggctgtggttttcacgtagccttttggcggtgagtgggcaggactgtgggccttccaccccacctctaatcagagc

SEQ ID NO: 440455 - DNA, 122 bp, Homo sapiens
atgctgctgattatttgtgacctttgtattgacatgtctcgtttgcttaaggaaatggatcgtcatgggtcaggccctcagccaactggacctgtgagcttgccacttgctcaaaccactta

SEQ ID NO: 440456 - DNA, 122 bp, Homo sapiens
tacgcccccagccgcgctcgccctgcctgtgtccgccattacgcgattccccgccctgggcggcagccacaccccgccaatggccctgattggctcactgccccacccacccggggcttcgg

SEQ ID NO: 440457 - DNA, 122 bp, Homo sapiens
gaagtccaagcacttgatccactcaaagactttccgcggaatgaccctactccacctggccgctgcccagggctatgccaccctaatccagaccctcatcaaatggcggtaaggctgtggtg

SEQ ID NO: 440458 - DNA, 122 bp, Homo sapiens
atctcagtcactgtttccttccctatttttcctcattgcttagaagagttacattttttacgtacatcactcaggttaagcatctaaggaaccataaacaaaagcaagtactaaacggacaa

SEQ ID NO: 440459 - DNA, 122 bp, Homo sapiens
agccccgctcctccggcggctcacgccagccgggccggcccggcgcagcggcgggggccgcgctctgccatcgcaccggtctccctgtccctggcctctcaatgcagcggctcttcaaggtt

SEQ ID NO: 440460 - DNA, 122 bp, Homo sapiens
tgtttatgaaaagcttgcctaaagaaggttttgcttctttggagccctcagggttggtaacggatagagaagaggaggtggaatgcaggaaggaaggtttagaggatccatctcaaatggca

SEQ ID NO: 440461 - DNA, 122 bp, Homo sapiens
tgtgtgctcgatacagaaggcaggtgtgctggccttcagagccaggtgccctgctcccctcgtgtaaggaagcgcataaggttgtgaaggtcactgacccgagagcgctgcgtgctgacccc

SEQ ID NO: 440462 - DNA, 122 bp, Homo sapiens
tgctttcgcattagcatcaggtccgaggttactcattagaaactgggcaaagccggaaggcggccactttgcagcaaagaagccctagaccttgggagtcaatcaggccagcccaggccgca

SEQ ID NO: 440463 - DNA, 122 bp, Homo sapiens
cccgaccatgaaaggctgcgcaccactggcagtgccctacgctggggaagcacagctggacgtcctgagccggggggagtgcatagaggaagcagcagcgctcgtcgcgctttgaggcgctg

SEQ ID NO: 440464 - DNA, 122 bp, Homo sapiens
tctcatgtaattatctcaacaaccctaccaagttagcagcaaggtttccagttctgccttcgaagggaacctcctctcaccggagatccctatgacagaccctgcgaaatattttgctgcat

SEQ ID NO: 440465 - DNA, 122 bp, Homo sapiens
agaggaagaaagaagacccaaaagttactatttttctctccagaaaatggcagaggaagacggatccctggtctcttttggctgtcctgggagccccagtcccatccgacctacaggcccaa

SEQ ID NO: 440466 - DNA, 122 bp, Homo sapiens
acaaagcacacgaaagagagagcctgcatttcacgcatcttaaaccacagccatggagcccgtgcagctcattcccatttatcatccttcctgtgcactagaaacgttctgcgtctccacca

SEQ ID NO: 440467 - DNA, 122 bp, Homo sapiens
tctctaactcacttgttcctagaaggctagtgttccagtcctgctctggactcgtcttatcgctgcctggatctgacgctatgttgtcactctaaaaagtcacccagattttctacttcata

SEQ ID NO: 440468 - DNA, 122 bp, Homo sapiens
cctcggtgagcgtgaaggcggagcccgctccgaggggcgggctcgaggcggggagaggggcggggctccagggacctgttgatcgcaggtgtcactggcctgactggtccctgggtattggg

SEQ ID NO: 440469 - DNA, 122 bp, Homo sapiens
tccccgtttctcttgctctcattccttgtatcctttccccttttgagcccgtccattcatcggttctgcccccgactccccctgacctaaataccccagctcctaattcccccctcaccccg

SEQ ID NO: 440470 - DNA, 122 bp, Homo sapiens
aaaaaaaatccaggtgaccttggggagttcacttttaaacttgaggtctgaattatctaacgtgtagatttgaaagtttgaaatagatgctggttctaaaatgaccctatgattctttataa

SEQ ID NO: 440471 - DNA, 122 bp, Homo sapiens
ctcgaaatgattatcagtggtaacaatgatcaacgtaaaatagatgtgacaggaacatcacgacgtttgattatacttacaggaaacacaaagctacagtgaaatactatctcacgtctacc

SEQ ID NO: 440472 - DNA, 122 bp, Homo sapiens
gcaaaggttcaagatacaaaatcaatgtacaaaaatcagcatttctagcagcatttcaatcgtatgaaatgcatagaaatatgtccaagctgagagtcaaatcaagaatgcaatcccactca

SEQ ID NO: 440473 - DNA, 122 bp, Homo sapiens
gacccgcccccccaaccagacccaggaagccccggccaggcctgtggggggcgttaaccccgctctacagacggggaaaccaaggctaggagaactgtcacttgcccaagacagcaggctcc

SEQ ID NO: 440474 - DNA, 122 bp, Homo sapiens
aaatatgaaaatagcctaattttcagggttttcctttttttacatacccttcatggttaacggttagtggttaatggggattacccattaactcccaccctccttcccagctctctcccaag

SEQ ID NO: 440475 - DNA, 122 bp, Homo sapiens
tgcactccagcctgagcaacaaggggcaaaactctatctcaaaaaaaaagaaagaaagaacgggctaaaatttggtgaaatttaaaagggttgtagaaaactttggagtgtttgttttcttc

SEQ ID NO: 440476 - DNA, 122 bp, Homo sapiens
cttgcttttaactcctgacctactcacacaacagagcccacagcaggaaggccccattctcggcctagtgagctgaggtgttgccacccactaggcacagctgctctgctaattttagacct

SEQ ID NO: 440477 - DNA, 122 bp, Homo sapiens
gaaccccctaccccgtgcccttcggcctctcttggtcttccaaggtgcccccgtggcgcgcgggctcagttctccatgatttcttggatccagtcaaggtagtggcatacgctggtgtagac

SEQ ID NO: 440478 - DNA, 122 bp, Homo sapiens
aaaccggacctcactatttagcgtctcagaaaacgcggggttcattgccctggtcccccccgccttcccccgccccccgaaccttccggctggctctcttgcggtccccgcctcggcgctga

SEQ ID NO: 440479 - DNA, 122 bp, Homo sapiens
ggccacatgcagcccatgggccgtgggttggacaagcgtggtctagctcatcctactgctcggatcccaacaatgtacaactctgtgcggggacccttcacatctgtagtcactataatctg

SEQ ID NO: 440480 - DNA, 122 bp, Homo sapiens
ggcccagacgcagtccgagagtccagacgcatgccgactggaggaccaaagagattagcacgaagaaggatgatcttccacaaaaagagctatgtacagctataatggaaaatactcggtga

SEQ ID NO: 440481 - DNA, 122 bp, Homo sapiens
ggaggggaggatccgggaagctccggggtatttgacaggagcgagggcggacgcaaagaacgcggaggacctctgggtgcctgcaggggagctgctccagccgggccgccgggagcggtggg

SEQ ID NO: 440482 - DNA, 122 bp, Homo sapiens
aggctcttgactgaagagggcttcatgtgctctgtgaactgtgtggtttccttggctgatcggagacctttctgacttgcttcctgtttttcttctttacttttgctatacagatgtaggag

SEQ ID NO: 440483 - DNA, 122 bp, Homo sapiens
ccgtggctgaaaaacagcacacgtggttagcgctgccggctggccttacccaggggaaaacgttcatgtacttctttctgggtcgtcctctccttcctagggctctctctgcatcagagtca

SEQ ID NO: 440484 - DNA, 122 bp, Homo sapiens
acccagacgagccagctggctcaagaacttggcagctgcgtgatgactgaacagaggctgcgttcgaacccactactgcaagacttaggagcccccgatgggaactgccgtggttcactgcc

SEQ ID NO: 440485 - DNA, 122 bp, Homo sapiens
gagaggggtttgtttgggtacgtgtttcatgtgcgtcttcagtcctcagacgaaggaccccgggaagtctttggactctgtggctttctctgagggagtgtgcagcagtgtttgggcacaga

SEQ ID NO: 440486 - DNA, 122 bp, Homo sapiens
cggcggcgagggggaggagggttcgctcgccggctccgacgcagacatggtggactgatccgcagcggggccgcgaacagcgtttcctgaggcacctcccgcgcgtggttccgccgcgcccc

SEQ ID NO: 440487 - DNA, 122 bp, Homo sapiens
accagggacgcccagggtcccctgggccctgcgcattcgcagtgggcaggaactttcgcccgtggggtgggacctctgccacgccgtttctgttttcctgccacaacacaggtgccttgact

SEQ ID NO: 440488 - DNA, 122 bp, Homo sapiens
gagctagaattctggtccagatccacctgactctaaagccacaaggtcccacggggccaccgtgccttcctctctcagcctggtaactgtaaacccagtcaaagcggatgagggaggagtcc

SEQ ID NO: 440489 - DNA, 122 bp, Homo sapiens
gggtcaggaatctgaagtgatctagctggatggtatggctcagggtcttgcatgaggcaccgtcacaataacagccaggattggctaggcatggtggctcatgcctggaatcccagcacttt

SEQ ID NO: 440490 - DNA, 122 bp, Homo sapiens
ccgccggagcctcagcgcgcaggagcggaagtggggttcgaccaaggggtgtggcgagcccggtttcctaggagacggcccgcgggttgctctcggactgagagcgcgaggcttcgggactg

SEQ ID NO: 440491 - DNA, 122 bp, Homo sapiens
agactctttgtgctgtctttactaaatggaaaggaatgcctgtgctggcccctgcacacgcgtgtgtcagtcagtcagcacagatgtacgtgggggaggcatccacacatgtcctcagaagc

SEQ ID NO: 440492 - DNA, 122 bp, Homo sapiens
gctggagtttgagttcccaggattctaacagctcctgcaggttgggcctcccacatggaccggcctgggccctctgatggtggtcagggaacttgcggggcactcagagagggaaggacctg

SEQ ID NO: 440493 - DNA, 122 bp, Homo sapiens
gactggttccccatctaactgatctaatcaatgactccgaagagccggggctcctggccccgcccccgccatcctcttctccgcctcccattggacgcgggccgagaaggcagggccttgct

SEQ ID NO: 440494 - DNA, 122 bp, Homo sapiens
tctgtgcgtcataatccaactcagaaggcattccaaaaaaaaagagtaccaaaactgtttcgagcaatgtcagcactgataggataagtattagtctaggaaaatcaggagcaggcccagga

SEQ ID NO: 440495 - DNA, 122 bp, Homo sapiens
aagaaaataacagcatgtgcactattctatagcacattttcaatatgctatttccagccacgtgctcagcccagcaagctcttcctagcattgtttttctttgcttcatttcctcttaaatg

SEQ ID NO: 440496 - DNA, 122 bp, Homo sapiens
aaagtataattcttaaaagtcatggcggagtattgggtgcaatcctcctggaggcaggaacgggcttagcaccggcaggttctggttggccctttgctgctgtgtgcgtgggtcccttcgtc

SEQ ID NO: 440497 - DNA, 122 bp, Homo sapiens
gcaaggagggcggggaagagggcgtccgtgacggcggcctcaccgcggcatcctgggaggcgtagttctcactcctatgacagaaaacgagggtgtggccagcaaaggacttcaaggcccat

SEQ ID NO: 440498 - DNA, 122 bp, Homo sapiens
gggtcgccgctgcgccgggccgggatggcggccaccgcgctgctggaggccggcctggcgcgggtgctcttctacccgacgctgctctacaccctgttccgcgggaaggtgccgggtcgggc

SEQ ID NO: 440499 - DNA, 122 bp, Homo sapiens
tcgagccacgctccacttcccgggaagaattctggggagagtgaaggctcgctctgtggccgccccgcccacagcccgcctggggaagccgcgggccccagctcacctgcaggttgctcacg

SEQ ID NO: 440500 - DNA, 122 bp, Homo sapiens
agtggcagatttggagccaactattaattatttatcataacaaggacaggaataacctgtcgatataaaaagaaacccaaggaaaatccccaaatcttgtttttgacattggtttcccctcc

SEQ ID NO: 440501 - DNA, 122 bp, Homo sapiens
caatgtgctgcagcccgtgggctttcaggcttctcttgaggcggaaacttttgttacactcgggacacgaaaagggcttctctcccgtgtgaactctgatgtgctcgtccagcttaatcttg

SEQ ID NO: 440502 - DNA, 122 bp, Homo sapiens
cgctgctgccattgtttaataataaactgtcggtgccttcgtctctggcttcaagctgagcgcattgatggtaggaagtgtcctctcccggctgagtaacctggcacgcagcatggcaacaa

SEQ ID NO: 440503 - DNA, 122 bp, Homo sapiens
gctacctttctgaggaaaccaaggcacccagaagctaagcaactttcccagggtcatctccgcagctaggaagtggtggagcctcagtgtccacaacctgagttaccaggtgagactgccac

SEQ ID NO: 440504 - DNA, 122 bp, Homo sapiens
cctggagggctgcacggcggcttgtccctttggtagttgaatcccgcccattccaaaaagcgctgacagggatgtaaagggttttttttgtttgttttttgtttttttccccctcgaagaaa

SEQ ID NO: 440505 - DNA, 122 bp, Homo sapiens
cgggtttgtgccgctggcgccccggggagtggcccttcgcctaacttgggccgctgttcgcgtgttctgcaattcccaggggtccccaagcggccaccgacgggggtttccctggcacgggg

SEQ ID NO: 440506 - DNA, 122 bp, Homo sapiens
caacagaaagtaggcagcaaagccaaagaaaatagcctaaggcacagccactaaaaggaacgtgatcatgtcctttgcagggacatgggtggagctggaagccgttagcctcagcaaactca

SEQ ID NO: 440507 - DNA, 122 bp, Homo sapiens
gctgattcattagggcaaagtacagcccagataccgcagcccaggacccgcctgacttgacgaatttgctcagaaccctgtcagagactggcgcttctgtttgcctgagcatgggctgagcc

SEQ ID NO: 440508 - DNA, 122 bp, Homo sapiens
aaaaggctgaacactagggaattgttttccttagaacctgaaaggcatgtctgttccatacggaaggaaaggtatgagctgtgtgagaactctatccaagctcatttccacattcataattg

SEQ ID NO: 440509 - DNA, 122 bp, Homo sapiens
gcatcccctctgcctgggccgggaggtggatggtggaatgatcgccgtaagaatggctctcgagttctgagtgcactggatgtagtccggctccacgccaaatgctctacgttcctttccca

SEQ ID NO: 440510 - DNA, 122 bp, Homo sapiens
gggtctccaaagcagccggtgcgtggctactaccgtggcgctgtcggtggcacgtttgaccgcctgcacaacgcccacaaggtgttgctcagtgtcgcgtgcatcctggcccaggagcagct

SEQ ID NO: 440511 - DNA, 122 bp, Homo sapiens
aaacccctttcccacgtatataggtttggcatttgctgagtaggagcagctgtacgactccgggaatctgggagagttagctcagcctgctgactcagaaactccggggtctctaaggacat

SEQ ID NO: 440512 - DNA, 122 bp, Homo sapiens
cctgcaggtggggagaggctgggcagagggacagaaagggagatggccactgagagcatacgtggggctgtgacctttgggcggagtccgatccaaccgtccacctcacctgtgctgggtct

SEQ ID NO: 440513 - DNA, 122 bp, Homo sapiens
tcctgctcagagtagatggctacggtgcggatgcccagctccgtgcaggcccggaacacacggatggcaatctcacctagagggcaaagaaacaagaagttagattcctaggtcctaggaga

SEQ ID NO: 440514 - DNA, 122 bp, Homo sapiens
gttcacagcagagccaccctgcacgcaggctgcgccacggcatgaccttctcgggctgcccgctgtctgaggggcgcctgaaggtgagatcacaaaacacagaacacgatgtttacccgtga

SEQ ID NO: 440515 - DNA, 122 bp, Homo sapiens
aaggatgtttcgtttaaataggctgttggcagcctacggcaggagtccagagtgacaaaacgtgccaccagggggcagatgaggacgatgaagggtacaccccactccttcccaggtaccct

SEQ ID NO: 440516 - DNA, 122 bp, Homo sapiens
cccactgctgggcaacgtggccccgcccacccgggggccgacggggcctcgccctggtcccgcctctccgggcgccctggctctgattggcaaggaggccacccttttgccgggcggaattg

SEQ ID NO: 440517 - DNA, 122 bp, Homo sapiens
ttccgagtggagaacgggagggaggccccggcggggggaaagaagccctcggttctgggtcgcattgcccgagggggctctacgcaaagtgaaatactcacagttcccgaaacccacgttgc

SEQ ID NO: 440518 - DNA, 122 bp, Homo sapiens
taactttacggacttttctcgttccctggagtacattggaataacccttctcagggttagcggtgctcgggtccggtaacaacatggcggcgtccgtgaggggctcctttgggcaggggtag

SEQ ID NO: 440519 - DNA, 122 bp, Homo sapiens
ggtcttcaacagtcctttgttgagggcaaattctcaactggctagtcctcaaatgaatcacgtagcatacaaccacaggagtggaaaagaaagagatatgaaaattgaaacacagcaccctc

SEQ ID NO: 440520 - DNA, 122 bp, Homo sapiens
tgagtggaatgtggccccaaggttggtggggccccatcatcccgatcgggccctgagctccggcagcccaccctaaccaccagccccaaggagggccacaagatggcctctgcctaggcatc

SEQ ID NO: 440521 - DNA, 122 bp, Homo sapiens
agcagagtactgttcaggatacatatgtaagaaaactacacaaggctggggaaagaaccacgtaaaaggattactacagcgattcctaacctttttggagtttcgggatgaaactcttccac

SEQ ID NO: 440522 - DNA, 122 bp, Homo sapiens
aactgagccggtactcacctccgccccttctccccgtcgctgtccgcagccatggccctacgctaccctatggccgtgggcctcaacaagggccacaaagtgaccaagaacgtgagcaagcc

SEQ ID NO: 440523 - DNA, 122 bp, Homo sapiens
cgcgctccttccagggtcggaggcccacagacccctcacgttcgcttctgtcaggagtagcggcagaatttcgataatttatgtctttgatggagactgggaaggtagcctggccgctgcgc

SEQ ID NO: 440524 - DNA, 122 bp, Homo sapiens
tcttctattcttttgtctctgaccttctgcccccatgtacatattcctccaggtgattttcgatacacaccatccatgctaaaggagccagccctgacactggggaaacagatccatacttt

SEQ ID NO: 440525 - DNA, 122 bp, Homo sapiens
cagaaactgcctctagctagtttaagcaaagtaacttactagaaggacatgagggcatctcgtggaatctaaaaaggtttcacagtggttagaaggatagaagcaagggcacctccaggaat

SEQ ID NO: 440526 - DNA, 122 bp, Homo sapiens
tgaacctccccacctgaactcacagctctcaggttggagcaatctgcctgactagcattgcggaatttaagttagagcaacctggatttggtttgctttgcagttttctataatctcagtgt

SEQ ID NO: 440527 - DNA, 122 bp, Homo sapiens
tgctgttgtagggcacgaagcacagcaggaagatgacgaggttagccagcaggaggcgcacggtcttccgccgccgctggctctgcgtggcgtcggggcgcgccagcgtccagaagactcgg

SEQ ID NO: 440528 - DNA, 122 bp, Homo sapiens
gaattggcagttcctgtctcctaggtcgtaaggatggaataacgcactccatgtacataccgagcacgggtctggctcagagacagggctcagaaattggctggtagcatggagagaagcct

SEQ ID NO: 440529 - DNA, 122 bp, Homo sapiens
tggagcacttccggtccgtaacctgggtcaggggtcccctgcccaggaccagggcttgcccgtccgagggcaggaagatggggggcgctcccccaggggggctctcgagccacaagcggccc

SEQ ID NO: 440530 - DNA, 122 bp, Homo sapiens
gctagtggggcggacgggcaggggaagagggcgggcattcgggcagaaagaactgcttagcgaaggtaaggcacgaggaggcaaacgcataaggcacaaggcaagaacatgcagagcagagg

SEQ ID NO: 440531 - DNA, 122 bp, Homo sapiens
ggcaaaggggacctgatggagtgtctctcctgccagggctccctccttccggctgccacccgatcccagcttgccctgcatcctggtgggtccaggcactggcattgcccccttccggggat

SEQ ID NO: 440532 - DNA, 122 bp, Homo sapiens
gtgccccctcctctttgctgctgcagtgtctgcgccgggccatttaatgagatttattcacgcacggctcttctcagctttgcgaggggttggcagatccagtgcacagggatttcccacta

SEQ ID NO: 440533 - DNA, 122 bp, Homo sapiens
gccggcgccgtccctcccctagacctcagaggccctgcccgcagatgtggcgccaaatcccggatgcaggcctaggcgccagcccaggaatatagggagcaaattgttaagaacaaaacaaa

SEQ ID NO: 440534 - DNA, 122 bp, Homo sapiens
gcatgaccttttgaatctggcttccttcgcttaacataatgttttccaggttaatccacacggtagcatgtagcatgtattagtacttcattcccttttatagctgaatattattcccttgt

SEQ ID NO: 440535 - DNA, 122 bp, Homo sapiens
gggggtctgaggaacagtcctgtgctcataaggccaagagcctgcctactctgctctccgcgtggccagctttgagagtgctttcatacatcccagcccaaccctgctgccctggagaaagc

SEQ ID NO: 440536 - DNA, 122 bp, Homo sapiens
ccacaagcgagccccttttcttgacgcgcgccttttattgacgcaaacctcccgttctcgcgggaacttgggaacgggagcctggtagggaggacaaatctctcgaaatctcagttggcgct

SEQ ID NO: 440537 - DNA, 122 bp, Homo sapiens
agaattatccagtcccaggatgataagggggaagatgggaagaaacagacgggagacgcccgcccagaaagactgcgggaagaaagaaattcgagaggaaactgcacgccactgagcgcctc

SEQ ID NO: 440538 - DNA, 122 bp, Homo sapiens
aaactcctcacaagcacctaggggggccaagagcgaccggggtcggcaggtaaggaagaccgcggcgagcggcagggggcgccagcgcccgcgttcgggcgcttcacgtcagccgcagaatg

SEQ ID NO: 440539 - DNA, 122 bp, Homo sapiens
caacttgctatcttttcagcattcctgttttaaatgcccaaaccataccatttgggtcaccgggctgacagatttgaatttattttgcttccagggagcctctgaacactggcagggactta

SEQ ID NO: 440540 - DNA, 122 bp, Homo sapiens
caggcagagaagggaaaaagtagagggcacacctaaaatacaggaatgcacacgggtgcacgcacccttaagcatgcattacgtttgcccagtaatgtatgtgcacttgagtgcaagcccca

SEQ ID NO: 440541 - DNA, 122 bp, Homo sapiens
aagagggaaactgaggccagggaaaggtaaagtcgtgaaggattctggactggagtccaccggtcccaggtcccagaccaggagcggtccccagaggcctgcagcctcttccagacatcacc

SEQ ID NO: 440542 - DNA, 122 bp, Homo sapiens
caccgaggcggcgaggggcggagggcgcagaaaggggccgcggagaaaggacaaggcggccgaccagctcccaggatggaaagggaccctcaaggggctccaggcagcacctggggcaaggg

SEQ ID NO: 440543 - DNA, 122 bp, Homo sapiens
ccagaagatgaggaaggaatttgtctcagtccacttccacacctgtccacctgagctgggcgttagcctgagcctttgcctctgtatggatcccgtgagtatcctccttcccaaggccaatg

SEQ ID NO: 440544 - DNA, 122 bp, Homo sapiens
tgagtgtggatggactgacacgtggactcggccaaattcccaccactaggccgggaaacacgctcatactcactgcgtaaatcccaccgtcgtgggccttgcttccgcccagcgcgcacacc

SEQ ID NO: 440545 - DNA, 122 bp, Homo sapiens
atggcacctacctgctgctggccccctttcttcagggtccccaatttctctctcttccctcgtttctgtctgtgttctctgccattaagggcagcttataaacaccatgttcctgtctttat

SEQ ID NO: 440546 - DNA, 122 bp, Homo sapiens
caggggggccgcgcggtgcccccggccctccacccccggcccccggcgggcgcgggagcgcggccgcaggtaaatattttggcaacttttatttcatcagatttaaatccttaatgaactta

SEQ ID NO: 440547 - DNA, 122 bp, Homo sapiens
ggatggcgaggacacagaggacggtgagcatggcgaggacggcgaggatggcgaggacggcgaggacggcgaggacggcgaggacaccgaggatggcgaggacggcgaggacggtgaggacg

SEQ ID NO: 440548 - DNA, 122 bp, Homo sapiens
gctcaggcatggcgggctgcaggtcccaagtcctgccccgcgggaaggcagctaagacaccgagaaatcacctaagatttcttggtgagaaatcgagagctgcgccggtgggctggcactgc

SEQ ID NO: 440549 - DNA, 122 bp, Homo sapiens
gttttaaatcagactataaataaaacaaacaaaaaaataaacagaaggaggaaaaaagatcgcctaggatacagtgttaaaccactttcacagttcagcttgagttgtggctcttggagaat

SEQ ID NO: 440550 - DNA, 122 bp, Homo sapiens
gagcggccgggccagggaaattcccggagctccagatcgatccggagtcccgaaggaaggcgacggccccgcccccggggtggagtcggatacgggtagggggagcccactggtgacgccta

SEQ ID NO: 440551 - DNA, 122 bp, Homo sapiens
gaatccaccacttgggcctaaggggaggctggtttgtgtcctggaagaaccgggtccctccgccctaaccatcaggtcggcgttacttgaggcgttctgatcccttcagccttccgatccct

SEQ ID NO: 440552 - DNA, 122 bp, Homo sapiens
ccgccctggctggaccgcggtggctgcgtgcagagcgagcaaggctgcgcgggcctggagcgcccacggggcgcgggacctctctctgtctccccccgccccgcggggctctctctcgtcct

SEQ ID NO: 440553 - DNA, 122 bp, Homo sapiens
tcagtgggctctcagttgccaggtccgacctgggtggaacatcgtttccgagctctgtctcgaagtgagttccatagacagtttggtcctaggtcctaaatctccctgctttctggcatatc

SEQ ID NO: 440554 - DNA, 122 bp, Homo sapiens
ggagcccagggcctggccgctgctccagggacctggttgaatggcccgagtcactgttgacggcgtttgaacaccaggaggtgtgggtgccggacagctgcagcttctgtttctgatagagc

SEQ ID NO: 440555 - DNA, 122 bp, Homo sapiens
accgaatccaccagccgggcaggacgctgattggctgaggagtgcacttgccagggcccacgcccccattctgcctgccttctcagcaccatccagtcacctgctgccagccctgcctagat

SEQ ID NO: 440556 - DNA, 122 bp, Homo sapiens
cgcccgctccgccggaagccggtcagcgccagccggaagccccgccccctagaggcaccgcggacaccgtgcagcgctgttcacccagatgccagctgtgaccttggctaagccagtgactt

SEQ ID NO: 440557 - DNA, 122 bp, Homo sapiens
aaggggaggctctggcccagggagcaacagaccgtgcccaaggttctgaagcacagctgccgctggcaaggaggcccagaaagatctgcagaagcccattcccaggaacatggagttaccga

SEQ ID NO: 440558 - DNA, 122 bp, Homo sapiens
agcccagccgtgagttggccggcagtagagaaagccgcagaggcatggtccttgtggttccggccgagccttttcacgctggtttaaggctagatgtccggctcccaattctgtgggtaaag

SEQ ID NO: 440559 - DNA, 122 bp, Homo sapiens
ctaccacagcccagccggaccgccaccatcatcggccttcccgcgtaaaccccggcctcccggagccaaaaccttcaggaaggcatgaatgtcgccacattgcccttttggagggaggccct

SEQ ID NO: 440560 - DNA, 122 bp, Homo sapiens
agctggagaccagaagcctgaaggcagctcggccctccccagcccacagcgccgttattccgtttctatatcagtaaacacatttcattttccgtagaccagggcggggtgacgggtgatcc

SEQ ID NO: 440561 - DNA, 122 bp, Homo sapiens
tggcgcggaggttttcaggctccgcccgctccactcgcgctcccgccccttccttcctctcgaggtgacccggcagctggcgcctttctcaccaggtacccagccccctggccgcctctctc

SEQ ID NO: 440562 - DNA, 122 bp, Homo sapiens
ctgatcgagagctgccaccggccgccgaagcctggatcaggctctgtcccgacgcctgaccggaacctgaagccagcggaaatcctgagagaaagtctgaaacccactcagtccccgaaacc

SEQ ID NO: 440563 - DNA, 122 bp, Homo sapiens
caagtgattctcctgcctcagcctcccgactagctaggattacaggtgcaccaccacgcccgactaatgtttgtatatttagtaaagacgtggtttctccatgttggcgaggctggtctgga

SEQ ID NO: 440564 - DNA, 122 bp, Homo sapiens
agcgacaactcccgtggttacctggacaacccgccacgcagccgcagcgacaggcactgacgcttatgcgaccggagcgcaacacgcgtcgcaaggtcacacgtaactttgcggcgaagcaa

SEQ ID NO: 440565 - DNA, 122 bp, Homo sapiens
tacattctcgaggggggactgggatgcatttatgtttgcattcttgagagagaactgggacgcatgcatgtttacattctcgagggaggaactgggacatgtgcatgtttgcatttttgagg

SEQ ID NO: 440566 - DNA, 122 bp, Homo sapiens
ccgggatgtctgtctcacagcagtttgcctgggaaacagactctggggcaggacgttgcacgctggaggattccctgagagagctcgggacacctgacgggggtgggatggggcctgggcag

SEQ ID NO: 440567 - DNA, 122 bp, Homo sapiens
cccctctatcacctcacataactgcatggggtaaagtcggcggtgggttcaagtgttttgcgctccctccacctcccccaacccagtgcagccccggatgctgcgtcttcatcctgaccccg

SEQ ID NO: 440568 - DNA, 122 bp, Homo sapiens
accccacgctgcccggttcggggctcccagttccaccaggagggacagcaggagagggggcgccgcttgccgggcagcctggctggcagccatcagcagcagctgcaggtgcccgtgtgcac

SEQ ID NO: 440569 - DNA, 122 bp, Homo sapiens
gcaagcatgagtggagaaggggctgctgtggttgggctggggtggactccccacctgcgtcgtccaaacattagtgtgagtgcacccacacaaacacatacacaatcacacacaacatgtga

SEQ ID NO: 440570 - DNA, 122 bp, Homo sapiens
aatggcctggcatgagggcctcaggccctgccctggccttaagccagaaggaaatggtctcgcttttgaaaaccaaacccacaagggctagacaaggtagtgaggtccaagccagagcaaag

SEQ ID NO: 440571 - DNA, 122 bp, Homo sapiens
gggagttggagggaaggactcaccagagcagctgcctcccgtccccacccaacacacatccgggactccacagagccgcttcctggctgcggtcctgctggctccccaaaaacccatcaagg

SEQ ID NO: 440572 - DNA, 122 bp, Homo sapiens
tctgaaaaagtaggatgtcagaagtaagtgagggaaaatacttctggaaatgccagaaaccgtcatgaaagttcaacgccagaactgagcttttattttgcaaaagaagcccttagaggttt

SEQ ID NO: 440573 - DNA, 122 bp, Homo sapiens
cagcctgatgccaccggcagccccagagaccggtcaggtgacaggctgcacctcacccagcggagttacctcccagtgcaacgctctgtttcctgaggtgaaacacaaagcctgctccagta

SEQ ID NO: 440574 - DNA, 122 bp, Homo sapiens
tgtggcctgttgctgcacggccaagagctcggaatggtccgttactgtgaaaacgattagcgaataaggaagagtgtgcggtggagaccatcttccccgtccccgcccccagcacaatactg

SEQ ID NO: 440575 - DNA, 122 bp, Homo sapiens
agcgcgggaaagcggccgcgatggcctcggaagaggatgcgccccgcgccgcccgccctgcgccatgcactgttacccctcggtcctcacccgcactgcgggtgcggggtggcaactacccc

SEQ ID NO: 440576 - DNA, 122 bp, Homo sapiens
cccaatcagctctaagtacaaagcatcgcgagtctttagtgctctttggcgctataagcccgtgggaacgagcattggagacccttttcacaagatggcgccgaaagcgaagaaggaaggtg

SEQ ID NO: 440577 - DNA, 122 bp, Homo sapiens
tactgcacacacacacacacacacacacacacacagaactaccaacatccacccacgactcgggaaagcatgaactctgcagccagacagcctgtcttcaaatcagctgtgcctcttaccag

SEQ ID NO: 440578 - DNA, 122 bp, Homo sapiens
agtggacccatgaggtgggttagaatcgtgtgtgggattctccagccccctgtacctgtgcgtgtggtatgcgcggagccagccagcactgcctggcgtggagctggcgggttctcagtctg

SEQ ID NO: 440579 - DNA, 122 bp, Homo sapiens
cggggccggtaccagttcaattactacgaggcgaagcaggcgtgcgaggagcaggacggacgcctggccacctactcccagctctaccagggtgagcggccgaacccagcacttcccaagcc

SEQ ID NO: 440580 - DNA, 122 bp, Homo sapiens
tcttccctcggacacgcacgaccctcgccccctgggaaccgtcccgcagcaccagatccgcggtgacacccaaactcccccaggctccccgccgacccccgcgagacgcatgcgcggcgctc

SEQ ID NO: 440581 - DNA, 122 bp, Homo sapiens
tctttctgtggtgtccatgaccctagaggacaggtcggccacttggtagtgcctgtgctccggtgagccacagaggcaatgagaccaaggggaaaatctctcggctcggtctctcccccgcg

SEQ ID NO: 440582 - DNA, 122 bp, Homo sapiens
aaatgtggaagcctcctcacctgtcagttttattctccctttggggttcccttacatgcacgctcacctgatggcgggtgttgtacaccttctccgctgctattgtgaagggcatgtgcagc

SEQ ID NO: 440583 - DNA, 122 bp, Homo sapiens
tcgcccctgcgctgcgcggaccgcagccacagccggactggtgggaacggcggcgacagacggattggctgacagtcccagccctcagaacagccccggcctcgaagcgttggcgtctgcgt

SEQ ID NO: 440584 - DNA, 122 bp, Homo sapiens
aataccttaggtctcactgcctcacaaaaacaccaatctctctgtggccgcccaacatcacgccgccgcacataagaagttctgggcagccaccggaagcaccggccctcagtcctctgata

SEQ ID NO: 440585 - DNA, 122 bp, Homo sapiens
gccacgaagtgtgcattcacaagagtgtcgggtgtaatgtatttatttctgggtctcaaacgatctttgcagcgagtaattctgtttcgatgttaaagtcactggattttacttctctggtt

SEQ ID NO: 440586 - DNA, 122 bp, Homo sapiens
aaagacctgtcagtcatttttcaccaatgggacctgaaaattccatgataaacacaaatacgttattactctaaggaacaatttgttgtttaaaactgaaatcttgtctttacagatctctc

SEQ ID NO: 440587 - DNA, 122 bp, Homo sapiens
accgctgccgccccggccgctgctcctttaatctttttgttttggtttgaatctgctcggcgcagactggccaaggatcctctccgccctcccccttcctcctggcgcgggagaggcaccgg

SEQ ID NO: 440588 - DNA, 122 bp, Homo sapiens
ccccgtgcagaaggccagggtctgcgggtttgggctggtctgccccccaggtgagggttccggaaagacggccggctgctgagtcttctcaagcaggggaaacagcagctcgagagtggttc

SEQ ID NO: 440589 - DNA, 122 bp, Homo sapiens
caggcatagtcccagggagcaggcagctgcctaggaaggcagtcaagcagatggggacctcggctgccccaagactggcccggggctggtcctccctgcgtctggcctctgggtgggtggtg

SEQ ID NO: 440590 - DNA, 122 bp, Homo sapiens
ctgttctctaaagacgttaggagtcacggcatctggcctgcggttgggtgaagcactggccgttgggcacagtggatgtgtgaaaaggtgccattcagagttgttattctcatgacggaagt

SEQ ID NO: 440591 - DNA, 122 bp, Homo sapiens
ctttttataatattagaatcatagtttacctacattacagggcttttatgaagattaaatcgagcatcgtgggtagtgttttttcagcccctgtgactaagtaggttataaatggtcctcag

SEQ ID NO: 440592 - DNA, 122 bp, Homo sapiens
attcaatatcctccttctagctgtttgaaaatacagaatatattattgttatggtcatcccgcagtggtatagaacactagaacttactcctccaatggagctgtaattttgtatcctttaa

SEQ ID NO: 440593 - DNA, 122 bp, Homo sapiens
ggggacttctggtccatgtccagcagaacctgactccatcgcggtctccaatgcccatgccggacaccccacggcccttgtcctgtgatcccgaacctcacggctgccgcccccctcacgga

SEQ ID NO: 440594 - DNA, 122 bp, Homo sapiens
cagtccgctgacctccagggaataaagtcttgggtctcaagactcgcacggccttgtgcacgggctttgtgcggcctgagtaatctgtcggccctgagtatcaccagggcttttgaatcttt

SEQ ID NO: 440595 - DNA, 122 bp, Homo sapiens
tgtacataattttatgtgctgtacatttatacagcagtgtagtaagtttgtttataccagcgtcactcaagtgcttgagttatatgttgcgttatgatgctaagatgtcacagctgcattgt

SEQ ID NO: 440596 - DNA, 122 bp, Homo sapiens
agctgcactgtcccggaacgcaacctgaggtctgaccctgttaaatcccatgcactaaaacgtctcaagtggtcaccacgtgcggggcttcgacgagagccgtggagagcaggggctggggt

SEQ ID NO: 440597 - DNA, 122 bp, Homo sapiens
tgccagctgaggatgtggtgagtgacctggggtgggtggctgggtacagagcaggtggggcgacggagctacagacaggcagggacagagagcaacaaactctgtgggctttgttaaggtaa

SEQ ID NO: 440598 - DNA, 122 bp, Homo sapiens
ttggtacccacagcaacagccactgtttcggacatcattcccccaagcaatagagcacaacgaatgactgacaagcatccagttgtatgtctcaggatggtatttttcagggctggaagact

SEQ ID NO: 440599 - DNA, 122 bp, Homo sapiens
ccatcgattgattagataggttaagatagtccttgcattcaggcaagccacagcaggtgccgcctagggcagcggcctctgcccagacactcagtgctgcagaacaggagggaggccggggc

SEQ ID NO: 440600 - DNA, 122 bp, Homo sapiens
cctgaccattctggaaccacctgactttaatgctgcctggatagaaaccactcacagagccgaccagggggttgcggtgatgcaggggctgggtctttgcaggatacacagtcaccttagga

SEQ ID NO: 440601 - DNA, 122 bp, Homo sapiens
gtaaaaacacattcctgacaagtgacaagcagaagagtccggcagctgcagcgcctcactcggctgggacctcgtacttgaagatgacgctgaagagccggccgcccagccgctcggccagc

SEQ ID NO: 440602 - DNA, 122 bp, Homo sapiens
ggggcttccatcctccagtgccctttctgttcattcatctgttactatacagggacaaaccgtgatctattagcactgggttactgtgggtaggatgccaagccctcctcattcctctcatt

SEQ ID NO: 440603 - DNA, 122 bp, Homo sapiens
gtctgagtcacttcaattcaccagcctaatagatgcaaaaggatgtaagcatgtcagacacgcagagacagtatttgaatcaagcttaatagctcaagggagctgggccatttcctattttc

SEQ ID NO: 440604 - DNA, 122 bp, Homo sapiens
tgtggaacttgatgccaccccctgcaatggagagactgatttaggagcattgtgtcccttcgagatggggatccacacactgtgaatgtgatgactgtacttcaggtatctctgacatacct

SEQ ID NO: 440605 - DNA, 122 bp, Homo sapiens
gctccgggccttgaatctcggcagatgcgagttgtgggcacctagggaaccctgaggactcgcattcccccgggtctgtatcccgtgcccaccccggagcgtcgcaaaccttggaaagggtg

SEQ ID NO: 440606 - DNA, 122 bp, Homo sapiens
ctagaactcaatgcatgttttgaataaagtttttttttaaaccttgtatgatagggaaaccgaaagatagataagcaaacaggtacagataagtaggataatacgcttgaattggatagcca

SEQ ID NO: 440607 - DNA, 122 bp, Homo sapiens
gctttgaatcgaatatattcggaaaccctcgaccctggtataaccataatcggagatgttcgtttatttccggacctagagatgaggcgctggggcgcttgggtgtttggggcgggtccgag

SEQ ID NO: 440608 - DNA, 122 bp, Homo sapiens
ctacagcttgacctacagcccatcctggccgaggcactgcacattctggcctcattcctgcggaagaaccagcgggctttgcgactggccacactggcagccctggacgccctggcccagag

SEQ ID NO: 440609 - DNA, 122 bp, Homo sapiens
ttggtttagaagctcttgactccgagacacataggaggcttgaataataatgttcttccccgggtagatagtgatgaagttacaaaagcatttaaactgattatttcccaaaaatgatgtta

SEQ ID NO: 440610 - DNA, 122 bp, Homo sapiens
gcggggcgctcgtgtagggagattgacctacagtgcccagctggggcaaccgtgccgtcccgttgctggtgccgtcgtgacggtcctagaagagagcgagaggaaaggtaaagaacaaggaa

SEQ ID NO: 440611 - DNA, 122 bp, Homo sapiens
gatattacacccaatattgcacagactgtacacccttcctgtgatactgtttctaatacccggggcgggaggagagaataatattacgtcccatatcgcagggggtgtacacccctcctgtg

SEQ ID NO: 440612 - DNA, 122 bp, Homo sapiens
aagtgtttattgagtcccctggggggcacccagaataccacccaaaatagcaagaagacccggtccccgccttgcggacgatgcactcacatgccacagcaacccattctcgcctcttcctt

SEQ ID NO: 440613 - DNA, 122 bp, Homo sapiens
ggctgggcttttacagtagaagcccagacgttttcccagttaaggcttgagttctgcctccgagcctatattcaccctattccccaactggagtgccctctcctctttctccaggttgtcca

SEQ ID NO: 440614 - DNA, 122 bp, Homo sapiens
gactgtaagcccacacaagctcttcttatctctactagaattaaaatgttaagtcaaaaacggctccttttttgcgcctcctagtgaaacttaaccagctagaccatttgagtaccagcatt

SEQ ID NO: 440615 - DNA, 122 bp, Homo sapiens
ccatggcgctctgtgcctgcggccgatgcgttgctgcgaacagcataggtgagactctgccgagtgaggtataggtcttctcaccacgcctgtactgcagacacggtcgtgtagagtagcag

SEQ ID NO: 440616 - DNA, 122 bp, Homo sapiens
cggggaccccttccctgctgtgtttggggacttcctgggccgggagcgcctgggatccttcggcagcatcacccggcagcaggagggtgagcaccgcacactgggccggccgggtcctcacg

SEQ ID NO: 440617 - DNA, 122 bp, Homo sapiens
gggggtgtggcccagaggccccattctgcgggggtgggtaacctgggagcccccttctcccggggacgtgacctgtgagctccacttcttccgagggcgtggcccggagcccccttttcaca

SEQ ID NO: 440618 - DNA, 122 bp, Homo sapiens
ccacgccccctgcattagcacaggcgtttccagagttgcacgcgagctcatttgcaagaccgtctccccctcccatcccttcttggtcccctctagggcccagggcagcagccccgcccctg

SEQ ID NO: 440619 - DNA, 122 bp, Homo sapiens
tggcttagtgctgggattcccacccacccacagcccgccatggcgtctcagctccagaaccgactccgctccgcactggccttggtcacaggttgagggggttctttccccgggcggtttgg

SEQ ID NO: 440620 - DNA, 122 bp, Homo sapiens
cgaggctttgagcaacctgcggttgcacggctctccttcggcttggggagggaggggtagcgttcacagttctccagtgtgccatagactgttagaccagatccttcagatctagaggcaca

SEQ ID NO: 440621 - DNA, 122 bp, Homo sapiens
ggaagggaggctggcagacagtggattttatgcctataaatggggggacagggaggaagacggggggcccgggtgaacaaaaaccacacggtctctatggaaatgtggagagaactgagagc

SEQ ID NO: 440622 - DNA, 122 bp, Homo sapiens
caggaggaatacaaatgctccactgtctgcagaaaggcccgggggtttgggtaggatcaacgatctttgacctctgtaatgtgtggtccatggagactgttgtcatttcgggagtaggagtg

SEQ ID NO: 440623 - DNA, 122 bp, Homo sapiens
cctgcagctgctactacccagggctaataaaagcagagcttcctgttgtttctttattaccgccctctgcctccctccgccccaatccgctcccagctgcagccagagccctaactgatcgc

SEQ ID NO: 440624 - DNA, 122 bp, Homo sapiens
cgtgatccacccgcctcggcctcccaaagtgctgggattacaggtgtgagacacagcacccggccctatttatgtatttttgagacagaatctcactctgtagcccaggctgacagtgcagt

SEQ ID NO: 440625 - DNA, 122 bp, Homo sapiens
gtccagatgttactatcttattcacaacttagaagaaaaagagcacttagatggagaggtcgcctctctatgcaaagtccttgacctagctttatctagggcttgtacggtcttgtcggggc

SEQ ID NO: 440626 - DNA, 122 bp, Homo sapiens
ggctgttgaccgagggacaatgccctgtgtgtctggtggggctctggccggtggcacctccgcctgtggcctgcggccggccgcccagccagcacccacagggccagctaagacaatcagct

SEQ ID NO: 440627 - DNA, 122 bp, Homo sapiens
cagagcgtgagtgcgtctgtggtggtgggcttgacctgaggctcatccttgtcacctgctcggtggcagtgcctgcgtgcagacccctcgcagcactcaggtgtggcccgtggacttgtggt

SEQ ID NO: 440628 - DNA, 122 bp, Homo sapiens
acatttgacataatacaaaatataaagtcatagggaaaacttccggatgctgtcccaaaccgtggaatattcaatttagaatctcctgaacctcaagaggacagatgacacacaacctgtat

SEQ ID NO: 440629 - DNA, 122 bp, Homo sapiens
ttccgcccaatcaggtgtcggaaagcccagccagtccccgggagtgtagccaatagaaggcgactccggcaacacacccgccctgatccactaggaacaaaccgctccgagcccgggtggtg

SEQ ID NO: 440630 - DNA, 122 bp, Homo sapiens
ggtggaaaagtttgtccaagtcctgcccacttcttgcatgagtgtcttcataaatccatgcgcgccgctggctgatgccccgctggtggcagaaggtcccctttcgctctggctgcggtggc

SEQ ID NO: 440631 - DNA, 122 bp, Homo sapiens
ttaagcccaattcttacatttgtcaataagtttttatttaaaagaaccgtgcccatttgccgggatctaattaaactaaagagcttctgcacagcaaaagaaactatcgtcagagtgaacag

SEQ ID NO: 440632 - DNA, 122 bp, Homo sapiens
tagacgggaccgacagcgacaagggggctggccagggagcagcggggctggaggacggcccggcccccacgaggccgtgcatcccacaccccagctccaccccggagcagcagacgcacacg

SEQ ID NO: 440633 - DNA, 122 bp, Homo sapiens
catcaaagctaatggaggcacaccaagacagaattaaaaccctgatcaggaaccctgtcccgtcgcccaccgccctttcccaaaaggcacatggggaacttgtgctagaaaaggaatgcttt

SEQ ID NO: 440634 - DNA, 122 bp, Homo sapiens
gaaagaccctgcagagagagccctggggtcaccaactcaagcatgaaaggacactgaccccgtgtggtcatgtttggaggtgcagcacggggagagaggaaaggccccggcacggtcctttg

SEQ ID NO: 440635 - DNA, 122 bp, Homo sapiens
cggaaaagcttccattccgttaaagtgaccggcaaagttgtatcttttgtaagctttgaccgcaaataagcctgtgagttctttacttccatagtcttccggtgaaggaactgaggttttgg

SEQ ID NO: 440636 - DNA, 122 bp, Homo sapiens
cacagacagaaaatactcatatacgagtttcaggtgcacatgcaacttaaaaccttcaggcgtacgggattctgaggcagcagactgatttaaaatggagccactgaaaatgacacgcttgt

SEQ ID NO: 440637 - DNA, 122 bp, Homo sapiens
cgcctggtgcgtgtggggagctggtccctctgacttgagaggcagacccagctgggagggcggtgggcgcctcggacctcccccttgtcctcctcttcagttctgggaacggaggagctatt

SEQ ID NO: 440638 - DNA, 122 bp, Homo sapiens
tcacctcgctgctaggcctaagcgagtggtctcgttcaccactgagtgtcccctgtgttacgcgcgaggcccactcgaagcaggtttcgagaattaattcgtagatggacgaagattctaca

SEQ ID NO: 440639 - DNA, 122 bp, Homo sapiens
ctaaagagggaaagcatggtacccagggtttgtctgcatttacatgtgaattcttcctgccgcttccacctagctcagccctttgtgagctaacctcaggtctaggccaccacttgcctcct

SEQ ID NO: 440640 - DNA, 122 bp, Homo sapiens
tccgggccacgcccactccccttatcccaattccgcgtgctggtcccgcacacggtcatccggtttctgtcctgtggtctccagtcctggggcaccctagaggcagagcaggggattccatc

SEQ ID NO: 440641 - DNA, 122 bp, Homo sapiens
agccatgccagaagcagtcttccaggtcatcttgtagaactccagctttgttgaaaatcacggacctcagctacatcatacactgacccagagcaaagctttccctatggttccaaagacaa

SEQ ID NO: 440642 - DNA, 122 bp, Homo sapiens
agtattaacgtccattacacctccagcagcaatgccttccttggccatggcggtggattacgggtgaagctgaatcttgaaggcacccaagcctccgcctccgcacgactcggcagaggcag

SEQ ID NO: 440643 - DNA, 122 bp, Homo sapiens
aaacccaccaccagtttagttgcccagaaagtagacgaaggataatccatcttcaggatccgaaatgcagaggccctctacttgggggcggggagtgctttaggatgcctgaaaatgagggg

SEQ ID NO: 440644 - DNA, 122 bp, Homo sapiens
tgtctctccaatcgtgaatgagaccctgcaggtgggtttatggccgtcagtctgccccatcgccagctctttgatgtgccccccacctctggaaagcctcaccaactctcttatgggacccc

SEQ ID NO: 440645 - DNA, 122 bp, Homo sapiens
cacccagctcaagtgatggctcaagtgaaaaccctgaggcatcctcgccactctctcacccgcacttccaggcagtcacctggtcacgtgattctttctccagctatatctcagatctaccc

SEQ ID NO: 440646 - DNA, 122 bp, Homo sapiens
tccgggggcccggggcgccccgccgcccgcgccccccacccccgctgcaggcgccctccccgccgccgtcccccgctgcgcccagctccctcgctgtcacccgctcctgctcgcgcgctctg

SEQ ID NO: 440647 - DNA, 122 bp, Homo sapiens
ggctctgcaccaaggaaggctgaaccgagagaaccttggactagaggtcgtggtactcagcgctcccttcactgaccatttaaatgtaaagcaatgtttgtcctcgctgtcagtcgcaacac

SEQ ID NO: 440648 - DNA, 122 bp, Homo sapiens
tcgtttctgattcagcggagacgggggatcctgtgtcagagccgtggatcgcagaggcagcgaggctcggtctgcaaacaagacgctgcaaggctgagtgagagagagagggtgtgcgagca

SEQ ID NO: 440649 - DNA, 122 bp, Homo sapiens
tcctgcatacatgattaaaatgcacaagtacacagaccccaccgcactccctcacactggcgtgcacaccagcacgggtctgcccacgcagggatgcgctcgctcacgggccaccacacaga

SEQ ID NO: 440650 - DNA, 122 bp, Homo sapiens
atagtaattaagatgtaggtaggactgtattttacaagatttaaagattcttttggcagtcggataaaacacttcaatgctcagctagatgaaaggcagaagtctttgttacttacagctct

SEQ ID NO: 440651 - DNA, 122 bp, Homo sapiens
gtgaggtggagagggttgagctgggtagaagtggcctttgcaggtagtcaggggactcaccgttattctggctggcagctcatggcaagtttctctcctgggccgcagggggtcacaatgga

SEQ ID NO: 440652 - DNA, 122 bp, Homo sapiens
aggctgggtgaggctggtcgggaagagggagacggaggtggaagcgggttcaagttttgacgggtggtcacctcagaaagggctccttctgtttagcaaaactccccaatccttcgcctggc

SEQ ID NO: 440653 - DNA, 122 bp, Homo sapiens
agagagtcctccagctgtacacgttgacttcttgctataggaaccgtatcctgacgcagacgcgatgcggtgttccatcaggaaatgcttcatactctcagtgggcatcgtattcctgtggc

SEQ ID NO: 440654 - DNA, 122 bp, Homo sapiens
tctgtgctcttctcacgacctctgatgaccacattacgccgaggcacgaggggttcacctcgtcatttttcatcagaagaaaaggaacattcctccaggagctcagagcttctctggcaggt

SEQ ID NO: 440655 - DNA, 122 bp, Homo sapiens
atcgggacgggcgtgttggggcggggcctaagtgcggggcagggcgggctttcggggatgcggtctggattctggaggaggcctcggcgcgcagctgggcgagtactaactgtttgcactct

SEQ ID NO: 440656 - DNA, 122 bp, Homo sapiens
ccatgtccggccctcacaaccttttcaactcatatccaaaatatctatgaacatctttcccggaactgacactttaagtttcacctattcatatggctgcttctttctctaaacacccagta

SEQ ID NO: 440657 - DNA, 122 bp, Homo sapiens
cataagttttagagaagcacaatggaaagacagcctaatgcttggttctggactacagagcggtgattctagttaggcaatctgagatcttgaagacatttgttgaagaagatgtgaaacaa

SEQ ID NO: 440658 - DNA, 122 bp, Homo sapiens
gagctgaaccaatcagcgggcgcgctgggcccgcggcgcggttaagtgagaagcagaatccgaagttgattggccaaaaggggatttgccccaccccaatcaccgcggcagctggccgcggt

SEQ ID NO: 440659 - DNA, 122 bp, Homo sapiens
cgccgggcccaccccctcgcgacgtcaccagcggcagccccggaaagcggggcggggtcgcggtcccggcggagactctgcgcctccggcctacccgccccgcccccatccggcttcgctcg

SEQ ID NO: 440660 - DNA, 122 bp, Homo sapiens
ggattctgatttgcagctctgtccagggagcatccggccaaacctggagcccggggcgtgcggatggacctctggacgtggggccacacctgtgcgcgagttttctcacttactggctcgga

SEQ ID NO: 440661 - DNA, 122 bp, Homo sapiens
tgcaggcagcctgtttcaggtgtccacactttgcagagggcgcctctgcacagaagcgcacgagtcccagatggagggaagcaaatctcacccaactttaaatatttgtttctccaaagcta

SEQ ID NO: 440662 - DNA, 122 bp, Homo sapiens
tccgtcccttccctcactgttgtgtctctagtcctgagcccgcgggtggagcgacagggccgccctgcagaggccggagcacgtggttggagggcggagcacacgctggagtgcggggcaca

SEQ ID NO: 440663 - DNA, 122 bp, Homo sapiens
aaagtttcagttcccacggccattctaaaatggcccctggagagctctggcttcctcctgcgccccttcccgcgcccgcccctgggtgtctccgctggctccccagcatctcctcccagctc

SEQ ID NO: 440664 - DNA, 122 bp, Homo sapiens
tcttgtcacacgtggcaggggccggttagaagactcggcggctgcgccagcgctgatgagcgaggacagaggagcatgaaactggtgctttcctgtaaaatattcaaagtgaggtgaaagtt

SEQ ID NO: 440665 - DNA, 122 bp, Homo sapiens
ggggaacctcctgttggctctgggagcagcttggctaggcccagaggtttggaatgtaaacgggtcagaggactagtgaaaagataagttcccaaagggtctggtgctgcacatggggatga

SEQ ID NO: 440666 - DNA, 122 bp, Homo sapiens
aaatcccagagtcttcccaatgatctccactcagccatgggtcttaaattccacagcatacgcttgccaagctccagaggcccggccacatgggaggcctgttcctcccatggaaaggggtt

SEQ ID NO: 440667 - DNA, 122 bp, Homo sapiens
tgaagtcccagaggcccacatacttggggcccaggtgagcctggtcccgggacaccatggcgggcgggcgcagcggcaggaccaggctgtggcccagctggagcacccagagctgggcgtgg

SEQ ID NO: 440668 - DNA, 122 bp, Homo sapiens
ccacactccgaagctgtatcatgaacgctgtggtgggcggctggtggggagcggggttgccgtcccactaccctctggaagcctcagccatgaagagcccctgtgggcaccttttcccggca

SEQ ID NO: 440669 - DNA, 122 bp, Homo sapiens
ggccaggggtttctgagtggttgttgtgttcctggttctgaggctcctgcccacaagatccgaagactcaccagggcagctgctgaccttcaggtggaggcagggagcctctgcagaagccg

SEQ ID NO: 440670 - DNA, 122 bp, Homo sapiens
ctcctggcctcaagtgaactgcccgcatcggcctgagggaacattttcaaaactcagaaccgtatttgccttaccatttgctcactggagaaaaatgtcatgggaggacgtaagaaacacaa

SEQ ID NO: 440671 - DNA, 122 bp, Homo sapiens
tggagcgaacaagggggatgctgataccgacctcctggttggaaagcctgtagagcagcgcggatgacagtggaacagcgggtcaggcggtgggcgcctgagcgaggggctagagcgggatg

SEQ ID NO: 440672 - DNA, 122 bp, Homo sapiens
gtctccccaactagtccctaaattgcatgagagcagggaccatctttgttttattgtgtccgcaacacttagcacagtgcctggcacataatcatacttaactacttactaaatgagtaaat

SEQ ID NO: 440673 - DNA, 122 bp, Homo sapiens
tctacactcagggtgcaggagccaggagccgggagctggagcaggcgaccaatccaatcacgtttactcccagtcgtccccggcgggggcagctcctgcacgccctctcccccaacactcgg

SEQ ID NO: 440674 - DNA, 122 bp, Homo sapiens
agactggaatttctgaaactgacaactcacagttctaacgtaaagaaaactagctctggccggccatagtggttcatgactgtaatcccagaactttgggaggccaaggcaggcagataacc

SEQ ID NO: 440675 - DNA, 122 bp, Homo sapiens
agaggccttagggcaagggggatgatctttttcagcctcccctcccctcctcccacccagcgtcctcatccccaccgcctgcgatagacttgggtcgcccattaggaagctgatccgcaggg

SEQ ID NO: 440676 - DNA, 122 bp, Homo sapiens
cccagctaattttttttgtattttagtagagacgtgtcaccgtgttgcccaggctgttctcgaattcctgaactcaggcaatccgcccgcctcggcttcccaaagtgctaggatttacaggc

SEQ ID NO: 440677 - DNA, 122 bp, Homo sapiens
ccctgcagaaggacagtgtggaagaactggtgggccgaggccgggggtttcaggccccagcgcggccctgagcgggggcttccctcaagcggggcgcggcagtccgggcgccgagacgcccc

SEQ ID NO: 440678 - DNA, 122 bp, Homo sapiens
agttcaggcagggccttcggcacagatggcacaggagttgccagcagagatggcgtcaggcgagggggcggggagggtgagcatggagaccaagaggaggtggccccgtgtccatctggggg

SEQ ID NO: 440679 - DNA, 122 bp, Homo sapiens
aatgcgtttcccatgcacatttccctgcatgagaaatgtgccactcatgagaaaataacacgtgtaggaaacaatgaagggtcacgtccacgaagcctcttctatgtacagggccctgggct

SEQ ID NO: 440680 - DNA, 122 bp, Homo sapiens
cccctgcggggttgcaatgggaattggagaaaatatatttcaagtgccttgcgcgatgcccggcaccgaggcacttggcggcactcaatatctggtattgtttggctattattactacttct

SEQ ID NO: 440681 - DNA, 122 bp, Homo sapiens
aggcggcaggggtaagggcggggttgtcccccagagtttcggggagcacaggaggctggccgccccaccccaccagcccatcctcccacctccctggggccctgctgccgcgcggcttccgg

SEQ ID NO: 440682 - DNA, 122 bp, Homo sapiens
gcgctgtgggaatcctgcttgggtaaatgtcaccgctttatataaagaactttgctctatcgtagctccagaatctgctcagattgccacaccttaacatatgatctgattattaggaagta

SEQ ID NO: 440683 - DNA, 122 bp, Homo sapiens
gaggagatgtttgcatctgaaaaggtaaacaggggccagctgagtggtgcaggggacattcgctctggctgcatttatttgtagtaattcctgtttggttcttaagaacacaaacttctgga

SEQ ID NO: 440684 - DNA, 122 bp, Homo sapiens
ccccctcccccttccgggtacctggaaacctcgggcccgggagccaattcctgctggggacgcgggccccggcggccgcgggaagccaaggtgggggcggcgcggggcggcgcggggcggcg

SEQ ID NO: 440685 - DNA, 122 bp, Homo sapiens
cctctctctctcacaagcacacgcactcacacactacggtaccctagggatgaaatcacacgcacgcacacactacagtaccctagggatgaaataccttttgttgctctgttctaggactt

SEQ ID NO: 440686 - DNA, 122 bp, Homo sapiens
taacttgataaacaagaacctgataaccaccgccgagagaggagcaatggtaaccttcaccgagaggagattatggaccacacggtctccgggcgggtcccttctaatctccttttacaagg

SEQ ID NO: 440687 - DNA, 122 bp, Homo sapiens
ggggccgggggcggggcgtgagctggccggggcggggcctatggaggggcgggaccgcggcgccctataagtactgcggagcgaggcgcgcgcccggccagagagcgagcgcgcaacggcgg

SEQ ID NO: 440688 - DNA, 122 bp, Homo sapiens
gttctctaaatcatagcagcaattgctgctgcagcacacttctctttctcctctctccaccgctccatctctccagggtctctaccttgcctgtcaggctccactttcctttgctcctgcct

SEQ ID NO: 440689 - DNA, 122 bp, Homo sapiens
cacctatgaggtccagtgaataatttgaaaaaggcttacaggagattgtgagcaggaatccgggctcaactttgggaactggtattctagtgcagtatattcaaaatacatacttaatgggt

SEQ ID NO: 440690 - DNA, 122 bp, Homo sapiens
ggcgctggccagcagtgagccattgctgctgtcagtgtcctcaggaatgtttccctttggcgctgacagcagtgtcccagccggaaggctgcgcacatccactccagcccagacggtgcgtc

SEQ ID NO: 440691 - DNA, 122 bp, Homo sapiens
acaaagttctatagtgggtaccttataagcacaaacttgtttaatccctaataaactgtacgatgaaattctttgagatggagagagacactagaagttacccagccaacaaatggcagagt

SEQ ID NO: 440692 - DNA, 122 bp, Homo sapiens
ttctgaaggcttgggcagggcacatctccaatcttcaaaagagcctatgtttgccctgggcgtgggggctgctgattgattcagcctggcatggagctcttccagctttccagacttgccgc

SEQ ID NO: 440693 - DNA, 122 bp, Homo sapiens
gggacacgagtttatttaaaaactcgtgtccggggagtttatttaaaactcggaagccggcggccgcgagccggttgtttatgtaaacccggaaacgccccggggggcgggggcggggcggg

SEQ ID NO: 440694 - DNA, 122 bp, Homo sapiens
gcgagtttatagcggggacaattggcttccccagctcaacccccccccaacccatgcctccgaagtccctttggtgtaaagctccaggggtgggagggggaaggggtgcccacgcactcacc

SEQ ID NO: 440695 - DNA, 122 bp, Homo sapiens
ttaatgtttaatgggtacagagtttcaattatgcaagatgaaaaaaaatttgaagacgaacgatggtgatggttgcaccacaatgtgaatggacttcatgccactgaatcgtacacttgaca

SEQ ID NO: 440696 - DNA, 122 bp, Homo sapiens
gagggactgagggattggagccaaggttaccagtcaggccttacttaccccctgggttggcgctgaactccagtgcactgccccactctggactgcaggaggcgctgtgagagctgcattcg

SEQ ID NO: 440697 - DNA, 122 bp, Homo sapiens
tttcctggttcctgtttgtgccatttttagggcccctttttcttgtttcctctagaaatccgccccttggtgtatgggctgctcagtgggctgctgctctcttgctgaatctgtgtccagac

SEQ ID NO: 440698 - DNA, 122 bp, Homo sapiens
tcacggcaggacaagcgccccagaggtcggaaaatcctgggacaacgcgaaagcggtggtcgccccacactctgcggagaaagtggtttcgcgcacgcgcgccacgcccatcgaaccctcct

SEQ ID NO: 440699 - DNA, 122 bp, Homo sapiens
ggttgcccaagaccaagtcttagaggcagccgggttccgatcaagtgctgcgaaacgacgcgtttgacagctgctctggagccgaggatcacaataagagaaggcgcgtgaggctccggcag

SEQ ID NO: 440700 - DNA, 122 bp, Homo sapiens
tgccctgctttcgtggccttcacactgtggacctctgacctctgggagcggcctggatgacgaagaggttttctttgggggaggtggtctgcggggtgggaccacaggtctctgctggggag

SEQ ID NO: 440701 - DNA, 122 bp, Homo sapiens
agccccgcggccctttaaagcccggacaggtgcagctcggtgccgcctctggttggctggcgtggggtgacgtaatggcacatggcccgtcgccattggctgggcggcaagctccgccccct

SEQ ID NO: 440702 - DNA, 122 bp, Homo sapiens
aggggagcgggccgcgccgccctcccattggccgcgggacgggccgcgccgcggattggccgccctgagccccaggtgaccccgccgatctgcgagccctgagcactgccccgctccgctcc

SEQ ID NO: 440703 - DNA, 122 bp, Homo sapiens
gggcgctgcgggtgggggacccgggcccggcgcgccgcagctctgcgcagagccgcaggccgaacaacagcacagccccgagtagacaccggcgcaggacgccgcagcccctcccgggcggc

SEQ ID NO: 440704 - DNA, 122 bp, Homo sapiens
ccgacaccattgtgtctgacggttccaccctctcctctaagggtggctctgagggccagccggagagctctacggctagcaatagcgtggtaccccctccccagggaggcagtgggaggggc

SEQ ID NO: 440705 - DNA, 122 bp, Homo sapiens
ccatgggtggtgcccgagggagccctgggaggagccgtcagcccaggcagtgggtggagacgggctctgccttctgccttcaccagctccgcccagctcccgggtcacccaccacagccccg

SEQ ID NO: 440706 - DNA, 122 bp, Homo sapiens
gttgtaatgtctccatggcacagttctggcttgaaggcaggattggctgctttttctactcgacatctttgagccaatcagcaagggctgcttgcctggagactggttaactcagtaaaggt

SEQ ID NO: 440707 - DNA, 122 bp, Homo sapiens
agtgtgggggatctctggagtctcttcctcctcttttaagaacgccagtcataaaagattcgggcctcacccacactcttttaaccttaattacgtttgtaaaggcattatccccaaataca

SEQ ID NO: 440708 - DNA, 122 bp, Homo sapiens
cggccgccgcggccaggtaggacgagcctggctgggtctaggccagaagggtgtccgtggcgccggtctcccgcggagcgcagaactagtaccggatccccagccgcttctgaccacacaga

SEQ ID NO: 440709 - DNA, 122 bp, Homo sapiens
ttggcagaaaacttgcagaggaaggaaagaaagatttatgactagtgtttatctactgtccgcgaagtgccaggaaagccccctgctgggtaacttacatatgtttaactcattccagcttc

SEQ ID NO: 440710 - DNA, 122 bp, Homo sapiens
gtgaggctgcgcaatcaagtgcggggccgagactcagcgcggggctcgtagcggggtgcacggaggactctaggttcaaggaactcagagaaacacctttccagggtctgggaagcctctcc

SEQ ID NO: 440711 - DNA, 122 bp, Homo sapiens
ctcgcacccccccaacctcgggtaaagacgcttctggaaggaagggcgccccgcggaccccgcccaaccctgcccagcccagcccagcccagcccagcccttcccggggcggcggcgcggga

SEQ ID NO: 440712 - DNA, 122 bp, Homo sapiens
acagaattctgaacagcaaggacctacttggtattctggaaagtatggggcaacttggggcgtgatgtcagccagagtccttccaccaaggcttttatggtgttacgtgatccaccacccca

SEQ ID NO: 440713 - DNA, 122 bp, Homo sapiens
caaacccacaccgtccctttgccacctctctggtcgtccattcccgtggtgccagaggcgcgggtcctgcagtagtcggtggctcccgccaggagcatccccgtctccgtggaaaccgggcc

SEQ ID NO: 440714 - DNA, 122 bp, Homo sapiens
tgtgagctccacgggtcaccaatataaagtttcctgccttctgatggacaaaggaagcggcgatggccagaatttgcagggacgctaaatgtccaaaacgtatgccttaaggcatttctctc

SEQ ID NO: 440715 - DNA, 122 bp, Homo sapiens
gaaggtgggctgggtgagcagggtagaggggctctggctccgggccccacccttaggagtcgaggccctgagtgtccgtccctggcccccaccccttcctcagaagttgttcgaggagcagc

SEQ ID NO: 440716 - DNA, 122 bp, Homo sapiens
gcctaggcccctcagtgagccctaagaggtcatatagagagcagcatttcctctccaggccgagatgagggctgagggcgtttggagggaagcgctctgcctactgccgggaggtgacaccc

SEQ ID NO: 440717 - DNA, 122 bp, Homo sapiens
cccttctgggcctttcctgcggccttcccagctcacctggagcagacggatcagcaaatccggccaaagaatactcaggacccaccgagcccccgcgaggaaggactcataccccaacccca

SEQ ID NO: 440718 - DNA, 122 bp, Homo sapiens
taaggggcagggcctgggctggggccttggctggtggctccagactgtgggtggggctctcgggggcggggctctcgggggcgcgtcctcgggggctcggccgggttccgttgccaccaccg

SEQ ID NO: 440719 - DNA, 122 bp, Homo sapiens
ggcgagatggaaagaaagtatcaaggagtgagctgaagccactgcccttgagaaccctctcgaggagtctggcctcatgaagatgccagaataagtggcaggtatatcctgaatgaatgtga

SEQ ID NO: 440720 - DNA, 122 bp, Homo sapiens
ccacaggacacggccggggccgtctgcgtctgtgcctgtgcagcccacaccagtgcagcccggggccctctcagacctcaccacacgcgtgcccagcacatgtgtgcacacgcagatgcagg

SEQ ID NO: 440721 - DNA, 122 bp, Homo sapiens
gcgctgcccaggtacgagtggtcgtatttgggtgcggtgcctggcgtgcggctcaccagccgcggcaggtgcgcgtcctcggcgggtctgcggcgcgcggggctgaaggcccagccgcggtc

SEQ ID NO: 440722 - DNA, 122 bp, Homo sapiens
cccgggcggtcaggccccgcgttcctgcactgccccatcaccacggtgggttaatgtgggcggctgactttcactcctagagtgctaagcagtgttcagacggctcttacacacgcggcctc

SEQ ID NO: 440723 - DNA, 122 bp, Homo sapiens
tagcccagaaaggcaccagttagcttttaaaagtatgtgctctctcctctttactaactgcggtgttagtggataattgagctaaggtttatacctgtattttccccctatttcaagatttg

SEQ ID NO: 440724 - DNA, 122 bp, Homo sapiens
cccgggccctccaccaggaaccccccgcccagaacccccgtcccgaccccggccgccgcacgcctcacccggcgcctgcagtgctccgtgtgctccccgccgcccttgcgtccgccgagtgc

SEQ ID NO: 440725 - DNA, 122 bp, Homo sapiens
aatgttcaagctccgcgtcactcatcggtaccaagttgatgatctctgcctagggttcttcgccaccctcaggctcaagtcccaggaggcctcctccgctgacttgggtgaacagctctgag

SEQ ID NO: 440726 - DNA, 122 bp, Homo sapiens
tgattctcatgcgctggggcagggcccctctggagctgcctgcctgcaggtggggtttcccgatggtggggccaaggccgctgcagactgaagtccacatgagtccccctgcccctcggggt

SEQ ID NO: 440727 - DNA, 122 bp, Homo sapiens
ctcacagatggaatgactattattggtgcttgtcaatccagaaataaaccacaatttgctcggcatttcaatctttaccactgatgtgttagtttcatttaattagttctgtgctggatgag

SEQ ID NO: 440728 - DNA, 122 bp, Homo sapiens
gtcactgtggctgagttagctgctccgcttccccaacaggctggcggagctcgtgcccttcgtcaccgtgaacgcccagtggggcatcctcagcaagtgcctgacctacagcaaggcggtgg

SEQ ID NO: 440729 - DNA, 122 bp, Homo sapiens
gccggggccaaccccgtagtcgaggcctcaggcccagctgctgcgcatgggggttgatggcgcgggcccggaccggagagcctccgaggcctacccgaccgctccccgggagggtgacctcg

SEQ ID NO: 440730 - DNA, 122 bp, Homo sapiens
acaaagagcagcgcaggttggtggttgggagacaggctggagcccggcggtgatagcgctcgcccccgagagagacgagttcccggaacattcacagcagcccgaccaatgcctggtacatt

SEQ ID NO: 440731 - DNA, 122 bp, Homo sapiens
tccagtcccggctcctcccgaagcgtcggagggcctgaccccacccccgggaccctcggccgcggccaatcacgaacgccgcctgaaacacgacttccgcaccccgctcacgtgaccagggc

SEQ ID NO: 440732 - DNA, 122 bp, Homo sapiens
gaggccagtctctttaggagtcaagagcttgtagacactgtccctgtttcagttggtcaccgaaaatactcagtcccctcaacaccccctcttcctcatttagccagattctgcttatttta

SEQ ID NO: 440733 - DNA, 122 bp, Homo sapiens
agtggttcccctttgctggttgttggtttttgtgtgcccccccacctcaaacccccccaccgtaagagaatcagaagggtcccatctgccttgcagggaagggtcatggttggtgactggta

SEQ ID NO: 440734 - DNA, 122 bp, Homo sapiens
gccaagcccgttcccttggctgtggtttcgctggatagtaggtagggacagtgggaatctcgttcatccattcatgcgcgtcactaattagatgacgaggcatttggctaccttaagagagt

SEQ ID NO: 440735 - DNA, 122 bp, Homo sapiens
gacggcacagctgacggcggcagccaggaggactaaggcgacgcaactccggcccggcatcgctctagcagccaacgccactccccggactccagcagaggcaaagaagagccggctgggcc

SEQ ID NO: 440736 - DNA, 122 bp, Homo sapiens
aggtaaaagattatccacttctcagatctgttacttagtttaggatattttaacaaatatcgtataaaataaactgctcctaaaaacaaaataacaaaagcgcacaaaggaaaaacatgcaa

SEQ ID NO: 440737 - DNA, 122 bp, Homo sapiens
ctgggaccaggccagcctctctccaaacagagcacgatgctccgtcccttgatgcggcaacggagccgctttcgtattgaatgacagagaccaggggtgtcaaaggctctgggccctgcact

SEQ ID NO: 440738 - DNA, 122 bp, Homo sapiens
gcagggactgagaccctcgcaccgccatcaccgggcaaagtggagaaagagacccaatgacgcgtggctgaggtcccgaggatccatctcaggaccctcaggatagactaggctgcatgggc

SEQ ID NO: 440739 - DNA, 122 bp, Homo sapiens
agaatacacacttgttaagtcacattgtcatccaggcagacgctgcttgtcacggtcactcggatgtgcatcctcaaaagaaggtggtcttccatgtggactttcagggctgggggtgtgaa

SEQ ID NO: 440740 - DNA, 122 bp, Homo sapiens
cccttcttgccctccttgctctgaggggccactgttgggcctggcctgtgactgaggaatcggtcctctctcctggagccacagagataggctgccagctcgttccgcagcttttccatctg

SEQ ID NO: 440741 - DNA, 122 bp, Homo sapiens
ctgctactctggctaaagtcttccacttacttttctcacttacaggtacctgaatatgtgcgtgcaaatgtaaaagtctttagatcaaaataggaacaaggaaagtttatccgtttcagttt

SEQ ID NO: 440742 - DNA, 122 bp, Homo sapiens
atgttaagttggacatctggttattgacagcttcctatgtgcaagcagaatgccaggctccgtgaagggaaagtcttccccctggagctccccatccagtgggggaggcaaaacccatcaca

SEQ ID NO: 440743 - DNA, 122 bp, Homo sapiens
gcctggtctcggacttggcctccagaacggtgacggccaattcctgtggcctgaggctcccgagtttgcggcattttgttccagcttcccacaaaccagtgccatggctcagcctgggcgcc

SEQ ID NO: 440744 - DNA, 122 bp, Homo sapiens
gggtgagtgtgtgtgagtgcatgggagggtgctgaatattccgagacactgggaccacagcggcagctccgctgaaaactgcattcagccagtcctccggacttctggagcggggacagggc

SEQ ID NO: 440745 - DNA, 122 bp, Homo sapiens
tgagcatgcccagcagtcagcttagaagcagagctggacaaaatgcagtttttactttaccgtggcttgtagccactgctgctgctgacaatgagcagggaggcagtgaggcattgggttcc

SEQ ID NO: 440746 - DNA, 122 bp, Homo sapiens
tgctaggtcagcaacttggtagactgacaaagtagaaatggtgttagatgaagagttagccggggctagtgcttaagtgacaagttagcttagaatataataatctgaccattgaagccttg

SEQ ID NO: 440747 - DNA, 122 bp, Homo sapiens
gaggcttttagaaatgcacttattatataattaacagagatttgtgactcctttgtaagtcgttggccataaaaggctttgtttaataatcacagtcatgtcttctgttactctgtgtcaac

SEQ ID NO: 440748 - DNA, 122 bp, Homo sapiens
agagatcctcccgcctcggcgtcccaaagtgttgggattacaggcgcctgccaccgcgcccggacgcagatattttctatgggcatctggaatggcgtccccaaagcttggcgccgtgctat

SEQ ID NO: 440749 - DNA, 122 bp, Homo sapiens
gaaaaatagagggtgaaagactaagtgtgaaagtattacatgacaggtctggaaatggcacgcatttctttggcctggaaaccactggcaacaacttagtcacacttccctcacgtaaatgc

SEQ ID NO: 440750 - DNA, 122 bp, Homo sapiens
ccgcgattccggcccctggcccggactcggtctccctggcgggggccatggggtgcacaccggacgcaggagcacccccaaccccgcgcgcctcccactccgccatcccgcgtgcgtcccgg

SEQ ID NO: 440751 - DNA, 122 bp, Homo sapiens
agggcgcagaccgaccaaccggctagggcctgactggctagactgtgcccgctgcagaggcgcgctcccagcacagggcggggacggaagggaggaccccgagccgcgtgaaacgcaaggcc

SEQ ID NO: 440752 - DNA, 122 bp, Homo sapiens
gcactggcgctggatgtggagagaagcacatcagcggaggaacacactcaactggctggacgtggagagcaatgcaccatcgtggtgagaggtgacaacatgctagcagccctcacagcctt

SEQ ID NO: 440753 - DNA, 122 bp, Homo sapiens
tcatcagcaggatccaaacactggccctaccctccccagtgaggtattgtggggaaatcccgggaggaggggagtccatgtgagaccccggtggccactgccctgctgccctcttcctctgg

SEQ ID NO: 440754 - DNA, 122 bp, Homo sapiens
ctgggggcttcgggcaggtgtaccgcgccacctggcagggccaggaggtggccgtgaaggcggcgcgccaggacccggagcaggacgcggcggcggctgccgagagcgtgcggcgcgaggct

SEQ ID NO: 440755 - DNA, 122 bp, Homo sapiens
ccacaacgacccaatacactgagtactggtttttcaagaataatccatgactaaactctacgtaaattgctaggtcacattatcatttttccccatttggtaagactgaaaaccatctgttg

SEQ ID NO: 440756 - DNA, 122 bp, Homo sapiens
acggaggtgaagctggtgcgggagacagacggggtgatggcagaggcggtgctgaagctacgactgcccccgctccggaaggacacacttgactggcgagacatggtggcttgttcctggtg

SEQ ID NO: 440757 - DNA, 122 bp, Homo sapiens
tggaaaagttcaacaagtgcatggaacatcggaaacctcctgaaaatgctaaatttgccccgagatgtcccgaagtccggcatatttctctgggcagcctagaggctcaggagcccagccca

SEQ ID NO: 440758 - DNA, 122 bp, Homo sapiens
accatttactatgtgtgtgggctgttgtcaggtcctgagtgactattaaaatgagaaagacgttcctagctctgtagctgaagtcaggaacaagtataaattaagtgacaattttttttaag

SEQ ID NO: 440759 - DNA, 122 bp, Homo sapiens
acaaaagctcgacggaaattggagtaacttttggaggcccttgtagctgccgtcaataagcgtcagccccataatggcggctgcgcctccgccaccaattcccccccaacgctttttttttt

SEQ ID NO: 440760 - DNA, 122 bp, Homo sapiens
gtttgaggaggaagggagcactaggtctgagatccctgagtggggcccttccccacggtccgaccactcattagaggaggggcccctgtggccgtaggggaagaggccgtgttcacagccgc

SEQ ID NO: 440761 - DNA, 122 bp, Homo sapiens
ccaaagggtccttattagctctgacagcccctctgaggacatctgcctcatggcactagccggtcgtcttgcttcccaagactcaccagccatatgtgtagtcaaaggaatctctggaaccc

SEQ ID NO: 440762 - DNA, 122 bp, Homo sapiens
tgtactatttagttgtacatttaacattcaaaaatcaagaaaattttgcctggggctgggcgtggtggctcatgcctgtaatcccagcactctgggaggccaaggtggtcagatcacttaaa

SEQ ID NO: 440763 - DNA, 122 bp, Homo sapiens
tgccctcgtccagctggctggaggctgagccgcccatgaccgcgagctgcctgtgctgagcgcggaaactgcccggtccgcgcccgctgctagctcctggaggttgatccgacggcgaaccc

SEQ ID NO: 440764 - DNA, 122 bp, Homo sapiens
agaagatcatctttccaagagctacttctctgatgagcctgcacatgcagcccaggggtccgtgagtgtgcgtgtgttaaccagaggggctgagggggaggcgctcactgggcctaaattcc

SEQ ID NO: 440765 - DNA, 122 bp, Homo sapiens
gtatgtctgctgccactcagtcaccttgataggctgctccatcaggttcatcacctccatcgtggctactgggggcacaaaggaggaagtcaggaagcaggaagtcacctggcccagccccc

SEQ ID NO: 440766 - DNA, 122 bp, Homo sapiens
aacagatcccttactgggtcccttccaagtggcgtcacatagcaagcgtccagaaggaggcgggacttccgggccaagcgagccaattccggccgcgccggaagtctctactgaggaaagct

SEQ ID NO: 440767 - DNA, 122 bp, Homo sapiens
ggtccgcgtgggccccatcagggaagtacagacaagcacacggagaggggtccgcgtgggcgccgtcagggaagtaccgacaagcacacagagagggggccgtgtgggcgccgtcagggaag

SEQ ID NO: 440768 - DNA, 122 bp, Homo sapiens
ctctggaggggaacccactgccggagcagtcctatcacaagctcatggccttggacagcacgtgagactccctgccctcaccccctttctctgggcctgtctcgaaattccaagccattttt

SEQ ID NO: 440769 - DNA, 122 bp, Homo sapiens
gatgtgaccccccattcccctccttaccccagctcagggtgaggggctcttgcagcccctcgtgctgcatatggcacgtgtatctctgctcttgtccagaaggcaccaccacagctgcccac

SEQ ID NO: 440770 - DNA, 122 bp, Homo sapiens
caacaaggacccccgggaacccacctaagatcgtcatctctctggccatcacagtcccgccgaacaggcttgtgatgactgtaccagacgtgaggcaccgcccccactcctcccggcagtcc

SEQ ID NO: 440771 - DNA, 122 bp, Homo sapiens
agcagtgtggcccccgtggggtctgctcccgggcatgtgctcacctgcagatcagcagtgcggcccccgtggggtctgctcccgggtgtgtgctcatctgcagatcagcagtgcggcccccg

SEQ ID NO: 440772 - DNA, 122 bp, Homo sapiens
aataagcagagaatgaactggaaaatgagggggattaaaagtgaaggcctccagtcgccacggcgacagcaaaaggctttgtgcccagctggaaaagacaggtgcaaaggccccggaccccg

SEQ ID NO: 440773 - DNA, 122 bp, Homo sapiens
aaccgcgtcagcagccccacgactctttcccagcagcagtggtggccgaggcagaggctgcggctgctctttgctgcagtggggcgcatgcagccgcgaatcggcacctgggcagcaagcga

SEQ ID NO: 440774 - DNA, 122 bp, Homo sapiens
ctagtgccgtctcgatcccctagacagcacagttagtgctccggcttcggcctcagctcccgtatggactgtgccccccaaagggctcgcgcctgcattcccacatacgcgaagaaagccct

SEQ ID NO: 440775 - DNA, 122 bp, Homo sapiens
cttcaaagagcccggcctccctctgatcagccccttctttctgatcagatgcattattgacgaggcagcctcctccacctgcctctcatcagagcagctcgtttcccaccgtggtaatttat

SEQ ID NO: 440776 - DNA, 122 bp, Homo sapiens
cagtctccgcctaacaggggtcaccccaagatgggggtaaccccctgatgtgggtcacagcgcacacacagtatcctgcagacactcccagaggggtcgcactgcatacacagtccctgcaa

SEQ ID NO: 440777 - DNA, 122 bp, Homo sapiens
ctggccgggtggaaaccacgctgcagccgccgggccaagggcaccgcggtggggaggcagcgcctgattcacagcaatttctgaggttggaacaggaaatggttaatagtgtttgcaaataa

SEQ ID NO: 440778 - DNA, 122 bp, Homo sapiens
agatggtgttccccagggaacagaagtctccagtcccatcttaagctctgccggatcccgcgtgacatcagctagccccctcgcggctgccgggagctgtgagctctgtgctggggccaggc

SEQ ID NO: 440779 - DNA, 122 bp, Homo sapiens
agggcggggctgtgcggccggcggaggcccccgaaagttccagaaagcgggtggggaggtcggcgcgggaggctcagatggctggaggcggcgggcacgcacactgcggggctccgaggggc

SEQ ID NO: 440780 - DNA, 122 bp, Homo sapiens
ttctttttttttttttttggttaggaccatttaaatcagagtttcatataaattgcacaccgtttttattttatgctcattgacattcttttgaatcctgttgctgaataaaagcctctcaa

SEQ ID NO: 440781 - DNA, 122 bp, Homo sapiens
aggataaactgagggaagaaaagctaacagagtaaatgcagttcacaatatgggattttccgatctgtgttccttcagatctgtgtataggtgaaagtttgaaaagtagggttcctatcctt

SEQ ID NO: 440782 - DNA, 122 bp, Homo sapiens
ttctattagtggtaacaaataatagccccacgcctgcaatatctcctttaatattcccaacgtccgctaagcgcgtctcatcaccatttaaagaaaccgtggctcctagaggtaaagtactt

SEQ ID NO: 440783 - DNA, 122 bp, Homo sapiens
caccctgggcagagcacgcacggccccagcgactcggacatggtgaggggcgcggaggctcggggtggacccgaggcctccacacatgtggcaggctgcagcaacccgccacccacgaggac

SEQ ID NO: 440784 - DNA, 122 bp, Homo sapiens
ggtcattattttcgccttttctctccactccctcctttcccggttcctgcctggaggagacgcctcattgatggagctagagaagaggaaggaaaaccgcttcgtggagcgccagagcatcg

SEQ ID NO: 440785 - DNA, 122 bp, Homo sapiens
aaagcatagtggatttagtctaacattttcccacctggaaaaactgggcttaagtatctccgacaaacaaaaagcaatactgcgttcttcccaatatgccatgtcacctttgtagcactcac

SEQ ID NO: 440786 - DNA, 122 bp, Homo sapiens
ccagcagcaccgccgacctgcgcgagtggccgcagccaccgcagctcctcctcctactcgcgccgggccgggactgggcccagagcagcgcctccaattgtatttaaaatgtagtttttaga

SEQ ID NO: 440787 - DNA, 122 bp, Homo sapiens
gccatcttctttacctctgcaggaacaaatcggatcaggtgaggctgattctcctgcatccgtgcctcagcccttagtggtcccagatcattgtggtggccacttttaggacagggccagag

SEQ ID NO: 440788 - DNA, 122 bp, Homo sapiens
tacttggctatatgtaagttagttacggataaaaaaggaaaaatcaatgtgcaaactggacgttcatttgctgcatgtgattagctgatctttccatgtattatgcccagcatgtagggcta

SEQ ID NO: 440789 - DNA, 122 bp, Homo sapiens
aattattactctgttttttcagtttgcttgagataaggctgtgaaaacaaaaaatgtagccgaggtgctaaggagagttatcttaacagggctagtcataatcatgcagcctgagagagagc

SEQ ID NO: 440790 - DNA, 122 bp, Homo sapiens
gctcctgggaacttgcaaatcatcattgtcttcccccaacccccatctaaagcaaaggatcggatcttgagcaattaatcaaaattggtttcctgcatccagaggggatcactccaaatgaa

SEQ ID NO: 440791 - DNA, 122 bp, Homo sapiens
ctgcggggggatcctggagtggccccaggcccggacacggatgtgtagcaaaacggggtgcggagtggagcccgcagagagggaaccaggccaccaccacgtggtcactgtagggtccccct

SEQ ID NO: 440792 - DNA, 122 bp, Homo sapiens
gctcagatgccatcatgcaatcatggcaggcacacgggggcccctcttcaaacgtctgtgcgcttcccttgtgccccgccctggcacacagccgcccccgcggagcccagggatcccagccc

SEQ ID NO: 440793 - DNA, 122 bp, Homo sapiens
tgaagagaggcggccgcgtccggacgctctgatgcggttgcgtacgttttcagcgcttcccgctctccaccggttggactgaggcttttaaactgcagtctgctcccgagtccggcttccta

SEQ ID NO: 440794 - DNA, 122 bp, Homo sapiens
ttcaacaaaggcgatgacagtaatactctttgaatagcaaagcccctgatgtcagcctgacggaaaatggggaaagcatttaatgggccaaaatgatagtctaaggagtaattgaaattatt

SEQ ID NO: 440795 - DNA, 122 bp, Homo sapiens
gggcactgtcagtcagaggtctgggggcggggtttgtggggcctccatctgactgcccagcgcccctcacttgcccctcgacccccacatcatctcactgctgggctgcgcccgcaccccca

SEQ ID NO: 440796 - DNA, 122 bp, Homo sapiens
gcatcagcatttcagccgcagcagcctgcttgtggacagagcaggggttggcagtggtgacgactgttttgggaaaggaaatgtaagggcatttcggctgctgtgctggggctgacgaggag

SEQ ID NO: 440797 - DNA, 122 bp, Homo sapiens
agagtggggtagcaaagtctccaactgtattgaagaactatatcattctcccttcaattccgtccatttttgctttacatattttgatggtgtgtaagtgggtgcataaatatttataatta

SEQ ID NO: 440798 - DNA, 122 bp, Homo sapiens
cccacagcgcagcggccggctgaagggctcctggagcgcggccagagaggacactgaggccgaggaggcgcccagagcgagcaagggctgctagcacgttgtcacctctcagcaccattgca

SEQ ID NO: 440799 - DNA, 122 bp, Homo sapiens
aggctgggagctccagcgagcttgggagctgccaggcggctgctgcgagcaggcagagggcgcctggagcttgggccctcaggcggcggagcatggcctgggcggcctctggatcgcgagtg

SEQ ID NO: 440800 - DNA, 122 bp, Homo sapiens
tgtgaagctggcagggtgggcagtgtaaatgcccactagcaggagccagctgacctcctgcgtgtcacaatagcagccaggtgtctccacggtgacgtctctgagccaggaggtcagaactg

SEQ ID NO: 440801 - DNA, 122 bp, Homo sapiens
caggagctcgctctccgcccgggctccggctccgctccagccgtccggggggcgccgcggcgcgcagagcgcagcaccccgactccagccaggagcccccgcccccccggagcgcaggagga

SEQ ID NO: 440802 - DNA, 122 bp, Homo sapiens
gagacttggggctgacgctggtgctcagcgtggtgctgctgcggatggcacaggccagcacggctcagcttcatgtgtgcctctgccgtgtccctgtccttcacgtttagaacacactctgg

SEQ ID NO: 440803 - DNA, 122 bp, Homo sapiens
aggggggccaggaatgtgtccccgcaggttgccagactctttgtcaatctgctgtcctgccgccttccattgtggcctcccattgccctggggaacagggaaggaactttcccttgcagatc

SEQ ID NO: 440804 - DNA, 122 bp, Homo sapiens
atctgcaaggctgtgcaaaagtccgctagaagtaaggtcagaaagtgccctctggcaaaacgggaaaggcaaaagaaaaactatcatgtgcccctcggttcagaatctggctgtagctacca

SEQ ID NO: 440805 - DNA, 122 bp, Homo sapiens
gtgagcatttcctcgtgttttccaatagccttcaaagtcagtgccttcgctgctcattgtcgcacacctaagcagcaagtcattattgtactttgtggttggatatcgtgtgtgtgcacgcg

SEQ ID NO: 440806 - DNA, 122 bp, Homo sapiens
gtggagctgctacacaacacctcctacaccaggcaggtgaggctgggctggcagggggtgcgggggcaggtgaggctgggctggccagggggtgtgggcgggtggaacgggggaggggtctg

SEQ ID NO: 440807 - DNA, 122 bp, Homo sapiens
caaagataaagctcctaagggggcgtggtcccctaaggacgcgaacttcagacttctgggcggggaggctttctggacagtcagacgtggattacggagggggcgtggcttcggaggggcgg

SEQ ID NO: 440808 - DNA, 122 bp, Homo sapiens
atgttcggctggcagggttgccggcttatgtgctgagtcttttacctcgtttggagatagcgagagcaacgaagagaaaacattaattacccggtattagtattaatacggcggctccattc

SEQ ID NO: 440809 - DNA, 122 bp, Homo sapiens
ggggtcaagcgattttcctgtctcagcctcctgagtagctgggactacagctgggttacacgcctgtaacccagttctgtgggagatcgcttgagcccaggagttcaagaccagcctgagca

SEQ ID NO: 440810 - DNA, 122 bp, Homo sapiens
ttgcctgagtattacatgaactttcttccatttctccctcaagcatgggaagttggcgggcgtggtggttccctcctgtaatcccagcactttgggaggctgaggcaggcgaatcacttgag

SEQ ID NO: 440811 - DNA, 122 bp, Homo sapiens
gggcactgctccgtcttgtagctgcccagcacgaagttggcatctgaaaaatgggccacacggtgcctgagcagcgcgactggaagcaatgctgggcagaggagaccaaaggtggaaggacc

SEQ ID NO: 440812 - DNA, 122 bp, Homo sapiens
gcgacccctgcacaaagccgccgccgtggctgcctccttccttacataatcctgttagagcgcatttaatctaaggatgggacactgtgttccatgccaagcagcctcatcgtggctgattg

SEQ ID NO: 440813 - DNA, 122 bp, Homo sapiens
gtacggcaggatttcccaccaggggaatccactttggtgcgcagctcccagcccagttagcgctctgggcctgcgggccaggccgcctttggttttccggatcctgccgggctccacactgc

SEQ ID NO: 440814 - DNA, 122 bp, Homo sapiens
ccggcgagccattgctggggcggcgggctggagggttatctgggaagtcagccccggcctcggtcctctccacgttgctgcctacgcgtgctgcccggacgtagggcactcctagcggctcg

SEQ ID NO: 440815 - DNA, 122 bp, Homo sapiens
cagaggagaggttccagtacatgatgccttaaatatcatagatatccaagcctttttagccgacaatcccccatccatccatttcaccagtcaacacatatgaagccctactgtgtgctctg

SEQ ID NO: 440816 - DNA, 122 bp, Homo sapiens
gaaatgttctatattattgaataattttagtttttattttcccgaagtttaatggaatgccgatactgaaaagtgaaatagagcagctttgaaagtttgtccatttacatttcttttgaact

SEQ ID NO: 440817 - DNA, 122 bp, Homo sapiens
ccgcccggaaggaagctagatccaagcgaacgcctggctctgtcaggcgagcctggaagccggcgaaccccggactttgacagctgcctgggagcgtcgggagctctggggtggggggccgg

SEQ ID NO: 440818 - DNA, 122 bp, Homo sapiens
cctttggtggcgaccggccaggatccacctcagtgacgaagaaccaaagttcagaggatccgccgggcagggcagggccgggtggcggttggctaagggaggagagggcctcaacgctgggc

SEQ ID NO: 440819 - DNA, 122 bp, Homo sapiens
cacctccgaccactccatcaggagggcggaacctgctctgcccggcagccccatgtgggccggtgagccccgcctcgctccgtctaagctgcagcaagcaacactggctcctgcctgacgct

SEQ ID NO: 440820 - DNA, 122 bp, Homo sapiens
cgcattttcctgggcgggaacagcaaaatggcgccagaactagtggcgggctgaggacgccgtacccctcggaaggcagccctgcggtccctttgccgcccgttccctcccggacatggagg

SEQ ID NO: 440821 - DNA, 122 bp, Homo sapiens
cggcggcggcggcgcgacgatgaggatgatgaatacattgcaaagtttttttggccccggcgaggggtgtcagattgagtgctctgtgcgcatgtgcgaaggtgtccaaactgacaatgctg

SEQ ID NO: 440822 - DNA, 122 bp, Homo sapiens
tgagggctcagcttgtggctggaggtgggaggtgagggggacccatgcacttggcaggcccgcttccaggacagccctttgctgggattgatgagctgttggtggaaaattgttgaggacct

SEQ ID NO: 440823 - DNA, 122 bp, Homo sapiens
cgttcgcagggctcttccccaaacaaaataaaatgaaacggaggttttcctgagcttcagcgtcaatccgatcggacccccgggaggtgcagcgagctcggggacacggtgttcgggtggta

SEQ ID NO: 440824 - DNA, 122 bp, Homo sapiens
ggtgggggtgttgggggaggcggggcgtgcgcgcgttctgattggccgaccggggagtgacgtcacgtgtcggccgccgagcatccgggctcccggcagcggcgctgcggcggctcgcggga

SEQ ID NO: 440825 - DNA, 122 bp, Homo sapiens
gatgtggggtcttttgagcatcgatatcctcgtgggcaagtctaagtgtcagacaataagcggaggagcggcgctcggagcgcgttggccccgctgtcagtcttgcccagattaacaacttc

SEQ ID NO: 440826 - DNA, 122 bp, Homo sapiens
gaatgagccagagggacacgctggtgcatctgtttgccggagggtaaggtcctggcggggcgtgcgcactggggctgagggtgctggggccgaagacgcaggcgaggggggcgaggggggcc

SEQ ID NO: 440827 - DNA, 122 bp, Homo sapiens
atgacactttttattggattcagtcttgtctcttgtctagaaagaactttatcttgttgacgcatgagctgtttaaaaattatcctattaaatgttggttaatagttgtgcagtttttcatt

SEQ ID NO: 440828 - DNA, 122 bp, Homo sapiens
ccttgttctcctgccccacagcacaggaaattccaaggtggttttctttacaggctcctccgcttctgtggccagaggggacagcggaggagcccaggtacctaagccaactcaagagaaga

SEQ ID NO: 440829 - DNA, 122 bp, Homo sapiens
tgaaggggaaaccggccacgtttccggacctcggcggggcacacggtctccggttttcaccggctctgtcttggagccccgaagggcatcagacagcagccccggcacccggggattattcc

SEQ ID NO: 440830 - DNA, 122 bp, Homo sapiens
gattcttgagggtcagtggaccaaaacggacctccagggtcagggtcattattgagggtccgtggaccaaggtcaagaggccttgggagttgttctgcagggtgtggcatggttcctgccca

SEQ ID NO: 440831 - DNA, 122 bp, Homo sapiens
tctcttttactcctgtaatcataagctctgtgaggaagccactatgttttgtctatgccccgaacaactgcccggcacagagtatgctctccgtgacttagttttagaatgaatgaacttac

SEQ ID NO: 440832 - DNA, 122 bp, Homo sapiens
tcacctttcccagcgttgtcaccagggtcacccagatatcatggttttattcatcaggttcgtgagatactatgtcaggcatttcacaaggtcttgtctttgcccccagtgtttataatccc

SEQ ID NO: 440833 - DNA, 122 bp, Homo sapiens
tgagaagtgaggagcccctccgcccagcagccaccccgtctgagaagtgaggagcccctccgcctggcagccaccccgtctgggaagtgagaagggtctccgcccagcagccaccccgtccg

SEQ ID NO: 440834 - DNA, 122 bp, Homo sapiens
atttgggatgtaattggaggattggaccggtctccccgctccctcgaccaatggctgtcacgcggtccctttaagaaaccaggaatccgcccggagtcggagcccaaaacagatcctcttct

SEQ ID NO: 440835 - DNA, 122 bp, Homo sapiens
aaatcagatgtgccctggaggccaggcctcaggacgctcctcccccaggtgcacgctcagcggacaaggtggacaacccgaaccacgcttgctcagaaatcccgtaacccagctggcatttt

SEQ ID NO: 440836 - DNA, 122 bp, Homo sapiens
tgagacgggaaaaggtggagccagtgggcacggtgggcggtgcggagggcggggctgaggcgcctgagcggggcacaaccctcctagaggcgggacggtttcctgccaatcactgctggttt

SEQ ID NO: 440837 - DNA, 122 bp, Homo sapiens
tatgagtttctaccaccctgctggcctcttcgatgcagtttagcccctgacaatgactaacggactcatttgactctcatcatctctagtaatttaaaaattccctagggtcagggagcagg

SEQ ID NO: 440838 - DNA, 122 bp, Homo sapiens
cacgcccaggggtcttttccacagaagaactgatgccatcagtcatagccacagaggtaacggctggaagtttgctgtggagtcaacactgcagaaaggccacattcaggtggaggcaggga

SEQ ID NO: 440839 - DNA, 122 bp, Homo sapiens
gtgaaccgtgatgagaagtctcagagcgcactgcgtaattaccacgtgtagaaagcaaaacgttgacaagacacggccgttagcaaaaagccgaacggttactacgctcaacgagaaaagga

SEQ ID NO: 440840 - DNA, 122 bp, Homo sapiens
tttggcggagccgggccagagacggatgtctgacgggtagcctgtggggggcccgcctggcgctggggagacggagaggcgggcgggcgggctgctggaggcgccccggggcctcccgccac

SEQ ID NO: 440841 - DNA, 122 bp, Homo sapiens
tgactctcccagcctgaagcctgctcgccctcgggtgtccgggctgggcacaggcgccagcgtccccctggagaggagaggtcgcccggcacctcccaggacaggcccaagtgggagtggga

SEQ ID NO: 440842 - DNA, 122 bp, Homo sapiens
tgctttttttctctcctgttactcctttgccctgcagggaagctggatctcttgaagttgcggaaacatagtcattcccttttttcgtttcatttgcttagtcagtacccttccttagaaaa

SEQ ID NO: 440843 - DNA, 122 bp, Homo sapiens
gcccctcccacctccagcgggcagttgccttgtgctggtggcttaggaaccggagcccgtcgctccaaccgttgcagctccacgctccagcccaaccgcggctctgaaggattgacccgccc

SEQ ID NO: 440844 - DNA, 122 bp, Homo sapiens
caacaggcactgcataaaggttggttaacgggatcgtgtttggctgcaacgtggagctcccgggtcgaacggcgagacagctgcgcgtccccgagccgccgcgcgcccggtccgccggggcg

SEQ ID NO: 440845 - DNA, 122 bp, Homo sapiens
ggcagagaggcaggcggtgaaggccaagcctcgccccccaggaaggccctgattggtggacgggctgctttgggcagggccgccctcaggctatataagcgcactcgcggcggcgttggtgt

SEQ ID NO: 440846 - DNA, 122 bp, Homo sapiens
gcaagaggcaaaggggcttccccgccatccggagcacagcctgcgctgggccaggactcccggggttcccagagctcccgcctgctgcccccagcccagcttccaacccttctcctgtcctc

SEQ ID NO: 440847 - DNA, 122 bp, Homo sapiens
aaaatacaggagaacctcaagagatcactttttactgcgaaatgcaatttactggtgagacgaacggctcacgtggagatgatgagcatcgcgcggtgttttaagcggatacccacaacact

SEQ ID NO: 440848 - DNA, 122 bp, Homo sapiens
tttgggactatgtcatatatggagtccatagtaggctgaagtgtcattatgcagtgtgtacgtgtgtgtatatgtgtttgaaaataatgtttacatgtatggtatgctcttaaataaggacc

SEQ ID NO: 440849 - DNA, 122 bp, Homo sapiens
cctggaggaggatcgagcaaatttacaaagcgccgagagcaagtgaactgtggtccatctcgaggtggcagataactagtttttccttttctgggcagcctttctcttcttctgtcgcttct

SEQ ID NO: 440850 - DNA, 122 bp, Homo sapiens
ctgcgcctggatccaccgccacccgcttgtataaaaagtgggccccacacggtgcagcttcgtagtctgcaaagaaaatgtccaaagaatgagttgtggatcctcccagccagagcccagat

SEQ ID NO: 440851 - DNA, 122 bp, Homo sapiens
gcccctggttcccccactggctcttaggacccccatcgcagaggggggacgcaccccccgcgaggcggggactgagagccagaccctcatcccccaccggcttaggacccacatcgttgatc

SEQ ID NO: 440852 - DNA, 122 bp, Homo sapiens
tcaacgtcccggtgttctggccgattctggtgatgtacttcatcatgctcttctgtatcacgatgaagaggcaaatcaaggtaaagcagaggcgctgccgccacgccggccgcaatcgctgt

SEQ ID NO: 440853 - DNA, 122 bp, Homo sapiens
gcgggcaggaaccggggctgcgtgcggcgcttgcgggccagcagaagttctgggtgggcgcgggctgggtgggccccacacttggagccggccggcgccaccggccccgggcagtgaggggc

SEQ ID NO: 440854 - DNA, 122 bp, Homo sapiens
tttaaaaaatggaaggggtaaaacagcaggagactatcagaaactccttccaatggagcacgtaacctgcttcatcttcagtcttgatgagtgtcactatgcagacttcattattagtgagc

SEQ ID NO: 440855 - DNA, 122 bp, Homo sapiens
gtctccttctggatcagccaggcggcggtgcccgccagggtgtctctaggtacggggcctcgccgctgctccgagggagctggaagggcggccctggggaacaggactccccatccctcggc

SEQ ID NO: 440856 - DNA, 122 bp, Homo sapiens
gtccccgtcacccaacaacccactcaggcacttccggtaagaaatctagtgcccttggctcggaacctgcgtcgtagtgcgcaagcgccccgggcctggagacggccgcggatgccgaggga

SEQ ID NO: 440857 - DNA, 122 bp, Homo sapiens
gcgtcacggccccgggtcagtcttcgctccccaccgcctccggacgcatctccaaggcctcgccccgcccccaggagtcgctcttgcgtcaccgccccgccctcaggacgcacctctgcgcc

SEQ ID NO: 440858 - DNA, 122 bp, Homo sapiens
gcagaggaccagctcttgctccacaacagcttgcctccccttcctctttctacccttccacgtgaccctcacggttctctccaccagaaaagaggctaccattgttagttgccagtctggca

SEQ ID NO: 440859 - DNA, 122 bp, Homo sapiens
ttcggctaactacaacagcatgcccttgaaggacctgcgtctatgctgttatcctaaaaccggatgcagagggactgtctaaaccctgatgactgctgaccaagttagtggccggcagattt

SEQ ID NO: 440860 - DNA, 122 bp, Homo sapiens
atatcctgtaaaaaagtcccactgaaaacctgctgtggcagcaggagagaaggggagaggcgtctgtgagagaggaaagaacaagtcttgaccctcagcctgccctccaggctttgggcctg

SEQ ID NO: 440861 - DNA, 122 bp, Homo sapiens
agtaagatggtattgacgagacgacaataaaatacctctactacagagcacagcaatgttcggcctggtggctcacagaagctgaggctcttgaacgtctgggcacagcatgaaagcatcaa

SEQ ID NO: 440862 - DNA, 122 bp, Homo sapiens
tgattaagaactgcttgagaagttttaaactgcatgcagcctactcagcacagattggcccgtgtcttctgccacggatctcggctaaaggaaaagccaacagaagcccaccggagcctccc

SEQ ID NO: 440863 - DNA, 122 bp, Homo sapiens
caaaagaatgcaaccgtttttctctcacctatctatgacctggaagccccctccccacttcgagttgtcctgcctttccaggcggaaccagtgtacatcttacatatattgattgatgtctc

SEQ ID NO: 440864 - DNA, 122 bp, Homo sapiens
agcgcgctgccccctctgttctccgcgtgctttcactagggccccatgctgcttagtggccgatttgcagggaatctgggcacaatcttaataacaccagggccaaaaataacaacgttcct

SEQ ID NO: 440865 - DNA, 122 bp, Homo sapiens
gctctggccaagtttgcgcgcggtctccgctgactctcgggttacctgagccggcaaccacgtcagcgccacatcatctgggctttttatattgcaaggaaacaggaaaagaaggaagaaaa

SEQ ID NO: 440866 - DNA, 122 bp, Homo sapiens
atctcaagtcacaaggaatcaaaagagatttttgtgcacattaataaagggggccggccccgccaacatcttctgtcgctgactcggagagctcagaagcaccggctgagggagctcaagct

SEQ ID NO: 440867 - DNA, 122 bp, Homo sapiens
ccctcccgccgccagtcccggcagcgccctcagttgtcctccgactcgccctcggccttccgcgccagccgcagccacagccgcaacgccacccgcagccacagccacagccacagccccag

SEQ ID NO: 440868 - DNA, 122 bp, Homo sapiens
cggcgcgggcggcgggtcccagcgccctcgcctccctgaccgcttccggccgctcccgggcgggagccctgggacccgctcctggggactcaggggaccctgccattttggggtttgagcgg

SEQ ID NO: 440869 - DNA, 122 bp, Homo sapiens
cgggcatgcagtgtgaggggctggtccagagcctctgacccacactgggaagtcatggaccgttcaggggtcgggggcgacacaatgtccgaggtctgcgacgtccctcccttgctccctct

SEQ ID NO: 440870 - DNA, 122 bp, Homo sapiens
caattagggcttgtggcttttcggtatagggcggtgtattgtttttccagttgagaaggtcgacggaggtgaagggctgctacccaaaaacacgcctctccaccacgtgaccatcctcctct

SEQ ID NO: 440871 - DNA, 122 bp, Homo sapiens
acctggcttggggagacagccacagtgaaatgccactgactcaatacacctaaattcccacggagcttcacaggacctcaatataattggtgtctattgggctaatttctgctttgaagccc

SEQ ID NO: 440872 - DNA, 122 bp, Homo sapiens
ctgatgtgaggagcctggagcctgtccgtggccgagagggcctccttcctccttcctggccgacacgtcacctgctccgtccagtccacgagaagcagctgtggcccaagcccatgacctgc

SEQ ID NO: 440873 - DNA, 122 bp, Homo sapiens
ttccaggttcagtggaccaggaggcagcctcttgcagaagatccttcatagactttgctccgggagtgcctcacacttaactcctctgcaacgttggaatctcaccacgggagagtctcctc

SEQ ID NO: 440874 - DNA, 122 bp, Homo sapiens
ccaagaatctctgcgcagagatccttagaataaatgttatttctaggcgcggacttcttgcggccgcgtgtgggcacgacaggcttctttgggaaagacaactaaagtttgaaatacaatcc

SEQ ID NO: 440875 - DNA, 122 bp, Homo sapiens
atccacacaaggccaggcacatagtaagctttctataaatagcagttactactactaaagcgatctggagccctaatgctgataccccatggcctatgcaaattcctgagcccctaaatagg

SEQ ID NO: 440876 - DNA, 122 bp, Homo sapiens
ctgggtccgggggagaggagtggccagggaggaggggcgacccaaaggcctccggtgatgcgctgacagaaggtaaaaacaaggaacaaagcaaaaccacacacaggacggcagcgcggagt

SEQ ID NO: 440877 - DNA, 122 bp, Homo sapiens
tctctacaatttaattttaactctattcaaaacttacctcctctagcaactcttttcatgcgtcattcaacaaatggtgattgccattttaacctctgtttctaagtaactttcatgtgtaa

SEQ ID NO: 440878 - DNA, 122 bp, Homo sapiens
gttgcagtcctgcctgctccgaagaccctcccgccccagcgcctttgccccgctctcccgcgctcgcctctctccggagcgcgcacccacccaggcggcaaagttgtgactacttgggcgcg

SEQ ID NO: 440879 - DNA, 122 bp, Homo sapiens
cctatagaaagaagttggaggtgaaaccagatgctatgagaatactttattaggcaaaaccgcatactataaaagtgcttcaaaatgcagcaggaggagatgggaagacaaaaatgaacaag

SEQ ID NO: 440880 - DNA, 122 bp, Homo sapiens
ggcacctggagtcatgccaagcaggaagcaatcactccacagagctgaagatgtcagaaccgttcagaaatactgcctggggaaagttcttggttcttcggcttaggaggaaaggggcagaa

SEQ ID NO: 440881 - DNA, 122 bp, Homo sapiens
agcccggggatgccgcccgggggagcctgaggacccgctccagctaggcacgccaggccccgccctttgaggacacgccccacaccagcctcagagctctgaggtgcctgggctgagcttcc

SEQ ID NO: 440882 - DNA, 122 bp, Homo sapiens
cagcgctgtggccccgtcgtcgtagaccgccagcacgcacaagtcgtaggcacggcccgccgccaggtcattcaccaggaaggtctgactggtggacgggatcatcctgtaggagggggcgg

SEQ ID NO: 440883 - DNA, 122 bp, Homo sapiens
atgatcacatgcacacaaaatatattcaacagtcatggggaaaaatagatgggagttcatcgagtgattaaataacttgccattcagaagcaggggtaacatgaaggctttgtgttgaattt

SEQ ID NO: 440884 - DNA, 122 bp, Homo sapiens
cagcccctcccgcaccctgcccgagcgtcccgcccagcgccaggtcttgcgcccctctcccggctcggctcccctgccgcagccctggcctcgcccagcgtttctccccagggctccctgcc

SEQ ID NO: 440885 - DNA, 122 bp, Homo sapiens
ggaaaaccgaaatgcccgtgaatgagccaggtagagcgccggtgagggtgaacgggtgggcgctggcatagcggagccgcggtactgggcctggggcactggcccgggacgtgggcgtgtct

SEQ ID NO: 440886 - DNA, 122 bp, Homo sapiens
ccccccggagccccccgagactggagtgtcccatctctgcccggagcctccagagactcgcgtatctcatctccgcccagagcctcctgagactggagtgtcccgtctccacccagagcctc

SEQ ID NO: 440887 - DNA, 122 bp, Homo sapiens
gcctcatagccctttgctgatggctgagggcttggccagccaccggcccgcctgggacgccgcgccctccgccatagccaagggtagggaggggaccggagtgggatcctggtctggtgcgc

SEQ ID NO: 440888 - DNA, 122 bp, Homo sapiens
cctctatctgttgacaatccagtggtgatctaagataaaaccttgagactcccatacacacggtcaacccacaacacacctcacaggccaggcagggacacacagtccccttccctccctcc

SEQ ID NO: 440889 - DNA, 122 bp, Homo sapiens
gctgaggcctggaacaacccggtgggaagccatggagggggtcccctagcggaggctgggcgcgggccagtgcgcgtgcgcggctggaggctcagcgcgcaagcgtgcgcgtgatttggccc

SEQ ID NO: 440890 - DNA, 122 bp, Homo sapiens
ttccagagtgggaggcaggaggagtgagccttggaacaatagtggagtgtttgtggtggacggacgggagagaggaacacttgagggcatgaacttacttctgtctctttacttgaaaaagc

SEQ ID NO: 440891 - DNA, 122 bp, Homo sapiens
gttgagtaagagagtcatggtaactttgactttcctgtgggtattttagaggaatagggacgtaggccctacagcttaaaatagtgcccaaagtttcaattccttagaaagggatttcccat

SEQ ID NO: 440892 - DNA, 122 bp, Homo sapiens
cacaggaagtcagacagggcttgtgttctctggcaggcagaagagagagcctgttaggcccgcagcatctagggactttcagcctgattgttttttaaagagccctcttccatgcattgttg

SEQ ID NO: 440893 - DNA, 122 bp, Homo sapiens
cacttctaatggagttgggtgcgggatgggctcagaagagagggagagtggtccgggcggcgggggactctgcaaagaggagtggtttggaaactcctgcctggaagccgaggagacaaaag

SEQ ID NO: 440894 - DNA, 122 bp, Homo sapiens
agaaaggggacggagggcttcgggctatacttgggccacacagccgggaagctgaggccgcggggcaggtctgcgtggcggcgtcgagtccgagcggggaagcccctttgcgggaactctgg

SEQ ID NO: 440895 - DNA, 122 bp, Homo sapiens
gaggacgtgagcgttgctcctggtgctgaacagagcgcgaaggttcgccgtcgttgggtccgccctccccactttcggtcgccgccttcacccacctccctccttctagggcgctgtcccag

SEQ ID NO: 440896 - DNA, 122 bp, Homo sapiens
cggcgcccccaccatggtggggttcagagggtctgtccacaggtccctgttcgccttccccggggccctggcctctcgccgccccactgttccccctgtggtttgccccagcactgcagcag

SEQ ID NO: 440897 - DNA, 122 bp, Homo sapiens
ggaggcagccaacggcaaactggaggtgaagatccgcgactggtaccagaagcaggggcccgggccctcccgtgactacagccactctacaagactatccaggacctgcggtacaagattct

SEQ ID NO: 440898 - DNA, 122 bp, Homo sapiens
tatatagactttggaagtactgatttagcatgttgttcataatcattgatacaaattagccgggggagcattttcacaggttattgctatcccagatggagttcgttgttttttttttttta

SEQ ID NO: 440899 - DNA, 122 bp, Homo sapiens
gcacaaccctgggagtagatgccagcactcctaacacaaaggggtcaggacaggatgccccgcagtcaggatggaaagccacagagcggggcagaacgggtcctcagtgccaaggcacagct

SEQ ID NO: 440900 - DNA, 122 bp, Homo sapiens
tgacagctcccagcggcgcgcccctttcgtgtgtgccggtacctcggcttaggagttgcccgctgacaccttgaatgaaggaggtccccttgccagccagcctgccgggatgggccattgct

SEQ ID NO: 440901 - DNA, 122 bp, Homo sapiens
gagaaacctgggagaaaaaacatgattctgctcagccagcccacaagtgtaggacttgaccgcaccctcagcctgggatgcaacgggcactgatgcctctgagccccaggctcaaaaccagg

SEQ ID NO: 440902 - DNA, 122 bp, Homo sapiens
cggagagaagcagaggtatatgaaccaataattcatttttccttaagctttaatttaaaacgaaggtggggactttgttctgaccttattttccagcccattcgagtcaatcccttcaccct

SEQ ID NO: 440903 - DNA, 122 bp, Homo sapiens
ggcttgtgacatgaataggattatttttctttttctttggtttcttcaggcctagttccccgagagcgttcagacagtgggggctcaagctcagagccatttgaccgtcatgcacctgctat

SEQ ID NO: 440904 - DNA, 122 bp, Homo sapiens
agcagaccatgcaggatgagctgcttctggggctgacacagcagccggcgcggccgctttcgggggcggcggccacggagaaactccccgaccaccaccccggcggcggcacgatcgcgggt

SEQ ID NO: 440905 - DNA, 122 bp, Homo sapiens
cttaatgaaagcgttctatcaaaacacaacattacagcaagcagcaagcaactttacacgcgtgtgtaaaatgaaaatcaaattaaacgtaagatctggggagtgtttctcatgaaagccct

SEQ ID NO: 440906 - DNA, 122 bp, Homo sapiens
tgcaactgttctctgcaaaacgcctcctgacgcccgggcccagccgctccgccatctccacggccaccttctccagtaacgagctggtcagaagccgtccccgcaggaaaggactgcaggga

SEQ ID NO: 440907 - DNA, 122 bp, Homo sapiens
gtccccgggagggagccatgtttcttactccccggcactcccagatggcggccggggacgcgggccctaagcagaccaaagccccagggacctggagagccagaggacgcaggcagcaagga

SEQ ID NO: 440908 - DNA, 122 bp, Homo sapiens
gtggcgaccgggctcgacgcgcgcacgcgctctggagccccacggctacgtgtcgggccacgtgatgcccaccccgaaagtcccccgtgaagcaacaggacgttaaaaaaaaatttctcttc

SEQ ID NO: 440909 - DNA, 122 bp, Homo sapiens
ggacccacaagggactgggctccccagggcctcaggaaaagtaaatccctctggactctgcgctccctccagtggaggaccctaaaaagccgccagggagctcgatgccagccaactcctag

SEQ ID NO: 440910 - DNA, 122 bp, Homo sapiens
tatgcccatctcaccaagagaaaacagctcacactgttagcaagtgatagagtgggggctcgaacctaggcagttaactcctggcattctaagagcaaggagaagggatgagggagtgtaag

SEQ ID NO: 440911 - DNA, 122 bp, Homo sapiens
ctaagggtttcttatttctccacattagcccaccactgagaagggagaaccggggaaaggcgactgacctggcacgttggaccctgtccgctttggtcccggccactttgatctcacgcgtc

SEQ ID NO: 440912 - DNA, 122 bp, Homo sapiens
tgtatcctcctatctcagtcttgactctctttgctgactttcctaccctgggccccaccccgagaccgcccatttcagtgggcctctgtgtttggagaacgaacttcgaaagactggaacac

SEQ ID NO: 440913 - DNA, 122 bp, Homo sapiens
agtgggttaaagttaacacgagacagtgatgcaatcacagaatccaaattgagtgcaggtcgctttaagaaaggagtagctgtaatctgaagcctgctggacgctggattagaaggcagcaa

SEQ ID NO: 440914 - DNA, 122 bp, Homo sapiens
ttgcaacttacccctgccaacccaccacccccggaggtgtccaatcccaaaaagccaggacgagttaccaaccagctgcaatacctacacaaggtagtgatgaaggctctgtggaaacatca

SEQ ID NO: 440915 - DNA, 122 bp, Homo sapiens
aggcggcggcggaggagggacaggtgatctcgcccacggggagggcgtggccgtgggcggcgcggggtgccaggaagaaggggtgtcggggcggggaggaggaccttggggggagcgccggg

SEQ ID NO: 440916 - DNA, 122 bp, Homo sapiens
tccgccgaagggaagtccgagcagtcggggagctcaggggggccctcccggggagagggtcgcgggctccttctgccgcttacctgtcgcgccgaggcaaagccgcagccgcgccgcggggt

SEQ ID NO: 440917 - DNA, 122 bp, Homo sapiens
ccaactccaccctctacatcaggttagtgatggagtaaagtgacatgccaccttcctgtccgccaacaggaggagcgggctgtgcctcttcctgccttggcccaacaatttcaggggttaga

SEQ ID NO: 440918 - DNA, 122 bp, Homo sapiens
gtatctctgagacaccccgattggctggagaattgacttgggagagataaggagggagggcgggtgccagcatgctatgggctcctgcgtgaggcctgtggtacacagagattaggttgtga

SEQ ID NO: 440919 - DNA, 122 bp, Homo sapiens
acgtgtaggcagggaggcaaggtgagtaacacctctttactcagcaacgtgctcctccctcgggggaccttccccagtgcccctccatgctcgaagggcctggaaggatcagaatgcaggcc

SEQ ID NO: 440920 - DNA, 122 bp, Homo sapiens
gagccagaacgtccctccacagccgcgccgcccctggctcgacttcccgagcgagagccgcgggacgttgcagacgcactggctccgccttcccaccaatctcgaccctcgccgcgttccgt

SEQ ID NO: 440921 - DNA, 122 bp, Homo sapiens
ggagggcctggctggctatgtatacaaggcggccagcgagggcaaggtgctgactctggccgccttgcttctcaaccggtctgaaagcgacatccgctatctgcttggctatgtcagccagc

SEQ ID NO: 440922 - DNA, 122 bp, Homo sapiens
gccatcttgtggaatgttccggaatgccgttaggtgtcgaagtgggcagcggttgacaaccgtgggcctttgacagttactagtactaaacatcgatgccgattgtgagtttccaatcagag

SEQ ID NO: 440923 - DNA, 122 bp, Homo sapiens
aaacagaaactgggtggagactgtctcaaaatatgtaggacatttgtgacaagctggggacggaccaagaaggtggtgctgaggcagcactaatatgaattagcgttacaacaatgtcccag

SEQ ID NO: 440924 - DNA, 122 bp, Homo sapiens
taatgaggttgaagagcaggtgcaggtcgatggggtgcagaaattggtcctttcggcgcacgagtgccacgagctggttgcgggccagcaggatggagaagaccaggctgcgcgcacgcgcc

SEQ ID NO: 440925 - DNA, 122 bp, Homo sapiens
atcaagtgatcctcctgcctcggcctcccaaagtgctgaaattgcaggtgtgagccaccacgcccagccaccacaggcttcttcctgcacaactgcaggaatccctgaggtcctctttatag

SEQ ID NO: 440926 - DNA, 122 bp, Homo sapiens
tctttacctgccatccttccctgtgtacgccagctcctcggcagatcaatagacctcaatcgtctgatcacccagcgcgtctcagcagccatgtataagtccctagaactggcgattggacg

SEQ ID NO: 440927 - DNA, 122 bp, Homo sapiens
acctgggctgcagggatcctgggtgtgaggacgtggcacgtgcaggaagacaggtgccctcgcatggaagccccggtccacacccatgggccatgcaacccggggcaggccacataattctc

SEQ ID NO: 440928 - DNA, 122 bp, Homo sapiens
tttcaggcctcagtaacatcatcggtatcatcgtctacatttccagcaacacaggtgacccgagtgacaagcgggacgaagacaaaaagaaccattacaactacggctggtctttttacttt

SEQ ID NO: 440929 - DNA, 122 bp, Homo sapiens
cctggcgcatcactgccgagccattagctgcgggtttcctttcatcttcgctgtggcagacgtttctatttatccacttgcgctcgccgagtggcgtcaccagcggtactgtaatgacgatt

SEQ ID NO: 440930 - DNA, 122 bp, Homo sapiens
cccaggggggacagtatcgtcttgcagtcgttgccacaacgctacgctggtgcccggtaacgacactctccgcgccacacccagcgccagcctcttggatccccaggaagaccagggccgag

SEQ ID NO: 440931 - DNA, 122 bp, Homo sapiens
cgggagcccccggtgagcggggtgggctcgggggcgggtgggcgtgcagggaaggcggcccgggacgcgggcctgagcttgctgggactgcacagccctcggtagcctctcccgggccctga

SEQ ID NO: 440932 - DNA, 122 bp, Homo sapiens
caccattttcattgctgtgatagaaaatcttaacagtcagcactgaaattgccttcctcacgtgatcatctcacactttgcatggatagttgcctgtgataagtattttactttcttctctt

SEQ ID NO: 440933 - DNA, 122 bp, Homo sapiens
cctgtcattgccaggccacccctgcctctctcccgccgcagccctaggttcccgaaattccggcccctgcgcaccccctggtggccgcccctcgccggtgcagtcttcttcctccggagcgt

SEQ ID NO: 440934 - DNA, 122 bp, Homo sapiens
ggagcagaaagcagccaagagagtaagtgaagaaaggcaaagtggaggagagctctttctcgtcctttgaagaagactaaaaaggaacaatagcaaatagtattttctttgtgattcagata

SEQ ID NO: 440935 - DNA, 122 bp, Homo sapiens
tgcgcctgcactcctcagcccttgggcggtcaatgggatcgggcgccacggagcagggggcggcacccatcagggaggctcgggctgcgcggaagcccaccacggggggacttgggcatggc

SEQ ID NO: 440936 - DNA, 122 bp, Homo sapiens
ttgagaatacggcgctgagtgaaagaagccagacacaaacggccacctagtgtatgaccccgtttctatgaaatgaacaggaaaggagacagaaagcagattcgtggttgccagggtagtgg

SEQ ID NO: 440937 - DNA, 122 bp, Homo sapiens
gcctctcctggcctggtcaagggcattgctgggctttgcagaggcaccagttccccgcaccgtctgcgggtcctgggtccctgctgggtctttctccaggaaagtcctgatttctagggttg

SEQ ID NO: 440938 - DNA, 122 bp, Homo sapiens
ggccgctcacgcacacagccggtagctggttttcgttagccgctgccctcgcccagaaggcgggtggaaggtcgccagttggacgcacagccaaactcttagcgcactcccgcgcgagatcc

SEQ ID NO: 440939 - DNA, 122 bp, Homo sapiens
actttaaagattctttcaaacccctatttagtatttgttcttcgtgggattagaagaattcgatttttcccttggctccataatcttgtgtaatagtacccctatacacaagggatacacac

SEQ ID NO: 440940 - DNA, 122 bp, Homo sapiens
atcacagtcactagaccctagagcttgtctcctccaactcgctggctttctggaggacaccgaggtcctgagagcacaagagactgcccacaaacacacagggagtggaagcccctgcaagg

SEQ ID NO: 440941 - DNA, 122 bp, Homo sapiens
gcctaggcgcgggcggcagcctggcagacctaggagagcgcaagcgcggaagcacagagccgggttttgttgtttgtttgttccccacccccggggacgtcttttactttgagatgaattat

SEQ ID NO: 440942 - DNA, 122 bp, Homo sapiens
tgtggattgtggtcaagaaaaacttgaaagtcactcaaataaccaagctgtagagctactcgattacatgattacacatatgggtttttcaaacaaaggcatattgttcagcaccgggtgtt

SEQ ID NO: 440943 - DNA, 122 bp, Homo sapiens
aggccagtgaggaggctggcgcggctgggagagcagctgctgaccgaggtgaaggcattgcgaaagaggaggctgcggcgggccaaggcgtccaggtgcggggtggcgatggcgctgttgtt

SEQ ID NO: 440944 - DNA, 122 bp, Homo sapiens
ttatggttccaggcttctagtcagtgacaaaatggcactgccaagatgacttaccacatgcgtggggtatagcagagcactatggtaggtgctgcttctaaaatttacttttggctttgccc

SEQ ID NO: 440945 - DNA, 122 bp, Homo sapiens
ctcggaggcggcctggggtctgcctacgcaccttgggctggatgaaggccatgaggtccccgtgcaggacgggctccgtcaggaagctgtaggagtgtgccgactcgatgccaatgccgtag

SEQ ID NO: 440946 - DNA, 122 bp, Homo sapiens
gctgcagaccaaagcggcccaggaagcgccggacgtcgctgaagctggcgtggcgaggcacgttctgcagctccagtttaaagatctcagaggtaaacaagtcatccctgatgtagctgtag

SEQ ID NO: 440947 - DNA, 122 bp, Homo sapiens
acagaacagcaccatagtgacatctagcccggatgtgggcatggcccaccgaccactgaccgcctacgtcgttcttccaccccgagcgcccgcatatcccgttccgttcacctcccactggg

SEQ ID NO: 440948 - DNA, 122 bp, Homo sapiens
acaccttggtcccgcacagctggcagctctgcgcctccaccttgtcgtgtgtgagctgaacgtgcttctgcagcatgtactcggtcacgtacttcttgtcgcacacggagcacgtccactgc

SEQ ID NO: 440949 - DNA, 122 bp, Homo sapiens
ctgcaccgtcaggatctgagactgcttctcagggctcactcagtatatctgagcgcgtctcgccagcgcactggttaaccgagcgattctgcgagattggcagccgcactccaacaatcagg

SEQ ID NO: 440950 - DNA, 122 bp, Homo sapiens
agcaggtttcacagtgccctcgctgctgcctcccgtttcatctgcacgtctctttcaatgcgggcgtgcgaacttccaggtagagccgagttcaagaaaatgaagtactgcatgcgacgagc

SEQ ID NO: 440951 - DNA, 122 bp, Homo sapiens
acaaggaagtttttcagctggccattaagggcattgtcgaggcctttaaggtcatcagctcgcacactgcccagcctgcagtgtcaaatgtcctgcctctttgaatgtggttggatcgatga

SEQ ID NO: 440952 - DNA, 122 bp, Homo sapiens
acggcaccccccaccaagacttcttggactgggcggcagcacgcggccaggccaggcggccggacaggtggggaggtctctgtggctctccacgcccccattggtctgaggaggactctatg

SEQ ID NO: 440953 - DNA, 122 bp, Homo sapiens
cccgggaatggcggggagctccagttcagagccggaactccggacttctgcaaggccagacgtgaggcgacactgaattgctcccgagacgcgggaagggcgaaggcaatcgaagcgaagag

SEQ ID NO: 440954 - DNA, 122 bp, Homo sapiens
ctttcacatgtaatcaccaacaatgcaacaacaaactcccaaattttccaatagaggacacgtataggattttgctttgatgttacacatagatgatgcagcattcacacacgtttaaggat

SEQ ID NO: 440955 - DNA, 122 bp, Homo sapiens
tcatatatatttgggtggtgacaatactacaactacttagaaggaacctaattttaaaaacgtttttcagggattgaaagtgaaatgctatcctggaatataataaagggaaaccacaaaaa

SEQ ID NO: 440956 - DNA, 122 bp, Homo sapiens
cagaagcttgcagggaaccttcccgaattctctaaatgggatgcgaattttcattgaggacgttcatgggttttaagttaattagtctcacttaatcaccgaatctgaatgaaatgtgaata

SEQ ID NO: 440957 - DNA, 122 bp, Homo sapiens
tccttgtgtgtgtgtgtgtgtgttttcaggtcagatgtaccaacagtaccagcaacaggccggctatggtgcacagcagccgcaggctccacctcagcagcctcaacagtatggtattcagt

SEQ ID NO: 440958 - DNA, 122 bp, Homo sapiens
gctggctagggtccaggccgggggggacgggacagacgaaccagccccgtgtaggaagcgcgacaatgccccgctacggagcgtcactccgccagagctgccccaggtccggccgggagcag

SEQ ID NO: 440959 - DNA, 122 bp, Homo sapiens
taactaaaacactaaggtcacccagcaagttagcagcgcaaagagaattaacaaaacggccgccctcgcccagttgagaacatcggcatctctcacctccgaagttccgagggtgccgcaag

SEQ ID NO: 440960 - DNA, 122 bp, Homo sapiens
cagagacaggacggggattgtgccctgaaagatcctcccaataaagatctccctttgagtcgaccacagtgagtgatcccggtgaaatcagcgctcaggtgctgggggcaaaaagacctggg

SEQ ID NO: 440961 - DNA, 122 bp, Homo sapiens
ctgcaaagaatgttcaaggggtatttgtgtccgtagctgctcgtgcagcatctcagcctgcggtgtcagactcgaacccagagctgtgtcaaatgagtcaggactcccctctgctgcccttg

SEQ ID NO: 440962 - DNA, 122 bp, Homo sapiens
tctggtttgagaggtcggtacagagacgcacgcgcacatcagcaaaacacgcacttggaacgaagaaacacggaactaggcaggaagaactatttactctgaaaaataagcccttagtgggt

SEQ ID NO: 440963 - DNA, 122 bp, Homo sapiens
cttttgtcctgattggtaagacacataataaacaataatcaatccaggcacaggggctcacgcctgtaatcccaggactttgggaggccaaggtgggaggatcacttgagctcaggagttcg

SEQ ID NO: 440964 - DNA, 122 bp, Homo sapiens
gtttcttctgggttccaaaagaaccctccataggcatgattttcacaccagtgttggctacgtaatcttcccagggcctggatcatagtgggtatttaaaaagtcagaagatcaattggtag

SEQ ID NO: 440965 - DNA, 122 bp, Homo sapiens
gggagatgccttcctgtagcatgaaaccaaaggccacagaagcagagaaaaaaagctcttcgtttcgattataaacttgcaagaaaaaaggagcccaaactgttcagtgagacacgccgacc

SEQ ID NO: 440966 - DNA, 122 bp, Homo sapiens
acagatcactctccatccagaaagctgccagaaatccagcatccaaaatttgctgcaaaacgaaggtggacttgcagcaaaccaaaacctagcaccatgcttcgagaggcagttatggccac

SEQ ID NO: 440967 - DNA, 122 bp, Homo sapiens
actgctcagccctttataggagcgcctggagacgggcaggggtggacagggaaggactggcgcaggtgcaagcccctgggccagatgactctgggactctgtcacaccaactaaaataccag

SEQ ID NO: 440968 - DNA, 122 bp, Homo sapiens
acctaaaccatctacctttctactcaagatcattttcaaatatgtcatcactaaatgacccgtcaacactaaatgatccatcatcagcaaatattatcttgatatcatagattaccaagtat

SEQ ID NO: 440969 - DNA, 122 bp, Homo sapiens
tctgttagcctccggaaagatgctcagatctcgctgagggaggcagctcgcgggtgacagcgagtgcccagtctcctgccggaaagtgctgctgaagtcagaccacaggggcgctccgaggg

SEQ ID NO: 440970 - DNA, 122 bp, Homo sapiens
gtcatcctcagggccaggggcctcggctcggcctcgatacgaatcacactgtggccaaggcgcaatctggacatgccatagcagctgagccaccatcacgagccgggctctgcataccgggt

SEQ ID NO: 440971 - DNA, 122 bp, Homo sapiens
gttgaatgacggagacctgagtttggattctgaatccaggtgtattcgatgccgctccggcgtagaacgggttaaagatgcccccagccaggtagagccagactgggagttgtgcaaggtct

SEQ ID NO: 440972 - DNA, 122 bp, Homo sapiens
tctgtaaggaaggaggtgaggtcacttgcgagcatgctgggctggaagttaggtaatgagcgtaaggagcaccttaaaagtttggaacagctccctagtggatagctaggggccaggaagga

SEQ ID NO: 440973 - DNA, 122 bp, Homo sapiens
gcgaggcgggccggagcgacggaaagcgggcgcctcaagctgcgtatgcagaaggtggggcgaaaccttctacgatcgcaggtgttttgtgaagccgcgccgctatagcggggctgaaacgc

SEQ ID NO: 440974 - DNA, 122 bp, Homo sapiens
acgttcacggaggacgtgactggaacccgtctccccttctccagtcgttccagtcctccccggccctctacttgagtgggtgggtcttctgatgggttcctgcccttgcgtgtgtgtatagc

SEQ ID NO: 440975 - DNA, 122 bp, Homo sapiens
gctccgggccctagttgcttgggcaacgggaactgtcagcgacctggcccaatcacctctcggaacgtcactcgggtaggtccagaggcggggtcaacccggcccggccccgcccccccgcc

SEQ ID NO: 440976 - DNA, 122 bp, Homo sapiens
cggatttcctttcctgttcccctcctattccaagtgcttcaggtgttcaagtaatcatagcgattttaaaagcctctcctgtttcttgcctgggaagtcagatggacccacaggaagaattc

SEQ ID NO: 440977 - DNA, 122 bp, Homo sapiens
acctgggtcccaatctatgctttgtcccttcggcacattgttgactgtggctggtggcttcgtggctctgagcttgtctccttctctataaatgaggaaacataatacttgcgacgatgatg

SEQ ID NO: 440978 - DNA, 122 bp, Homo sapiens
tgggggcggctgcaagtgcccagagaggctgacagagccatcggaatggtggcgcagggccgagagccacctctgcccctcggccttctgagagcggccccctgggccaccccggagttccc

SEQ ID NO: 440979 - DNA, 122 bp, Homo sapiens
tctcctggagagtttgaacgatgtaagaaagcactgtgatttttaccaagtcaaaaaccacgcacaaaatcccgcaccccgccagccccccgccgcctaagcctagccaaggggaaggggcc

SEQ ID NO: 440980 - DNA, 122 bp, Homo sapiens
gctagcaataccctctcgagggttatgatgtcattcaaatccctcaactgggtgactggccggcaacatggtccaagccagctgttttgctatttataatgtacacttgcctttgccattga

SEQ ID NO: 440981 - DNA, 122 bp, Homo sapiens
gcagtatataaatgatgctgaagacaggtcaggtttattcaggttcctgtattttcctgtcgagttgctagctgcccgtcgtagaggactaaaaaaaattaatgaaaattgctaaatcaatg

SEQ ID NO: 440982 - DNA, 122 bp, Homo sapiens
gcccctttggacccagccaatggctgtccacagaggtggggacaattccaaaattggaaccgtcttgtaaacagccaaaagcaatgatgtctttaaccattccatagctgttcctggaggcg

SEQ ID NO: 440983 - DNA, 122 bp, Homo sapiens
tagccccactggagcgctggcgcgttggcgatggggtcccaggtgggagagagatctgtccgctgaacctgcgcatcccggcccctgcggaggctgcagagattctgccctttctgttcgga

SEQ ID NO: 440984 - DNA, 122 bp, Homo sapiens
atcattgttaacaaagctgtcatgctcttagtctgcttcccagccttccctgtctcactgcgacatcattatccaccaagctgctagagccaggagtgatggtagcatcctttctcttcttt

SEQ ID NO: 440985 - DNA, 122 bp, Homo sapiens
ggatcttcatgggaatgaaatcctgtcagggggtggaggacctgggggagcaggccaggccgtgcatgggcctgtgaagctaggggggacaccccctgcagatggaaaacgctttggttgcc

SEQ ID NO: 440986 - DNA, 122 bp, Homo sapiens
aaatgaggagctcgaggctcctgggagtccgttgcgggcaggtgggcgccgctgttgtgtcgggagagccaggagcgacagactcaaactcagaaacccaaccacctccgctccctccgcga

SEQ ID NO: 440987 - DNA, 122 bp, Homo sapiens
ctgctcgcaggggcttgctactggcctggaaatgctctgcagagtcctgggctctgccgccgccgccgcccccacctccccggggcctctctcccggaggatgcaggcctgggccagcccct

SEQ ID NO: 440988 - DNA, 122 bp, Homo sapiens
cactggcgaccacagcgagctgggcagcagggatcctgtccacctagagcacctgccatgcgtgggcttgtgctgggacaccatctagtgacatctgctctggaagaggtcaggagaaagga

SEQ ID NO: 440989 - DNA, 122 bp, Homo sapiens
atggtggattagtcacagccagtgaagcttccggttctccagagccaccttcccaccctgcggcgctgcagaagggccatgccggctgccaaggctcagctgtgcttctctcccatcatccc

SEQ ID NO: 440990 - DNA, 122 bp, Homo sapiens
ggcgacggatccatctcccgggatgaaaaaccaagccaggccgcccgggggctggttctgcgtcggcggggggtccctaatgggaattaaaggcgggggtgattgggcccgggtgaggggag

SEQ ID NO: 440991 - DNA, 122 bp, Homo sapiens
ttcaggtgctccataggttgtttggacacctcctggtttataacagtcatgatgtttagacgtcagactccgcctgtcagtttaggacctcccatcattaacagcccagaaacgggtggctc

SEQ ID NO: 440992 - DNA, 122 bp, Homo sapiens
ccgcgcgcacctgcagacccggctgcgctcgcagaagtttaagggctcaaggcaggagggcggcgcggggccgggccccgaaaaggcgcaggagggcacgaaggtctggcgccgacgctcgg

SEQ ID NO: 440993 - DNA, 122 bp, Homo sapiens
tcgccaagttgtacctcctgcgcttcgccgcagataaagccccagcttagagcatggggtcgcaaccacccagagccttcagaccagtgagcactttccgcacaggtttgaatcccatgaac

SEQ ID NO: 440994 - DNA, 122 bp, Homo sapiens
aacccaacacatttcactcatgtaagactcaaacgggctacttctgatttcttcttttaacgtttaaatttatatgcttaaaaccatgaactcacatacctccttcaagaggatacaactga

SEQ ID NO: 440995 - DNA, 122 bp, Homo sapiens
tgcacccccgccagcagtgccctcggctggacacacctgcgttgtgggcagccggcagcgcgtgacccactgtgcacctgcgccttgatgtaggggggagaccctgcagagagcgcttcctt

SEQ ID NO: 440996 - DNA, 122 bp, Homo sapiens
ttagaggggcatgggccggatctgagctcggatccactttctcagtcagatgcctttgcacgggcacagcctgctccaaacatatgatcagccttattgatcatatcccttcttggccttct

SEQ ID NO: 440997 - DNA, 122 bp, Homo sapiens
gtgcggtgggaaagccaagctctcaccatggtcacagactccaccgactttgacaagcgccgcaaggcacactatgacaaagggaagtttctcaaggctcagaaaaaccagcccttggagaa

SEQ ID NO: 440998 - DNA, 122 bp, Homo sapiens
tgtgttgctggtgtgtgcgtgagtggtcacctaggtagaccctcatgccctcaccccacacgtgcatgtggtggcatcccaaggatccttagagacagccagcatctcagcatctctgacag

SEQ ID NO: 440999 - DNA, 122 bp, Homo sapiens
gcctggagacagggaatggtggaggggttatcaacctcaatgcctttgaccccacactcccgaagacgatgacgcagttcctagagcagggagaggccaccctctcagtggcaagaaggtaa

SEQ ID NO: 441000 - DNA, 122 bp, Homo sapiens
tcattttttgggaaaaattccatcaacagggcccttctagtcaacatactattttccttacgtgaataccgaactttgtttctcactattgaagctctaaaactaagagtctggccaaagtg

SEQ ID NO: 441001 - DNA, 122 bp, Homo sapiens
actgagcgacaccatcctcatccatgaaggtgcacgcccacatcccccaagcgctcctcacgccaagcgctgaccaccagaccctcttctagtggacatattttattggggggcggggattt

SEQ ID NO: 441002 - DNA, 122 bp, Homo sapiens
ggttgtcccttcgcgtccttcatagaatctgatccaggaccacacgttgcatttaattggcgtgctctttagtttcctttcttctgtacccccattttcaaggggtgcaggcaagttatctt

SEQ ID NO: 441003 - DNA, 122 bp, Homo sapiens
tgctggcccctctatctgggggctccgatcacttcacgttttcaccccattgctgtggggcggaagtcttgtagccccctgtagtacaaatgctgaaataatgaggatgtgtgctggggggt

SEQ ID NO: 441004 - DNA, 122 bp, Homo sapiens
ctcaaggcaaagagcccctgccctctttggtctttggattacccatcccctcaggcactgcgtccgcgcataatggacagtcaccagatggtgaatgctggaaacgcatcggtgtttttgaa

SEQ ID NO: 441005 - DNA, 122 bp, Homo sapiens
tgggggactccgggagcgtgggcttcacaggcgaggagcggggcgagaggcctctcaggccggggtgcgcccaccgccccggcctcagggagcgactttcccggaggccgggggacgctgcc

SEQ ID NO: 441006 - DNA, 122 bp, Homo sapiens
ggcatctcgggaccctaggagccgcggtggggggcattctttcagtgcagcctccacggccggccaggctcagctaccctagacctggctgggtttctgcctgtgcccctcgggcccctgcc

SEQ ID NO: 441007 - DNA, 122 bp, Homo sapiens
cttcactccactggcaaggctttgggtctcacgcccacggctgaagcagtgcgaagagtacggggctcctcttcagaagacctgagttccgaagctgcccggggcccgccggcgctcaccca

SEQ ID NO: 441008 - DNA, 122 bp, Homo sapiens
gggttgtgcaccctagagttgccgctttttgagaaccggttttacctccgcccactccttcgtcctctagtttgggacttccaaacttctcccctctcctccccgggcatagtgcgcgcttt

SEQ ID NO: 441009 - DNA, 122 bp, Homo sapiens
acctgcaggaagaatgttgtaccatatccagcatttttgtcccaacaaacatgggacaaacgtttttcactagaatcatccttgaacaagttatccgaattccttacattcaaaggaaatcc

SEQ ID NO: 441010 - DNA, 122 bp, Homo sapiens
caattaattatactcactttttggcagcaaagcagcactctaacaagctcaaaatctgaacgatgttgtatggaaaagcccttgggggtcaggagtccccacccattccaaattgcagcata

SEQ ID NO: 441011 - DNA, 122 bp, Homo sapiens
gtctaggccagtcggggtcaccaaaaaaaatccaccaaaaaacacccaagaagggagaagcggtcaccccccacgtgctggaatgacagctttttacttgctaggcagttggaccttttccg

SEQ ID NO: 441012 - DNA, 122 bp, Homo sapiens
cggaatcctaactttggaaacttcaccataatagaattgctgccgaggtccaattgcagccgaggtggggagcgtgagcccgcagagcttggcatggctcagccccctgagaggggttggca

SEQ ID NO: 441013 - DNA, 122 bp, Homo sapiens
ccccttcaagcctcagttttctcatctgtaaaaggggcactgtccaccctccaaggttctcggatgattgattccccagctcctctgaatgccccactctgggcccagcctagcaacccagc

SEQ ID NO: 441014 - DNA, 122 bp, Homo sapiens
tctggagctggcggggtggggcgcggctccggcgacccgagcccggctccgcagaggctgcggcggtcgcgtcctttatttttgctgcagcagcagcgacttgtcaaagggaaagacgtaag

SEQ ID NO: 441015 - DNA, 122 bp, Homo sapiens
ggctaacaggtataagcactcagaacaggacccagcacctatgagtcaccacatccccatcgttatgggttacatgtgtcttttccccaccacactaagtccttcagggcaaggactgtgtc

SEQ ID NO: 441016 - DNA, 122 bp, Homo sapiens
ctcccagtcgtcctggtcggcatggctgtggaagagcaggccgtagagcgcagcacggagcgccaggtcgtcctcagcccctgggagggagaaggaggggtgtccttggagccgcctgatcc

SEQ ID NO: 441017 - DNA, 122 bp, Homo sapiens
gggccgctcgggtctgggagtgccaacaggacgggatgggcacgagcatgccgggccccgcgcgggggaggggctctttccttaccccacacaaaaaggtgtgcccgggttggctgcccctg

SEQ ID NO: 441018 - DNA, 122 bp, Homo sapiens
ctcctcaacccttgggcaggcgatgggaccgggagccgcggagcagggggtggtccccatcggggaggctcaggccacgtgggagcccactgcaggggtggaggggaggctcgggcctggca

SEQ ID NO: 441019 - DNA, 122 bp, Homo sapiens
gggcccgacctgcggcctctcagaaccacggcaccgcccctgcccgccccagcgccactccggcacctccgcaccaggcgccctagctcgggactcactcggctcgaccacgggaagggaag

SEQ ID NO: 441020 - DNA, 122 bp, Homo sapiens
acacatcaacactgccaaccgagggagcccaaaatcaccgcaagcgaaaggctccggcggcggccacgggccacagcccgcctccgcgcacacgcagcccctcccgagcctccactcgccgt

SEQ ID NO: 441021 - DNA, 122 bp, Homo sapiens
tggccgggggtcgcggtctggggccggccaacgcgaggtgggtggctgcgggctcgggagcgcccagggaaatagggcgaatgcgccggagggtcgagcccttccagagagcgctgggctcc

SEQ ID NO: 441022 - DNA, 122 bp, Homo sapiens
gaagttgcaggtccctgggtgccggggccagggaagggggtggactgaggctgggagccacggctttccatcaggccacactcccaaagcaaggcctgagctgcaagaagccaccccaccca

SEQ ID NO: 441023 - DNA, 122 bp, Homo sapiens
gacaacccgaggtcgctggccctggatcccaccaaggggtaagtgtttgcctgtcccgtgcgtccttgtgttcacctcgtatgagacagtgcgggggtgccaactgggcaaggtggcaggct

SEQ ID NO: 441024 - DNA, 122 bp, Homo sapiens
cgtggtccctgcagggtgtgtgggctgctcggccttggccagcatcagggacagctctggcgcccggtcactctgccccctacccgcggcctgctgcgggccagcagggtgacagctaatgt

SEQ ID NO: 441025 - DNA, 122 bp, Homo sapiens
ctccctccgtctcttttacctgcacctccacacctcctcaacagatctttatcctggacacggcagggggtccccgtgccctccgagaatccaagaacccgccccgcttctacgcggaaagc

SEQ ID NO: 441026 - DNA, 122 bp, Homo sapiens
tttacttataatggcaacagggcaaaacatcagtttgagtaccgtatgtgtataatagaacgcttagtccattgtttggcattgtaagggcaagaaaaatatcttgtcctcacttatcacaa

SEQ ID NO: 441027 - DNA, 122 bp, Homo sapiens
tttccttcgctccccctccctctccactctgagaagcagaggagccgcacggcgaggggccgcagaccgtctggaaatgcgaatcctaaagcgtttcctcgcttgcattcagctcctctgtg

SEQ ID NO: 441028 - DNA, 122 bp, Homo sapiens
ggcctgacccaagacttctgcttcagggggactgagcgatgctctaattcctttgtgaaacgtttgatctctgcggtgtggccacaggcttccgccggcacccctgccgctctggttttgag

SEQ ID NO: 441029 - DNA, 122 bp, Homo sapiens
agacaggggctggaatggcaggctgccggccgctgataacggaacacatcggagttgggtcgcgagacagcaatcaaaagacaaaaagagtctgattttaaatggtagcaagcctggagagc

SEQ ID NO: 441030 - DNA, 122 bp, Homo sapiens
tctccaggggcacggaaggccgaggcgtgccgggggagccaggagcagctggctggcgggcgccgcgggcctccccggtcacgtgacaccccggacaacgtgcgccgtcacgtgacggcaga

SEQ ID NO: 441031 - DNA, 122 bp, Homo sapiens
ggaccccgcacgtgccggggagaactggcaggcggccagggcgaggaggcttccagcttgcgccgcactggcctgggcacccgggctgcagggccttttgggccctcccctcagtgaccctg

SEQ ID NO: 441032 - DNA, 122 bp, Homo sapiens
gcgtctctgcctggaggagactgtgtagggtccggcgtggggatcagccaggatgggctgcgcgtctccagcctctgcacacacattggcgggtggggtgcagggagggagaggcaggggag

SEQ ID NO: 441033 - DNA, 122 bp, Homo sapiens
gattacattttctccctgctccacttgactttcttccggaaggagcaggtctcgcaggatcggggccaagactggaagagttcaggtttgggagtcgtgtgtataacagccccgcgcctcca

SEQ ID NO: 441034 - DNA, 122 bp, Homo sapiens
ccacatgctaaacatcaggaccagtgtggcgcttccaaggttcactgccctgagcaactccggcagagggggcctcagcgggtgcagttctcatggccagagtccaaccacctctctctcac

SEQ ID NO: 441035 - DNA, 122 bp, Homo sapiens
cggcggcggcccgccaggacccggtggagctgctgctgctgtctacccaggagcggctggcggcggagctgcaggcccggcgggcaccactggccaccatggagagcctctcggacactgag

SEQ ID NO: 441036 - DNA, 122 bp, Homo sapiens
ccagaagatgtggtctgatatactgtacagtcccctgtaatgtgtaaatccagggcccatcgtcagcttctacatctgattctcaagcctggctagatattagaaactaggagggctgagca

SEQ ID NO: 441037 - DNA, 122 bp, Homo sapiens
atgagcactgtggacagccctgtgccctgcggggccggatggagaagccccaggagctggcggaggatggcgggaactccagctgggagtgggatgacacaggaatgccggggcagcgggca

SEQ ID NO: 441038 - DNA, 122 bp, Homo sapiens
actttttattcttcatttgtttacttcttcatgcgctcttcggtctttacaaaatgtgctcgcgatatccttccgcaagtgtcagtctcaggcactcaccacccgccttgaagccatttcta

SEQ ID NO: 441039 - DNA, 122 bp, Homo sapiens
atgcagagggcaggggagcacggggaaatcttgcaataagatactctgcttgggaaataacgcgactcctccccttgcaactcattggccagctccagtcacatgactctcccgccagcaga

SEQ ID NO: 441040 - DNA, 122 bp, Homo sapiens
ggccactacttttcagactcttgtgaggggttctccttttccatttgccttttaagtgtccgggtctctcagagttctgtcttaaaaactctttctcactctgcactttctagggaccaaat

SEQ ID NO: 441041 - DNA, 122 bp, Homo sapiens
atttcctaatacagcgagaacacatagaacttctatgagctacaagaaacaggaagaaaacgtttgaaataaaacagctgggcagaatgtggtaagcctatatcttttttgctccaagtcct

SEQ ID NO: 441042 - DNA, 122 bp, Homo sapiens
attgtccaccttttacataggaggaaaataagtccagttaaagttgaagtccccacctcacgcagttctcaagtgttactacaggttggaatcacctgggagagcttttataaggccgccgc

SEQ ID NO: 441043 - DNA, 122 bp, Homo sapiens
aagagaggcggggagctctgcaaagggcttattttaaaaagaaagggaaaaaaggtggggcgcgccgtctatctttttagaataattctgtaggaaaacgaatcggaggtaaagccatgccc

SEQ ID NO: 441044 - DNA, 122 bp, Homo sapiens
ctcacgtgctttgtgaagattcttcccacaccccactatttgacgtgactcctttgggagcgggtgagtggatcctcttttcccaaacctgcagttctgcctggctcagctcacccaacttc

SEQ ID NO: 441045 - DNA, 122 bp, Homo sapiens
gtgggaaagacccccctctgtccgtacgcaaccctctcggctcccgtagcgcctactccacgtgacatcctgcctggtctgccccctgccggctccgcacgccagatgtcacaccgtttccc

SEQ ID NO: 441046 - DNA, 122 bp, Homo sapiens
aaaatacaaaaaaattaagcaggcctggtggcgggcgcctgtagtcctagctacttgggacgctgaggcagtagaatggcgtgaacctgggaggcggagcttgcagtgagctgagatcacgc

SEQ ID NO: 441047 - DNA, 122 bp, Homo sapiens
agcttggctctagggcaagctgccctgcacagctggatggcgtctggaaaggaatgtgaccgtgcagggcggggacctggaaggcaggattcaaagattccttcagaggctcttcgctggtg

SEQ ID NO: 441048 - DNA, 122 bp, Homo sapiens
aaagggaccgttttctggaggagagtcaccttctcgttgaaccaggcctccgcgtccctgcggttctgctctgcaagggcttcgtactcagctcgcatgttgttcagcagaactgtgaggtc

SEQ ID NO: 441049 - DNA, 122 bp, Homo sapiens
taaattaactgactttctaactgcatatgaaccttgacgacaagtcgggggtcggggaagcgccacagcttcactcccggggccctctactaggggaggcttttctcctccacctgcaccag

SEQ ID NO: 441050 - DNA, 122 bp, Homo sapiens
cgcgcagcgggcggaaggtgcccgggcccactttgagcgcgcggctgcgcactgagccgccggccctcccggaagcgcagagctccgctggtgccacgtctatccccttacatcctcctagg

SEQ ID NO: 441051 - DNA, 122 bp, Homo sapiens
ccagctggagccaaaccaaggcctggattctcctcgtggatgtctggtaaggccccaccacgtaccccagtcacgtagtctctaaaactgaacagatttgggacgcttcctcttagagggca

SEQ ID NO: 441052 - DNA, 122 bp, Homo sapiens
ccacagcaaagtgaattaagggaggtggctcagacctcggctagaagcctcggtggcactcgggagggacttcacaaaccaggatgcggacgggggaagcgccagggcttttcctgtagatg

SEQ ID NO: 441053 - DNA, 122 bp, Homo sapiens
cccttcccccctttctccagccttggtgccttcacctccgtaccaaccgcccaaccccaccgcctccgacccccctgcctggaagctgctgtcctttgagggcttcggagatgagaacagga

SEQ ID NO: 441054 - DNA, 122 bp, Homo sapiens
gcgggagcacgccccgcctcggcctcgccgccgctcgggctgacactctgcctccgggcccggggagacctttccatctgcaaataacactggagaattcagactaatcggttcagcttccc

SEQ ID NO: 441055 - DNA, 122 bp, Homo sapiens
catgggggcagaggccgccatggaggagaagaggtattggcctcaacgactccacctccccgccacgtgcccagatccgggatggaaggaccctataaatgcccacaacccagcctccccag

SEQ ID NO: 441056 - DNA, 122 bp, Homo sapiens
ccagccttgccaacgtggtgaaacctgtctctactacaaatacaaaaattagctggtcgtcgtggcaggcgcctgtaatcccagctactctggaagctgaggcaggagaatctcttgaacct

SEQ ID NO: 441057 - DNA, 122 bp, Homo sapiens
actcacatgcatcagaatcaccccgaatgcttgttaaaacacagattcctgggtcctccccgcagagttgctgatttagtaggtttaagggcccaagaatttgcatttctaaaatgtttcca

SEQ ID NO: 441058 - DNA, 122 bp, Homo sapiens
tcctttatctgcacaaaaacatctggtgtgaatacttgcggagcaggtcagaggttctcccgggggcccttccctatttcctaggcatttgcctgtctcctgcctctatcaatggtaaaaat

SEQ ID NO: 441059 - DNA, 122 bp, Homo sapiens
tcgggacccctcgcctcccaggaagccgcggccgtcccgggtcaaggccaaggccacggccgccaccgcaaagaccagaccctccgcagccgccaccgccgctgcccggaaacgggcgcttt

SEQ ID NO: 441060 - DNA, 122 bp, Homo sapiens
ctggccctggctgaagctggatgagctctgctccttgaggatgggccgggtctgacggctcgaagaggacgaggaggaggtgaagactgtgggagagagaagaggaggtgagaaggggtctg

SEQ ID NO: 441061 - DNA, 122 bp, Homo sapiens
cgtcccgtgcacagaatacgtccggtgcaaaacgtgtcctgtgcacttgtcctatgtaaacgtgtgtgtccgtgtgcaaaacatgcatcctgtgcatatgtcctgtgcaaaacatgcgtccg

SEQ ID NO: 441062 - DNA, 122 bp, Homo sapiens
agctcaggagtttgagaccagcctgtctctactaacaatataaaaattagctgggagtcacggtgggcgcctgtaatcccagctactcgggaggctgaggcaggagaattgcttgaacccag

SEQ ID NO: 441063 - DNA, 122 bp, Homo sapiens
cggggagacgattaaataccatgccgcagaggcccacgggatttgggggcggggctacggcgagcgcacgcgcatacgttgaccgcatgcgaccccggggagttgtgggtagagagttccag

SEQ ID NO: 441064 - DNA, 122 bp, Homo sapiens
agcccgtgagcttgggccagttaccgaagaggctctggaagtgacagccaagggccctttcggctctgacgccgtgtctaaatcaggctcatcacttggctctagctgtgattcacctttcg

SEQ ID NO: 441065 - DNA, 122 bp, Homo sapiens
acgtgttcatctacagaataagccactacagaagcgtggcttatgtgaagacatggaggtcggtgtcattttgataaaaaggtaccaaggttataaaatgcccagagcaagcccccagaagg

SEQ ID NO: 441066 - DNA, 122 bp, Homo sapiens
gagccgccccaggctttctcccacgttctccctttctctgctgcagttgagtttccagagcgtgagcgcgcaggatgacacctggctggctgagagctgccggggaggcgctggcgggtgcc

SEQ ID NO: 441067 - DNA, 122 bp, Homo sapiens
tgcattttggactgcttgtttggaaggcagcaaagaagagttttcatgggctttggagttcgacatccctggcctgcagtctcagtgcctccacttacaagttgtgaagcctgacacaagtt

SEQ ID NO: 441068 - DNA, 122 bp, Homo sapiens
ttcctgcaaagggagcacataccacataggatctggactgtgccatttgtactgttccagcggagtctctgggcagggccacaggcttgaaagcccctttggggaaagcctatcatttcccc

SEQ ID NO: 441069 - DNA, 122 bp, Homo sapiens
aggtcttgttccatgggggctgggcacccaaggtatctactgatggtctgaggaatctaccgggatggattcctgatttttttttttttttttctgagacggagtttcgctctagttgccca

SEQ ID NO: 441070 - DNA, 122 bp, Homo sapiens
agggaccttgtgttttcacaaaatccctaagatctagaacagtgcctgacatgaaagagacgctcttcaaatgtatatgtattacaatcaccagagcaggcattgtttgagcatctactgaa

SEQ ID NO: 441071 - DNA, 122 bp, Homo sapiens
gcattccttctgaacctcatcttgcctctccggggatttgcttctgccatttcgcctgtacgcaattacacttttcttttccaattgtcaacgcaacgttgatgaaatacgagctgcttctt

SEQ ID NO: 441072 - DNA, 122 bp, Homo sapiens
cgggtgggtgcccagacgggagggagagcgagcgagcgagatcaagggcagcgaggtctgcgggttcctctgtgtgtgtgtctcaggccctgtggctcagcactggagccgcctggcaccca

SEQ ID NO: 441073 - DNA, 122 bp, Homo sapiens
caaattcttgggctcaagtaatcctcctgccctgacctcccaaaatgctggggttacagacgtaagccacagcgcctggccctgcgattgttttttgattcaatcttcgaagtagaataggt

SEQ ID NO: 441074 - DNA, 122 bp, Homo sapiens
ctgctcccgggcgcaggtctgcaggtccgcgcccactgcccgcggcgccactgaccatgtcgggtgagtagctcaagctgcttcagttcagcctgcctgttcctactggcttgggtgacaga

SEQ ID NO: 441075 - DNA, 122 bp, Homo sapiens
gcctcgtgggctccctgcccccggagggggcgcgcagagggagggcggtagcccagtgagcgcgaccactacttccctgtgaacgcgagagctcagacaagccacagggggccagagccgag

SEQ ID NO: 441076 - DNA, 122 bp, Homo sapiens
cccgcgccgctgctggaacgcgaggcggtcccggagcctcttccgttcgctgcacagcctcgccctgcgcccgccaccgccctgcggatcggtcctctcgcccgccacctccagttgacccg

SEQ ID NO: 441077 - DNA, 122 bp, Homo sapiens
ccttcctggatggatcgctctggaagtcattaagcagcttagtcccggcgcggtggctcacgcctgtaatcccagtactttgggaggccaaggcgggcggatcacctgagttcaggagttcg

SEQ ID NO: 441078 - DNA, 122 bp, Homo sapiens
cgagggagggcgccggaagtgacgcgaggctctgcggagaccaggagtcagactgtaggacgacctcgggtcccacgtgtccccggtactcgccggccggagcccccggcttcccggggccg

SEQ ID NO: 441079 - DNA, 122 bp, Homo sapiens
tctttcttttgataccaactctggaactttgggaccatgtacgaaactaacggtggctcacgcctgtaatcccagcactttgggaagctgaggcgggtggattacctgatgtcaggagttcg

SEQ ID NO: 441080 - DNA, 122 bp, Homo sapiens
tgccgaggacatcttactcctgctgctgggcctcatcgttcttgtcaacattggcatcaacgtggcaactatggtcagtgatgattgtggactacctctgggggtgaacagggccaagggtg

SEQ ID NO: 441081 - DNA, 122 bp, Homo sapiens
tttggaaaggtacttgaactctctgtgccttagaatcccttttctaaaatgtgggctgggcgcagtggctcatgcctgtaatcccagcactttgggaggctgaggcgggtagatcatctgag

SEQ ID NO: 441082 - DNA, 122 bp, Homo sapiens
tgaaagtattcttggagctatgggattttcacacacttgctatttatgagccaggaataacgacaggctctaaagtaactgcactggctaagactaggcatgaaattccctcataagcacat

SEQ ID NO: 441083 - DNA, 122 bp, Homo sapiens
ggcgcttacttttaggctctgcagcagctcactgggctgggtgttttacctgtgacatctcgccatgtccccaaaatggccccatgagggatttcactgccaggccctgcctcagtcacagc

SEQ ID NO: 441084 - DNA, 122 bp, Homo sapiens
cgacgcctcgaacgtggccggctctgaaaggcctcctattctgctggaagctaattggcccggggtcttcccagccctgtgctgtttgtgtgctattttaattcgcttatgaaaagcccccg

SEQ ID NO: 441085 - DNA, 122 bp, Homo sapiens
ttatgggctctttggagagcaagatgaacatacagttgttccctcttctctgtggggacacgttccaagtcccccagtgatgcctgaaattgtgtatagtaccaaagcctatatatatatgt

SEQ ID NO: 441086 - DNA, 122 bp, Homo sapiens
cgcctctcagacctcagtcccctccggtgacggaccgggctcctgtcggtccccgcacggcggctctggcccagcctgcggccctccttgtgcagttctgcgcccgcagccccgcaccttcc

SEQ ID NO: 441087 - DNA, 122 bp, Homo sapiens
tggtggttgttgtagaaggctggcggtcccgggggtggtgtcacttccctgctccttcagcgggaggcggagacctctattagcacactcatttccatcttgcgggtcgttcactcgctagc

SEQ ID NO: 441088 - DNA, 122 bp, Homo sapiens
cattgtatagccttgaacccgattgtgaatacaatgtagcaacttcgctggcgcctgccccgcactccccgtcccgtccacttctgaaactcctgttcctaatgacaaagtggctatgtgca

SEQ ID NO: 441089 - DNA, 122 bp, Homo sapiens
gattaatcatgagcaagatcatatagcacaaacacggccttgggggccatccctgtgtcccggacaatcctggagaaagagataacactttaaattgaacatccatccccgagtggatgctt

SEQ ID NO: 441090 - DNA, 122 bp, Homo sapiens
gtctaacccacttcagggaagtgatatgaccctgatagcaaggtcctttagactacaagacggatcttgtcaaattcaggatactcctacttcaaattttcctcaattcccagtctctctga

SEQ ID NO: 441091 - DNA, 122 bp, Homo sapiens
gggaaggcgtccgcgcggcggccattttgtcttgtcggctcctgtgtgtaggagggatttcggcctgagagcgggccgaggagattggcgacggtgtcgcccgtgttttcgttggcgggtgc

SEQ ID NO: 441092 - DNA, 122 bp, Homo sapiens
ctgtgaggcaggtggagaggctagggaggatgcagaggctaactggtgggaacagggtcccggcaccattttgagtgtgacatcatggatgcccaggcatgtggtcatccagcctgaccctc

SEQ ID NO: 441093 - DNA, 122 bp, Homo sapiens
gggaccaattatagggtctgtatattatccatgcttttagtactctctcctttcttctggcgcctgccaacatcaccactaattttgcatcaagaacagctggagaaaataagaaattcaaa

SEQ ID NO: 441094 - DNA, 122 bp, Homo sapiens
gcaaaactacaaatcattcttcaaatgcagccccagatgcagtctatgactaagatctaccgcggacccctggactggcctgctagcccatgctccgatgttaatgacatcgaaggcacccc

SEQ ID NO: 441095 - DNA, 122 bp, Homo sapiens
acaagcactaaagactgagcgtcctgtaataggtgtttaagtcatgattgcgctaagcgccgtggggaccaggcccagcctggaggtcagaggcggcctcgggacagggtgtgctggcgaga

SEQ ID NO: 441096 - DNA, 122 bp, Homo sapiens
cataatatgtggtcttttgtgactggctgccttcatttggcatcaggacttcatctctctcgccctctctcttgctctgttggtcaggctggagtgcagtggcatgatcacggctcactgca

SEQ ID NO: 441097 - DNA, 122 bp, Homo sapiens
gagcccggtttatcgcgaggggcagtccccagggctgccgaatccagcagcgatggagagcggcaccgggccctgcggagaagagcgcccacgtgaagtccagcagacgacagtcactgagg

SEQ ID NO: 441098 - DNA, 122 bp, Homo sapiens
tcggccaggcttgcagacaggtgaatgcatctcattggctccagggaggcatgatgccaccgggcagctctttttaagagaaaagccagaaccggtggagcagcgacccctgagcagtgttc

SEQ ID NO: 441099 - DNA, 122 bp, Homo sapiens
ctcccaatgcccatggggacaagtcacatttcttgagctgctaaattgaatggcagctgccgcttactccatatgtttctcattctaacatgttgtctcaaatatttttagctactaagcac

SEQ ID NO: 441100 - DNA, 122 bp, Homo sapiens
cacagtgtgcctggatgtctgtgtcccgggacctcggggaagagggcccgcaccggtctgcgaattgcaaggcccggccttccccagcgacgctctggtatccgctgtcccctccctgtacc

SEQ ID NO: 441101 - DNA, 122 bp, Homo sapiens
aaaattatgatcaaataaatttgtatgccttttctcctattaacctgccttttttgtcagcgattgtcagtgaaacttcagagggcaaaggggaagttttccttggcccctccagttttggt

SEQ ID NO: 441102 - DNA, 122 bp, Homo sapiens
acctcgtgatccacccgtctcggtctcccagagtgctgggattataggcatgagcccccgcgcccagcttatgtaggattcctttagccatctgggtacttttggggttccatatgaatttt

SEQ ID NO: 441103 - DNA, 122 bp, Homo sapiens
ctaattcgaccttggccaaaacgatccttaacagcatttatatgcttgatctcctctccacgcagcccatcaataagccattgcgctccacggtcacacttcagcactcccaatacaccagg

SEQ ID NO: 441104 - DNA, 122 bp, Homo sapiens
tctgctggtaaagaaggagcagggagggaagggcgtctgtgcaattaacctggacaccgccgggacacacacacgctctgatcccctccgtgctcggtgttggcccagtctcttgcgggctc

SEQ ID NO: 441105 - DNA, 122 bp, Homo sapiens
cgttgagcagcccgtgtccacagactctggagtgggacttatgaagccaaacccgccttccggttcgctgctcagcccggcggcttccacatctgaactgcttccgcgccctgcatcccaac

SEQ ID NO: 441106 - DNA, 122 bp, Homo sapiens
ccgcctcctggggccgagcaggtttcggtttctgaagggcggtgcaagtccccggggtggcggactcgacctggcctgcagccaggctactgcacgaaagcccaaggtcgtgtccggccact

SEQ ID NO: 441107 - DNA, 122 bp, Homo sapiens
tggctggaggggggatgctcttcaggcagcaacagcggccagaggaccggccagtcaaggcgggccagtctgctctctggagacagaccgattggccaggcatttcgccttccagccaagac

SEQ ID NO: 441108 - DNA, 122 bp, Homo sapiens
accatgctgttgaactggcctcagagaacaacaatcagtagaacgattacagtttctaagcggatcagttcccacccgactttgataatcaaaaagaaggttcacagggaaaataaggaaga

SEQ ID NO: 441109 - DNA, 122 bp, Homo sapiens
ttgtgtaacgaactgtccccagttggctcatttatttgcttatgtatctgcagtttggggcgggttcagcaggaacaacacccccctgcttcatgattggggccccaactgggaagacttga

SEQ ID NO: 441110 - DNA, 122 bp, Homo sapiens
cctgaataactagcctcataggttgcgtgcccatgaagccagtcctagttagtgcatattcgtgtttacttatttcaaagttcaaagttctgaagatatttagagtctgtatgtaaggccca

SEQ ID NO: 441111 - DNA, 122 bp, Homo sapiens
cccgcgccccactaccacgacctcgacccccgaaggcccacgcgcctcaccgctcggttgcgtcctccgccgcaaccacccctcgcccaaggctccgcctccggacagtgccacctgccagg

SEQ ID NO: 441112 - DNA, 122 bp, Homo sapiens
ttcaacttccggccacatagtgagaggatgttttcctactggagctgagccgcgggggcgcgccccccggccgcgccctcctagccacgccctccacgcccggccttccgagagcgagctcg

SEQ ID NO: 441113 - DNA, 122 bp, Homo sapiens
gatatggaatctgatcccataactagatagcaggttacaaaataaggatttgtatctctccgttccttattatactcaatgaccttagacagttttctagctaatagtatagtagttatcat

SEQ ID NO: 441114 - DNA, 122 bp, Homo sapiens
tcctgtttacttcaatccagcagatgtgtgtagagcagcaaccacgccgggctgggaccccgcggccgaggcgtctgctggaaggagtctctgaggtcaccaaccacgccgggctggggccc

SEQ ID NO: 441115 - DNA, 122 bp, Homo sapiens
agcctcctggggacaggcaggcagatgaggcagccggtgtggggcgagctcccaggcccacgttcccagccagcaggcctggcccttcgtgggtgctgggctccttacatgtgctggtggga

SEQ ID NO: 441116 - DNA, 122 bp, Homo sapiens
ctgggagggaggcgcctctgcttgtaagctctcaaggccgcgagtgagctgtaggcagtccgtctgtgtctttgtgaggcgcccgtgagattagccactgagcagaggtttaatttatgatg

SEQ ID NO: 441117 - DNA, 122 bp, Homo sapiens
acgaattaatagtcctttattagccggcgaccgagagacggctaacgctcaaaattctctcggccccgaggaaggaaggggcttgattaacttttataccttggtttaggaagggggcgggt

SEQ ID NO: 441118 - DNA, 122 bp, Homo sapiens
ctcttgcaactccgccactaagacgccttgggtcaccaggcccgggggaaaactcgtccccgtcccaggctctcgattcgggccgcagctcacgtcccgcgctcctccctgcgcgccgctct

SEQ ID NO: 441119 - DNA, 122 bp, Homo sapiens
agaagggagcagccaggaggcagagaaccagggtagggccacatcaatggtgcctgtggccgtgcccagcaggtgcaggtgttttcttctcccatgtcagtgctggtctctcaggggtggct

SEQ ID NO: 441120 - DNA, 122 bp, Homo sapiens
agctgggatctcttaggcaccaagaactactccaatgttggtaggaagcacatttcttcacggcagagtcacagcccttctctgtcattctgcaggcatctctggcagatcttgcatttaac

SEQ ID NO: 441121 - DNA, 122 bp, Homo sapiens
agttgataaccacatcctctggcgtgatccttctcttcagcatccccatcttgggatggtcgccacggccacggaacaagccaggcggctcaatcttgaagttgcctattttttcttggtga

SEQ ID NO: 441122 - DNA, 122 bp, Homo sapiens
tcgggagcggcgacgggaaggcagcaggaggtggtgcggggacccgaggcgcctcgtacccggccgggctgacgcggccccgctacacacaaagcgcttcagctgcacagggcgctattttc

SEQ ID NO: 441123 - DNA, 122 bp, Homo sapiens
tcctcggaggaacgcaaactcccctgcgtggaggaagtggtggagaagtaactgagcctgcgcttgagaccttctccacgcagcaggaagatcccaccgacccttcctggcctaatccttta

SEQ ID NO: 441124 - DNA, 122 bp, Homo sapiens
cggggccgcgcagcggcctctcgtctactgccaccatgaccgccaacggcacagccgaggcggtgcagatccagttcggcctcatcaactgcggcaacaagtacctgacggccgaggcgttc

SEQ ID NO: 441125 - DNA, 122 bp, Homo sapiens
gctgggggaagacagcacaaccagatctccatttatccgctgctaaacctccgccaggcacgctgagcaccggccgtcaccatagcacttaatcctcgccacgacctcgcaggcggaatcct

SEQ ID NO: 441126 - DNA, 122 bp, Homo sapiens
cctacgagattctcacacattattcataggcatgattgggacactggcagtggagcattgcgatcaaacacacacacacacacacacacatacacacacacacacacacacacacacccctt

SEQ ID NO: 441127 - DNA, 122 bp, Homo sapiens
ggggaggagagagggggaggggcgccgccctggccccgcccccccccgcccgcccgcccgcgctccgccgcctccggagctgcgtcccgtcctgtccagtcccgtccccggcgcggcccgcg

SEQ ID NO: 441128 - DNA, 122 bp, Homo sapiens
aggcatgagcccaaactggcagagcagtcccacagcaatgccccagggtctcctgatgtgcgaccacagcttccggatctccacggaacatcccaaagagaacatgagcagccccatcatca

SEQ ID NO: 441129 - DNA, 122 bp, Homo sapiens
ggaggcgctgggtatccgagcccaacctgcgtccctgcgagcccctccggctgttgcttgcgctcgggctccctaaaagccgcaaaccgatttcgcacagaaggcatttgcctctcgtttcg

SEQ ID NO: 441130 - DNA, 122 bp, Homo sapiens
tgggggcggtggtgaatggggcagtaaactcctgctcggtccatactctaacccaataaccgggaggcctggtgggtgtttaactgtgtcctgcccatgcaaagaccagtgtgtgtgtgttt

SEQ ID NO: 441131 - DNA, 122 bp, Homo sapiens
aaaatgatatgaaattcgaacttcaacatccataaataaaaatgcactggaacacagccacgctcacctgttggtgtatcgtctatgggaacttccaggctacaacagcagaggtgaggagt

SEQ ID NO: 441132 - DNA, 122 bp, Homo sapiens
ctgggggtcggggctcaggtgggatgggagcagggctgcggggtctttaccgtccggctccgcgggccaccaccgccgttccgtgcggctcgggttcctccactattgtttccggccgcagc

SEQ ID NO: 441133 - DNA, 122 bp, Homo sapiens
ggcaacttgattcctcacatggtactatatactaagacaccctacactcccagttttacacgtggtagttctagcacgttccttcatttaaggagtctcttgaattccaaaatttccagatt

SEQ ID NO: 441134 - DNA, 122 bp, Homo sapiens
acaggtaaaatattgtctgcgtttcactttgaaggaaaagcgtggtgggggggaggggggcgggtgaagaaaggcacagttaactaccaggaaactaaagagactgagttaggcaagatgtt

SEQ ID NO: 441135 - DNA, 122 bp, Homo sapiens
acacgtagtagagagccgatggtatttatacacacacacgcacctgtgtgcaggcacatgcgctgacataaaggaaaggacgtttttgtgaagattaagctagggatattatcagagctaag

SEQ ID NO: 441136 - DNA, 122 bp, Homo sapiens
gatatatacatagaaattaaccttgctaggacttgatagttctttggaatctagggcccccgcacttgaccttcatattgtactgtctcccgaagaacaatacatgtatcttgtggaccatg

SEQ ID NO: 441137 - DNA, 122 bp, Homo sapiens
ttctgtctcacagtatctgtgtgtacaatcccagttgtggcaagaggggcaggggtatcccgccagaagctaacagcccccaaataacaataatgtaatggagagtgtgaatggtaagaaaa

SEQ ID NO: 441138 - DNA, 122 bp, Homo sapiens
acacggcctcatccatgcggcctggcgtgctcagggccgtgggtgagttgctgtggctgccgtcggcctccacgccatcactctggccgcccaggctggggttcatgaggttgccggcggcg

SEQ ID NO: 441139 - DNA, 122 bp, Homo sapiens
ctgcaagaggactaacagccacactcagttggaaaggccgccaggctggtcaggggctggcgtttggtggacgggaggggaagaagcagaggctctgggcccagacagtctgcacctggtgg

SEQ ID NO: 441140 - DNA, 122 bp, Homo sapiens
ggccagcagagggcagcagagctgtgtccttgtcaggtcagcccaggtgtgggacagtcccgggatagagacgcaggctctccctcctgccttgcacagcggagacttgggaagtcccagct

SEQ ID NO: 441141 - DNA, 122 bp, Homo sapiens
gagtagtggaggtggcttgccgggtgagtggctcggggcggcgagggcgggggcgccaagcgtggaggtaactcccggccgcagctgaagccctcctactcctcctcctcctcctcctcctc

SEQ ID NO: 441142 - DNA, 122 bp, Homo sapiens
cgcctcctgacgatttttgccgaaggcaggcgagcgcttcggagcggactcgtttttttccgccagtcttggcggaagcctgagacgcaatagatggagactctccttttcgccttggcgta

SEQ ID NO: 441143 - DNA, 122 bp, Homo sapiens
ggagcaggcagagtgcgtggagctgctgctggccctgggcgagcctgcggaggagctgtgcgaggagttcctggcgcacgcccgcggccggctggagaaggagctgagaaacctggaggccg

SEQ ID NO: 441144 - DNA, 122 bp, Homo sapiens
agagcccacggcagctgagcggagggtctggcgcggtgacgctgcgcatccgggccgcgccgcgctcgccccgaccctaaaccctcacctgaaccctaaccccgctgggctcccggctcccc

SEQ ID NO: 441145 - DNA, 122 bp, Homo sapiens
ggggccagataagggaataaaagcaggttgcctgcgctagccaccgcagcttactgtggtcgtcttcctgacggtgtgttttgttctttccgctttttgcaataacagttgttgctgctgag

SEQ ID NO: 441146 - DNA, 122 bp, Homo sapiens
ttttcccatttcactgaggattggggtaaacttcactgatccacagtgaagagacaggtccgggctcagatgggcatttgggagcctctggcctggaggaaccagtcactcaagttctttcc

SEQ ID NO: 441147 - DNA, 122 bp, Homo sapiens
tctggacgggttgtttggaaattcaagggaagcttggggctccttccctggggactggctcgtcctccctcgcccttggtggcggtcgggggaagggggtgtctgccgcagctggagacgca

SEQ ID NO: 441148 - DNA, 122 bp, Homo sapiens
gactccccctgccaatctggtaatgacttcttagtgaccactgtctgctcgcagtactagcgcttgccttggaacgcggcaggccctgggatcaccgatgctccgccgcggtctgagatcgc

SEQ ID NO: 441149 - DNA, 122 bp, Homo sapiens
tgtcccgaatccctgcaggtcagtacctggaagattccataaagtcggggtgcttgagggcgtagggccgagaccgtcgcgggtactgaggcgcctccgtcgtctctcccactcgccgcccg

SEQ ID NO: 441150 - DNA, 122 bp, Homo sapiens
accaggggtgccaagggtcccctgggccacacacatgcccggtgagggggctctttcgcccgtgcgttgggacctctgcctcgccatttgtgttttccttctacaacagagctgcctcgacc

SEQ ID NO: 441151 - DNA, 122 bp, Homo sapiens
ctggcggccatggtgcggtggtgtgggaggagctgggcccgggctgggcactgagcccaccggagctgcaggcgtctgcagagccttgcaccgagtttccccgcgagggcgggcgggaggag

SEQ ID NO: 441152 - DNA, 122 bp, Homo sapiens
agctgggagccgggagcccagagttcggaacctagagttcggagccggctagggagccggcgttgtcgcggcgaggaggtgggcgcgctggagcaggagcggggccggaactggagccgagg

SEQ ID NO: 441153 - DNA, 122 bp, Homo sapiens
agctcctcctctcagttgtcccggctgtggaatcatgcgcctctggacccctagaaggaacgttctagtgcattcagggttatgtgcagggtgagcgcttctcacgcccaacagcacctata

SEQ ID NO: 441154 - DNA, 122 bp, Homo sapiens
cttcttgctggcaaggggcgtggcagaagcgcgggctgccgcaggtggcagatgggtgtccggagcagctgtggcccgccacatccgggatgcgcaggtccctggcttctgcggggacctag

SEQ ID NO: 441155 - DNA, 122 bp, Homo sapiens
caggattgcttaataaccttccttgctacatctccatcttaaagagaaaaaaaggatacacgagagaagagcctgggtatctagaggttatatataagtctaatggtcaatttcagtctaat

SEQ ID NO: 441156 - DNA, 122 bp, Homo sapiens
atgaagcaatacaaagcctgtgcccaacgctcagtctaggaaagtgggtgatcaccccggcgtccaccctccctccacttcgcaggctgccgtctctggacctcgtgtgccttccccgtggc

SEQ ID NO: 441157 - DNA, 122 bp, Homo sapiens
cttctgctgctcggcggccaccaggcgctgcaactccgcttcatcggcttcgcccagctccgccattgttcgcctcaggctcgccaccttccgacagctgtgtttgcgcatgcgcgacgggt

SEQ ID NO: 441158 - DNA, 122 bp, Homo sapiens
acccccttgccatcagaggcccagagcgcggtccttgtgctgctgagctgtgtttggggccgcctgtgggctgtggccgcctgtcctcatcttctccccttttctccttggcttttcatcct

SEQ ID NO: 441159 - DNA, 122 bp, Homo sapiens
aatttaccactcttttccgcagcaagattgaattatgtagatgaagtacagtcaactgaacggtgactgaatgattgagcaaccttggatgccaacgcccatgaccctgaaatgtactgttg

SEQ ID NO: 441160 - DNA, 122 bp, Homo sapiens
tgaggagcgcctctgcccagctgcccaactgaggggatgtgaggagcgcctctgcccggccgccacaccgcgtgggatgtgaggagtgcctctgcccagctgcccaactgggaagtgaggag

SEQ ID NO: 441161 - DNA, 122 bp, Homo sapiens
cgaggcgctccctggtgctccccgcgcagccatggctcagcacttctccctggccgcctgcgacgtggtcggattcgacctggaccacactctgtgtcgctacaacctgcccgagagcgccc

SEQ ID NO: 441162 - DNA, 122 bp, Homo sapiens
ccgcccggccccggctccccgggcccgacgcccgactccgctcccgctcggccccgctcccggccccggccagcacagcgctctccgcgcccccagcaccagcccgctccgctccactccgc

SEQ ID NO: 441163 - DNA, 122 bp, Homo sapiens
actggcgctgcccagccacctggtcaaagcccagcaccctgaagcagatggcggcagctgcggctgcgcacccaggttcaggtatgcatcgcgcgtcctctcaaacactagggcgccccggg

SEQ ID NO: 441164 - DNA, 122 bp, Homo sapiens
tttgaaatgttttcaaattttctatgctcatattttactctggtgagctcttgtgtttaccgaaaatgcatccaggcctctggctgaaagagtccaaagggatttctggaactaatggtatg

SEQ ID NO: 441165 - DNA, 122 bp, Homo sapiens
ccctgcacctggcccgtcccgttgcctgccctcttaggaacacacgccccgtttagcccccgagaatgccaccctggcagtccccggccaccagggagaggggcagacactgaccgtggccc

SEQ ID NO: 441166 - DNA, 122 bp, Homo sapiens
gagcacagcctgaacccaaggctggttttgaggtggcagttaattactagcccggaaagccgaagccccggagccgatgtctgggctgacagggttccctcctcagcctcggggcagtcaga

SEQ ID NO: 441167 - DNA, 122 bp, Homo sapiens
atatggacatctttgctggtggggcagagggacattattcaacccatcacatttggaaagcgttatctaattggccacattttaaacgtggtggcttgcgtttcctttagtaccagggtaca

SEQ ID NO: 441168 - DNA, 122 bp, Homo sapiens
tgagcgccacctctcgggaagccaatttgctcgcgaacgaaggaagtgagtcagagaacccgggggtggagagaagaaagcaagcagctaaccggaaaggtctgaaaaagctagcgccggaa

SEQ ID NO: 441169 - DNA, 122 bp, Homo sapiens
ggtaatcattttaaaggccacggccaacaccaccagcattacaattacactcagcagtctcgtggcaaaggacaaaggacgcaatggcacaatgtagtttgattgagccaaggacatagacc

SEQ ID NO: 441170 - DNA, 122 bp, Homo sapiens
ggacacaagtacatagttgttattaaagccattgactagatgattttatcaagggatcctcgtatagagaagagagatctgcagactgagcattatcgtcaagatgattataggtggcacag

SEQ ID NO: 441171 - DNA, 122 bp, Homo sapiens
gtttctgacatacacagactaatgataatctttgggaaatttgggtctaccataaatactcgctgtccctctcagcttttttaatcaacttcatgaagattttataaatgacttctttctca

SEQ ID NO: 441172 - DNA, 122 bp, Homo sapiens
ctcagccccaagagatgcgagctgctcggggaccgccctgagtttctgagagtcctggggcgatggcacctgggtcctgtgcagatggcactggggagtctcgaaggcttcgactcgggctg

SEQ ID NO: 441173 - DNA, 122 bp, Homo sapiens
tggttgatctctcatttcctttttactagctttattatgtggtttcctatacacaattgccgatttagcattctgttcagctactgacaagcccttctctagggccagtgaggaaattccgg

SEQ ID NO: 441174 - DNA, 122 bp, Homo sapiens
aacagaaccagccacttgtctcccagcctcattacagacccacattaaaggaaccaaagccgatacattccggcagtctgcttcatgaccaagcaagaatgctgtgatgttgcaatcccttg

SEQ ID NO: 441175 - DNA, 122 bp, Homo sapiens
ctcacggttttttcagtctacaatatttttacagatattcttacaaaagtgcaattttaacgttggtaaaatggtttctttctcaaatgtactagaaaaaaattcaattttaaatggaacta

SEQ ID NO: 441176 - DNA, 122 bp, Homo sapiens
tgcctgcctcctattctctcctgtcctcttaagcccagagtctacaacaaaattgtgtaccgcaattctcagagctctctaactttaacctttcccaccttccctagaacacatttttgggt

SEQ ID NO: 441177 - DNA, 122 bp, Homo sapiens
ccagagcctgcctgcctgccagggtactgggacgtcactctcaaagcggcgggacccagccgctgatcttgctgaggaggcccggtctcagaaaactgagcggctgcttctgcagaccctgc

SEQ ID NO: 441178 - DNA, 122 bp, Homo sapiens
gggccgtccatccctctagcatgcttctcacgacttgcatctttacccactagacttctgcgctgacccaggggctggagcgaatcccagaccagctcggctacctggtactgagtgaaggt

SEQ ID NO: 441179 - DNA, 122 bp, Homo sapiens
gggagggagctgagaacggcagcggggccaggcgagggttgcagggtgggcgggagctctcgggagaaaagcagaacaccagcggaggcttgtggcagggaacccggagccccgcctgaccc

SEQ ID NO: 441180 - DNA, 122 bp, Homo sapiens
tggcccgatgcccgcttcccaacggccggaggccgctagactaatcggcttcgccctgcgcgctgtaatgcgcatgcgcacgcgcacaagttcctgggcccgcccatcttccggacttgggc

SEQ ID NO: 441181 - DNA, 122 bp, Homo sapiens
cagatgcatgcagcgcacggtggtgcggaagcacaggcagcggctcggacaccctgcgcccggcttctgggccaccacggccagcgtcccccaggcgcagaacagcacgagcgccaacaggc

SEQ ID NO: 441182 - DNA, 122 bp, Homo sapiens
gccagggagccacaggaagaagaggaggggaggaagggcggggctagcatctccctctagcgttgccagaggctaatgtaattgaaaaggcctcccaagctgtgtcctaaaacagctcccat

SEQ ID NO: 441183 - DNA, 122 bp, Homo sapiens
acccctgccctcaagcctcatcaagttatgcactgcccagtaggggaggcagaacgtgagcgcctaatacaagcgagctgcttgttatggtcaacaagcctaaccgtggaggggcggggaga

SEQ ID NO: 441184 - DNA, 122 bp, Homo sapiens
ccgcgaccgggagaaaacgcagagtcgtcaccggagagaagtcgactccctagcagcagtcgacgccagagggccgcccacctgttcgcccgtccccctgccctgttcacaatgcagcctgc

SEQ ID NO: 441185 - DNA, 122 bp, Homo sapiens
ccccgccgctcccgccgcagcaggagcagaacgcgcggccggagagagcggcggagccggcgcccagggagcccgcggggacaagggcagagacaccgctccccacccccagccctcgtccc

SEQ ID NO: 441186 - DNA, 122 bp, Homo sapiens
attcctggctgcaagtccctggccggcagggcggccactgagcggtcatcaagggcgcagcgctgagccctggcatggaaacgccgcctccgccacgcccacgtccccaggctcagctgcat

SEQ ID NO: 441187 - DNA, 122 bp, Homo sapiens
aagcactccaggcccgtgtgaaatggaggtgcacgagggaacagatggaaacagcgtcaacgggcagctgcagccacggtgagcacagaatgagctcatgcacaccctggtgctgcctatgc

SEQ ID NO: 441188 - DNA, 122 bp, Homo sapiens
agcaaactacaaagtggattgatgatgtcagaacagaaagaggaagtgatgttatcatcacgctagtaggaaatagaacagatcttgctgacaagaggcaagtgtcagttgaggagggagag

SEQ ID NO: 441189 - DNA, 122 bp, Homo sapiens
gatggtcaccttaaattcagccatctcatacccagaaagcatcagaacaccagcctgctccggggccagcaggtggccctccttgcacacctcattgtcggacagcagggtcaccacacctc

SEQ ID NO: 441190 - DNA, 122 bp, Homo sapiens
ggctctgcggggtgcggggagggaaactgagccgaggccgggtagagggcgggcgtggggcgagccagagacttctcaagaagcccagaggattctggggactggaaagcggccgagttctt

SEQ ID NO: 441191 - DNA, 122 bp, Homo sapiens
ccttgcttttgtgaatattactgaagttattattgaaaatgctcgagcgaggattcttgacggttgtctttgagcagaacaatattcagaagggaagctgtactttttttttttttttaaga

SEQ ID NO: 441192 - DNA, 122 bp, Homo sapiens
gaggtgagactgcccctaatggctgctcgtggtattgcaggacaacagccacaggggtgtcgaacactttctgttgttaaagtagtccttcaacctctaccttctgggtgccatgttgtctt

SEQ ID NO: 441193 - DNA, 122 bp, Homo sapiens
gcccctataagccaccaggtcgctccagtttggtgccagcgcctggagggagaggcgtggcgagggctgtgctgcctaggatccactgagtggctcttgctggcgtgtcagctgcgcgcgaa

SEQ ID NO: 441194 - DNA, 122 bp, Homo sapiens
gtgtgcctgcagacctttgagagtacccaggccctgctagagcacctgaagggccactcacgccgggtagcaggcagtgccaaggagaagaagcacccctgtgaccactgcgaccggcggtt

SEQ ID NO: 441195 - DNA, 122 bp, Homo sapiens
tcaccatccgtgtgttccagggcccgacgcagggcagcttcttctgcactgagtggaggacgggtaaacccaggggcagctggaggcagaagagtggaaggtagaatctgccatttgggaaa

SEQ ID NO: 441196 - DNA, 122 bp, Homo sapiens
aaactaaggcttggtcctgcaatatactcccagccctgaaacttcctaagacttgatgaacgtctgtccttacccctttactttccattcctctccttaactggaaatcaatcattagaaaa

SEQ ID NO: 441197 - DNA, 122 bp, Homo sapiens
tttcctgtacgttgtcatctttaaagacaagtcttcatccttcgggcggaaccgggtcctcgctcacagagcggtccaggcctcaggcctagcctctgcccctccctagcctgaggctccct

SEQ ID NO: 441198 - DNA, 122 bp, Homo sapiens
gtattttacttcccgtggcatcgactatgcctggattggtgtaaaatagtccactggatgcgaatgagtaagattttgatttctctgcaatcagtgactaaaagaaaatccaacattgttaa

SEQ ID NO: 441199 - DNA, 122 bp, Homo sapiens
atttctcctaacagcaccccacttcacttccagggactgcccttcaccacttgcacccagcgtaagtgggactgtccatcaggatgctccgtgggatgatcaactgacccatgctaagctaa

SEQ ID NO: 441200 - DNA, 122 bp, Homo sapiens
agctattcttcttaatgaaaactaattctcaacttaaaatgtatgcctgatcattttaagcggtagctatcaaagtatgcttggtgagggataacgagaatccaaatttccttcaattccaa

SEQ ID NO: 441201 - DNA, 122 bp, Homo sapiens
cgctcaggccgaggctagtgaagagcgacagggagtctagagccgccattgcagagacaccggaaactaaaagaaacttaggccccagtctgcaggtcggcattcactcgctgaccaatgag

SEQ ID NO: 441202 - DNA, 122 bp, Homo sapiens
caaaagtattcccaaaggtaaagtttgtttacgattaaattctcttaagctctccagcagcgtcaatggtgcaaacttcctaggcagtttccttctaaattagccaatgctacttttattca

SEQ ID NO: 441203 - DNA, 122 bp, Homo sapiens
ctaaaatgcaaaatgagatgcgggcactaacccaggggatgccacctctgctgctccagtcgtctctctcgaggctacttcttttgctttgttttaaaaactggccctctgccctctccacg

SEQ ID NO: 441204 - DNA, 122 bp, Homo sapiens
gctccagcttggtcctcgcgactccccaaaaccgtatataaatatatctcttataaaagccgagaggaagcaaatcagattccaggctgctgccaggtgttgtctcgtcttccgccgttgct

SEQ ID NO: 441205 - DNA, 122 bp, Homo sapiens
gggtcccggttgccttctgcaaaggtgaaggtcgtgccggccacgcgaggaaatctgcctcgctcacaactcacaggcacacatcaacactgccaaccgagggagcccaaaatcaccgcaag

SEQ ID NO: 441206 - DNA, 122 bp, Homo sapiens
ttacctcagggcagggggaaagtagcttggctattcccgacagatggacagttggtagaacggaccctcccacaggccctcatccccttgtgcagctgctggcctcgtagacaatcggctgt

SEQ ID NO: 441207 - DNA, 122 bp, Homo sapiens
cgcaaagcagcacatggagacgcttccacggtgaactctcccctcccgaggctcggcacacgttccacaccaagagcacgcgctctcatggacatgaggaccaggtgagatcagggataagg

SEQ ID NO: 441208 - DNA, 122 bp, Homo sapiens
actcagcaggtccagaccaggccacagctatggccacctgacttgtgaccagggttgctgcgtacagcatcgaaggaaggaagacttgactaggtggttcaggcacccttgggtgggcctgg

SEQ ID NO: 441209 - DNA, 122 bp, Homo sapiens
caccattctgctttctgcctctatgggaccactctccggacctcagatgactgaatcgcacggtgcttgtcctttctggactggcttgtttcactcagtgtaatatcctcaaggtccatccg

SEQ ID NO: 441210 - DNA, 122 bp, Homo sapiens
ctgcacggggctgcgtggaaagagcgccgagcggtggcgtcgttgtcgccccctcctcgtcgggaagaatcgtttggtctcctgccgtgcccggttcgtattccctactccctgccacgagc

SEQ ID NO: 441211 - DNA, 122 bp, Homo sapiens
gccggggtggggccagcgcaacggccgagcctgcgcagccagccggctccgggggccccgcgcactacaagtcccagaaggcagctctccgcggggcgggcagtcgccttatctgcttctgg

SEQ ID NO: 441212 - DNA, 122 bp, Homo sapiens
gcttctcgcctgccggcttgaaaggccaagccgaagccccaccctccctccgcgccccgccgtgggggaagcccacccaggcactctgctcaacctgcctgcggcaggaggcgtccgcgtag

SEQ ID NO: 441213 - DNA, 122 bp, Homo sapiens
tcaccacggccgcggcctagagaagaggccagacgcacaatgaaacctgctgcacgttctcgaagtcaggggcccagatctgcccgtccccaggacacgccatcacccctctacctcggctc

SEQ ID NO: 441214 - DNA, 122 bp, Homo sapiens
accagcccaggcaggtggactgatgctcagtcctggaccagctccccttgaaggacctaacggacttaagacacccagggtggttgctcctctaatcacggagcccctgactctgacccaac

SEQ ID NO: 441215 - DNA, 122 bp, Homo sapiens
aagacatggacttgactgtggattttcattctcaagaccactgcaaacctcgcgtctttgcgaaaacccttcctgactccctcccacgcatctccgacctccccttgggtccaggcaggctc

SEQ ID NO: 441216 - DNA, 122 bp, Homo sapiens
tcgccagaaaaagcgaccttgtctgatggcctctttccgtctgggtttcttctccctcgtcgtcgtcctcttcctcctcctttctctcgagctgattctctttcattgctatgacctcattg

SEQ ID NO: 441217 - DNA, 122 bp, Homo sapiens
gcttgatcacatcttaggagagaccttaagccaaagacctgtctaagctgtgtcccaactcgtgacctatgaaaactatgtttatggttttttggtgtttttttttttttaaaggtctcact

SEQ ID NO: 441218 - DNA, 122 bp, Homo sapiens
cctcaatggaaacgatgtggtgtccgggtaccatggccaggcccagcacacggggctccccggcagagaaggaatctggaaagaaggatcagagcatcaggaaagtaggccagaatcagtcc

SEQ ID NO: 441219 - DNA, 122 bp, Homo sapiens
tacctatatatctatgtacacaaagacctgtgttagatcatgtgaccatggagaaagtcacgaaaggatccatgttaagctgctggttacagcggattaaggggaagatggggcaaggccat

SEQ ID NO: 441220 - DNA, 122 bp, Homo sapiens
aaaaagaaatttctgtctaaagtcagtcagaacacccccagactccacactggtgacgtccgaatccccccggacaccggtgtggcctcagtccttcctcccagctggttcgctcagctctt

SEQ ID NO: 441221 - DNA, 122 bp, Homo sapiens
cccaggagaacaaccctttaccgaggctcctctgggagggcggggggagccagaagggagcgggaggagtcatttggttttgttgtaagaggacagcctgtaaaaatgctaagaagtggata

SEQ ID NO: 441222 - DNA, 122 bp, Homo sapiens
tgaacgcggcggtggtgaggcggacgcaggaggcgctggggaaagtgattcggaggccgccgctgaccgagaagctgctgagcaagcccccgttccgctacctgcacgacatcatcacggag

SEQ ID NO: 441223 - DNA, 122 bp, Homo sapiens
ttgatcaagttcttttatatcaaataacagagcttggcatttggttgcttgctcataactcggcagtaagcatttttaagcatgaagttattctttggttgaattttattcttgatatgggg

SEQ ID NO: 441224 - DNA, 122 bp, Homo sapiens
ctggccaccatgaactttgatgttataaagggcaagccagtataagtcctgtggtctcagcgcgatctatcgctgcgcaaaagtggagtgggcaacgtattcgttaaaaaccaggacaaatc

SEQ ID NO: 441225 - DNA, 122 bp, Homo sapiens
atttttaaaaaacctatggccttaacagctctctttaatcagctcaggaatttaaatctccgctaaactttaacacattatcttgagttatttaattacaaagggcatagtgtaatacattg

SEQ ID NO: 441226 - DNA, 122 bp, Homo sapiens
gcggacgcagccagcacccgcagccagcacccgcacactcccacccataccccggcagcccgccaagactctctggcccgcacctctatggtaggaaacccagaaaacaggaagtggcctcg

SEQ ID NO: 441227 - DNA, 122 bp, Homo sapiens
gtttaggtcccagaagagcccctgggccccctgcagaactgtccaggaaaccgtcatcctcgctgtcaccgcctgagccctcttcctcctgttcgctgcctgctgggtctcctgctgatgcc

SEQ ID NO: 441228 - DNA, 122 bp, Homo sapiens
gctccttagccctgtcagtggggacgtgcatgcttgtccctttggcgggagtgttggtgacggggtaggcatagggggtgagagtgctgataagaaggatgaggagaatgagctggatcagg

SEQ ID NO: 441229 - DNA, 122 bp, Homo sapiens
aagaccggtccaattgatcactggggaacagggcaataacctcccgcggaggctgggacgcgggcacggagctctgcccatatgagcagcgcagggatgggacactgggtgcccatcccagc

SEQ ID NO: 441230 - DNA, 122 bp, Homo sapiens
gctcccgcgggccctgggccgcagcggtagcgacaggaagcgccagcaggggaggtggctcgcgcgcaacacgtgaccccactggccggcggccggcagtgcgcatgtgcacggctacgcgg

SEQ ID NO: 441231 - DNA, 122 bp, Homo sapiens
gctaggattagaagcgtgagccaccacacctggccattcttcctaccttttgctcttagccgagaatggatgttatttatcaatctgcagggaagagaggttatttctggttttcatgtcac

SEQ ID NO: 441232 - DNA, 122 bp, Homo sapiens
agagaaaagcataacaaagttatttgatcatagctttatgtgatatgggaatcttcagaacgaagacccaaagatacaggggagctatctgatttttgtttaggtttgatgaagcagggaca

SEQ ID NO: 441233 - DNA, 122 bp, Homo sapiens
tttccccctcttccgcctacacccgctgcgtctcctggtgtctcgttcctttccctttaccggagtcgattgcctcactgcatgtgtattcgtgagttcgcggttgaacaactgttccttta

SEQ ID NO: 441234 - DNA, 122 bp, Homo sapiens
cctgaggccgccgctagccggagcatcaccatgaagttcaatcccttcgtgaacttggaccgcagcaaaaaccgcaaacgtcacttccatgcccccttgcacgtgcaccggaagatcatgtc

SEQ ID NO: 441235 - DNA, 122 bp, Homo sapiens
aagcttagactaggtgtcccttctcctggtcaagagcgtttcccttctttatcttgcaggcgcagtgtctgctagaggctacaagaaagaaagaggaaaggtgggggctcattggtggggct

SEQ ID NO: 441236 - DNA, 122 bp, Homo sapiens
aaccaccccacaaggcagaaactttatcaaaatctggcactacaacactggccctcatcacgccgccacaaattgcgagggatagaagaaagctgcaaagtcacgttaaaaggaagcctagt

SEQ ID NO: 441237 - DNA, 122 bp, Homo sapiens
gcatatatcggcttctctctctgccgttgtgtttctctggggttatctttccctctactccgcccggacacgccctctatctcttcctcccaccctgtcccagtctagtacctggggtgggg

SEQ ID NO: 441238 - DNA, 122 bp, Homo sapiens
ggccccgaggtgtgggaagacatcaagtaagtggccggctaccctggctgtggcccaggtcggcgcccagtgtgggaggccccccgcgcctcgcctggtcctcagcctgctggccgggtcgc

SEQ ID NO: 441239 - DNA, 122 bp, Homo sapiens
gctaggagattgtagaggatttctacacttgcatagaaatgagaacctggagcagagttccggtgttattgagcagcaagaatgagagcagagggggaagcaaaggtggcacattgattata

SEQ ID NO: 441240 - DNA, 122 bp, Homo sapiens
cagcacaggttattactcaccaaaggtcagtaccggttactagtcacccacggtcagcaccggttactggtcacccgcggtcagcaccggttactggtcacccgcggtcagcacgggttact

SEQ ID NO: 441241 - DNA, 122 bp, Homo sapiens
ctaggtgttctttatatttatatatgtgtgcagagggcacgggcccctgcccatcttgcccggcactcatctcttgccctcccgctccccacacccgagtgccactcgcccgaagctcccag

SEQ ID NO: 441242 - DNA, 122 bp, Homo sapiens
gcctcggcctccccaagtgctggggttacaggcgcgcccgaccccgatacttttaaataacgacacgttgtgaacaacaccacagtccctacgcctctggatggtgtctccggatagatcca

SEQ ID NO: 441243 - DNA, 122 bp, Homo sapiens
cactttaaggtagatgaccgtctccctcgactgtgagcccctagggttgtatactcacctcgcatgcaagtttgaggattaagcgacataagctaagtaaaatgactggttggtgcttaata

SEQ ID NO: 441244 - DNA, 122 bp, Homo sapiens
tcaaaggaacagagtggcagcagtaccaatggcagcaatggcagtgagtcttccaagaatcgcacagtctctggtgggcagtatgttgtggctgccgctcccaacttacagaaccagcaagt

SEQ ID NO: 441245 - DNA, 122 bp, Homo sapiens
acataaatttgtacacatttttgactattactctgccttttgtaagttgattttttgcagcgaaacttcagagggccccttggcacctacagtagaatgtcccttaattcagatttgtctga

SEQ ID NO: 441246 - DNA, 122 bp, Homo sapiens
ggccgtggggcggggcggggcggagcggcggcggttgagctgctggctgagactctggggcggaaacggagtggggcggctggggaggcgaggggcgggccggggcggagaccgggaggctt

SEQ ID NO: 441247 - DNA, 122 bp, Homo sapiens
ggtgtcgctggggcggtgccgctggggcggggcctgcggggtggggctgacggcacggggcggggcctcggggaccccggcaagcccgcgcacttggcaggagctgtagctaccgccgtccg

SEQ ID NO: 441248 - DNA, 122 bp, Homo sapiens
tgcccgtgattggctgctcgtactatttacgtcctttcgatgttgcgtcatgcagtgcgccggaggaactgtgctctttgaggccgacgctaggggcccggaagggaaactgcgaggcgaag

SEQ ID NO: 441249 - DNA, 122 bp, Homo sapiens
ctccgatgtctatttgcaggcccttaaaggtgacagtgcattgcaaggagtgggggccctcgggaaaactgaagcagaggtggccccacccctcagctgagagcgagcttcagcaaccaggg

SEQ ID NO: 441250 - DNA, 122 bp, Homo sapiens
gaataattcccccaggatgttcttctgatgtagcgaatgagaggacgagcctatttgtctcgtagacgaagctggaaatttcagctcaagggttcaggctcctccctgtgcatcctttagaa

SEQ ID NO: 441251 - DNA, 122 bp, Homo sapiens
tcacagtccccagtcaccatctcctaaaaaccagttcttccggccaggcgcagtggctcacgcctataatcccagcactttgggagaccgaggtgagtggatcacaaggtcaggagttcgag

SEQ ID NO: 441252 - DNA, 122 bp, Homo sapiens
gaaagtccgcacggcctatctgtcatcccgcattatcaggaagacgcgccacttccatgccgggctgcaaggctccagcaaattgttatttttatgggagatgataaaggaaatgctacctt

SEQ ID NO: 441253 - DNA, 122 bp, Homo sapiens
tgtcaccatttttctgacggagtccaacaagagcgtgctgcagttccaaaacgtgaggcgcgtggtccagatcttccgaatcatgcgcatcctcaggatcctgaaactcgccaggcattcga

SEQ ID NO: 441254 - DNA, 122 bp, Homo sapiens
ctcctggttctgtagctgcgggacgcacggacggatggacccgggtggggggagcggagccgcgaggcaggggaagggccgggagaaggcgggtagaggactgcccaatccagggcggggct

SEQ ID NO: 441255 - DNA, 122 bp, Homo sapiens
tttgataagttattgctcaattccccttaagtggctgtttcctcatatcctcatcaacaccgtgttatcaaactttttgatctttgccaatctgagaggtgaaaaatgttatctccaagtgg

SEQ ID NO: 441256 - DNA, 122 bp, Homo sapiens
gttgcaatgttccccagcgccaaacagctcccgccttccccccaagcagaacccgacactcgaagaagggcttgctcctccagggaccccctgataagaaaagtggggaccacggcccgctc

SEQ ID NO: 441257 - DNA, 122 bp, Homo sapiens
ccaaagcgcgaggaccttattgtcctcctcccccatcctccaaccagcccacaggacagccgcgttaccatgacgaccgggctcctagaagctgcagtcaaggacctggttgccatggtttc

SEQ ID NO: 441258 - DNA, 122 bp, Homo sapiens
atatgactagtgctgacatcagtgagcgtttatttagcatctactatgtgtcaggtactccgcagagcaatttttattaaatacttgaaaaagttcttcgaggcagagtcaccaaagtcccc

SEQ ID NO: 441259 - DNA, 122 bp, Homo sapiens
gtcatctagacggcctttgactgacaccatctctccgtgtggaggagccgctggggtgcacggggcaggtgtcgtccgtttcaaaggtaaaataacccagctgcagacctccagaggccgac

SEQ ID NO: 441260 - DNA, 122 bp, Homo sapiens
tggccaagatggtgaaaccccgtctctactaaaaatacaaaaattagccaggcgtggtggcgagcgcctataatcccagctactcaggaggctgaagcagggaattgcttgaacccttgggc

SEQ ID NO: 441261 - DNA, 122 bp, Homo sapiens
tgaagttgggctcgaacccaccaccaggccggacgtacttgagggaattcagaatctcttcgttcttggcgttctcctacaggagagaagggcagctagaacccggggtcaagaggaggaga

SEQ ID NO: 441262 - DNA, 122 bp, Homo sapiens
agttaaaaataaaataaccggatatgtaacattattgcaatatggggggaaaaatctgttcgcataaggaccacggaatcatgcataatgttttaaaattttgctggatgttataatattgt

SEQ ID NO: 441263 - DNA, 122 bp, Homo sapiens
gttgggtatgagcagcgccctccgccctccgccctaagggttcgtggcccaccgctccttcgcagtccctgccgccaccgtccacgctctgcgttgtagagaagacagtgggtcggaagagc

SEQ ID NO: 441264 - DNA, 122 bp, Homo sapiens
tccttgcactctagcacgtgtagccctctgctcagcacggccccatccttatgcgatgcacgacagaagctcgccctgctggaactgctcctccagaagactgctgtttgcggcattcattt

SEQ ID NO: 441265 - DNA, 122 bp, Homo sapiens
ttctttcagggagagcagatcacaggtgcagtcccaagggttatcctctagcaggatctccgcaataccagggatttgctccaagacctcctcatagggcagcgttttcagcctgttacccc

SEQ ID NO: 441266 - DNA, 122 bp, Homo sapiens
gctgccacggtgaagcacccctgcctagttctgaacagacgcagcacatcaaaggggagccggcagctcactcctgagcaaagcagcaggctagttcctcacagtcaaggaaaaccactggg

SEQ ID NO: 441267 - DNA, 122 bp, Homo sapiens
agtggctcatatctgtaatcccagcatgttgggaggccgaggcaggaggattccttgagccgaggagtttgagaccagtataggcaacacagggagacccagtctctacaaaaaataaaaaa

SEQ ID NO: 441268 - DNA, 122 bp, Homo sapiens
ccgcccctctcgtcacccgcccgtgggtgaccggtgtcttctccctggaggtctgtgagccgtctccctgtctttgatggcctgtgttttttccactgaggcctgtttcggtttggattttt

SEQ ID NO: 441269 - DNA, 122 bp, Homo sapiens
tgagtccgccaatgctcccagctgaataaagccctttccttccataactcggtgtctgagcggttcttgtctgtggctcgtccggctacaaacccacaagtggatagaaaataacctaatcc

SEQ ID NO: 441270 - DNA, 122 bp, Homo sapiens
cgggatgggtgtgtacctgtctttcaagtgaggcccactgccccatccaccccatcatctcgcccaccacggattgaagaatcagtcattaaaattgacttgttcaggaataggtacccagc

SEQ ID NO: 441271 - DNA, 122 bp, Homo sapiens
gagccatcgctgcgtctgagactgggacccggaagtaaacaggccggacgtgacgcaagccgctcggcctagggatggtggctggccgggttgtcatggaaaccgctcaggagcagggagct

SEQ ID NO: 441272 - DNA, 122 bp, Homo sapiens
tcccaccggtggatttacgagcagtctgcttggttcgggccattttctttcacccaacgccgaagttttaggccacttctccgacctccgcgctgcttccgctgcccgaggaagagccgcag

SEQ ID NO: 441273 - DNA, 122 bp, Homo sapiens
cctggagagctgtcgttcatcgctggaggagcgctgataggctcgccctgtggaggaaggcgggatcttttgggcctaccgctgcccatactaatagagcaactgtctctcttatctgggaa

SEQ ID NO: 441274 - DNA, 122 bp, Homo sapiens
ggaggccgccgggaagtaggacgctattcccgagtccggtcacaagatggcggactggtccggcagaagacgagcagggacgaggaagcggggctaatgaacctgagatacagttagaagac

SEQ ID NO: 441275 - DNA, 122 bp, Homo sapiens
gacccttgtggcccgggtcgcccgcagcctcatcttggcaggatttacgccgccactggccgaaggcaagaagtggaaggaatcggccgtctcccccagcgtcccagctccggctgccctgg

SEQ ID NO: 441276 - DNA, 122 bp, Homo sapiens
gctcccagcctcttcagtcataggacttgatttggaaacccatcaccaccctccctgccccgctctggctgtcaggttgtcagggctcctctctcctctctggcatagcccagaactgagta

SEQ ID NO: 441277 - DNA, 122 bp, Homo sapiens
agacaaaccaggaatcttggatttgcgcgctttggtgctgacaggctttttcggccccagcgggctgccgtagcagagaagagcactgattggctgaggcagaaaagtgcccctgcctcggc

SEQ ID NO: 441278 - DNA, 122 bp, Homo sapiens
accagcctggctaacgtggtgaaacccccgtctctactaaaaatacaaaaattagccgggcgtggtggcgcacgcctataatccagctattcaggaagcggaagcaggagagtcgcttgaac

SEQ ID NO: 441279 - DNA, 122 bp, Homo sapiens
cgtcgggcccccgtccccaccttccccgcgggcgtccgggcccctctcctcacctccctgcggacagctcctaggccagtcgagcgccgatttatcagcccctctgaggaccgccaagcctg

SEQ ID NO: 441280 - DNA, 122 bp, Homo sapiens
ttctctggacacttggtcatggttggtgagcatttgtcagacgtgaatgaaactcagtgccgggcccaaaggaagagagcaactagcaaatcgtaagaaaaaaagacatcctccatccctac

SEQ ID NO: 441281 - DNA, 122 bp, Homo sapiens
actgcagatatatcgttaggtaaactttttaactttgaaagtaaatgtaattaaactctacgaatcctaggtggaaaaggagaagcttaattaatggttcaaggtgcattgaccctggcact

SEQ ID NO: 441282 - DNA, 122 bp, Homo sapiens
aaggtcatgacctcatgggcagtgtcaccctggaccactttggggaggtgccaggtggcccggctagagccagccagggccgtgaagtccagtggcaggtgtttgtccccagtgctgagagc

SEQ ID NO: 441283 - DNA, 122 bp, Homo sapiens
gataacttccacttgagcagcctgagacatcaagggcgggggcactttccccctcgactgcgcctaccgcagcctttctgagtttcttcctagcgaggccgagagggtctttgaggaaaatc

SEQ ID NO: 441284 - DNA, 122 bp, Homo sapiens
ctccttgggttgaggctgaccttatgattgccttcatcgctgggacagtagcaagcctgacgcaagcagagacttgaaaggagtttatgcatggggttgcaatgatgctcttcataccctga

SEQ ID NO: 441285 - DNA, 122 bp, Homo sapiens
cacatctttcatctgttgcttgatgtcccatgtctccctaaaatgaataaaaccaagctgcgccccggccgcactgggtacacgtcggccggacctcctgagactgtcaggggcgcgcagcc

SEQ ID NO: 441286 - DNA, 122 bp, Homo sapiens
ctgaggaggtgagcgctgcctgcaacgccctacaccacagccagcccaggaccgactgatcgctcagctcccgccaactttaataagtatagccaccgcctgggtgtagactcctgcaaaat

SEQ ID NO: 441287 - DNA, 122 bp, Homo sapiens
tggctctgggatttgaatcagatttgcctgattccaaagcatgttttactccaaagtatacgtcacaaaatttgggcatttctccaaatgttaccagcttcttaaaaacacattgtatattc

SEQ ID NO: 441288 - DNA, 122 bp, Homo sapiens
catcttctgtttgctgctttaattgggtgcggttaaaaggccacgtccctaggcgttcaccggctttcttgccatctgctgcatgaaaactgactttgccgaaaaaattaacaaagaagagc

SEQ ID NO: 441289 - DNA, 122 bp, Homo sapiens
agaagtttaccttctaccacagcgtccacagtacccggcttggcctcaggcctcgggtcccgacgtcctccccagagcacaaacctactacaggttaggccggaggccgccacagcccaggg

SEQ ID NO: 441290 - DNA, 122 bp, Homo sapiens
acccccacccccaccccccgcttcaatccaaactcatcctagagtagaataataattttacgcctaaaacccaaaagactcacagacaaggagagaaatgaagaagctgagtagattataga

SEQ ID NO: 441291 - DNA, 122 bp, Homo sapiens
tttgctctgtgacctagtttgtggccagttgtcctgtggtcaatattccacatgtgtttgcgggggataaaagtgtgtcttatgtaataattgggtgcaatgatcttttttttttttttttt

SEQ ID NO: 441292 - DNA, 122 bp, Homo sapiens
acaaagcaactaggggtttcagagggagtacacgtaaggggcaaaagcagcaacggaatacgacaacggaataagcatgaatacgacctggctacctgaaggaggtaggacggggaaccgag

SEQ ID NO: 441293 - DNA, 122 bp, Homo sapiens
tcccccacgaatccagaactgagataaaggacgcccagtagggagtctgggctccggccccggggcccacgtcacgttgagccctgtgcctcctggtcagtcactctggggaaaaaacagga

SEQ ID NO: 441294 - DNA, 122 bp, Homo sapiens
gtgcactcctgtggcatcggggggcggggggcaagcatcacagtcatagggagtgtgaggcgcccagaatgggggctccacagtcaggcctgcaccccggctgcaggataccagatcctgtg

SEQ ID NO: 441295 - DNA, 122 bp, Homo sapiens
ggctggggcgggcggatgacgaggcgcaggggcaagggtgggtctgcgaggcggcgggtccgggcgtcttaggctccggggctccctcgctggcggcggagcagggatggcgcgcccggggg

SEQ ID NO: 441296 - DNA, 122 bp, Homo sapiens
aagagaaaggaggcgtctgctcagaccagcaccggggcgagtgctgccacaggcaggatgcgggctccgcttcagctaagcaacaagtgttcccaagaatggatatggaggctgggcgcggt

SEQ ID NO: 441297 - DNA, 122 bp, Homo sapiens
tcacttgaaccctgcagcagggaaactttgtcgggatttttgcttacgctcgagagtgggcgagcctgagagagaaccacttgaaccatcttgtaccgtaccagggtgtacctacctcaaag

SEQ ID NO: 441298 - DNA, 122 bp, Homo sapiens
gaactgggggagagcggccggcgcggggccgggagaggaggaccgggccaggtgtgcgctcggaaggggcggatgcctttgcggccgcctgtacctgcctttctaaacaactgcggaagccc

SEQ ID NO: 441299 - DNA, 122 bp, Homo sapiens
tcttcatcactatcaagtaattgtgagatactacttcttttagttcgcctccaatcaactcgagatttctgctcaggcacgtgactcttagaatttctccttgtttcatgtcttctaacatg

SEQ ID NO: 441300 - DNA, 122 bp, Homo sapiens
ccctctgggcttcctctagtccctcgttcctcccctggacatctcctcacccctaacccccggcgtcctcaccgctcctcggagtcacccacccccgcgtcccctagtccgccccggcgtcc

SEQ ID NO: 441301 - DNA, 122 bp, Homo sapiens
tctgtgggcccaagggcaggtgacgccgggcaggggagctgtggggtgtgtcccagccatcgtcccctcgtgacagggaagtgggaagagatgttctgttttgctcacagcagaagccatca

SEQ ID NO: 441302 - DNA, 122 bp, Homo sapiens
aagaacttcttgatccaattgcgttccctgtactcttactgtatatccaggtatgtccatcggcatgggggcctggtcagctcatgtttttaacagtcttagagaaggaaactatggcacat

SEQ ID NO: 441303 - DNA, 122 bp, Homo sapiens
tccattttagatttatcttgacaaccgtttacactatttcccctatatcttcaagacgaccgggcttggtaaggagccagccaactattaaaaagattacattctcattttctaactatatt

SEQ ID NO: 441304 - DNA, 122 bp, Homo sapiens
ccgctggccgcggcgcctctgagcaacctgcagccatgctgcttgtcaaggttcccacggcgcgcgccgttgacgcaagcacaatcccatgtccccggcgctcgttttacgccatccaccaa

SEQ ID NO: 441305 - DNA, 122 bp, Homo sapiens
cccagacggctgggcctcagggtaggtaaccaagacagctcaatgcatctctccctcagccgtccctagcccctaaaaacagagctgggggtcccagtcctctgtgggacatggccctcttt

SEQ ID NO: 441306 - DNA, 122 bp, Homo sapiens
ttcgcgtgcgaacgcctcgcttgcccctgtgccagcggtccccagggctgtgaggatgagcgctgccaaacccctacacgaaagtttggttctgttccagaaactatggaggaaaacacgca

SEQ ID NO: 441307 - DNA, 122 bp, Homo sapiens
cccactccacacacagtccagacactctgcatccctcaatcatgcttctgagtctcctgtcgacagttgccacctccttcctgacacactgccccaggcggtgactgtgacaaggtgactcc

SEQ ID NO: 441308 - DNA, 122 bp, Homo sapiens
taacttacccaagatcacatgctagtaagtggcagtcatactctggggtgctgcagcccccgccatggtgccatagcccccacagtgccgagcctcctactggcagtggccaggcagggcgg

SEQ ID NO: 441309 - DNA, 122 bp, Homo sapiens
agcacaaggggaaacagtaccagggtcaggcccagggcctctgcttgcacacctactgagcgcccatccctgggcaggcaggcctagcagcctcggggtccggcctagagtcctccaggggt

SEQ ID NO: 441310 - DNA, 122 bp, Homo sapiens
tttattttttgagacggagtcttgttctgtcgcccaggctggagtgcagtggcatgatctcggctcactatagcacccggctcactatagcacccggctcactgcagcccctgactcccagg

SEQ ID NO: 441311 - DNA, 122 bp, Homo sapiens
tgcgggctccgggcgcgtgcacgagaaggggcggagtgaagcgtactctcaacacgcttgcgcagcagggctaagtgacgccaagcagtttgctgcacttaaccacaaccaacatggtggct

SEQ ID NO: 441312 - DNA, 122 bp, Homo sapiens
cctgacagtccatctacatgccaagcggcccgacgcagctccgccccgcccactcctcggcgcaccgccccgcgaccgagctccgccctcatctgcgcggcccctcaccttcccgccgggcc

SEQ ID NO: 441313 - DNA, 122 bp, Homo sapiens
ctggcagcgatggggtggtgggggccgcggggcctgggcggggctgggggcaacggggcgcgcccatgacccagccgcccggcaggccgtggagctgcggagcctgtggcgggagcacgcgt

SEQ ID NO: 441314 - DNA, 122 bp, Homo sapiens
ccgatggagcgcctcgcctagtgaatgctccagcaaagtggcgtgtgtctgtatggtgaacgtgtggttccgtgcctgcctttatgtcatgtcagggtgttgaaatagatgactgaatggtt

SEQ ID NO: 441315 - DNA, 122 bp, Homo sapiens
ccagtctgtagttctggaaggctcagagaggttaggtgacttttacagaataatagagctcgtcagggtttggctggcagtcaaacccaggtggtcaagtccaaatccaactcacagtgttg

SEQ ID NO: 441316 - DNA, 122 bp, Homo sapiens
tggtctaagttggagtccagtcccacatctgccccatccctcttttccctggtccctttccgctccaacatgctcctgtactttgcttaactgcaaccacgtgtgtctgggctccgaccaat

SEQ ID NO: 441317 - DNA, 122 bp, Homo sapiens
aaaaacccgctcggcctcgctactcttctccttcctctgaggtgcagaggcgcggtgggacgacaaggagttgcgagaaagggcagagctcactgaggaggcaacagagaaagtccgctaac

SEQ ID NO: 441318 - DNA, 122 bp, Homo sapiens
acactttggaaccggtgcctaagtggtgcagattgcaaaccccagctgggcagaggacagcgcgggaggggagtggaaggatgtctatctgggaaggccttgaacttgctctctccttacct

SEQ ID NO: 441319 - DNA, 122 bp, Homo sapiens
aatttctcaaatcttcaggtttttcactggtaaaatagggatagtgataacatcaatcttcgaaggctactgtaaagattaaaggagaaaagactatgcaaactgctcagcgcagagcctgt

SEQ ID NO: 441320 - DNA, 122 bp, Homo sapiens
aggacggctctgcagaggggtgggtgtgctggggagggagtgacggaggaaatggcatggcggagctgaaatttgggccgagtctgatggggcacccaccagtccccctagtgagaactcct

SEQ ID NO: 441321 - DNA, 122 bp, Homo sapiens
agtttcaggcttttatgaggaaagcgtttctgtgtagaaactggaagctgttcagggcatcggcagctgaaccctgctccgttggtcagcgttactatcatctcggatcatatggagctcat

SEQ ID NO: 441322 - DNA, 122 bp, Homo sapiens
attattaatgtaaatggtcatttgctggctccttaagcacatgcctagtctgtcttttaccgaagaagtaaatttctgcaagggtaaataataaaatgaaataaaataaatattattattac

SEQ ID NO: 441323 - DNA, 122 bp, Homo sapiens
ggcccgggcactgggaacccgaggagcaatccgtggggtggaggaggtcccgggagaaaacgccagggagtgcggcctttccaaatgagtgctgctccagcatgtgtacagccgtttccacg

SEQ ID NO: 441324 - DNA, 122 bp, Homo sapiens
catctgcttggctcctcagccagccgcgctccgggagccctgggggcgaggcggccgtggcgtcctccacgtctgtgtctccccgcacgtcagccgccccacgctgtctctggaagcttccg

SEQ ID NO: 441325 - DNA, 122 bp, Homo sapiens
tcctcctccagatctgggtcttggggaaccaggggtgttggcgctgggcaattaccacctcgcttcacgtatacccagtgtttctgtggcatgatgctagggggtgtgtaggtgggtctccg

SEQ ID NO: 441326 - DNA, 122 bp, Homo sapiens
ttacaaatgaaacccaaagtgctccgcaagcacagccagcgaaagcgaaaaactctgaaacggacaagatggctgccacctcttcgcgcctcttagtcccacccactcagggcggaggtctg

SEQ ID NO: 441327 - DNA, 122 bp, Homo sapiens
ctaataactagcaaatataacatgttaggccaaggagtagagataattaagagaactagtcgagaaggcattggctattaaaaaatggacaggatttatgcaaactctcatgaaaggtggga

SEQ ID NO: 441328 - DNA, 122 bp, Homo sapiens
cccaagcacatttgctgtgctcctcctaaggtaaataacagcatccactgtgctcagccacggcttaaagcccttctagattgcatacaactcaggcagggtcattctgactcactccctca

SEQ ID NO: 441329 - DNA, 122 bp, Homo sapiens
cttcaaagggcaagtatttttgccaattcaggttccccagtgactgaagatgttgaaatgcgtttcctgtgttgctccttttctgtgttgaccagctctgtaactcatgacacctgcagtct

SEQ ID NO: 441330 - DNA, 122 bp, Homo sapiens
agggctgttcctgcacccagggagccaacagaggagatcctgcaggggtttgcacagctccgaggtgcccggacccacctggtgaggccccaacatgctgactgggctgtttgtttttgatt

SEQ ID NO: 441331 - DNA, 122 bp, Homo sapiens
ttgatgcaaaaaggcaggccccagatgagggtgcagacaacattagatgtgtattttgggcggtggcatctgtaccagatggggaagaggacacacacacaccgctctgtgctgatggccac

SEQ ID NO: 441332 - DNA, 122 bp, Homo sapiens
cgtcccctgcctttccagtagcccggggtggctgtttaccttgcaaacagccttgcaatacgatcaaaacaggcgagacagccatgcagtaagggattgcgggatgtgctttgggtgtgaga

SEQ ID NO: 441333 - DNA, 122 bp, Homo sapiens
cgaggtgagctgggagacggtgatggtgagcagccacggcgcggtggtggtaaagtgtgacggccgtggcagcggcttccaagggaccaagctcctgcacgaagtgaggcggcggctgggct

SEQ ID NO: 441334 - DNA, 122 bp, Homo sapiens
cgctggcgctccgcgatgagcgtgcacttggcgcacaggcagtccttccagcgacagtagcgtttgtggcccttgagggccgacaccacgccatggttgcgacagcgcgcgcacttgggggt

SEQ ID NO: 441335 - DNA, 122 bp, Homo sapiens
aaggggcgggtcaggttagggggcggtgcttaatgggagctggtcttggggccgggcttccgcgtgcgttggcctggcggcgagagcgcgcggcgggggcgtgcccggcgggcggggcgggg

SEQ ID NO: 441336 - DNA, 122 bp, Homo sapiens
gaggcaggagacggtgcagtgccggagaacatatggcaagctggtggctgaaccttggtccgctaccagccccagggagagcaccggagcacggccccgacggcagccgcagcctcccgccg

SEQ ID NO: 441337 - DNA, 122 bp, Homo sapiens
aagaagcgggaggatgagaatgtcatctcccctgacactctggtgccggcagtcctgaaacgctcacctctgacgtccctgaaggtcagaggtggcaaccacagtgccaatagctcaccaaa

SEQ ID NO: 441338 - DNA, 122 bp, Homo sapiens
cacgcctcccccggaggctgtaactttgcctcgcttcgcgcctcctttctttggccgcaccgcgacccgtggccccgcccactcccctacgccaaccaatgagacggtcgtcccggcaagcc

SEQ ID NO: 441339 - DNA, 122 bp, Homo sapiens
gtgcgtcccgggccccggcagcccagcccaggcgctctggccaagtttgcgcgcggtctccgctgactctcgggttacctgagccggcaaccacgtcagcgccacatcatctgggcttttta

SEQ ID NO: 441340 - DNA, 122 bp, Homo sapiens
gttgctgggcagcttgttgttgtttctgctggacattctggctgaagactggcttcgcggcgagcagttttaataaaactcagatggccagcagccgccaatccctaccagctgcggcttga

SEQ ID NO: 441341 - DNA, 122 bp, Homo sapiens
cacggaaattggcgttttgacagttttctacgtttaggtgttttatacactttagggtaacgttatcatgtcattgcatagggtggaacttaaatagaaactggagatggctgcttcagcca

SEQ ID NO: 441342 - DNA, 122 bp, Homo sapiens
ggactggaattaaggagctgagaattgctcttgtccttgagtgtcactcacacatccctgcgtcagtgcagcctgcagaaaagccatctaacccaaggggacttaggtggagagagacccct

SEQ ID NO: 441343 - DNA, 122 bp, Homo sapiens
acacaagcagaaacagcaatactgctcaaagcgatgccattatttttcatgtaccctccccgacacacaacccatttaacattaaccttcccagcactctagtggatcacgaggtcaggagt

SEQ ID NO: 441344 - DNA, 122 bp, Homo sapiens
tctagtctcagcctcatctcctaccactctccttttatactgtgtttccaaccatgggcacgatttagaataatgttctgtttactcttctgtttactttttcaccagacattgtgctccct

SEQ ID NO: 441345 - DNA, 122 bp, Homo sapiens
gcccgcggagtccagcgaagtttggcggaacatggcggaagcgtctggggcacgcaggagcgcggggcggcggcggccggagcccgaggagctgtagcagccttagtcgccgccgccgcggg

SEQ ID NO: 441346 - DNA, 122 bp, Homo sapiens
gggtctcagctgtttaggctagtgccagccatgctccctctaatgcctaagtgagggttccgaggcctccacttcagcatctgggatactacaagggggacccaggaggagaaggggcccta

SEQ ID NO: 441347 - DNA, 122 bp, Homo sapiens
taggaccctccaagccaggtgcgggatataatctcgtggtgcatcgttttttaagcccgtcggaaaagcgcagtattcgggtgggagtgacccgattttccaggtgccgtccgtcacccctt

SEQ ID NO: 441348 - DNA, 122 bp, Homo sapiens
tcacttccatgtctcttcctctctggagatgccctctccagagagtctggttcgcccatccggcacctcctcgggctccctgtcctccgggaaccccgtgggccttctcacccctcccgtcc

SEQ ID NO: 441349 - DNA, 122 bp, Homo sapiens
aaataaaactctgctggtctctgaggatgcagaaacaagacattgtttttggtcttaagccgttcacagaatgcccgggggttacactttgcatttaagcacggacatataacttccacctt

SEQ ID NO: 441350 - DNA, 122 bp, Homo sapiens
ccatgacaagctgcttctgggggatgcgcctcgtctcactctaccgagtgtcattgaagccgatgccttcgaggggctgctccagctcatttattcagggcgtctccgcctgccactggatg

SEQ ID NO: 441351 - DNA, 122 bp, Homo sapiens
tgggtcctaccccacccacgggggagcctctcctccctcaagctggtccccagaagttggcgtacccacctttgctcaatctgtccaccagaagcggacgtccctccgaaccaagtccgcag

SEQ ID NO: 441352 - DNA, 122 bp, Homo sapiens
cggagagctgcgcgcaggcccttcgcgcgatctgccgtcatatcagcttatggcgccggtcgctgattggctggccgctccagcctcccggcccgcttgctggctgcccagctgctaggaca

SEQ ID NO: 441353 - DNA, 122 bp, Homo sapiens
gttgaaagtccagcctaacttactgtcacaagcctttaggaaactgtgtggtattcttttcggtctgccaacttgaattttagaaatgcatattttctataagttgtcgaacacttatagaa

SEQ ID NO: 441354 - DNA, 122 bp, Homo sapiens
gctggctgcgcacgcgcgccgcctcatttccggtgctctctctcgctgggtcgctcgggtcggcttcggtcgctaccgctcccgctctgccacccccgccaaccgccgctcgggcctccgtc

SEQ ID NO: 441355 - DNA, 122 bp, Homo sapiens
ggattcaccccaaactcaatactaacaattcaattaaaaaataggcagcaccaagcagcacgtggggggcagctacttctccagacagtggagagccaccagctcgtgcccgaggccttggc

SEQ ID NO: 441356 - DNA, 122 bp, Homo sapiens
ttgacagtcctgggaggcgacgggtagaggagagacgcggcagccgcggggccggggagacggtgggaggcccggcgtccatcatccactttattacttgatcaaactttaacattttcggg

SEQ ID NO: 441357 - DNA, 122 bp, Homo sapiens
taaagcccagaaccgcagagctagggcgaagcctttgtgacagtgggccgggccacacttcgtgggatacgtcctcaaaagaccgcagagtgatgacgaagcctttgtcaccgcgggccggg

SEQ ID NO: 441358 - DNA, 122 bp, Homo sapiens
agagccggctcctgtggggttttgggttaaaagcctgccaagattggtttcttggtgcctcgttgggccaggtctggagctctggcttctgggggtgaggctgggtgccggcatcctggctg

SEQ ID NO: 441359 - DNA, 122 bp, Homo sapiens
gcggagcgtttccctgggggtctgcccacttcctgggaggggcgccaggcctgggtggagcgctctgcggcagagcccagcaccttatacctatgtatgggatagaggtaaaatcttaaaaa

SEQ ID NO: 441360 - DNA, 122 bp, Homo sapiens
tatctgctctacagcactggtgattctgtaattattctagtgaggaccagctacataattcgtggggtccagtgcaaaatgaaaatgaggggtccccttgctccagaatgacggcatctgtt

SEQ ID NO: 441361 - DNA, 122 bp, Homo sapiens
ccttcatggtgggaggtgggcttttaccaggttccactacccccaaagtgtgtggggttccgggccctgggctttcagggcaggtggatccagggggctgccgaaggtcagcactccctgtc

SEQ ID NO: 441362 - DNA, 122 bp, Homo sapiens
cggaaccgtcctaatgggacgctgagacccagagggcgcccagggttttcccactgcggccggcctaactccgccgcagcagccgctcctggggccagggggccgggccccatagccagccg

SEQ ID NO: 441363 - DNA, 122 bp, Homo sapiens
tgactccgcacaccggggtgacttctcaggttctcggggtggcagctgcagtgatgacaccgcttcctggtggtcacgccgcgggcaggacgcgggaggccaggtccgtgcatcccgcgtgt

SEQ ID NO: 441364 - DNA, 122 bp, Homo sapiens
gccattcctgggagacacgggactcctctgatggctaactgtagctggaagactcctccacggccttgctcaactctccttagattgcctgtgctctaggatgcgtcaaacaaactttctct

SEQ ID NO: 441365 - DNA, 122 bp, Homo sapiens
gctgaaaggctcccggagctccgaggtgagctggaagtggactctcccggcctgatagtccggggagtcgcagtctttcgttgctgtgggaaggaggtcgcgttgcatcttgggaattgtag

SEQ ID NO: 441366 - DNA, 122 bp, Homo sapiens
tcacccctcccagagacctgttgctgcagctacccctcaggaatgcctgtagatggctgtcgcacagctggaaggctcgccccgagaagcggcttcaaggtagtgcctttgggggtgtggtc

SEQ ID NO: 441367 - DNA, 122 bp, Homo sapiens
agtgggaagtcttgcatcctgggtcagttttgtattctgagcatgaactgcctgagattccgctggcagttacagctttcttctgctgaagtctgcaggtgtgagacacaccatgtcagggg

SEQ ID NO: 441368 - DNA, 122 bp, Homo sapiens
gggctataaataacaggacagctgggaggcggccgttcttggcactcacgcgtgggtcggcggtggtatgcagctgctctccttcagagtacagcaggattctgccctatgaagtctgcttt

SEQ ID NO: 441369 - DNA, 122 bp, Homo sapiens
ccctccaggcgagagcagcgcgtcggaatctcggcccggggttgcctactgttcccggatcgcagtgcgaatccacaaaaagcagggaggcgaaaggaaacaaaagcccgggctctgcaccc

SEQ ID NO: 441370 - DNA, 122 bp, Homo sapiens
caaggtaggaggaaaattctgaggaacaccaaggaggaagtggcagctcttaaagaggggcggtgaggtaagactttacggaaaagttaacaatttaaattgaagggcacacagaaatgagc

SEQ ID NO: 441371 - DNA, 122 bp, Homo sapiens
acgcccggcctgcctggcagcgccagtgcgcgccgccagacgtgggccaggcgggccgggcgctgccctggcagcctccgtccgctgtggactccgaagcccctctcgctgtgtctgagaga

SEQ ID NO: 441372 - DNA, 122 bp, Homo sapiens
ctcagaaaaacaacaacataaaaacagactgatcatctgtagtttttgcacaactgatcacgccctccactatcttgttcggcggtctcggcggtctggaatcctcctaggccagcgaacct

SEQ ID NO: 441373 - DNA, 122 bp, Homo sapiens
tcttactcaggaaacctcttcagcgttgtactccagcattcaaaactgttccattataaacgtcttccacttctgttggaaagcttctgcatactcaagaggtataaagaagataggaagag

SEQ ID NO: 441374 - DNA, 122 bp, Homo sapiens
ctactgggccaaagggacggttgggagtttgctccaactgtccctggggcacgccttccccgcccagcaggggttggggaacgcgagctgggagtgtgagggaaagcgccacgccagtgggg

SEQ ID NO: 441375 - DNA, 122 bp, Homo sapiens
tctactgcttgccctctcacctcccagcggcttccgccgccccggccaagctgcacggcgcgtcccgggccctagacccccacccgccaggcaccagccccggcctgtcccctcgcgccgtc

SEQ ID NO: 441376 - DNA, 122 bp, Homo sapiens
gaaaccaggtgggtgggctgagcagtgggaaagaactgcaggctcagggtggggctggttcgttcctggggaacccagagcagagtgaggaaccagactctggatcttgctgacccagcagt

SEQ ID NO: 441377 - DNA, 122 bp, Homo sapiens
cacgcacgcacgcacgcacgcacgcacgcacgcacgctcttacgctgttgcggacagcagcgccctgcctactggcccatcagggggttgcgtgcgcagcctcctctgtttccgccctgaga

SEQ ID NO: 441378 - DNA, 122 bp, Homo sapiens
gctgcccagatttctgtcagatatgtctaagcacaggctttctcaaccagggctggctagcggccctcgggctttcagataaacactgattcttaaggaatttctcagcagcttggggagtg

SEQ ID NO: 441379 - DNA, 122 bp, Homo sapiens
tgcagactgatttcttttagactcagcctaatttattgtaggcgacagtcagtggactgacgctaatttgtgtaaacttggaaacacttaatttgatagtggagtcgtgtgatttaaaccaa

SEQ ID NO: 441380 - DNA, 122 bp, Homo sapiens
cacgtaaaacacttaagactaactgctacctacattttagctgtcattattattattattcgtgattactattcagggctgtaggaaaactgcttaagcctagtttatgaggtcagggcacc

SEQ ID NO: 441381 - DNA, 122 bp, Homo sapiens
gtggaaggcggttaaaagtgcttctttcttaaaagtgcttctgtctgactgtgttgcaggcgtcgctgtattccttagctctgaaatgccttatcagtctctccacgatcatcctgctcggt

SEQ ID NO: 441382 - DNA, 122 bp, Homo sapiens
cgcccccgttgtcggcccccggtgaacgcgccgtcccagaagcacctcagcttggttccgcggatgaacggacgcttctcccgcccggcccccaaaagctgccgtcctccgcggccactacg

SEQ ID NO: 441383 - DNA, 122 bp, Homo sapiens
ctctccgttttaatgtttcgggtttttttacccaggcccctgttttatgagccctgggtacgtccttcctgtgtcccgtttggcctcctgggttacactcctgttcaccccgcttggccggt

SEQ ID NO: 441384 - DNA, 122 bp, Homo sapiens
ctcctcgcacccacccgggcggtttcacccgccccgccggccccacccacgggctgcgggcggccccgcaggacaaccctcacagacggcggcagaggcccggcccagccaggactccaccc

SEQ ID NO: 441385 - DNA, 122 bp, Homo sapiens
tgcgcagcaccggaagccggggggcggcggcggggcatggcgggacttgtagtccgcgggcgggcgcggggggcgcaggcgagaccctggcgcggccgggggtcctgcgggtgggactgcgg

SEQ ID NO: 441386 - DNA, 122 bp, Homo sapiens
attgttgaaagttgaagtatgcgggaagttgctaataaacagaacaaacttcacaacatacgtactctctttttttcgttatttgctgggaagctattcatagaaatccacgtggaccagaa

SEQ ID NO: 441387 - DNA, 122 bp, Homo sapiens
ctggggaccaacaggtgctccgagcttcccctgtctctgggagagcctctcctgctaaagcgacttgcatctccggactcactctccctccccgaaattctctttgctttcttttcagccag

SEQ ID NO: 441388 - DNA, 122 bp, Homo sapiens
cacaacctccccgccttcatttcagcgagttcccctataatcacttgatctcggtttctccgccttctcctcctccccctcccagctagagacacatggtttccacatggagacaaacttct

SEQ ID NO: 441389 - DNA, 122 bp, Homo sapiens
tcagcccaggagtgcaaggttacagtgagctattactgagccactgcattccagcttgggcgacagagcgagacactctctcttaaaaaaggaagaaaagaaagaaatattaacaaactagt

SEQ ID NO: 441390 - DNA, 122 bp, Homo sapiens
tggaggtaatagcaccgtgattttcagctgagttggtcttggtttggggcagctcaaactcggccacacgatagtaatggcactgagttaagtattttataaagtgttcgcgagcctgctgc

SEQ ID NO: 441391 - DNA, 122 bp, Homo sapiens
tataactttgctttaagcagttttaatatgcattagggctgctattgttttaggcaagctcgaattgtgaatcactgcatctctatagcaactaagtacaaaaggaagtgaagcaaaagccc

SEQ ID NO: 441392 - DNA, 122 bp, Homo sapiens
aagaactctaggaacaaattggacttggaaacattaactgacattcttgagcaccagatccgggctgttccctttgagaaccttaacatgcattgtgggcaagccatggagttgggcttaga

SEQ ID NO: 441393 - DNA, 122 bp, Homo sapiens
ccctcccgaaatccctagctcagcaaatatttgaacctgcccaagttaatcatgaagctgcgatctttatctaagggagacgtgcgagcgcctgggctcctttcctccccgatacagtagcg

SEQ ID NO: 441394 - DNA, 122 bp, Homo sapiens
caatcaagtcaagagggaaaaaggccgaacgtgcctctgaccacctcgagctcctgcttccgcgctcctggccttgccgcgctctgagaacacctttgagtccgctgggcctgccatgactg

SEQ ID NO: 441395 - DNA, 122 bp, Homo sapiens
tgaataacgctcctcaaagtaagtacaaaatgttacaagatagatgatgaattgtcagaacgtactcaaaagccaaaacataccgcctggcccaaagcagtaaaagacgaaaggcagggacc

SEQ ID NO: 441396 - DNA, 122 bp, Homo sapiens
gcttgcgctgcgcccacattgcttctgcgtgtttacagttgggcacgagaaggctcagcacgcacgcacagcaggtgggggcccgccctgcccacagcgtgaaaacaggagccccggccagc

SEQ ID NO: 441397 - DNA, 122 bp, Homo sapiens
cctcaccggctcaaggagggatcgtcctgggcccgacggcagcgagtgaaatagcagcagcgttgccatggaagatggttccgtggcacccagacatcagcagtggggctgatgggactcac

SEQ ID NO: 441398 - DNA, 122 bp, Homo sapiens
ctgaagctccagcccttcctggtgccctgatctcctgcactgagctgtgatgagtacatccgggttccactggatgcatgtgcgggaaggggggtgccctgggttgggtcagtgatgagaac

SEQ ID NO: 441399 - DNA, 122 bp, Homo sapiens
cctctctggtaataagcaattcaattccttgtgtaatatgcttggcccctaaaagccctccgcatccgttgcctccataaccctcagtttattgtggaggggtagaggaggaatgtaaggct

SEQ ID NO: 441400 - DNA, 122 bp, Homo sapiens
tgacagagtgaagtgagctcgtccggagacaccttcatcaattaattcccctaaagccagcgctgattggacactcctgacaggtgatgcaataaaaattgatattccaccccttcccccca

SEQ ID NO: 441401 - DNA, 122 bp, Homo sapiens
tggaattattgaggggattaaatgagatgatgtatgtataatgcttagcattatacttggcgcaaagttggtactcaataagtgttaatacttattagtatgatgattttgttaatttgatg

SEQ ID NO: 441402 - DNA, 122 bp, Homo sapiens
tgaaacacagtttatgtacagggaaaaggattttattatccttaggaatgtcatccaagacgtagagcttgaatgtgacgttatttaaaaacaacaacaaagaaggcagagccaggatataa

SEQ ID NO: 441403 - DNA, 122 bp, Homo sapiens
tctccgacggatggcctacacccgggaggagtccaggaactctaggtggacagttacttccgcacacgcgtagtaggacggtagccggtattcaatcttcaaatcagcgccgcgggaagtgc

SEQ ID NO: 441404 - DNA, 122 bp, Homo sapiens
tgggggggtagtaaaactccttaggctgattgcttaggggtctctgcatgtgataaatgccgggtggtgttatgatggtaagaagatgtcaggaataaaccagagacctccctgcagatgcc

SEQ ID NO: 441405 - DNA, 122 bp, Homo sapiens
ccaggaatattgactctcttagatccttgggatgtttgaacctgagcatgccagagccaacgggccctaggattctcccttgctcctgttcctgttgggctcacgcccctcaccctggcgct

SEQ ID NO: 441406 - DNA, 122 bp, Homo sapiens
tcagctctctggtgtcttgggctgggggaagcagagccgcacacaattccttggctcgggcgtgcgtgtgcacggctctgacagaaacacagcccgagaaacagccctggaaatgcggctgc

SEQ ID NO: 441407 - DNA, 122 bp, Homo sapiens
tgctccctcaaagggtcaccaactgtcgtgcttagcagtgtcttgcaaacagtaattatccgatgaattgaattattctgttttctttgagtccactttgggttaagcaccccctcccgctc

SEQ ID NO: 441408 - DNA, 122 bp, Homo sapiens
tgtggctccttcctagtggtgagattcttggtaaataccttcatttcttcaagcctcctccgcaaaatgctggaccaaagcaggtgatttcttcccttctatgatcatgggctcccaatggt

SEQ ID NO: 441409 - DNA, 122 bp, Homo sapiens
ccttgccgctgcaaccaccattgccgcccccacgaccaccccggccacccagcccaccgccggagcctgagaccacagatgcctcacacccatctgtccctccggagccccttgccgaggac

SEQ ID NO: 441410 - DNA, 122 bp, Homo sapiens
cttgtgggtgtatttgtgtttgtgtgtgtgtgtgtgtgtttttctcccctacgtgtgggtcggcacttccactgagatcactggcacacaagcagagccctcttgcagtgtttgttcttccc

SEQ ID NO: 441411 - DNA, 122 bp, Homo sapiens
ttctaacccataaggggtactaatcctgtacagactccaatatctcccgggctgggtacacgcaggttcacacccaggtgtgagcaagattgccaaactatacctataaggcgtttggaggg

SEQ ID NO: 441412 - DNA, 122 bp, Homo sapiens
ccacaggtaaaatcagggctaggaagggctccacagtgtagcccttccaggcccagggagcgccgcgaactcgacagggccacacatcgaggcctgcgcagccgcggcccagcactccacga

SEQ ID NO: 441413 - DNA, 122 bp, Homo sapiens
aaagcacctggcagataataaatactcagaaaatggtagctattagtattttactattagcgccctcactcatactggggccagatagcagtttcacaggcaggtctgggtcaagcagctgg

SEQ ID NO: 441414 - DNA, 122 bp, Homo sapiens
tctcctcccctgagtgttggtccatttgcactctcacagatctgctgttcttcataccaccggctcccacagccacagccatgtcccattcagcctggcaggcccaggctcagtgcctccca

SEQ ID NO: 441415 - DNA, 122 bp, Homo sapiens
ctactctggttgggggtgtaggggccagggtgtggtgtggccagacctccaggcccagggcgaccccccctgctctccctgctccactgccccctgcccctaatgcgccggcctctcgcagg

SEQ ID NO: 441416 - DNA, 122 bp, Homo sapiens
caaatctaaacttaatcttttaagaagtaaataacttctctgtaggaaagtaactacaaacggtaaagaaagacatgcttgtcaaaaaggccagaactcctgaatgtggaccccaggaactc

SEQ ID NO: 441417 - DNA, 122 bp, Homo sapiens
caacagaaagtcctactaaagttagacaggaggttttatcttaaagccccagagcctgtgcggactggaccacgcttccttaggatcctctctcctggcatggcatgcccctgtcaagctgc

SEQ ID NO: 441418 - DNA, 122 bp, Homo sapiens
ctgaggcagcctggtcctgggccctccgggctgctcaaggccacagtcctgggttcttcccgctgcttcacgcctctggagggcgtcagacaggcgtccaggcccacgttaagacgctcgag

SEQ ID NO: 441419 - DNA, 122 bp, Homo sapiens
aagttctaaggtctttacttaaccccttgcctactgtgcaatattacaaatggaatcatgcgtcaattctgaatcccgactggcaggccaattgtgggtagtcagtaaacttacagtggatg

SEQ ID NO: 441420 - DNA, 122 bp, Homo sapiens
tcacaggacccttgaaatgaagcgtgattatccggggtgtcagtaagaagggccctgtgccgattcatagaatccaggttgacaagcccttctaggcccggccctgtcactcccgtcttgcc

SEQ ID NO: 441421 - DNA, 122 bp, Homo sapiens
cttctgagggagcttcagggattgcctggcttcctaagtgcccgtgttgagagttagaagcgggatctgccggcagctaagagactgagcatgacggcggaaacatctaattttattagttt

SEQ ID NO: 441422 - DNA, 122 bp, Homo sapiens
ctgactgcctttggaccagcctccatgatcagcccaaccactgacagctggtctgaccaccgtcacatcatcagaacttgagtctctgctggctccttccaaggttaagcccgagcccagag

SEQ ID NO: 441423 - DNA, 122 bp, Homo sapiens
tgcgtaggctgggcttggccccatcccctttcaggccagcccccaccccaccactgccttcgccaacagggtctgcagcgtttagatgccagaggtggggtcaggacaatttccatcctggt

SEQ ID NO: 441424 - DNA, 122 bp, Homo sapiens
gggtcctcgcaggtgtccggcttggagacaaggacacggcaccactgagagccaactgcacggaagaggcaggaggccaagccggagccagcgcgaaatccacccctgcggcccctctgcct

SEQ ID NO: 441425 - DNA, 122 bp, Homo sapiens
aaagataaatatctttgaggaatctgagacagattcctcaacccaggaaggtggccagcgcgtcctcctgagcctgggtgggaaagcttggcgcccggaacctttgtactcgcccttccctg

SEQ ID NO: 441426 - DNA, 122 bp, Homo sapiens
agatgccgttaccagtgagatatcatcacacacgcacggaacggctacagctagaaagaccgacaatgctggaacactcataaatcatggatgagacgcaaggggacacagccactctggaa

SEQ ID NO: 441427 - DNA, 122 bp, Homo sapiens
ctcactagggagtgccagacagtgggcgcaggccagtgggtgagcgcaccttgcaccagccgaagcagggcgaggcattgcctcactttggaagcgcaaggggtcagggagttccctttccg

SEQ ID NO: 441428 - DNA, 122 bp, Homo sapiens
ccacccccctgcccccgcaccgccgccctccgccccgcgcccccagcttctctccagcagcgcacacttggagcagtccttcccgcggccatccgaccctgacccatcgtccccgggaccgg

SEQ ID NO: 441429 - DNA, 122 bp, Homo sapiens
aggacctatgtagctctgggttaaacatttggcagcaatgtttacaggaggagctgtgaccgcacattcatcacatcaggaggcacacaaagcctagggttaccaggactctttctgacccc

SEQ ID NO: 441430 - DNA, 122 bp, Homo sapiens
gggggtcaggagaggacaaagcccctgcttttttccagtctgcagcacaaaccgcatcatcgtacatgtaacctcacttgccttatcaaggcatagctccgaggtccccgctgtggcacgaa

SEQ ID NO: 441431 - DNA, 122 bp, Homo sapiens
aactactgaggtctttatacattttatcatttaatcctctcagcaatcctatgagaaaggcgatggtattagctttattttacagaggtagaaaaatgaattgctgagaaataagaaacaga

SEQ ID NO: 441432 - DNA, 122 bp, Homo sapiens
ttcttctctctgagtcaggcgcaaagcttcccgctcagctgctgagtcagctctcaaaaacgaagggctgagctcagatgaggaattcgacagtgtctacgatccctcgtccattgcatcac

SEQ ID NO: 441433 - DNA, 122 bp, Homo sapiens
aggccgcgctaatgacggagggggtgaacttggctggagaagtcccttctcgcctctgtgcgtcctctcgggccccgtggtagagggtcaagcgggcgggtcgggacttagagcttatcccg

SEQ ID NO: 441434 - DNA, 122 bp, Homo sapiens
aaacaggaagctgcagctggtggcaagatgcaacctctggcccaaagaatacaagcccaccgtaagtcctcacactttctcactaaggcagtttccactctgctcatgcagtgcccaacctg

SEQ ID NO: 441435 - DNA, 122 bp, Homo sapiens
agttgggtggaagatccctcaatataacctccattttctcatgggcactgtgtaacatatcgttcctatctatttcaggttaccatgaaatcatctgcatggaagcccttgtttgtcaatat

SEQ ID NO: 441436 - DNA, 122 bp, Homo sapiens
aggcggcgttctgctgggcgaacacacacacacactcgagaaggtggcactccagctgggcgaacacacacacccactcgagaaggcggcgttctgctgggcgaacacgcacacacactcga

SEQ ID NO: 441437 - DNA, 122 bp, Homo sapiens
ccggcctcgcacgtcctccctccctgcaggctgagaaaactgtggtgaaggcgggggtctcgccctttatcccctcctgcggtgcctatgggcagcacctgccgtggcgccttggttcgcag

SEQ ID NO: 441438 - DNA, 122 bp, Homo sapiens
tcaactgtctctttgtctctggcaacaaatcttgttctttttccattttcaaagaatgagcggtcacaattcttatgctcttatctctctattgtaacttttaggaagttgttatgttcata

SEQ ID NO: 441439 - DNA, 122 bp, Homo sapiens
gcacggtgctccgggccaggtgccggcgaggggggccgggggagcacgtggcatggatgccgctgagaagagcaggacgagcttgtctgagccccaaggcagccgaggtcagagcggacgtg

SEQ ID NO: 441440 - DNA, 122 bp, Homo sapiens
cgaccaaagcataccctcacccgacctttgtgtccagcatgcattccagcccaggagctccggcccgctgggcagaggctgcacaccattcctgccagcatctaaatcgctgctttctggcc

SEQ ID NO: 441441 - DNA, 122 bp, Homo sapiens
acgaggagaggcgggcgacttggtgtgggaccagctgcgcaagcgcactactgctgtaaacgcttcctgaagctgcgtagcctttaaggagcgtgagtgtagcgtattacctgctttatgct

SEQ ID NO: 441442 - DNA, 122 bp, Homo sapiens
gcgggccggatctggagggggcgcgcaggggcagcccgaggccggcgacggggagtgggccggctccttccctctccactcccaagctcgcgccctccctccctccccacctggttaaatcc

SEQ ID NO: 441443 - DNA, 122 bp, Homo sapiens
aatgtgttccttaaaagtcagtcaaaggcaatttccatgatattttgcatttaaaatgaccgcacaggagtccactggcagacagtagctaattttagaaacatgccaccatacactaagta

SEQ ID NO: 441444 - DNA, 122 bp, Homo sapiens
tgtctgtaatgtgcttagcatggtgctgggcacacagaagcagtcaaggtttgctactaacgattgcgttaggattttagaaaagctgttgactatttctaaatgtttactttctaaaggtg

SEQ ID NO: 441445 - DNA, 122 bp, Homo sapiens
ttcccgcccccatggctgccttcgattggctaaacctgctgggccgcggcggggatgcggcgcagccgcattctgattggctagacttaggcctggaccctagtgattggctgataggagga

SEQ ID NO: 441446 - DNA, 122 bp, Homo sapiens
gcatcaaagctagcgaggcgagcgaagtttggccgggggttggactttccttcccggaggcggcacccaaacagctaccccgtgcggaaacccaaacttctgctgccacttggagtctcgcg

SEQ ID NO: 441447 - DNA, 122 bp, Homo sapiens
tggaacccccttgcttggcagtcatcagatgcagacctgcgcccccaacatttggtggaacgtgaacactactcacacttctcagacatctaaggcagcagaagtggtcttggggactccag

SEQ ID NO: 441448 - DNA, 122 bp, Homo sapiens
ggttgttcccccatcctctctccacgactccgtcccaccttcccagtacttaaaagacgacggcagtaaccaacaatgaatgccccagctcaggagagcagctttgtgaccggaaggccacg

SEQ ID NO: 441449 - DNA, 122 bp, Homo sapiens
gctgccttggcacagctgtagattccgtgagtgtttcttcagtcgtacccagtgctagtgcgggtgttaattgctctgaccctggtcacccgcccgtaagaaaggcgctgctctcaccccat

SEQ ID NO: 441450 - DNA, 122 bp, Homo sapiens
gcagcacccggagtgcctctatggttcttcctgtcgttagtcgggagggggcgctgtacgcgcgctgtacgcttgcgcgaggtgacgccggggcagggccggaaggaatgcagcggctgcca

SEQ ID NO: 441451 - DNA, 122 bp, Homo sapiens
cagttgcataaagcctggtgcagagctgctggcaacccaagggtatagcaatctgggactcgagaagtgaaagctgtaatagtgcagttgccgcctgagcaaggatcatgtgggactcacag

SEQ ID NO: 441452 - DNA, 122 bp, Homo sapiens
tcagtgcagcttcactgctcagacactgcttctggagggaccctactccatcccacacagcgagagtccgtctgggagggctgacggcttccagaaaccaagtcagcaggagccctagagta

SEQ ID NO: 441453 - DNA, 122 bp, Homo sapiens
tacccgaactctgtgggcagattctgctgcctgggagccctggaatagaacttcaaggaccgttcaacatctggattcaactagaaattaagaatggcccccaaacagaaagccgggcctag

SEQ ID NO: 441454 - DNA, 122 bp, Homo sapiens
gagcgcggggaggggtgaaagggcggggccggcttgcgtggcgcctgcgttctgcgtgtccgcagagcccggagagtccctgataatctaagactcatagccaccgactagcaatttgttag

SEQ ID NO: 441455 - DNA, 122 bp, Homo sapiens
tcactttacagatcatttcgaaaacaccaactgtgttcagaaagagtcccgcctttcaggcgcctgtagtcccagctactccggaggctgaagcaggagaatggcatgaaccctggaggcgg

SEQ ID NO: 441456 - DNA, 122 bp, Homo sapiens
tgaggcaatttctcatccagctggtttccagtgacctcactctcattcaggtgcagataccgactataaaaatgtttagctatagtttagagttggctcctcaacagagctatttctacttg

SEQ ID NO: 441457 - DNA, 122 bp, Homo sapiens
cggtgacggccatgtttaccggcttcagacttcccgcacctgaaggggcggaggcagtgccgtaaagtagcgctgcgggtttttgcgacaccatccgcgcctcttcgaggtggccctctggt

SEQ ID NO: 441458 - DNA, 122 bp, Homo sapiens
agtggggtggggcagcccgcacctggtgacaggtggcctcactcatccttctgtggaaggcgcaggggccaggccggaaaagaccctgaggctggacctggtcgtatctgcgtccctgcagg

SEQ ID NO: 441459 - DNA, 122 bp, Homo sapiens
gcccccatcccacctgtcacactggaggagaagcagacactcactagactgctggcagcccgtggagccaccatccaggagttgaacaccattcggaaggccctgtcccagctcaagggtgg

SEQ ID NO: 441460 - DNA, 122 bp, Homo sapiens
cactgtcaatactttctatatcatcctaccactgctgcaaacttcttccttcagagtgatcggaatttaacttcctctgcctgcaccttccctgagacaggaaaagccacaaaagaaataag

SEQ ID NO: 441461 - DNA, 122 bp, Homo sapiens
caaatccagcctgaccctggtatagagacccaccgagagtccctccgacccggagagacccgccgagggtcccacacccggagagacccgccaggagtccccacacatttgaaggccctgcc

SEQ ID NO: 441462 - DNA, 122 bp, Homo sapiens
catcttatcacttaccctcaaaatattcttttgagcagtaagttaaggctgtttttagctcgcagttgattgactaccattactcaagccatttgggctgttggagctcacctttaattaaa

SEQ ID NO: 441463 - DNA, 122 bp, Homo sapiens
aagccaagaggccagccctggctagacaggtctcagaagtgcctggcagcccctgctatccggggaggaacactgcaaacaggcctctgtaggctcagtagtatggccattttttttttttt

SEQ ID NO: 441464 - DNA, 122 bp, Homo sapiens
atatactcttggtttttcttttatatggcagttagcaaaggtcacttctgatggaacgaccggtctatgtggtgagcgcaacgcacaccaaacttaacaggttaaatggagctggagcggag

SEQ ID NO: 441465 - DNA, 122 bp, Homo sapiens
cgatctcggcgccccaggcacacgcgggccagagctctgctgccacccgggcagctgccgcgctgtgggttgatgccctgctaatcccactctgcacatccccctgcttgacggagcagaag

SEQ ID NO: 441466 - DNA, 122 bp, Homo sapiens
aggggcccgatacagacccaaaaatgtaaactatctagataatttcgcattagccctccccgggccgggctacaggctggagagttttggccgcccagcaggctggcaggcgggggcagaag

SEQ ID NO: 441467 - DNA, 122 bp, Homo sapiens
ggtggggtcaaaaagggctcattccacatacaattaagtccagaaatcagtcccccaatccgggaaaggcgatcctttagagacccaccccccaagcccccgccccggagctcacccctcag

SEQ ID NO: 441468 - DNA, 122 bp, Homo sapiens
tcttaagaatgtgctgcccaaactaagctgaccattttgttttcctctcacacggaaacacgtttccccacttgtaaaacagagaaaagaggactttgaaattcattaaggtaataagcacc

SEQ ID NO: 441469 - DNA, 122 bp, Homo sapiens
catctgcccaccacgtctcatctgtgcctccctgcctggaacggagctgcaggaaggcagcgatgtttgtctggaggtgagcactgcggtgggcatttgccccgcacgtggtgggtgaccat

SEQ ID NO: 441470 - DNA, 122 bp, Homo sapiens
cacagccgtgaaggaggtgagcaacattagtcagacctcttggttttgcctccacaaacccgatttctttgtttgccctccccatctctaccccaataagagccccagtgtttgaaagggaa

SEQ ID NO: 441471 - DNA, 122 bp, Homo sapiens
taaatctaagagtttatttctggactctcaactctattccattgatctattatatatttccgtccattccagtaccacactatcctgattactttagtttcataataaattttgaaattagg

SEQ ID NO: 441472 - DNA, 122 bp, Homo sapiens
gccaggagagtacttggcaatcttacagggttgacaaagcaaaaaagagtttagagctgccgaggtagccaggacttgaaggatcaagctcaagagaagtgagcaccacacacaccactaag

SEQ ID NO: 441473 - DNA, 122 bp, Homo sapiens
tacaggtaccattatttgttataattctccttctttgtaatcttatcacagtgattctcacggagtgggaggagtatcacaccctaaagaaaaccttggaaacttgcagggatgtattaggt

SEQ ID NO: 441474 - DNA, 122 bp, Homo sapiens
ctgccttgggggcccggggtcccctcccacccctccccgaagagcgcgggccccgggaaccgatgacagcacacctgagtcagcccgccgcccacccgcccctcagcgtctgtctccgcatc

SEQ ID NO: 441475 - DNA, 122 bp, Homo sapiens
ggaggtcggaagtgagggtaactcaagtccttgagataatcacaatctagactttgtcggcgaggagcacccatccggaggagacgcagtaggtcctggcatgtggaaggcaaaaaataaat

SEQ ID NO: 441476 - DNA, 122 bp, Homo sapiens
gcactgctccgcctccaatccagttgctcttctttcttttcctcactctctttttcctcgcgtcctttgccccggaagtgctcttacaacattggctgccggcgtgactttgaccgcttccc

SEQ ID NO: 441477 - DNA, 122 bp, Homo sapiens
acttcagggtgtctatccaggaagacactgtggaccagctgtggaccgtggatagcacagcggcctcctctctatgcggcttctccacctactacaacacccaggccaagttggtatccaag

SEQ ID NO: 441478 - DNA, 122 bp, Homo sapiens
ataatgatacatatgtaagtacatagtacattctagatgtgtgtgtgtgtggacatagtgcgttctagatgtgtgtgtatctggactatgacatgaccacaagatacatgcgtatatagatc

SEQ ID NO: 441479 - DNA, 122 bp, Homo sapiens
ctttttaaaaagcattttttccgattgctttatcgggcatcctgtggggcgcgcaagcggcgaggcctccagtggcctctcttgccactcttaggcagggagctgcggggactcagctgcac

SEQ ID NO: 441480 - DNA, 122 bp, Homo sapiens
agagtccaaatttcactctcagctttagggctcttttaataacacttcattgctgcatcccgaagttaagcaaaagaaacaaaataaagataaaaaggaaagcactgttccaaatgcatagc

SEQ ID NO: 441481 - DNA, 122 bp, Homo sapiens
cggttcgatggaactgggcgcggcggagcatggggtggcgccaatcagggaggctccggccgtgctggagcccaccaggggtgggggtctcaggcatggcaggccgcaagtccagagccctg

SEQ ID NO: 441482 - DNA, 122 bp, Homo sapiens
aagtgtttgctactgttcatgtgcattatcagtccaagcatggccagcaacatctaggatcgccacacagatccttatagaaagatatgtctattgcttcttttttatttttatttttattt

SEQ ID NO: 441483 - DNA, 122 bp, Homo sapiens
ctcagtcgtcctgccgggcgggccctgaggatgcaagggacggaggaagtttcgtgcgtgcgcccttcctatagcgcccagtagaactgactgacagtacctgtctctgtggcgtagtcggt

SEQ ID NO: 441484 - DNA, 122 bp, Homo sapiens
atgtatgaaatgccaggtgcccagaggacccaggcagtccgtcattcacataccaacccacgtgcaggcttcaattcaaccttgaagccatttgggcctgggcttttttgatgacttatttg

SEQ ID NO: 441485 - DNA, 122 bp, Homo sapiens
ttgcctaagatcacacagcgtcccagaggccttactgggcaggggagggggtggcccggccgggccctcgcgcgccggcttctgctgattctttctgcggcctgataataagagtcccgggg

SEQ ID NO: 441486 - DNA, 122 bp, Homo sapiens
gactgcagggaggactcttcggtcactgcggctctctccccatggtggactcttctgaggcgcttgactgcgctgatttgggcctttatctgtctgcatgtcggcaggggcgcccaggaagt

SEQ ID NO: 441487 - DNA, 122 bp, Homo sapiens
acagggacctgctaaccctatgaattctccctcatacccttaaaaagtcgggtgcttggccgggtgcagtggctcacgcctgtaattccaacacttgggaggccagggcggttggatcacaa

SEQ ID NO: 441488 - DNA, 122 bp, Homo sapiens
ggacacctgagcgcggagggtgcggcaccttggcaccttgaccctgtggcagggacatctcggcccaggaaagaatgaggtttaggcacggcctaaccacctaagtgagggcactgaagctg

SEQ ID NO: 441489 - DNA, 122 bp, Homo sapiens
tgtgtctcggctggcgggagccggggacgggaaaggagagtgctcggtgcgtgggctgggcgtgcctgcgtcccctcgagccccacggggcaccctccccacttgcctgtggcctcggagcc

SEQ ID NO: 441490 - DNA, 122 bp, Homo sapiens
cgcgcttttccccaacccatgacactctaggaaattcacagagccaaagttagcatagaccgctcgttgggggcttggccagtgagttgggaagtgccctggaggtagcgcgggaaacaagg

SEQ ID NO: 441491 - DNA, 122 bp, Homo sapiens
ttgccaaactggtgtagtcctcagtattagctctaagttctctctttctaaataagctggcggtattttcattgtatttattaaagtccacgttatcactatgcagccaattataaaacttc

SEQ ID NO: 441492 - DNA, 122 bp, Homo sapiens
gatgacaggtaggtgtggtctgtgtggtcgctggaagtcctttgttcaatagctgtgccacgcacttgaccgtagctaatcccagcgactgtaaacggaaaagccaaagttaggtcaaataa

SEQ ID NO: 441493 - DNA, 122 bp, Homo sapiens
ctctcttcttaggccttaaaggggtccccgtgtctctccagtctagagcctaagttcaaacgaggcgtataggcgaggacagcaggaaggctccaagtcaaacaaacggatggtacgaattt

SEQ ID NO: 441494 - DNA, 122 bp, Homo sapiens
ttgtcttttaaatgtgttttacaagacagtcttcagcagaacttagctccctcaaccctccgtccctccagcagctcctccgtggctctgcaatcttctgtttaaacaccagagcgcacctc

SEQ ID NO: 441495 - DNA, 122 bp, Homo sapiens
attgagcaacagcagtgctgaggacgcaggcagggctgtgggcactgcaggggctgcccccggtgtccacacacgtgctgggctctgccgaggtgcgggaagcctgtgtttcacgctcaggc

SEQ ID NO: 441496 - DNA, 122 bp, Homo sapiens
ctgcttcggtatggttagccaatgactggaggtatttaaaaggtgagcactggccaggcacggcagctcacgcctttaatgccagcactttgagaggctgaggcaggcggatcacctgaggc

SEQ ID NO: 441497 - DNA, 122 bp, Homo sapiens
caaggcgcaaggcggcctgacaccaggtacccggctcccggttcctccgacgttctctggcgttcccgggccctgaccagttcctccatctcagaagtcttaatggccttcttttactctgg

SEQ ID NO: 441498 - DNA, 122 bp, Homo sapiens
aaccaaggcactcaagccagaccacagtggccaagaatcctgccctgggctgactctgtccgggacagggatgtggggttctgcagcctggtccactccggggctggcagggagtgtcctgg

SEQ ID NO: 441499 - DNA, 122 bp, Homo sapiens
cccctccccacccctcccccgcgcggggcccccgcccgcagcccctctagcagcccctctcgcagccccagcgcccctgagccgtcctggcccggaccggccaaggaactaacgagcgcgca

SEQ ID NO: 441500 - DNA, 122 bp, Homo sapiens
gcgcggatcgggcaggaggcgccctcttggcaaagtcggctagaggcgccagctcagtcgcgcaccggccccgagtccgagtccgagagggacggagggagcgagttataggggcgagaggg

SEQ ID NO: 441501 - DNA, 122 bp, Homo sapiens
tcccgcggcccacagagcacaggtgaggcagcagaccgggtggggtcggtgtcgcgcctgcgcccgcccggacgcctcgggcccgcccgctccgcaccctggaaacccctgcactcagcccc

SEQ ID NO: 441502 - DNA, 122 bp, Homo sapiens
tctcaggggccctttctcttccttcgttgcaacactgaagtcctcttgtttgatgacttgcgtgaggttattcctcccacttaggaggctgagtgctgcgaggtccgaggcgcagccgctct

SEQ ID NO: 441503 - DNA, 122 bp, Homo sapiens
ggattggcctgctgcctccctttgccggcacatcacagctgactaagcatgcttcccatccgggttcccactcagtccacaccacagccccattactgtgtagacaccactgccccactcaa

SEQ ID NO: 441504 - DNA, 122 bp, Homo sapiens
cccacagacacatgcagaataacgtttagccaaatatatgggtacattgcagttctgtcacgttcacatataaagttcaccataacacaataaatattcttgtacttcttttataactttca

SEQ ID NO: 441505 - DNA, 122 bp, Homo sapiens
gaggacagcggcggagcgcggcggacggaaggggctggaatcgtctctagcgggcgggggcgccgggagcgcagggaggggctggcggcggcgcggggcgggggcgccgggagcaaggtgcg

SEQ ID NO: 441506 - DNA, 122 bp, Homo sapiens
gcctgggactgagcgagtggacttagggctgggcaggcagtagccaccagagggcagcagcgaactaggccaggcctgactggggtctgaagatcagggtcagtgtggctgtgcctgggaat

SEQ ID NO: 441507 - DNA, 122 bp, Homo sapiens
ctccccattcctttccagatgtacaacgtaaacgctcggaaaacgagtcggaaaagggagcggagaatttcctaatgaggaaaggaatcacctctggtgggcggaggaagcctgtatatgtg

SEQ ID NO: 441508 - DNA, 122 bp, Homo sapiens
cggcggagcgggcgggcagcgttcccgggggcgcatttcatcggggctgattaatgaggccggggagttaatgaggagaaagctaaacgcagggagctgagccgcggaaggcctctccgagg

SEQ ID NO: 441509 - DNA, 122 bp, Homo sapiens
catcaacctcatttccttgtggttgattttgtgcggattggctcaacacttatttctcagcgagcccggacaggtgatacttgtgctaattctgtgatttcttcctccgagcctcacaggat

SEQ ID NO: 441510 - DNA, 122 bp, Homo sapiens
atgccctatgtacatgaggttttacctcctccattcctgaccaataaccacccataactacggcattctctgtgacttccttaaacagcagtgatgggaagggatccaatagtatcttcaag

SEQ ID NO: 441511 - DNA, 122 bp, Homo sapiens
ccaagccccctcagcctccgggctgtccccaaacgtgtctccctcgcggtgtccgtggcgcgcaagagcctggagcctgctgctttgggcctcacgcctctgtctcatgcctctgccggggc

SEQ ID NO: 441512 - DNA, 122 bp, Homo sapiens
gagggaggaagaggaggggcgggacgagaccaccaggcaggatttttaagcccagagctgcgagaccagcaggaaggaactgggagaaaccaatggggaggggatgggggcggggctgagag

SEQ ID NO: 441513 - DNA, 122 bp, Homo sapiens
ggtgagttagacacaagcgaagggctgaaggccggctctccatcagctgctgggctgtgccgtgccccacctgtacttggcgaagagtgatgagggctgaggcagcctctctgtccgtgggt

SEQ ID NO: 441514 - DNA, 122 bp, Homo sapiens
agcaactgaaggagaggcgattcaaagcagggagtgtgatgaataggtcaactctgtcctcgcagccgtccctgagagggcgctgttcccaaatcgaagccccagaggcggagactgagaca

SEQ ID NO: 441515 - DNA, 122 bp, Homo sapiens
ccgactccaagaataagtcaccagagtcccctagaagattcttgagtttctgctcttaaacggctccttttccaaggaggaacgaggtctgttttctgatgttggggcctcagatactctgt

SEQ ID NO: 441516 - DNA, 122 bp, Homo sapiens
ctaccagtagaagccaaagcaaaccccttctggaggaaacacttaccaacttaggcctgacgagtaaaacaatacattttccagctaaaagacacaggtatttccatagtggattaaaaaca

SEQ ID NO: 441517 - DNA, 122 bp, Homo sapiens
ccctgggacagattcctgctcctcactccactcctgccctgcccccactgtcctgcttcccgttttctgtctgaaagcaactccaggcagaggaggtgggtgccttgttataattcatatgc

SEQ ID NO: 441518 - DNA, 122 bp, Homo sapiens
gagtgggagggatttcgccggaacaaaaatgcctcagtttggaggtcgcgctcactgcgacggcaggctttgagtgtagcacttggtagttcttcctctgctctgcttcccttcggaggaaa

SEQ ID NO: 441519 - DNA, 122 bp, Homo sapiens
gcctggtggggagggagccctcgggcaggtggctgcgtcgggcctggggcagttgtgctgcgcttggagacctgcccgccctcggggcctgtgtgcacagggaggataggctgtttatctct

SEQ ID NO: 441520 - DNA, 122 bp, Homo sapiens
tgaaaagccataggccacagcagagtggaggggtccagcggcaggaatctcatagggaagcgagaagctggggcacccgagaagccctcactccccttctcagcacccccgaccccagaccc

SEQ ID NO: 441521 - DNA, 122 bp, Homo sapiens
ggaggcagctccgaggaccccgggggctggggtcaggccatgtgcgtgcactggcaggtgcgtgcccgtgcaatggggaggctggggggctgcccggcctgactgaggctccgcagctcctt

SEQ ID NO: 441522 - DNA, 122 bp, Homo sapiens
ctatttgcttaaggaacaaatattgctgtgggaagtgactaaatagcttcccagaagcagcggtcatggggcctttggaccagctgggcatcttctaatcaaggcaggagggggaatgatgc

SEQ ID NO: 441523 - DNA, 122 bp, Homo sapiens
aatcgaggccgggctttggcgggaggtgggaacgctgtggccattcggatttggcgcgagcgcggctggagtttgctgctgccgctgtgcagtttgttcaggggcttgtggtggtgagtccg

SEQ ID NO: 441524 - DNA, 122 bp, Homo sapiens
ggcgggggaagttatccagcggccagctaatgctatcaaagagatgattgagaactggtacggagggagtcgagccgggctcacttaagggctacgacttaacgggccgcgtcactcaatgg

SEQ ID NO: 441525 - DNA, 122 bp, Homo sapiens
ccgggagcaggcccgggctgaaggcatcccggtggagatggtggtgattggggacgacagcgccttcactgtcctgaagaaggcaggccggcgggggctgtgcggcacggtgcttatacaca

SEQ ID NO: 441526 - DNA, 122 bp, Homo sapiens
tctttccacttctcctagcaccatctaatggtgaaatatggaactttctcttttcttctgcgtcactttcattaacatcatagggttagagcagctgtgcaatcccagtgttgatactcatt

SEQ ID NO: 441527 - DNA, 122 bp, Homo sapiens
cccgcggaaggaacccggccgcactgccgccggtgtaaacactcactctggccctctcgccggaaaccggaaattccgcgctgcattctgggagttgcagttcccgctgtggccccccgccc

SEQ ID NO: 441528 - DNA, 122 bp, Homo sapiens
cagcagtggtgtttgaccatgcgggcgcggtgggtctcacagagcaccatcagggccacacggctggatggcctcatggtctcccgcttgaggatggcggcattgcagcctgacagctgtgc

SEQ ID NO: 441529 - DNA, 122 bp, Homo sapiens
ggtcagctcttcctcatagtcttcttcctcgtcctcccaggatccctgtcgggctgggggcgtgccgccccctgcagggtctccaagccctggcccctctgaggggtcagtctccatgtcca

SEQ ID NO: 441530 - DNA, 122 bp, Homo sapiens
ggactccagggtcgcaggaaggggttctgtctgctcagacccaggcttgtccaatgcctccgccttcgctaggtgtaaactggctcctgggcgcagtgactaatacctcctgctctaggcgg

SEQ ID NO: 441531 - DNA, 122 bp, Homo sapiens
cggtccaaagctgaagggattggccgaggcagcgcaggcggtgcagctcggccagcttgccgttcctctccctttctctcagcatcttcttggtagcctgcctgtaggtgaagaagcaccag

SEQ ID NO: 441532 - DNA, 122 bp, Homo sapiens
attttatattatgacacatgcattcacctgtgaaaccatcaccccaatcaaaacagtgagcgcattcaccatgccccaaaggttcctcatgtccctttgtaatctcttcctcccttcacact

SEQ ID NO: 441533 - DNA, 122 bp, Homo sapiens
ggggttactccgcagtccagtctccgggatcccctgggggttactctgcagtccagtctccgggatcccctgggggttaccccgcagcgccctctctgggatctcctgggggttactccgca

SEQ ID NO: 441534 - DNA, 122 bp, Homo sapiens
aaacacaatatgcaggatcgttcggcttcagcagaacccaccgcaaagatggcggtgggacgaagccccttctcccgccgccgaagcctctcgcctcacatttcccacaaacccttcgcgcc

SEQ ID NO: 441535 - DNA, 122 bp, Homo sapiens
tagtttagtatccaaggccccttagtagtctagcataacagctttacacatctgttacatcgcaggtacagtaaccgtgttcctgtcagactgttgtactttgccctctgaatctttatcac

SEQ ID NO: 441536 - DNA, 122 bp, Homo sapiens
atctgtgggcaggttttccttaggcagccacatcttttgaaggtccacgtttctgcctctcgagatgtccctccatggtctaaaacgtattcagctctctcagccagctcctgatggttgaa

SEQ ID NO: 441537 - DNA, 122 bp, Homo sapiens
cacctgtcacatcctaggatccgcgaaggactgaaacagagtttctgaagcgtccctcggcgcagtagctccgctccacctcccattcgcgctaccaccgcggccgcagccccaggagtcgc

SEQ ID NO: 441538 - DNA, 122 bp, Homo sapiens
cctgttacatgcttcggaatatctgggagaagaggataatattactccccatattgcgggcggtgcacacacccctgtgatatggttcataatatcctgggaaaaaagggtaatattgcttc

SEQ ID NO: 441539 - DNA, 122 bp, Homo sapiens
ctattttcttgacccgtgtgggactgctaacatacttctcattcttgaaagctaaccagtcggttggggaagcaaaatttatgtatattttgtgtttttcaagaccccattcttccctgaaa

SEQ ID NO: 441540 - DNA, 122 bp, Homo sapiens
aatgaaatccccggaagtgtgtctgccaacaatccttttattttggctttacctgctgttcgcctgatgcctgtaaacctttcccgagtgttgattttcggaagggtgctttgcagggtgga

SEQ ID NO: 441541 - DNA, 122 bp, Homo sapiens
gctaattcccagccactgccccgcctcaggtcatcctcctggcggtcagagtgacctactcgactggcacttctggtgtgtaggaatctctggtagatcaagttaaaaggcagattttgaat

SEQ ID NO: 441542 - DNA, 122 bp, Homo sapiens
ttgcttcaggcattgctatgggatgctttagtcttggcttgtccgttgttgctagaatcacgtgctgccctcactgctgctcttgtccagctgccactgttactcaatccctcctgatagat

SEQ ID NO: 441543 - DNA, 122 bp, Homo sapiens
cggggccggctctgcggctgcagcagccccattgtgaggccggcgagacaatgggcggcccgaggaggcacctgctcgcctgaaaggcccataaatcgccgccgcgtccagctgccttcccg

SEQ ID NO: 441544 - DNA, 122 bp, Homo sapiens
ctctgccccacgatgctgatgcccagaaagtgatgtctttctgcaggaagagccatgagccgcggccaagcccctgcccctgcccccaaccctcgccccgaggcctcacccatgttgagcgt

SEQ ID NO: 441545 - DNA, 122 bp, Homo sapiens
atccccttggcccttcctcatgcttctgaagtggacatattcagccttggcgagaagctccgttgcacgggtttccccttgagcccattttacagatgaggaaactgagtccggagaggaaa

SEQ ID NO: 441546 - DNA, 122 bp, Homo sapiens
gcagcttggtgtcctgtgatcatattaagcctgtaagataaacagatggtcccctctgaccgagcgatgaaaatccatcctcctcctaactctgccctccagctcctgagcaacatttgcta

SEQ ID NO: 441547 - DNA, 122 bp, Homo sapiens
ctcccccgaagctgcagccttcggggctgagccccgcgggtgcgggtgcaggtgcggagccgcccaaggtgcgcaactcgtttgcagcggcgcagcccagacgcgcctgcagctggggctca

SEQ ID NO: 441548 - DNA, 122 bp, Homo sapiens
aaggagaccatggaacctgagcatggcctgacaccctggaatgaagtgaagaaggccaggcgggaggacctggccaatttgatgaagaaatattatccaggagagaaagcctggagtgtgtc

SEQ ID NO: 441549 - DNA, 122 bp, Homo sapiens
cacagaggggaaacggagcttcctgcactgccctcatcactcagaacctggggtcccaggcgattcagtcaccgcccgcagaacagcgccgcgggcaccacgtgaaactcccggggccggct

SEQ ID NO: 441550 - DNA, 122 bp, Homo sapiens
aggccgtacactccgtgacgatccatgatcacctcgtggcggcaggtggggcagcggaaacggcctccagacatggacactgagctgccccggctggtccagtagggatttgcagcctgcag

SEQ ID NO: 441551 - DNA, 122 bp, Homo sapiens
ggcaggaaaccattctcttctcccattgggagcgcgacccgccattcactagcgggccttcggggcaccctgatcagtttcctcaggttcagccaaggcctctgtggttctgctctttctca

SEQ ID NO: 441552 - DNA, 122 bp, Homo sapiens
ccctcaccgagatgacggtgtcgccctggcactgctgggacaggtcgcggacgccgctcacgaaaagcctgctggtgctgacgtaggccttaccggcttccaccatgccactgcacagcttc

SEQ ID NO: 441553 - DNA, 122 bp, Homo sapiens
ccactaagttctactttgccaaggtaattcatgcttgacacgtcggctcctgacactatgcgattctgcaaagcggggcaaatgccctaataagatcaagtctgcaagcagattcttctagc

SEQ ID NO: 441554 - DNA, 122 bp, Homo sapiens
aatacatggatctaataaagaataaataattggaaaagaaaagtttaaggaagagagaaacgggaatgagaaacaattactgtgggctcccaatggcctggagtgaatcaccaaagtaacct

SEQ ID NO: 441555 - DNA, 122 bp, Homo sapiens
ttcatttcttcctcccctcgctgcgctctgcggagccgggcatcctgccaggccctgcctcgggccctgcgcttggcccggggaggcctctcagtaaacaggcaattaccccgtgcaaagtg

SEQ ID NO: 441556 - DNA, 122 bp, Homo sapiens
gtggctttcccgcggagggcggccccgcggggcctcccgacccgctctgggctaagcgagcggccaggtttcgtgccctcaggtggctgtggttaacaagtcgcgaacttgtgggaattcgt

SEQ ID NO: 441557 - DNA, 122 bp, Homo sapiens
tccgcacacctgtggtgcctgccacccactgggttgcccatgattcatttttggagcccccggtgctcatcctctgagatgctcttttctttcacaattttcaacatcactgaaatgaaccc

SEQ ID NO: 441558 - DNA, 122 bp, Homo sapiens
cgttatcacaggagatgaggctgcatgcgggtggttgcccctgagggcctttccgtgggacgcagaggcggcagagaggaacgtcgatgatcctgaccctgtgcgggcctaggctcatgtct

SEQ ID NO: 441559 - DNA, 122 bp, Homo sapiens
tgcatcagtgtaggacgtgacatgctacctgtcctggagggccaccaccaggagagagcacgtcacactcttgtgcatcggagtgagtcttgcctgataagggaagtcactcttggcaccta

SEQ ID NO: 441560 - DNA, 122 bp, Homo sapiens
gagtgggaccctgctctctgggcggtttgcgccgcggtctctggcacctcttgttggcagcgtcgccgttgcaggcacagggcaggcattggggggcgggcagcgggccaggcccaggtgac

SEQ ID NO: 441561 - DNA, 122 bp, Homo sapiens
gacgcgcgggaaagcggcgtcgcgaacagagccagattgagggcccgcgggtggagagagcgacgcccgaggggatggcggcagcgtcccggagcgcctctggctgggcgctactgctgctg

SEQ ID NO: 441562 - DNA, 122 bp, Homo sapiens
cacgtgggtggctcatccctgaagtcacgttctccctttgtgtctttcagtgagctcttccgcccatgagggccccctggccttgagcagcataggtgagcggatcctgctgggctcatgga

SEQ ID NO: 441563 - DNA, 122 bp, Homo sapiens
ggcagacagaaggaatctaaacacagcgcgacctctcccagccttccaatctgcaggcagcgccccagcttggcaggagctaatggaaagccagctggaactggaacccggaattgtaattt

SEQ ID NO: 441564 - DNA, 122 bp, Homo sapiens
gggtgacggacgcacctggaaaatcgggtcactcccacccgaatattgcgcttttcagaccggcttaaaaaacggcgcaccaggagattatatcccgcacatggctccaagggtcctacgcc

SEQ ID NO: 441565 - DNA, 122 bp, Homo sapiens
aggtgtggccacgccccccggcgttcgggattggcgagttgcaagaaatatgacactccgcgtttctgggctgcccggcccagcggcgtccgtccagcgtcccaccctactcctccgcttct

SEQ ID NO: 441566 - DNA, 122 bp, Homo sapiens
gcacgccgagggttaaggaggaggccgcccggcctggagctgggatcgcaggctgggggccgggacacccgggcctcgccgggccgggggcagggccgcgggtctgacagctgctgcggctc

SEQ ID NO: 441567 - DNA, 122 bp, Homo sapiens
gtgggaataggcagttggggggctgtggctcggcggggccgggggctccacttactttcccgatcgggtttcgtcttcatccccagccagagcccagggctgcccttggtgacgcccaggag

SEQ ID NO: 441568 - DNA, 122 bp, Homo sapiens
tttgctttctcactgagttgtgaaaatggaggcacactttcctggcctggcctcttccttcgttcaataaatgaatgaaaccattcaacagaaatctgtgacacacccaccatgtgcggacc

SEQ ID NO: 441569 - DNA, 122 bp, Homo sapiens
agccgctctacccgggaggcccgatcaccacaaccaaacaaacggcattcgccctcaccacggcctcgagctcctcagacctcctcaagtcctccacccgttcgaagaggagcgtcgtcatc

SEQ ID NO: 441570 - DNA, 122 bp, Homo sapiens
atccaaccagtacattcttgttgaagctggtttgttttgggatgcttgccgctccccacccgcgctgaaatgtgggcaccatgagggcacgcaccctgtccgtctccactgctgcaccccta

SEQ ID NO: 441571 - DNA, 122 bp, Homo sapiens
gagccaacagaacacctggaacatgataagtgcttttaaatatgttaaagaaaacaattgcgagagaagagagaacacagacgacatgagacgtcctacaaaaggaggccccttagctatta

SEQ ID NO: 441572 - DNA, 122 bp, Homo sapiens
ttgtgtgtacaccctgtaagcctcccagaacgagaggcgttgggagtcgggcacggacagcgcaatggcatgtgtgttcagagggcggaatcctggggacactgtgtgaaggaagacagaga

SEQ ID NO: 441573 - DNA, 122 bp, Homo sapiens
ctctggctgaaccacagttgccacctcctcttccccatatccctgactccagaacagtcacgtgaacctcgtgggtttgagcgttcagaactcccttagaagctccccttgtcagcggggta

SEQ ID NO: 441574 - DNA, 122 bp, Homo sapiens
gacgtcacctccaggaggactcgctttttcattaatgaaaccggccggcgcgggcgcatgcgcggcaggccgccttccctctcgcttccccctcccctttcccagccgcgctctcaatctct

SEQ ID NO: 441575 - DNA, 122 bp, Homo sapiens
caaggaacaaagtttaaaataacaaaaatgccaagatccctccacagcgtgagtgcacagcgagggggtgggcagctctctcacaccccacacagatggcccctctaccctcacagcccaca

SEQ ID NO: 441576 - DNA, 122 bp, Homo sapiens
atctgggtttcactgccagtggtctcagatgaaccctgagggtgcattttctccttaagtcgtgcataaccctcagcctcccccgagtcagttgacctgttgacctgccgctgggaactccc

SEQ ID NO: 441577 - DNA, 122 bp, Homo sapiens
ccgggtctctcggagagggcgcgcccgctggccagaggaccaatcagtgcacggcaggctcgcaggccgccccccccccccccccccaacccagggaccactcaggcgccggccgctggcgc

SEQ ID NO: 441578 - DNA, 122 bp, Homo sapiens
ggtgaagaaatagggaaaactgctgccttccggaatagctttggattaaattagagatctcgtgatgacgcgttgttttctgccatttatcccaaactttttcagatctagaattcgagagt

SEQ ID NO: 441579 - DNA, 122 bp, Homo sapiens
cctacacatgaatgaacagctctgctcaatacaaattctccagttagatcaagcctccgacggggcatgcctgaatctgaaacaggaagctcctgagctgtcaagaaccatgctaaacatag

SEQ ID NO: 441580 - DNA, 122 bp, Homo sapiens
cgtaatctgccctccttggcctcccaaagtgctgggattacaggtgcgagccactacacccggcctccgctggcacttctaactgtaggacaatagcctggtgctgccagagcccccgggca

SEQ ID NO: 441581 - DNA, 122 bp, Homo sapiens
gaggcgggctcggataaagtcgggacgccttctggtacataaagtttcatctgctctcctcgctcgcacggtccctgccgcctggcggccccctcctcccacggcgggcgcgggcggggaga

SEQ ID NO: 441582 - DNA, 122 bp, Homo sapiens
gtcaaacccatctttcaggatgtagagcgctaattcagggctgcaccgactcatgactgacgcagtcttccgagacagggccccctccaccctcagtcacgcggcagggcccggtcaacctc

SEQ ID NO: 441583 - DNA, 122 bp, Homo sapiens
caagtttcccccgcttggaaagttctggagtccggagcccgtggcccactgggtcagctccggccggcgggtccgggcggccgctgggcgtgcggcgcagctccgactcggcggcgcggaaa

SEQ ID NO: 441584 - DNA, 122 bp, Homo sapiens
tgacatggcatttaaatggctgtcccaatgctactgtgaaatgtcatggtttccagtactcgatagtgagaagctcagaggaaacagcacaacagagagaagaagcaccaatagaggagcaa

SEQ ID NO: 441585 - DNA, 122 bp, Homo sapiens
ccagagcggcgacgaatgggagcccggagcgcaggggcggaggcgcgcccgggcagctaccgagaagcgccaatcaaccatcgaccaatcagatcatcaccgtcaatcgtcatcgaccaatc

SEQ ID NO: 441586 - DNA, 122 bp, Homo sapiens
gggaggtgcgcgcttggccgcgcggggcggggcctctaccggcccgatggagcgcgcgggcgctactagccgcgggggccaagcgcctggcttcttactgcggcttcatactgagggccgag

SEQ ID NO: 441587 - DNA, 122 bp, Homo sapiens
gtgggggactctcacctcggcaacaccggcttcctcggaaagcagctgcgactgctcctccgctcctttgtcagcgtctctaggctgcactgcctgctgggataccggaggactcaaatgcc

SEQ ID NO: 441588 - DNA, 122 bp, Homo sapiens
tagctagcacctggcacatggcagacactcatagctgcctaaggcattggagaactggatcgtgctgcagccagaggcacctgcagagcctcatgggctggctgctgcagggtgtggctgat

SEQ ID NO: 441589 - DNA, 122 bp, Homo sapiens
ccaggttaaccattaccacctcaccagctgccaaatggcaagagggcaaggcgttggaaccgcatctttgagctcctccccttccctatccagcccgccccttgtactgcacccaccaatct

SEQ ID NO: 441590 - DNA, 122 bp, Homo sapiens
ataccagagactttgtggtactgtggccacggtcgtttttctgctactaagggtgaaagtcgattattaaagcaattgcatcttccaagagcgattttcccgcatccctccgggcttggggg

SEQ ID NO: 441591 - DNA, 122 bp, Homo sapiens
tgcctcctctcgggcttggttaatgagtctgtgcgccaagccaggtcgctccgggcagttcgcgcttccgcgcctcggcactcggatgaccgtgtcctattcgtctctctcgtgaatgtcgc

SEQ ID NO: 441592 - DNA, 122 bp, Homo sapiens
cacacgatgtgctagaggtcactccgggtggttctgtgtgtctgttggccccgtccgcgccggcgtgtggtttcccattctgagtgtttgctctgaccccatttttattgctggggttgtgt

SEQ ID NO: 441593 - DNA, 122 bp, Homo sapiens
caaggtctcatcttccacaaggcctctctcagagccgaggtctcatctgcaaaagggaagcgactctgccttttccctcacattgacggcgcgttcctgcctggcctcagtccagaggacgc

SEQ ID NO: 441594 - DNA, 122 bp, Homo sapiens
agaaaactgctttttcctccaactccagttattcattttagaaagtagagctgggactgccgggcagcgtcagcattgaaaataccatagagctgggactgccaggcagcgtcagcattgaa

SEQ ID NO: 441595 - DNA, 122 bp, Homo sapiens
tctgattactaatttattcttcaagcaagtcctttaactcagagttcttaaccttttctgcgccgtgggccccttggcaagcaagtgaagttcgtggactcctacaataatgctataaatgc

SEQ ID NO: 441596 - DNA, 122 bp, Homo sapiens
tcacttcttcatgacctggtccccttctgaatgcatctacctccaccactgtgcctcctgcgcttagaacagtggctaaaacagatcatgcactccaggatcgtttgttaaaggatggatga

SEQ ID NO: 441597 - DNA, 122 bp, Homo sapiens
ttccacaaactctgttgtgctgtctagctaaacaacagcttagatgagaggaagaccttgcggggtaattatctctcccagatcctagccaaagaatgcagccttctgtttgtaccaaggca

SEQ ID NO: 441598 - DNA, 122 bp, Homo sapiens
tgggatccaggccacttcctctctgcttttctcttcagcaaaaatttgtttttcagagcccggcctgaagactcccttggaaaattctccgagccctgagcccaacacgctcttctacacca

SEQ ID NO: 441599 - DNA, 122 bp, Homo sapiens
acaaagcctccacactgtggaaagggaccccagcacgttgctgttgctggctctggcagccgcttttattcccttatctcaccccacccacatcctgatgattggtccatttcatagagagc

SEQ ID NO: 441600 - DNA, 122 bp, Homo sapiens
tgggctggaataaacaatggctacccactggttgccctcaaaggtagcagtgggtctcctcgcactatttttccttcttagaaaaagccaagaaatcatattaacccataatatgattcaca

SEQ ID NO: 441601 - DNA, 122 bp, Homo sapiens
cctctctggggaccccccgcccgcgccccccagaccagcccggctcctgggtcccgaccccgatcccgattcccaacccgaccccgatccggaccccgatctcgcccccgcccgcgctcccc

SEQ ID NO: 441602 - DNA, 122 bp, Homo sapiens
ggtgatctgcctgcttcggcctctcaaagtgctgggatgacaggcatgagccactgcacccggcatgcactgtgattttcatatggaacactgggcaagtgtggctttggtgaattgtatga

SEQ ID NO: 441603 - DNA, 122 bp, Homo sapiens
gctgaggtctaaacaaggaggcagaagtaggtaggtgccacttctcttcccttcattcttcgccaggctctctgctgactcaagtgtaagtgagaacaggtgtgagtgagtgggccggcggg

SEQ ID NO: 441604 - DNA, 122 bp, Homo sapiens
acgaagcttttgttgggaaagcaggcgggactgactttggctcttcagtgtttgcgcatgcgcgtaacgtcctgaggcggtgggtggtatattaggcgaagaggcggggtcgcccaagctgc

SEQ ID NO: 441605 - DNA, 122 bp, Homo sapiens
gccagagccctcagacccctgctgccatcaagcagcggaacagcctcttttgttatcagacggctccaagaatgcggatgcagcagttagctcactctcttaagcctcttgtggttaacatg

SEQ ID NO: 441606 - DNA, 122 bp, Homo sapiens
tcccaaaatagcaaacctctaaaatcaggagtccaatgggcatgcattcaagcctctaatcgtagaatgtatttggctggccggttggctggctggctggttggttggttggttggttggtt

SEQ ID NO: 441607 - DNA, 122 bp, Homo sapiens
ccgaattgccgctcagcccgaattaccgctcaggccgaattaccgctcagcccgaattaccgctcaggccgaattaccgctcagcccgaattaccgctcaggccgaattgccgctcagcccc

SEQ ID NO: 441608 - DNA, 122 bp, Homo sapiens
ttttgaaagatggtgtagcagggtttgagactggcctggatggtggggagaggagggcagcgagcagagacttcctcagacccaaccctctccaggattcagcagcagcaccccaaggctgg

SEQ ID NO: 441609 - DNA, 122 bp, Homo sapiens
cgaggctggcgatccagaaagagcacctcacgccctgggctgcaagcgcagccggacgcgcgcgaccagtgatcgccagccaatggcaagccgggacccggtcccactgctgattggccccc

SEQ ID NO: 441610 - DNA, 122 bp, Homo sapiens
tgagagtgttgggtcaccctgaacaggcaggtaggtctgccccccatcactattgggcatcgggtgagcactgatgagcattttggacttaggagatattttctctaaccctctagaaaacc

SEQ ID NO: 441611 - DNA, 122 bp, Homo sapiens
tttgacgtcaggctctcacggtcccaaaggatgggctttgtacatttccaggccgcagaccggagcctcccatccctttgggcctcttgggcggtccctacggccacctcccgcagctccct

SEQ ID NO: 441612 - DNA, 122 bp, Homo sapiens
tcctgctgtatcctcctccctgggctctggcatgtgctgttgagtttggggacctctgtgcgggctgatggccacacaagaatctgaggctccttttttgtgactctggctcatttaggatc

SEQ ID NO: 441613 - DNA, 122 bp, Homo sapiens
tctccccagggtccacggaatcgcacaagtcacttaggttctcccggatccctgcagagtcggtggtgggtacagcaaatactcaggtcccctgcacttccctgagccttgctctctctatt

SEQ ID NO: 441614 - DNA, 122 bp, Homo sapiens
cttctcctgccgagtcactggactctcaatattcggcagcagattcatttcctggaggagcgggcagaagatgggaccaggcgggagccgcaacgggagattaataccgtctttcttaaagc

SEQ ID NO: 441615 - DNA, 122 bp, Homo sapiens
tattatgatttagagagctacgttctttcttttttcttttcctttaggttgtgtttttggcgaggggtatgttggaatatagaacaaattcaatagcaaatatataccagcatgtccccaat

SEQ ID NO: 441616 - DNA, 122 bp, Homo sapiens
cccggagtcccggctggcacctgtgggatctgtcacctctgggtaggggcggggccaggccgccgcgggattctcctcccatcactgcgccgcggcttccgccccggcctctctgggcggct

SEQ ID NO: 441617 - DNA, 122 bp, Homo sapiens
ggtgtgtgacgaggccctcttctgcctccgggtgcaggacaatgggtgtctcatcgcctgcggctcccagctggggacaaccaccctgctggaggtctcgcctgggctctctaccctccaga

SEQ ID NO: 441618 - DNA, 122 bp, Homo sapiens
cctcggggtgagggaggccactctataaggagaccatgtgtgtggaagcaccttgggaaacgctgcgcgcaggccgggacccagggcagtcggccttccttatccatggattcaatgaactg

SEQ ID NO: 441619 - DNA, 122 bp, Homo sapiens
cacacactgggacttggactcaacctgatgggcttctgggcccagccccagacaaacccccggcaaacgtcccattccgaggaaagcatgagcagatggagtatggaagaaatgcccaagac

SEQ ID NO: 441620 - DNA, 122 bp, Homo sapiens
atacctgcagcacgcagctccgttctgggcgttggagggataaattgagtgcagacccttcgacgtgctgcgctgggctccagctcaattcagaaaagaggtgatcatgtttctgggtgtat

SEQ ID NO: 441621 - DNA, 122 bp, Homo sapiens
tgtcattgacaatgtcttcagcctggccccctaccgtgactatctggatgtgccggcacccgaggccacaactgagcctgactctgccacagctgagcctgactcagccccagccaccagtg

SEQ ID NO: 441622 - DNA, 122 bp, Homo sapiens
ggaagctgaagaggagcgcaggtgatgctttgcacgaaggcggcggtggcgccgaggatgcgctggggcccagggatgtggaagccacaaagaaggggagcgggggcaagaaggcgctaggc

SEQ ID NO: 441623 - DNA, 122 bp, Homo sapiens
ttaaaaggtcttaacgtgggtaaaagcgggaatttctctgttgcgcatgtgcgcgctctccgcctgataggagttgtagttctgcgggtgaagctcggcgttactatcaagcaaccaaactg

SEQ ID NO: 441624 - DNA, 122 bp, Homo sapiens
aatcaagacgactctttggacacattgcactggttgaataattctggtttaacatggctccgcgtctcctctccccgtgtctctccggcgtgcggttcgggtctgcctggccttggattatt

SEQ ID NO: 441625 - DNA, 122 bp, Homo sapiens
ctctcgagagggggcgctttcccggtgcaggggaagccggggctccgagagcaacagaggcggctgaggcgtcgctgtcacctccggctgctgcagtaaaaccccgagccgaggcggggacg

SEQ ID NO: 441626 - DNA, 122 bp, Homo sapiens
ttaccaaacccgaaacccagaaatgtggttgtggctcaggggtcagcacccactagtgcccggacactactgggaggctgggacctgaccaaagcccgtggtgtctgtggcctgaggacagg

SEQ ID NO: 441627 - DNA, 122 bp, Homo sapiens
caaacagatgccagtagtatgtagacgtcttccctatagccaagcagctgtatttcctatcgcacaactcaatattgactgcataattggcctttacaaaacatttattaaaatgcaccatt

SEQ ID NO: 441628 - DNA, 122 bp, Homo sapiens
ccccccgcctgggactacgcgggccccaaggagcggggcggaggatggtgtgctgaaaaccggctgggcagccccgctgggcctccggtggggtggggggcgcactgtcgctccagggctct

SEQ ID NO: 441629 - DNA, 122 bp, Homo sapiens
cacgaggagttcacaaggtgggcctgggagggtagacggggatagagtaggctcaggcatcgggggcctcagtatggagcctgggcgtcccattcccagtagctcctgcccctcccagagtt

SEQ ID NO: 441630 - DNA, 122 bp, Homo sapiens
agtatttgtcctttcgtgatgaacttacttcattaacgtaatgtcttcaaggttcagccacgttgtagcatatgttagaatgtcctccctttttaaggctgaataatattaaattatatgtg

SEQ ID NO: 441631 - DNA, 122 bp, Homo sapiens
cactcctgggaggctcaaaggctcaaacgccattggcagaatccccgacagctcatcctccgccccctgcagggggcggtaatgacagagtcctaatttccggttccggcagtaccggtagc

SEQ ID NO: 441632 - DNA, 122 bp, Homo sapiens
tgtctctatgattttgactatcctccacagaggatattctatgcatatatggttgtccctcgatatccatgggggattggttccaggatccccctcaataccaaaatctgagaatgttaaag

SEQ ID NO: 441633 - DNA, 122 bp, Homo sapiens
tggtttcctgggattctgcagttctcctgcagaacggacccagacagaggggcttccctccggtgcacagagaatccttgcccagtccctgtgctgggggctcgctgacctcttccttctgg

SEQ ID NO: 441634 - DNA, 122 bp, Homo sapiens
ctgccgccgtccaggaggaggcacctgcgagcacggagcgaggagactgcgctgagccggcgcgggctgcgggcggcggctcttggtgaggctccaacgcgccgccgccgccactgccgccg

SEQ ID NO: 441635 - DNA, 122 bp, Homo sapiens
ttggggaggacgcagagcaagatggccaaacagaagccttcactgattgttctccatgcacgaacatcaaatttaacaactatctacacaaaaaagcaccttcataagaaccaaaaatcagt

SEQ ID NO: 441636 - DNA, 122 bp, Homo sapiens
gcccccacaggtgagggtgctgggccagggaagtgggcggggccggtagctgctggggagcgggctgccaagccagggtcgctgcgaccccgctcgccctgcacagcctggggcgcacggtg

SEQ ID NO: 441637 - DNA, 122 bp, Homo sapiens
ggaggtcaagacaggagaatcgcttgagctcaggagtagagcccagcctgggcaacatagcgagtcactgtctcaacaaaaaaaagttagccaggaatggtggtgccagtctatagtcctag

SEQ ID NO: 441638 - DNA, 122 bp, Homo sapiens
tttcatctccaagctggcagaagggacagctttggacatattagtagcttaccttgtaaacggtttttgagatactctcagaatctccacagggggaggagatggcatgctagagctgaggt

SEQ ID NO: 441639 - DNA, 122 bp, Homo sapiens
actctcccgcccctgcctgtccctctcgggcagaacccacctctcagccccagcgaccagcggcaggtgagcagcagcagcaacccagtcctgagaactgcttcgtttgtaaagaaagtcgg

SEQ ID NO: 441640 - DNA, 122 bp, Homo sapiens
gatttttttccttcttaaacttattcctctttgagccctatcttctctactacccagtgacgtgactcatttggaagccaccctgtgcctttgtgatatgacagcttagcatgtgaccagct

SEQ ID NO: 441641 - DNA, 122 bp, Homo sapiens
acgggcttggaaagcggcgcaccgcgagattgtatcccgcacctggctcggagggtcctgcgcccacggagtctcgctggttgctagcacagcagtctgagatcgagctgcggggcggcagt

SEQ ID NO: 441642 - DNA, 122 bp, Homo sapiens
caagggtctatactgcaagcttgtccaacctgtggcccactggccatgtgaggtccaggacggctttgaatggagcccaacacaaattggtaaaggttcttaaaacattatgagattttttt

SEQ ID NO: 441643 - DNA, 122 bp, Homo sapiens
catttcttcaacacgtccccccatccttccctcttttctccattctctgcatttgatccccggtatattccagcctccaggccaacaaacttctccgcgtccgccgggagcaggtcagggaa

SEQ ID NO: 441644 - DNA, 122 bp, Homo sapiens
cctcagttttggcctcgcctttttgctctttctaacgagcacgaaggggcgatagggacgcggaggacacctttattcttggctggttctagcatgctgcttcatgtcccctggagcagcgt

SEQ ID NO: 441645 - DNA, 122 bp, Homo sapiens
taagagaaacaagtgagtgtagtgggttgcgtggtcaaaaaagtggggaagccaccgcaacgaggggtgagtctgagccaaagagtggctcagagctccccgcccacctcgtgccgggccgt

SEQ ID NO: 441646 - DNA, 122 bp, Homo sapiens
agcaggcatcagtttttgtctctggcctatttgcatctctttcttatactggaaggaagccgtgctgtgactcattactactcttttctaccttttcactgcatgtccaaagcaggtgaccc

SEQ ID NO: 441647 - DNA, 122 bp, Homo sapiens
agaaacaaaactcttgagaatcgctgagctgtaaaaatgttagaaagccggtgtcccaggcgccctgagaaagccgggagagggcggtggctgcccacaggccgcctccagccccgcgcgag

SEQ ID NO: 441648 - DNA, 122 bp, Homo sapiens
tggagcgcccgagtctggcgggtctgggtctccgcctccgggcccagccgcttccgccgccggctacgcagtggtctccgagccacctactgtgtgtcccgccgggcccctgggagcggccg

SEQ ID NO: 441649 - DNA, 122 bp, Homo sapiens
aaaagaaattgcttacgtttcgccaaagctctaggtttttgcttggagacctcactggtccgaggctggccaagccggggactgcgtggcgttcagcactcctgcgcctccacagcctgggt

SEQ ID NO: 441650 - DNA, 122 bp, Homo sapiens
gcaggtaggttttccccaaatggagatccagagggcccaggatccttccataccttcttgcgctctcatttctaatgtgtagcttcctggtatgttctgggcactgacatcaagctagcaaa

SEQ ID NO: 441651 - DNA, 122 bp, Homo sapiens
gtttgacccctcaccactgagaggagtaaggtgtacttccttgtcaagcatgactccgagcggcacttcttccacaccgcgcagctgcctgtgcctggcaggggcctcctgcggccggaacg

SEQ ID NO: 441652 - DNA, 122 bp, Homo sapiens
cctgtgcctctcagcacttcctgctctgggcttccttctctgcgctgctcacagcggagacgtggtcatgaggccgggtcgccttggagccagggcctctcagtccctgtggtggtctctgg

SEQ ID NO: 441653 - DNA, 122 bp, Homo sapiens
ggacgcacatgacatgaactactgattagaactggtggaaaaagttgtttattgcaactgcgaggaagttagactttaaaatgcagaacaaagactgaacatactgacataccggttctttg

SEQ ID NO: 441654 - DNA, 122 bp, Homo sapiens
ggagcgttgacagatgctgtcttggagcgggcaccgccgggggaaaagtctggactgcctcggcgagaagcggccggtaggcaaccggccccagcctcgcattcgcctcaaagaccccaatt

SEQ ID NO: 441655 - DNA, 122 bp, Homo sapiens
gtagctgtatggccgtcaagacatgattggatcccctaagtatatttcactcagttatgtcgcttaattgaaagtcatatgctctatttagcagaagcgaggaagaccagtcctcatcctac

SEQ ID NO: 441656 - DNA, 122 bp, Homo sapiens
tccgatcggctgtgtcctccttttctctctttatctgagagatgtgtgtccatggcaagccggcttccatcctaacctgttgctccaaatgctgtcaaacacacagacgactcccaggataa

SEQ ID NO: 441657 - DNA, 122 bp, Homo sapiens
cctctctctctctcgagccacagaagtcttctgcttcgctggtgacagatggacctgaggcgggtggtgtggcaggtggctatgagcaggggtgtaggtctgagtcttgggtttgactctgt

SEQ ID NO: 441658 - DNA, 122 bp, Homo sapiens
ctaggtcagagaggggccgcctgggatgcacagcacattgatagattacttctgggcccacggggcctcattaccatcatatccatcatcttctgctagtaccaaataatggatgtaattta

SEQ ID NO: 441659 - DNA, 122 bp, Homo sapiens
ccagccccgggcgctcgctcgggggcctacagaatggcgtgtttcggggttgtggcgggccgaggggcggggtcgcagcaaggccccgcctgtcccctcctgggcctctcaaagtctgagcc

SEQ ID NO: 441660 - DNA, 122 bp, Homo sapiens
acagcagggaggggacagatagaaaagctgacggcaatcctggttaagagatgctgcccccgccggcctgtgcagggcacaaagctgaattcctagagccgcgaccacgccagatccttctc

SEQ ID NO: 441661 - DNA, 122 bp, Homo sapiens
tcactagatgcctgcaatcaatttttaattacagcagcagtcacgatcggagataaagcacgcaacatgctgagaaagaaccaaaagcctgtttattacagttccagtccaccatgagccag

SEQ ID NO: 441662 - DNA, 122 bp, Homo sapiens
ctgagtgagtagccctgggtggggcagacgtccttgtttaacaggctgcacaggcagttccgatgggcagccaaagttgagaaccgccgctccttaggggcagctatgagcagcggcgggac

SEQ ID NO: 441663 - DNA, 122 bp, Homo sapiens
tccccacttgaaccttctctgggtctcgccggcttatcatgtcgcctggtgagtggactgcgccgggctgggcctgctcctcctgacagccttgaggactgtcccggcatgttgctgcatcc

SEQ ID NO: 441664 - DNA, 122 bp, Homo sapiens
ggagacttccggcagggcgggcgcggggtcttggcgaacggtcttcggaagcggcggcggcgcgatgaccacgctacgggcctttacctgcgacgacctgttccgcttcaacaacatgtgag

SEQ ID NO: 441665 - DNA, 122 bp, Homo sapiens
cagcgtggtttcagcattaaggcatggactgaatttcaggaaaatgcttgtgattagcatcgcttattgctattttacttgaagctaaaagataaatcagagaaacaatatcccagtaaggg

SEQ ID NO: 441666 - DNA, 122 bp, Homo sapiens
ggtgagcccatctgggtcctgctggatgcatgtgcagggagggggatacctgggttaggtcgattatgagaaccttatattgtcctgaagagaggtgatgacttaaaaatcatgcccaatag

SEQ ID NO: 441667 - DNA, 122 bp, Homo sapiens
cagtgggaagagctacagagaaggtgtcattgtaggtgcctggtaaacaatagctgttgtcgggtgtggtggctcacacttgtaatctcagcactttgggaggccaaggcaggaggggcgct

SEQ ID NO: 441668 - DNA, 122 bp, Homo sapiens
ggagatggccacggtgcgcatgcagcaaggtctactcccgcgaggtgaccacgggacagacgatcctctgaggtttccaggaagacccccgccctaatcctctgaaggtcggaggtcacagg

SEQ ID NO: 441669 - DNA, 122 bp, Homo sapiens
ttccacaaagaatttaaagcaatttagaaggctccacaagatgtcaggtttgcacgtattcgaagtagtcgagaaaacagaggtgaaacaagattaaggctatagccacagataaaatgaat

SEQ ID NO: 441670 - DNA, 122 bp, Homo sapiens
gacgatgagcctgcggatgccgttcacccagcagccgcgcacgaacatgttcacgagcgacgtgccctcaaacaccgccgaggccatgtcgcacgcatgcccccgccaagggctccccagcc

SEQ ID NO: 441671 - DNA, 122 bp, Homo sapiens
ctgggttgtggggtctattatccactgataatattgggagtctagggcacagtagccaaacgagattgttgcaggccgttatctgggctgcctcctgtttttgtaataaacccttatttgga

SEQ ID NO: 441672 - DNA, 122 bp, Homo sapiens
cccaccgctccctgccacgactcgcgggcgctacccaggcctgcccatatcgagcccagccgagccaaacctcaccccggtacatgccgaagtagccctcggagcggacggtcttgatgagg

SEQ ID NO: 441673 - DNA, 122 bp, Homo sapiens
atggaccaagccaggctgtgggccaggcactgtactaagggctttgcaaatgctagctctcgtgctcctcctggcaatttcacggtgtaggggtggttacacagtcaactctcagagtgact

SEQ ID NO: 441674 - DNA, 122 bp, Homo sapiens
agcaatcagaaaatatgctgatataacgtcaggatatgcctaatgtatatcctgatataacgtcaggatatgcctgtaggaatgatcagaataagtaggtaggaaatgatcagaataagtaa

SEQ ID NO: 441675 - DNA, 122 bp, Homo sapiens
gccaaggcaagggggatcagggtctcctggcctgtgtggcccagaggtactagtctgcagcggggaggggtgttgggaccctggggccctctcttctgcagcctccaaacctcagcagaccc

SEQ ID NO: 441676 - DNA, 122 bp, Homo sapiens
gagcaggtatggcgggtgcagtggcggcccggcaggttacggggctgggtgcggagcgagcgtgatctgagtggagagcgggccggggcaggagcgtcgggtgggtcggaggtgcctggacc

SEQ ID NO: 441677 - DNA, 122 bp, Homo sapiens
agatagaaagaaaaggatcacacacacagacacacccctactttatacttcaggcctgcacggtcctccatacttgaaccctcttgcaaaccgtactaagaaatatatgtgcacatgcatgt

SEQ ID NO: 441678 - DNA, 122 bp, Homo sapiens
ggtccccaagcaagtggttgacactgaaggccacgtctgctcctgtggctgggtatcccccgggctggctggaataaccaccgcttgtgtcatcgaagaggggagggggatccggggctgcc

SEQ ID NO: 441679 - DNA, 122 bp, Homo sapiens
actggcttcacccacatttttttgttgttgttcagtcctaacccagcgcagccgtttctgcgcctgatctcagcggacgcagtgcgggacttctccctttatttctgcagagctgagggcag

SEQ ID NO: 441680 - DNA, 122 bp, Homo sapiens
ccgccgcgggccgccccctccccgcgcactaaaataaccccctgctgccggcccagcgcgcggctcactagcgttcctgcggctcctggcgcactggccgggcccccagccgcctccagcct

SEQ ID NO: 441681 - DNA, 122 bp, Homo sapiens
gggtttctaagcggaggaagctctaggcgtttgtgttctgggcttgcagcggtggccgcgcgctcccggaggagtcgagctggaggaggggacagtttgggagtgcgagagtctaaagacgc

SEQ ID NO: 441682 - DNA, 122 bp, Homo sapiens
gaaggggccggccaatgccctgtggatgcagatctgggagacctcgcagggcgtgggccgcggcggctcgggcttcgcgtcctatttctgcctcaactcgccggcgctggacacggcggccg

SEQ ID NO: 441683 - DNA, 122 bp, Homo sapiens
ctcacgcagtaacccggggagggcagcagcagggctgtggaaagcaccagcagggcgctccggggctgggccttcacagcgcccctggaggctcctgcagttcacagagtggagacagacag

SEQ ID NO: 441684 - DNA, 122 bp, Homo sapiens
gaagcggaagtctgggaagctttagggtcgctggagggggaccccggttggagagaggagcggaactcctggacaagccctgacaagccaagccaaaggtccgctccggcgcgggtgggtga

SEQ ID NO: 441685 - DNA, 122 bp, Homo sapiens
ggaatgtccaggggcggggcagcgagcgagcgcgaagcaatcctgaggcggtctagggggcggggcgttcagggggcgtggccgtgcaggggcgggctccgagcgtggggtgggcgcttgcg

SEQ ID NO: 441686 - DNA, 122 bp, Homo sapiens
ggtggcgaccccaagatgcggcctcagccgccggccgtgtttgtgctccagccgatgaagcgagtgcaaagggctgtacaaacgcgaggcactgaacaaacactgagcgtgccgtccagatg

SEQ ID NO: 441687 - DNA, 122 bp, Homo sapiens
tccctcccgtctttgacggggccaaactcggggtgtaaattaggatcctcactgaagcggcgggaccctgagaggctttttcctggccccttagttgtgggttttcctgcgggcggtggagc

SEQ ID NO: 441688 - DNA, 122 bp, Homo sapiens
tatccataactggtatgacagggaatctcaaaaaaggaaatatcctgttctgaggtctcccgctggattaagtgctcatgactcacagaggccctgccttagctctcagtttcagtgactta

SEQ ID NO: 441689 - DNA, 122 bp, Homo sapiens
acattttgtttctcaaactactgtcactcatctcaaagatactgcagcagcaaaaggagacggaggcagaagctgaatccccaaagggtgagcccaggcagatggggaggctggtggagcct

SEQ ID NO: 441690 - DNA, 122 bp, Homo sapiens
tgcccaggccatggagaagctgattcaaactttacttgtccacaccggtagaggtgaccgcgatgagaataccagaaacagcactacgaccctcagaactcagggtacctccagctgcaggg

SEQ ID NO: 441691 - DNA, 122 bp, Homo sapiens
aggaaaaactgaatgatagagcacaggtaccgctcccctttcctcatcatgcctctctgtcgcctctttgttcatagttgaccacggcatgtttgagaatttgaacacagccctcactccaa

SEQ ID NO: 441692 - DNA, 122 bp, Homo sapiens
ctagttcttgggaaggtctccagacagaaataagtgtggcttgtctgaggacctcttattcgcctattaaccttccctccccagtaaacactcctgggaacaacacacattgtagaaccacg

SEQ ID NO: 441693 - DNA, 122 bp, Homo sapiens
acacggggcagcagggccatgcccatcaccagagccctgagtccacgtgctctgacgcagcgtccaccaggcgctgggtacagcagcctcacgtcgggaagtcccgccaccacttacacctt

SEQ ID NO: 441694 - DNA, 122 bp, Homo sapiens
aatcctaaactatggacttcaggtgataatgatgggttcatcaattataacatgtgccaccgtggtgcaggatgtcagtagccagggaggttaggtgtgtggggatagggatagacgggaac

SEQ ID NO: 441695 - DNA, 122 bp, Homo sapiens
caaagaggatgaccactcccagtgcgtgcacgttctctccgctaatgtcactgctcaaaacgttcagaaaattaacacttacgccagggtcggaggcctcaggaggttctgtatccttctca

SEQ ID NO: 441696 - DNA, 122 bp, Homo sapiens
ctagtccagtgccagacactcagtgaaacggtggccgggctgaccagatctggggatgcacgggctcttctttcatctcctcaacaacagcagcagagacctcaaaaggctgtgtgaaattc

SEQ ID NO: 441697 - DNA, 122 bp, Homo sapiens
gcggacgggcgcggggaggccgggggcagcgggatctccaggagtttcccgggcctctgccgcggtgtgttggtcggcgggggacggaggccagtgagtgggcgcgcacttggacgtatgtg

SEQ ID NO: 441698 - DNA, 122 bp, Homo sapiens
catgcaataattaaatgtcctatggtgacctggaggcactgctaaggaacacagaagcctcgcaacagtcagtgacacacatacagatggtcagtcaacagatggatatacacacaaatcac

SEQ ID NO: 441699 - DNA, 122 bp, Homo sapiens
ggcctgggcagaatggctccgcctccgcccagctgctggtaaaagaggatcctggctaggcggcttccctgttggcctgtcagccaaggtctttacacatcctgctccctgggatgctcact

SEQ ID NO: 441700 - DNA, 122 bp, Homo sapiens
gaggaagccgatcagaccttgagggtgaggggttctttctaaactgacctacctattcctcggccgcctcccacacctccgggcctcactcgcgcctccccgccaggccgtgcgccccgcgt

SEQ ID NO: 441701 - DNA, 122 bp, Homo sapiens
gctgagtgaggtgcccttatgctgcattccaaagacactttgaataccttttggtactcacgcttcactcagatcccccaccagattgagctccttgaacccaggaactatatcttcctttt

SEQ ID NO: 441702 - DNA, 122 bp, Homo sapiens
catgcccctagccaatgaacctggagcgcgctgccccctctcagcttgcggcccgaaaggcgcgccagttcctttgttctcattggcccgcaccaagcgctgcctgcgcagagcctgctagg

SEQ ID NO: 441703 - DNA, 122 bp, Homo sapiens
ccccggctggggctctctaccgcggtccttcccctccccaccgtcttcccggtgtcggcccggggctgggcatcacgcttctgctcttacagagctgacagcctgcaggggagacacggaga

SEQ ID NO: 441704 - DNA, 122 bp, Homo sapiens
caagcagatgatgttgtcctaagaattaatttcagccggtgaaagagtacaggcaaaaaacgtggtctcggactttccggtgatgcttaagaacatagttgcagtttttgttctgattcttt

SEQ ID NO: 441705 - DNA, 122 bp, Homo sapiens
cggcctcccccatttctttctcttcataattctcatcactatctgtccatttctctgggccggtggtgctgtccacgtggctgttgaagtctcccacaggttgcaggagctgaggtgggcag

SEQ ID NO: 441706 - DNA, 122 bp, Homo sapiens
gggaagaggcccaagaggcttcctgtccccttgggggcagcagagccaaatgcttgggctcgggcccaagctgcctgccctgcaggggtccagggaggtcctgatgagtcctgccccttccc

SEQ ID NO: 441707 - DNA, 122 bp, Homo sapiens
aggcgccgtcacttaaattgatgttttttaaagacaaagaattatgttaagggtctagggcggggaacaggagaggaacgcatcctgaaagactgtgctgcccaggagagggcacgtgcatc

SEQ ID NO: 441708 - DNA, 122 bp, Homo sapiens
agtaaagttaaaggggtggaaaccgggcccccctccggaagggtccggggctgggaggcgcgtctgtctctgggcatgctcagtgcaggggcagggctggggcgggggtggctgaaagtttt

SEQ ID NO: 441709 - DNA, 122 bp, Homo sapiens
gtgttcacaccagtgcccatccatggcatctgcctctagaggctcacttggtgtctgtaccgagagggggaaagcaggattttgcctaccttgcagcctggttggctataaaatagcagaga

SEQ ID NO: 441710 - DNA, 122 bp, Homo sapiens
tgggactgttcaggctactggtggcgggatgtgggcctgagagcttggttgcagaaacttcggggtctacaaaggccggcgggagctgagccaaaagagcttgtttgctgggaggcaggagc

SEQ ID NO: 441711 - DNA, 122 bp, Homo sapiens
ttaaacctgacccaaagtgaacagcaaggtccagaaacggcaaggcttgaggtcagcctccgtccccggacactttgaaggacggcagatccctgaccccttggtggcccgcgaggatcgcg

SEQ ID NO: 441712 - DNA, 122 bp, Homo sapiens
ctcaggtgatctgccagcatcaggctcccaaagtgctggggttacaggcatgagccaccacgcctggcctgtccctatagttttgatatttccagaatatcatatagatggaatcatacagt

SEQ ID NO: 441713 - DNA, 122 bp, Homo sapiens
atctgacagtaattagctaaactgtctggaacgaaaacctattattagtagagcacagctcgaggatttcaaagatctacttttcagacaagagaatgcaaatgccccagaaggcgatggta

SEQ ID NO: 441714 - DNA, 122 bp, Homo sapiens
agaggtgataggagcagagccctcagacttaggggagcatctctgaggctaacctgggaccgttctttgtcctcttgcagaagtgaaaataacccagattgccttttgacctccccactatc

SEQ ID NO: 441715 - DNA, 122 bp, Homo sapiens
tagaatcaagtgcaatctcagtgaatttgtgctctacatatctctgcttgtcatcaaagtcgctccacaaacaaaggaaagttgattgttagtatcatgcaactaccactttcatgtgggat

SEQ ID NO: 441716 - DNA, 122 bp, Homo sapiens
ttagtgagatccatgcaacacctgccttgtggaggggaagcagggctgacagtggcgtggcgttgagctaagtttagctgcctgtgtgatctctgccaacactcagggatgtgggaggggct

SEQ ID NO: 441717 - DNA, 122 bp, Homo sapiens
tgttgctggttttcctctgatctcaggagttgccagtgattggagttagggattatgacccgtagtatctggaaaacaagagatgtctgttttatgtggcctccagttgctctcagtgactg

SEQ ID NO: 441718 - DNA, 122 bp, Homo sapiens
gtattttatttattttgcataagacgatgcataatagatgatgctagggcgacggctaggcgagaaagcctttgtttctcatcacagaggggctttaaagaagaggctcgcagcgacaagtg

SEQ ID NO: 441719 - DNA, 122 bp, Homo sapiens
ttctggaggggctgtggcacatcctccatgctggtcctcctccccatcagcccattatcccgtggtttccctagttgggcccagacactttctgactggcagcaaaagactaaccccagttc

SEQ ID NO: 441720 - DNA, 122 bp, Homo sapiens
taagtctattgcccaaatgctttacatttgaaggtcctgaggtatttgtgagaatctgaacgaacgttcatggtcagctcagaaatgttggtgtgttgaggccagaatgcattcaatctcct

SEQ ID NO: 441721 - DNA, 122 bp, Homo sapiens
cacccttcgtcaggatgtaacgagtgagagagaacagctagaaaagggtggagaagtaggcgggaggaagctatttaaaagaccctaaagtgctgcagctgttttggctaatttttctcatc

SEQ ID NO: 441722 - DNA, 122 bp, Homo sapiens
cccgctgggcttccgtggtgcatgccagggacctcagaatggagcgccccactgagccagcggctctgcttcaggcccaagagcagggagtaagagagaagcctgctcaggcagaacaggtg

SEQ ID NO: 441723 - DNA, 122 bp, Homo sapiens
ggcccctcagcggcatggcgtgcggggcgacgctgaagcggcccatggagttcgaggcggcgctgctgagccccggctccccgaagcggcggcgctgcgcccctctgcccggccccactccg

SEQ ID NO: 441724 - DNA, 122 bp, Homo sapiens
tgccgcagacagaccccagagggagccgcgcccagcccgctgggcggccccggcttcccgcgaccccctccagaccctgggcagaaagagcgccctgctgtcccgacagagccactgtgctt

SEQ ID NO: 441725 - DNA, 122 bp, Homo sapiens
catgctgactcatgtgcccgcagctagcaggagctggcagcatgggctccccaggggctacgacaggctgggggcttctggattataagacggagaagtatgtgatgaccaggaactggcgg

SEQ ID NO: 441726 - DNA, 122 bp, Homo sapiens
ggtgaagagtaaatagatcaccaagtattttgaaagttaccttccttggccaggcacagtcgctcacgcctgtaatcccagcactttagaaagccaaggcgggaagatcacctgaacccagc

SEQ ID NO: 441727 - DNA, 122 bp, Homo sapiens
ctgcactggcccggtgcttaggaagccctctgtgtgagtggaagctgcgcactgtcaggacgcactccacgtccctgaaagagtctcacaaatcagctcctagccagtgtctctggcactgg

SEQ ID NO: 441728 - DNA, 122 bp, Homo sapiens
attggagaatttaaagtccctatgaacacagtggattttggccatgtaactgaggaatggcgtgacctgcaaagtgctgagaaggaagaggtaagggaattactagcatttctaacatcaca

SEQ ID NO: 441729 - DNA, 122 bp, Homo sapiens
ctggaaataaaataatgagggtttgagacccgggctccgacctcccttctgttctgggcccgtgtgaggccggggacggcccgggcaggtgtcagcagcaggagtgttttccggggtccctg

SEQ ID NO: 441730 - DNA, 122 bp, Homo sapiens
gagagagtagggggaccgctgagctctgtccacagactagagcaggaaaggggggaaaggcggcgatagaggttagcaggaatgtttaattatcaggagcaggaacagaactgagggcatgc

SEQ ID NO: 441731 - DNA, 122 bp, Homo sapiens
ggcgcccttcgtgcgttcttggtgccacagcggcctccagtggttctctgaggaaccacacgctgtctccaccgccaggctccagcttgtccctaaagccagggcggaaggcggcggcgccc

SEQ ID NO: 441732 - DNA, 122 bp, Homo sapiens
gagcacagcactgaggcgcaaaggctccggctgcagttcttctgggttcaaactgtttgccggctgtggcttttgacgggtcatgtaacaactccgtgccttagtctccataatttaaaaac

SEQ ID NO: 441733 - DNA, 122 bp, Homo sapiens
accaatgtgcagactactgtacaacggcattgtcctgaacaggtagtctgaacactggggcgacggagcaggatctccagaagcttccttctatgtacttaaaatcctctcccggtcctcag

SEQ ID NO: 441734 - DNA, 122 bp, Homo sapiens
taatgctgcttgcctccaaagaaggaaggggaatatctgggctcagaggtgagagggagccgttttactgtgtacccttttgaaatgtgaaacttgtgaacatgtgacataatcagaagtta

SEQ ID NO: 441735 - DNA, 122 bp, Homo sapiens
gctcgttaaagagaatgttctgccaaataattttttccaatgacagtggttttccttctccgcttcttctgcatagggattgggaagcatttaaggggctttcattgcatgtcaatatgctg

SEQ ID NO: 441736 - DNA, 122 bp, Homo sapiens
cgtgctcggacgtcacctgctttaggtgcacccggtttaatagtgcacggccagctcccccgaatccatgggtccagtcaacacagattgaaaatgtttgggaaccaaaacaataacaaata

SEQ ID NO: 441737 - DNA, 122 bp, Homo sapiens
ctctcagtatgttgcccaggctggtcttcaattcctgagatcaagcgatacatccgtctccgccttccaaagtgctgagattacagccctgagacactgtgcccggccttaaacacaaatct

SEQ ID NO: 441738 - DNA, 122 bp, Homo sapiens
ccgaagtgaccgtgtgaccggcggggcagggccggggctgctgggcgtggcagagcagagcgggggccgggaggggccaggagcagagcttctagccttgccactctcccttcccttgtccc

SEQ ID NO: 441739 - DNA, 122 bp, Homo sapiens
tcgagggcttggtgctggagcacaagggcgcccattactccaacgaggtgtatgagctggcgcaggtgctgcgctgggcaggccctgaggagcggctccggcgggtggcggagcgcgtggca

SEQ ID NO: 441740 - DNA, 122 bp, Homo sapiens
gcgggggaaggagagcaagagggagggcaagagagtcaccatctgggtggggcgcaaagccgcacatgttggggagtccttgtcagaaatgcaaggccctgctgacgaggtcgcacgctggc

SEQ ID NO: 441741 - DNA, 122 bp, Homo sapiens
tcctgtgggactgagcgcttaacctgtgtggcaactgtgctaacttcaggcaattagtaacgaaattgaattgcattgtaggacattcagctggtgtcagggaattgctattggaatgatgt

SEQ ID NO: 441742 - DNA, 122 bp, Homo sapiens
tgcatttgtgcattgataaaggggcgcccttcatcgggagtaagtcccagaaaccacaagcgttggctcatgcctgtgtggagtcacaggcaggtggccacggggaattagctgaagaccag

SEQ ID NO: 441743 - DNA, 122 bp, Homo sapiens
aggcccgggtcagtggcaacagctgtggcagtggggctgtaaaggggccctgagcccatccggaatgtgaagggcaggtccttcagggaggacaggtgtgtcaagtgagctgccggcccttg

SEQ ID NO: 441744 - DNA, 122 bp, Homo sapiens
tcgctgcccgcctcggccgccggttacgaggctctgctggccccgccgctccgccccccgcgcgcctacctcagcctgcacgaggccgccccgcacctccacctgcccagggacccgctggc

SEQ ID NO: 441745 - DNA, 122 bp, Homo sapiens
ctgggttaggcaactcgatttcacgaaagcggacaccaacgctctacccagaggcccgagcgtcgtctaacgtttccattggccctttcggccttcactcagctgctagcaacgcagtctgc

SEQ ID NO: 441746 - DNA, 122 bp, Homo sapiens
cggccgcgattagcataatgtagtattttcagtttcaacaacaccacggcgattggcggccgccccgctgccccgccccgccgcggcccggcccccgcgcaccgcccattggccgcgcgcac

SEQ ID NO: 441747 - DNA, 122 bp, Homo sapiens
ccctttccctacaactgcagcctccttattctgctctggcccagcagagtgaggaggggccgcccacccagccatacctgccggtggctgctgggggtgcatggtcagaagaggaaagatgc

SEQ ID NO: 441748 - DNA, 122 bp, Homo sapiens
gctgtttctagtttcatttgcaaatgaatggacacagcaggacttcagaagggttcacatcgaatggtcataaatatacgaagaacaaatttagcactctccagagctagtgttaagagcta

SEQ ID NO: 441749 - DNA, 122 bp, Homo sapiens
acccctagcctaggtgtatgttgggctacaccggctatgtacacgtctctccgtgatgttcgcacaatgatgaaatggcctaaggatgcatttctcggaacgtatccccgtcgttgagcaac

SEQ ID NO: 441750 - DNA, 122 bp, Homo sapiens
ttggtttgtatgatgttttttcatgattggactgaggttatgcattttttttattaagaacgtcacagagatgatattgtgcacccgccccccgcaatatatatcttaaacagaagtttctg

SEQ ID NO: 441751 - DNA, 122 bp, Homo sapiens
catggccacggacgagctggccaccaagctgagccggcggctgcagatggagggcgagggcggcggcgagaccccggagcagcccgggctgaacggggcagcggcggcggcggcgggggcac

SEQ ID NO: 441752 - DNA, 122 bp, Homo sapiens
ggtgaaatgggtggtgctgacctggtagaaactccacgggcctcaaagcggaacctttcccgaattaaccagcctgtctggcctgtctttggcagctcaagcaggaagccaggaccagggag

SEQ ID NO: 441753 - DNA, 122 bp, Homo sapiens
ccacccccttgtggcagcctcaggggtgaaaaatcaggacccacccagtgtgaggaataacgcaacgcgagctctcagcaacgcggaaagaaactggccagcaacctagcttaaaggatcct

SEQ ID NO: 441754 - DNA, 122 bp, Homo sapiens
cgtcccgccccgcgccgtggccccgcccacacgccgtcagcttcgcgtctgtcctcgccccgccctgcatcatcgccccgccctgcatcatcgccccgcccacacgccgcctgccaggcgtg

SEQ ID NO: 441755 - DNA, 122 bp, Homo sapiens
tacagagggagccagtgagcagccttgacctcctgaggcctcacagactcactgcaagagcggcttctaggcagtgaagctaagctgcgtcctggagggggcgccacagtccatcatatgct

SEQ ID NO: 441756 - DNA, 122 bp, Homo sapiens
ttggatcagagggagatgcaggaagtcagggtgaatactgcctcttctcctcacccctgccggcctcagatggcccagcctgataccagggccccttgaggaagcagcacctttaaagggtc

SEQ ID NO: 441757 - DNA, 122 bp, Homo sapiens
taccttcatgctgtcagttctgctcagagtggctgggtgtctgcggccccagactgcaaccgcccagagttatgcgctgggcccccgccagccgccccagccccgccccccttcccgtagct

SEQ ID NO: 441758 - DNA, 122 bp, Homo sapiens
ctgttgcccccatagccggcaggtctgggctcaatccttcttccttcaacagaccttggccgacttccccatctcacgcagccccactgctgctcctccctgcccacaccccttcgccaccc

SEQ ID NO: 441759 - DNA, 122 bp, Homo sapiens
actggtggtgaacttggctggggtagcagattttcacgttaatgatatttacctgcaccccgtcctctctcatgtttgctttttcagggcagcctcttcgcttcagaagcctggcaaattga

SEQ ID NO: 441760 - DNA, 122 bp, Homo sapiens
gcgggccttccagagcgcctgcgcgctgccatcctgtgcgccaccagctcctagcagcaccgagcgggaacagagcgtgcgcaaatcctccacgtttcccaggacaggctatgactcggtaa

SEQ ID NO: 441761 - DNA, 122 bp, Homo sapiens
cagcgggtccatctcctttgactccagtaactgagaggtaaatcagggtgacccgtttgacgtgtaaagaacactgaggccagggaaggtgaaccccaggcggcgtctctctcaggtagaga

SEQ ID NO: 441762 - DNA, 122 bp, Homo sapiens
ggcccggcgaggggcgggagcgattgtgaacggcggcggggcagagccaatcgcggaaaacggcaggaggagagccaatcccgagggtcggcggacgcgggaaggggcggagccagaggcgg

SEQ ID NO: 441763 - DNA, 122 bp, Homo sapiens
caggccccaccagggaggaggaggccgctctccctcccaccaccgttgtcgggggtgacccgaggtgttccagatgaggagctgaatcactgggacttaagtcaataagtggcagccaccag

SEQ ID NO: 441764 - DNA, 122 bp, Homo sapiens
atgacctcagaatcttcaccactgcagccactattaactgctctgagctggcttgtgagacgaagcctatttgtcttctattctctccaagaataaggcagagggctgtggtgagtcccact

SEQ ID NO: 441765 - DNA, 122 bp, Homo sapiens
ccagactccgtctcaaaaaaaaaaaaaaaaaaagaaaagaaagaaagcaaaggaggagctcgtaagcccagtaagactagacatctctgggaaagccaagactgaaggctaggggcctcttt

SEQ ID NO: 441766 - DNA, 122 bp, Homo sapiens
ccacgcaagtggagagtgggttctgaaagctctgggatgaaccaccctctctctttctgtcgttcctcttttaggaccccggctgcggcgaggaggaaggagccagcctagcagcttctgcg

SEQ ID NO: 441767 - DNA, 122 bp, Homo sapiens
cagacgccgcatggaatgcggggccggctccactccttccgtaatgtggttttttatagtcgggggactcattgtcccgtggccactgccagctgtctgtaagctcaggattagagagcctg

SEQ ID NO: 441768 - DNA, 122 bp, Homo sapiens
gaaggacagcgacaaggaagagcggggtgaggaggacagcgagaatgagtccacccacagcggcaacaacgccgtctcagagaacgaggctgagctggctcccaatgccagcaaccacatgg

SEQ ID NO: 441769 - DNA, 122 bp, Homo sapiens
cgagacaagcagttagtctctgcatgtggctaaaattataacaggttaccttagaagcttcgagacagttaatgatctcccaggaaaatcaggaatcaggaagagccaatcttgagagacag

SEQ ID NO: 441770 - DNA, 122 bp, Homo sapiens
ttgtggtaaatgatgggctccgatgtctagaggacgtctcaaagccatcgcatttggtaccgtctgcactacaggtgcaaagggcggggaaactgacagcgttactgtcctggggcggaccc

SEQ ID NO: 441771 - DNA, 122 bp, Homo sapiens
attcctccaagacaggaatttcactggccagcctcttcagctcccagctggactgaacagcgatgagtgtgggcccccggcgctcctcctgggtcaaggcaaaatggaagaaaagacctggg

SEQ ID NO: 441772 - DNA, 122 bp, Homo sapiens
aagaaaaagaaaaaacgtagtcacgtagttttcattctagattagaagcatggatgaaaccgaaagactattcaaagaaaattgcttttaaaagaggaaggaagaactaatcttgaaggctg

SEQ ID NO: 441773 - DNA, 122 bp, Homo sapiens
gcggcgttgcacaacgtgagcgatgccgcagcggctgagccgccatcttcccgcagccggcgccttcctttcgaatacacgccaggccccgccccaagcacagctcctgcgtcctcattgga

SEQ ID NO: 441774 - DNA, 122 bp, Homo sapiens
gcggcacacctcactcatgagcagacgacaggactggcacgttttaatggagcacacgggcgcagcctaggcggccttttgctccggctgagaggcacgggcccggtgccagcatttgacag

SEQ ID NO: 441775 - DNA, 122 bp, Homo sapiens
cctcccttaccagactgtcagcttcctaggggcagggactgttatgcttactataacacccggaagagtgcctggcacatggtaggctctcaataaatgtttactggacaagctaattcatg

SEQ ID NO: 441776 - DNA, 122 bp, Homo sapiens
gcccgctgtggagataactgcgcaagctactgccttgctagtgctggtgatgctcagcgccgcggaggacaatggctgggaatcccctttgttttccggggcgctgcctggggacagcccgc

SEQ ID NO: 441777 - DNA, 122 bp, Homo sapiens
ccgctggtgctgaacgaatggaagcgcggggcgggcctgcgcgcgcggccgccctgcccacgatgctgtcgcccccgcgacctgtagggccttcgctggcccctcaccctcctcccgccccg

SEQ ID NO: 441778 - DNA, 122 bp, Homo sapiens
taggggttaatgacggggatgatttataagtttggtttctgtcacgtcaggtgctgtgcccggcgcttgagataggaaatgtaaaagacaacgtgcgcctcaattcacagtctcgtgagaga

SEQ ID NO: 441779 - DNA, 122 bp, Homo sapiens
gagaggatcacctaagcccaggaggtccaggctgcagtgagtgagctgtgttcacgccaccgcactgcactccagcctaggtgacagagtgagaccctgtcttaaaaaaacagggcagaaga

SEQ ID NO: 441780 - DNA, 122 bp, Homo sapiens
acttttgagctgggaggagggaaaaggtaaaaatacaagtatggctgttgttgcttcagccgggccttaattaccagacacaagaagcagttcagaaatctggtctctgttgttgtagaggt

SEQ ID NO: 441781 - DNA, 122 bp, Homo sapiens
ggctctgggagagtggaccaccaggttgcccctgagccgcagcctgcaggagtagaaacccggtggtgtcttgcagccccacaacctccctaaggggcagacgaccaggacccttgggctcc

SEQ ID NO: 441782 - DNA, 122 bp, Homo sapiens
gcttggcccgtcccctctcaagcatatctcggataacgccccttccgcacctttcacgggcggtgggagctgaggctcctgtcgttatctctgatccttgcaccctggcaggaagctggtag

SEQ ID NO: 441783 - DNA, 122 bp, Homo sapiens
actgcaaatgacaaaacaggaatttgacctcagtgcctgtgatgccagagtcctcgtctgcgcaacagcagctgtctgttctctcaccacgtctggtctcccaccagggatctgctttttgg

SEQ ID NO: 441784 - DNA, 122 bp, Homo sapiens
tcaaccatagtggggaaaatctggctgaccatcctcttcatcttccgaatgctggtacttcgtgtggctgctgaggatgtctgggatgatgaacagtcagcatttgcctgcaacacccggca

SEQ ID NO: 441785 - DNA, 122 bp, Homo sapiens
gatttctccatcttaagtgcccctcaaaggggacaagaagggggcaaaagaagtttaatgcgcatcccctaagaggtgtggaaacgtctttctgccgagggacagaggaggtagaactgccc

SEQ ID NO: 441786 - DNA, 122 bp, Homo sapiens
caaactcaccccgattccctggtctccggttcagtcggaccggggtgttcccgaagaatccgcgttgctgacgggtttcctaggcaccgggatgctgctgagtggaaccccactttgagaag

SEQ ID NO: 441787 - DNA, 122 bp, Homo sapiens
cggagggaatctcctggtttgtgggttgcgaagactgtggaacaagcgcagtatctatgccggagttcctcaggctcagtccctcacggcttcctttggctagaggacgaaattccgcgacc

SEQ ID NO: 441788 - DNA, 122 bp, Homo sapiens
tgtaatcagtgtgaaagaaaaagaagaaatgaaacctggagtgcaccctggtttttccaacgtctttcagctagtgcagcttgaaattttggcatgaataagtttaactgtaaccccctggc

SEQ ID NO: 441789 - DNA, 122 bp, Homo sapiens
actgcctagaaaaagtggatcaagaagaggtgtattctcggtggtggttgggagggcgggcgcaataggactcaataaggggaaggagtaacccttacgaaagaaaaacataagggctcaaa

SEQ ID NO: 441790 - DNA, 122 bp, Homo sapiens
gtgagcctggcgagggtgcagagcagaaagtagagactgtccgaagactgctatctgggacgagacaagttgttaaagggacaggagagaaagcagagctatttcaagagtgagccacagaa

SEQ ID NO: 441791 - DNA, 122 bp, Homo sapiens
cagaatgaaagttattctccttatgggacttagatatatttttgattttgctcgttatctcgaacttatatacttttgtaaaatggaagagttgtgtttcacatcttgcttgctttcttttc

SEQ ID NO: 441792 - DNA, 122 bp, Homo sapiens
gctcggccttggacatatgtccttttacccttcagcaataaaaacatggccctttctccccgctctcgggcggttaattttaacccgcagatcgcagtttcagcggactaacattcctcgca

SEQ ID NO: 441793 - DNA, 122 bp, Homo sapiens
gaccattttcacaaattcattttagttcagcaaataattgagtatctacttgttcaataacgatgggcaatacaaggataaatgttattttggatctgcccttctggaacttcaagagcaga

SEQ ID NO: 441794 - DNA, 122 bp, Homo sapiens
gttatctattcccagctgtgaggtgtttcaaatctgaatatactctgaggtccattttttcggtgtagacttttctgaggactccttcaagaacagcttattttcattgatggatataagag

SEQ ID NO: 441795 - DNA, 122 bp, Homo sapiens
cgccgcgctcacgggctgccgggtggcggctgaggttggcagtgccgagctgccccgaggcggcgggaagcgcgcggcgcgggggctagtgggggggtggggaggaggaggaggaaggagga

SEQ ID NO: 441796 - DNA, 122 bp, Homo sapiens
cgttggggccgccgtggcttcctgttcttttcggcttcctcctggctcagctgactgtctcgagttctcggcctcctcctggtcacgctggccttccggtaccgcctgccacccctccttca

SEQ ID NO: 441797 - DNA, 122 bp, Homo sapiens
agtgctggcagaacttcaggtactggtgagaggtttgtaaagggataggagcatccaagccgagatgaaaaatacaccaagccttctgctgaccttccgccgccaacagcaccttctctcct

SEQ ID NO: 441798 - DNA, 122 bp, Homo sapiens
agatgcacacaatggagttgatggctttggagatgagaagcgccaccggactgttaaccccgaagggaagaaaaacaagcaaccctaaaccacgctctgggcagggctgttaattgtgccgg

SEQ ID NO: 441799 - DNA, 122 bp, Homo sapiens
gaaggctgagtcggtgctggtgccacagctcatgcaaacgcaggaacagtattcctagtgcgttcttcggggaaggggacgggcaacgtatgccctttcatgggaaaaaattctctccaacc

SEQ ID NO: 441800 - DNA, 122 bp, Homo sapiens
ttggtcgggaatcacaccactcccggcaagactaaatgtgcgaggcggctgaggcggtggcggtggaggcggcgggaacccggatatggggcgttcagcgcacgggagcggggcggggcctg

SEQ ID NO: 441801 - DNA, 122 bp, Homo sapiens
tcccagttccactctgctcttcagttcgttttgaccgcttaaaggtggtgtagggtttcacgttcctcttcccacccctggaaaacacacttggcatttacagtttcgtagttaagctttct

SEQ ID NO: 441802 - DNA, 122 bp, Homo sapiens
gggtgcagggattgtgtgaagattgagagctgggggcgccctcttccgtgatcagggccccgttggccccaactggcatttaattcccctggctgtcttttcggattcttatcactttttat

SEQ ID NO: 441803 - DNA, 122 bp, Homo sapiens
agtgctctcagcagtgctcttgggtactgactagcctgctgcctgccgcctttggccctgcgtgtgagagtgcccgtgtaggacacaccctggcctctgctcaccagctgcatggcccatct

SEQ ID NO: 441804 - DNA, 122 bp, Homo sapiens
ggggctgccctgacctctgcgagccacataccttctcctgcgccttcttcttggactcctcgtccatccagcccagctcgtccagcgtctccacaaacactgtccgcaccttgtcaatgagt

SEQ ID NO: 441805 - DNA, 122 bp, Homo sapiens
tggaccggaggggacgggggcgcggctggatctggaccggaggggacgggggcgggcactcggcccctgggactgtgacccggggccctgcccttcacgcccctgctgctgccgcgctcccc

SEQ ID NO: 441806 - DNA, 122 bp, Homo sapiens
aagaatcaaacagaagcacctgctccagcccatcatcttcaggaagctgcctggcttcgccgttcccgtggatagggatctccattgtggctgccttccctaggatcccgtccgtcatggct

SEQ ID NO: 441807 - DNA, 122 bp, Homo sapiens
agaccatgggaaaatgtctccaggccatgtcagagaccttcacagcagcccctcccatcacggaaccagaggcccaggaggaaaaagtggttttgtggaccaggcccagcgtccccttgctg

SEQ ID NO: 441808 - DNA, 122 bp, Homo sapiens
aggccttgaggaagtggcccagcagtgtgcttgcgtttccaaggtgagtgctttgcttcacgggttcctctaggcactagcactccttgctgatctgctgatctcattgggcagtgtttctc

SEQ ID NO: 441809 - DNA, 122 bp, Homo sapiens
cgaaagggttgatcaagcaattcccagaccaagacaccaggagggtcccgccctcggccccgcctccagctttgcatacatctcctgattggtcggcggcggcaggccccaccccgcggagc

SEQ ID NO: 441810 - DNA, 122 bp, Homo sapiens
actgtgataaatagctattcaattgcctggcacatggattgcctgctttatagattttaccgagcatgtttcaaatccagagaccctctcttaccctggtaaatgtctacccaggctgcttc

SEQ ID NO: 441811 - DNA, 122 bp, Homo sapiens
ggatcaattcttccagctctggagagaaaaaccgggagtgcaagtggcgggtggcagaggcgaagcttgcaggagatccactgggacccccgggatccctcagcgcccagcagggccctccc

SEQ ID NO: 441812 - DNA, 122 bp, Homo sapiens
ccccagtgtgggcccttgggtaagtcacccctttctgtaacagaggggctgttgtgaagacgctgcatagcgcacagtatttatgtaagtttccattagggagccttccacctccttccatc

SEQ ID NO: 441813 - DNA, 122 bp, Homo sapiens
ttctctcagcttccagctcaggaggcggagtgggaggagcgggcctggcggccgtgggggcggggctgctccactaacggttactggtcgctgctgccgccgcgctcctcccccggctgcgg

SEQ ID NO: 441814 - DNA, 122 bp, Homo sapiens
gaccaggaacacagtgcacgcgccgtctccccgcttcctctaacacccaccagtctgctacgggtccccgaaagggcctcgttcccccagcccaagagagtggcgaagaaccggagggagcc

SEQ ID NO: 441815 - DNA, 122 bp, Homo sapiens
ggtgcgcgcgggcaagggcgccaggccccctagcagggtgaataatctaatctgttctttcgtctccgtgtatcaaacaggccagggctcgacccacagagcaccctcagccatcgcgagtt

SEQ ID NO: 441816 - DNA, 122 bp, Homo sapiens
gatgggcctggggtgggagagcccgggctgcgccggcgtgaggggctcggtcgtggggagcggcctggacgcggggacgctggagtccggggcgcggccgggggcgcggtccgggggcgtga

SEQ ID NO: 441817 - DNA, 122 bp, Homo sapiens
gaagcgggtgagggaacgatggggacaaaacaaaacttttgttccccgtacggatgtgctcgagaacacttggcttgggttccaaagcctggtcataagtgctctgaattatttccagcaag

SEQ ID NO: 441818 - DNA, 122 bp, Homo sapiens
gccggcgttcagtggggtatgaaggcgtcccctccccttccccaggggtctccagggatccgcaaccctccggcacctggccggggtcgtcctagcccagccgggggaaggaggggctgagt

SEQ ID NO: 441819 - DNA, 122 bp, Homo sapiens
ctataagaaaggtgacattgtaggcatcaagggaatgcatactgttgaaaaaggaatgcccgcaagtgttaccatggcaaaactggaagagcctacaatgttccccagcacgctcttacgtt

SEQ ID NO: 441820 - DNA, 122 bp, Homo sapiens
gtgtacccagatcccgaattccttagagctctttagccgagcactgtggcaggagcgcggcgcccggaatacaagttcatggttccgagccggcgggcgaagggcagcgcgatcccccgcca

SEQ ID NO: 441821 - DNA, 122 bp, Homo sapiens
agtgaattttgaaacctcttacctaaatgatagctgctcttggtgtttctttatgctctacgtttggtcatgtaacatgcataatctctgttctctgaagttgattaaagttctaaacttaa

SEQ ID NO: 441822 - DNA, 122 bp, Homo sapiens
gatgatggggccactaaccgatggatgggactgtcacgggccgggacctctgaggaccagcgctgccacggggaaacctccggcccatgtgatccacccgtcctgcagaggctgggttccct

SEQ ID NO: 441823 - DNA, 122 bp, Homo sapiens
gcggcgctgttcccgggctgggtgcagctgctaaggacaaggcccctgctccgaagaacgcggtggctcggggataccctgaaagggacggccatggcgcacatgggatgccctagggttcg

SEQ ID NO: 441824 - DNA, 122 bp, Homo sapiens
aatatgaaaaaaaatttaaaaattaaaaaatagatctcttgatctttgtcctcctgtctacgtgtaatgatgcatcctttgaccaacatctcccaaaaccctgccccatcctctggaaacca

SEQ ID NO: 441825 - DNA, 122 bp, Homo sapiens
tgagggcagcccgaagggcaccagctccaaggtgcaggccgagctcctcggggaggccagcgtggctggaatgtagggtggcagcaaaaagagagcgctccacatagagaaagggacttgca

SEQ ID NO: 441826 - DNA, 122 bp, Homo sapiens
ggcccatgcagggagaggccagccagctggggttcgtttctggacgtttgggagaagggtcgtcccttcggtcctagcagagaaacgtcaggcctgagaactccagctctcctcctggatca

SEQ ID NO: 441827 - DNA, 122 bp, Homo sapiens
agcttagctgtgcctgcctccctctgcgctaaaggagccactgtgccagcctggaactcacggcatcccctttaggatgttggctccacagggattggctccttggcagatgcagtcgctcc

SEQ ID NO: 441828 - DNA, 122 bp, Homo sapiens
ggcgggaagagaatgggactgctggcacccaggtggggccctacctcagccagggagctccgtccagctgccagcacggtccagggctccgggacaccctgggggctctggggttgcagcca

SEQ ID NO: 441829 - DNA, 122 bp, Homo sapiens
gaatccaagccgctgagggcggggaaccactgagtgatacctaagctgtccaagatctcccggcagctgctgaccccgagggaaagagctgctccctgccagactttcactgatcacagacg

SEQ ID NO: 441830 - DNA, 122 bp, Homo sapiens
caccgggctgtcagtgagcctggggccagcgggcgagccagcggctccggctcccgctcccgctccgcgcagcaccagcccgactctccccggcccccgccgcgccccctcgccgcgacctc

SEQ ID NO: 441831 - DNA, 122 bp, Homo sapiens
aagacagattgctttggaggctggtctggtttcctctcctggctcctgagagggccacctcggctgttccctctggaggacagagcccgactctgtctgttttcaaggtacctctcatgacg

SEQ ID NO: 441832 - DNA, 122 bp, Homo sapiens
cgccagtcccgtgccgtgtgctcacactcctcagaccttgggtggtccatgggattggggcgccatggagcagggggaggtgctcgtcggggaggcttgggccgcacaggaacccatggagt

SEQ ID NO: 441833 - DNA, 122 bp, Homo sapiens
ctttaaatctgttgttgctgggaaaatggaatctagcaccacagtggctgtggctccacacgaaataattacagacctttccttactcagtagttctttaaggagagtaaggcagagtatga

SEQ ID NO: 441834 - DNA, 122 bp, Homo sapiens
ttttttgttagggcttcatttcctttggaggaaatgccaagaaggggagtgtggaagaggcgcgactggtttggttctgttaactgtgatgtgtgatgtgcacatttggcggcaggcagaca

SEQ ID NO: 441835 - DNA, 122 bp, Homo sapiens
ttcccccgacccactgggtcctaagtgccgggaaaggccgcagggcagatgctggggaggcgctctccgcttgtcctctcccggcctgcaggaccccaacgggttctctcctcaaagttaat

SEQ ID NO: 441836 - DNA, 122 bp, Homo sapiens
agctgcaggtggtgactcagttgtcaccgtcactgtcaccgctgccggtgcttctggggacgcgtgaggtcaccggggtggctcgtcctgtgcagcccccgcccccggcagacccgtcgacc

SEQ ID NO: 441837 - DNA, 122 bp, Homo sapiens
aggggcagggctctcactgagcttgtcctgtctcatttccccattagtccaggagattcacgggtgcccaggctgccccctcctgcctccagactcccctctacactcaggatggggaggag

SEQ ID NO: 441838 - DNA, 122 bp, Homo sapiens
ggggcccggcaggccccgcccagcctccttcacttccttgggccagggccgccgccgcgccgggctctgccctatgtggccgttggattaatatccagatattaagtaaacactaaattagc

SEQ ID NO: 441839 - DNA, 122 bp, Homo sapiens
gggttgagaaacgctttgtctctgcgtgtttagctgcttcgggggctcacgcagggcaagcggccaggcaagcgttattgtcagaatatgcaaagtgccttttcgggaaagatgaagttgga

SEQ ID NO: 441840 - DNA, 122 bp, Homo sapiens
ccaccagctccgagtactggaagttgctctcacaccagtccacctcggagctctgataggcgaagatgctaggcatcttgtctcagtggccaccaccagccggctgcgcccggcagagagaa

SEQ ID NO: 441841 - DNA, 122 bp, Homo sapiens
cgccgccgaccaccatgaacttccctgcagtcatgggagggcgcgctgccttcatgctgccggactcccagtggtttactgaatatcgcggcggaacagcgagactctggactccaggagag

SEQ ID NO: 441842 - DNA, 122 bp, Homo sapiens
ggccgtcactctcacatctgctacaggagggcagcagaggggacattgcctttgatgaggcgggcaggagccatacttctgctggagttcatagactgaactgggtgtgaacccagagaaac

SEQ ID NO: 441843 - DNA, 122 bp, Homo sapiens
ccatgccttgtcagtcccaagaaactttctgccatttctaacgcttaggatggctctcggcggggcagaagttgcctcccttttgcagtcactcaaaacgcagttagcggtatagctagctt

SEQ ID NO: 441844 - DNA, 122 bp, Homo sapiens
gactggattcctgcggccgccgcgagccgggagaattctaatagcgcagatgcccggaaccgctgcagcagcccgagccggaagtgccagactcctacttcccaccggatgcggggctcggc

SEQ ID NO: 441845 - DNA, 122 bp, Homo sapiens
ccgtctctttcatcaatgacgaggtcgatgggcattttccccttcaaacagctaatgtatcggtggcagaagttatcgcacagttcgtggacctagaacgaaggtcatggtggagggtttag

SEQ ID NO: 441846 - DNA, 122 bp, Homo sapiens
atactgggggatcacagagtacaccccatacacacgccactttctatcagtaggtattcccgaatgtctgccatctggtggtccgagagcttgtcagagcaacatagttttctttaactact

SEQ ID NO: 441847 - DNA, 122 bp, Homo sapiens
gggcgtcatctatagtccggaggacagccccagggcagaggcctctggtgagtgccccgccgccttaccagactacaaactaaaccagtgtttaagtcaaggtgtctgggttttcaccgggg

SEQ ID NO: 441848 - DNA, 122 bp, Homo sapiens
ggctctgggatgggagaagggagcttcttagcgatttgaaaattagcatcccttcagtagcgcaaaccttatggaagaaaccttggccttaaaacattctcagaggggagactgggaggaac

SEQ ID NO: 441849 - DNA, 122 bp, Homo sapiens
tgggggtggggaggcaaaagccaccctggcaggcccggaccttttgtagtttctgtgggacgcgcatggctgaccgcctgcaaagaaaaacagcgcctcccttaagggtcaggtcccagtga

SEQ ID NO: 441850 - DNA, 122 bp, Homo sapiens
gccacgacgcttactcataataatcctgaacattcgggattcctgtatttccatgctcaacgcctgataccgacaacctaattatttcccattttgcctcgaaaggtggcttctggggatag

SEQ ID NO: 441851 - DNA, 122 bp, Homo sapiens
ctctcggcgcccgcgcgggcgactctggcgcgccagaccgcagcgccaggcgccctctgccgccgggaagccgaatcctcccgtcctaaccctaactcgctggctgcccccgcccgggcctc

SEQ ID NO: 441852 - DNA, 122 bp, Homo sapiens
cagaggagaaggctgagacccgagaagggaggtgagtgcaccccgtcccatgtcaggctccgctacatccccagtgcttgccgtccctgaggatcggtccaggctgccaggccctccctcac

SEQ ID NO: 441853 - DNA, 122 bp, Homo sapiens
gacctgcagcccccgaccacattctaataaggagcaggttgcgctccttattagacagctcggcgacctacttggtcacagccttcatgcaggtggccatgtcatcgtagtgctctgcctgc

SEQ ID NO: 441854 - DNA, 122 bp, Homo sapiens
ggttcccgcgccctccagagtgaggccgctcgtgcatgggccattaaaggagtcttcagccggagaaagggctgggcggcgtctcctgcccgcctggtctgtctttgtaatttgatgatggt

SEQ ID NO: 441855 - DNA, 122 bp, Homo sapiens
ttgcagggacgcctctctgattacatacccacgtttcaagggtgtcagacaatgcagggacgcctgccttggtccttcacccttagcggcaagtcccgctttcctggggcaggggcaagtac

SEQ ID NO: 441856 - DNA, 122 bp, Homo sapiens
ctcttacttgacctttcagcagcattttacacagttgattattcctctttctttgaaacgcgtccttcatttagctttgctgcattctctgcatttccctctcaccttattggaggtttagt

SEQ ID NO: 441857 - DNA, 122 bp, Homo sapiens
gccttctctgagcaactgttgctcagagagaattcagttttgctcttattaccagccacccggcatgcggatcttgctagtcaccactgtcctcagatactgggctcaggctgggcctacac

SEQ ID NO: 441858 - DNA, 122 bp, Homo sapiens
ctatatcctcaatgcgcacaggaagtgcgtgggtaagccagggccccgcctgccgcccgccgtcacagctctccgctctgctccacgccaagcccaccacactgtggccacatgccaaaggg

SEQ ID NO: 441859 - DNA, 122 bp, Homo sapiens
tggcatcctcatctttgatggtccccggggctcctgagctgcgctggtggccccagggctcggtgcctctctcaggcgacagctcacagacggcgggaaactcttccctcccgcaccttcgg

SEQ ID NO: 441860 - DNA, 122 bp, Homo sapiens
gacgttggctgtggggaaacagcaagcggcgtggacgaccgttgctgagctggtgtggaacgtctgtgatcaggtaggtgtagtctcgtcgctctacgctgcgtgcaagaccgactcctgac

SEQ ID NO: 441861 - DNA, 122 bp, Homo sapiens
ctaaccttccacaagagcctcctgttggcagatccttggctggaaccaagccggcatgggcgtctgtgaaatgtggtctccatacttctagcccctgtgaagaatcaataggcaatatctag

SEQ ID NO: 441862 - DNA, 122 bp, Homo sapiens
ttttttcaaacccggagctgcactgggattggtggactgggcactcacgtggttaacggtcgcgggaagccgcggagcccgaacctgagactggacctgaggagacctcagcctcggtgctc

SEQ ID NO: 441863 - DNA, 122 bp, Homo sapiens
cctgggggggaggagggggcggtcgccgctgccattggccgtggggggtgaggcgggccccgcgcaggaaaccccgcccctccctctgcggcgggggcggccccagcggatgaatgaagcgg

SEQ ID NO: 441864 - DNA, 122 bp, Homo sapiens
gctagacgcaggcacaccccaggcccacgggtgcttgtgagcttgaaggcggttgctactcgaagggagagctgggctcgtgtgggagaagagtggtctccccgcctccgtggggtcccggg

SEQ ID NO: 441865 - DNA, 122 bp, Homo sapiens
aaaataagattttattttatcatccaaatgaggtagaaaaaatgaaaagattagaaatgtcggattgtgtgaagctattgtacagtttacaaggacctttagcccatcaaaacctgcaaaat

SEQ ID NO: 441866 - DNA, 122 bp, Homo sapiens
gtcagtgggtcagagagtgaagccgagagctcctctgggggtgagctggacgatgccttccgccgggctgcccgtcggctgcaccggctcttccgcaccaaaagtccggctgaagtttcaga

SEQ ID NO: 441867 - DNA, 122 bp, Homo sapiens
agggtggtcggggaagcctcgatgggaggccgggtggtcggggaaggctcgatgagaggccgggtggtcggggaagcctcgatgagaggccgggtggtcggggaagcctcgatgagaggccg

SEQ ID NO: 441868 - DNA, 122 bp, Homo sapiens
ttcgaggacagttggtccagccagcaggctcagttcagataccagacaaccattccagcacgagggctcagcgccctggccccggcggtcgctccagtgcctgtgtgcccaccagcacatcc

SEQ ID NO: 441869 - DNA, 122 bp, Homo sapiens
gaaggaggaagcccactgctaacaggaaccactggagcatgggtgcttggggtggttgagcggggattggatgcaaatggcatgtggaaagaatggagaggtgatccctaatgtgcaggggg

SEQ ID NO: 441870 - DNA, 122 bp, Homo sapiens
gcacacaccggtggtcgatccgttcccctccggaagatagggtcttatggggccctggaacgtcttcaggtggcgcctcccctgtaagtccgccgtctgtccgggggagcctggaacgagtc

SEQ ID NO: 441871 - DNA, 122 bp, Homo sapiens
gagctgccgtggggcgcttagttttgagtccgggtggtgcgcctggctttggggacagcccggggcacgcgggcccgggggtgccggcgggaggggccggcctgggcgtcgcgccaagggat

SEQ ID NO: 441872 - DNA, 122 bp, Homo sapiens
agccgacgctacgaaggcctgagggacagcgaggcatcctgggaggcgccctggctcagacgctcctgtgggagggcgtctgcgtcctcagtttccccaggacgcgtaaggagaaaaccggg

SEQ ID NO: 441873 - DNA, 122 bp, Homo sapiens
ttaagcaacatcttgctgggcccgggcaacagaccttccaggcactcactaaaagacagacgtctccaccatcaaagagcacacagtctggttcgggacagggtttcatattttcctttgac

SEQ ID NO: 441874 - DNA, 122 bp, Homo sapiens
gcagggagggcaggttaagagagtgtgggtccagtagcctcaccgtgactcagcgcttcgcggccggcggcctagaggaggcgggaggcgggagtctacgggtctcggaggccctggggctc

SEQ ID NO: 441875 - DNA, 122 bp, Homo sapiens
ttcacacctgagccagcgagaccacgaaccccaccagaaggaagaaactcccaacacatccgaacatcagaaggaacaaactccggacacaccgccattaagaactgtaacactcaccgcga

SEQ ID NO: 441876 - DNA, 122 bp, Homo sapiens
gaaagatttaatttttctaattctcagaggagcaggaagcagtgagtggtttccgcgcgccgcagggctttgtttaactttacaggttctgcgctgcctggagctacccaggggcaggaccc

SEQ ID NO: 441877 - DNA, 122 bp, Homo sapiens
agactccccgacagaccaattccaggaggcacagtggggacccatgtcttctttcttccccggcctgagtttggggcaggagtttcccaatggcccagctttgcccactcttctcagccccc

SEQ ID NO: 441878 - DNA, 122 bp, Homo sapiens
accgctggcctcagacatcagcaccccaaagggtatgttggagtcccatggtggaggtgccggccgctcctccacgcacttgatgtataccgaggatcccatgcttgacgtcgcagggggca

SEQ ID NO: 441879 - DNA, 122 bp, Homo sapiens
aacatgggtccaagatacccaggttggactctgcccagaattggctatctttgggaaaaacggccaagagactctggtgcagtatgaggctccagcccctgctacagacagagacaccgagc

SEQ ID NO: 441880 - DNA, 122 bp, Homo sapiens
tctaggtccgaggctagccccctgttgagaactgatttaagacttgaggtgtgcctcggtcgatcggaagcttgctcttggctgaaagctgaagctaagtctggtccttgataaaggagagg

SEQ ID NO: 441881 - DNA, 122 bp, Homo sapiens
gaaaggctttcttcctttcaagcatgtgcctggggctgtgcagctgagggacgttcccgacgcctcaggggaaggggtgtggaattgaccccattttggccttactgaccagtttttcaaaa

SEQ ID NO: 441882 - DNA, 122 bp, Homo sapiens
tgctctccacggtgggcagacacccaggggcacttctggggctggcctttctctccctctcggggcacccctgccttctactgaccacccagccagccagcaggagcccacgtgcacccagc

SEQ ID NO: 441883 - DNA, 122 bp, Homo sapiens
agaagtaagtttacttaaccaaacgtgggctctctctaacatttgccagatatcaccgggcgattttttttaacctcatcttcacagcagaaacataaaaggcgagatctataaacatttca

SEQ ID NO: 441884 - DNA, 122 bp, Homo sapiens
tgagtgtgtggtgcgtgtgggaatgtgtgcaagtgggcgcctgtgcgagtgtgtggtgcgcgtgtgggaatgtgtgcaagtgggcacctgcccatgggagtgtgtggtgcgcgtgtgggaat

SEQ ID NO: 441885 - DNA, 122 bp, Homo sapiens
accggctagagcaggagcacgagctcttccgctgtttccaggatccctgccggctgggcacgcgccaaaagcagccctgggccctgggtatcgcgcttggggggagggtacccccgccggct

SEQ ID NO: 441886 - DNA, 122 bp, Homo sapiens
agatatgatggcctgaaacagcagcccccagagcagagtccccgttgtcctctcaagccccggggaaagtgcccagcaccgtaagtgcttgataactgacactgtcaagtttctccttcctt

SEQ ID NO: 441887 - DNA, 122 bp, Homo sapiens
gggggctcggccgggccgcacgccggtgccccctaccgtccggagtcatccctcccgccccggcgctcgggctgcgatcctggtccctgccagtggaatctggaacaccagccagttgtgcg

SEQ ID NO: 441888 - DNA, 122 bp, Homo sapiens
atgctttacaaattcctgaaagcctcttcaattatcagtatacagcttctgcagcagggacgacccttcttctactcccaagccaatacaccctttctcttggtctcaaacacacagacata

SEQ ID NO: 441889 - DNA, 122 bp, Homo sapiens
ccacaatcagggtctgaggaaattccccggaacctcccacatgttcgaagcaagggtgaccgggtgtggggtgaggatgtccttgcttttcctattaagatggcctcccataaccctgcatg

SEQ ID NO: 441890 - DNA, 122 bp, Homo sapiens
agtcctgtatcatccatacttgtactaccttgtcctatgaagctctgagaattttttgtacgatcagccttactgctaataaaagcacttccacagggctcctgactctcgtgtgttacata

SEQ ID NO: 441891 - DNA, 122 bp, Homo sapiens
cacggcgcacaccggccggcgcgtccagctgcctgcccagtggccgaggctcttccccctcgcccagtcttgagctggaagtgattcctattggccaaggtgtccatgtaaataggtgtgaa

SEQ ID NO: 441892 - DNA, 122 bp, Homo sapiens
ctaattgcgtcacaggaactccgggaaggcggggccgggatcccctcccgccgagtggcccggaacgcaacccccgagacccccagggccccgagggtcatgcaagtgaccagatcgagtct

SEQ ID NO: 441893 - DNA, 122 bp, Homo sapiens
gataagtaaatcaagcaattaaaaatgtcgtttggtgaaaatgtagcaacccacccaaaacgagcgatgccggtgggccctcccgaccagaacttcgaagagcggcgcctcctccatctcac

SEQ ID NO: 441894 - DNA, 122 bp, Homo sapiens
ccccacacctgtccttgccccgagcctgtctctgacatcgccagacttccaccgagtacacggcgcctctgggccctcgcagagaccgggccacccttcctggtggtgatttgggtgccgtg

SEQ ID NO: 441895 - DNA, 122 bp, Homo sapiens
ctgtgcctgagcctggggacctgggagagttcggaccgaagtccaccgagggccgcagaacggcagggttggggaactggctccctggcgcgcacagctctgtctgcagggcgcggatctgc

SEQ ID NO: 441896 - DNA, 122 bp, Homo sapiens
gctaggccatatctaggcctatcagggaagttggtctcttcatgagcccccctgcacagacgtctaaatgtccagagtcccaacagaataacaaagggttaaaaaccatctccatattgaag

SEQ ID NO: 441897 - DNA, 122 bp, Homo sapiens
gacggcgctcagcccccgcctgcgcctgcacggagcatgcgcacaaccagctccgccccgcgccgggctctagctgtttccctcaggcggcctgttccacgccaggattagttttgcttcgc

SEQ ID NO: 441898 - DNA, 122 bp, Homo sapiens
tgctccacatggctgagtgctccacgcgactcactgctccacgcggctcactgctccacgcgactcactgctccacgcgtagcttctgacactgccgagcattttcaacagctgtgtctcgg

SEQ ID NO: 441899 - DNA, 122 bp, Homo sapiens
gcccttgccagagccggtgcgtccgcctagccccgctccgcctgaggccgtcagggctcccgaggatggaagattcccaggagacatcgccgtcctccaacaactcctcggaggagctcagc

SEQ ID NO: 441900 - DNA, 122 bp, Homo sapiens
ttcagacggactccggacgtgcttctgaatctcacagaccccagaagcgcccttcgccttcggttcagcaacgggccttctcccgggttgtcccccacttgaagaggagcttcaccacgttc

SEQ ID NO: 441901 - DNA, 122 bp, Homo sapiens
aggggcggggcagccgctgaggccgctgggaaatggagtccacgagaggacacctgcattcggggaagtgtagttccatgcgtttgaggcggggtcccggctgagctgttacgcgcccacat

SEQ ID NO: 441902 - DNA, 122 bp, Homo sapiens
tttatggaactttaaagttgactcaccactgagtcatcaaaacacagcaatacctaaacacgctcctgttgctaacaaaagaccagcatgggatgtctgtcttacctcctttccctccccta

SEQ ID NO: 441903 - DNA, 122 bp, Homo sapiens
gcctccacttcctccggggggcaggaccgaccctctcatcctttcattcatccatctgggcgcccagccagactccactgacatgagctgtcgcctgatcaacaggtggtattgcctccccg

SEQ ID NO: 441904 - DNA, 122 bp, Homo sapiens
cgggggctcgccttcgctgtgggccaccgccagcttgtctgtggaggtggccgacgtgaacgacaatgctccggcgttcgcgcagcccgagtacacggtgttcgtgaaggagaacaacccgc

SEQ ID NO: 441905 - DNA, 122 bp, Homo sapiens
gctgagtaaattccaaaaaccacagaccactcactattagggctgaagcccaggacatggcgaagggtcatactgaggagttttaaacagtggaatttgtgattagattatataaagatccc

SEQ ID NO: 441906 - DNA, 122 bp, Homo sapiens
ggggctccgcaggcccgccagcaccgcccggcactctagcacctgctgtcccagctgaaccgccagcaccaggaccagggcgcagccggctgccagcagcaccctccgcaccgacaggcgca

SEQ ID NO: 441907 - DNA, 122 bp, Homo sapiens
gggctgccgcggcgcgcactgggacttcgctcgcccgcttccctccttcaacccgcccgtcggccccaccggtgccttcccccgccactgcctcactgcgcgcagggccgctcggcgcaggc

SEQ ID NO: 441908 - DNA, 122 bp, Homo sapiens
cacggcacctctgtgattctcgtcacctgccaacaccagcaccagggctgcccctcctgacggccccctcgccgtctttctgggcacactccatcggcacagcgtcttcactgtcctcctga

SEQ ID NO: 441909 - DNA, 122 bp, Homo sapiens
cccagggcagcacagcaccggcctctgaggcccacgggtgcacgcgaaacacatgccgagcgtcagcgcccctgagcacccagcctcggcgcctcctccaggaagccctgcttggggagtgc

SEQ ID NO: 441910 - DNA, 122 bp, Homo sapiens
aacccgctgactcttctgggctgagagcagtgtttcccaaagcataggatcagaatcactcggggctcactaaaaagaacttggtcctcagaacagaaccagcacctccgagaaggggcggg

SEQ ID NO: 441911 - DNA, 122 bp, Homo sapiens
gggggaactaggcgcgcagaaagggtacgtgcggaaaaaactcttgcctctgcgctagaacgtccggcagggcccttctgtgaacaagcggcagcacctgcgccaggggcaggtgccactga

SEQ ID NO: 441912 - DNA, 122 bp, Homo sapiens
ggacctgcccagtcctgtcaattttccatctaaattacataactgtcctccttagagacgcggggatgcccaggcacaggcatgaaagatcggccttgaggttattttgtctctgcaagtat

SEQ ID NO: 441913 - DNA, 122 bp, Homo sapiens
cttggttttggacatgctgagtctgaagtgtctgtaggtcactgaagggtgactggtgctcggggagaggcttggggctgtcacttctaggttggatatccccagctagaagtgggcagaca

SEQ ID NO: 441914 - DNA, 122 bp, Homo sapiens
gcctctgtaaacacactgcatggagctcaccccgacagggacagacagaacgagctacagcgctcagggtggcagggctgctctgcagggggcggcgtgaggggcacaggcagggcatcgca

SEQ ID NO: 441915 - DNA, 122 bp, Homo sapiens
cagcgtgggaataggcactgaggagattccagccaggaggagaagctgggagaaaggttgcgctggaggagacagaacccttgtgtggatggtgttctcagggttacgatttcacatttgtt

SEQ ID NO: 441916 - DNA, 122 bp, Homo sapiens
ttgccctcatcagcgtgcctggctgcctctacctaggacgttccaagtccctgactgtcacgccagagttgcaaacatctttcttgaaggcaatacattttaagtacattcaggacaatgcc

SEQ ID NO: 441917 - DNA, 122 bp, Homo sapiens
aggcactggtggctgtgctttgggcccgagcagccagaagccagttgccatcacctatgacgaggagacagcgcctggggcagagcccagtatggggtgcgttcagggtagatcaggaggta

SEQ ID NO: 441918 - DNA, 122 bp, Homo sapiens
gaaccactgcacctggccttctcttgtgtcttttgtctttcatttctcttcttcactacccgtcagcatgataggtttcttcctcctcttatgaatcccagtgtcaagatacagcctgatcg

SEQ ID NO: 441919 - DNA, 122 bp, Homo sapiens
ggaaaggcggggggaacctgtgagtggttctccggcgcctgctcagtctgtccgggcgtgcgtccgtccgcctgcctggctaccggtcagtctcagtctcccctactccctttacttcgctc

SEQ ID NO: 441920 - DNA, 122 bp, Homo sapiens
tagaaaaaaaaaaaaacacctttagaaatcaaagggacaaggataagtgtcattagatttcgtaaccaacctgggtactgatgagggagaccacccacaggcaacctagagaatgaaactcc

SEQ ID NO: 441921 - DNA, 122 bp, Homo sapiens
agcatcttagacattagtgatgttgtaaagaaagttcagcaaagtcattgtggaaaacatcgggcaaaagttgcaggtcagagctatcctgcatctttctagagcagcagccctccgtgtaa

SEQ ID NO: 441922 - DNA, 122 bp, Homo sapiens
gggtgggaaggggagcacagctcagcatttatttctggatccagctcactaaaaatacctcggctctcctgtttgatcactctcccttttgacctgaatggatcgcgggagccgcgccgccc

SEQ ID NO: 441923 - DNA, 122 bp, Homo sapiens
acgggagtagggggtgggtctcttatagtaaccagctgagggctcttaaaaaatgttcagcggaaacatgaaccacatcacagaagtagaggcagaccttgcttcatgagcaagctcatctc

SEQ ID NO: 441924 - DNA, 122 bp, Homo sapiens
tacgcactgatatttttcacaacaatttattgggtcttggtcccctctcctccagaagttcggcagggcatgatagctcacacctgtaatcccagtgctttgggaggctgaggcgggcagat

SEQ ID NO: 441925 - DNA, 122 bp, Homo sapiens
gtgggaggtgggaggctggaatatgtgaatgttggggggctgtagagtgaatgtggggtgcgtgtgtatgtgtgtgtgagatatggttatagcttagcttagcttttgtttagattttcttt

SEQ ID NO: 441926 - DNA, 122 bp, Homo sapiens
gaggagaaatctcacttttctccatgagttttttctcttgggctgagactggatactgcccggggcagctgccagagaagcatcggagggaattgaggtctgctcggccgtcttcactcgcc

SEQ ID NO: 441927 - DNA, 122 bp, Homo sapiens
tccttggttttgattgaatcgacgtccaacaaggttgtccggagccctgtactcaaacagcgtccatccctgttcgcgcagagctgcacacagcagtcctggatttaaagacaatcaccctt

SEQ ID NO: 441928 - DNA, 122 bp, Homo sapiens
gcctaagccctgtgaccacaccctctcaccacagtgtcttggcccaaatcttcctacaaacgagtaactaatgacttgatacctgacactgcaggtggctctagggctctgcacaaacacct

SEQ ID NO: 441929 - DNA, 122 bp, Homo sapiens
gcctccttcccaggggcaaggccaaaggaaggcgaccctgcatggctaaccaggccccagcgcggcgccagaaggttaacgaccctccctgcccctttccttatgaaggccaagagcctcca

SEQ ID NO: 441930 - DNA, 122 bp, Homo sapiens
ccacccaatgcctgttgcaagcataaagtttggctccagagttagggctttttctctgggcgcccggctgcgggtcattgggaagctgaggatgcggcggaacctcggaggagccccgggtg

SEQ ID NO: 441931 - DNA, 122 bp, Homo sapiens
agagttttcagcaagtccctcctgcaagcagctttattttaaacaaataaataaatagctcgctgaaaggcaaaactgaataaagaagaaacttggaatggttaggatttgtattctctttt

SEQ ID NO: 441932 - DNA, 122 bp, Homo sapiens
ctttcctcgcccacgctgaacccacgtcctgggcacagcagctcccaagctgtcagcagtcggctggcagtgccaccacaccctctcggaatcatgcacagtgctgcctctatcacctctca

SEQ ID NO: 441933 - DNA, 122 bp, Homo sapiens
ggtgctaggggaacgggcgctgggggcagcggccccggtggatgctaagggcttcgggatcgggagagtccaccacgcctgcctgctcggctgagaatcgccatggtaatccccgtctccct

SEQ ID NO: 441934 - DNA, 122 bp, Homo sapiens
agactcccagtccagtggccgcctggaaattgcggagtggaatgcagccactagagacggcgcctgagcccccgcccggggccccgttagttgagaaggaaaagatagcctctggagctttg

SEQ ID NO: 441935 - DNA, 122 bp, Homo sapiens
ccgaatgaacgccagaaactctgtggggtggggggagtcaccaaccgtggtgcatccatacgaatcagcctaccgtactgggaaagagccacctgaatttgtgaatgttgtaaaagcaaaag

SEQ ID NO: 441936 - DNA, 122 bp, Homo sapiens
tgcgtggcgtgtccgctggaccaggggacgggggcgcgccgcaggtgtaggagctttgcgcgcctacctggcggtcgtgggtcgaggaggggtcaagaattgttgtctagcagccctctccc

SEQ ID NO: 441937 - DNA, 122 bp, Homo sapiens
cggaacactcagaaatcgccaggtccctgaaccgggaagatcctggggacggagccaacgcggatgcaaaaggcagcaattattttcctgccggaaaaaaattcacaaacgctgctttggag

SEQ ID NO: 441938 - DNA, 122 bp, Homo sapiens
tgcccattagcagctctgtgacctgggactgttcacttaccctctctcagcctcagtttccgcatctgtacaacgagaggtcctatctcttaggtccttacaatttttaaactctgggattc

SEQ ID NO: 441939 - DNA, 122 bp, Homo sapiens
gagctgccgctcccgaggttcctaggagatgcagaagacactgccctgaatgcctacagccggctggcaatgccgccccagagcagagcggcgggtgccgcctcgccttcttataggctcgc

SEQ ID NO: 441940 - DNA, 122 bp, Homo sapiens
ccccctattctttcattggctcctcttctctaaagatccgccccctgttagtctgaaccacgtcccctcgccttcaaggcttcctaccgctggtcctcgcccccacacttcattggctagtt

SEQ ID NO: 441941 - DNA, 122 bp, Homo sapiens
gcagcagaaaggcgtccggggaccccggcctgcagtcccgccacacagtgcatccagccccgcccggcctaaccccttcggtcactcggcccgacccgaccacgcctcccgcagcccggcct

SEQ ID NO: 441942 - DNA, 122 bp, Homo sapiens
aaggcgcagggccctggaggctctggacagggctcccctttctctcttcattttgggtggcgttctccagctctagtgcagacaattagcatgatttctccactctgggcacgtcccctttg

SEQ ID NO: 441943 - DNA, 122 bp, Homo sapiens
cttgttcagaggtccatggggcagctcaactttaggttgcaggttggctggacttggcttcggactgcagtttaggttcagatctgctccatgtatctcttatcctctttggactcaggtat

SEQ ID NO: 441944 - DNA, 122 bp, Homo sapiens
agattgagacccagagggtgttagggacacatctaaaaccacatagcaaaccactgtcagcgccaagataagaacgcaggagcactgaatttatggctagaatttccagagccataaaagtc

SEQ ID NO: 441945 - DNA, 122 bp, Homo sapiens
ttaaaggcggcggcgagtgcttcatttgcatgttctgtgcggcacattggagagtctgggcggatgtggccagcggggccccagggctgccaggatgggccatggaaaatgcatccgttgct

SEQ ID NO: 441946 - DNA, 122 bp, Homo sapiens
atggtggattaccattgcacgtttagcccagaagagacaaagatggttaaacagtgtgtgcgcagtggttaatggatacacacagatcttgttgctgtacaagctgagggggcctagaacca

SEQ ID NO: 441947 - DNA, 122 bp, Homo sapiens
accaggaggacgcaggcctagaggtgcaccagttctatccgctggtgaaggtgcagtgctcgcccgaactgcgcttcttcctgtgctccatgtacgcacccgtgtgcaccgtgctggaacag

SEQ ID NO: 441948 - DNA, 122 bp, Homo sapiens
cactcccaggaccctaagacctcaagcagcagaaaccacaattctggatgttacgtgcagcgccagctcctgtctgccctgcctccttatccctttctcccagggcgactttggaccaggtc

SEQ ID NO: 441949 - DNA, 122 bp, Homo sapiens
cttttctttctttctatttaatccatttccaggttcctattattttgccaaaaagggggccggagttgctcgccggcggaggagtgggagacgatggcccttacctgctctctttctctctc

SEQ ID NO: 441950 - DNA, 122 bp, Homo sapiens
gtagatatcatctgtggtgatcacctgttggagcagtatcaaactctaagggaaatccgacgtgcaataggtgatgcagcaatgcaggatggtctgcttgtccttcattatggtcttgtagt

SEQ ID NO: 441951 - DNA, 122 bp, Homo sapiens
cccgcgcctgccgcaggtgagaccctcgctccccacggagttctgtttgggtttccgtggcgtttgttccccgcaggtttgtttatttttcttcaaattacagatgcagggaaaaccgcctg

SEQ ID NO: 441952 - DNA, 122 bp, Homo sapiens
tctacgggctacccgattggtgaatccggggccctttagcgcggtgagtttgaaactgctcgcacttggcttcaaagctggctcttggaaattgagcggagagcgacgcggttgttgtagct

SEQ ID NO: 441953 - DNA, 122 bp, Homo sapiens
agacattaaacagtacttcagaggctgcccaggagttctatgatgatgagatggacccaccgggagccctggagtaatggttcagtttctgattcttaactgtagatgaatctttggacctg

SEQ ID NO: 441954 - DNA, 122 bp, Homo sapiens
cccagttgtgtgatttgtggggccaggccgttcctaatgcccaacccatagatacgatgacggggctttcagtgaaggattcagctcctatttgtctttcccaggttcccctggacagacag

SEQ ID NO: 441955 - DNA, 122 bp, Homo sapiens
aaatctatgggaatgctacagtaaggatagaccttcaggatatctagccgtctctctttacgtcagttcaagtctacaaacatgtatgcaactagcatagtgcttgacacagaatagagtct

SEQ ID NO: 441956 - DNA, 122 bp, Homo sapiens
gcattactgagtgcttactgtgtactaagtgacttgacaggcattatttcattcggtctccgtggccctagaggtaggtgctattactgttcctactttacaaccaacgcgccgggatcgag

SEQ ID NO: 441957 - DNA, 122 bp, Homo sapiens
ccgtcctctgggcacgcttctgcccagtcccggcaggcagtgcccgcaggtgttaaatcgcgtatttacactgcttaaacaataagcctgttaactgaattgtgattctatgcaatgaaata

SEQ ID NO: 441958 - DNA, 122 bp, Homo sapiens
acgcgcatgcgcggcgcatgcgtggcccggggtctcggggcgttgctgggaaacatctgccgttggttgcggcgggcaccggccgacatggcggcagcggtggcggctgcgctggcgcggct

SEQ ID NO: 441959 - DNA, 122 bp, Homo sapiens
ggactgcgggtgttaggtgtccaagtagaaagttcaaatcttctgacggcaggtaccttacgtgggattactgagagccagtccctcttcccccccggctctgaggacccccatcgcaggag

SEQ ID NO: 441960 - DNA, 122 bp, Homo sapiens
atattctgcacacggccctgacctcggggtgcatcgctggtgactgcaacttacccgtgccgtcgaatccccatcctggtttactgaagtgcagaagtgacataagtgcttgtgaatcagca

SEQ ID NO: 441961 - DNA, 122 bp, Homo sapiens
ctaggacccttccctctgtctgggcccacctaccgctgttgacgtaaagccggccccggacggtgtccttccccaggatgttctcggcctcgcagacatactccccagcgtcctccaccttc

SEQ ID NO: 441962 - DNA, 122 bp, Homo sapiens
acctcgctcactcgccctctggcctggactgtcaacggccctaatgaccccaatccccaacggccctgcgctccaactcaccactgcactgccaggctgcacgtcggaagccgggctccgcg

SEQ ID NO: 441963 - DNA, 122 bp, Homo sapiens
ctggaaccttcaggaactgcccaaggctagggtgggctggcaagagtggaggggcccgggcgctgcagacataggggcttcccaccaggagctcactgggaagagggagcaggccccggaga

SEQ ID NO: 441964 - DNA, 122 bp, Homo sapiens
aaagtgttggcctaaatctatttggaagcattttggtacttgaatttgatatgctctttgcgtaataaagggattatgctgcccactccctagtgccggaaagagcagtttgggatgtctgt

SEQ ID NO: 441965 - DNA, 122 bp, Homo sapiens
cggtcgagggaagcggagccgcccagcccaaagctcggagtgtgcccgccgcctccccaacgagtggaaacttgaaactcccgctggtgccagcaaactcactgagggcgttgccgtcgccc

SEQ ID NO: 441966 - DNA, 122 bp, Homo sapiens
gccaggatctctgcgctggcggcagagactgcaacctgcagctgcggaagcttcaagtctcgcaacaggttattccagtttggatttaagcaaaggcctcaggatagcgcctccccctagct

SEQ ID NO: 441967 - DNA, 122 bp, Homo sapiens
cgacgaggctgagaatcacagaccatcttccataaacttgattctgtctccaattttggtcgcaagttgcttgtaggcccaccagacacagctgaggggtgggagggggcatgcggaggggc

SEQ ID NO: 441968 - DNA, 122 bp, Homo sapiens
acctcgtgatctgcccgcctcagcctcccaaagtgctgggattacaggcttgagtcactgcgcctggcctgcctgattgaatttcttacaggctacttattatagatatgatgctcaaatca

SEQ ID NO: 441969 - DNA, 122 bp, Homo sapiens
caggtaccctaagccaagttgtgtcacagacagctctcaggaaagaatcacttgactaaacgccaaagatcaggtttgggatctgcaattcaaaactgcagtttgggcatagaaaagattaa

SEQ ID NO: 441970 - DNA, 122 bp, Homo sapiens
aggatgcacggtgcctgtggtaccctggctctaagagggatgcattagactaaacgggatcgcaacttgcggtggttcgcccgcctgcagctcttatacagcagcccgtgccgtgcgccctg

SEQ ID NO: 441971 - DNA, 122 bp, Homo sapiens
ctttagcgtgttgtgggtaggagttaaatgggcccccagccaggaccaggggttcaaatccgttgccatggtcccccgacgctttcccgggctccagaacggatcgcgtggtcacgtgacag

SEQ ID NO: 441972 - DNA, 122 bp, Homo sapiens
gccggccccccattcgggtccgggttttagttcctcggggagcccctggtgccccggatacggctgattttgtcgtgtgggacctgttctggctgctccagccccaggaaggacccaggaca

SEQ ID NO: 441973 - DNA, 122 bp, Homo sapiens
atcctccctcccaaatcacgcctcaccagcaagtgccctgaccttacagaccaagccagacgcctccttctcacgtccccaaaacatcacagactgcgagtccagtccccctcctcgccatc

SEQ ID NO: 441974 - DNA, 122 bp, Homo sapiens
ggggtacactggaagcacttaagaaaatggcaaaagttttagagtctcctctccctgacccgggggtctcaaacatctgctgggggctattagagcgagacatcacccatccccagatctgg

SEQ ID NO: 441975 - DNA, 122 bp, Homo sapiens
gagtctgggatggagccgggggctgccgagggaccgcgacctggaggggccccggggagacggttgagggaaccgggatagtcagctctggaatggaatctgaagcaaatggaggttgtcga

SEQ ID NO: 441976 - DNA, 122 bp, Homo sapiens
accccatgcagcctcctgtggaatccgctgcatccccgggtccccccgccaggctggcgtcgcccagggtctggcagtcagggtggaggccagtgataagcaacttcactttcccatggcct

SEQ ID NO: 441977 - DNA, 122 bp, Homo sapiens
gcacagctgccctttgaagtacggtctattatatctcttttacagacccagaaactgaggcgcagaagttagggtcagccccaggtcacacagctaacaagagctggcctaggcacccaggg

SEQ ID NO: 441978 - DNA, 122 bp, Homo sapiens
agaccggttacactttatggggtgggcggcagcgagagttccccgtcccatcatctcctccgccggacgcacagagaatgcagcgtctgtgagcacagctgccctggacctggcatctaaga

SEQ ID NO: 441979 - DNA, 122 bp, Homo sapiens
ccaggggagggtgcgaaggaggcgcctgcctccaacctgcgggcgggaggtgggtggctgcggggcaattgaaaaagagccggcgaggagttccccgaaacttgttggaactccgggctcgc

SEQ ID NO: 441980 - DNA, 122 bp, Homo sapiens
gaccgctccccctcccacccgcgggacaaagggcgggggcggggggggcgcacccccacgcgtgacctttccccgtactgcgcacgcgcccagcccccaccaccgggggacggtccgcccgc

SEQ ID NO: 441981 - DNA, 122 bp, Homo sapiens
tcatgtgagtcagctttgaagcgaatcctccagcccagtcaggttttcagacaactccagcgttggccaaaatcttgactacaacctcaggagaaaccctggccagaactacccagataagc

SEQ ID NO: 441982 - DNA, 122 bp, Homo sapiens
ccggagctggggatttgcaggcgatccctctctattttcgtcgagagctgacatcacccgcgccgccgcctcgggcaactcctttaaccgccgccccccgcccccatctccagtcgcggtcc

SEQ ID NO: 441983 - DNA, 122 bp, Homo sapiens
ggggcggggcgggacggggcggagccttcccgagctgcgaggtcgctgtctccttgcgctcgccactggctctctctgcggcaggtttccctccggttaccgtgaccaaaggggaaagacgc

SEQ ID NO: 441984 - DNA, 122 bp, Homo sapiens
aaaggcgcatggcgtcctggcagaaatgatgcatggttaggaaggatttggacccagcagcgccttaccccaaaagaacaggcaagagaacttcaccaataggtaagggcccggcagagttc

SEQ ID NO: 441985 - DNA, 122 bp, Homo sapiens
tcagaatattatatattcaacttaataatgagatagtgacaattcgaaagggtttcacttcgtatactatcagttcgctgagaactaataaaaaagtgtggttttttgggtcatcccaaaaa

SEQ ID NO: 441986 - DNA, 122 bp, Homo sapiens
gggctcaaagacggcaaggccaggcaggaccacaggtttattggggactccacgcacagacgcttatggcatcacacgacaacggcacggttactcgggacacacacggtggcctctgccca

SEQ ID NO: 441987 - DNA, 122 bp, Homo sapiens
gaagccccaacaacagatttctgttgctgtttactggttaccactagctggaagagaaggcgaaagtgtaaagaacagaatggcataattggcttagtctgactatgaccattgcggggatg

SEQ ID NO: 441988 - DNA, 122 bp, Homo sapiens
tctgtgtggtgtggggcgggccaggagcgaagagaggccttcctccctttgtgctccccccgccccccggccctataaataggcccagcccaggctgtggctcagctctcagagggaattga

SEQ ID NO: 441989 - DNA, 122 bp, Homo sapiens
gctctgggtgaagtaggatcatcaatgtcggcccccagggttcacagctgttctgagccccgcccccaggtggcagggcagcccagtcagtcagtcacgtgctggcggctggccaatcatcg

SEQ ID NO: 441990 - DNA, 122 bp, Homo sapiens
ggccgtgaactgaatggtggcgctggcctgtgcccagtatatctggtatgaccctggggtcgtgtgggggagccggcatgggcagtggaggtgcttatgggacctgcagtaggacacagtcg

SEQ ID NO: 441991 - DNA, 122 bp, Homo sapiens
tcttcccaggcctggggaaacttcggtctgcagagaatggagcggcgacgagcgatgccccggagtgggggcctgccttttgcccagggacaccaaggcaaaggaacaattactgccacatt

SEQ ID NO: 441992 - DNA, 122 bp, Homo sapiens
ctcaaagtccctaagcactgatcctggctgtgagagcgacacctggtggccaacagaccacgccacagagagaaaagcagagggagctgcagacaggaaggaactgaaggagctccagatac

SEQ ID NO: 441993 - DNA, 122 bp, Homo sapiens
aacctccgagagtcgacgtgatgtcgctgaagtgggaagcccagtcatggaccgcatgtacgaccgtggtcccggaagaggataatggagctgaaaactcctatcgcctggtgatttcgatg

SEQ ID NO: 441994 - DNA, 122 bp, Homo sapiens
ccaactacactggtatctataccaaaatcctcatgaggactctggatcctctgtgcagcccggtagggatcatcctacttatacatcccagcaggctgcaaaacacttccgttcccttcaaa

SEQ ID NO: 441995 - DNA, 122 bp, Homo sapiens
caaaacactgtctctaccagaactacaaaaaattggctgggcgtggtggcacgtgcctgtcgtcccagctactcaggaggctgaggtgggaggatcgcttgggcctgggaggcagagatcgc

SEQ ID NO: 441996 - DNA, 122 bp, Homo sapiens
tgctgccgggttccaaggggagattgctgattcgctgtgctactttgggaaccattcacccgggacccagcttggaaagaggagagcttgtttgtgcttcggttggtttatgtttaaagaca

SEQ ID NO: 441997 - DNA, 122 bp, Homo sapiens
caggcagctccccgcagctcccggcgcttccaggcagctctctgagccgtgccagaggcccggcccgccattcccaggtaggagacgccccaacagagctgggcatctgggggaagtggagc

SEQ ID NO: 441998 - DNA, 122 bp, Homo sapiens
aaacgtcgaagaaactggaaatgttgccctgatgcacagaaaactttgacagaggctgggcgcggtggctcacacctgtaatcccagcactttgggaggccaaggcgggtggatcacctgag

SEQ ID NO: 441999 - DNA, 122 bp, Homo sapiens
ccgattgggtgggacttaatggactttccgcgcctgcgtccaggactgaggccgtgagagcgctctcttcaggcgctctgacttgtttctgctccatctctctagggggtctttcatggttt

SEQ ID NO: 442000 - DNA, 122 bp, Homo sapiens
acgccacgccgccgttgcctagtaactgtcgccggagggaggcggggagggtcgcaagcgcgccgccggcgtccaatcaggacctgcgttccgggagccaatagcagcttcgagagccgctc

SEQ ID NO: 442001 - DNA, 122 bp, Homo sapiens
tcgggcatggtgagctgcaggtcccgaaccctgcccctgcgggtaggcagctgagggctgcgagaattccagcgcagcgccggcgggctggcactgctgggggacccggtgcaccctccaca

SEQ ID NO: 442002 - DNA, 122 bp, Homo sapiens
tcttggggggcttcttatcagagcagaggtagcagcctccatcttccagctgctccagggcgctgaggctatgcaggccccggggtgtggtgacagagcgcaccccaaaggagagaggcacg

SEQ ID NO: 442003 - DNA, 122 bp, Homo sapiens
gttctgtaggaagaggcgtggcgacagacacctgtgaacctcacccccgttccagacagccgactcctgtgcgcaaatcaggcgtggagaaggaagaacgcccccaaacagcggttctgttt

SEQ ID NO: 442004 - DNA, 122 bp, Homo sapiens
gggggaggggtggaggcggaggggtgggggggaagggggagggagggggaggaggtgactcgagcatttagacacaagcgagaggatcatggcggatggccccaggtgtaagcgcagaaagc

SEQ ID NO: 442005 - DNA, 122 bp, Homo sapiens
taaggcaggacattgccccttgattcagtgtgcaaataatggagtagtgtaattagcattcgtgtagttatactgatgtaatctcatggggtcagggtaaattattgtattctggggctcaa

SEQ ID NO: 442006 - DNA, 122 bp, Homo sapiens
tgacaagtgtccgtcttccaggccctcgtacgaaatgacacgtactcggaccaacactgtcgtgttcgtgaagacgtcatcacactccgctcctcagatatgcccaactgtccatctcatcc

SEQ ID NO: 442007 - DNA, 122 bp, Homo sapiens
gtttaggacaaagggtcccagactctgcctgccaagaagatgccttgagaatgtcttctgcgggtgctactgacggcaaacacctacacgctgttttccacatgctcagtgctgttctcagg

SEQ ID NO: 442008 - DNA, 122 bp, Homo sapiens
agctgggacggagggaggtggccccagccctggtgatgcaggggcaggatgcccacagagcgtacaggtgcagcttagaactgcaggggtggtgacgcccggaacaggaatacagcaggaaa

SEQ ID NO: 442009 - DNA, 122 bp, Homo sapiens
ttagtagtcctcccagttctctccctgtgggtcggcaggggatgggggaaattggaggtccggacacttaggcactagaaatgacttgaaagaaaatgaactattcttggctccagggagac

SEQ ID NO: 442010 - DNA, 122 bp, Homo sapiens
gcaatgggcgggtgtttttgctgatagtttcactgctgaattaagaatgttcccttcatccgagtctcaagcgtcaccttcaaatccccagttaagtaaagatacctccacaagaataagaa

SEQ ID NO: 442011 - DNA, 122 bp, Homo sapiens
aagtgcgacagggtgacacttgggtggtggaggtgagaattcttaacctgtaggtggaggcgatgagggcctctggcactgaagtggaaaaacagagttgttatttctttcaaagaaggagg

SEQ ID NO: 442012 - DNA, 122 bp, Homo sapiens
cactcagaagtcccgagacccgatgctttcgccagcgtctcggtctccaaggaaacgcgacgccgcctaccgagcgcctaaagggactaacctctcaaggcaaaatctagttcggcccgctt

SEQ ID NO: 442013 - DNA, 122 bp, Homo sapiens
agacaaaaagccaaacggacccacaggacaagaaacaatgttgtgggcagccgtgtgtttcgcatattgcccctgacacaaacaaggaattatggaggtcccatctttaaacagactttata

SEQ ID NO: 442014 - DNA, 122 bp, Homo sapiens
aacacagaaacaagaatgacaggatggtggaaacgaagtgaggaacgcataattcatttgcggagatgtctgtgagacggtgacatttcagcagaaaccagaaccatgtaaagtgtaaatca

SEQ ID NO: 442015 - DNA, 122 bp, Homo sapiens
atttgctcttagtcactccttcaggccctctcctagaccagcctatatagaaacagcccacgcagcagctaatccaggggccagggctgttgaaagccagctgctgttcccacagcgactga

SEQ ID NO: 442016 - DNA, 122 bp, Homo sapiens
aaacaaagccacccgctacagctcagacggcaccgccacgatgtggtttaaggctctgtacgtatatatatgtgtagaggctcacacacgcgcacacgcacacgcagagcggcactgacacg

SEQ ID NO: 442017 - DNA, 122 bp, Homo sapiens
tatgatatcttcccactcaccctacttttttccttctcaggaaacactgacgggaacacacgtgccggtgctaccctccagtgactggactagatccttgcgcaacttcaacccgcgctagc

SEQ ID NO: 442018 - DNA, 122 bp, Homo sapiens
cgacccggtggtggactccttgcactgggattggacatatgcaagcgggagatttggggccggcgctcaaaatcggggggcgggggtggactcgggtttggaccccaggatccgatcagcgg

SEQ ID NO: 442019 - DNA, 122 bp, Homo sapiens
actgttctaggtgcttcgtgtgtattcagaccccttttttaggcctgtcattggggacttcggtcatggggcatccttctgtccgctgtccttcccagttgcctattattaccctctccatg

SEQ ID NO: 442020 - DNA, 122 bp, Homo sapiens
tcctatgcgcacttttcgcagagccccagccagccgccttcaggagaggacgaacctgggcgcgttttcacccgtcctgggacatattaacgccattttggctgaatgtgcagagctaccca

SEQ ID NO: 442021 - DNA, 122 bp, Homo sapiens
gtggctcacgcctgtaatcccagcactttgggaggccaaggcgggcagatcacctgaggtcgggttttaggaacagggcgccaaatctggccataaactggcccaaaaactggccataaaca

SEQ ID NO: 442022 - DNA, 122 bp, Homo sapiens
actcgttcaacgtcatgaagtgagtcagaggggagtcaggaactaactcctagagggactcgttcaacgtcatgaagtgagtcagaggggagtcaggaactaactccgtgagtcatggctcc

SEQ ID NO: 442023 - DNA, 122 bp, Homo sapiens
agatgtgtaggcaatttatcaaatattaacctcttcctaaacatggggttgaattcctcccgtaacattgtaacgttgttagaattatgtgaaagggggctttgtctcaactatcctgctag

SEQ ID NO: 442024 - DNA, 122 bp, Homo sapiens
gcgctctgttcccacgcccctcgttatggcgcagaagatttccgagaggatggcggggaacgaagccctctcgcccacctccccgttcagggagggccggcccggggagtggaggacacctg

SEQ ID NO: 442025 - DNA, 122 bp, Homo sapiens
gcagttttctctatgagaagttgcccccaagtcctagcagccctggtaatggggactgcacgctcttggccctagcccagctccggggccccctctctgtggatgtccccctggtgcccgaa

SEQ ID NO: 442026 - DNA, 122 bp, Homo sapiens
ctgacccaggctgagggagcccccgaggctactgcggggcggggccggggcggggtggggcgccctcgccgcctcaggcagcgccccggccgctggcgggaggcggcagcggcgcgggccga

SEQ ID NO: 442027 - DNA, 122 bp, Homo sapiens
ctgtcatggtggaagtccagagattcctctctgtctcccttatcctctgccccaccggggcgaggactgaacgctatcaatacgtaagagaggacaggcaagccaaatgtcaaactaccaag

SEQ ID NO: 442028 - DNA, 122 bp, Homo sapiens
catcgtaggtggtgtgttcatcacatcagtgtaactataatggctgtttgttgccgggcgcggtggctcactcctgtaatcccagccctttgggaggccgaggcaggcagatcacgaggtca

SEQ ID NO: 442029 - DNA, 122 bp, Homo sapiens
gggaagcccccaggcttccccctctgcatgggtgcctggggtgtttcctctgcatttactcgcagaacgttcccgccgctgttcttcaacagcaggcaggagtctgagctgagttcagaagg

SEQ ID NO: 442030 - DNA, 122 bp, Homo sapiens
tgctcggagaagtttcatagcatagagcactcacgacacagaacctaccctgaagccgagcgagacgcgagctctctccgccttcaagggccggggggagcgggggggcccccgccactcag

SEQ ID NO: 442031 - DNA, 122 bp, Homo sapiens
tcagctcgagggggcggggacagtgtgtgacttgtcagtgcatgtacccggcagccagcgcgggccctggcccagagcagatgctctgtaaatgtcagatgaaggaggaagtgatgtactcg

SEQ ID NO: 442032 - DNA, 122 bp, Homo sapiens
tgcgagaactcaccaggcagcttccgctgcgtgtgcggcccgggcttccgagccggcccacgggctgcggaatgcctgggtgagaaatttgccccacccggctccaggcccaccccagggtc

SEQ ID NO: 442033 - DNA, 122 bp, Homo sapiens
ctgttcttagaggaacaatcaatgggaagcaaaggtgtacccaggcctctcaacagttcccgagtgctgtcactggagggcgatgtctccaaacagtctctttccccactgggaacggcgcc

SEQ ID NO: 442034 - DNA, 122 bp, Homo sapiens
gcccaggaagagcccggccatccctttccggactggatccttaagaggtgaattttcttccgtggattccgatttgctccgtctgaccagcctaggcaatccagcatcgcgtggtaccagtg

SEQ ID NO: 442035 - DNA, 122 bp, Homo sapiens
ctatctttttatagaataaacaaaacagaaaaacaaaaatctcgtaactccggcgctggccgccttgcactgccaatgactcagcagcctgtgtaagttacatattggagagaggaccgagc

SEQ ID NO: 442036 - DNA, 122 bp, Homo sapiens
ttaacccacaacaccagggattttacctaattcctgcctatcctgccttttctctggctccgtgctggactggccacttcctcttgcctcatacccacctggctaatctgactgcttatcct

SEQ ID NO: 442037 - DNA, 122 bp, Homo sapiens
gcgcgcgccgcgccccacgcgcacacgcacgcgcacaggcgcgcgccggtcggccccgcgcgacgttcctcagcgagcccggccttctcacacacacgccgctggggagcttggccgtcggc

SEQ ID NO: 442038 - DNA, 122 bp, Homo sapiens
tgttttacggaagtatttgctgtccacccaatgcaaattctaaagtcgttcccccagcgtcgctgccccgaatgcaggggggcggggttttattgtataatataattttctttaaatatttt

SEQ ID NO: 442039 - DNA, 122 bp, Homo sapiens
gagagcgtccggattccctgctctaggtcgcggcgggacagtgccagtgggcgtgtggggcggggcagggcagggaagggaagggcggagctggggtgagggtccaaggggcccaggacttg

SEQ ID NO: 442040 - DNA, 122 bp, Homo sapiens
ccaactcccgggctcatgtaatcctcccacctcagcctcccgagtagctgggactggaggcgggagccaccatgtcgggctaattggtttttctgtagagatcgggcctccctaggttgccc

SEQ ID NO: 442041 - DNA, 122 bp, Homo sapiens
tgctccggacgggcgggcgggctgggaggctgcgggagccgggcgggggcgcgggcggagcgtcctgctcacctgaggctggcggcccaggtgctccaggcgacaccgtccgtgagcgccgg

SEQ ID NO: 442042 - DNA, 122 bp, Homo sapiens
gttggtgcgcagcgcctgctcgcgccgagtccggcccttgctgcgccctgccccgcaggccgggaagtcgcgcaggtagtagtagtccaggcagtcgtaaagctcctcctcgtagcttatgg

SEQ ID NO: 442043 - DNA, 122 bp, Homo sapiens
agggttcccgggtcaggtgacccaggttcaaatcacacgattctaagctttctgtgcttccgtttccccacctatggaatgggcagccagtaaaggggctggtgtgggggctgaaccggttc

SEQ ID NO: 442044 - DNA, 122 bp, Homo sapiens
tgatggatgtggccaggctgagacaagaccagagaagaaatcagaccggagtttgaggcccggcactggctggagagctgtcctccacacaagctgaggcagcgtctttcttccccggcttc

SEQ ID NO: 442045 - DNA, 122 bp, Homo sapiens
caatgtccccgctccaccttgagtcgtcttggaaacggtcgccagggaaaccgttcttcccgctcaggcccgcccgccctcgtcaaaagcttggctcagagagcgggggaggggtgtgtagc

SEQ ID NO: 442046 - DNA, 122 bp, Homo sapiens
actgtatgacccgattcacacacctggacacatttaatcctcccaactaccctagggggtcgaattcagtggaaaagagagcggcggctaagggcacctccaatggggagggtgtcggggca

SEQ ID NO: 442047 - DNA, 122 bp, Homo sapiens
gcatgacctggttcgtggggtgtcattccggcgtgacctggtcctggggtgtaagtccagcgtgacctggttcctggggtgtcactccggcgtgacctggttcctggggtgtcactccggcg

SEQ ID NO: 442048 - DNA, 122 bp, Homo sapiens
ttgctggactctgggggaagcggagagccgggtttctttttaccgggtatttttgaggctcgagatttattaagcactgactgagccctgtcatattccacgtccttggcagggcaccgaaa

SEQ ID NO: 442049 - DNA, 122 bp, Homo sapiens
tccatttccgggctccggatatttggtatcgattggggccggggacgcggagcaggtggccgcggcggggcagctgggccgccagcttggtgcctcggggaccgtctcccgctgctttggtc

SEQ ID NO: 442050 - DNA, 122 bp, Homo sapiens
agccctctaaacatcaatgtcttaaagggttgacattataacaatggaataactgaaaagcgaagttttctgaagtcatatgaccctgctgtgtgcccaagtcacctattcacatggctgtt

SEQ ID NO: 442051 - DNA, 122 bp, Homo sapiens
ctggtccttctacttcggcgggctgtcgttcatcctggccgaggtgataggcgtgctggccgtcaacatctacatcgagcgcagccgcgaggcgcactgccagtctcgctcggacctgctca

SEQ ID NO: 442052 - DNA, 122 bp, Homo sapiens
atgaactgtagaaaattctccaagttgtccaaggtcatatggtgataaccctgattatgacgtactgaatccctgacgcatctcctacaactcagtgttgaaaggctcagcatgccttggtg

SEQ ID NO: 442053 - DNA, 122 bp, Homo sapiens
ccaccccaccccacggccgcgcctcccacgccctcgtaacagcgagagaaaacttgaagccgcggggaacccggatcccgatcccgatcccgatcccgatcccaaccccaaccccagccccg

SEQ ID NO: 442054 - DNA, 122 bp, Homo sapiens
caacagtgtgacgagaaggaacgccctttccaggagtgaccgggcctcaggctagagacgcggtgggggcaagaccacccggtgagcctgtttggcgaccccaagcaagcccctgtgtccct

SEQ ID NO: 442055 - DNA, 122 bp, Homo sapiens
agggacacgtctgccattgctcggttccggtgaaggggcacagttaccgttgctcggttccggtgaaggggcacgtttaccgttgctcacttccggtgaaggggcacgttcaccgttgctcg

SEQ ID NO: 442056 - DNA, 122 bp, Homo sapiens
agtctgtaattggcttgtaatcagctcctggctggctggttttctcattatttttccccccgtgattatgggcctccaactggatttttgtgactccagcactattgaccatttcatctgtg

SEQ ID NO: 442057 - DNA, 122 bp, Homo sapiens
cctggatcccagtcagcagccacaagaaggcggcacggtcagagcccgccgagcgtcgtccgtccctcctccagggtggtcagcgtggcccagcccactcgacaggaatggaaacacagaag

SEQ ID NO: 442058 - DNA, 122 bp, Homo sapiens
tagtgaagcatacagttcaagaaacaagtttgcttctctctcattaatctgctcagttcacgaccttctcccctggggctcactctcaggcacatgcggccgttctctgtatccattagcac

SEQ ID NO: 442059 - DNA, 122 bp, Homo sapiens
tcgaatcctgtgtgtccggagaggccaacgctttcattagccagcaggaatgggctggggcgcgtttgtagttgggaatcctgagcccgggctgttgcttggaggactcgggagcagcagtg

SEQ ID NO: 442060 - DNA, 122 bp, Homo sapiens
ccaatttttctttactccatctgtcaagagaggcacctgttaaaagttccacagtgtttccgtcctcaaatatccgacatataattacaatcaagttccagacaagcaggccagctttcttc

SEQ ID NO: 442061 - DNA, 122 bp, Homo sapiens
actggacacccagcgcaggcagccaggcagagctctgcgtggggaagccaccgactgagtcgtgtcttggggatctggactcacacccaaaaccctgtagacgggttcagaggctcaggaag

SEQ ID NO: 442062 - DNA, 122 bp, Homo sapiens
ctcaaaactcacaggaggagccttctgagaagcccctctgacatccatcgatttaaatgacgctcccggtcccaaagcaccctggatagtttgcctctctcctgctacacggtgaactcccc

SEQ ID NO: 442063 - DNA, 122 bp, Homo sapiens
tagccgctccaaaggcttctcctgctgccatggcgacgctccgcccccataaacagcttccgcctctgccattggccagcacgtctccaaggagaccgcgggcacttgccactctccctggc

SEQ ID NO: 442064 - DNA, 122 bp, Homo sapiens
aaggccctgctggacaccttctggtacctgggcctcgtgtattacacctgtggctgccgccgaggcgcggttcaatttgaagtctgagcccctacaggcccgtgaatcctggattacaactg

SEQ ID NO: 442065 - DNA, 122 bp, Homo sapiens
aaactatgttttatggcaaatggtttaaaacttcaggaaaccacctttaaaggccgcaaacgaatgcttgctttttacttagacctgtggtgatctccccatcgcctggaaatatggagcgg

SEQ ID NO: 442066 - DNA, 122 bp, Homo sapiens
cataatatcattttatgtttcatttcactcacaagagacagccagatgagcaaatatagccgaccatgtgctactgcaacaaatgctgaggcatccctctgacgtgagccagtaatattaaa

SEQ ID NO: 442067 - DNA, 122 bp, Homo sapiens
gccctaagaagaaaaagacttcctccccattacctggtttcccagagatgagcagggtgacgccatcctctcagccccacttggcagctggcgcgctgttcctggcaaggcagtggcctgta

SEQ ID NO: 442068 - DNA, 122 bp, Homo sapiens
gcgtcccccacccctggcgccgctcatcctgggcaggatcggccccgtctgaggctgcaccgcattagggagctgcacccctcggcttgacctctgatggccgttgcaacaacatcaaagcc

SEQ ID NO: 442069 - DNA, 122 bp, Homo sapiens
ttcggccaatcaccgagcagacggcccggaagctcgagaggctcgtgccaggtcggggggcgaaggcgaggccagcccaccaagcaggggcgtcaccaagggaaagccaatcaccattattt

SEQ ID NO: 442070 - DNA, 122 bp, Homo sapiens
gtgtgaccagcgctcagcaggtgtccggcgggagggcgggcaaatacaactcagtgcccacgtgcgaatgaatgaacaaactagttccgggcggagccagaggcgcgcgccggcgcggaccg

SEQ ID NO: 442071 - DNA, 122 bp, Homo sapiens
gtgcgagcgtgtgggtttctcgggagaggtggcactgcagtcccgtcgcctgcaccgccgcgtggccccagcttcccgaaggtctccgcctcccgggcccacccgcgcgcccaccctttttc

SEQ ID NO: 442072 - DNA, 122 bp, Homo sapiens
ggaggctgcgggcggcggcggtgcggcgggcgcagcgggcgcagcgggaacagcgggcggcgcgcatgacctgtccagcacagcgcgcctcctggcccagcacaagatcctgcagggcgagc

SEQ ID NO: 442073 - DNA, 122 bp, Homo sapiens
agcagggcctgggaagcgccggagtggcggcgggggatgacgtcactgtctgtgagtggccgggcgtggcctgcgcctcccgcttccctggcttggcggcagcctcaagggactcctctccc

SEQ ID NO: 442074 - DNA, 122 bp, Homo sapiens
ctaaattcttagcttcaagtgatttcccagaatgcttggaataaaatactccttttttggcgtgaccttgagactccaaatcatctggaccttgaccacctccctcccctcatcttgctgtt

SEQ ID NO: 442075 - DNA, 122 bp, Homo sapiens
cgcagtggggagcagctcgctcctgggctttgggctggctgcagtctgtctgagggcggccgaagtggctggctcatttaagatgaggcttctgctgcttctcctagtggcggcgtctgcga

SEQ ID NO: 442076 - DNA, 122 bp, Homo sapiens
cccgccaggcgctggtctgagcgtctgagcccagatggtgcgcttgctccagagggcgggcggctccagtggccgccgcgggacggtggggccagaggggcccgtgggggtgggggagccgc

SEQ ID NO: 442077 - DNA, 122 bp, Homo sapiens
cagttagaggtctcattggcaagggccagtccctgttccccatcctccttgagcaggtgccggagtctcccgaggctcttgccgtccgcgtcgggaggaggcagctgtggggctttggaggc

SEQ ID NO: 442078 - DNA, 122 bp, Homo sapiens
ggcaggcaagtgggaggtggagggcaggattagccacctcggccactttggccactcaaccggccccaaaccaacaggacccaaactaaaaataataagctacctgccccctcggctcgcgt

SEQ ID NO: 442079 - DNA, 122 bp, Homo sapiens
atccggatccgagggcctggcagtccagtgtccgcgtcttccgggtgactctggttgtcccggatcgcggcggcggcggcggtggcggcggctgagggacccgcggccccggacacagcggc

SEQ ID NO: 442080 - DNA, 122 bp, Homo sapiens
ggctgcattggcctgggagaggcattttgttccaggccagggatttctgtgttagcattgcgtgcaggaagaaaaaaaaaaaaaaaaaaaaagaagacttaatttggtttaaatggagagat

SEQ ID NO: 442081 - DNA, 122 bp, Homo sapiens
gagcagggccgaggcaagcccttagcgcggtgggaaaccatcaaggtgtgaagtagggggcgctgacagaactctgagggctcagacgtgggaagtgagggaaagagacacctttgatgact

SEQ ID NO: 442082 - DNA, 122 bp, Homo sapiens
caaactcctgacctcaggtgatccgcccgcctcggtctcccaaagtgctgggattacaggcgtgagctaccacgcccggccaatgggcacactttcttacacgtatttctcctgactcatct

SEQ ID NO: 442083 - DNA, 122 bp, Homo sapiens
gacatattttggctttaaaagagagaaaaaaataataataattgccactttacctgaggacgtagtgggcttcaccagacagcagtgaattttaagtcacctgaggtatgcatatgcaggca

SEQ ID NO: 442084 - DNA, 122 bp, Homo sapiens
tgaccagacagagcagggagaggcgtgtgcacctcagggccacgatggccaagacccagccgggaggccggccgaggccccaggccccagggactgcgccagtcctctatgctatctcagct

SEQ ID NO: 442085 - DNA, 122 bp, Homo sapiens
ccagagcttccgtcatccatgcgtgatcctgcccgatcatttggaaaatcggtttttagccgtgagcccgactgcataactgggcggaggtgtgcgtgtgttcatgcttcacacgtgggagt

SEQ ID NO: 442086 - DNA, 122 bp, Homo sapiens
ctgggttatagggtatgcatgtatagtggctgctgtgatgtatccccaactctttcagaacgaaaggacctattcccttagctgctgggaggacccctggctggcagtcccagctgccaggg

SEQ ID NO: 442087 - DNA, 122 bp, Homo sapiens
tttactgatcagggaggctcagtgaggtaatgtgacttggcagagagcacagagccaaggcgggatctaaaattagctcctctgtcactgggtttggtgacctgtccccaaggccagagagg

SEQ ID NO: 442088 - DNA, 122 bp, Homo sapiens
gtggtggacgggagtgggggtctgtcctgaacaggtgggggtggtccctgtgctggcccccgccatgcgatcgcaccccaggactctcctcctcttcctaagccccagcatgtgcctggtgc

SEQ ID NO: 442089 - DNA, 122 bp, Homo sapiens
tgttctagtgcgttttcatcgtgaacatcttaggatgggaaggcctcagggaagggctttcggggaaggacagaaccaagaggctttagtagaacccggaaacctggcattcctttacgatc

SEQ ID NO: 442090 - DNA, 122 bp, Homo sapiens
ggaggcagcggtggtggtggcaccgggtagaaggcggtggcactgggtagaaggcaccgccgccgcccgccgcgggaggcttccgcggagactcagggctgcagagccagcggaggctgaag

SEQ ID NO: 442091 - DNA, 122 bp, Homo sapiens
ctgcatgaacagaacagaagcttctggctctccaaggcagcagcttggggcctggtggcccgggtgtgcgagccgcgagtgctttccaacagagggcaccagagccgtgcggtgtgctgtgg

SEQ ID NO: 442092 - DNA, 122 bp, Homo sapiens
ggccctcgcgccgctacccaggctcagggggcggggcctcgatgcgacccagtgcgcttgcgctgaccgccccggctaggcttaaagagcaggcggggcagagacccatacctttggcgctg

SEQ ID NO: 442093 - DNA, 122 bp, Homo sapiens
cctggcccggccgcgccgctcaccctgctgcccggaggaatctgccatggctgggaatcccggacccgcagctgcggctacagacacttcctagaatctgatgcaaccgccgccccggaagt

SEQ ID NO: 442094 - DNA, 122 bp, Homo sapiens
gggacacaaacgacccgacagagtgagcgaacaacgtcaaagggcctcaagtttggccgccgactaataatactaatagaacttcctgcttctggtgctgcttagggaggaagcacggaact

SEQ ID NO: 442095 - DNA, 122 bp, Homo sapiens
ccgtttccagccgcggcctcagcgcccccgtgcggccgccagtggacacagcacccagggcgggccttgcctgagaggtgcgggttggagctttgcgaatcaccccatagaagcttcgctgc

SEQ ID NO: 442096 - DNA, 122 bp, Homo sapiens
acggggccagaggcccgagttccagggagttgctgattccagtggagaaccgagacaccgcgtcctttctaattaataagcacgccaccccctacctccaacccccccccccgccccgcctt

SEQ ID NO: 442097 - DNA, 122 bp, Homo sapiens
ggcctggggccgaggccaccccgaagcccccggcgaccccgccgtctgcgtcctattacccgaacactgcacaccgctgccctacggcgccctggagctggacccactgccacatggcccgc

SEQ ID NO: 442098 - DNA, 122 bp, Homo sapiens
tgggggcaaagaagaagagctgtctctgggaccatgcctcctcccgtacacagcaagatgcgtccctaaactcccgggggaattagacttgtgggaatgttctggggaaactcctgcgcggt

SEQ ID NO: 442099 - DNA, 122 bp, Homo sapiens
gtgtggccagttatcacaccagtggaactaagtggtggggaatggtgtacttttgaaagtcgatcttatgagtttgagaggggtcatctttaaattttgtaaattggtcattagttgaattc

SEQ ID NO: 442100 - DNA, 122 bp, Homo sapiens
cgccttcttcggggagggggcagggcctgtgtggctcagcgagctggcttgccggggcaacgaggggcagctgggcctctgccaccaccggggctggaaggcccacatctgctcccacgagg

SEQ ID NO: 442101 - DNA, 122 bp, Homo sapiens
ttgtttgcctgcttttctgcaaagggtctctatcaacatctagctttttctcagccaaatcggacagcctccaggagagctgatgatactgaaacttagttgggcaaaggcttccagctcag

SEQ ID NO: 442102 - DNA, 122 bp, Homo sapiens
cggggcagtcagcctagccaccttcggaactctccacgcctgatcccgttccccggagcccgcggccgttaccttggtgcctccgagccgtaacacttcctccagggagaacccattctcgg

SEQ ID NO: 442103 - DNA, 122 bp, Homo sapiens
ccggggcgctgtgggtgaagagcgccgggggaacctttacgcgaggcagcaatgacaacgcgcgattttaaaggcgagtggtgaggacatccgcatttcctcactccaccttgcacggctat

SEQ ID NO: 442104 - DNA, 122 bp, Homo sapiens
tctggaggctccagggaagagtctgtttccttcccttttccagcttgcacagctacttcccgacgcacggccgcctcccggaccttcagagccagcggcattgcacgtctacagccttcttc

SEQ ID NO: 442105 - DNA, 122 bp, Homo sapiens
cggggcttggacaggcagccagccccctgctaggagccacgtggagtgctgggaagccatcggggccgggcgcggaagggctcgctggcaccgtctggcgaggggtgcctgccacaccctgg

SEQ ID NO: 442106 - DNA, 122 bp, Homo sapiens
aggaggggaggcttaggaaaaatctgcaatgcaagagaccagatccttcttttgaactctcgaaaatttgactaagtgtgactaatttaaaagcccagagcaatttttttttcttaataagg

SEQ ID NO: 442107 - DNA, 122 bp, Homo sapiens
acagactgcaagttccttggcccggcagagcacctgacattcaccccagcagccagggcccggtggctggcccctcgagttcgtgcgccaggactcctggactccctctatggcaccgtgcg

SEQ ID NO: 442108 - DNA, 122 bp, Homo sapiens
gaaaagttttagcagtggatttacagccttgcttaatacttctatttcttacaaaacaaccgtataggggttaaagtatcagtgcaaagtcccgttcaaatattgactcagtaatgagctct

SEQ ID NO: 442109 - DNA, 122 bp, Homo sapiens
gaccgctcccgccttgagcgcagccacaggccctctctggccacaaggatggggtcgccccgcagacactggtgaccagcggaagcatgaccaggaggcgattaccttctaatcacaaataa

SEQ ID NO: 442110 - DNA, 122 bp, Homo sapiens
cgttccgcccctgcccgggagccccgcgtcctcattggcgagctccagggtggcccggcccggacaccccagtgataaaatagatcatctacacggaaactggcgcgctccaggggtggggc

SEQ ID NO: 442111 - DNA, 122 bp, Homo sapiens
gcgcgggttccacggcaagcactgcgagaaaggtatggcgggcaggggcgtccgggccggcgtcagcaccctggagagcgcccgcggtccgccgtcctgcttctctgctgtctctctccttg

SEQ ID NO: 442112 - DNA, 122 bp, Homo sapiens
acttttagaaaaaatattgtccagactcactgtgctatttcccaaatatgatttggggagcgagccaacagataaagaaggatatttatttttgtttgtaatgtcgacgtcttctttcgggc

SEQ ID NO: 442113 - DNA, 122 bp, Homo sapiens
ggtgatccatccgcctcagcctctcaaagtgctgggatttatgggcgtgagccaccatgccgggccgagatggccttactctgatggacaccttttggcttctatccaccactgtggtgaaa

SEQ ID NO: 442114 - DNA, 122 bp, Homo sapiens
gccatagggcaggccagctggcgccgggggctattttgggcggcgggcaatgatggtgaccgcaaggcgaccttgtaaggcatttcccccctgactcccttccccgagcctctgcccggggg

SEQ ID NO: 442115 - DNA, 122 bp, Homo sapiens
ctcgcgcccggggcctttgtaaagagcgcagcggtggcgcggaggttttcaggctccgcccgctccactcgcgctcccgccccttccttcctctcgaggtgacccggcagctggcgcctttc

SEQ ID NO: 442116 - DNA, 122 bp, Homo sapiens
gggctccacatccctgttattcgtaaaggacgggaaaaggagttgtgtcaagacctcgatcgaggagagtctctgattttttggcaagttggacagatggcatatcaatccctgcaacgtta

SEQ ID NO: 442117 - DNA, 122 bp, Homo sapiens
ttagtagccggaacaatttttggcagaccaccatttccccctaccggattatcctgccatcggctttgaccgtttcagtgcccaacaaccaccttttcccaataacagaccaggaaaggaat

SEQ ID NO: 442118 - DNA, 122 bp, Homo sapiens
cagtgccaggcagagtagggaaagtgcagctgaggaggaggctggggcagtggccaaggacgttcaaatcccaggagaccatcagggcctgcctccaacctaggagcccccctcccatcaga

SEQ ID NO: 442119 - DNA, 122 bp, Homo sapiens
ccctgccaaagcccaactcccagggctctggaaatggtgaggcgaggggcttgagaggaacgcccacccacgaaggcccagggcgccagacggccccgaaaaggcgctcggggagcgtttaa

SEQ ID NO: 442120 - DNA, 122 bp, Homo sapiens
cttcagagaggatgcttgttggggggctcggggctccagctcctcagcgtcacccggggacgcctggcctgagcgctggcggttcccgggagggacacgcaggagctgcctgcctgggctgg

SEQ ID NO: 442121 - DNA, 122 bp, Homo sapiens
cctgcacagagacatcgggaaacggctcgaggtgcggaagaccgtgaccgcgtgcctgggcgagcccaaccacatcactcggctggagcacgctcaggcgcggctcaccctgtcctataatc

SEQ ID NO: 442122 - DNA, 122 bp, Homo sapiens
ctcccagtcctcggagggtgcaagtttctgtgctgtcctttcttgccaactccaggacagcgtggcctgccgccccgcccccgcccgcccccaccccatcccagccggggccccaagacaca

SEQ ID NO: 442123 - DNA, 122 bp, Homo sapiens
gctaggatagagttttaactcctggtcatctaaaaaatgtattatttagttgtctttgttcgtaggtggctctcctgttagaatttgtaattctgagataaaggccaccaccatctggtagt

SEQ ID NO: 442124 - DNA, 122 bp, Homo sapiens
tgcgcagtgcggtcaccctttttcttcttaccgccaccaacccgggtacaccatagagagcgtaaaccgagaccagagaggcggctgcctctctatggtaacgccccgcgcaggcgctggcc

SEQ ID NO: 442125 - DNA, 122 bp, Homo sapiens
cgccctgccccaggctgagttgtctcaggacagccacaaagccagccttcctcctgcctccgggcctttgcacagcggttctgcgactggggtgctttttccggcccctgcagccccacttc

SEQ ID NO: 442126 - DNA, 122 bp, Homo sapiens
tggataaaaggaggacctctcgccaagggccccaatgagtggcacacagtctactatcaccgacaggttggtatgaattcctccttcgttcggcctcccggaatcgggcccgacctagcagg

SEQ ID NO: 442127 - DNA, 122 bp, Homo sapiens
gccgccatcatgttcttggcatcgaacatctgctgggtgagctcgggcaccgtcagggcccggtactgctggctgccccggctggtcaggggtgcgaagccgggcatgaagaagtgcaggcg

SEQ ID NO: 442128 - DNA, 122 bp, Homo sapiens
cagttccggatcctctatcagtcccaggagaaggaattttgaaatagctgtttggtttctcgcttccatgctgttgatgatgaatctgatggaaaagataataaaatctgtaagcagcagct

SEQ ID NO: 442129 - DNA, 122 bp, Homo sapiens
cgcctccagggcgctttgctaagctttgtccagccgcggcaacccgcctcccccagcccacggcatcctcaagggcccttgggatcgggggcctcttgccttctatggcactattttggaaa

SEQ ID NO: 442130 - DNA, 122 bp, Homo sapiens
ttttcacaacatttctgttagcttgaggcttgggccgagagaaaagaggctgctgaaaaccgtctgcgtctgttttcttcatgctattggtaggagaaacacacttgtcacatactgagtca

SEQ ID NO: 442131 - DNA, 122 bp, Homo sapiens
gcatctttttttgcatggacatgccgagtagtgataagcagggttttctgttcttttgggcgtctctggtcagactcttctctttcagatcccgtgtcacagcattaggttcaggtgtgtca

SEQ ID NO: 442132 - DNA, 122 bp, Homo sapiens
accccctcgggcgcaccgctctgcgctcattgcaactttgaaagcaggaaggaagaaatgcgcaggctccagccgcgtccccgcaggccccactcccgtttcctagcaacgccgggtcacgt

SEQ ID NO: 442133 - DNA, 122 bp, Homo sapiens
gcccatgatttttgttttgttttggagacagggtcttgctttgttgcctagactggagagcggtgacaagatcatagctcactgcagcctcgaccgcccaggctcaagtaatcctcctgcct

SEQ ID NO: 442134 - DNA, 122 bp, Homo sapiens
aggggcttcgtgatgcacacaaacaccaaacaagcaggaggccttccgggatcctgctcacgagcagcttcctggaggcaagcctggcccgtctgccccttggtgacatcaggaccccagca

SEQ ID NO: 442135 - DNA, 122 bp, Homo sapiens
tgaatttttttaaaaatgtttttgctttagagaatttcgtccctgatgcaacaaaaatagcgattttaaggaacgttcagcccatcgctgacctgcgcacgttaaaatgattcgcgttcaac

SEQ ID NO: 442136 - DNA, 122 bp, Homo sapiens
atatgaatgaaaatgcacccgttggatttttttccccctcatcacattagcttgtatacacgtgggaattgaaaggtttgcattttcttcacatagttcttgctatgatgtctgacggactt

SEQ ID NO: 442137 - DNA, 122 bp, Homo sapiens
taatgttgaaaaatctagagcatcctcgatgtccaactccagggcggccgcacaatggcacgtccacatttgtgggagaagagtcggtggccggatgcggctggtgacgtggtgccaagtga

SEQ ID NO: 442138 - DNA, 122 bp, Homo sapiens
actaggataggctcctctccaccggaaaaggcgggatttagatcacgtcccgcaggccggcggaagtagctgatactctcattggttgcaaaaccttgatctgtgaaagcgggcgttttgga

SEQ ID NO: 442139 - DNA, 122 bp, Homo sapiens
ctcaaaaagaggttgtgtcatgtcacttttaatttagggccctttctttgttgtaccatacgtgtgttgtatctgacattatactgaggcttatggatacatgctgacagtgtgggtaattc

SEQ ID NO: 442140 - DNA, 122 bp, Homo sapiens
ctttcacatggaataaagagaaggtattctccatcacattcttaacatttaagggctcttcgatgataaatgcctctcaacagggctctaataaattgatcggataaaggctgtgaatttga

SEQ ID NO: 442141 - DNA, 122 bp, Homo sapiens
ctgggccccacctcctttaaccccacagtggtcctaactagaggctggggtgggagggagcgaggcaccagtcgccatagcttcctacaggttatttgcgggttactacactgtgcggagcc

SEQ ID NO: 442142 - DNA, 122 bp, Homo sapiens
tagttcctcacccccttggctactatgggctggtccggaaggtcaggcaaggggaagctgcgcaggcgcagtgtgagcggcaacatggcgtccaggtctaagcggcgtgccgtggaaagtgg

SEQ ID NO: 442143 - DNA, 122 bp, Homo sapiens
ggcggtggcgtgcggggaagcgcctggggaacacctggctctgcaagttttgtgccttagcggaaagaggcgacatctctggcaagttgggagtacaggaagtagcgaaggagtgccatctg

SEQ ID NO: 442144 - DNA, 122 bp, Homo sapiens
gcgcagcggccgcgtactgtcacgcgcctctccagcactctcgaaagcactacctcgagacgtgcatttccattcatggatctgtgcctgggggttgattaatgtcacccctgcctgggttg

SEQ ID NO: 442145 - DNA, 122 bp, Homo sapiens
aagtcctgtccgtgtagattcttcttgacctttctctgcagcattccttccttctgagtacggggcaggactctctctgggatggaggggtcttaggacctgcaagcaaacaaggtaggtca

SEQ ID NO: 442146 - DNA, 122 bp, Homo sapiens
agaatgtgcatattcttatgtataaggaaaattaaggcctcatgaggttaaagaggtgcccgaagttggagggcaccaaaatggctgagacagaggcagacacaggcaaagtgagtccaggg

SEQ ID NO: 442147 - DNA, 122 bp, Homo sapiens
gcccaccttactgccatagcagcccaggccccacccgttctacccgaactacctaggccccgcccacccccgcccccagagcggccctgggtgtctccctagcggccctaaccccaccccta

SEQ ID NO: 442148 - DNA, 122 bp, Homo sapiens
agcagtgactgcctgatgtacgacactacttggtactcatcagttgaccagctggacctgcgtgtcctccagtttgccctacccctcagcatgctgatcgccatgggtgccctgctgctctg

SEQ ID NO: 442149 - DNA, 122 bp, Homo sapiens
ctgccccaggtacctcaccttcccctcttgtgccttctgcacgctttggggtacccctagcggcccaaggcacaccctgggctcgaaccatgtaagccaggttccacagggtcaagcgcagt

SEQ ID NO: 442150 - DNA, 122 bp, Homo sapiens
cacggtttttctcagtctttgggttacacagtttcattctcatcatcacacggaggcacccgctccatactcaccacacacggaggcacacgctccatactcaccgcacacggagggacacg

SEQ ID NO: 442151 - DNA, 122 bp, Homo sapiens
agctcgtcccgggacgccccagctccgggccggcttcgcctgcgcccgcgttgctggcagcgccggggttaaccctcccgccctgcggagcaatgatttctgttttatttcagcaggggaag

SEQ ID NO: 442152 - DNA, 122 bp, Homo sapiens
ccctgagctctctgtgttcccatcttaccgtccagccaggcatgtaggcaggaaagctggcgttggcctccgcttgtccttctcccagagcccgctggacactgcaccctgctccaactgcg

SEQ ID NO: 442153 - DNA, 122 bp, Homo sapiens
ggctggaaggggcctttcatccactccagccgcaggacccctgctgcagctcggagcacgcgcagcaatgcaaataacacattcgaggagagcagaggaggtggctagccgcagcttggaca

SEQ ID NO: 442154 - DNA, 122 bp, Homo sapiens
gggtggagtttcacttttttccgctcttctccctcctgcaggaaacagcatcagatgacgcgggcggcctgcaccgctcccctcccagaggctccaggcggggagttcccgggtaggcgggc

SEQ ID NO: 442155 - DNA, 122 bp, Homo sapiens
ttcttgacgactccaggatccgggtggcgctgcgtgcctgcccccagtccgcgtcctgcgcggagaggatgcctctgtcaccctctgtgtggacgtggcctttgaactcctcattcctccac

SEQ ID NO: 442156 - DNA, 122 bp, Homo sapiens
agcggctgcccttctcgcagccgccgctgggggactggcacctctgggtcctaaagggatcggatttccggggccggagcctgtgagccctccccttcccctccacccgaacggatcccctc

SEQ ID NO: 442157 - DNA, 122 bp, Homo sapiens
ggtgtctcagtacccagaggggtctggctggaccgccccttccttttctcagggtgtggtcgcttatttatgcagccctccaatcatcacatttattaagctcctactctgtaccagacact

SEQ ID NO: 442158 - DNA, 122 bp, Homo sapiens
ccctgtcctctcctcccgttggtcacaggtgggctccttcttcatgatcaacctgtgcctcgttgtcatagcgacccagttctcggagaccaagcaacgggagcaccggctgatgctggagc

SEQ ID NO: 442159 - DNA, 122 bp, Homo sapiens
caagtaggcttgtgacacacacccatttattatcattatcctggtttgtgcatttcctaacgaggacaggggagcagcctgtctttgcattcagagcctctcctctaatgagcgctccatca

SEQ ID NO: 442160 - DNA, 122 bp, Homo sapiens
ggcaactactttgaagaaaaacacatgtaactgccagactgatctcttttcttggagatccggggtgaacggtatctcctggcaatgtcccaacctctgagcattgtccaaaagcatcctca

SEQ ID NO: 442161 - DNA, 122 bp, Homo sapiens
cggacgatgaaagcctgcccgcaggttctcctggagtggtgagcctctgtcggaagggggcgcccacgtctttttaatggtcctaacacaccagtggaataaatctctaagattccacatct

SEQ ID NO: 442162 - DNA, 122 bp, Homo sapiens
ggtcacccctcatggagtcactctgactcgctccaggtgtttttgtcttccctgagttcccgtgccgctggacatccctccccagtcctgacctggctcttattccccctcctcagccccag

SEQ ID NO: 442163 - DNA, 122 bp, Homo sapiens
gtctgtccactttgaaaatacctttccaggcagctccctgaccatttggacacattgccacgacaggagcctccaagtatgtgggaggggacgggcgggacgagcttggctgttctgctgca

SEQ ID NO: 442164 - DNA, 122 bp, Homo sapiens
gaagggggccggggcgggctctccgggacggttccgggagggcgtcctgggcgggccctgcgtcaggttgcagtttcacttttagctctgggcacctccagctcctgctcgccggacggctc

SEQ ID NO: 442165 - DNA, 122 bp, Homo sapiens
tcccctctccacatagaagtgggctcccggaggcggtgaccactgctttacagccgcatccgcaccggtgccacgcagaaatactgcgcgatctgggctgctggagctggcagctagcgcct

SEQ ID NO: 442166 - DNA, 122 bp, Homo sapiens
gttccacggggcagcatccggcggcagcggagcctgtggctccccctgcgggctgctcagcggcgtgcacagtcctgccggctggcttgggtgggtggtgggctgcgggtaggggaggggat

SEQ ID NO: 442167 - DNA, 122 bp, Homo sapiens
tcaaaggggaaaaaggagtttcaaaaatgttcttggaaataccatctctcacgaattcttcggcctctgctgtcccaatgtcacttgtctgagatgtaaacagaggagttctgagaaagaag

SEQ ID NO: 442168 - DNA, 122 bp, Homo sapiens
cggcccgcttctcattggccaggcccgcgctgtcgtgttttgattggccgcggagcctcccggccctgcttctgcagtcgctgccgactccattttgtcggtagaggcagaaggagaaggtc

SEQ ID NO: 442169 - DNA, 122 bp, Homo sapiens
atagagccagcagcggagagagcttcggtgagttcatcctcggctccctgctttcccagacgtccccctggtgtgggcctgtgtcactgcgccatctagtggacacagcgcgcagctgccgt

SEQ ID NO: 442170 - DNA, 122 bp, Homo sapiens
cgcggtctccactttcccgtttagcataacaatggaaccttcgtgagccgccgcgttgtccgcgagatgccgtttctatggtgacagccgggccgggggcccagaccaatgtgtcagtggag

SEQ ID NO: 442171 - DNA, 122 bp, Homo sapiens
cttatttaggacctcagagcacttcagcccacagtggtagggagagctggaactcagtatcgaacggctgggatgggcaattcctggctggctagtgctggtctaaatgctccctccatggg

SEQ ID NO: 442172 - DNA, 122 bp, Homo sapiens
gggccgccagcgctccctccggcgctgcagctgccccagcccgaggccgcacggtcccaccgcggccgcacaacttcagttcccttagactaacttcccgccgcctgtgccgcgcccagcgt

SEQ ID NO: 442173 - DNA, 122 bp, Homo sapiens
ccagatggttttactgacaaattctaccaaacatttaaaaaatagcactacagtcaggtgcggtggctcatgcctgtaattccagcactttgggaggctgaagtgggtagatcacctgaggt

SEQ ID NO: 442174 - DNA, 122 bp, Homo sapiens
ctcagtcacccagggtaaagatggagatattaacattctcatcttgcagacaaggccctgcgaagttaagcggcttgctgaagttcatgcagttagtcaccagccaaactagtgttctagct

SEQ ID NO: 442175 - DNA, 122 bp, Homo sapiens
gctcagagaggttaaattgcttgcttaagatcgtccagctctttctctggccccccagttcggttctctctccagacatccactgcctccgcatcaggaacatcgctccactgctgcatatc

SEQ ID NO: 442176 - DNA, 122 bp, Homo sapiens
aggggaatacttccaagttgtagtgttgttgttttcagcctgctgctgctgctgctgttgcggctaggggaaccgtcgtggggaaggatggtgtgcgaaaaatgtgagttaaggggccgctt

SEQ ID NO: 442177 - DNA, 122 bp, Homo sapiens
aggtggagggtgtaccgcttctctcctgattacaaaggtgagatcaaagctacaatgacacgtaccctgcctggcacctctcctgcccaaggacccagcctgtctctgcaggacttgcagga

SEQ ID NO: 442178 - DNA, 122 bp, Homo sapiens
ccacccaatttataaatataaacccacagtatactcacaaaaataaaacggtgggctgggcgaagtggctcacatctgtaatcccagcactttgggaggccaaggcagaaggatcacttgag

SEQ ID NO: 442179 - DNA, 122 bp, Homo sapiens
ctgtctcctctgctggtttcctgcccgtttgtcctatgccccacccactccctgatgagccggggaggagcctcagctctggggaagccatctgtcctcggttccatctgacacctgtgggg

SEQ ID NO: 442180 - DNA, 122 bp, Homo sapiens
gaggtacggatacgttgagggaggttacggatacgttaagggaggtacagcagcggtgcgcgccttgcagggcatgctgagaggaacagttttttaactgcttctggctgttggtggcagag

SEQ ID NO: 442181 - DNA, 122 bp, Homo sapiens
gttctattctcagagccactggcaggcacttaatacatatttgaatgaatgtgtctccttcgactttaaaaatgcccccaccgggaagtgcgtgggggatgtgggaaggccggaaaccattt

SEQ ID NO: 442182 - DNA, 122 bp, Homo sapiens
cccagcagcaggggcgggctccaggccagctccacctgcctgggccttcccacctctgggcggggatggtgaccgcaccctgaaatcccagagtcaggaccaagggaagagtctcagaggcc

SEQ ID NO: 442183 - DNA, 122 bp, Homo sapiens
gaacaggacaggtcagggctggacacacacagcttcctgctccctgctctacagctccctcgcaggccagcgtctccttgattctgtggtcaggcacagcccaggtgggttatgggaagggg

SEQ ID NO: 442184 - DNA, 122 bp, Homo sapiens
tcagatgtgttttgcgccaggctgtgtggtggggacagagcctgggtaaatgaagctttccggctcgaccgctcccaacctgggcacacacgtcctcctgtcctgcaaggggcagttttggg

SEQ ID NO: 442185 - DNA, 122 bp, Homo sapiens
ttttccgtacggcttcactttaaaatttgaaaactcctgagatttttcaacatattaaagcgtgtcacactaaggagtgacacacaagacccagactcttccctaggctgggagagactcgg

SEQ ID NO: 442186 - DNA, 122 bp, Homo sapiens
agtgcgtcatttcggaaaacgagtcaccttactttggggaagcaggggtccgcgaggtctcgcctctggtactcttagttgctagccttcagtaccagcagacctcaggctctcccgactaa

SEQ ID NO: 442187 - DNA, 122 bp, Homo sapiens
cctggctgagacatggggcggtggcagcgcgcgctctccagtcctccccggtgctgggaccgtggccatctctccagggccctgctgagctctggctgctggggccgcaaagactaaaagcc

SEQ ID NO: 442188 - DNA, 122 bp, Homo sapiens
ccacagaggggcggcacgttggttgccgtacaacgtggtggttccctgcatctctgcccacgtcggagaggtgcgtcggcttccgtacaacacggatactctctctctgacgcaacttcctg

SEQ ID NO: 442189 - DNA, 122 bp, Homo sapiens
ctggtagggccgccagtcattctattccggcacctcccttaggcgccagggacagccgagcgttacctggtcccgggcagcggagttctttacccaccccagttctggttctgacgccctag

SEQ ID NO: 442190 - DNA, 122 bp, Homo sapiens
ttccagaattctgagattgtgagcaactttccccaaatgtcctccatctgctgttctaaccggtttactcaactgagctagtcatacttgtctaaagcaatgttctaactagtataaaacta

SEQ ID NO: 442191 - DNA, 122 bp, Homo sapiens
cctaaagtcatctctggagaaaagcacagacctgtctcccaggtgcattcttaaccctggcgaaataaatttctaaatggattgagtcctgtctcaatctttttgattctttttgatttaca

SEQ ID NO: 442192 - DNA, 122 bp, Homo sapiens
tccatctcgggactgaggcttctggggctatgccatttggaagctccccagtcaccatgacgagaaagatgatgctaaatcacagtccaactcttaaaggcttctaccagaagtgacacatt

SEQ ID NO: 442193 - DNA, 122 bp, Homo sapiens
ttcaaagtgttcgggttggccacaccagccctggggggatctataaagaggtagaaggagcgtggaacctgccttcggcctcgtgttttaattcatgctggaggaaagacgatgcggaatgc

SEQ ID NO: 442194 - DNA, 122 bp, Homo sapiens
tgggcctcagcaggggcctggaggcaccgatggtggagaggccggaaaggggtggccaaccggcacgacaatcaccaagcacgagcgccaactcatcccaggctcagcccctagcacacacg

SEQ ID NO: 442195 - DNA, 122 bp, Homo sapiens
gcagggtctggtcgccagcaacctgaatctcaaacctggagagtgccttcgagtgcgaggcgaggtggctcctgacgctaagaggtgagaagtgaagtcggggtggtgggcggcagggacgg

SEQ ID NO: 442196 - DNA, 122 bp, Homo sapiens
gcgacccgagagaagtcgctcacacttctctttgggggagggcgacagttccggggaggacgcttggatcccgaaaatgacgggatccaggtcccacaaccctcaggaagcgctgcggtctt

SEQ ID NO: 442197 - DNA, 122 bp, Homo sapiens
gagcccggaaccgttaggtactgccgaatgcggtgcaaaatttccccctctcccccagttcgcagtgcctggagccgctggggttactcgtctgttctgatgccaccgcgagatggtccccg

SEQ ID NO: 442198 - DNA, 122 bp, Homo sapiens
ccaaatgagtgatgtggggatacccagcccctagatattaaatctgttccttccagctcacgggagtccagtgtcccaaacagggacagattggctaggtaggcagggacaaatgtagagac

SEQ ID NO: 442199 - DNA, 122 bp, Homo sapiens
gtaatcaaaagtgagaatgaaacatacatgacacaactggggacctctgggtttctgagacgtgggctacaagattatattaggtagaaaactaaaggaaatgtattccaagcaaaagtggc

SEQ ID NO: 442200 - DNA, 122 bp, Homo sapiens
gctgccgtggtgatggacgtagtccacgtgcagactgccttgaacgcaggagccgacggacgaggggctagcctttccctgcctgtgcctctcggagagggatgagcatgaatcaccactgt

SEQ ID NO: 442201 - DNA, 122 bp, Homo sapiens
aggttattctcgcgagatcggatctgggctccgcgaggttttggcgtagttgtgggactgcgcaggcgccgtttggagcccttacgctcacacttctctcccgcgcaggcgcagacggggaa

SEQ ID NO: 442202 - DNA, 122 bp, Homo sapiens
gactgtgtctgctgtgttgtctgttataagatgtttcagacctattttgcatactggcagcgacaagttgagacttgttcaacttgacacagtcctgtggtcatagcgaatctttctaaagc

SEQ ID NO: 442203 - DNA, 122 bp, Homo sapiens
gatgtgggtggggccagataaaagaataaaagcaggctgccggagcttgtagtggtaacccgttggggttttctgtgctgtgataaggtttgttcgtttgcatttggcgtctgcgttgcctt

SEQ ID NO: 442204 - DNA, 122 bp, Homo sapiens
cctttcaggcaggtctgcttcggtcactagagacgtactggggcctgacaacatcaacaacgtcacaaccctgaggtctgaggtcccgggcatggcactttgtgaggtagtaaaaggactgt

SEQ ID NO: 442205 - DNA, 122 bp, Homo sapiens
tgtgtggccacgcccagccaggtcagccccgcccccaggccgtcaggcccagccccctttcgtcagaccccgcccccagccctgctgagcgaccccgccagtcgggtccatcctgcagtaaa

SEQ ID NO: 442206 - DNA, 122 bp, Homo sapiens
tctggggaagaatgttgggggcggtcttcctgtggttgtatgcactgatgagaaatcaggcgtttctgctccaaacgaccattttatcttcgtgctctgcaacttcttcaattccagagttt

SEQ ID NO: 442207 - DNA, 122 bp, Homo sapiens
cgcagatactgaaattggcaggagtgttggtggaggggaatccaagtgaaggaaaggtctcgtgttttggcctctgtagggaaagccaggaagcaatctggcaagtcctgagggcccagccc

SEQ ID NO: 442208 - DNA, 122 bp, Homo sapiens
atgtctcctatacacacttacctctgggcctggagaacttggtgagttgtttttgtacagcgtttgacccactgatgaagagagccaacaccagcccagaggtgctgcggctgccctctgct

SEQ ID NO: 442209 - DNA, 122 bp, Homo sapiens
cctaatacaaaacaaatgttactgcaggcctgaggatacctttacctaattgtccataaccgaatatgaaagaaggctttgggattaagtttccataacaggatagaaagaccagttgtgag

SEQ ID NO: 442210 - DNA, 122 bp, Homo sapiens
gcccaggtgctgtgatgggtttcgtgcgcagagaggcctgacagcctctgcatcagtgaccgggcgaagagtggggcagctcggacggtggttggggaacgttagggagattggcgcgcgga

SEQ ID NO: 442211 - DNA, 122 bp, Homo sapiens
tgaggccccagaacagaagctactgtggcacccatggggccatcccttccgctagtcgttcgttaaatacttactgagcacccactatgtgctagacctgggctacatgtttgaagtagttt

SEQ ID NO: 442212 - DNA, 122 bp, Homo sapiens
cctcccacggatggaagtgtctacccagctgaccctgagtggggtccgcgggggtcatggcgtccctgactcgcccaggggtgcgtgtctcaccaaaagggggtccccaaagcagcaaaaag

SEQ ID NO: 442213 - DNA, 122 bp, Homo sapiens
actttgcgcacatttccgcgggctagtcctcagctcccaaactgtggagtctcccttccacgtccaccaatgaggagcctggaaacctctgtcgagagccaactccccactagtgccaaagc

SEQ ID NO: 442214 - DNA, 122 bp, Homo sapiens
cttggtggcccaagcatccttctagggtccttgcaagcagcagggctaggggcagccccacgagggctgcctccccacggctggccctagcaccctcagcaaatccacaggaactcaccaag

SEQ ID NO: 442215 - DNA, 122 bp, Homo sapiens
aatacaaggattgttgtttttcttagctgtgctaatggcatgtgataatggcaagatactcgtaactgtttttagagatgaagtattttttgtttgtgtgtttgttttgagcctggagtgca

SEQ ID NO: 442216 - DNA, 122 bp, Homo sapiens
gggcagaagatggaagcccttggcaagctcgatcgaaccaagctactaaattgctgagctcgttttaactgaagtgtgagaaggaggtttaaggcaagtagacaacatcctgttgttggggt

SEQ ID NO: 442217 - DNA, 122 bp, Homo sapiens
ccccccaccacacacggcggctccccccaccacacacacggcggctcccccccccacacacggcggctcccccccacacatggcggctccctcatacactgcggctccccccaccacacacg

SEQ ID NO: 442218 - DNA, 122 bp, Homo sapiens
tctctcttttcggcctccgcttttgggcctgaatgggcaacactttcctggagctcattccgacgcggcgcaagcggggctacaggggcttcgcggaggtgatggcgacgcgagcgcggaaa

SEQ ID NO: 442219 - DNA, 122 bp, Homo sapiens
gaaggctgagttagagaacgctgagcccctgctgctagcagacacacagggttagggtcccgcaagcctctggctccgttttcatcagccgatcaatatatcatctcattctctgtgtttct

SEQ ID NO: 442220 - DNA, 122 bp, Homo sapiens
aaaggacagtaaataacaaactatcttacaggaaaagctacaccatgtgccccaagacaccgagctagaaagtagcaggggtagtcagtatcagggcccatcgcctcatgttatctgcacag

SEQ ID NO: 442221 - DNA, 122 bp, Homo sapiens
agagcatggaggtcctccgtgcacagaggagcaaagctgttgccccctgctcttcttcaacgtgggcagctaggacctaagctcagcaccacatcaacctcatctgacacgtggctggagga

SEQ ID NO: 442222 - DNA, 122 bp, Homo sapiens
taaggcgcatgcgttatgagttcaggtccgacttaaccccgcctctaagcgcagcgcatgcgtcattcctaccttagcgcacttaacggttaggagaggagaaagcggcaaccggggttgta

SEQ ID NO: 442223 - DNA, 122 bp, Homo sapiens
tttgaaacaggtttctcctctctgactttctgcactggagaaaaatctggatctgcttttcgaaaagattttttttttttaagaggcatccgggcaggcctgaggagtcgggctgaaggtgc

SEQ ID NO: 442224 - DNA, 122 bp, Homo sapiens
cagcaatggagccagtgagagcagaatgtcttaactctccattttcattgtgagtcagggcgagtttgaggctctggttacatcaggagcaccgcgatcttaatgaagggcccacactcgtg

SEQ ID NO: 442225 - DNA, 122 bp, Homo sapiens
gaatatcccatgtctccacagaggccacggtgtcttcacaaagctaactgccatgattttcgcaggtgatattgtcccttcatgattttccattttctacttgagcattaaaatatcaggaa

SEQ ID NO: 442226 - DNA, 122 bp, Homo sapiens
caaaatgtaggagttttcagtttgcagcttgaacttgacactgttgaaatacatgcatttcggtggccccgttacatttcacgcgtcacgaagccgagcaagaccagcccgggccgccttcc

SEQ ID NO: 442227 - DNA, 122 bp, Homo sapiens
actagtgggactgatgtggggtgtctgcctgaccctggaacccaagacaaggagctctcacgtctaccgcactcaccacttaccttggcacatagtaagtgctcagtaaatgtttgttgact

SEQ ID NO: 442228 - DNA, 122 bp, Homo sapiens
tcccggaggatgcgagcagaacccgggacaaagcgcgatttccttccaaatctggagcggcgctgctgtgaccgcgggtgcggcggccctggtgcgctccgcggcgctcgctgcgagacgcg

SEQ ID NO: 442229 - DNA, 122 bp, Homo sapiens
ccactggactctgtaaacccactgggcaccacagaggcagaaggggtgatgagtgagaggcgagtggtagtggacttgcccaccagtgccagctccagcatgcccctccagaggcgcagggc

SEQ ID NO: 442230 - DNA, 122 bp, Homo sapiens
tggaattcctcaaccaccagcgcttcgagcccatggaactgtatggggaacacgccaaggcggtggcggccctgccctgcgcccccggccccccgccgcagcccccgccgcagccccctccc

SEQ ID NO: 442231 - DNA, 122 bp, Homo sapiens
ataaaaataaaaatgtcatttaacagtttgaatttaggatttactgttaatcagaaacaccgaggaggcttagctcaccttttaattgagaatgtgggaaggaaagagagtaaacacattaa

SEQ ID NO: 442232 - DNA, 122 bp, Homo sapiens
tggcctcggccctctgtggacgtgggcggatgggtggccctggactggtgaaggactggccgggagttctgtagggcccccacctcctgccagcgcccagcccacagtcgaccactgcctgc

SEQ ID NO: 442233 - DNA, 122 bp, Homo sapiens
acacaggctggagccacgctggagctagctgggagctttgaccaacctggcctagccctgcggcctcccaactgtgcccaggactccctactcattcccctcagggcatctgcccaggctgt

SEQ ID NO: 442234 - DNA, 122 bp, Homo sapiens
aggctcatgttggtagcggccagggcagcagtgggtagaggccaggccagaggtaggtagcgtcaacgttcctcacacaaaatggcgagtaaacacctcgcccatttgcgccgcccactctt

SEQ ID NO: 442235 - DNA, 122 bp, Homo sapiens
cctggtggtgggtgtcacggctttgctgctgcggggctggcccggctctggacctaccttcgcactgtgaatgtgaagatgagcctctttcacagactggattccgtcattgctttcactgc

SEQ ID NO: 442236 - DNA, 122 bp, Homo sapiens
tgagggattgtatgaacatctcacagttgccagctgagattaagccaactcacagccatccgtgttagacctgcaagagaaagtgtatgagcagaggcacgtggctgcctcaggtggaagca

SEQ ID NO: 442237 - DNA, 122 bp, Homo sapiens
ccctggccccatctcccccagctggccggctccagccacagaagccttctcggtgcttctcgaacactcccagggatcccagccccagagcgtctgccctcaccactgccccacatggaact

SEQ ID NO: 442238 - DNA, 122 bp, Homo sapiens
taggcggggacatggaggaggacgcgggagccgccgttaccagggcgcgcgcggggacggcgacgtcatttccccgcagccaagccccgcccagccccgcgcagccgccgccgccgccgcca

SEQ ID NO: 442239 - DNA, 122 bp, Homo sapiens
gccgctggaggttgaaggggatgccgaccatcaggtccagctcctctttgagctcccgcacggtcatgtcgccgcggcagtttgccactcggaacatctcccccgtctcctccagccgcacc

SEQ ID NO: 442240 - DNA, 122 bp, Homo sapiens
tcctttttcttgcctttaagtaattattattagcccagggagtgagctgcaaggacaaaccggctctctgcctggaggtgggtagaaagggaaggcggtaacgggggtagagggaggctcta

SEQ ID NO: 442241 - DNA, 122 bp, Homo sapiens
tgcttgcccggattcctgcttccgtcctcacgggaggttccctcggggtcccttccctcccgacctgacctggagtgtccatcatgctctcggggcaggcctgggccctctccagtccctcc

SEQ ID NO: 442242 - DNA, 122 bp, Homo sapiens
gtttgtggggatttttctgtgagcctcccagggcccgtcgttttggtttctctggagctgcgattcagccccatgtgaaagtctggaggcgatggcctggctctcactggctgacgtcctgt

SEQ ID NO: 442243 - DNA, 122 bp, Homo sapiens
taaagaagaaacacacttcctttacgatacttatgactaattggtactttctgttaaggccgcagtctctctaactagatgcttcactgcctctcttgagaatgagaggacttgcccagtgg

SEQ ID NO: 442244 - DNA, 122 bp, Homo sapiens
ctaggccagggatcaggttcacaggtagcctattttccacacctcataagaaatgtgtttcgtaaataagtaaccacacctgagttactatgcaaataaactcagctctgtcctctgaacag

SEQ ID NO: 442245 - DNA, 122 bp, Homo sapiens
tcttcctgctgtctctgctttttggagagtgtctggctgcctccacggggtggccggggacgaggtgcgggcattaaacattaacagtgccaggtaatatttaccctggtcacaagaaaagc

SEQ ID NO: 442246 - DNA, 122 bp, Homo sapiens
cacagggcttgggtggggctcccctacccccggcgtccatggctaggcagacagggacaccgtgattggctcagcaatgggcacatgacccaggccagccaatgagggccccctctgggatt

SEQ ID NO: 442247 - DNA, 122 bp, Homo sapiens
agaagcacgtctcatactccagcaatcaggcttctattacaaaggggaaaaaacacgaagcgttcctatgcttgtaaaacccagtattcctgtgtctgtgacattcagttttcaaaagagtg

SEQ ID NO: 442248 - DNA, 122 bp, Homo sapiens
atctggccagccctccaccttcccagctgtgaaatggtgatgatgacagcacttccactgcggggtcccctgccggccacccccacccagccctgaggtcgcttgttcttgcacctgcttcc

SEQ ID NO: 442249 - DNA, 122 bp, Homo sapiens
cggaggttggtgtgggtggcaccgttccagcttggggggcatgtgccgtgtggcctcctgcggtttttcaagcatttttcccacagtgcaaaacactgtcaactccaatatatctgtagtgc

SEQ ID NO: 442250 - DNA, 122 bp, Homo sapiens
gggcgggccgcgccctggctattggccgccggctgacccgccgccgctgcgcgcccggtgcggtcgcctcagctcgccctcctgggccccacgtctggactgtttgctcagcgcggacgcta

SEQ ID NO: 442251 - DNA, 122 bp, Homo sapiens
ctcgggatttaaaaggaaataggaaatcaggaacttttagagccgggagcgaagggtcggcggaaatttcccgaaggccgccgaccccctcggcgccccgcttcctcggccgcgctcccgct

SEQ ID NO: 442252 - DNA, 122 bp, Homo sapiens
gatgtaagaacccaacccttaagtctcccctctccttctccaggaaccaattctggggcccgtgctatatctcacctgatccacagaatggagggttccacagatgctgtcaagggcagagg

SEQ ID NO: 442253 - DNA, 122 bp, Homo sapiens
ctgacaactaaccctggagcccgcgagactccgaatctagtcaaattcctggcagccaatcgggagaagggaggaatctggttagcccgcctattgaacgtgacatcatttcctccgcaacc

SEQ ID NO: 442254 - DNA, 122 bp, Homo sapiens
ggggcctcatggcctgcatctgcccttaatgttttcaaaatgactcacagcctacagtgtcgacgacaagttgctttgacagcaaaggggaagacatccagacaaagtgcttctgagcgaga

SEQ ID NO: 442255 - DNA, 122 bp, Homo sapiens
ataaggattttcgcatcgatgtttatcaggtctcacttctttcttatgactcatcgcagccgtgcagaccttccgtatgggcacacttgctgatcctacacaaggtttttaatatctgtggg

SEQ ID NO: 442256 - DNA, 122 bp, Homo sapiens
atgtttaaggacaccatcatgggtgttcttattgaataccaacgatgtgtctggcgtggtcgggtgggtgacacaagggtaaggtagtccatgtttggaggcttataggagctaacatcata

SEQ ID NO: 442257 - DNA, 122 bp, Homo sapiens
gtaacacaccgctgcctcaccgttttggcaagagctgacaaaggcgagatgtagaaataccggcctaacaacttttccagtgactcctgatgtcgatgggtggtttcttgcacagccagtac

SEQ ID NO: 442258 - DNA, 122 bp, Homo sapiens
atctccatcattggcgttagtctctggtcacctgacttgttcaagccaatgagagggggccgaattagtacttccgctttccgtgctgtttaacgagccactatgcccgtccctcggatact

SEQ ID NO: 442259 - DNA, 122 bp, Homo sapiens
gatgactcactcatgttacataattagaattcaccttcagactttgctgtcttaccatttcgtctcatagaaacaaggcttcctagcttggcttgttttcttgttactcaggggctgttgct

SEQ ID NO: 442260 - DNA, 122 bp, Homo sapiens
ttggaatcagggctgtcggtccgctccaattgtctggtttcctgaacttattttcaagttcgccattgagagaaacctccgaatgactaattcttaaatttaagggtgcataataatcacct

SEQ ID NO: 442261 - DNA, 122 bp, Homo sapiens
ctcaagtaacctttttttatctccagggtttggagggttctggaagtaaacatcatagttcgccgttgccaggcgctgttgagttgctgccttgctcttatctaggggtctagatggccttc

SEQ ID NO: 442262 - DNA, 122 bp, Homo sapiens
catttcaaaccaaaacatttaactagagaagtgtgtttgctgttcagtttttaactttttcgctgtggacattttcaggtataaaaggagaagaatataatgaaccatccatgagtagttac

SEQ ID NO: 442263 - DNA, 122 bp, Homo sapiens
caccgcaaagggtttcacttcccctgggtgagccttctgggggtgctgtcttgggcagagcgccagccccagtggtaccactgctggggagcccgctggggtccgagtccgcccactgtggg

SEQ ID NO: 442264 - DNA, 122 bp, Homo sapiens
cgtgtccgggccgctcgccccgcccccgctcgccccgcccctggatttgctccctcaaagcggaagtgaggccggactgaggctcttacagtggtccctgctggcccttggtgacgggtcgc

SEQ ID NO: 442265 - DNA, 122 bp, Homo sapiens
gtggttggacacattcctaagggggtgaagccaacagtcccagccctgttcttttgacaccgggatggtggggctctggggaggaggagatcccagggatgacagcctagtagtacccaacc

SEQ ID NO: 442266 - DNA, 122 bp, Homo sapiens
gcagggctctagattctctcttaaaagttggagagtctcaatcaaatcttccacaccacccgctgcgctgctgtgtcccttctcctccttccctccatgcccctcagtttcttctgtcgact

SEQ ID NO: 442267 - DNA, 122 bp, Homo sapiens
gccgtggagtcagaccggccagggtgggacctaggttttaactcgggttctggctacacacgctgcgcctccatacagtttgtcccaggtttggcagcaggccggctaccttcaggaattct

SEQ ID NO: 442268 - DNA, 122 bp, Homo sapiens
tgccccgtgtttctgagcctgctctatttacctcttgcattgtggctctcgctctgtctccgcctgcctcgtatcctctgcctgcctttgtatctctgccccgggctcctctcggctctgtg

SEQ ID NO: 442269 - DNA, 122 bp, Homo sapiens
gggcagacagatgtgtaaacatggactcaaaggccgggcgagctgagatcagacaacaggcgctggacgcatcctaactacggctgggtggcggggctgagagacgggctggggttgggggt

SEQ ID NO: 442270 - DNA, 122 bp, Homo sapiens
ggagaggaggggggacggacacatttctgggcagggccatctcttgctctggcctttctgcggttgacggctccatcctccctggtgagtcttcgcgctgcggggagtggggagtcctcaga

SEQ ID NO: 442271 - DNA, 122 bp, Homo sapiens
ggggcgtgggtgggtcagcgttccttggggacccgtgaagcctgggcttagggctcacagcgtgggtccccagcacagacaggaggcggacagcttcccgtgaactgcaggggagtcccggg

SEQ ID NO: 442272 - DNA, 122 bp, Homo sapiens
tctaaaatgaaacggaccgctgccctttttatctgtactaagtttcaggagcagaatcttcgttaaactgagcagagcaagagcgcgctgcccacagggctggggcgggcgcacgggccctt

SEQ ID NO: 442273 - DNA, 122 bp, Homo sapiens
ctcaggagttgtcagcagtgtgctttgggtcctttgtggtcaccagatactgtcaaaagacgcaattacaacaaatttagtttcaagatcctaactggcttttctttgcaattctagaatca

SEQ ID NO: 442274 - DNA, 122 bp, Homo sapiens
tccatgaatgaaccagtcctcctagcgctactttggaggagtggctgtgcctggaatcttcggacagtttttattgaagcgatctttacccacatgtctgggctctgctcactctccagcaa

SEQ ID NO: 442275 - DNA, 122 bp, Homo sapiens
gttctggggggccatggaaatgcctcatccggcttcagggcagtcacacctgggagcagccgcggcctgcggggtggatccgggcctgtgcggcggtggggtggggttggaggggtgtttga

SEQ ID NO: 442276 - DNA, 122 bp, Homo sapiens
gacttcgctcgaacctgggaggcagaggttgcagtgagccgagatcgcaccactgcactccggtttgggcaacaagcaaaactcttgttaagaaaaaaaggtagacacagcatgagtccact

SEQ ID NO: 442277 - DNA, 122 bp, Homo sapiens
tgccgaagttggttttcttcggcctccttctctctcccaggcccagggctgggacgaggccggttcccgcctgcaacctgcactgaagacgggaaccttgggagccggtaccggaacgctcg

SEQ ID NO: 442278 - DNA, 122 bp, Homo sapiens
aatctcaacggatgaaagtatttatcttctcacctaggtcagaattcattttttcttctccgtgttcctgtgatatattgctcatatgttccattcttaattttttgctacctttaccatat

SEQ ID NO: 442279 - DNA, 122 bp, Homo sapiens
aagcaggcagaagagccatgaaataacgcccaggaacccctgggaagttctaagctgtgccgcggcgctgctgggaccagctcttcttgcaagtggattctcgggctcccaggacagagaac

SEQ ID NO: 442280 - DNA, 122 bp, Homo sapiens
cccgaggctgaagcatctgaagttgatcagcaaacattggcctctcaaggttgagaaattcgtgaggaagctgcactcccccactctccagaagcagccagagctgccacataagccagata

SEQ ID NO: 442281 - DNA, 122 bp, Homo sapiens
cccctgccgccaagacttccaataaaacgtgcgttcctctcgacagcactttgtcggtctcggtccctcagcgcgaaacgccagcgccactgggccccagcagggggcgccccaccctagag

SEQ ID NO: 442282 - DNA, 122 bp, Homo sapiens
cacaatgtcaatagcgtcacagttgagaaaacctgctctagaccaagggttgctttctgccgtgtgcctcaccccacccccactcgtgttccctaatcccatctccaaaggttggcagcaga

SEQ ID NO: 442283 - DNA, 122 bp, Homo sapiens
gtcagagattaagttctattgctaattttatgcaaggctttataaaatcacttaccttcccgtatagttcaatttttccatctttaaaatgaatacaatatatgtctagctcagagcgatgt

SEQ ID NO: 442284 - DNA, 122 bp, Homo sapiens
aagtctccgagaaaataaatgcatgagaaaataaacccaaactttctgaaaccaaccccccgcatgccagctccgaaaccccacagccatcgccgctggacactcacctccttcccggcttc

SEQ ID NO: 442285 - DNA, 122 bp, Homo sapiens
catagactggtacttggaagctgtagtaggatttgacctaccgagagtctgaaacagcagcgtaagatgtgagcctgtgaagagaaggttcctgagatcgggctgtggtggaggtcaggcca

SEQ ID NO: 442286 - DNA, 122 bp, Homo sapiens
gactgcagcagaaacccctacatcatggggttcctggaagggaccctctcccttcagcgacgcattgtgaggccatttctaggtaaaaaggtagaatttccttggattcctgaggtttattt

SEQ ID NO: 442287 - DNA, 122 bp, Homo sapiens
tatgtccattcaactgcactttgagatgttagatttaatgcaaggctaatgaggccaagccgtaggtttcattttcacaggagccaattaaccttactactatatccacagattttacccca

SEQ ID NO: 442288 - DNA, 122 bp, Homo sapiens
gtttctgcaaggtggtggcggcccctccgctgccgggggccgctcgctgaccgcgcccgccggaccgcggcctccgcgctctgcactaacctcccaccgcctcgctcctctgtcctctgctt

SEQ ID NO: 442289 - DNA, 122 bp, Homo sapiens
ttgggagccaggacccctgggtctgagggcccagactcctgtgtcggaggaagggaaggccggaggcctggaatcctggggcctgggtaacaaaatgcttgtgtcttgattcttggaagtgg

SEQ ID NO: 442290 - DNA, 122 bp, Homo sapiens
taagcccctcactgcccggggccggcggggcccgctggccgctccgagcgcggggaccgccgagcccaagcctacccggaactcgcgctggcccacaagcatcacgggaagccccggttccc

SEQ ID NO: 442291 - DNA, 122 bp, Homo sapiens
agtggaaaagcagttttttaacaagccaaaccaagaaagaaaccccggtcgcagtatccccggcagggcgcacccaggatagctggttatccaagcgcatgtgtatcccagttgtaaaaata

SEQ ID NO: 442292 - DNA, 122 bp, Homo sapiens
agccgtcgccgtcgcgggacgcgtctcccggcggccccgggggcccgggctttgcctccacggacatctccatgtacacgctcagccgcgacccctccaagggcagcgtggccgcggggctg

SEQ ID NO: 442293 - DNA, 122 bp, Homo sapiens
gtttgttgaagagcaggttgcagtaatctggtgagaggtggtgagtggttaaggaagttgcggtagaactacagagattatgcagaaagaagtgtcctgggaggcagtttagcttaaggcat

SEQ ID NO: 442294 - DNA, 122 bp, Homo sapiens
gccttaccccagcaactaactccgaacgggcaacgacagcagcctatcctctacgaaacccgcccctatcaaccaatgggatgggcagggcttcgagcacccagccctccaagggccctatg

SEQ ID NO: 442295 - DNA, 122 bp, Homo sapiens
aatcttttattgaatagtgcttctccttgtggggcagggctaactcatgggcaatgaatccggagtcgatacccagtgtatgagatgttggcaactgtatttatgctcatctctaatccctt

SEQ ID NO: 442296 - DNA, 122 bp, Homo sapiens
agtaatttagggatagaggtgagaacggagttagacacaaaagtaagatcacatgaactccgacttcggatggaacacatcatccatttaaaccctcgagccgagctcaactggaaactcca

SEQ ID NO: 442297 - DNA, 122 bp, Homo sapiens
aagggctccagtccagagaccctgggccattgaacttgctcctcaggcagaggctgagtccgcacatcacctccaggccctcagaacacctgccccagccccaccatgctcatggcgtccac

SEQ ID NO: 442298 - DNA, 122 bp, Homo sapiens
tcagtggcagttcatcccagcagcttctcctttctctgcctgtgacttctgccgcacttgcgggtgctaccatacactgccggtggtgttggtcccatggtgacacagcgcttggcaattta

SEQ ID NO: 442299 - DNA, 122 bp, Homo sapiens
cgccttcctgccccgcctcccgccgcgccgccgaagtcccgcctctcgccaagctgcccgcggcgccacctgtcttccgcctgcagctcacgtccgcttgccttgcccggcctacctcccct

SEQ ID NO: 442300 - DNA, 122 bp, Homo sapiens
gtaggggcctcgccggccctggttctcagtcccttcccctcactggccagatgcctaagccgaagctcccaaatggaagtccgggtcaaggagaagtcaggaacctctgggatgtgttcagg

SEQ ID NO: 442301 - DNA, 122 bp, Homo sapiens
cactagatcctgagggttttagtgagtgcctcagtgtgagcacatgcaggcactgctaggcgcctgtagttgattcttagttaatacaagtgaataatcacaactagaccttaaattgcagg

SEQ ID NO: 442302 - DNA, 122 bp, Homo sapiens
tgctgtgtgcaaaccagccagctaaacacgcctccacaacacaggcaagtaataaggcagcgtccggcccttctctccatttcagctttttaaagacttatttttaacccacttctcccgtc

SEQ ID NO: 442303 - DNA, 122 bp, Homo sapiens
gtgtcccatttgctctgctgggccgacttcccaaacgccctttctcttgagggttggaagcgctgttctgtatttggccacgcgggggagctgctccgcacagctcaggactaagccacctc

SEQ ID NO: 442304 - DNA, 122 bp, Homo sapiens
gagctgacgcagatgttcctacccttcggcaatatcatttcctccaaggtgtttatggatcgagctaccaaccagagcaagtgtttcggtgagtggccgccgacgccacccctccccatcca

SEQ ID NO: 442305 - DNA, 122 bp, Homo sapiens
tcacacagacaagatgtgtgttgcaaggatgaggcgcctgctcggcctccagcccagggccgggaagggagaaggtgctgtgcgtcgctgcctgtgtcgcccgcggctctcctcccagcgac

SEQ ID NO: 442306 - DNA, 122 bp, Homo sapiens
agctttagaaagcctcctgggtatttaccctatacaaccctgcctaagaacgaactttgacgtatgctgaatgttgactgctacatcccaaggttgtaaaaaaacaagacttagctatgtaa

SEQ ID NO: 442307 - DNA, 122 bp, Homo sapiens
ctaatgcatctcttaccaatctacgaagttacaggatggggcatgaaaaaatatatttgacggcacaaaagtatgaagcataggattaagtaaagcagattgaatatgactgttacgggctg

SEQ ID NO: 442308 - DNA, 122 bp, Homo sapiens
atcaccccagtaaaccagtgtccctggctcgcctgtgccccagcttgggtatcgcgatcccgttctccccatcgtgacatccagtccaggctttcaggacagcgagcccggtttccaggcag

SEQ ID NO: 442309 - DNA, 122 bp, Homo sapiens
aactggtttatgaaatgaaccatgaaatgcagcattattatgagaaatatcaaagatgcacgttgaatgctgagcacagtaaagcaccacaggaagtaccaagttaatggtagctgctatta

SEQ ID NO: 442310 - DNA, 122 bp, Homo sapiens
ggctttgctggatgtggagccgcacttggtgggtccagggtcgcagggcagtgctggaaacgtctgtgcccatccacgaagcgcagaggcgcagggtggcggtcgctccacacagcctggag

SEQ ID NO: 442311 - DNA, 122 bp, Homo sapiens
aaaatgatcttgttttttgtaagtttagttttctaagaaattatcattaattcatttccccgaatcatgtaattgaaggatgaagctcctggtataaaatagcacagctggccgggcacagt

SEQ ID NO: 442312 - DNA, 122 bp, Homo sapiens
caaagagaagagtcttccgcgggtgctagaaaagcgaagcacgcgttaccatggagactgcggaatggaaaagcgttcggtttcttgtttcctagccgcgaatggggtcgtggttccttcga

SEQ ID NO: 442313 - DNA, 122 bp, Homo sapiens
gcccgactcccacagaaggtttggacttgttacacccacatgcctaggggagcgcagcggcgatcacacccagatagggaaggagttgggccaggacagacagggctggagacagacgtgca

SEQ ID NO: 442314 - DNA, 122 bp, Homo sapiens
agtcaaagttcgagtgaaggatggaaaggtatgtgtgtcggctgagcgggagaacaggtacgactgccttggatcgaaaaagtacagctacatgaacatctgcaaagagttcagcttgccgc

SEQ ID NO: 442315 - DNA, 122 bp, Homo sapiens
agagcccgccttcctggaactctggttggctgatatagctgtccgtcgaagcggcattgccgcctattgggcaatggccagcttcgcacgccagacccgtgccccgcccagccgcgccgcgg

SEQ ID NO: 442316 - DNA, 122 bp, Homo sapiens
caggggccatttctgggtgggggaagaggcaggtaggaaaagccaagtgcatcgggctcccgggcctcagccagagcccaggcttagtggcacctgaagccagccctggtgctgctgcactg

SEQ ID NO: 442317 - DNA, 122 bp, Homo sapiens
tttgttaatgaaggacaagagtttagaaaaatcttttattttggaagttggacacgcaatcgaccccagcagtgttcctaaaaggagctatgccatttggatgggggaaaaatgagggggcg

SEQ ID NO: 442318 - DNA, 122 bp, Homo sapiens
acatcgcttacaattagaattatgcagctcttcagcaagcagccatcgcttctctttcaacgaattagctccatatttcagccgccctgtcttctcgctcttatcggctccagcgactcggc

SEQ ID NO: 442319 - DNA, 122 bp, Homo sapiens
tgacaccgaccacctccaaggaatgaaaggagcagtcagccgaaacgacagcattacttgcgtccttacctaattggaaccttatccgtggctgagggtgccaccattggaggggccgccgc

SEQ ID NO: 442320 - DNA, 122 bp, Homo sapiens
agcttccactctacactctgtgagctcagacaatcctactggttcccatttagtacttttcgaagggcaaggttacatgccttctgttttgcagtactaggtaggggaagcattcccaagcc

SEQ ID NO: 442321 - DNA, 122 bp, Homo sapiens
cggatgaggaggaggatcctgcggaggaggattgtcctgaattggttcccatggagacgacgcaaagcgaggaggaggaaaagtctggcctcggcgccaagatcccagtcacaattatcacc

SEQ ID NO: 442322 - DNA, 122 bp, Homo sapiens
aacctgtgggtgcctcagaccacagcagagctcacagaacctgcgggagccaggctgacccgccagcatggtagagttcgcgcccttgtttatgccgtgggagcgcaggctgcagacacttg

SEQ ID NO: 442323 - DNA, 122 bp, Homo sapiens
cttccaacatcctttcattcacagcatcaccgagcaggaaagtcttgccaagaataatctcgggttttacaagcaaaggaactttggaacccacagtcccacttagagactccaacctccag

SEQ ID NO: 442324 - DNA, 122 bp, Homo sapiens
gaaacggagatgaaaccgaggagcccccaccctcttcacagggctaaagccagaaaccaccgtcccaggccacagcctgcctcatgtggccatgcctgctccctggcagtgcgcgtcctgca

SEQ ID NO: 442325 - DNA, 122 bp, Homo sapiens
caggaaggagaatgaatgcaggaggaactatcaaacacttacaataccatcagatgagaacgcactcagtatcatgacaacagcaccggggaaactgccccaaggattcaattacctccatc

SEQ ID NO: 442326 - DNA, 122 bp, Homo sapiens
tttttttggaaggcccagattagtagcagagactctccttgaaggggatagatgcattgtcgctgtttggtattttgaacagattcttaagaaaatgttttcctggtggaagatttcagaca

SEQ ID NO: 442327 - DNA, 122 bp, Homo sapiens
tttgtgggggtgtgtttaaaacgttctggtccccaaggctcttgggtctacctgagcatacgcggcacacaccaaaggtctcagggtggaattgttcacgtcaggaatgtgctttgagcagg

SEQ ID NO: 442328 - DNA, 122 bp, Homo sapiens
acccagattcgggagtagtccctgagcagctgggcatagggaggccccacctctttccaccgggcccttgtctctgtccttaaccaggacaccagacgtccaggtcttctctcagccactcc

SEQ ID NO: 442329 - DNA, 122 bp, Homo sapiens
tagtgcctttggatgagtgctccacgatcagttgattcgtgaaggtcatgaattcctgaacgctggatctctggaaaaagctgaaggaagcgacatcgtcgtacctggctttgagcagcact

SEQ ID NO: 442330 - DNA, 122 bp, Homo sapiens
cgcgctcctcagccgccctccgtcacgtgatcccctcccaatcacgtgaccgtctgactccgcctagtgcccccgccacatgatcgctgccttcagcaacggtctcccagcccccaaacgtg

SEQ ID NO: 442331 - DNA, 122 bp, Homo sapiens
ggagcggcccccgcccggctggcggggggcggggtgctgtcgcgctctccccggcggccgcgcctccgaggggtcctctgtgagccccgaaaaggccccgctcgcctcctttgtcccaacac

SEQ ID NO: 442332 - DNA, 122 bp, Homo sapiens
cggacccccgctgtcggtgcctcgccagcgctccccagggcggccagtcgcggcaggaagcggctacgctcaaaccagtttcagctgctccagaccaaactgccaggccaccctgtggggcg

SEQ ID NO: 442333 - DNA, 122 bp, Homo sapiens
caaactagtgactgttttactgcaggtgaagaaggggcagagatcagaggctctagcaggcgggacaatgcccagggattcatgagccggacaaagctgtatccctccatttccacctgcca

SEQ ID NO: 442334 - DNA, 122 bp, Homo sapiens
aaagctgggcgctggcttcggcctgggcctgggacgggtgggggtgggaactgacccctgcgctgcctcagaggctctgggcagccagctagcccggtgcgacccgctggcagaagctgagt

SEQ ID NO: 442335 - DNA, 122 bp, Homo sapiens
caggggactggtctcccgaaggagtcccgctgacccaggtcttcggcacgaaatgtctcacgtgtccgtgtcaagagacccccaaagaggctttgtgtgagcaacaaggctgtttatttctc

SEQ ID NO: 442336 - DNA, 122 bp, Homo sapiens
ttctgagttctcccatcagaaaagtcctggtccccatccaagagcttaggacgtttgtgacgatagtcataggatactttggttgctgaactggtctctgggtgttccctctcagcatgtcg

SEQ ID NO: 442337 - DNA, 122 bp, Homo sapiens
gcatgccccacccatctgcaaggcattctggatagtgtcaaaacagccggaaatcaagtccgtttatctcaaactttagcattttgggaataaatgatatttgctatgctggttaaattaga

SEQ ID NO: 442338 - DNA, 122 bp, Homo sapiens
tttaaaggaaaaagaaaggacctaagcactaaagctgctgccccaaatctgctcgcgctccggtatcctcgccccagtgccccagtgggaggctcgcacgcgcccagcccgggacaggtaca

SEQ ID NO: 442339 - DNA, 122 bp, Homo sapiens
ccagtgcatttaagattccagaaagcagaagaccgattccggaccacacaggaagcccgacgcccgacgagaacgggcacggaggcgctgcctgcgcgcagctggtttacattcccttgctg

SEQ ID NO: 442340 - DNA, 122 bp, Homo sapiens
gacagctagtgccgtctggggaccagtcactgtgctaggatcagctcgagtactaagccgcgacagttgggctagaaagcccttcctccgagccccccaaggcccaggtggcagcgggttca

SEQ ID NO: 442341 - DNA, 122 bp, Homo sapiens
tcaggggttgggggaagatcaaagttgagcacagcagacacatggtggaagtctatgccccgggccacacctgcttccggatcagaggccctgcagagataactcaatgtcagccggaccct

SEQ ID NO: 442342 - DNA, 122 bp, Homo sapiens
atataggcatccatagcggatgcctggatggtaggaataggatgtggcaaaaatccttcccgaagcctagcggtcattattttgaatgtcatccccaccatacctcgtgtctgagtgtgcga

SEQ ID NO: 442343 - DNA, 122 bp, Homo sapiens
agaagatgagggctttaaagagctctctttgtccccatgtggctccttctaccatgctcccggcaagctaatgttctcagtggctcttttttttttttaacaactcttattttcaaataaga

SEQ ID NO: 442344 - DNA, 122 bp, Homo sapiens
gggtgaccgttcattccatgagcagtgacgctcacgtgtgcagggcactctgggcagacacggcctgggggacccactactgggtgttgcgcgggcgccctgcagggtgcggggctcagggc

SEQ ID NO: 442345 - DNA, 122 bp, Homo sapiens
gtaaacatcccacatagccacttaatctgccctctcagcacatgcgtgcgcaggcacacacgtttgctgtgctctcgctgtccttcattcgtgtagctatgaaactgagccagtgaatgaaa

SEQ ID NO: 442346 - DNA, 122 bp, Homo sapiens
aatgcccgggagccggagccggagccggagccgcggccggcgctgcggctgctgcagcagcggagcccaccgcagtccccaacgtcacaagcgactgtccaatcgcagcggtgccggcgcac

SEQ ID NO: 442347 - DNA, 122 bp, Homo sapiens
tgcatgcggctggcctgggcagaggacataggcaacctttgccgatgggttcctgggccccgggtcctgtccacccgtggtcatatgtggacatgggtgaagctccaaactgtagggatggg

SEQ ID NO: 442348 - DNA, 122 bp, Homo sapiens
ggcgcgggtcgggccaccagacggggggcggcagcagaggcggggcggggcggggcgcggcgggacagcggcccctttgtgcctgagccctttgtgcccagcccgcgcgccccgcccccacc

SEQ ID NO: 442349 - DNA, 122 bp, Homo sapiens
gctcaaggaccaagagctcgatgatctcctccttggtgcgggtctccggctgcaaccaatcgaggcagaggtttcggagtttgatcagggtcttccgaggcccaacaaattccacatagatt

SEQ ID NO: 442350 - DNA, 122 bp, Homo sapiens
attcttctggctcttgagggccaccgcatgcctctttccagcccaccagttccccttatccggaatcttgccagccccccaagcacagcaaacagagaggcacaaaggacgaggatggaacg

SEQ ID NO: 442351 - DNA, 122 bp, Homo sapiens
actgtaaaagagaactgttttttttgaggaaaactgtaatactgcctctaggtaccacttcggctcctctgcaggaaatgaattctaggtggatagctgtcaggtcatttttttttttttag

SEQ ID NO: 442352 - DNA, 122 bp, Homo sapiens
tgaggtctcagaatgtaaggattgcagggccaggagggttggagaaggggagccgtcccccgccatcaaagagcttcctggtggctggaggtggtgtgcgctcccccgccatgaggaggagc

SEQ ID NO: 442353 - DNA, 122 bp, Homo sapiens
ccacagaattaaagttggagttctttgcagcaccgcctgtttacccctaattaatttgggcggctgccacacacacacacgcacacacgcacgcacacacgcacgcacacacgcgcacacac

SEQ ID NO: 442354 - DNA, 122 bp, Homo sapiens
ctggagagtgggaggctctgcagcgggcccggacacaggtgagcccaggcacgccctcaccgccccctctcgacccacagggcttccggcccatcgccaagccggcctacagcccagcctcc

SEQ ID NO: 442355 - DNA, 122 bp, Homo sapiens
atgaacggagtatcttgtgtcctggaccctttgcaagaacccttcccctagcaacagatgcgtcatctcaaaatatttttctgattggccaaagagtaattgatttgcattttaatggtcag

SEQ ID NO: 442356 - DNA, 122 bp, Homo sapiens
cctgctgtgctggcccagctcacacgggagcaggtgcatcgggcacctgtgctgtttgcgcgacacccccgcatctgggtgggtgtggtggtgagggacaatcgcctggctcagggtgggca

SEQ ID NO: 442357 - DNA, 122 bp, Homo sapiens
atggcgacccggagcccgctccccacccaccccgcctgctccgccctcccctccgccccgcgccacctttgatggctcggacctcagccggccaccgccagccctgctcgcgcgcccgcgcc

SEQ ID NO: 442358 - DNA, 122 bp, Homo sapiens
gaaggggcagagaaatgtacaggtgcctcgcacccttcactcagctccccgcaatgttgacgtctcacgtaaccaccatgcaaccaggaaaccgagatggggcagtacacagggctgactca

SEQ ID NO: 442359 - DNA, 122 bp, Homo sapiens
aaggggctgcactggagtgtggactgcccggtatccttagagaaagttttgacagtgtgacgccagtgtcgcctctaaccacgtacaaaacgcgccatgcattgggtagctattacagtgca

SEQ ID NO: 442360 - DNA, 122 bp, Homo sapiens
ctgtgacagccttcctctgagatggcccaattgtaaggtccagggaatgctggcttttcccgcttcggtattcctagtaaacgcctgttccacccagcctcaaacgtttccgtccctgccct

SEQ ID NO: 442361 - DNA, 122 bp, Homo sapiens
tctgggagggggaggtaataaaatggttcgatccggtcttgacttgccaggcgctcgaggcggggtggggctgcccgggccactctgtaaaggagcaggtgggtcgatcctgcttgagtaat

SEQ ID NO: 442362 - DNA, 122 bp, Homo sapiens
cctcggcggtcacccgcacgcggcccacagccacaggcagggccacagcctcgccgtccacggtgacctgggtggaagggtcgggtaggtcaggaactcacagaaccacaggcaaggctgtc

SEQ ID NO: 442363 - DNA, 122 bp, Homo sapiens
cgccgtgacccgcgccccgattggcccacttccctacataccctcctctctcgcttccaccgtgggaccctctgcaggctccgtactccaaggaccgtaccaagacgaagggtggaaagcgt

SEQ ID NO: 442364 - DNA, 122 bp, Homo sapiens
tttccgccacactctagcgctcggaagtgagctcctggatcatacagctgcaaggctggccggtccttgtttgccagtcgctcttttctgggtgctggactgtcgtcacacctctgcgctct

SEQ ID NO: 442365 - DNA, 122 bp, Homo sapiens
acttgtgcctatactaaggcggtggccctaagacgacgcgggggttctggtgcgcacttacgtgcagtcggatgcgctgggtgagttcccacacccggtagatgtaagggaaaaactgcatt

SEQ ID NO: 442366 - DNA, 122 bp, Homo sapiens
tttaaagactgaccagtctcccaatgccggaagtgagctgtgcagcatgctctccggtgacgaggcccctgtgggagggggaccttttgagatatgcagctgctcaccccggccccaggaag

SEQ ID NO: 442367 - DNA, 122 bp, Homo sapiens
atgttagtgggttcggcctcagaatcagccggcgctgagatgtgcacctggcaggatgaacgtaacttctggtggataaagtgggaggcctgatccaggaagaagcacaccgtggcctgggg

SEQ ID NO: 442368 - DNA, 122 bp, Homo sapiens
gacccctccccacctgaaacgatactgccacctggggaccccaggccgctgacatggggacgcgctagagctttcgaacacgtctctgcatctggacatgccctcggtgcacgtgtattgct

SEQ ID NO: 442369 - DNA, 122 bp, Homo sapiens
aaatagggagtaaaccaagagatttgtgacttaacaaaaaaacaattcagtacaggtgagcggtaaaggggttgcctcttcagccgatggagaagcatcagcatgatctctataaagcagac

SEQ ID NO: 442370 - DNA, 122 bp, Homo sapiens
tcctctaaaaagctgctctcatccgtttctctgcagatacgcccaggaaccaaaggacatcggtcccttggacgcagtgcctgcagcagcggctgcttggggagacctccatcgtgccatgt

SEQ ID NO: 442371 - DNA, 122 bp, Homo sapiens
gcgctccatgcagcgctcccagagccggagtagcctgtctgcctccttcgaggcactggccggctactttccctgcatgaactccctggaggaggaagaaggaggtgagacaccccttcccc

SEQ ID NO: 442372 - DNA, 122 bp, Homo sapiens
cagggctggctcctcaagctccaccctctgccagctgtggatcttgtttcctgtggagcccggggatgtagccagccagcctcacaccttctgggggtagcagatggggtcagcactgtgcc

SEQ ID NO: 442373 - DNA, 122 bp, Homo sapiens
agtagaagcagagatagaagctccttgagtttttccctggtcacctttaggaactgaggccgtggccccattatagcccatctactcactcaggatcagcagcagcagccacagaagcatgg

SEQ ID NO: 442374 - DNA, 122 bp, Homo sapiens
ttgttgtgtgcatccccctctctaaggccctactccatctctggcatcaacctttcctcccgtcttgtggcccgcactaacaccctagtgtgtatgtctatatttttcttcatacttagctt

SEQ ID NO: 442375 - DNA, 122 bp, Homo sapiens
gtctcgtgaccagggcttagccaatcaggacttataagtgaatttccacctgccctgtcccgtctccaccacatttgtgttcaatttctaaagaataaatgcaatgttgtgtgaaagacctt

SEQ ID NO: 442376 - DNA, 122 bp, Homo sapiens
tctgtttaaactgaaaaaaaaaaaaaaacaaaaatgcactgccccctttcaaagttagtccgggaattgagtttagaatcctttaaaggaaaagagggatatcatgtactgaacttgtctgg

SEQ ID NO: 442377 - DNA, 122 bp, Homo sapiens
agcgcctctatcctgcgctccttggcgtacgcagccgggcgaggtcgcggcgggaatgggcgccgaggccctgcccgccagggccgcatctgcggcccgagacttacttctgctttgctttc

SEQ ID NO: 442378 - DNA, 122 bp, Homo sapiens
gacaacggaggtgaccaccgattgctgccaggcaggatgcacacaggcggagcgctcaggcgctaggggccacaggtcccatccaagtggccccaaagcagaggcttggctcccccatcccc

SEQ ID NO: 442379 - DNA, 122 bp, Homo sapiens
tatttcccattatgggcacttctggggagcaaaaggccgtaaagggtttggactgtaccacgttcttcggtggggaggaactcgactcacccaggagctggaatggggggcagtgactgccg

SEQ ID NO: 442380 - DNA, 122 bp, Homo sapiens
cactcttccccctggctcctcagctgcagccgctccggcctccttgctgttcctgggatacgccacactcagtctggcctcggggcctttgcactggctgtgtcccctgcctgtgatgccat

SEQ ID NO: 442381 - DNA, 122 bp, Homo sapiens
tgactctgcagagagccaacggcaggaagagggcagcaccggcacgtcggaggccgaggacggcttagacgggaggtccggaggctctcagcctgaccagccctggcctagggccggggaaa

SEQ ID NO: 442382 - DNA, 122 bp, Homo sapiens
cctggggattggtgactattctgcctcttccgccaccgttggcggctgaacactcctccccggtgtctgagttcaggggcccagcctgcggataacacctcaggctacctacaggcccgggg

SEQ ID NO: 442383 - DNA, 122 bp, Homo sapiens
tgggggagattcgccgagactgaaaacaccacgtttctctgtgaacgttgccccgatctccgcacccgttggtggatcttccctgcagcatgtcttcctgtggggacgtgctctcccccttc

SEQ ID NO: 442384 - DNA, 122 bp, Homo sapiens
tagcaaatacggtcgcagtcccgggagaaagcacacacagccgagaccccaccgcttcgtcggcgccgcctggaccagccagtagctccgcccctgggccccgcccctccctgctgagcgaa

SEQ ID NO: 442385 - DNA, 122 bp, Homo sapiens
ccagcaaagcccatccatctttagagctcacccgtctccagctacaccccccacccctcccggcccagatcaggcagcggggtcgccctctccaggactctcaaggcagctaaggctggagg

SEQ ID NO: 442386 - DNA, 122 bp, Homo sapiens
ctgtgagcactgcacgcaggactgagaaagcccgggataagcccggagtgcagggaaacccgcagccccctgggcagatgtggagaagaatctggacaagctgaccgagaccccggtaccgg

SEQ ID NO: 442387 - DNA, 122 bp, Homo sapiens
ccccgctttccgcaagatgcaggcgtgggtccccccggatctctccctattaagagaccccggagttccgtccttgctgccgcctagtgcccagcagtcccctcctaggtccagccacccgc

SEQ ID NO: 442388 - DNA, 122 bp, Homo sapiens
ataataaccacacaaggaattcctcatgtacgtcacaagtctcatgcgtttctccacctacgttttgcacatgtgcacacatttattgatttagaggcagggatcttgctgtgctgcccaga

SEQ ID NO: 442389 - DNA, 122 bp, Homo sapiens
ccacgtcccagaccgaggcgtccctgtcgccgcccgctaagtccacccctctgtacttcccgtataaccagtgctcctacgaaggccgcttcgaggatgatcgctccgacagctcctccagc

SEQ ID NO: 442390 - DNA, 122 bp, Homo sapiens
tatggccatatgggagcgtcagaaaactcgggtgtgtacacgcaactcggcaatcatctgcggcggaatgtcactcccaggccggctccccaggtcccaccagctcacctctgggcccccac

SEQ ID NO: 442391 - DNA, 122 bp, Homo sapiens
tgagtgagtatgtttggggcccgggctcccgccccgaagccaggttgttaaaatactcaccgcctctggcccgcgtgcacgacgctctcccgcgaagggcccttaggggctgcctccaaacc

SEQ ID NO: 442392 - DNA, 122 bp, Homo sapiens
ctccaggaatcttgaaaccaggaatgccaggtatataacagcgggttacaaaagaaaacacggattcctaaatcagtgttttactgtcagtgcagtgttaaatgtcaatgcaacacttaagt

SEQ ID NO: 442393 - DNA, 122 bp, Homo sapiens
gctggtgatgattggacgactggtaacagggggcggagggctccgaagtctggttttgggcgggaattgaaaccgccgctgaagccaacaagaatttgagaactgtaaataccaagccttga

SEQ ID NO: 442394 - DNA, 122 bp, Homo sapiens
ccgggcctgacagtgtctgggtgtaaagttcctcctctgaggaggtcactgttccgacctcgcccctgtcttcctgtagggcctcctctaagtcttgagcccgcagttcctgagagaagaac

SEQ ID NO: 442395 - DNA, 122 bp, Homo sapiens
cgctaatggtgcaagagcccaggacgccatgaggccagagagacagggcatggactcacacgaacgacgcggatgctgctgcgggcagcgtccagggtgtcgtagaaggcccgcaccacctc

SEQ ID NO: 442396 - DNA, 122 bp, Homo sapiens
ggatgttgggtgtgggattcgcaggagtcttccttcttcgggtttggattaagttcctaacgccacttgcacaaactagggtttgggctcggctgttttttttttttttcttccagtgtggg

SEQ ID NO: 442397 - DNA, 122 bp, Homo sapiens
ttcagaaggagccaatcagagagtgtgcaatattgatcattcctggagcagagctgagtgcgtgactgaagggtcagcttgggggcggggacggacaaggtggtgggcggaacttaagggag

SEQ ID NO: 442398 - DNA, 122 bp, Homo sapiens
ttctgctggattctgaatgccgagaaagaaaaactgagaaatttgtgaactattacaagtcgtctgtaaaatgagataataatatcaacttcacaaggtaatttaggctttcgtgaaaacta

SEQ ID NO: 442399 - DNA, 122 bp, Homo sapiens
acctagcaccatgcctgcagtggccctggtcacctccaaggacacagactgcaacaccgacgccgtcttatgactccaacgtgcaccggcggtttccgcgattccggcgttgcatcagagag

SEQ ID NO: 442400 - DNA, 122 bp, Homo sapiens
ttatcgcggcctgggacccgccctctccccgcctcccgctttggcgtctccaagactccccgccccccagacctcgccccgccccaggctaggctggaaagtggaggatccggtttgctctg

SEQ ID NO: 442401 - DNA, 122 bp, Homo sapiens
ccttcggccgaaggtcgaaggctgctccgggaacgactgggacgcgctggcgcttgggggcgccagtggcagccgttcagcgagccacggaattgctgcaggagacaagcgctgagttcggt

SEQ ID NO: 442402 - DNA, 122 bp, Homo sapiens
tatgcatgtgcttgtaccagcttcagcatctgtgtcttttcccctctggttcatcagaatcgagtgctatgtgtgctctggcacagatgaacatcagagaataatagcagctgatgtgtgat

SEQ ID NO: 442403 - DNA, 122 bp, Homo sapiens
cgcaagtgatcctcccgcctcagcctcccaaagtgctgggattataggcaagagccactgcgatggaaacagaggctgctgcttaagttgcccaaagtcttgcagagtgggatgtgagcaga

SEQ ID NO: 442404 - DNA, 122 bp, Homo sapiens
cttcatggggatctcacgagcctccgcgcgggcctcccgttttgcggcgagccgggcctccgccagcctctgcgcttccgcgctcaaacagtagatctcccggctctgcgtggccgcggggc

SEQ ID NO: 442405 - DNA, 122 bp, Homo sapiens
acaagcagcccataaggttgggatcctccgtctccaagtagcgcgactacagctcttgcccgcacggagcagcctcggacagcgcggccgctttaagagaggggcggggcccgggtacaggc

SEQ ID NO: 442406 - DNA, 122 bp, Homo sapiens
gggacaccggaagctctgaagacttcggaccagagcagcccttccgtgatggtgctggatcgacccctgttctgtgctggctacgtaaccactggctgaatggataaatgtatcaaagacaa

SEQ ID NO: 442407 - DNA, 122 bp, Homo sapiens
aaaccatctgtcctgccctgtgcatggcgctgcctacagtgacaaggactctgctgcgaacgggcgggccctccacgctcaggcctggctctcagggcagcctcctgagaaacggactccgc

SEQ ID NO: 442408 - DNA, 122 bp, Homo sapiens
agaggaaaatcttcctaacattgtatttggctatgacttcactgcgacaccgaaagcacacgcgacaaaataaaaataaaataaaataaaataagaccagaaaagcaaagaagggcagcatc

SEQ ID NO: 442409 - DNA, 122 bp, Homo sapiens
tgagaagagtttggtagcagataaaatcctcctaaaaaacaagcctgaaaatccgaagtgcgtcctggacttaggtgactgagtgttctctgtccttgtctggtgtgcctgagagcccagag

SEQ ID NO: 442410 - DNA, 122 bp, Homo sapiens
tgggtcagcccagcgtctcccagggtgagctgtggaatgctgaagggcagcacacaaccacggagcaagaggagcggcagctgcccgggctccctccgcaggcgcctctgcacggcgaggag

SEQ ID NO: 442411 - DNA, 122 bp, Homo sapiens
gaggctggggccggggctctgggctaggtaggggtcgcaaggacagcgccccattactagcgagtcagtgagaacagactcgggagaaggtagtttttacgctggtgatcctcgccctcccc

SEQ ID NO: 442412 - DNA, 122 bp, Homo sapiens
cgccccccgagcttgtcactttggtcgctttcgtgacaccgggcgcggggtgggggagcgcggcggcgccgggctccaccggggtgcgtgtccgggtgggcgccgcggagccgcagcccagg

SEQ ID NO: 442413 - DNA, 122 bp, Homo sapiens
aatacggcaggcagcttcacctgcggctgcccccatgacctagtgctaggcgtggacgggcgcacctgcatggaggggtccccagagcccccaaccagtgccagcatactcagcgtggccgg

SEQ ID NO: 442414 - DNA, 122 bp, Homo sapiens
gcggtggccccgcagccccccctgacgccgagctgtcacctcgctggagcagcagtgcagcggctgtggctgtgcagcagtgccatgaaaatgattcaccccaattagaacctctggaggca

SEQ ID NO: 442415 - DNA, 122 bp, Homo sapiens
gccggtccgccgccggaacgggagcctgggtgtgcgtgtggagtccggactcgtgggagacgatcgcgatgaacacggtgctgtcgcgggcgaactcactgttcgccttctcgctgagcgtg

SEQ ID NO: 442416 - DNA, 122 bp, Homo sapiens
ctgcctcggcctcccaaagtgcccagccgacggttcaggtgtgtccgtgtctcccaggaacgagtttgctcagtcacgttgctctgccgtatttcactgtactgaagagactgctttattca

SEQ ID NO: 442417 - DNA, 122 bp, Homo sapiens
agaaccattatataaaaatggcatttttgtgctttttcctaccccccgatgcgggcaatacgtttaaaaataaatatcaggttgtcagtggcatggtggtaacagtttactcagagaattag

SEQ ID NO: 442418 - DNA, 122 bp, Homo sapiens
ggaggtgggcgggagatacctggacctggagcagagctgcccaccttgctttctcactttcgactcctgagagatgggggagcagaggccccagcagggagcaggaaggttggtgccagaac

SEQ ID NO: 442419 - DNA, 122 bp, Homo sapiens
cccccgcctggtgttccccagtggatggcaattactgcctgacgtgcggcagtgacaagacgctgaagctgtggaacccgcttcgggggacgctgctgcggacgtacagcggccacggctac

SEQ ID NO: 442420 - DNA, 122 bp, Homo sapiens
gtgcgtccgcaccggattccccgcggcggcaaggcgaagccagggtaagggcggtggggacggcgccccggggctgccctgcggtccccactgcctgctctgcgttgccccgtagcctcctc

SEQ ID NO: 442421 - DNA, 122 bp, Homo sapiens
ttattacagatgaaaaatactagaaatataacaaatacgtaaaacttacaccagtccaaacggtcggatgataccacagacaccacaaagcctgacacgtgggtgcttaggaatgcctctag

SEQ ID NO: 442422 - DNA, 122 bp, Homo sapiens
ggagggtcactaaatgagggtggacctagacatgtgggggctccttttggattctaataccggttgagtatcgcttatccaaaaggcttgggaccagaagtgtttcggatttgggaattttt

SEQ ID NO: 442423 - DNA, 122 bp, Homo sapiens
ttcgccgcagtcccgcccacccgcagcctccgaggggtcccggccagggcgttctccacacgctcggctacctgcaggggttcgccactgcaagccgggccagtagaagtttgggggcgaag

SEQ ID NO: 442424 - DNA, 122 bp, Homo sapiens
cttgggcagggactgtgtctcccctgtcggcctgggcctggctggccaggctgtttcctccgtcagactgagacctccatgtggacagggctgtctcccatcagacagggagcttcccagac

SEQ ID NO: 442425 - DNA, 122 bp, Homo sapiens
cagcgaagtctgtgcggaatcctaaaccagcccaatttacatccattcatgaatctgtgacgtcagcaagcctttgggctcctttgcggtgggctggaggattgtgtgggtggaatccccct

SEQ ID NO: 442426 - DNA, 122 bp, Homo sapiens
cacagatgttagcaaggctgttaggaaacaggcagccgcaggcggggctggtgggcgagccgactgcacagccgcctccagggtggactggcaccgccggtaacgtgattaaggccggcgct

SEQ ID NO: 442427 - DNA, 122 bp, Homo sapiens
tccgcggcgcccccaaatgccgcactgttgagtcatctcagcgctgcctcctccgcgctgcgctccccacccccgctcctggagcaagaagatgcagacgatacttttcccggaggcaagag

SEQ ID NO: 442428 - DNA, 122 bp, Homo sapiens
tggcacagcaacagccaggcctactgtagaggaggtgtcaccttttaaaaacagaatctacgttattcagcagcactgaaaatgctaggctacaagtggaatgcaggtgtcaggctgaaagc

SEQ ID NO: 442429 - DNA, 122 bp, Homo sapiens
cttcgctgagacagggataccgctctgagatccatctgtaaaacttggggactcccatttcgatcgtcaacactaatcccagtcagggccaaaccgaaaccaaacgccccgccggggctccg

SEQ ID NO: 442430 - DNA, 122 bp, Homo sapiens
tttaaaattcacaaacaaaaacaaaagatgcactagacccacccagcgaccccaaggtcacgccctctgtggttattggcaactcggggacgctgcccagctcccgattccgctcagcacct

SEQ ID NO: 442431 - DNA, 122 bp, Homo sapiens
gctgcattgggctgactttgcttttcaggttgtgtttgatttgcccctgggtggctaagccggctgaatcgcccaggtggggtttcattcattgaatggcatgggcaatgggtagcaggtag

SEQ ID NO: 442432 - DNA, 122 bp, Homo sapiens
gggttcttcagggaaggggccgctctaactctctccagccccagccgcactttcccctggcgtctcacctccagaaggacagggactacagtgctaggctgaggggcagccctgtgcaggcg

SEQ ID NO: 442433 - DNA, 122 bp, Homo sapiens
cctccccacagtggctgcctccgggtgatgatggctgtgtgaacgactgccatggcccaccggaagcttgagagcgtggggagcggcatgttggaccatagggtgagaccaggtcctgtccc

SEQ ID NO: 442434 - DNA, 122 bp, Homo sapiens
gtatatgtctcaggtccctgcagggccaagcacctagcctcgctcttggcaggtactcagcgaatgaatgctgtatatgttgggtgcaaagttccctacttcctgtgacttcagctctgttt

SEQ ID NO: 442435 - DNA, 122 bp, Homo sapiens
agcacacagcccagggccatcccttcggcctgaagcagtgtcctcaccacactaggtctccgtgggcagctccttccctggccccacccggcttgctttggaaatacccagatgtacttgaa

SEQ ID NO: 442436 - DNA, 122 bp, Homo sapiens
ggatatgaactacaaactgaaatatgagagacttgaagaacagtcaaggattcctgcaatcgtatgggttgggaaaggtgctttagtaatccaacccccaaagttagcaaatacgaagctac

SEQ ID NO: 442437 - DNA, 122 bp, Homo sapiens
actgaattggactggagtagctgcagcagttgcgacctggcggcaagtaaccggacgaaacggacagatggccatggaggagaagcctgacctgactgatggagaggcctgatctgaccagg

SEQ ID NO: 442438 - DNA, 122 bp, Homo sapiens
gggttcaccgcagcctcaacttcccaggctcaagtaatcttcccactttaggccacccaccgaccaagtagctgagactacaggtgtgcgccacagcaccagttaattttttcttttttgag

SEQ ID NO: 442439 - DNA, 122 bp, Homo sapiens
atccagcttaggtgatgtgcttccaaaatccttgttctcactgcaccccctccagagatacggtggataaggctcaaggactctgggatagaaagcatagctgagaagctgggctgccctct

SEQ ID NO: 442440 - DNA, 122 bp, Homo sapiens
caatgtcaagaagtccggaagaggaaagagcttgagctgcagatcctgacggaagccatccggaactgggagggcgatgacattaaaactctgggcaacgtcacttacatgtcccaggtcct

SEQ ID NO: 442441 - DNA, 122 bp, Homo sapiens
gtgcccaggccagacatggacactgattaatgaagtccacggtgggggtcacatattccccgcacctgagggtttccgccgcgcttccgggtgttcaatgccgtttctgtttccccacagac

SEQ ID NO: 442442 - DNA, 122 bp, Homo sapiens
cacccgaatactgcgcttttccgacgggcttaaaaaacggcgcaccaggagactgtgtcccgcacctggctgggagggtcctacgcccaccgagtctcgctgattgctagcacagcagtctg

SEQ ID NO: 442443 - DNA, 122 bp, Homo sapiens
attcttcactctccccatgctggtcaccttgctgtttgttcctcaaacacatatgacatgcgtttctgtcttggcagtcatcctgctacctgtaatgtcagcactgctttctgttgtccctt

SEQ ID NO: 442444 - DNA, 122 bp, Homo sapiens
ttgctgcccatgctgcttctgagccatggagtcaccaccagtgtggtggggtcttggacccgaagaaaggagaagacactgtgccccccgattagctgagtgtggccaggctgtgtgtttgc

SEQ ID NO: 442445 - DNA, 122 bp, Homo sapiens
cgtgtgttaacctgtacttctgccgcagagtttggagaaagcggcagcagattgtgctgccgcaggctggagcctggaacctggagccctggagccttgaatggtgtgtggtggcaatggag

SEQ ID NO: 442446 - DNA, 122 bp, Homo sapiens
gtgttctataccactgtgggatgactgtcattaacaataatactttatatcatttcaaatcgctagaagaaggatatggaatgtttccaacacaaagaaatgataaatgagatgatgatctg

SEQ ID NO: 442447 - DNA, 122 bp, Homo sapiens
agggacaggtctcaaagaccctgatgccaatatctttgaaagcctcggaggagaaatggtcgcccttggaaagaaaggactgaagagcacagagaccacagctcctcccacacacaaacccc

SEQ ID NO: 442448 - DNA, 122 bp, Homo sapiens
tacccacccctccggctgccgtgaggccttggagatggcagccagaccggactttcccatcggatccgccagaacccaggcttcccaaggcagcagctcccgcgcagccgccgcccgcttct

SEQ ID NO: 442449 - DNA, 122 bp, Homo sapiens
gtgtgtgtgcatgtgtgcatgcgtgtgtgagtgcatgtgtgtgagtgctgccgctgcccgcgacccctggccccgaaggtgttggctgaaatatggagaatagtcttagatgtgtttgggta

SEQ ID NO: 442450 - DNA, 122 bp, Homo sapiens
ctaaaaacaagtgtgcccgcagaagtgaggcggcacgcccgttactcctcacgcaggaagcgcagcaatgaaacaaaacgccgtgcgtttaacgcttcggtttcttgattttgagatgaccg

SEQ ID NO: 442451 - DNA, 122 bp, Homo sapiens
cgcgcctataaggcttgggcgggcccggccgcggcccacagagccgtccccgcccgcccgcgccccgaccagcccggcctcgggcagccactcaccggtgtccccgtccgcgtcctttctcc

SEQ ID NO: 442452 - DNA, 122 bp, Homo sapiens
atcatgggagtaaggctgctgaagtcagagagcaaagtgttttaagagtagaggagtgctcgtcagggtcaaatactgcagataaatagaatgggggtttgcaagtggtcttaaggtttggc

SEQ ID NO: 442453 - DNA, 122 bp, Homo sapiens
agggggtgtttctatccttaggcctgaagaagcaaagggagagagctcagagagggtagccgcagcctttgacagggccagctaaaagagccatggcctttaatagagggagggagccaact

SEQ ID NO: 442454 - DNA, 122 bp, Homo sapiens
ggctcatctggtagcaacagggagtcaccagaaattccagagcaaaggagcaattcagtccgctgaaggtttaggaacaccttcagtggcttcaggttggtggggtaaagcagtggtcgggg

SEQ ID NO: 442455 - DNA, 122 bp, Homo sapiens
cgccaggacctggccaacctgcagaagcagcaggcccagtacctcgaggagaagcgcaggcgcgagcgtgagtgggaagctcgtgagagggagctgcgggagcgggaggccctcctggccca

SEQ ID NO: 442456 - DNA, 122 bp, Homo sapiens
atgcgcaggtcaaaacctggttccagaaccggcggacaaagtggaggtgagcaagcggggcgggccggccgcccgcgagcggcgcggtctcaggcagctctcggttcattggcctctcgtgg

SEQ ID NO: 442457 - DNA, 122 bp, Homo sapiens
tgcttatgttgcagtataattgtttctgagttgggcttctgtaaaatgattatgtctactcgaagacctgaagaatttaagagcaatctgctcatggggtgtcagtatttgagggctggcaa

SEQ ID NO: 442458 - DNA, 122 bp, Homo sapiens
gcgttgcgcctggctggcttagcagggctggggggtatgccgagggcttcccctggtggccgctccccgcaggtcccgacaagcccagtccccggcgacccttttgatcaggaggacgagac

SEQ ID NO: 442459 - DNA, 122 bp, Homo sapiens
ctcgcagcagatttgtagtctggttgctgtcgttcctgaaatagcctctgaagctctgtccgggaagggaaccttgagtgtggaggagataagcctgctgactgggtgagccggccggggcg

SEQ ID NO: 442460 - DNA, 122 bp, Homo sapiens
caggaaaatccgaccgggcggagcacgccctgggtaacaagatctgtttttctggaagtgcgaccggcctcttctgccccattcgctcctctgtgacacaaatacttggggaaagcgcaggg

SEQ ID NO: 442461 - DNA, 122 bp, Homo sapiens
ctttgtttctcgctgccgccgaagctccaattttcgtctgtctgctttgtgtcctctgcacgtagaagcccagcctgtgtggccctgcgacctgcgggtattgggagatccacagctaagac

SEQ ID NO: 442462 - DNA, 122 bp, Homo sapiens
acatacctgctggccttgacaggcaacctcctcattatcaccatcattaccgtggaccgtcgtctccattcccccatgtattactttttaaagcacctctctcttctggacctctgcttcat

SEQ ID NO: 442463 - DNA, 122 bp, Homo sapiens
cgctggggaaggggatcccgttgtcggacgtgaagatcaccagtgtgtcgttcaggacaccggcgtcacgcagctcctggagcaccagtccaactcctgtggtgaggggccgagaagcagag

SEQ ID NO: 442464 - DNA, 122 bp, Homo sapiens
aggctgagggtttatatagagagacgctgagtgatgattggttccttgctccatgcgcggcgctgctggaaaaggactcctcgtatctaccgcgctgctgtgtttgttgccccttaaaaaag

SEQ ID NO: 442465 - DNA, 122 bp, Homo sapiens
agctaaagggctttagcaggggtgcgcctgagtgtatgcagagggcgggtcctggcaggacgaattcaccgccactgccagaacgaactattcagattcacgtggagcaaggggctcatgca

SEQ ID NO: 442466 - DNA, 122 bp, Homo sapiens
gagggaagatgggcaggaacgtgagagcctttcatgccctcattgttatccatacatcaccgtggatcactttattaaaggctgcttgttgaatattttcctgggcctctccaaagtgtata

SEQ ID NO: 442467 - DNA, 122 bp, Homo sapiens
gtttcactgcgtcttcaccacaaggacagccactggctccgtctttagatgggaaaactgcggcccggcgacttttgctagttggaaaggtgggtcagtggtggaattaagtcacacttagg

SEQ ID NO: 442468 - DNA, 122 bp, Homo sapiens
aaggtaggaaaatgccaccctcagggcactggttgggctaaaggtgacactggcgtctcacgggctatgaagacggaatgcctcttaatgccggaattccaagacggaatgcctcttaatgc

SEQ ID NO: 442469 - DNA, 122 bp, Homo sapiens
tggggcgggcgggtgtgggggcggggcggggcggggcgggggctgcgctctgccctgtcgcgggtttatataccctttgggcacttaaccgactgtgccagcccagtcccatacctgtcaag

SEQ ID NO: 442470 - DNA, 122 bp, Homo sapiens
cgatgtttcagggtgagccggacgcaggcgtgcctgcgcagtgcgcggaggagtgctgttcgtgtgttcgagtccctgggttgcttcctggggtctgtggtgctgggtgtgctatctgcgtg

SEQ ID NO: 442471 - DNA, 122 bp, Homo sapiens
ttaaaggcaggctcgagccaagagacgtgatgaattgcaagaatgtgttgtgttcatagccggggagctggcagaaatagcccagctaaaggactaggatggaagggttttttttgttgttg

SEQ ID NO: 442472 - DNA, 122 bp, Homo sapiens
gttttcataacctacctcagttacaataaatatttaaaatgcacattaacatcctcgggccgcacaatcggcctctgtggccccggcccgtgcagatttaattaggccccggcttcccctgc

SEQ ID NO: 442473 - DNA, 122 bp, Homo sapiens
agttaaaaaaaaagatgaaagaatgaaaatggcagactgcctagcagaactagcccttcccgatgtttcattgttgctatagtgacgatccagtctgcacgaagatcccagcttccttaacc

SEQ ID NO: 442474 - DNA, 122 bp, Homo sapiens
tgaggctgcgggtgcggcttctgaagcggacctggccgctggaggtgcccgagacggagccgacgctggggcatttgcgctcgcacctgaggcagtccctgctgtgcacctgggggtacagg

SEQ ID NO: 442475 - DNA, 122 bp, Homo sapiens
gcctgggcctgaaggcagtgggctgtctggcctcctgagtgcccggggagcccacgcccacgcccaggagggaggggcccactcggtgcatccacgcagaggcggctgcgaactcaggcacg

SEQ ID NO: 442476 - DNA, 122 bp, Homo sapiens
ccgggtgcacggcccactgcacctgctgtcactgtctcagagcccccgaggacgcatccacgctggctcacacaccgtggctcacagcagacaggccagagcaggtgttggagaggggcggc

SEQ ID NO: 442477 - DNA, 122 bp, Homo sapiens
acagcgatccgtggaacaggactctgctccaaagagaagtccagccccatgcgtcaacagcgcccccactggtccacatggaaggaactccttaagtagcgacactgtcctatcaatcttta

SEQ ID NO: 442478 - DNA, 122 bp, Homo sapiens
tgtgtttatttccccaataactggggaaactggggaggggcacgaccccacgggagcctgcgcccacctgcccaagtactggacctggggctagcttgccgcttgctccttgccacccgcca

SEQ ID NO: 442479 - DNA, 122 bp, Homo sapiens
gcttcggaaaaagcggaggccccaggcacgggaggccgatgcctggcgggcagcttccgccggccctggcttctctgtggccgttcgaagcagcagttccgtcagccgcttcctcgggcggg

SEQ ID NO: 442480 - DNA, 122 bp, Homo sapiens
agaaagggtgggcggggaaaaaagaaaagtgctttgcaagttcattttcgttgtcaggagcgctggtggtttactccacagaggcaggaaaacttcagtcacgaggcgaataccccactcag

SEQ ID NO: 442481 - DNA, 122 bp, Homo sapiens
cgcgggcggggagggcggcgcagggcagcgggtgcggtgacacctgtgggcacaggtgagcggcgggagggctacgcggcccgggggcggggcggccgggacccggggcctggaagccgggg

SEQ ID NO: 442482 - DNA, 122 bp, Homo sapiens
tggaattgacaaagagggcagggggtcgggggtggatgggaaaggcagcacctcaggatccggtcacacagttgggttgtgatggattcctataatgttgatgatgcagataatgcctgtgg

SEQ ID NO: 442483 - DNA, 122 bp, Homo sapiens
tgcaagtgtaatgaatgaaggggcaagcagtagaaagtggacttaaaggggagacaggtgcgacagccttttggatttcattcaaaggtcaacaggcagctgagaaagggttttaagccaga

SEQ ID NO: 442484 - DNA, 122 bp, Homo sapiens
cgcgcttcctgcagccacgtggctgcggccgggaattcagcggcccttttccctcccgaccgggacccaggacccctgtccccaccgcgccttacctcgcggtcctcccagagcggggcggg

SEQ ID NO: 442485 - DNA, 122 bp, Homo sapiens
gatcccgccctattatgggatgcctctgcactgacatttcaattgtgttttcctggttcccggccacttgatctctcctctcctctatctcccacttccccggctccggctcaaacactggt

SEQ ID NO: 442486 - DNA, 122 bp, Homo sapiens
ccgtggctttgatttttgcacttgcttctccattactaattggtagagaccgtggactgtcgcttcatctctctgagcttcagttttcttatcactggcaggtttggggatcgaatgtaaga

SEQ ID NO: 442487 - DNA, 122 bp, Homo sapiens
taaacagatgagtatagctagttccaataaagctttatttgtgaattctgataattttcacgtcatgaattattagtctttgatttcttttcccaaccatttaaaaatgcggaaaccattct

SEQ ID NO: 442488 - DNA, 122 bp, Homo sapiens
gacctctaaagcagggactgtccgcccccctccgccggggaaaactaaggctcggggagacgaggtggcctgcccaaggtcactcaggagtggttccgaaggaagctagggtgccagaccta

SEQ ID NO: 442489 - DNA, 122 bp, Homo sapiens
tcaggtattaagacttggggcatcgtgtgttgctgcagaacttttcatcagggacactttcggcctcaggaaattaatcttcgaatggcatgagatgcatgggggcacttgagcactttgca

SEQ ID NO: 442490 - DNA, 122 bp, Homo sapiens
caactggattggacttggaggatcctgagtgccgccagattggttggggatgctgaagtgcgcaggacgccgaggctaaggggcaggaagggacggccagcatgcagcgccacgattcggtc

SEQ ID NO: 442491 - DNA, 122 bp, Homo sapiens
ataaagttttattgagccatagccatgctcattggtttatgtattatccagagctgctttcgtgctaccacataaatagcatagtgaaataggtgtgacagagaccctctggccacaaaacc

SEQ ID NO: 442492 - DNA, 122 bp, Homo sapiens
ttccctggtgtggggtgtttttcaagccttccagccacagctgtctcccctcaggctggacggctccggggtgacagggcttcaccctctgcctgcagacccctggtgggcacatctcacag

SEQ ID NO: 442493 - DNA, 122 bp, Homo sapiens
ttcattgccgtgccatgcatatttctgaggggaatttttttggtcgaaacgaggactcttcgattgaccagacaggcactttccaagggtgccacgtactgaggaatgcggtcggagcgtgg

SEQ ID NO: 442494 - DNA, 122 bp, Homo sapiens
agctttgcttacccaacaaagcaccttaacatgtaggtaagttattaacattttaaaatgcgatgtggagttttattaatgtattgttttgctttcagggatggcacaaaagaaatatcttc

SEQ ID NO: 442495 - DNA, 122 bp, Homo sapiens
gaggtagattcaaaatggggaggagagggcacgaaacagagtgtcaatctagagaggtaacgtgggctagtcgttctccatgcactagtttgagtcccatttgacccgggctcaaattctgg

SEQ ID NO: 442496 - DNA, 122 bp, Homo sapiens
ctatctggatgggtcctatcttactctgtgctgatgaggtaggtccctgctctccctccacgtcccagagcttggacccactgaggatgccatgacaccccacagaagggctccactctgac

SEQ ID NO: 442497 - DNA, 122 bp, Homo sapiens
tgacacagctcaccttgacgggttggtattgatcccgccctgcaccctcgcaggagctgacgccacagaagcttgcacagcacttgctctgagtcatggctcccactccactcactccagga

SEQ ID NO: 442498 - DNA, 122 bp, Homo sapiens
cacgccccgcccagcgcggggccgccgccgagagcccccgggcccgggcagagctcggagcgcctccatccccggaaccaggggactccctggagtgctccggtccaggctacgatcgaggc

SEQ ID NO: 442499 - DNA, 122 bp, Homo sapiens
atgaatttcatgtcacaaagcttctctcaagagctctcgtagtggcctgtcaaccactttcggagaatgagccaggtcagtcactgggaggacctgtgaaagaaagttggtcactgagtgcc

SEQ ID NO: 442500 - DNA, 122 bp, Homo sapiens
ctaaagagggctgggacgtacgttccgaaatggctgctgtcaggctaggaaagcttggcccgccggtcctcctctgctttctccgcctacttgggtcggcgaacacttccgccttggtgccg

SEQ ID NO: 442501 - DNA, 122 bp, Homo sapiens
aatggcagctttggccttgctctagttgacctccccaaagataagacttagtgagacgcccggtaatagggttatcccttcttcctgacagcgtctaataaagagcaaaaccttgcttcctt

SEQ ID NO: 442502 - DNA, 122 bp, Homo sapiens
gtgccgatgaggacgcggtgccgatgaggacgcggtgctgatgcggtgctgatgaggacgcggtgctgatgaggacgcggtgctgatgcggtgctgatgaggacgcggtgctgatgaggacg

SEQ ID NO: 442503 - DNA, 122 bp, Homo sapiens
tagctagagattgaaatcttatcagccttcagttttgcaatggtgtgatgaagaggcagacgctactatcaggcagttcccataacagggctaggtatgccgtggtcattggatcctactat

SEQ ID NO: 442504 - DNA, 122 bp, Homo sapiens
tcgtcccactggccaataagctctggctctgccgcacggatcgctgggagtggtagtccccgtaaaaccaccgaccgcaagcccgccacattttccctcccttaagcacttgagctctttcc

SEQ ID NO: 442505 - DNA, 122 bp, Homo sapiens
cggccgggcgccccgggaggagtttccggcgcggggcggggtcgggggcggggtcgggggcggggcggggcggcgggtgggccccaccccccagctgagcccggccgggcggactcggactc

SEQ ID NO: 442506 - DNA, 122 bp, Homo sapiens
ctttgtttataaaatgatacgcttcattccagtgggcgaggaggtctgtggtctcttcatcgtagactcggatgttatgatatgcaaataagccaggaaaaaaattatcgatttctctggta

SEQ ID NO: 442507 - DNA, 122 bp, Homo sapiens
caaagagtaagacttacaatgcagattcctgaccattatttagaaaatctctggccagagcgagactctgtcaaaagaaagaaaaagagagagagagaaagagaatctctgatccattgagt

SEQ ID NO: 442508 - DNA, 122 bp, Homo sapiens
gcgcagcgcgagtccgggaccagccggcgagaaagcgctctgcaaacttctgcgctgcgccggccggcagcacagctgggtacccggctgcgtccgacatgcaaataaccccgggcggctta

SEQ ID NO: 442509 - DNA, 122 bp, Homo sapiens
cctttggctgaaagcaaatatggctccgtgtgcggtttctgcaacaaaggctgggcgggccgggtttccctagggatggggaccgcctccccggggagtcgtgggggtgagccaccggggcc

SEQ ID NO: 442510 - DNA, 122 bp, Homo sapiens
aaccatcgagatctttgaagaaccagctagcctagaggagccagaacatctcgctcctcgcgcgtttccgtttccgctaggactctggcagttggtgagcatcatggcaaccgttgtaagtg

SEQ ID NO: 442511 - DNA, 122 bp, Homo sapiens
cagagtcatcttggggttgcagcctgcctgagcatagcttagtccccgctcatccaccctcgtttcctggccctgtgctccctctcccactatccaggcccagcacctcggctgcgcctggc

SEQ ID NO: 442512 - DNA, 122 bp, Homo sapiens
ttctgcgtcttcccggaccccgctctttcttcgctacccctcgaggtgccccggcccgcgcgccacattgttctggatctcgggctgggcgcctgtgcccctccctgcatgctggacctgcc

SEQ ID NO: 442513 - DNA, 122 bp, Homo sapiens
ccagcagggacgccctgggggcgaggtgcagcctccggcctttactggtgtactgcaggccgccaaacagaaccgagaagacgtccaccatgaggacagagatgccactgtgcaggaggatg

SEQ ID NO: 442514 - DNA, 122 bp, Homo sapiens
aaatttgcatttccacggtgatttatgatgtctagctccttttgctatgttgatttgacacgtggatatctgcttctgtgaagtacctatccaattatttttgcccatttttctagtatgtt

SEQ ID NO: 442515 - DNA, 122 bp, Homo sapiens
ttttcctaaatactccggaaggtctcaggcctctgacactcctccaggttccgcagggctcggcggttctgaccggcccgcagcagcagtcccatcagctggtttccctgcagcagctccag

SEQ ID NO: 442516 - DNA, 122 bp, Homo sapiens
cccagtacgtatacctcgttggcggccagcgtcactcgcctcaggcggaacagctgagaccgtgtcgcgcaaaaggagataacaggccgatactaactagactaactcgacttccggacagc

SEQ ID NO: 442517 - DNA, 122 bp, Homo sapiens
cggcgtagcggcccctctctcagacagtcgtctgtgcgccgtgagactttggacctactgcgcaggcgtcatcctgttggaacctggtcagctgggttagagagatcgctacatgccagcct

SEQ ID NO: 442518 - DNA, 122 bp, Homo sapiens
cctgccccttccggggcaggtctccgggaggggcaggtccgcggcgtgcctccaacccggcgcctgcagccccggggcaacaaggtgtggggtttttaattgagaagtttttctctctgggc

SEQ ID NO: 442519 - DNA, 122 bp, Homo sapiens
ggttcactgcgtcacctgccagaaggtggccatcaagatcgtcaaccgtgagaagctcagcgagtcggtgctgatgaaggtgggtggggccggggagggaggcggggccggcggtggggtgg

SEQ ID NO: 442520 - DNA, 122 bp, Homo sapiens
ctatatttgaacttaaagatctttatgttagaatggaatctatccatgttccagcttaggcgaagcccttctgaagatatccattccttccttcctcatcaaattttccttcttgactagat

SEQ ID NO: 442521 - DNA, 122 bp, Homo sapiens
tttcacttttccagtagccaccatttggttaacagacatgaaaacaaaccttctgacactcgccccactggctgtctgtcttcttctagctgggaactctgataatggggtttccctctcca

SEQ ID NO: 442522 - DNA, 122 bp, Homo sapiens
tctcaggagacagaagtgaaagtggcagctggggccttgggggcgggtcagcttgagagccgttggaatgagcataatgccaccagtgctgggtctgggctgcctgccattgcagcgggtgg

SEQ ID NO: 442523 - DNA, 122 bp, Homo sapiens
agtgcacccattaggttgtcacgggttccctcctgtggccacagccggcacagcactctgcggcacagtttgtgggtggagattctgagttctcgaccaagacccacatagcctccaactcc

SEQ ID NO: 442524 - DNA, 122 bp, Homo sapiens
atcacagacaagaaacttcccataattcaaagggagaccatttccttattagcaaaggtgcgcattacagtatttcatgacagttaaaaattacacacctaccacctgttttggtcaatctt

SEQ ID NO: 442525 - DNA, 122 bp, Homo sapiens
tccactgcacagtcacatgacattgcagcactgccgtggcaatggcaagactgtgacacacggcggccccacgcggtctccactgcacagtcacgcgacattgcagctgtgccatggtgacg

SEQ ID NO: 442526 - DNA, 122 bp, Homo sapiens
ggcttctaatttttttaaggaaatgtcttttatttcctttggccactgtgattgatttcacgatggatccatgaaccaagaaaggcaatcaaggctaacaagtttcaatttcaggactactg

SEQ ID NO: 442527 - DNA, 122 bp, Homo sapiens
agccaagtggagctgaaactggagttcctggggtttggtcagcagctactggtgggcacacgtggcaggtacatgtgggggcatctgtgcttctcaaagccagctggggttccagcaggcac

SEQ ID NO: 442528 - DNA, 122 bp, Homo sapiens
ggtcctgagccctgccctgcagggagatggctgaggcctgacgagaattcaagcgcggcgcgggtgggcctgcagtgctgggggacccggcgcaccctccgcagatgctggcccaggtgcta

SEQ ID NO: 442529 - DNA, 122 bp, Homo sapiens
ggggagcggggagacttcgctgggggactctgctcctgctgatagaagagaagaggagcgcgctatgggcgtctagtgacttgaggctgatagaaaagaaggggcccctggccaggctccat

SEQ ID NO: 442530 - DNA, 122 bp, Homo sapiens
gttttgtagaaaataggggtgaggtgcgtggaccccaaagcctaatttcccagcagaaatcggccctggaactagaactccctgatccccagaattgcagctgcggatggaggtccggttcc

SEQ ID NO: 442531 - DNA, 122 bp, Homo sapiens
agctcacaggtcatacaaaagctggcaaacggctggcttcgaaccgtcctggcttcgaaccgtggctgccatgtgcctcccgctgctctactcgcctgaggttgaccctggtaagcggttgc

SEQ ID NO: 442532 - DNA, 122 bp, Homo sapiens
gaccgtagccagaggactgtcctgagcgagactctcggtgacctaagccagaagagtgaccggagccagactcatatgggccacggcttgaagaccaccctgagccagacctatatgggcca

SEQ ID NO: 442533 - DNA, 122 bp, Homo sapiens
tcaagaagtcgaagaaatcggggtggcacagaattacacttcatggccacacagaagactcggggcttcgcaaacccatcaaaaaaagcaacccgaatggcaacatcaatcttcggtggttc

SEQ ID NO: 442534 - DNA, 122 bp, Homo sapiens
accagattctgctttctctcagctctgtctgccaggagattaggcagggttggctgacagcgtgccccgcccggcagctgctcgccctccaggatgtccgcgccgtggggaagcgggggtcc

SEQ ID NO: 442535 - DNA, 122 bp, Homo sapiens
actagccatagttttacttcccataaaaagcttatgtgtcggcccgggcatggtgactcacgtctgtaatcccagcactttgggaggctgaggcgggtggatcacctgaggtcaggagttcg

SEQ ID NO: 442536 - DNA, 122 bp, Homo sapiens
ataaatgcttaagttaggagagcagcgggctgaagacattgccaagggggcgggcccggccggtgacgtgagcccgccagtccggggcccgcggccaatggcggcgcagacagggcggccga

SEQ ID NO: 442537 - DNA, 122 bp, Homo sapiens
atgggcccaactgactttgcttcgctctcattagccggtggtcctccaggaaagcggggccgcctctccgctgtgctctcataggcccaggttcttgcgttcgtgtgtccttctctcactct

SEQ ID NO: 442538 - DNA, 122 bp, Homo sapiens
cagaacacgttgcccacctcgcaagtatgcagcccaatcagtccccagggtctcggttcccgttgcgcccttccccatggccactgcgctcattcatgagcctagggtgatcaggcctccgg

SEQ ID NO: 442539 - DNA, 122 bp, Homo sapiens
gcgcggatctcaggctttgtagcgaggttgcttagggaggagggagcggcaggacccaggcgacgtgactgcagtcaactaactggtgtcagaacctcaactacccgccgtctttttttttt

SEQ ID NO: 442540 - DNA, 122 bp, Homo sapiens
gaccatcccccaccctggaaacagccgtctgcagactaaactctgccccacctctggcaacgggacctgaccctttcagcacaagtacattcaattagaggaagaagctcccacggtggcgt

SEQ ID NO: 442541 - DNA, 122 bp, Homo sapiens
gctctttaagttttctggggcgggtttccctgatggtttggaggttgcagctgggtccctcggggttccctggggctcatgcaagaaggaagattcactcaaagtggtgtcctgggagtcag

SEQ ID NO: 442542 - DNA, 122 bp, Homo sapiens
tcccctggaactatttattatttcttcctttaacaaaagaatagcctcacagggtgttgacgacactgagtagctcataacatatgactgcttcagtgcaaaggagatgtggcgaaacagtg

SEQ ID NO: 442543 - DNA, 122 bp, Homo sapiens
ctgacatgcctgcctctcatccctccatgctgctgaccgccacagctgctggccaccagacgccctccctgactgctcactctggttccatggtgacctggctgcctcagtcatggttcaag

SEQ ID NO: 442544 - DNA, 122 bp, Homo sapiens
acttaaaatatcgtaactgtctggaggacaataccccatgctgaggattaatggtcccgccggacctttgattcaccagtgccttttcttcgcccttgacaaattggatttttaggaatggg

SEQ ID NO: 442545 - DNA, 122 bp, Homo sapiens
ccaaagtgatgggattacaggcgtgagccatcgcgcccagcactgattcattctttaacccgagagccattcactttaccttgtccttgtccatgacaacactggccacaggtccaaatgct

SEQ ID NO: 442546 - DNA, 122 bp, Homo sapiens
ctatctcgtagaaccttccatgacttgcccccagtgtcttatgtataatgttcatggtgtcgatatcatgataggtgttcctagatgtgatggtgtctgttgcacacacatgtggtggtgtg

SEQ ID NO: 442547 - DNA, 122 bp, Homo sapiens
ctcagtggaggttgtgagtgcccagcagtgtggcctgaatctccgtggggtttagggagacgaaaggaccccagatcgacgtcccctcgttcccactttggggatcggcgctctggctgttt

SEQ ID NO: 442548 - DNA, 122 bp, Homo sapiens
aggaagcgcaaaaagggaactctcaggcagcactgtccaccaggaagatgatgcaggccacgtgtggaatttttcatttttagtagccatattaaaaaagtaaaaggagggccgggcacagt

SEQ ID NO: 442549 - DNA, 122 bp, Homo sapiens
gtagttctttcacctcggctgggcgcctagaaaagcctagaaacagctccttttttcttccgcctccgagtcttcgcgtcagcgtcctgcgcagggcccttggggcgaatcgcggtgcgcgt

SEQ ID NO: 442550 - DNA, 122 bp, Homo sapiens
aataaatactaagggaactcagaggccggtgctggcgtggatcctccgtatgctgaatgccggtcccctgggcccctttttctttctctatactttgtctctgtgtctctttcttttccaag

SEQ ID NO: 442551 - DNA, 122 bp, Homo sapiens
tgaactctgcattcctaacagtagaggggctcgtgttcttgtgcatagatcacacttcgacgggcaatgttctaggtagaattggagctcagtggaaaggcagatccctgacagcttgaaca

SEQ ID NO: 442552 - DNA, 122 bp, Homo sapiens
atgatttatttgtaattttctgtcctgctttactccttcataatgaccattgtattagtccgttttcacactgctataaagagctgcccgagagtgggtaattaataaaggaaagaggttta

SEQ ID NO: 442553 - DNA, 122 bp, Homo sapiens
tagattctccttcctgcaatgctaaggggtgaatctcttttgcgggagactggattctttcggtgtgtgttttgctctctgggtactctttctgtagtcggctaacagaggatgaccaagcc

SEQ ID NO: 442554 - DNA, 122 bp, Homo sapiens
caactttcatagcctttcacaaaggtgccagggtttctccattatcaatagggaaaaaaacggtcagaggatgcttcctgggtctcagagctgtgacttgagaattgagtgggggagagggg

SEQ ID NO: 442555 - DNA, 122 bp, Homo sapiens
aaggaagggcagcttctgaggggctatgtagggtccatccagccacacggtgtgttctttcggtgagtgaggggggctctgcacccggacccaagtgccttccctgagcctgtgttgctctg

SEQ ID NO: 442556 - DNA, 122 bp, Homo sapiens
tcaacgccaagtgtgatctcagtttaacctgccctggtagatatgcatacacttcccatgcgcaccatctcatgtgatcgtgtccacagctttgtgagttgagaggggtgggagtgattatc

SEQ ID NO: 442557 - DNA, 122 bp, Homo sapiens
cagttgaaattacatctgaaatacttgccatgaccttataagtgttctacactattgggccgggtgcggtggctcatgcctgtaatcccagcattttgggaggccgaggtaggtggctcgca

SEQ ID NO: 442558 - DNA, 122 bp, Homo sapiens
catgagggccccctccaaggactcgtggcctcccgcattgagacttatgggggccggcatcgagcctctgctcagagcactgctggcagactctatccccgaggataccctgtgctggtgag

SEQ ID NO: 442559 - DNA, 122 bp, Homo sapiens
tccaatgtgtctgcggatgcacagcactcagcacacagtaaaggtgtgtagctgaataaccgcatcaacgccctgggttgcaggaggaaggaaagactgggcacccctaaggtgctgttgtc

SEQ ID NO: 442560 - DNA, 122 bp, Homo sapiens
cgcaccccacgcctcgtcgttccgtcacgggcgcgctcagccactctgcgcacgctcgcgcggtgacacgatggcacgtggcccgctcctgaccaacagcctgacggcctgctcctgggcgc

SEQ ID NO: 442561 - DNA, 122 bp, Homo sapiens
gtcagtttccgatgagaggccactagcaagggatacccatcaccaccagggagcagaatccgttccagggattggggtgagtccgacttcgagcagcagctgccccccaacatcatgtaccc

SEQ ID NO: 442562 - DNA, 122 bp, Homo sapiens
gtaaataaaaaagcatgaatgatgtttactttagaatggtagtttgcttgccttgctgagcgttctctgatatattgtttttctgtttaggaaacagtagcaaattcactaattgtctttag

SEQ ID NO: 442563 - DNA, 122 bp, Homo sapiens
ccaacgctccctggcggcgcgcgcaccccctcagccagtcctggagcgccgatcggcgcgcgcccagactcctcggaccaatcagcggagctccctctccgcagcgtgtgaggagggcgaaa

SEQ ID NO: 442564 - DNA, 122 bp, Homo sapiens
ctttctcaaataggctgtgtttgtttaagatttgaatgatgtctttattggcctataagacgcttggtactctttctatgcatgaaccttttatgggtaatcagagatgagacagatattgt

SEQ ID NO: 442565 - DNA, 122 bp, Homo sapiens
caccttcaccagggagcttccttgtcctcctgggaaaccttgtccaggatcagctctccccggggggtctgggcttctggttggcctcgcccccttcccccagctcctgatccagggagagc

SEQ ID NO: 442566 - DNA, 122 bp, Homo sapiens
tgcacttggactcaaacccaaactcctctctatggctgacaaggccttgcaggatctgcccgcccccagccctagacatcacctcttccccatcttcacacagtcctctaggcttgaaatat

SEQ ID NO: 442567 - DNA, 122 bp, Homo sapiens
ttccaggctgggaagagaatccagagaccagaaatgcaattgacaggctaagacctctggcgagaaaaaaaattgtggctgttgctttgtttggtcagttcacatatgaggatttaatatat

SEQ ID NO: 442568 - DNA, 122 bp, Homo sapiens
accattgctaccgggtcggccccgcagggtctgagacccgcacccttccccggtcccacccgtcaccaggccgcccgcgtagccaggaattcttagccaggttcctgtgcgcccaccgtgac

SEQ ID NO: 442569 - DNA, 122 bp, Homo sapiens
gccagcaccttagcatgaatcaagccattgtcaccaaactctgctagtagtcattgtgttcgtcatcatcatgcgcttccagtgtaaactttaaaaaatgccagtttcatttaagaatgtct

SEQ ID NO: 442570 - DNA, 122 bp, Homo sapiens
tggggagtgcctctgccccgccgccccgtctgggatgtgaggagcacctctgcccggctgcgaccccgtctgggaggtgaagaacgtctctgcccagccgccccgtctgagaagtgaggaga

SEQ ID NO: 442571 - DNA, 122 bp, Homo sapiens
cgtgggctacaggattaagtactggcgctcagacctccagtcctcagcagtggcccaagtcgtcagtgaccggctggagagagaattcaccatcgaggagctggaggagtggatggaatacg

SEQ ID NO: 442572 - DNA, 122 bp, Homo sapiens
tcaaacctggggtgccattactgactcctcctctgaagggcctgtggctctcaggagaggcgctgtgctacaacaatccttccattctttggcttggtcccctccattagtggagggcccac

SEQ ID NO: 442573 - DNA, 122 bp, Homo sapiens
agccgctgcctgggcgagggtcggggtgatctgctggatctccggcagcatcctgcagtccggcccaggagagaagtggggaggcggcggtgggggcggggcggcgtccggctctgagagag

SEQ ID NO: 442574 - DNA, 122 bp, Homo sapiens
ttcagctatagtatgatttgccaacctggtttattcaaatacacctgcaaagagaggtaacgaaggtttcacaactagagatgcaaagagatgcaaagagatgcaatgagggttactcatca

SEQ ID NO: 442575 - DNA, 122 bp, Homo sapiens
gtgccccgtccccctcaccgtcccgcgctgcaagccaggcaggctcaccttaggtcgggtcgtggcctctgaatccggccctggggaaagacacagcttcctgcttcagctcccacaggccc

SEQ ID NO: 442576 - DNA, 122 bp, Homo sapiens
cagcaggaacaccgcgacgctccactgctgaaccagtctccgctgcatcgtctccgctcgcgctcgggacctgcaacagaagggaatgggacccgagtgtcagtctggactctccatctccc

SEQ ID NO: 442577 - DNA, 122 bp, Homo sapiens
gtaataaactaatcgtgtctgtacatttcccaacagaatttgggccaccaaatattttcacgtacattatcccattgattctcacaacaacactgtcaaatagtaaagggattcttcttttc

SEQ ID NO: 442578 - DNA, 122 bp, Homo sapiens
acgctctgaagggacgagtgtcggtgtggcaccggtgcacgctgaaggagccggcggaaccgggtggccatggggatgtgggcatcgctggacgctttgtgggagatgccggccgagaagcg

SEQ ID NO: 442579 - DNA, 122 bp, Homo sapiens
gctcctgggcgggcactgtgggcagggcccagccgttcaggagggggacagctgtgctggcgaggaagccctctgggcagatgtaccaccagttggaccctctgtcctaggacatcccccag

SEQ ID NO: 442580 - DNA, 122 bp, Homo sapiens
agagcgagagtccatctcaaaacaacaacaacaacaacaaaaactcaataaaattttagtcgaggccaagcgcggtgactcacgcctgtaatcccagcactttgggaggctgaggcgggcag

SEQ ID NO: 442581 - DNA, 122 bp, Homo sapiens
tgaggagccacgttttctaggttctgatctcccctctgccaatcaccggctgtgtaacctcgggcaagttacttaaccactctgctcctcagtctcttcatctgcagaatggaggtcttagt

SEQ ID NO: 442582 - DNA, 122 bp, Homo sapiens
gtggggctgcctgtgttggctggcgaccagcaggattgctccaggattttgtgtttacctcgcgtgaagttcagcacgtgctgtcgtgtagtcagcttctactctaatttctgttacagttc

SEQ ID NO: 442583 - DNA, 122 bp, Homo sapiens
ttgaaagcatgtatattatccactatgcatgttaatgtaggaaaccaacattaggataatcggtctatctcggtgatactcagcatcacttttcagattcacattctgaggtttggtccttg

SEQ ID NO: 442584 - DNA, 122 bp, Homo sapiens
agcatcagatggctaatatcaaaaaacagataataagtgttagtgacgatgtagagagaccggagccctcttacattgttgatgggaatgtaaagtaatgcagctgccttggaaaacagttt

SEQ ID NO: 442585 - DNA, 122 bp, Homo sapiens
cgtccacgcccctgctcccgcgccttcgctccagttctcgtgcccccgcccctccccccgcgccctttcccagtggttgcaataacggacttagaggtctggacaattcaagtaaggaacaa

SEQ ID NO: 442586 - DNA, 122 bp, Homo sapiens
gggctgggattacaggtgtgagccatcgtgcccagccaggacaaactttttagggccgggcgcagtggctcatgcctgtaatcccagcactttgggaggccaaggcgggctgatcacaaggt

SEQ ID NO: 442587 - DNA, 122 bp, Homo sapiens
ggtcaccctgggaagctgactttcctggcttttctttcctgcaccagggactaaaacctacgtccagccattgtgccagctctcagtcagccagcctgttacttttgggcagtactcattgc

SEQ ID NO: 442588 - DNA, 122 bp, Homo sapiens
cccctgccgccggactcagattcggactcagacgcaggctcaggcggctcctcgggcctgcggctcacggcccagctgctgcttcctggcgaggccacccaggaccccccgctgcccaccag

SEQ ID NO: 442589 - DNA, 122 bp, Homo sapiens
gtccagctctcgcactctcagatgcaaacttccacacaaactcctcggctcgccttgtcccgcgggactagcatatcaagccttccgggacacaccgtgcgatgatatatacgtatataccc

SEQ ID NO: 442590 - DNA, 122 bp, Homo sapiens
aacatccccctgagtctggcttttagaaaaatatgcaaagcgtccgggcgcagtggctcacgcctatgatcccagcactttggaaggccgaggcgggcgcggtcaggagtttgagaccagcc

SEQ ID NO: 442591 - DNA, 122 bp, Homo sapiens
tgagataatcaactgagttttagagccacacacctgattcttacaaggcacagcaagcagcgaatatttatgtatctaaactaccattgcagtgtaaactgtggacatttcgagggacattg

SEQ ID NO: 442592 - DNA, 122 bp, Homo sapiens
gactgaagaagggagcccaggtgctttgcattttctctgtaaaaggggtgtgcctgcagccgggggcagaaagggcagcgttcatgtccctgagctacagagaccggcagatcctagcctca

SEQ ID NO: 442593 - DNA, 122 bp, Homo sapiens
ctctttgcgagaccctgtttggcgaacatcggttggggagggaaatcttggaggtagaaacggctgaactattgtggcattccttggcgaaactttcggtacaaatctggtagggaaaaaca

SEQ ID NO: 442594 - DNA, 122 bp, Homo sapiens
aactcctgacctcaggtgattcacacacctcggcctctcagagtgctgcgattacaggtgcgagccaccgcacccagccaaggactcttaagtgtaactgatccaccctacttttctccctg

SEQ ID NO: 442595 - DNA, 122 bp, Homo sapiens
ggggtggaggtaacaagagtcagcctcggaggtcctgaggcctctcctgccgccccaccccggtacaccgaccgacctgcagctcccccactcggtttctccgcggtattcagaactctctc

SEQ ID NO: 442596 - DNA, 122 bp, Homo sapiens
ccctcataaactttttatagcttaggaaaataaacatgtggtttaaggtctttgcataggcggtgctcgctgagtttgagcttgctttacagaactacgaaagaaaatattggtagagctaa

SEQ ID NO: 442597 - DNA, 122 bp, Homo sapiens
gcagacgggaatgcaaccttatgttctcatccttggcctgaggctgaagcctctgctttccggaagtacagtgagtttctgggtctctgctacctccagtgtgatggtttctgcaatatttt

SEQ ID NO: 442598 - DNA, 122 bp, Homo sapiens
taaccttatacacacataaaaaatatttctgcaaggacaccagctcagtaactgcctgtccgaccttggactggcgccacccttcttagtgatcctcctaacccaggataattatctcaaga

SEQ ID NO: 442599 - DNA, 122 bp, Homo sapiens
cgcaggatgaagggaggacacgagggtcggtgtagttctagaagcccgcactcacactagcgcgtcctccgtcccgagccgccacccgatatcccgacgctctgaggggatggcggccccta

SEQ ID NO: 442600 - DNA, 122 bp, Homo sapiens
tacttgctgttagcagtgaagttacacggcctgtgagccgcgggggctggagatgcaaaccgagcttgggtttcttaagtgggtaggagtggagatgtatatgcgaaggagaagggattagg

SEQ ID NO: 442601 - DNA, 122 bp, Homo sapiens
ctaatcccaacagctcctcaaaggctcgaagccagcctgagtgggccacttgaagagccacgggctgtgggaagatacggagaggctactccgacgtggggaggaggtaggtatgacgatgt

SEQ ID NO: 442602 - DNA, 122 bp, Homo sapiens
gaccagtgtggtcaacttggtgaaatcccatctctactaaaaatacaaaaattagccgggcgtggtggcacatgcctatacttgggaggctgaggcacaataatctcttgaacccgggaggc

SEQ ID NO: 442603 - DNA, 122 bp, Homo sapiens
tcgcggacgcaagtcgggccaacgtagcttctccctggcggtcctcctccggccccaggccgtctttaccacccctggaaccttgctgagttgacgccactgagctgcgtctcacacccacg

SEQ ID NO: 442604 - DNA, 122 bp, Homo sapiens
aggcaaaaagcctctctctccttccccactggccagggagtctggattcagggaaacaagcgcaacttttgcgactgtcccagctccgcgctgcagtaggtccaggggccctaaaactcgtt

SEQ ID NO: 442605 - DNA, 122 bp, Homo sapiens
tatcttcgatgccggaggggagagcatttcccacaagccaggtggaggcagcgggagacgcgaggaagtggacaagaccgaaaaacaaccctcgggctctaccagggtttgtaatatgctat

SEQ ID NO: 442606 - DNA, 122 bp, Homo sapiens
agaatgagccgtgtgaaagtgcctatccaactgtagtaggctcgcagcaagagtttaaatcgtttttattcatctccggtcctaacttttgccgctgctctgtgttccactcttctatcatc

SEQ ID NO: 442607 - DNA, 122 bp, Homo sapiens
actttttccatgttttttgtttgtttgtttgtttgttttgtactcattaaacacgataaacgttcagccaaggaataagggaaaaatgcactttggaggcatggagaagagttagtcaagat

SEQ ID NO: 442608 - DNA, 122 bp, Homo sapiens
cagtgctgcggggaccacgggggccggggggcggcaggcaggggctgacacacttctggccgcgtttagggaatccggtttttcattttggcccaagttgagccccttcgctttctctttgt

SEQ ID NO: 442609 - DNA, 122 bp, Homo sapiens
cggcagttacctccttcctccggctcggcgccccgggtcgggtgatgagggccgtctcctcgcacaccacggccacgtcctccacgaagacgcagtccggaaggctctcgtcggccggcagc

SEQ ID NO: 442610 - DNA, 122 bp, Homo sapiens
agccatcgccaacttggaggggcggggcagaaccagggggcggggcctgcgtggtgcgtgcgtgcgcgttctggaggaggcgccgccgccgctcccgaggcccctgccgccgccgctcccgc

SEQ ID NO: 442611 - DNA, 122 bp, Homo sapiens
ggagcctctcactccagaggaggcctctgcttcttgaggagggaaggagatgggccttgtcggatgccctcagatctccctagactgtgggactcttatcccaggctggcctagggctcctc

SEQ ID NO: 442612 - DNA, 122 bp, Homo sapiens
ccggggccccgcggttggtccgggagcccccagtcggcccctcagcgccggctccgggcccggccagtacctgcagcgcagcatcgtgcccaccatgcactaccaggacagcctgcccaggt

SEQ ID NO: 442613 - DNA, 122 bp, Homo sapiens
tattggatacggacagaacacccaaaggccaaggagcttgcacttcgtggagctcttaggcgggctgttccacagttgtgtgtgtgtctgagtctcctgcttgctgaccaatgtttgagggt

SEQ ID NO: 442614 - DNA, 122 bp, Homo sapiens
gatctcagactaccaggctccagaactgcgaggggatgccctcctgttgttttaaaacaacgagtttgcagcaccttgtgatgtcagccctagcaagagatgcatccgctgcaacctcactc

SEQ ID NO: 442615 - DNA, 122 bp, Homo sapiens
tggaaacagataccactagaaaaaaacacagagctttattattctcaacaccaatggcagcggtcttcataggacagaggagtgagttctgtcaacagacaggcggcccctacttgccggcg

SEQ ID NO: 442616 - DNA, 122 bp, Homo sapiens
tttcctgtatttttcaatttaaaataattgttggtgttacctgctgcccacgcactcctccgtctgcagggggcgcaccggccgccaccgctcactccttcaggatgatgggcggggcctcc

SEQ ID NO: 442617 - DNA, 122 bp, Homo sapiens
tacagaaagtagatttaggcttgcattcttgtaatcgaagccaccaaacatgtaaaatatcgaaaacacatgaacttaaaagaacgaagccaagccactcctactttcggaaggttgccacc

SEQ ID NO: 442618 - DNA, 122 bp, Homo sapiens
agcgctccctgggcacccgctcgcactcaagtgcaggcagcgtggtgacaatgccaactgcgccccctatctctgacaggctccagaggggcagtgggaatacagtagctacatgtggctat

SEQ ID NO: 442619 - DNA, 122 bp, Homo sapiens
gacagatcctgcttagcccggggcccagcactgagaaatctgggaaggaacgttgctcaccgcacatgggccgtggccccatccttcgggccctttaggtggggaatcgggctagcagctcc

SEQ ID NO: 442620 - DNA, 122 bp, Homo sapiens
ggagcgcgcctgcttgagttaaaaccccagttctgctaattcctagcagtgtacacaggtcgtccaacctctgcctcggtttcctcatttaaaaaatggggataataagagtacccggccgg

SEQ ID NO: 442621 - DNA, 122 bp, Homo sapiens
caaactcccaacctcaggtgatctgcccaccttggcctcccaaagtgctgggattacaggcgtgagccaccgcacctggtccagctaatttttaaaaatttttttgtagagatgggatcttg

SEQ ID NO: 442622 - DNA, 122 bp, Homo sapiens
tgaaacattttccttttgtcgactgtagagagctatgagtcaggtccaagctccactgggcgtatgcccaaggggcagagggggcagcaaccggacggaagctgcccaatcataagaccatg

SEQ ID NO: 442623 - DNA, 122 bp, Homo sapiens
tatatattttgcttggctgtggttgtttttccctgtcacttacagaggctgtgacagagtcgagaacccaggccagcacacatattctcttgtaaggccccgaacagggaaagaagaaacac

SEQ ID NO: 442624 - DNA, 122 bp, Homo sapiens
agagagtatgctataagcctaaccctcagaacttcagaatgtgaccttatatggaaataacgtctctacaaatgttaaaatgaggtcatttgtgtgggctccaatccagtatgactggcgtc

SEQ ID NO: 442625 - DNA, 122 bp, Homo sapiens
ctggcgcagcactagcagggtgggtcacgcgtgcaggttgctagggcaacgtcctgtcgccggcgtcggaaaccaaccagtaactctcaggagccggagtcgggtccgccctgggggcggag

SEQ ID NO: 442626 - DNA, 122 bp, Homo sapiens
ggggaaggcaaacgctgtcacacaggagaggtgtgggtcgtgcacttgtggcttcccgtgcgtgtgtgaggcttgctgtgcccaaccccagcccgtgtggagcccacgccccatgcaccctt

SEQ ID NO: 442627 - DNA, 122 bp, Homo sapiens
ccagccccgaaccctccagaaccaggagagttccccgcaaggacctcgcgcaggaacgcccgggaccgcccaccgaagtcccaggctccccaggcagcagggcaggagaacaccacccccgg

SEQ ID NO: 442628 - DNA, 122 bp, Homo sapiens
ggccattgctgtccaagtggcagtgcccatcactgggcatgaaaatgccgcccaacttcccgtccccagctgtatggaatgtgtcgtctgaagtgaacaccagcagccgggacacatttctc

SEQ ID NO: 442629 - DNA, 122 bp, Homo sapiens
atagaatcttgacacatgcggctggattggacagttctctagtcaagggggatggcattccggctcagactataaatggaatctaaagggtcagggcttcatcaattttttttaactctctt

SEQ ID NO: 442630 - DNA, 122 bp, Homo sapiens
actctcagaggaaatcttatgtcccaattccatactggtccttggttccccttatttcaccgttctccagaggtttcttattattgcccaacattaatcctgctgtaataacttacggtatg

SEQ ID NO: 442631 - DNA, 122 bp, Homo sapiens
cctccgcagccgctggcccgggtgctaagtccttcattgcccggggccagcagggccggtcggctgctcctagtgcgggcccgccaagcccacgccaacccggaactccacctggcccgcaa

SEQ ID NO: 442632 - DNA, 122 bp, Homo sapiens
tcctcttctcatcagtcccaaactttacgctttgactttgctctggtccgaaacccttcccgctttacaccatgcctgctggaccgtggggaaagggaaaatcttccctacgattctgctgc

SEQ ID NO: 442633 - DNA, 122 bp, Homo sapiens
ctgagcttctccttctacctaatccagcaggcaggaggtacccggctccgagtcgctgaacgcggcgctctcctggcgaggctggaggtcgggaaccctgcagtgtcggacccgagctgaca

SEQ ID NO: 442634 - DNA, 122 bp, Homo sapiens
ggctgtgccctaaacaggaggaggccattcacgcctcgcctgagttgtgtccaaggtgtgcgtgtggccaggggtccatccgcttccctctagcccagcccctgaacacagctgcagtgcac

SEQ ID NO: 442635 - DNA, 122 bp, Homo sapiens
attgtaagctccagtacccggctggccaaagaataatgtttggggcaactctgaaattaccgcccaggctgcagtttgggtttgcataacgtcttggaggactgtgagcaagacagaaagta

SEQ ID NO: 442636 - DNA, 122 bp, Homo sapiens
gcccagcgacagctctgttttagacagggcctccaggcctcttagactcagtccctgccacgcacccactcctgccctggccgctgcgacggcataatctcgggatctttgaaggcagatgc

SEQ ID NO: 442637 - DNA, 122 bp, Homo sapiens
cagtaaataagttatgtgtgaaagtgttactgggggaaccctacctgggaggtagggttacgtgggaacagtgtggttgatctttaaagactattacgaaggctgtttaacaagcatgcgtt

SEQ ID NO: 442638 - DNA, 122 bp, Homo sapiens
aggctgtctcctcctgacaaggggccccagtggtcggggccctaaaccagctgtggcaaccgcccaccactggccaaatggaacgctcctcacgtcaccaggtcgctccagtagttgctcgc

SEQ ID NO: 442639 - DNA, 122 bp, Homo sapiens
cctgctctgctgcctgcaggaaggggttcttgaacccaacccagtgcggaacttcctggacgacccccggcgacgcagcgggcccctggaggagtctgagcgggaccgccgggaggagagcc

SEQ ID NO: 442640 - DNA, 122 bp, Homo sapiens
tgggcatagcaggtatgaaaaagaatcagacatgaaacctgtggttgaggacagcatggccgaagggaaaaaagacccagattcttgtaatatactgtagggcgtggtcagggaagtaagtc

SEQ ID NO: 442641 - DNA, 122 bp, Homo sapiens
agtcaatatgcgtcccttctgtctccaacccccccgccccccggcttaccggtccagacccgcagccccgtgttagctcaccctcaatgtccatcaccacgaccagggtgtatttgcctcgt

SEQ ID NO: 442642 - DNA, 122 bp, Homo sapiens
aaaaaaaaggggtgatttcagagatgaagggcagcgaggaggctgcctgctggctccaggcgagaagccaccggtggatcaggaaagtgctttcggaggttagggaaacacttggtgcactt

SEQ ID NO: 442643 - DNA, 122 bp, Homo sapiens
agaaccctgtcactcagttactttggttcctaatttaacctcttcccaagccttctattgcgttcagttagctaggccaggagcttacagctgtctggttggtgctggctcaatgtgcttat

SEQ ID NO: 442644 - DNA, 122 bp, Homo sapiens
acaccacaatggtgacatataccaacacacacaaaccaggtttactggcagccactaagacgtcttccatttccaccccccccaacctttttagaaaattaaataaataactcctatttgat

SEQ ID NO: 442645 - DNA, 122 bp, Homo sapiens
ccagacggttcggcgggagccggggctgggacctgggtgacctgtcgtccgcccctgtagcgagtctccagtgggcatgtttcaggtgggcaggtccagcatccccaaacctgccccccgca

SEQ ID NO: 442646 - DNA, 122 bp, Homo sapiens
acaacccgcagccaccagacaacgcgcagccaccagacaacgcgcagccaccagacaacgcgcagccaccagacaatgcacagccacctgcagcagcccggcctccagagctgtcgagggcc

SEQ ID NO: 442647 - DNA, 122 bp, Homo sapiens
ttcgtcacatgcccctcgctgctggtcatcctgcacgtggcctaccgtgaggagcgggagcgccggcaccgccagaaacacggggaccagtgcgccaagctgtacgacaacgcaggcaagaa

SEQ ID NO: 442648 - DNA, 122 bp, Homo sapiens
agggctctgtgcactcatggaaaggggcatcgtgcctggaaacgcgagcggccattctggcgcagggacagggcctgggcgtctgtgtgtgctcgtgcccagttgagagacttggacggggc

SEQ ID NO: 442649 - DNA, 122 bp, Homo sapiens
tgaggaaccgagtgtgtccagggatgtggcagctgcagtgggcttggctttgtgaggaaccgagtgtgtccagggatgtggcagctgcagcgggcttggctttgtgaggaaccgagtgtgtc

SEQ ID NO: 442650 - DNA, 122 bp, Homo sapiens
ccaccgcccccaggcttcttcagatagtcaccaccaccccggccatcagtggagatttcccggaaaacagtgagcatggagtgccggactctgtcagccagagctgggacgtcatctggtgt

SEQ ID NO: 442651 - DNA, 122 bp, Homo sapiens
cattatggtacaaaacgttctcaccagccccaattcctctccatctaggagggttggatgcgcgcgattttatcggggcacggcgacaaaggagctgaaacgcgggcactcgctggagcgca

SEQ ID NO: 442652 - DNA, 122 bp, Homo sapiens
agacatgtgtctgaaaggaatcctgcaaattctgtcttattgaacaggcataaggtgtcacgtcaggcgtaaggtgtcacagcaggcgtaaggcgtcacgtcaggcgtaaggtgtcacagca

SEQ ID NO: 442653 - DNA, 122 bp, Homo sapiens
aaaggctcggggaaggaggttgcgggtgggtggcgcggacctcgggtccccagccatcggcgctctcccggggccctctgacctcgctccttaaaggaggagggtccgtggcaacggtcctc

SEQ ID NO: 442654 - DNA, 122 bp, Homo sapiens
tcacccgagccgcaaatccccgccgtccgaagggggtgtcgccccgggctgtcggcccagcgtggcttaggccaggtacaaccggcagcgcccgccaagccctgggctagggacgcctgcgg

SEQ ID NO: 442655 - DNA, 122 bp, Homo sapiens
ggccagaggtcagaataccgcgtgttccaacctttgaccccatctcctcaaggttatggtcgccaagacctcagctctgagttgtgctgggaactctccagagggctaaggggaaatgagga

SEQ ID NO: 442656 - DNA, 122 bp, Homo sapiens
ggagaaggtgttcaagggcttggacctccttgagaaggctgccgaaatgttatcgcagctcgacttgttcaggtatgggggaagatagtaataatggctgagaacgaaggtaataatggtta

SEQ ID NO: 442657 - DNA, 122 bp, Homo sapiens
cggggctctcctgccttctgggctccaacgcagctctgtggctgaactgggtgctcatcacgggaactgctggggtatggaatacagatgtggcagctcaggtagccccaaattgcctggaa

SEQ ID NO: 442658 - DNA, 122 bp, Homo sapiens
atgatagtgtagagcacagagataatcttgttgtggttgaaggtgtacatggcccggggccgtgcataggtgaagagagtggaggagtagtagataacaaccactgccagatgagcggcaca

SEQ ID NO: 442659 - DNA, 122 bp, Homo sapiens
cgcctcctgtctccccgcccgccctcaccctcgcacccgcagcgggtgaggagggaccggcgcctctgtctgagactggggctcccggctgctccggctcccggccccctgagctggagcca

SEQ ID NO: 442660 - DNA, 122 bp, Homo sapiens
cgccgccgaccgcgctgcctgcgacctgggtggagctcgcgtggggaggggcggcgggagcgcgcggcgcagcgcggctctgcgcggcgaggaggaggggcggcggcggcgccgccatcttg

SEQ ID NO: 442661 - DNA, 122 bp, Homo sapiens
ctagaggggtgggggtcaatgaacagggcggggtctatgaggctaaactgaggcggggcccgggtggaaagagggcggggctttgggattggccggggctactgtgaggagcctggcgggta

SEQ ID NO: 442662 - DNA, 122 bp, Homo sapiens
ttcctcccgcgacctttgtgcccgtgtctctctctcctgtacctattgcacgaccccccacgtccgcctcctgtcattgccagcaagtgccttgcatgggtacctggctgcacttattaatc

SEQ ID NO: 442663 - DNA, 122 bp, Homo sapiens
atattataaaaatatcttggtgttccctcaacttgttttgtaaattgttctgtctacacacgtgactaagaccaagaacagtgtgtaagaccaagaacagtttcttgcagctgctcatgatt

SEQ ID NO: 442664 - DNA, 122 bp, Homo sapiens
cacgcgccggaggggagggggctggcagccccaggcgtacatccagggtgtcagggcacacgaagattccggatgaggatgagagtgaggtgacatcctccgccagcgaaaagctgggcaga

SEQ ID NO: 442665 - DNA, 122 bp, Homo sapiens
ggaaagccctctctgcagcaaagccgtttgttattctgtgccgaagaggcgaatgcagcccggccgtcccaagtggttcaggtcctaccaacccgcgctatttaccagacatggttatgctg

SEQ ID NO: 442666 - DNA, 122 bp, Homo sapiens
ttcctgaattcacaatacttttgcattgaagatgtccggtccctttaaggtcttgggtgacgtaatgactagccccgccccctctcttctcgcttctcagccctgcccacttctttttgtcc

SEQ ID NO: 442667 - DNA, 122 bp, Homo sapiens
cctgagacaaacgcatggagagcggtgttcaccgccccactatttgtttctatttgtgagcgtctactgagtacagccactctgataaacactcggtgtgtgctctcttgcttggcacgcag

SEQ ID NO: 442668 - DNA, 122 bp, Homo sapiens
gacacgagtggagctgccacgcttggtgagataaagcagacacgagcacaatgtccactgcgtgcgtccgccaatgtgaaacgtgcagggcagacaggtccacaggacagaaggctgggaag

SEQ ID NO: 442669 - DNA, 122 bp, Homo sapiens
tgtagacggggtcgttgtccgtacgactgtgcgccagggctcggggaggggcgccctccgcgtgagcgcccccctgggaatattgaacataatcacctctcattccagactatgttaggtct

SEQ ID NO: 442670 - DNA, 122 bp, Homo sapiens
ctcctccgcatcgctactgctgttactactttccgaatcgctcactgtgccactgggcgccgccatcttgaaccaccgcaaaggattgtggagaacaccgccgttatcaagcctccttcatg

SEQ ID NO: 442671 - DNA, 122 bp, Homo sapiens
tttgggtggcagcctttgcctaaaatatataaacaaagaaatttgggcatatgagacattcgttcaagcttcaaaaggtaatacatataaatcaatgcctggagaaaaactgtaacatcaag

SEQ ID NO: 442672 - DNA, 122 bp, Homo sapiens
ttgctaaaagtggagtccagccttgggtcaccttcagactgtgatgtgagtcaccactgccgcctctcggccatttccgtctccacagccacaaccgattctgtgccatcgctgggagatgg

SEQ ID NO: 442673 - DNA, 122 bp, Homo sapiens
ggccaccttgggaagcacagccaggcttcagtcgtctagaacagagaatgagcatctaaccgcctggggagaggactaggacaccagatgataaggtttataagcccttaagcctctaaggt

SEQ ID NO: 442674 - DNA, 122 bp, Homo sapiens
caacacctccatttcttggtaccaacagctgtatccatcggattaggctagggcatgctgcgggcctctgcttatcaatctctctagaaccacactgatggatatttcatgccattgcaagc

SEQ ID NO: 442675 - DNA, 122 bp, Homo sapiens
ttttgtagcccactgctggagtgtgcattgcttaatcctctgttgctttttaactctcagcgtgtaatgaattaaatagttttttacccttcctgataaggatatttatgagtcagggtggc

SEQ ID NO: 442676 - DNA, 122 bp, Homo sapiens
gggagaaggagtgggcggggcaagggcggggcttcgggagccagggaacttaagcacgagcgctgctcgcggacacccgccccgcctcaagctccctcccgccctggttcgtgggcttccgc

SEQ ID NO: 442677 - DNA, 122 bp, Homo sapiens
cctggagcaggaaggcaggccttaacctctccttctttcctgcagggaatagaacgtgtccgggctgtggccaagcggattggtgaggtccaggtggcttgtggcctgaaccagacggtgga

SEQ ID NO: 442678 - DNA, 122 bp, Homo sapiens
cctgggtagggctgcaggtgacgtcactccgggccttgggactcggagagcgtctggaggcggggcctggacttcacgcccggcgcgctcctcccctttaaggcgcgcggccgggcggggcc

SEQ ID NO: 442679 - DNA, 122 bp, Homo sapiens
cgcccgcaggggcctctgcagctgtcaggtcagctgtgggtgcagaagccgatactcccccggctcaggcttgctgctatctttagcactgtgctcagactccagtggcctgggaaccctct

SEQ ID NO: 442680 - DNA, 122 bp, Homo sapiens
aggattcactcaactcactcgcaaaatgtgagatcactgtggtggttccgcatagagagtcgccgccgcttggagggggagagcccttcttccgagtaccgaggccctgctgctgggctttc

SEQ ID NO: 442681 - DNA, 122 bp, Homo sapiens
gttatcaaccacctgtgtctggtttgaccgttatttcctgcctgtgcatgtccaagagggcgactccgtccttcctttccaagtctttgcacggcttccaacaagggaggctttgttggggc

SEQ ID NO: 442682 - DNA, 122 bp, Homo sapiens
gagtgaagccaccgcgcggaagctccaggtccgcgccgtcgcagaagaatggcgtcacaacgactaagtagcgtaactctcgctcatagggctcagaggcggaagcggaagcacattctgtc

SEQ ID NO: 442683 - DNA, 122 bp, Homo sapiens
aaattcacaaaacatctcctcccatcccagactagaaagaatcctctaaatctgagaggacgagagcaggaaggaatgtaatgaaaggattgtcagcgggctttgaaacgagcctagtgaac

SEQ ID NO: 442684 - DNA, 122 bp, Homo sapiens
catggttttgtggggtgtgtgcctttgaccccggacttaagcaacaagcgtggtcttgggcgtagctacgaggtggttggtgggctccagggcctgcgtgcccctcgacgtgagcgatgatt

SEQ ID NO: 442685 - DNA, 122 bp, Homo sapiens
gcatgtactcacgagcctacatgaacagctacctggatgtactcacaagcacacgcacagcgcactcgtacacacgacacgcacacacgtacaagcacatgcacagtgcactcgtacacacg

SEQ ID NO: 442686 - DNA, 122 bp, Homo sapiens
agaacactcaaatcaattctctctgctgcaagcaaatgtaaccggattgctgcaggggttcgactatgattttccagagtcttagcatcctggatgctacaagcaaagtgaggacaaacatg

SEQ ID NO: 442687 - DNA, 122 bp, Homo sapiens
gaggaccatatgcacgggctgaggttttaccttctgggtcatctcggatcaccagcagcccgttcctgcacacaaccttcccagtggtggcgtcgaggaatattagtgatggaatgttggaa

SEQ ID NO: 442688 - DNA, 122 bp, Homo sapiens
ctgctcactgttctgctccttcagggggctggagaccactgctactaccaggggaagctccgggggaacccgcactccttcgccgccctctccacctgccaggggctgcagtgagtatgggg

SEQ ID NO: 442689 - DNA, 122 bp, Homo sapiens
cttcggcgcccctctgcacccacccccacgcgccctccactcggctcagatctacctccgcgcctctccgcgaccccggaaccccgcgccctgtccggcccattcccagccggatagaccgc

SEQ ID NO: 442690 - DNA, 122 bp, Homo sapiens
gacacgctccacagggcagactcggggcagggggctcccctggctttcttcaggagggggcgccctggccctgccctctgcttcagcccagacccgccgggaacactcagcggtgggcttga

SEQ ID NO: 442691 - DNA, 122 bp, Homo sapiens
cagtcagtcacagtcctgtgtggccaaatggtttgcttttcaagggaagccggagattcgcgccatgtgaaatgtcccaatttttcaatcatcagaaattcattcaaaattttaaaaagtac

SEQ ID NO: 442692 - DNA, 122 bp, Homo sapiens
gattcgaggccccgtccctttctcagaaggtaaggcttgcgtcaggtgaaccacattggtcgtttggctctaacaataacggcgccttagaatgaacacttcagcctcgttttgtctcttta

SEQ ID NO: 442693 - DNA, 122 bp, Homo sapiens
tcccacagcacctggcatggagggggaagtgagcaagggcaggcggggagagaagaggctcgccctcctggctctgccccagacacccgtccgatagcactccagtgccttccggtctctcc

SEQ ID NO: 442694 - DNA, 122 bp, Homo sapiens
gaggtgaccccgggtccttgggtaaaagcgtcccagagacgggaagaaatatggtataagcgagaaggcctcataaatctgggctgttaaaaatctaagttaaaaatatgttttaagtcaga

SEQ ID NO: 442695 - DNA, 122 bp, Homo sapiens
ttgcccccacacacagcaggcacatccggagcccccgcctgcccgcgtaaccccagctcccgtcacctcccactcgagcctgttacggatgctttctggaggaggtttgctggggctgccaa

SEQ ID NO: 442696 - DNA, 122 bp, Homo sapiens
gccacacacagcagggcatccgtgggctgcagctgcaccgacagttcacgctcccgcaggcggctctggtggaaagcattgattgcggcctcggcctgctccccattcagcagggtcacgaa

SEQ ID NO: 442697 - DNA, 122 bp, Homo sapiens
aatggcaggttagagcccctcgggccaactgccatcctggaaagtagagacagcagtgcccgctgcccagaagagaccagcaagccaaactggagcccccattgcaggctgtcgccatgtgg

SEQ ID NO: 442698 - DNA, 122 bp, Homo sapiens
aagcagaaaatcaaacaccccatgttctcacttataagtggaagctaaagactgagtgcacgtggacatacagaggggaataatagacactggggactccaaaagtggggagagtgggaggg

SEQ ID NO: 442699 - DNA, 122 bp, Homo sapiens
cggcagcctccaaccccctccactcactatccagccaaatgtggagtttttggttttcaccgttaactgcaaacctagaagagagattctttacgattctgattaagagatcaagatttaga

SEQ ID NO: 442700 - DNA, 122 bp, Homo sapiens
gtctggccgctcctcaggggaggggcctggctcaaggtcatgcccggctgtctgcccgcccgtgggctcagcactgatccctactgtcacccgccccactgggtaggggagcccaggtgggg

SEQ ID NO: 442701 - DNA, 122 bp, Homo sapiens
gaagaagcttaaccctggaatgagaattggaagggacaaatatccaaaccatatcaatgacggcaatgaacgaaggatacttgctcacattgtgtatactgctctttgaaaggatttcaaaa

SEQ ID NO: 442702 - DNA, 122 bp, Homo sapiens
cgagggaaacgcgcccccctcctgactcacggccaacgctgcggccgccccgcggccgcccgagccccccgcggctccattgagaaactgagcgtctcattcacaagctggcggcgaggagg

SEQ ID NO: 442703 - DNA, 122 bp, Homo sapiens
gggcatccccccagaggaaatgaaatcagtgtgtcaaagggacaggggcactcccatgtacgctgtggccaagatacggaatcaagcgaagtgtccgtcagtgaatgaatgggcagcagaaa

SEQ ID NO: 442704 - DNA, 122 bp, Homo sapiens
acgtgaagctctagcgctgcagagaggagcagcccctcaccttgggtcgctttccttccccgtcctttgtatcaaatgctcacgcccaattcgcaggggcgacgggagtgaatccagcctgg

SEQ ID NO: 442705 - DNA, 122 bp, Homo sapiens
ctggggctctggccccaactgctctccctggggacttgtttaaaaagcagctcgtgacctcggcactttggctggggttttccctttgaggaatgtgggctagacctgggagattcaggtgg

SEQ ID NO: 442706 - DNA, 122 bp, Homo sapiens
agcgtggcgggcacgctaagacccgccgcccccagacctagtgcctcgcctaggggaggccgaggacctccgcccggaagcagctagcagaggccaaaacgctcttattgtaaccgtcattc

SEQ ID NO: 442707 - DNA, 122 bp, Homo sapiens
ccgggaaagggggcggacaatcgcgtgagtgctgcgggcgtagctgtgcccgggtcctagcgccggacccggcgacgccaagaaaccacccaataggaggccggaagcatcggaagtcacat

SEQ ID NO: 442708 - DNA, 122 bp, Homo sapiens
ccaggatgctgcagtgcggcgcttcggcgccccctactgggggcaggggcaggctcctcccgccgcgctgcctcccaggcttgcgagcttgggtctttaacgtgctgcacccaagacgggct

SEQ ID NO: 442709 - DNA, 122 bp, Homo sapiens
tcacggaattcccaggtaggcctcaagaggaacggatcctgcatcctgagctctgggactcgcgggctctggagctcccgttgcgttcaggccccgggtgctgcggcgggcgcactcctagg

SEQ ID NO: 442710 - DNA, 122 bp, Homo sapiens
ccaggcccaggaatgctgaggatttaatgatgaaaattacagacatggtttctacacatccggtgcttacagtagggtaagggagtgagactttaaacaaatatatcctgtgtctctgacgg

SEQ ID NO: 442711 - DNA, 122 bp, Homo sapiens
gccgggtgctcatgaacctgcaaaacaacgaggccggtcgcagggtaagctgggcctccccggcctccccagcactgcagacctagggggctgttcccgggctgtgccaccagccgtggcct

SEQ ID NO: 442712 - DNA, 122 bp, Homo sapiens
cacagaaatctgagctgcaaaccccgagtggctcccagggcaactcagctaagcaggacccgcagcggagctgggcccaaccagccagcacacggcctggaaacggaagtcattctgctcct

SEQ ID NO: 442713 - DNA, 122 bp, Homo sapiens
ctaccgttaacagaatccggagaggccacggcgcaggcgcaacggaggtgagcgtgcttgcgggcggcaggccccaccccggaagcgcatgtctgcgttccggccgcagccgtcccccgccc

SEQ ID NO: 442714 - DNA, 122 bp, Homo sapiens
tgccatcctctcaatccaccagctcatagaaaatgcacatgagaccttttgtattgataacgaagcactgtacaatatttgtcccagaaccctacaactgcccagactcacctatggtgatt

SEQ ID NO: 442715 - DNA, 122 bp, Homo sapiens
gcggggacagagagcaagagcttcaggcagttggccactcagagcccacatggcccaggccgggccaggccactgcaggtgaagatggtcccgggtgcgtagaaccccctgcaagcagagac

SEQ ID NO: 442716 - DNA, 122 bp, Homo sapiens
cgggcggtaggcggcgggcggcgtgggggtgccgctggctttttgccggcgggtactgggcggggaggcctctgggatcactctcccggccctgtaggtgccggggaccgccccctcccacc

SEQ ID NO: 442717 - DNA, 122 bp, Homo sapiens
cccgggttacgtaccgaccccctggagtggaagttacttacaggggctgtgtgactactccggcctcctgggacccccatggcaatgctccaggcagccaccgccctctcgaggtcgtccct

SEQ ID NO: 442718 - DNA, 122 bp, Homo sapiens
ccttccctccatccgttccagggacctcaccctcgggggagtcaagaaggtacccaacggcgcgtttctaaagaaactcaactaccttgaattccaagccccaggattcaactaatgtttgt

SEQ ID NO: 442719 - DNA, 122 bp, Homo sapiens
aaagatgctacaagtggcccacttctgagatgcgggctgcttctggatgacactgcttcccgaggccacatgcttctttatatccccatatggattactttgctatggaatgtaaggaagtg

SEQ ID NO: 442720 - DNA, 122 bp, Homo sapiens
ccactgcactccagtctgggcgacagaccgagactccgtctcaaagaaaaaaaaaacaaccgtaacaaagggctatgagctatttttacaggcttaagcttatgaaagaagctgtcttggtc

SEQ ID NO: 442721 - DNA, 122 bp, Homo sapiens
cccgcggggccgcacataatttcaggcaccggcaggtgagtgggaggcggggccccagcccggcctcgcccactgcctctctcctgccaaaggggcggggcaacgaggcagcgcgcccggaa

SEQ ID NO: 442722 - DNA, 122 bp, Homo sapiens
cccccgggacctgcttaatctttggcattgattggccctcgggtttcacatagcgtttcccgtacccggatctagtgaacggttttccaggggcaaacctctctggatctctgaaaatcagc

SEQ ID NO: 442723 - DNA, 122 bp, Homo sapiens
caggctaggagctccccaaggctgtagccccggtgcagggacctgcagccatttgctggccggtagagaggctgcaggaagccacagcggctgcctaaccaggcctgcagcacctggaccga

SEQ ID NO: 442724 - DNA, 122 bp, Homo sapiens
gcccagctccaggcaccatagcgccccagtgacgcagccgaacacccgcgcctctgacgtcgccaaaggcccacctctatggtgtcggcgaagacccgcccttgtgacgtcacggaaggcgc

SEQ ID NO: 442725 - DNA, 122 bp, Homo sapiens
ggtgcggtagggtcgcaggccccagtccgcccaggctgggctgctgagcgggtgcgcctacgtccgagcaaggacgtcacgctcacggtattttccgaagtcctccgtgtaaaaagggcggg

SEQ ID NO: 442726 - DNA, 122 bp, Homo sapiens
gcaacacacatacaccactcaccacatgtaataggtcaagccatgtgcacgacgaggtgtcgacaatttcatatggttcaacctagtacactcacaaacacacctaccaactcatggctttc

SEQ ID NO: 442727 - DNA, 122 bp, Homo sapiens
gcagcgcaccgagtggacattttggtctttgtccgcgggtcagtacggcccctgggtccacgtggcgcgaaagtaggaggtgggatctgggcgtctcgggtcggtcggaccggggaggttaa

SEQ ID NO: 442728 - DNA, 122 bp, Homo sapiens
aatgtaactgtatttgtgatggcagcggtgggccatctggagcagctgctgtcatcatgccggctgcagcagggaggcacagctgggaatgcatgctccatggagccggtgggagcctggga

SEQ ID NO: 442729 - DNA, 122 bp, Homo sapiens
gggaaatggtgtttcgcttcacatcaccgggctgcaaagctgaggagtaatgtcctataacgtctgggggtccagggctttgcatccacagtcctgaaagaaggaaaagtctaattatgcaa

SEQ ID NO: 442730 - DNA, 122 bp, Homo sapiens
cagatattgcggacagtctaattcgccccgcgacgtgagggagaacccaggagcgggctccggtagagaaagaagcttccggtcaacgaccacatccacctgaatcatgagcaggttttaag

SEQ ID NO: 442731 - DNA, 122 bp, Homo sapiens
ccatgttggtcaggctggtctcgaactcccgacctctggtgatcttcccgccttggcctccgaaagtgctgggattgcaggcattagccaccccgcccggccattatatattcttatatata

SEQ ID NO: 442732 - DNA, 122 bp, Homo sapiens
ggagccaatgccaggctttgccgtaatcacacccagcctttcataacatcagttactgatcggagtactcccaaaggcggcacacctagaacaagagctatccaaatgcaccccacccagag

SEQ ID NO: 442733 - DNA, 122 bp, Homo sapiens
ttgtccaggccacgcaggggatgccggcaagttccacgtggccctactagggggcacagccgagctgctctgccctctctccctctggcccgggacggtacccaaggaggtgaggtggctgc

SEQ ID NO: 442734 - DNA, 122 bp, Homo sapiens
ctcaagggatcctcccacctcagcctctggagtagctgtgattacaggtgtgcaccaccacgctcagcaaattgttgtattttctgtagagatcaggtttcgccatgttggccaggctggtc

SEQ ID NO: 442735 - DNA, 122 bp, Homo sapiens
aacgctagtccctgtgagcccctgggctgccgtcttccattctttataagaaggggaatgcgacatctcaggaccatgaaaattctaggtttgtggtggctgcctggtgatgtgacactgcc

SEQ ID NO: 442736 - DNA, 122 bp, Homo sapiens
tgccctttgagcaggtattgagggtttgggggctttgttggtttcttacaaccagaggaacgctgtgcagacattaagggtagatgatgccctcttttggttacacctagtattctctgacc

SEQ ID NO: 442737 - DNA, 122 bp, Homo sapiens
aagggaatgggggcagcatctccatctacacccataagtgctgcccaagcaagggtcaaacgcccagctgtggcatcctcctgctgcaggtgaggagtgggcagcagggagggctgcggcgc

SEQ ID NO: 442738 - DNA, 122 bp, Homo sapiens
atgggggatgcaggcctagaacataactttttacagggcgcggtttaaccatgcttagggcgactactgagtttcatccaagctccagctagtttccgaccttaccaccgatctcctccttc

SEQ ID NO: 442739 - DNA, 122 bp, Homo sapiens
actccagcccaggtgacagaatgagcccgtctcaaaaaatatatatataaaggccgggcgcggtggctcaagcttgtaatcccagcactttgggaggccaaggcgggtggatcacctgaggt

SEQ ID NO: 442740 - DNA, 122 bp, Homo sapiens
agcctatgcgagatgcatcttaggaagggagctttcgctgctcagaaatcaaagctccatcggaggtgtcctactggaggcatcagacaacaagctaaatgacgttagggctacacaacaca

SEQ ID NO: 442741 - DNA, 122 bp, Homo sapiens
tctctctctctctctctctctctctctctcgcctgtcttcatgtcgtggattgatgaacgcgaatcgcgtgtaagcgccgccaccgccgggagtctgaggaattcgcctgggctgttagagg

SEQ ID NO: 442742 - DNA, 122 bp, Homo sapiens
ggtcccgaagccccctaccgcgaggcctcagaaggggatggcgacctcttgcagcgggagcgcctcccccacctgcgcgaaggcgaggaggtcccacctgcctcagctgtcccacctgcccc

SEQ ID NO: 442743 - DNA, 122 bp, Homo sapiens
tgcgctccacggcctccgccatcgcagcgctagcgtctttaggggtggtgcggtgagggacggaggggcggggcctgggagaaatggggcggggccggacgcgggcgccgagcacgtcacgc

SEQ ID NO: 442744 - DNA, 122 bp, Homo sapiens
ttccaggggtgacgggaaaggatgccagcaaggacttcagcaaggatcaatcagcaaatccgagggtgtctctcttgccaagccccgggctgtgtgcataggagaaggagaacatgaatgag

SEQ ID NO: 442745 - DNA, 122 bp, Homo sapiens
ggagcaggcggtgctggtgagcgcaggggcctggcgcgcggggccgcgcggcggcgatcgcgagcctgaccacgccctgtccccaggccgtgaaggccctgcagacggccacgcgggaggcc

SEQ ID NO: 442746 - DNA, 122 bp, Homo sapiens
tgtgctcctggtgctcctcactccctacttgggtggcagtggtggtggggtctcctccaccgtcaccacctcccacccccccatccttcagctgctgtcagttttacttttaactttcacat

SEQ ID NO: 442747 - DNA, 122 bp, Homo sapiens
caccagccagctctggggcagccccccggagcccgcccgctccggtccccgggacaagggcgcaattgaccagcgcgggccgcctctggcccacccagatgacggccaactttttttgtttt

SEQ ID NO: 442748 - DNA, 122 bp, Homo sapiens
attattgtgtcttgagtaaacattccttcgggatcagggtcctaaaataaaacaagctgccgggggtgagatagtttaacttgataaacaagaacctgataaccaccgccgagagaggagca

SEQ ID NO: 442749 - DNA, 122 bp, Homo sapiens
gatcaactcaatgagttggctgacaaatcaacacttaaagccctcagcaccttggtggtacgtggtgggtatctgctaagtgttctaaaggattaggtgctaggtggaaaggagcaaaagga

SEQ ID NO: 442750 - DNA, 122 bp, Homo sapiens
ggtgctggaagtggagagacaatagcaagtgagacagagaaggtccaaacctttacccaacggagtgtatagtccagcaaacatttcctgaaggcctgcacctggcaaggcactgctggcaa

SEQ ID NO: 442751 - DNA, 122 bp, Homo sapiens
caatttaatgtgatgggagataatagattttgggtgtgtttggaattaagaatttactttcggagaacccagcagagctggttgagctttcaaatgtgcggttgtgggttcggggtttattg

SEQ ID NO: 442752 - DNA, 122 bp, Homo sapiens
cagggcatgagatgacaggttctgagcctagttctgtgatgggatgaccacgccctagtgcgtggtcttgggatgggggagtgcattttgctggggcaaatgacgtacataatgatggccaa

SEQ ID NO: 442753 - DNA, 122 bp, Homo sapiens
gggcgggggctgcatggctgcagcgccagtagccagtagtggaggacggcgcagcaaccccggcccacccgaggctcctccgccaccgcccccgtccgcttccgggctcgcgccgccacggg

SEQ ID NO: 442754 - DNA, 122 bp, Homo sapiens
aggacagacactcagacacagtcgcacacacttcactcacacacaggaccgtcaattcaacgtgtccacctacctcacaagcaggcagggaaatcaggcctgcatctcaacacgtcaaaact

SEQ ID NO: 442755 - DNA, 122 bp, Homo sapiens
cagccatgttacaacctgagacaacatacacaagacctggcctgtacactctgagaacaacggaagaagaaaaaaacaaaattctctggaaccctggactactaacccctgcttctctctgt

SEQ ID NO: 442756 - DNA, 122 bp, Homo sapiens
cctctgccatttgataccgatggtacaaggagtgacccaccatatttaaaaagataattacggcaagaccaaggtaatctttgtgccttttattcacgaatatgggggtggtgtggagttgc

SEQ ID NO: 442757 - DNA, 122 bp, Homo sapiens
gggggggaattactcaattattctatcagaacctattataaagactgtatttcccatagacgtttacagcaactatgtttaaaaaacaaaaacaaaaaaaaaacacacaaacctaagtagaa

SEQ ID NO: 442758 - DNA, 122 bp, Homo sapiens
atctcatatagcagcctgtttgctggtgtcctgccttcagaaaccggccgtgagtgagcccgctggcattttgggaggccaatatataggccctttttcctacccgggttctcgctgaaatg

SEQ ID NO: 442759 - DNA, 122 bp, Homo sapiens
cgaagtccttattgggacttcccagttttgccctcaaaagtcgcgcatcccgggaatccccgtctcctgcagtcctggttagaccgggaagattgtcaccgcttttgtccagtcttcagcct

SEQ ID NO: 442760 - DNA, 122 bp, Homo sapiens
atggaaaacagccttttgtatttttgtctagttttcccccaaggctttccataaactactcgtttctcggtacgctctccaagtcaccccctccaacagcgagcccgttggtttggcccctc

SEQ ID NO: 442761 - DNA, 122 bp, Homo sapiens
ctgggccgcggggctcctactggggcgcgggctggtggctgggccgcgggggcggcgagtcgtcctccgaggagcagtcggaggaggcggcgtggacgctggcgccgttgctgtaggggaaa

SEQ ID NO: 442762 - DNA, 122 bp, Homo sapiens
gctccttcagaaccgcattatgtaattttagtgtttacttaagctcctttgggctgcctccgtggtagctatgagctcacagagaagtaagtacagtttagatctgatagcaaagtctatca

SEQ ID NO: 442763 - DNA, 122 bp, Homo sapiens
aagatttatggttgacgaaattcagatccagagaagtgacttgttcagggtcacgccggacgaagtggtaggacaggcgatccaggtgagtctcctcagggtcacttccctagatcccctct

SEQ ID NO: 442764 - DNA, 122 bp, Homo sapiens
ttctgaggatgggtgtgaaatgggagcaaggaagagaggagctggaagacagcataggtccgcagcaacatgaggtgctttcattttgaattggttttccatgtcatgctccttttttcacc

SEQ ID NO: 442765 - DNA, 122 bp, Homo sapiens
cggtgggcttttcggcggggtctttaggatttgcagctccaggaagcgagatgtcgaagccgccacccaaaccagtcaaaccaggtgagggaggtaaggtaggcgcttgccaggtcctgcga

SEQ ID NO: 442766 - DNA, 122 bp, Homo sapiens
gctgagggccgaaactcctgcaatcgcgccgcagccccagagccgcggacccaggcagaccgcactctccagagcgcttgcacctggcgcgcctgggcgcctctgcccctccccagccctac

SEQ ID NO: 442767 - DNA, 122 bp, Homo sapiens
caggaagggatttggtgaagtcaagtgggcagggcgaagttggggcccatccctgccgtccggcttccggcaggagaggttcccggggtcccaggcagaacgggcgccagcacctgcgttct

SEQ ID NO: 442768 - DNA, 122 bp, Homo sapiens
gcaacacagtgaaaccgtgtctctacaaaaaataaaaataataatagcaatagccaggagcggtggtgcatgactgtagtccaagctactagggtggccaaagtgagaggatcgcttgagtc

SEQ ID NO: 442769 - DNA, 122 bp, Homo sapiens
ttatttggggtaagaggagggcatggacccacatgagaacctgataaaagctaggccgggcgaggtggcttacgcccataatcccagcactttgggaggcggaggcaggcagatcacctgag

SEQ ID NO: 442770 - DNA, 122 bp, Homo sapiens
cccccaggacgcccgaacgcagcgccagtggcgtacgctggaggccgtgcggcacgtgggcgtggccatcgtctccagtgccctcaccacggtcatcgccacagtgcccctcttcttctgca

SEQ ID NO: 442771 - DNA, 122 bp, Homo sapiens
agctaggctctgttaatcagggatgaggcttcgggtagtcaagttacaagaaggcttcagcgggtgcatgtcagctatgcggttgggcgggttggccccactctaattagcctggcttccca

SEQ ID NO: 442772 - DNA, 122 bp, Homo sapiens
gctcaaaagggctctgcaggttggtacaaaggctgcggaaaggcgaagtcgcggtacaatcggtgttaactacatgtgcagccaccgtcttcttagtcttattacaggtgcagaggtaatat

SEQ ID NO: 442773 - DNA, 122 bp, Homo sapiens
ggcgggggcggggagccggtgtagacgggtggagggcagaccggtactctggtctatccccgcttccgggacgcgttttctagggagggcggagcgtggatggcgagtatggggaactcaga

SEQ ID NO: 442774 - DNA, 122 bp, Homo sapiens
cgccaccagtcaatggggtggtcgttttgagggacaagtggtaagagccaatcttcttggcgaaaacgcggagaaacgggactagttactgtctttgtccgccatgttagattcaccccaca

SEQ ID NO: 442775 - DNA, 122 bp, Homo sapiens
ccagcccggttcctgtcctgcccccgcaacctcgccccgattccactccgggaacctcggcgatgctgagccaagaccacttctgaatcagggatgacttgtctagtgaacctagggtcaga

SEQ ID NO: 442776 - DNA, 122 bp, Homo sapiens
tctcagcgccttagagaacttttaagaaacttgccatacgactaggaagtggagcagctgcggtttcacgcaggtcatttgacttaggagccgcagcgttcaaccacgtctgactacctcca

SEQ ID NO: 442777 - DNA, 122 bp, Homo sapiens
cggaagcgcggctgccattggaggctgcttttacctgcgcggggcccggggcgcaaagtccgaggcgccggggggaggaggcggcggacggcagcgcaggtgggcccgcgctctcggccctg

SEQ ID NO: 442778 - DNA, 122 bp, Homo sapiens
caatcaacggacgtgaggagactccttgctacaagcagaccctgagcttcacggggctgacgtgcatcgtttcccttgtcgcgctgacaggaaacgcggttgtgctctggctcctgggctgc

SEQ ID NO: 442779 - DNA, 122 bp, Homo sapiens
tgggcgctacacctccgaccacatcgtgctccgagaacgtggacgctgcacctctgaccacgtcacgctccgagaacatggacgctgcacctctgaccacttcctgctccgagaacgtgaac

SEQ ID NO: 442780 - DNA, 122 bp, Homo sapiens
ggttcattgcaacttgattctttgcggcatcaccgatcaaccgttcagtgtccgtaaaggcgacatagcttggagtggttcggtttccctgatcattggcaattatctcgacttttccgtgc

SEQ ID NO: 442781 - DNA, 122 bp, Homo sapiens
agtgcagtggcacgatcttggctcacagcaacctccacctccaggttcaagcgattctcccgccttggcctccccagtagctgggagtacagacacccgccaccacgcccagcttatttttg

SEQ ID NO: 442782 - DNA, 122 bp, Homo sapiens
tgtccctggttaaaggccgtagcaccagcacataaaaggcagcagagctcatgttccatccgtgctctgcttctccagcacgatggagaagactggatgaggactagattagcttcagagtc

SEQ ID NO: 442783 - DNA, 122 bp, Homo sapiens
cgattgaggggtggtgcccaaggacagccacagcacacaggtccccaacagcaagcaaaccgtgctatgttctgaatggcccagctacatagagggagaggaggattcacttttgaacccaa

SEQ ID NO: 442784 - DNA, 122 bp, Homo sapiens
cccagccttgactctcggccaccccgggcctcacctcccatccctgccaggccacacgaccggccctggtccctcagcgccccacctttggccttcgtggcctccgggccccgaccttacca

SEQ ID NO: 442785 - DNA, 122 bp, Homo sapiens
gagactgaggcgggagaatcacttgagcccgggaggcggaggttacagtgaccaagatcacgccactgcactccaacgtgggcgacagaatgaaaccctgtactcaaaaaaaaagaaagaaa

SEQ ID NO: 442786 - DNA, 122 bp, Homo sapiens
ccgggagggggccaataccaaattttagggctgttaggctctgagcagtcccttcgtgaccggataagtcagagacccggggtttgagccttgcccggcgctgagcggagggcccagtttcg

SEQ ID NO: 442787 - DNA, 122 bp, Homo sapiens
taaggctgctgaaacctcaaggtggggacgggctgggaggagcattgtggctgcgggttacggtaccaggtaccctttgacactcttggggtttctccagaaaaaaagacattcccccatgg

SEQ ID NO: 442788 - DNA, 122 bp, Homo sapiens
acgtcaaccggcaaccccctccccgccaacacgtgaccggacccccaccccaacaggagccggagccttccaggtggaaggagccttggggttgtttcaggccattcttaatgctttgtgta

SEQ ID NO: 442789 - DNA, 122 bp, Homo sapiens
caccgactctttagggccacgcacgggttctgagcgcccaacgcttagacctcgccgccccggtacccaccgagtttatttccaacctccctgggcctcgggctccgcccaggctcggaggg

SEQ ID NO: 442790 - DNA, 122 bp, Homo sapiens
ggggcttcagactgcagagacccatggaggtgtgggccatggggtttggcccctttttaccggagtgcagtggtggaatgaaggttatacaaccagccagcatctgggagcccggtgggagc

SEQ ID NO: 442791 - DNA, 122 bp, Homo sapiens
atgagacacagtttggccggagtgaccagcatggcagtaaagcaagcagctctctgcaaccgccagccaaggcccaaggcagagaccgagccaaaaccggtgtgacggaacccatgaatcat

SEQ ID NO: 442792 - DNA, 122 bp, Homo sapiens
caaatttgcaaagctggtgacaggcagcccctgagaaaacatatgataggtctgtaaactcgcctgcctgcatacccaccttagaattctctttgtagcactggtaacaccagtcagcccgc

SEQ ID NO: 442793 - DNA, 122 bp, Homo sapiens
cttcattgtgtgtgtgatggggataggcatagtctccccatcttgttctgtgctgtctgccgttaaggaggtggggagattacgatcactctcctttcctgtacagtaatctgctgatctct

SEQ ID NO: 442794 - DNA, 122 bp, Homo sapiens
tcttcccagtcgccccgccccctgcccctctgtcctaggcgcaagtctccgggcttgggacgctcgccgccagcgcccgcccgcctgccccgcccctagccccccgccccccgccccccgcc

SEQ ID NO: 442795 - DNA, 122 bp, Homo sapiens
aggctgcagcactggacatgaagccagtctgcacagtgctcagagcggacagcaccgatgcggccgcttgctgtttactccccagcttaaaccgtagcctcatcgcaacaatgtctgaatct

SEQ ID NO: 442796 - DNA, 122 bp, Homo sapiens
gggtggccccgcccagaattcccgcccctgccctgccggccaatcagagcagggccctcccgagggcccccgcagggcccacctccgccctggacagttccagcacacgtctctctcaccca

SEQ ID NO: 442797 - DNA, 122 bp, Homo sapiens
cgtcctactgctccggtgccgcagcgcccgctcccccgggcccgggtgcgccccactgggcgcgcgtctcccatatgatgccagacccatccgcccgcccctcagcagccggcggggcgcag

SEQ ID NO: 442798 - DNA, 122 bp, Homo sapiens
ttaagagctgtaacactcactgcaaaggtctacagcttcacttctgagccagcaagaccacgaaccccccagaagaaagaaactccgaacacatccgaacatccggaggaacaaactccgga

SEQ ID NO: 442799 - DNA, 122 bp, Homo sapiens
caggaatggggtccccagagaaagccatgcccacaggcatccaccagctgcagacaggcccggcccctgcatggcctgccttggctgcaccttgtacatcctggatggcatctgccggccac

SEQ ID NO: 442800 - DNA, 122 bp, Homo sapiens
aagactattgacgtcatcggagccacgggggtttcagcaaagcaagctttctgcttgtctcggacttgtactgtaggaggacgtaaagtcattcatcagttttggtacatgcctgactgtcc

SEQ ID NO: 442801 - DNA, 122 bp, Homo sapiens
ggaccggactcgatttcctcgcatcccttcctacaggggtcccagcctggccgcaggacacggcacacttcccatttgccgtgggatgtcaaaggtggctgcggctgcagcctctccatcca

SEQ ID NO: 442802 - DNA, 122 bp, Homo sapiens
gtgatcctctcacctcagcctcccaagtagttgtgcctcctaggcacacaacactatgcccggcaaattttttgtattttgtattttttgtagaaacaggatttcgccatgttggccaggct

SEQ ID NO: 442803 - DNA, 122 bp, Homo sapiens
actatatgttacacagcatggtgaatatagtaaataataatgtattatacagttcaaaatcgctaagagtacatttcaaaagttctcaccatgaaaactgagaagtatttgaggtggatatg

SEQ ID NO: 442804 - DNA, 122 bp, Homo sapiens
ggccgcctgcggcatcgtcctcagcgcctggggagtgatcatgttggtgaggggactccccggcaaggatcggagagggcctgaggggctccgggctgggagggctgggaggcgaggaaact

SEQ ID NO: 442805 - DNA, 122 bp, Homo sapiens
gattcaccaacatcgtccaggtgaaattggcagacacagaatgggcgctccgaaagcattcgcggacccgaagaaggtttggtttcaaaggttctaaggtgtgtagcgggggcctgggcgcg

SEQ ID NO: 442806 - DNA, 122 bp, Homo sapiens
tgtgtgctgcctctttctgggtgatttacatgtaatgccccgcccctttcgggatgattacgtgtgcctcgacctttaggtgatttacatgtagtgccccgccccgttcccggtgatttaca

SEQ ID NO: 442807 - DNA, 122 bp, Homo sapiens
gtggaaggacgtcttgccggaggttgtagcgcccagggatttgtggtatctgagtaagagcggaagcacatgcctgcctggacacctaagcgaagagccccgtgttgtggaatcccccgtcc

SEQ ID NO: 442808 - DNA, 122 bp, Homo sapiens
ggtgcttcaacatcgtcttgtgattttccatcagtaatgagcacaccaatttttcgagctcgaggtctcatgccagcttgggtcctgaagttctgttggcgaatgaaattcaaagccatgcc

SEQ ID NO: 442809 - DNA, 122 bp, Homo sapiens
cttctaacagtactttggtggatgacatggagtcatctttccagacttgctttgcctctccgttaagtcaggactatgtcaatggcagcaatcaggaagaaattggaactggtgttgatcgg

SEQ ID NO: 442810 - DNA, 122 bp, Homo sapiens
tagaggctcattatctatttattttaccaaacgcgaattgagacggactttgacaaaacacgaaatggtaatgtgaagctaagagcagagagtgaccaacagtaaacaacacgcgcagactc

SEQ ID NO: 442811 - DNA, 122 bp, Homo sapiens
tccacatgaatttgtaacattgtatattaacagttgccctaggtgattcttatgatttggcgagtttggtagacattgcactgtaggattcccttagttcagcaaagacctctaggatcttt

SEQ ID NO: 442812 - DNA, 122 bp, Homo sapiens
aggggcggtgggtgggacctgatctgtcggacagtaggggcggggcttttcgcgatgccccgcccctaggagcgctggcgtcacgcccccgtccccgcctctccggaacccggaagcgggag

SEQ ID NO: 442813 - DNA, 122 bp, Homo sapiens
gcaaatcgatgctggggaggttctcaagctgtttcttcatctggaaaatggtgagaatttcgcagagaattgagaggattagagataatgtgtcagatttagcaaataaaaatcgaagatgc

SEQ ID NO: 442814 - DNA, 122 bp, Homo sapiens
tacttactcaactcgtgggcctcctcagtcaacaggtagcaagctcttacagaatccccacgatttggagctgcagtacctgggccaggatgaagtgacctgtatgggcaaagtgatggcct

SEQ ID NO: 442815 - DNA, 122 bp, Homo sapiens
tggccctgctcattttaataaaacatcaataaggaatatgtaactctttaaaaaggtagccgaccaagtcaatatatcatactgataggaccttgggttttgtaactttggctaagtgagat

SEQ ID NO: 442816 - DNA, 122 bp, Homo sapiens
ccattaaagcctcagtaatcactgctgatcaatcactggaccagggcggggcagtccctccgcctggcctgggcgcacgcgtggctgtccaagctgagcgcgggggcggggcggggccgaga

SEQ ID NO: 442817 - DNA, 122 bp, Homo sapiens
tctgtccagttgacagaggctgtgcgccgagtgctgtctccctccgggatctgcataaaacggcgtgcattcagtcctctaaagcatttatccatgttattactgaaagacgccttattatt

SEQ ID NO: 442818 - DNA, 122 bp, Homo sapiens
cccatgatgtcatccagtggaaatctgccatgctcaaagactggaataatccagcgctcacgcggggaacgcagagcaggcggaggaggcaacagagcctctaggagttcccagaactagca

SEQ ID NO: 442819 - DNA, 122 bp, Homo sapiens
attcgctcattcatctatttatctaggtgacaattacttctcttgtttcaataatcacatcggaaattttacataacattgtctccctatatgtctgttttaatctgtatctttctatacat

SEQ ID NO: 442820 - DNA, 122 bp, Homo sapiens
ccttagcccgccatattgaaactggcacggtttctaaagactccttccccgcagttgtggcgcttccaagaaaacacgagtacggatcaggctctggatgagtgtccggccaccgagaatca

SEQ ID NO: 442821 - DNA, 122 bp, Homo sapiens
acctcaggtgatccgcccgcctcagcctcccagagtgctgggattacaggtgtgagccaccgcgcctggcctatacaatattttaaataattttgtgtgtgatacaatgaagtcaggtgtgg

SEQ ID NO: 442822 - DNA, 122 bp, Homo sapiens
aaatcaatgaaaagtaaatataaaaacactttcttgaattctagcagtagtgaacaaaggcgtgaatacggaagattttcaaaagtttagcatgaaagatgccatacgtgctgttgccaaca

SEQ ID NO: 442823 - DNA, 122 bp, Homo sapiens
cccaccttctgttccaagtcccggtgttcaaagagctgcggactcttcccccttgcagagcgaccagatcgcgtagagctgatgccgctgcctccctggcagccggtgggcgagaacttcac

SEQ ID NO: 442824 - DNA, 122 bp, Homo sapiens
gtagggtccttcatcctggatactcacgacgcggacccagttctcactcccattgggtgtcgggtttccagagaagccaatcagtgtcgtcgcggtcgctgttctaaagcccgcacgcaccc

SEQ ID NO: 442825 - DNA, 122 bp, Homo sapiens
aatagtatatcatcttcacaaggaataaaaactagtctcaaatatgtacagcagagagcccggggtggctgggacccctggggatgagacaggccaagggtggagcagaagagagagggagg

SEQ ID NO: 442826 - DNA, 122 bp, Homo sapiens
tccctcaagcctgtgctcccggaaaggcactgggcgaccgcacccgtggctttctctgggcgaccgggtcccagactccccccagcacagcagagcgcttccctgcccacccgcggaaaccg

SEQ ID NO: 442827 - DNA, 122 bp, Homo sapiens
ggacgcggggtccagcttggggtgggggaggcggtgctttctgccaaaatgtcttttaaacgtctcaacaagtagcaaacaaggccccacctgcgacagttgtagtgattccggaagacctg

SEQ ID NO: 442828 - DNA, 122 bp, Homo sapiens
tgtctctaggagaatgaggaatagtcacttcctgcctttgtccattagcgccgaccaacgcgaccagctccgtttacattctttcagtggtgttgttgaaagggcttggcagctcccaaatg

SEQ ID NO: 442829 - DNA, 122 bp, Homo sapiens
tcgggatgcctttgagtggggctggaggacggcaacagtcagggcgccagcagcagtgaccggcaaacgtcccccaccccgagctcagaacgtcccaccctcttctaggctagcgccgcaga

SEQ ID NO: 442830 - DNA, 122 bp, Homo sapiens
atccctgctcaccacagtcctcatatccttaaagggacaccctagtgattactgacgccacgacatctgctctgttctccgaaaccaaatctgatctcctttcatcttaaatactgtaggca

SEQ ID NO: 442831 - DNA, 122 bp, Homo sapiens
ccatgtgggcaccgtccggagcttcgagagccccgaggaggtggtggtagtgtgggacaacggcacagctgccaactaccgctgctccggggcttacgacctccgcatcctggacagcgcgc

SEQ ID NO: 442832 - DNA, 122 bp, Homo sapiens
cctgtagggtccaatggcccctggggctttcgcggtgctgatcacccttctgatcaaggacgacatggctaagccttccctcttgcagccccttcaggagaagaagccccagcaccagccct

SEQ ID NO: 442833 - DNA, 122 bp, Homo sapiens
tgtcagttatgtgccaggtgttagaatacgtgttaaactcaattcatatgccaacgcgtgcgtaagcaatatgccagttttatagctcagaacaccgaggctcagggagtcacgtaacttgt

SEQ ID NO: 442834 - DNA, 122 bp, Homo sapiens
aggatgcaagtagggagcagaaaagatagagggagaagtcagaagctcatattatttatccgggggaatgccatatcgggtgcaccagttatcagagggactagccagttcccgaaaccccc

SEQ ID NO: 442835 - DNA, 122 bp, Homo sapiens
catttgaaaacatccacttccttgtgacttagctgggtatcttttaacatctggaagccacgtccctgattgaaatctctggagacaacttacctttcaccaacttgtctgccaaattgcac

SEQ ID NO: 442836 - DNA, 122 bp, Homo sapiens
gcggagtggggcgcgggcggcctggagccccccggtgcggcccggcatcagagcgcgcagcgactttgtcactgcaggcttgccgggtgggttgcagaagagagaagagacccacccatcct

SEQ ID NO: 442837 - DNA, 122 bp, Homo sapiens
taatcctttcttccttccccacaccaattggaattcctgtgctccaaccattttgtataccgctgtcctactgatctttctaaattattcatttccttatgttactctagtatttaggaatt

SEQ ID NO: 442838 - DNA, 122 bp, Homo sapiens
ctctcattgcaccggcatcagactttctcacatacacagagatagaacattataattctccgccccaccctgcattcttgtgggatttaagaaattcctgctctcactttctacaagggctg

SEQ ID NO: 442839 - DNA, 122 bp, Homo sapiens
tctggcaaggcaggtcacaccagcacagaggaaggagcggggccaggccggtgcccctggcgtgggatgcgcagggctctgcctgcctctggtctatcagtcctgcccgttcccagagcccc

SEQ ID NO: 442840 - DNA, 122 bp, Homo sapiens
gtgctgcttgtccagggcgtccaggtctccgctcctgcgcgccagacagcgctccatctccgcggcgtcgcccttgacagctgccttgtggatcttctgcagttccgagtaccggattcggt

SEQ ID NO: 442841 - DNA, 122 bp, Homo sapiens
tgcgcggcaggctcgccgcgacccctagagagacggctttgagtggcgggaggccgaggccggctggcttgggaatccaagcgctggcccaactaggtgagaggaaactggggtgggatttc

SEQ ID NO: 442842 - DNA, 122 bp, Homo sapiens
acggcgggtgcttaaataaatgcgagttggattagggcgcgtggactgccaggcacagaacgtggcgtggagtggggacgtggaggagggagccagacaggccggggctgtaggcaggagct

SEQ ID NO: 442843 - DNA, 122 bp, Homo sapiens
cgggaggatccacttaaaagactaaaatccagaaaccccaggaaaaaagaataggaccggcgcaggcattctccaaatctgtacccttctagagtcaccagcttatatgtacttaaaaagtg

SEQ ID NO: 442844 - DNA, 122 bp, Homo sapiens
agggccttctctgaggccccccacagcagccatacgctccccaaccccagagtgggccgtcgggaccccacccgtggctgtggctgcctcccctgtgctgaccatgccccccccgggcgctc

SEQ ID NO: 442845 - DNA, 122 bp, Homo sapiens
gacccactctgcgggccaagaaaggtgaccgggcttccttccggcttgctaagcagaggccggaagcggtggtttttagcggctctctgggtagcagggtggtgtgatagcggcagcgaggg

SEQ ID NO: 442846 - DNA, 122 bp, Homo sapiens
ggttgtgtcaatgccaatatcctggttgatatttaattgtggttttgcacagaacttttgcgagttggggcaaactaggtaaagggaatgtggaaattctttatattatttcttacaatagc

SEQ ID NO: 442847 - DNA, 122 bp, Homo sapiens
cgccgcgcccgggacaggcgcgagactgggcttttattaggaaggcacgatcctgggaaccgctccttgtgcccaatgtaaaacttctcaacagttctattaaggaataataagtaatactt

SEQ ID NO: 442848 - DNA, 122 bp, Homo sapiens
tccgtgggcagattcccctccttgcacgtggtcaaagtgctgttcgactgcggggccgaccgggacagcagggattttgacaacaccccgctacacatagcagcccagaacaactgcccggc

SEQ ID NO: 442849 - DNA, 122 bp, Homo sapiens
ggctcccactccttgaagtatttccacacttccgtgtcccggcccggccgcggggagccccgcttcatctctgtgggctacgtggacgacacccagttcgtgcgcttcgacaacgacgccgc

SEQ ID NO: 442850 - DNA, 122 bp, Homo sapiens
cgttttcttgtcgttacaactctggtaacgccctgaaattgtcttgtccattcactgttacgtaatatctgtctctgccactagaaagtaagcgccatgcaatccggatcatgttttcttat

SEQ ID NO: 442851 - DNA, 122 bp, Homo sapiens
gccgcagaaaatttacgtttgcttttaatcacggaggccacagaacaaaactttccatgacgggtctcactcccgagtaacggcactgggcttctgcctcgtcgtggtgcagaaagcacagg

SEQ ID NO: 442852 - DNA, 122 bp, Homo sapiens
gtcgagaccagcctggccaagagagcaacaccaggtctctacaaaaaattaaaaattagccgggcatgctggcgggcgcctgtaatcccatctactcaggagaccgaggcaggagaatcgct

SEQ ID NO: 442853 - DNA, 122 bp, Homo sapiens
cgtccgctccctgcaggtgggccaagcgccgggacgtgctgcatatgcccggtttcctggcgggtccgtgtgacatgtccaagtccgtctcgctgctctccaagcaccgagggaccaagaag

SEQ ID NO: 442854 - DNA, 122 bp, Homo sapiens
aggggccgcacgtactcgaccagcgcccgccggtgtagctcggctaccagcgcctggaggcggaggagggaaacccgaggggtgtgagccatgccccacggactcccatcccgccagtctga

SEQ ID NO: 442855 - DNA, 122 bp, Homo sapiens
gtgaactcaccggcagctgaacatttccgtgagaaaacccctaaaagccggcaccggctccggtggggccacagagtctctggagcgaggctctctccaatgcctgggccctgggaccgagc

SEQ ID NO: 442856 - DNA, 122 bp, Homo sapiens
cggaatcccgcaaggggtctggcttccccatcgacaccttcttctcttctgtcaccatcacgtatcccacgaggccaggcggcaccgccacctcctctccccgtagacagcggccccgaaac

SEQ ID NO: 442857 - DNA, 122 bp, Homo sapiens
atgagactctgaactgaatatgcttgtgccggcatctctgtaaactgatgcaagcatctgcgttgcatgaattcctggaagtaaaactgatgggccaaaggacatgtgtgttttagatcttg

SEQ ID NO: 442858 - DNA, 122 bp, Homo sapiens
ggcgtggccgaggacaatgaccctcactggggacgctccggagcttgactgagggtctcccgctggcaccgcctcctctgccggcgtgtgtgtgtctgggggggggacccacacgaggcccc

SEQ ID NO: 442859 - DNA, 122 bp, Homo sapiens
tgtgcatacatttatttttcagtttctgtcccacaagagtttagatcctagaaagggttgcgaaggtctttgaaggcaatgactaaatgaattaattgttctatgataagctgaacacaaga

SEQ ID NO: 442860 - DNA, 122 bp, Homo sapiens
tcactaatactttctggttgctgcccacctacccctccctctcagggtgctcctgagcaccgccgaagatgggtggccagcagttacactggagaggtagaggaataacccagagagaaatg

SEQ ID NO: 442861 - DNA, 122 bp, Homo sapiens
acgccccatcctgcccgaagccccgccccatcccgcccgaagccccgccccatcccgccgcggcccaaccatccgctaggccccatccagccgaagtccagcccgttccgtgccccgcctca

SEQ ID NO: 442862 - DNA, 122 bp, Homo sapiens
tgctccccaagagacatgttgaagtatgttttttttgagatgaagtctcacactgtctcccgggctggtgtgcagtgggcgatcttggcttgctgcagcctccacctcccgggttcaagtga

SEQ ID NO: 442863 - DNA, 122 bp, Homo sapiens
aagagagcctgaccttaggctgtacacacactgtggaatttcttcaagggagctgccggccggcgcagaacccccaggagcacaggtctctccgggccgctgtcctgcgtaactgttctcca

SEQ ID NO: 442864 - DNA, 122 bp, Homo sapiens
ttcggaactcgcggaattggccttgctaagattccctcctagggtctttattatcttagccgcccgcgggaggatggaacggagattggttgggcgggagaggatgacactgacagagtggg

SEQ ID NO: 442865 - DNA, 122 bp, Homo sapiens
cccgccccttcgcggcgcttcctagttcggctggttcttctgtcgccggcttcagcagcccgcgcccgggcaggtaaggcattccccgccttaatgcctcggtcaaacgtcgtccgaggtcc

SEQ ID NO: 442866 - DNA, 122 bp, Homo sapiens
gaagttaaccacgatccatctccaagcaggcaactagcccaccctgggctctgtctcctgcgtgactgcccaggtggatagtactcctggatgtgcttacaaacgccttcaatcacactggc

SEQ ID NO: 442867 - DNA, 122 bp, Homo sapiens
acctccccctctgacctccgccactgacctccgcagctgacatcccccgctgacctcccccgctgacctccgccactgacctctgccactgaactccactgctgacctcccccactggcctc

SEQ ID NO: 442868 - DNA, 122 bp, Homo sapiens
cataatgcacataagcatcccccctgcttcccaggtcttggattaaatcatccatgaatccggaggggtggggggtaccaggtccgcaccacgcactcaatgcaggtcagcgcccaccccgg

SEQ ID NO: 442869 - DNA, 122 bp, Homo sapiens
aggcgtggccccgactgccgggccgcgataagcgccctgcgacccggctgaaagcgcacacgtgtcctgccgcgctgagccgccagcaggactggtaccaccgccctccctcggggctaggg

SEQ ID NO: 442870 - DNA, 122 bp, Homo sapiens
gatggagctgcctgttcaaatccttgtggatgtcataagattagcagctttcctctgagtcggcctcaaagacttcctttgcaattgttcctaagctagctcaagggataggcagtgaagtt

SEQ ID NO: 442871 - DNA, 122 bp, Homo sapiens
tctggagtttgctccttcccatattcggatgtgttgagagttttttccgtccggtggattcggtggtctcgctcgttcagaaacgaagctacagactttctccgtgagtgttacagttctca

SEQ ID NO: 442872 - DNA, 122 bp, Homo sapiens
aatgctaattttttctctttcattttaagatgttgtgtttaagatattatgttctattctcggtttttaaatgggtgttctgggcaaatcaactctcagtttgctcactgataagttttgac

SEQ ID NO: 442873 - DNA, 122 bp, Homo sapiens
gacacctcctgacaccctcctccatgctctgccctggttgggatgcctcttgggctgttccgggccccaggctagagccactgcctctgtttctctgggtgagtccttgccctgctgcagga

SEQ ID NO: 442874 - DNA, 122 bp, Homo sapiens
tcatctttactcccgaaagctcactttgcttttagtcctggccgtcggctgagcgagctgcgcatgcgccacgtgcccccgtggcgtagggcctcgtccggtcacgactatccgctgggcgg

SEQ ID NO: 442875 - DNA, 122 bp, Homo sapiens
gatggcgtgacggcttgtggggcctgcggggtgcgctgcccccggacctgcggggggaggcggctgagctggcggcgctcgcgggcccagtggtgagtgcggcgtcctcacgcccagcccga

SEQ ID NO: 442876 - DNA, 122 bp, Homo sapiens
gcctagaaagtgaatgtatttggatgctcactcccaaccttccttgcccttttgtgattccggattggattgagtgtgtgaggagggaaagagcagctctctggggagattaataatatggt

SEQ ID NO: 442877 - DNA, 122 bp, Homo sapiens
ggaagatcatcttctcctacgtggtggtcttccttgtctgctggctgccctaccacgtggcggtgctgctggacatcttctccatcctgcactacatccctttcacctgccggctggagcac

SEQ ID NO: 442878 - DNA, 122 bp, Homo sapiens
agcgaaagtgaaatcatacctaaggcattcaaaagaccgccgtgtcaggggttcagctaacggtgcagctactgggtgtgtgtgtgtcttcccggagaggcaaaaatcttttcacagactgg

SEQ ID NO: 442879 - DNA, 122 bp, Homo sapiens
tggcttcctctcgagccttgggtgtccagcagcctgaccagacagaggcctcctcagccccgcaccgaaggaggatggaggggccgggccggctcctgtcggttgcccgtgctggccgaccc

SEQ ID NO: 442880 - DNA, 122 bp, Homo sapiens
cctctctgcacctcaacttaaccggagcgtgcacacccgcctgcgaggctgacccgagcgcgtcccacccaaggtcgcccagccccgcgggcgtttacttttcaaaggtcgtgtgtacacag

SEQ ID NO: 442881 - DNA, 122 bp, Homo sapiens
gtgtgctagctgcctgtcccctcgggcctgccggggacaagcagtacctggtggttgtggcgctggatgacttccaggaagagcgtgggccggtcctgcaccggtttggtgaagatctgcag

SEQ ID NO: 442882 - DNA, 122 bp, Homo sapiens
ttgccggccagggcgactcccctccggcaccgggccccgcccctcccctcccccgtgcgccgtgggctctgatccaactcaagttcccagtgactttccggaggccgggaacagggaaaact

SEQ ID NO: 442883 - DNA, 122 bp, Homo sapiens
ggagcccggaagcacaaggacacaacagtttcttccattcatttgttctgttccagcctccgatgcataaggaacgctatggaatgtatccaagacccacatcagaacagcaaggagctgag

SEQ ID NO: 442884 - DNA, 122 bp, Homo sapiens
aaggagaagctgagaacatttacgattgagaccatctgctggaaggtcctcctaatccggcgtcggcgtggctgatctcatatcagtttctcggcaggaagcgggtgcgcctgcgtgaattt

SEQ ID NO: 442885 - DNA, 122 bp, Homo sapiens
cggaagtgatttcctctgggttacggcgcaggcgcaagataagctaggagccgcgcgagtcgtagtgtcgctgtttgcgggtctccgcgcgggaccggggcgcagcggggtcgctgaggcga

SEQ ID NO: 442886 - DNA, 122 bp, Homo sapiens
ccgagaagaaaagggccagtgtgcattccgtgaaactccaaagcccttctccaggcacagcgactcggggggaggggagagggggctggaactgcgctttcacagtgtgggcagtcaggccc

SEQ ID NO: 442887 - DNA, 122 bp, Homo sapiens
tgtactcgtgaactttctctttgtgatgcaggaactcccgccagagcttgtccagttcttcgccggagaatttcccagaggtcttcgcctaagagggaaacaaggcctggagtgaacccgcc

SEQ ID NO: 442888 - DNA, 122 bp, Homo sapiens
actgtgcgcaaaatccacaagaccgctgaagtcaggagcacagcccgaaagccagccagccgcagactcggctgtgagcaggctccagccactggaccctccaggagagagcagtgaatgtc

SEQ ID NO: 442889 - DNA, 122 bp, Homo sapiens
gggttgtggggccggcgctgacctcaccgcatgggcccctgcggccgccgtggcttctcacgcggcctgactttggactcgagtgcaggctcttagctgaatctctgtgtagacagggtggg

SEQ ID NO: 442890 - DNA, 122 bp, Homo sapiens
cctgggcaagaagcttgatgagttggacatgcagtggtaggttggaagctgaggcaagagcggggctagaaagagtggacctgctctggaataaagtatgggaacatcaggcatctcttgga

SEQ ID NO: 442891 - DNA, 122 bp, Homo sapiens
ttgaattttgtgtgtttttgttttgtttggatgactaaccggtgctttaatggtaccttacgattgttttcatgtgtgtttcttgacttcactctgcgtggttggtaagacttcaagagcag

SEQ ID NO: 442892 - DNA, 122 bp, Homo sapiens
gcgggcgccagggcttcacctccaaggcggatcctcaggtaaaggccagggccatctaggcgggtggcggagcaagccgggaggcacttcggagcgccggtgacccacactccccgcctcat

SEQ ID NO: 442893 - DNA, 122 bp, Homo sapiens
ccgccgagagcatgcccttggctcatccaatcagagcggcggatccaggcgcctgtctgtcgccttggcaacgggacgcataagcacgcgaggcgcgcggtggcggtttggatctggcccct

SEQ ID NO: 442894 - DNA, 122 bp, Homo sapiens
gcggacgcggggagtccgaggcggtgctgcagagcggacgcggggagtccgaggtggtgccgtagagtggatggggagagttcgagccacaggtggccacgcctcccctgcctccggccggt

SEQ ID NO: 442895 - DNA, 122 bp, Homo sapiens
cacttcccgctgcccttctccactggctgctcaggccctgcctcgccagcacggcatccgcgggggatccctacctgtcctttagggcttgcctcataggtcaaacgtcacctcccagggag

SEQ ID NO: 442896 - DNA, 122 bp, Homo sapiens
tctgcgacgtgcacaacccgggccaggacctggttatccaccgcacctcggtgcccgcaccgctcaacagctgtctcctcaaagtaagtcatcccccgccatccctggggtcttcccctgtc

SEQ ID NO: 442897 - DNA, 122 bp, Homo sapiens
gcagggagcctgagggactgggctttgtggggcagcatggggtgcatcggagtccatgcacgtcctccaggagcatggggcgcggacagggcatgggggcgcagcagggctcccagccttcg

SEQ ID NO: 442898 - DNA, 122 bp, Homo sapiens
ggcgcaaggtagttgcagagggcgaagcccacgaagcggaggatttctcggagccaagtccgttttcgggggacggggatcccagactcctgcgtccccaggtgccccgcttctggaaacgc

SEQ ID NO: 442899 - DNA, 122 bp, Homo sapiens
cagaatctgctcctgctcacagtcattatgacctcaccaccatcaccatcctaccacccacggtcctggccagacttgactgaatcaaaggggaacactagacccaagctgggccaatcgta

SEQ ID NO: 442900 - DNA, 122 bp, Homo sapiens
gaggcgcggcaggtgcagagcgtctcggtagcttcagggggtgtgttggaggggaatcgccggcctgcctggatccctcgagcaccaccgaggattcccgccgggaccctcttataatctta

SEQ ID NO: 442901 - DNA, 122 bp, Homo sapiens
cggccggagctggagagcgcagcccggcctcccgccccgccccggccgcccgccgcccgccgcccgcagcccgcccgggacccacttgtagccgccgcaggatcaaactcagttcacctctc

SEQ ID NO: 442902 - DNA, 122 bp, Homo sapiens
ggggcagtaggtaatgccacaatgggatagtggctgatctgccataagggatggtagactcggatactggcatgttgtgaggacctgacgtggagaaagatgccattgaagggccttgtagc

SEQ ID NO: 442903 - DNA, 122 bp, Homo sapiens
taaaaatccctaaagactgaaaaccactaaactggcccacctgactttattcttaagtcacggagattgtgatacacattttcgtcagcatggcattgattgaggctatgtgctccagaaag

SEQ ID NO: 442904 - DNA, 122 bp, Homo sapiens
cctcagaccccaggacgccagaggaggaaagggaggggcgtgtgggcagcgaggtccctacgcttccgggaggagccttaaggagtccccacccaggggttctagtttccagccgtcagatg

SEQ ID NO: 442905 - DNA, 122 bp, Homo sapiens
tcctcgacagctgtgaaattctgctgtcggctgcaggtctggtgggtggccaggccgcggcggggggccgggcgcagcaggctcagggccacgggttctttccttggacacctggaaccttg

SEQ ID NO: 442906 - DNA, 122 bp, Homo sapiens
gagctacgtggttttctacattctgtttcaaaaaggtgctattacttatcctgtgcttatcgctgttctaagtattttataactcaatgcatttcatactcataacacctcaggtaagcaag

SEQ ID NO: 442907 - DNA, 122 bp, Homo sapiens
cactcattttcctgtaggcataagaatgttattcaaataaactcaaaacttctgggtggacgctggctctggatttagtgtctctgtaatggccaaaaggataaaccaacatttattgcaca

SEQ ID NO: 442908 - DNA, 122 bp, Homo sapiens
gtggccgctgtggtggccacctagccggcaggtgcccacccaaggcaggacctggagcggcgccgttgcctgtgtctctcagcgccctctgcctcttctgcctcacccccgcccgcccgtcg

SEQ ID NO: 442909 - DNA, 122 bp, Homo sapiens
cggttccccacggcggccgcgtgagggcgctcagggacaggtcagccacggaggtagagccgccaggtctggggctgtgaagcaggcaggcctcgctggggaagaaagggaggcgcagacca

SEQ ID NO: 442910 - DNA, 122 bp, Homo sapiens
tcaaggtattcgagtgatttaagacctttaaaagcagctgaaacagcatcctctttcagccgattgtgctggagatggatgaaggtcaggtttaccaatccttcaaaagagcccagctttgt

SEQ ID NO: 442911 - DNA, 122 bp, Homo sapiens
cacacagtgacacggacggtgtcctgccaggtgcagaatggctcggagacggtggtccagcgcgtgtaccagagctgccggtggccggggccctgcgccaacctcgtaaggtaaaggccgct

SEQ ID NO: 442912 - DNA, 122 bp, Homo sapiens
tcgtggaggttggccgggtggcctatgtctcctttggacctcatgccggaaaattggtcgcgattgtagatgttattgatcagaacagggctttggtcgatggaccttgcactcaagtgagg

SEQ ID NO: 442913 - DNA, 122 bp, Homo sapiens
gaccagggaagaaactcgggcgcctttacccggtttaatttcagtttaggccaaaatccccgcgggttggtcggggcgggagcggggctcggtgttcggggctgacggcgggggcgaggcca

SEQ ID NO: 442914 - DNA, 122 bp, Homo sapiens
tctcctttcttgggtcatttcttaaactaatgagagctttatttaatcaagctctgcaaccgtgaacagttaggaaattccccccagccacaagtgggtacttacaagcaggcaaggctctg

SEQ ID NO: 442915 - DNA, 122 bp, Homo sapiens
gcgtcctgtcactccgccccgccagctaccctcccctgagcccgggtgcccggcttaggccgctccgtgcgaggagacctgggaccccgcaccctccggtcctacccagtgcttctgccctg

SEQ ID NO: 442916 - DNA, 122 bp, Homo sapiens
ttgtctttgtggattctttgtaactatgtccctttgcataaaaacagggccttttgtttccgaaaccatgattagctcctagccacactctccaattgaaatcataatctgctctttgtgac

SEQ ID NO: 442917 - DNA, 122 bp, Homo sapiens
ctctgtgggcggcggcagagggtccgagaattccagccccccgttgcccccccaactcaccgtcgtatcgctcagcctgctcggccagcttcgcctggtacaccagatcctctcgatcatcc

SEQ ID NO: 442918 - DNA, 122 bp, Homo sapiens
cgccacccgcgcgcagctacccgcagccgccgccatctttgcggaagcgcagctaggcggcgcttctctcccggcgccgccgcctaccgcttgggaactctcgcgacatccgacaggcttcc

SEQ ID NO: 442919 - DNA, 122 bp, Homo sapiens
aacatcggcggcgtggccgtggccccagcccacggctccatcctcatcgagtgtgcccggcgggagctgcacgccaccacgccgcttaagaagcccaaccgctgccaccccacccgcatctc

SEQ ID NO: 442920 - DNA, 122 bp, Homo sapiens
tggaagtgtgacggagacaacgattgcctggacaacagtgatgaggccccagccctctgccgtgagtcacacgccctgccccaccctgttggatggcaggcctgcagggcagctcggctctg

SEQ ID NO: 442921 - DNA, 122 bp, Homo sapiens
gtggacggtgtccatcctgatcgccatcccttccgcctacttcaccaccgagacggtcctcgtcattgtcaagagccaggaaaagatcttctgcggccagatctggcctgtggaccagcagc

SEQ ID NO: 442922 - DNA, 122 bp, Homo sapiens
aagggtatcaaactgagatctagatgttccatttaagttgttgttcattttcattagccacgccaggggtgaaatgcttataacttaaccattctctgtagtaagaacatttgttttcaatg

SEQ ID NO: 442923 - DNA, 122 bp, Homo sapiens
ctgagccctgccttgcggggaggcggctgaggcccagagagaatttgagcatggcacaggcgggctagcagtgctgggggacccggcgccccctctgcagctgctggcccaggtgctaagcc

SEQ ID NO: 442924 - DNA, 122 bp, Homo sapiens
ggggttctgctttctttgttcccctaagagacctgactgctgttccagggggcaaaaccacgtaggtgggctagagtttaggggcttcggaaactgaagagacgtggccacggcgaggacga

SEQ ID NO: 442925 - DNA, 122 bp, Homo sapiens
gcggagcggcgggttggggcgtcgcacggtgagaaaggccggggcctgagaacaaaccgccgcggtcgccggggcaacgggacggggcacgtgccccccccgccagagccggaagcggcagg

SEQ ID NO: 442926 - DNA, 122 bp, Homo sapiens
ggatccagccggtttaactattatatacatttaaatcaacatcaatcagttgattaacaccgattatatgagcgcattcaaggaccactcattggcagagccaagcttaggctcacggcgag

SEQ ID NO: 442927 - DNA, 122 bp, Homo sapiens
tttctaaagtgaggataacaggacctgcctcaggacaatgcttggcatatagtaagtgttcgatacattttggctacaaaatatactaggggttataattctgatagaagcaaagaggatgt

SEQ ID NO: 442928 - DNA, 122 bp, Homo sapiens
gagcctgagtcgtctgagcccttggaggcgaagcaggggccagaaactggacgccagtcccgaagcagccgtccttggagcccgcagtctagagccaagacgcctctgggtggccccgcggg

SEQ ID NO: 442929 - DNA, 122 bp, Homo sapiens
acactgaaaatgatcgagaaagtattcctcacattctcaacttgtgagcaaaggattacacgcaaatgctgatccagccaagaaagcacacatggacttgtccattggcctatgtacattct

SEQ ID NO: 442930 - DNA, 122 bp, Homo sapiens
accagcgggaagggcagcctttatgcgtgtgtaactagaccttcagccataagcatggtgcgcagcatggaagagcctgctatggaactgaaattgattgaacattttataggaattgatac

SEQ ID NO: 442931 - DNA, 122 bp, Homo sapiens
agggcggaggtatgcagacaacgagtcagagtttccccttgaaagcctcaaaagtgtccacgtcctcaaaaagaatggaaccaatttaagaagccagccccgtggccacgtcccttccccca

SEQ ID NO: 442932 - DNA, 122 bp, Homo sapiens
gatggcagggaccgggggtggggggtgcctacctgccacctccttggacgatggcagactcgcggcggcagcctcaaggtcggctgggacggtgcctcctctctccatggcgcgcaggagcc

SEQ ID NO: 442933 - DNA, 122 bp, Homo sapiens
gaacatgaagataatgggtgaggcaactagttaggaaccaaacaactttaaacaattccccgtaggcatgggtgtgtgtgtggtggagtttgacagaagccctatactcgagtcttttgggg

SEQ ID NO: 442934 - DNA, 122 bp, Homo sapiens
catcccttcctctagtcgggcagcaaattcctgtcctcctagtcccccgcagctatcccccgcccccagcctctgtggccctcacattgtcagacactggccgcgggccaccatctggacgc

SEQ ID NO: 442935 - DNA, 122 bp, Homo sapiens
tgtatggagggctctgtgcagcagcgcctaggcctctgttttagttcttaatttctttcacggcatcaaaaggcttttctattcaaaagcttttctttttcttttactcgtgagcctctgca

SEQ ID NO: 442936 - DNA, 122 bp, Homo sapiens
ctcgttatcacagcgcgaaacaactttaggcagcatcggtggagctggggttttctcagccgggtcctgcttggcccctgtgtcctgggccccttggcccgtgtgcttctcctcttgggtcc

SEQ ID NO: 442937 - DNA, 122 bp, Homo sapiens
gtgagtaaaataatctgtgcttctatgtaacttaagtacccacaaatcaggaagcattcccggatgaaaagcattcacagaaccatacgctggttcgccaccttcccggtgcaaaaaccctt

SEQ ID NO: 442938 - DNA, 122 bp, Homo sapiens
gccagtcgtagaaccccagctgcccagagtgatctcggcagtctgggtgggtgggaggggcgtcgtcggcactgtggggtccgcccggccccggtggctcatgttgttcggcctgctgaggg

SEQ ID NO: 442939 - DNA, 122 bp, Homo sapiens
tacattagctagctcatttattccccacaaaagccagacaaggcaggtactaattatgatcgtgcgatattaaacatggagaaaccaacgctctgataagttcgttttattgtgagaataaa

SEQ ID NO: 442940 - DNA, 122 bp, Homo sapiens
cacctgggtgatcagtggagatatgtgtcacaattcccctttaggcacagcttagacaagcgttacatcacatgagtgatcattgcagagttatgtcactatgcccccataggcagatccaa

SEQ ID NO: 442941 - DNA, 122 bp, Homo sapiens
gggaaagtaagggagcgacaggaatggcttgtgaatgtgaaggcgagccgtgaatgtctgcgtcttggagtggaacccagagctgctaagggggcggccaccaaaaccccaaccgtcaggcc

SEQ ID NO: 442942 - DNA, 122 bp, Homo sapiens
gagcggagaccccaggagaccgggctgggcccccaccctgaggcggcagcagccccgccccgtcgccacccgccgccctgggcccgcgacatcacctctggggtgccccaggcccttcgcgg

SEQ ID NO: 442943 - DNA, 122 bp, Homo sapiens
cgcggacggtaccagtccgtggcctgttaggaaccaggccacacaagaggaggtgagcagcgggcaagtttgtttacagcctgagctctacttcctgtcagatcagctgcagcattagattc

SEQ ID NO: 442944 - DNA, 122 bp, Homo sapiens
gaaaccgtgcacttgttccaatccgggggtttatacatcagggcaaagcctcccttaggccgccccatccctccccccgcccaagaaagccccgtaggaggcggatggttcacccttaggct

SEQ ID NO: 442945 - DNA, 122 bp, Homo sapiens
cggctggccccgcccgggaaccagggcgggtaagggaatcagggtcggcccgggggtccgcgtccacgcgggccaagagactggatccatcttcttcccaaagtgggaaagcctgtgtcagg

SEQ ID NO: 442946 - DNA, 122 bp, Homo sapiens
tgcggcgcctcctgttggcggccaagtgctgcctgggcctgcggtggacgtgcgtgtccacggagaacctggtggtggccgggctgctggcgtgtgccgccaccctggccctcggggccgtc

SEQ ID NO: 442947 - DNA, 122 bp, Homo sapiens
aggcggaagcaacacttgagcccaggagtttgagactagcctgtcaacacagagagactccgtttctacaaaaagataaaaaagtagccagggatattgtggcacatgccggtagtcctaga

SEQ ID NO: 442948 - DNA, 122 bp, Homo sapiens
agaaaacagatacccctatttcctgctaagtctggtcaaggcatactcagtctgaaacaacggtttgatgtccttgtacttatcctaattacatgggcccactgacctgtgagatttgctat

SEQ ID NO: 442949 - DNA, 122 bp, Homo sapiens
tgccccaggacaggagggcagtgtggccaagccctccaggccccctctgggcctcagaggcggtggctgagccccgacctggccgattggctctcgtcagctgtgtgcagtggggcccgagc

SEQ ID NO: 442950 - DNA, 122 bp, Homo sapiens
aaataagaagggctagaaaagatagaaattcaccaccccacgcacctcagcgcccgtgaccgaataacatggtaaaggattcaactgatactagttggcctgaactggaaaaggcaaatctc

SEQ ID NO: 442951 - DNA, 122 bp, Homo sapiens
tgaagtccaattagcaactcatccacaaggagaaattgatgggactgtttgaggagtgtccggccagaccttatggccgtgctgaccacccagcctccatttgccaatgccgtggtccattt

SEQ ID NO: 442952 - DNA, 122 bp, Homo sapiens
agtgatccacccgccttggcctcccaaagtgctgggatgacaggcgtgagccactgcacccggcctcagtgttttacttctttgagcctctggaaaggggcttctcgttccacacagagtgg

SEQ ID NO: 442953 - DNA, 122 bp, Homo sapiens
ggagttgtttatcccatactgtcatttggtttgtagaaaaagcattttgggggccgggcgcggtggctcactgtaatcccagcactttgggaggccgagacatgtggatcgcttgaggtcag

SEQ ID NO: 442954 - DNA, 122 bp, Homo sapiens
cttttaactattttttatcctagttgcttgttgcagattggtgtgtctgaggcatcagcacgcgtggtaatatttctcactgaaaaatgaaagaaagaaatgtagtgattagaagatgattt

SEQ ID NO: 442955 - DNA, 122 bp, Homo sapiens
cacatctttggcttccctctataatacctacagattccctttattatttcatactagctccgactagtcttaaatactctgtttctgtcctctttctcacacgcagttcctggaatcttcat

SEQ ID NO: 442956 - DNA, 122 bp, Homo sapiens
ccaccccgctttcaaagccgcctcatcattcccacgctagcaagttaatatccttatttacgagaacttgtgtttcacagtcttaaccacggaggttaagatgtctctgcctgaaattcctt

SEQ ID NO: 442957 - DNA, 122 bp, Homo sapiens
ctcgcaaacatgcaccctccgccggcgacagctcctcagtccgggaagaggcgtgcgcggcgccgcccggcttcagggcaaggtcctgaccttgcccaactgcagcatcttccgcttttgtt

SEQ ID NO: 442958 - DNA, 122 bp, Homo sapiens
gccacgtgaggggcacctgtagctgggagaattccaatagggtgctcccagcagtggcatcggcgacctcacaaaccttaagcccatctgcatacacagcataaccggtgacctggactcca

SEQ ID NO: 442959 - DNA, 122 bp, Homo sapiens
cgtgtgtttgtgtctgcccagtaggggtttgtggtctgtgcatgtgcccgtgactggggccggggggaaggaggggcggcctcctcctgactcttcctcacccccaggtctctgatccggag

SEQ ID NO: 442960 - DNA, 122 bp, Homo sapiens
actgaagaactcggtaaatatgattagcatgcacgcaccaacacatcactgtgatgaaaacgcaaatcacagtatgtgagtcactactctcaacattgccatgcccctgccttaaacctgcc

SEQ ID NO: 442961 - DNA, 122 bp, Homo sapiens
ccaaaacgtttccaagcagggcagggctggaggcttaagaaaatcaatgacctggcagggcgcattgattcacacctgtcaccccagcactttgggaggccaagacaggcggattacttgag

SEQ ID NO: 442962 - DNA, 122 bp, Homo sapiens
agtgaggcaggcatggtcaaagagcttgtgcggcagctgtccctgggatgtccaggtgtccgtctcggggtcgtagcaatcgaaggaggcggagtcctcaatgttgcagtccgtggtcagcc

SEQ ID NO: 442963 - DNA, 122 bp, Homo sapiens
aggggaagtggagtgtaattctttctacaagattagcaagctgaacttgaatctcacacacgcacacacaccacagtgacgtggaaagaatccacaggacacttatgagaggtaaaaataga

SEQ ID NO: 442964 - DNA, 122 bp, Homo sapiens
ctggcctgggaggggccgtctgccaggggaacaagtacagttgtgatctggggcgctcagcgcctccagtataaaggagggctgggtcttaggtgtctctgggggccttctgcgaccactct

SEQ ID NO: 442965 - DNA, 122 bp, Homo sapiens
ccagcctctgtgctggccatcaagccctaggatcttgagtccagaaggaactacaagtaccgtgaggccaagcggttcagcgctagaggagaggaggaagaggacggcaacaggaaaagggg

SEQ ID NO: 442966 - DNA, 122 bp, Homo sapiens
agctgaggaagggctgagccggggtggcgcccacccacctggagatgacgctggccatgccgtgctcacagtcactggtgctatagatgctcagccgggccaggaggtccagcaggtgggct

SEQ ID NO: 442967 - DNA, 122 bp, Homo sapiens
gaaaggagagacctgtaatgacggcgggatttggggtgcggagggttgcgagggaggggccgcaaccctgaacaattgcattcccgggctggatgccggttgttaagcgcgctgttgctttg

SEQ ID NO: 442968 - DNA, 122 bp, Homo sapiens
gtgaaaacctttctcctgatacggtcaatactggagaactgggaacaatgtcagaatgaccggccaccctgagccagccccttcaatggcactgcccctgggggctgttcaacatataaact

SEQ ID NO: 442969 - DNA, 122 bp, Homo sapiens
aacgtggtgaatcctcgaactggcaaaggaagaagtaaactctgcccccgcaagctcgcgcgacgcgacaccgcggcctctccttggcccactcaccacttggacgctcttcttcaggctgg

SEQ ID NO: 442970 - DNA, 122 bp, Homo sapiens
caagtcacgtgatttaacatatggctcccgtgtggttcctgcccgctccgtgtgggctaccgctgggagtgcacgggcaggatggagggacactcggggggtgagaatcgccacctgggagc

SEQ ID NO: 442971 - DNA, 122 bp, Homo sapiens
ttatctcagctctccaggccttggttttctcatctgtacaaggggtataataataagtgtcgtaaggattaaatgactggatgcagggaaggtcatggtataaataaatggttgggtgtggt

SEQ ID NO: 442972 - DNA, 122 bp, Homo sapiens
tagacatcccgggtggtgtcggtgatgggtcctggctggaagcccagggcctgcagctcccgccgcagttccaggtccgacaggccggccatggccaggacgccgccccccgcccgcccctg

SEQ ID NO: 442973 - DNA, 122 bp, Homo sapiens
ctccattttatcaggagtcattctgccactgcagtggatttccttcctgtgatggtgcaccggctcccaggtagagggtttgcccctttctcttcctcatcctcctcttcttgccagtctgc

SEQ ID NO: 442974 - DNA, 122 bp, Homo sapiens
gatttttgtcgctcagccagccaagtgggggcgattctgagtaatcgcaggcaatcagcgcggctggggttaaaagcgaaagggactcgcgggcgaacggccggggagggcggcgggcacag

SEQ ID NO: 442975 - DNA, 122 bp, Homo sapiens
cctcccgcaggtgaacgtgggcgagggcagccaccccgagcgggtaaaggtgtacggccccggagtggagaagacaggcctcaaggccaatgagcccacctacttcacggtggactgcagcg

SEQ ID NO: 442976 - DNA, 122 bp, Homo sapiens
tgccaacaaccaaattggttattccttattctgatgcaatggattcatattttgtgccttcggaatgggtttctgtgatgtaaaaagcttaagtcatactgtaaaataataggtcaaatttt

SEQ ID NO: 442977 - DNA, 122 bp, Homo sapiens
ttattgtcagtctcccccagctataaactacataaaggcagagacttcattcttgtttatcgatgtatttctggtgccctagaacaatgcctggcacacaaaaataactcagtaaatattca

SEQ ID NO: 442978 - DNA, 122 bp, Homo sapiens
cttctgcacttgggccgcggagtcttgctttcattgctggccttgatcgaagccgtggtccggttcacatgtgggggcttgcaggccttgtgtactctgctgtatagctgctgctctggcct

SEQ ID NO: 442979 - DNA, 122 bp, Homo sapiens
agccgaaagcgaagagggcccgggctgcacacaccggctgggaggcagccgtctgtgcagcgagcagccggcgcggggaggccgcagtgcacggggcgtcacagtcggcaggcagcatgggg

SEQ ID NO: 442980 - DNA, 122 bp, Homo sapiens
gaaggctcaaagtccagcagggagccattgatcagtccgggacttctgttgggagggtgccggcaaactatctgatgggtccccagggcctcccctggaggaagtggggacttgagcaggag

SEQ ID NO: 442981 - DNA, 122 bp, Homo sapiens
tgcacttaacagatatttcagtgcactaatgcatcacagatgttcatatcaaactgtgcacgcgtgcatgtaattttactgagaaggctgttgcatttctgattttgaatttttggatccct

SEQ ID NO: 442982 - DNA, 122 bp, Homo sapiens
atggtgtctgcaggcaccgctgtctcttactgtgtgtcaggtgcaatccaaccttagtggcgcccctgagggtgaactagggactcctcaaagtgctctggcagcctcagatctacattctc

SEQ ID NO: 442983 - DNA, 122 bp, Homo sapiens
ggaggcgaggggcctaactagtggccgggcgctgacctgcctgtcctgtctgttttgtctcgcagtgaaccccaactacaccggtggggaacccaagcggtcccgaacggcctacacccggc

SEQ ID NO: 442984 - DNA, 122 bp, Homo sapiens
aggctttcaaacattagaagatcaatattctgttgccattaaaatttctcttctgtaccacgtaaagttctgattaatcactcttcaagccagttttacatattcctctgtcttctaggcac

SEQ ID NO: 442985 - DNA, 122 bp, Homo sapiens
aatcaagaggaactgcattctgatggcacatccactgcttcttcacagcagcaggctccccggcagtctgttcctccttctcaggtacaagcacctcccatgcttcaccattacggcctcct

SEQ ID NO: 442986 - DNA, 122 bp, Homo sapiens
tgggggggggcctgcagaccacagcctctgtttatccgcagtgcaggtgcaaggcagtggcgggaaggcggtgcccctgggacttctcccaatcaatcaccccacctaggccaccgggtggc

SEQ ID NO: 442987 - DNA, 122 bp, Homo sapiens
gctgcaaggcttaaatgaggtaaaatcacattcgtggttcatcacatgggcttaagcttccgacagctctgaatttggaaccatgctctgtaactattagctggccttggcagaatactaaa

SEQ ID NO: 442988 - DNA, 122 bp, Homo sapiens
tacctcttttttcctgaaactccactggcagtcagctcctgctagcaggtgagtgtggctcgccctattggcccatgccagagctcaaatggctagaacctactgaatcaatggtgctaaat

SEQ ID NO: 442989 - DNA, 122 bp, Homo sapiens
tttccaccatgagccatctacttgctatgagaaggcatgctttcttttatttatcctaaacgtgtattttctgagcttccagcaaattctgcaccatccccttagactagtctggagtagga

SEQ ID NO: 442990 - DNA, 122 bp, Homo sapiens
ccctgatctagaacagggtatgtctgatctagaacaggctattaactttctgtaaatagccggataaatactttagtctctatctcagctactgagctctgcagttgtagtgggatggtggc

SEQ ID NO: 442991 - DNA, 122 bp, Homo sapiens
tggaagcactgaagaattgtatgtaaggtgcaaaaagctgtagactcacctgtatttctacgtttgtctcacatctagatccctgtttggactttttcctatgtatccatcagccaatccat

SEQ ID NO: 442992 - DNA, 122 bp, Homo sapiens
gggcggctgtacagtgagttttaaataccttggtccaaattttcaaacacgtatcgttagcgtttcccctgttgctggccccagagtgttcggttcactgggtggagcatgctctgagcccc

SEQ ID NO: 442993 - DNA, 122 bp, Homo sapiens
cggtggtagttcgaaacttccggggcttcttcgattacttccggttcgcagcgcggccgacggcgcgctgtgttttcgcaaagcttccgaggattctcggcaatttccgcccacgcccgaaa

SEQ ID NO: 442994 - DNA, 122 bp, Homo sapiens
gtgagggccaggagggctcttgctagaggtgctgatctctgttctgtcttctctcggcctcgtgcctctgcctctcccatgcttcctgcctgaggtgctgtctgtgcaccccccacgccaca

SEQ ID NO: 442995 - DNA, 122 bp, Homo sapiens
ctttggattccacagaattgctaagaattctgctgcgtgctttaactttcaaagaggctacggacagagagtggaaacttcgctgggctcccaagacaggttttctgcttccttattaaaca

SEQ ID NO: 442996 - DNA, 122 bp, Homo sapiens
gactaccacaaccccgccggcttcaactgcaaaggtgaggcggcggcctcagcccggccgcgtgtccctgacctgggcggaggtcccagcctcagtgcccgcaccccacctccccgtcggga

SEQ ID NO: 442997 - DNA, 122 bp, Homo sapiens
gggaacaagaccagccctagcttcaagggaagtgggtgatcgggtttggatttgtgtccccgcccagatctcatgccaattatcattcccaatgagggtggtggggcctggtgggaggtgat

SEQ ID NO: 442998 - DNA, 122 bp, Homo sapiens
ggcaccagatgcaaacggacaacgagagagacggatcacagacgctcgcacacggagtgtcggacgacggagaagccacaggtacagcttgtccagacctgggctgccggctccactccggg

SEQ ID NO: 442999 - DNA, 122 bp, Homo sapiens
tggccttcatcatctccccaagtactgataacgtcgtcaacgtggacttcacgccatgatcgtccacaacggtggcctctgtctcttaccttctgagggagagcatcagtgccatctgtctg

SEQ ID NO: 443000 - DNA, 122 bp, Homo sapiens
ttggtggataaatgccccagctctctcaccttccaatgagggacttcagcctacaccacacggaacagaagaactgcccagctgagctcagccaaccatagagtcatgagaaatcatcatca

SEQ ID NO: 443001 - DNA, 122 bp, Homo sapiens
ctgtttcagggatattggtttctcatgttcagtggagaaaatccccagtaatttttagaccggattgcagaggaaagcaagactagttctttgaaacttcattgaccccaatacatacctgt

SEQ ID NO: 443002 - DNA, 122 bp, Homo sapiens
ggatagccccctctttctgtactatttggcacatacaaatttggaaggagacaggaaattcgtgtccaacacaatgcgtgagaggcatgatgagagctagcagcatgaattatgaatctcct

SEQ ID NO: 443003 - DNA, 122 bp, Homo sapiens
attctgcgccacacagcaggcgctgttcctcccaagcgtggccttggcatgaagcccacacgcacccacacagcaggcgctgttcctcccaagcgtggccttggcatgaagcccacatgcac

SEQ ID NO: 443004 - DNA, 122 bp, Homo sapiens
aaagtatgtgcctgcttcgtacactgaggattctcagaaactggtaaggattcctcttcacgatggcaaactaagactgggattagaaaaacccctggtcacaggaaagtggtcagcaatag

SEQ ID NO: 443005 - DNA, 122 bp, Homo sapiens
cctggtgtctataactctggtttgtttttttagaagtttctgccttttttgcttctacgtcgtcttagcttgcaggcattcattcagaggtactgagtaagcactcacttgtgccaggcatt

SEQ ID NO: 443006 - DNA, 122 bp, Homo sapiens
gctcacaagagctgacagttagcaactgttcctctgggattatttgcaccatggaaataacgcaattgctacataccagggattctttttttttttttttcttttaactagcatacttctgc

SEQ ID NO: 443007 - DNA, 122 bp, Homo sapiens
taaactcgcccgcaggtgggctgagcctcaggtgggtctcccgttccctgtgctcccctgcggccttcctcccgggctttagggcagccgcaggaggggcaggctgggaggtgctgccacag

SEQ ID NO: 443008 - DNA, 122 bp, Homo sapiens
cctcgtggtcagtccctgatctcaccacccggctgtaggcctcgtccagcctcactgaggcgttcagctgtcagatgtgggtgaatcagccttgcccccaaggctcacttgttttactaaga

SEQ ID NO: 443009 - DNA, 122 bp, Homo sapiens
actccagctgccctttgtgaaggcctctggagtcactcatacaaggtcagcaactacagccgagggagcggccgctgcatccagatgtggtttgattcagcccagggcaaccccaacgagga

SEQ ID NO: 443010 - DNA, 122 bp, Homo sapiens
aaactcccgcagctgtaaatcaccctgtcctcctgggtataaagcgcctgtccatctcggcgtgggagagaggagacgctcgccgtcccctgacccccagctcagcgccggctccaagccca

SEQ ID NO: 443011 - DNA, 122 bp, Homo sapiens
ttcatatctgtcggatgggagggtctccattttctgcataggagaggcagttggtggtggcgtggtatttaccgtcaaaagtgagatgactgcaggttagtggtaaacaaaacatttcatcc

SEQ ID NO: 443012 - DNA, 122 bp, Homo sapiens
caagattcagttctaccgttatcggctgtgtgactgggtaaatcactacaccgcaagcctcggtttcctatttaccaaatgggtcgaataatgcctgccacatggggctgctctgaggagta

SEQ ID NO: 443013 - DNA, 122 bp, Homo sapiens
accaaaaagcataaaacactcactaacagagtaacaaactgagaaatctacttggatttccgggctgtttcttttacttgataaaaagacacaaaatacaaacatgaaaaaacaatacttta

SEQ ID NO: 443014 - DNA, 122 bp, Homo sapiens
tttaaatggcagcctagaataatctcgtgctaaggattttgttcctgacccaggttgaagcggaggagagggtgtaaaggatgcaactgcaagtgttcagctagtttcacaaggtgctttgt

SEQ ID NO: 443015 - DNA, 122 bp, Homo sapiens
cactgcactccagcccgggcgacagggtgagattgtctcaaaaacaaaacaggctggacacggtggctcatacctgtaatctcagcactttgggaggccgaggtggaaggatcatttgaggg

SEQ ID NO: 443016 - DNA, 122 bp, Homo sapiens
gatgcggagtgctgctctctcctgcaggcgtcctttggggacagagcaggttggtccatccgagtgggtcagtgggtcggccagcaggcgtgcccagagggaagggcaggaagcccaccctg

SEQ ID NO: 443017 - DNA, 122 bp, Homo sapiens
gaggcaggggcgtgtccagaaaggcgggagcttccggaaccgcttagagctaagggagctcggagcgggggccggggccgagggcggagcagggtggggaaggggcgggtccagaaagacgg

SEQ ID NO: 443018 - DNA, 122 bp, Homo sapiens
cgttcgggctagaggcttaccactgttcctgcgtggctaagtgtccgggttcgtcctaatcgagctgaacactagtcactgggttccatggttctcttccatgacccacggcttctaataga

SEQ ID NO: 443019 - DNA, 122 bp, Homo sapiens
ggcggaggccagcgccagtgtcctgtggtgaccacagcagcctgctggcatctttgcccccgccgtgccacgtcatctgggctcactgtgcgttttctggctcaggcctgaggcagccacgt

SEQ ID NO: 443020 - DNA, 122 bp, Homo sapiens
ggggcagagttcccctcccagtctgggtgggaccggaggcacggtgatgggggcggggggcgtcccctcttccccctcttagaccagagggtaggggagaggtgcgggcgcagaggcttccc

SEQ ID NO: 443021 - DNA, 122 bp, Homo sapiens
agcctggcattcgtactggccctggtcgtggagggcaacaccagagattctaagtgttcccgatgacaggaccaggtgccgccggtccacggagagctggctccctgcaagggcatgggccc

SEQ ID NO: 443022 - DNA, 122 bp, Homo sapiens
cgaggctttcccgggctgccaagtgcctattgatccacagctccaacagcacagaaatcccgtgtcttgtctgccgggcacgcagggagctccgagaacacatcagtcagcgcccagagagc

SEQ ID NO: 443023 - DNA, 122 bp, Homo sapiens
ggttggggaagaggtcgcgcaggctctccagtccgtagacacggaagagcagcaggtagtcggtgacctgggtgaggcgagggaagctgaggccgcggaagtcctccccggtggctgtgaac

SEQ ID NO: 443024 - DNA, 122 bp, Homo sapiens
agtgtgtttagcgctcaccaccatgtgcaccagcttgttgctagtgtacagcagcctcggcggccagaaggagcggcccccgcagcagcagcagcagcagcagcaacagcagcagcaggcgt

SEQ ID NO: 443025 - DNA, 122 bp, Homo sapiens
ctgttactcagctgctgagtttaccatgaaaagtttctcagctcgttaaaggaatgttgacgaatctgaggcctcttggctctttgaaatcaggttggctgttgatgggaggtcagaagctt

SEQ ID NO: 443026 - DNA, 122 bp, Homo sapiens
tcatagtacctggtattccccagaaaaactcttgtacttatgtaactggacacatatacacgaatgccaacagtcccaaatagaaacagcccaaacttccttcattctggatgaatacatta

SEQ ID NO: 443027 - DNA, 122 bp, Homo sapiens
ccccagttcaacaagctggaaaacgctctgagtcacggagggaccccaaaggcaatcagccgctccccgccatcctgaatcttcttccgctgtggaaaaacctgcgctagaggaaaccggct

SEQ ID NO: 443028 - DNA, 122 bp, Homo sapiens
ggtagccggactcccttttcctatatactttccttttgagcttttgctaaaatctggagacgtggaatccacccgcggaaactccgagcccctccgactgagcatgcgccatcgccaggcgg

SEQ ID NO: 443029 - DNA, 122 bp, Homo sapiens
cataggggaaataaaactactaaaatatgcacagggctcaatgtttaatctgtccagcttcgtataccttataatcatcacagaagaaaggaggtatataaacattacttatctcacctctc

SEQ ID NO: 443030 - DNA, 122 bp, Homo sapiens
gacacttgaccgcgtctgccggcccctccccttgtccgtcccctccgcgccgctggcgcgcgccttctgaatgccaagcattgccataaactccggggacaaaagcctgggtcacaaaagcc

SEQ ID NO: 443031 - DNA, 122 bp, Homo sapiens
ccggcctgacagttttgcccccacctccttcttgagcttaaggatttatacgcagggccccgtttgcctgctgtgtccccagtgtccaggacagcgcccggtaccaaaggtgctggtaaaca

SEQ ID NO: 443032 - DNA, 122 bp, Homo sapiens
ggccccgccccgcaccccgccaggccccgcccccaccccgccaggccccgcctctctctccgaccctggacagtccccgggacccaccccgcccccaggtcctgcccccgcccgcctccgcg

SEQ ID NO: 443033 - DNA, 122 bp, Homo sapiens
ccgcgccatacacgtccattgccacacacatccattgccacgcggtcacccatcccaccccggcacatcacagctgagctggccagccgcatcgcacacgtccgttgccacatggtcacctg

SEQ ID NO: 443034 - DNA, 122 bp, Homo sapiens
ccccgcaccgcctgattccgaggggcgggagcgcattgggctgcgcacgggtgggggcgccgcgccagcttcgcgtagctgctctgacgccgctgccgccgccgccgccgccgccgccctcc

SEQ ID NO: 443035 - DNA, 122 bp, Homo sapiens
ggtgggccgagtgcaccgcctgctccgtaaaggcaactacgcagagcgggttggggcaggcgcgccggtgtacctggcggcggtgttagagtacctgaccgccgagatcctggagctggccg

SEQ ID NO: 443036 - DNA, 122 bp, Homo sapiens
cccgcgatggagctttgtgaagatgcaggcgttggggctgctcggcgatgatgacatcatcgtgtcacacacaggagccggctgccggggggtttaagagaagagcctttcggaccacaccg

SEQ ID NO: 443037 - DNA, 122 bp, Homo sapiens
acagttacgaaatgcttgtggtttccagagtggggaagtttggaaatgtggataagggatcgcggacctacaaaaccatcaccttttggatgaggtaactgagattcaaagaggtgaagtaa

SEQ ID NO: 443038 - DNA, 122 bp, Homo sapiens
acacactcgcacactagcacgcacttgggagctcagggaacataacactggttagtgagtcggtgtccctctcccatcgattgcaacttttcccctccttccctctcctgcctctccccact

SEQ ID NO: 443039 - DNA, 122 bp, Homo sapiens
tggctctcacctctgcagggctcctggctgtactcacagctcaactccctacaaggtgcccgggcagccagcagggagccctgaggctccgtgtcacccctgtcggccttggaccttggacc

SEQ ID NO: 443040 - DNA, 122 bp, Homo sapiens
atctggcccctaatgatgcaggatttttcttggcccctttgacaaactcatggaagggggcgccttgtctaccaggcccaccacaatcaaccacttgcaggagggagcacatgagcaagcaa

SEQ ID NO: 443041 - DNA, 122 bp, Homo sapiens
gagagccccaggttagatgcaggaggcatagcctgcaccccaccatggaggcagcccacacgttgcacacgcaaagccaggcacacgtacacacaccccttggactgccggataaatgataa

SEQ ID NO: 443042 - DNA, 122 bp, Homo sapiens
gagcctcagccgccgaggaagcccgaccactgggatccacatgtccttgtctctcaggcccgctccaagaatcacctagtgcagctactacagtgaaccccacgcagggtatcccacgtgga

SEQ ID NO: 443043 - DNA, 122 bp, Homo sapiens
agcagccgccgccacggccgctccggggagaaagttgctgcccgccgcgctccgacgctgcggagttggagcccggcgggtctcactccacactcacgccccgcgcctgccgagctggcgct

SEQ ID NO: 443044 - DNA, 122 bp, Homo sapiens
taagatgcaccattcatccattcaaaatgcatttaataagcagctacagttggccgggcacggtggctcacgcctgtaatcccagcactttgggaggccaaggcgggcggatcacgagatca

SEQ ID NO: 443045 - DNA, 122 bp, Homo sapiens
catttccctcgcagttccattaggatgtaccaattgttaggccgtcagctgccgatcgcgcgcccggcgaggatgcagaggattggggggaggtggtgacttgcattttatttacaacaact

SEQ ID NO: 443046 - DNA, 122 bp, Homo sapiens
tcaccggcctgcgggcggggcggttgggggctcgccttccggtgtccaggggcacggtggcggccccgggtgtttcctttccccgagctcggaggctccgggaagaaccgaaaacgtgggcg

SEQ ID NO: 443047 - DNA, 122 bp, Homo sapiens
ggcgttcaccgtctttgcgtcagccggtctcacctgatgggtctgtgtgggaacggtttccgccggtgtctgctttcagggcagcaggaggtgggtgcagtgcacaaggcatgcaattgtgt

SEQ ID NO: 443048 - DNA, 122 bp, Homo sapiens
tgactggatcaaaagtttccctaagtttatactgacagtgcacaatggcaagtccatttccgataacaggaaataacctctcaaatttatacaatcatgggatccagaaacagtgctgtcct

SEQ ID NO: 443049 - DNA, 122 bp, Homo sapiens
cttaactgaactgctgtgacttcattctgatcctctatcatttatgtgacttactgcattcgccacctaactggtctttgtgtttctgtctgtgtccgcctacaaccagttctcaaaaaact

SEQ ID NO: 443050 - DNA, 122 bp, Homo sapiens
tggaggctgaatgacccccaccctgaaagaaggagctgggccggcctcctctcatcctctcgcttccagggttaggaagcctagggccagggctgccccgcaccagcagctcggacgttatg

SEQ ID NO: 443051 - DNA, 122 bp, Homo sapiens
ggagagcgattggggagctgagcgaccacccaccgctccatggccgtccccttcgaaacacggcgcactggccatgactgactcgcccatcgccctggtttccgtccctctggtttcctggg

SEQ ID NO: 443052 - DNA, 122 bp, Homo sapiens
aaaatatacacacacatacatatatacatacacacacatatacacatatgtacacacacacgcacacacaccaaagaacatcaggaatgcagttgcgggatgaacgcgtttgcccaagaccg

SEQ ID NO: 443053 - DNA, 122 bp, Homo sapiens
acctcatgatctgcccacctcagcttcccaaagtgctgggattacaggcttgagccaccgcgaccaggcattgatattatttttttgtgatgtgtgaactccaccctgagaccatttatcat

SEQ ID NO: 443054 - DNA, 122 bp, Homo sapiens
ggagtgggccaacactatccagccactctgaccagccgaaccaggaactcaatcaaaatgcgccacagcaggaccacaagggcaaggagaccaccgccttctccagtgcttccttgggcagc

SEQ ID NO: 443055 - DNA, 122 bp, Homo sapiens
ggaagccctggacggggcggggccgccctcagtcccgcccgcatccacttgtaaacgaggcgtaccgctgctaaccccgcccctggcttttccgggatccctttcgcctcatcaccgcagtc

SEQ ID NO: 443056 - DNA, 122 bp, Homo sapiens
gacaccggcgcgcctgctgcttcgagcaggggaggctttgcactcccatcgcacttttctcgtccgaagatacgaaactccgtccgggcgtcgcaaataattcgaattcggctctctgacac

SEQ ID NO: 443057 - DNA, 122 bp, Homo sapiens
cagggatcctgcggttgcagggctgtcagggggactgtcccaaggtccctgggtccctttcggagggaagcctgtaatgcagagagtgtctattgacttggtgaaaatactgctgccttagg

SEQ ID NO: 443058 - DNA, 122 bp, Homo sapiens
cccgctcctccggcgccccctcccattcacgcagcggacgtgacacgtgcggcggggtcacgtgttgttgttgggccgggaaagctgcttccgggtcaatgcaggacactgggctccggcgg

SEQ ID NO: 443059 - DNA, 122 bp, Homo sapiens
accgcgcccagctgttttttttttttttaatcagtttcttccactatattataagctttacggcacaaggatgggggtctgtctggtcccccagtttctagcatcctgctgggcatgaagga

SEQ ID NO: 443060 - DNA, 122 bp, Homo sapiens
aacacactcagatccttcttgcctatgtgaggtgatcacagagaatgggacacaagtgaacgaaggagcccaaaactggcagatacacaagcaagagatgttgagcagcagccatgccaaag

SEQ ID NO: 443061 - DNA, 122 bp, Homo sapiens
ggctcccggccgcccacgggcgccgccacccacgccaggctcccggccgcccacgggcgccgccacccacgccaggctcccggccgcccacggacgccgccacccactccaggctcccggcc

SEQ ID NO: 443062 - DNA, 122 bp, Homo sapiens
actttgggagcacctggatgatccaggaaactctccccatctgagggaatggttggcaaccgtaattccaactgcaaccttcattgtcctgtgtcatagcatattcacaggctctagggact

SEQ ID NO: 443063 - DNA, 122 bp, Homo sapiens
tggtcaccgagcaggcgttcagtaatagctgctgtctgcggtgcagacggactagtcgcccggccaggccacttcggtgactgccctgcgcccagccgggcggccggatccagaccagtgcg

SEQ ID NO: 443064 - DNA, 122 bp, Homo sapiens
gggcacagagtatgtgcttggtcagtgggagcgggcttgttacatgactacgctgaggcccgaagcgtgaggaggatgcactgacggggaaaggtgttcctgacaatgtgcgagggcccaga

SEQ ID NO: 443065 - DNA, 122 bp, Homo sapiens
ggcccaagggcttccggactggatccccggcgctaagcaggaggagctccgattccgctgcgcagcgacccctagacctggttttgtcaggctcctcgtctttgtctctggcacagtgacca

SEQ ID NO: 443066 - DNA, 122 bp, Homo sapiens
ccggggctcgcgctcctccgcgaagctctcctcgcggggcgggccggccggccgcacccccggcctggggcctccggtcgtagtaaagcgcaggcgggcggggaggcgggagcaggagcccg

SEQ ID NO: 443067 - DNA, 122 bp, Homo sapiens
gttcaccaagtaaaatatgtgagggtctaaaatggtagcagatctaagtgtccttgtggtcgtgctagcacctctgtctctgttcattagagcagaaatattgacttaaggcagccatcatc

SEQ ID NO: 443068 - DNA, 122 bp, Homo sapiens
gcggggtccgctggacgcttgagggtcccccatgcggaccaggtgcagaggtcgggcctgcggaggagtgggaagtgggcgggcggaggggtctccgagctcacctccgagggttcggtgcc

SEQ ID NO: 443069 - DNA, 122 bp, Homo sapiens
caaagaaacacaggattagcaggtttgtagaaagaccctacaatttgatctaaaacatagcgaatgctgccaattgacttaaaccctttgtgcctcagcttcctcatctctaacatggaaat

SEQ ID NO: 443070 - DNA, 122 bp, Homo sapiens
gggccaccagcacaattaacatgttcaagcactattactaaccctaaggattaacttggccgggtcagtggctcacacctataatcccagcagtttaggaggctaaggtgggaggattgctt

SEQ ID NO: 443071 - DNA, 122 bp, Homo sapiens
gcataatggagccctacaggaacaaggcagaaaaacaaataaatacaagtgcagctggcacggcgatggtgcctctgcccccgagcaaccgtctggtgacatcaaataagaagccctgagaa

SEQ ID NO: 443072 - DNA, 122 bp, Homo sapiens
ctgcgttggcccactccgctgttgctcttcctccaacttcgcttgcttggtggcggcatccggcccctgggcagctcgccgcttgttcacgtgtgtcccatcctcctgtggagtgggcacgc

SEQ ID NO: 443073 - DNA, 122 bp, Homo sapiens
aagggacaccgatttattgagtagcagagctgagggaaggcgtaggatggctccagcttccggtcagtggctacatggtcagttcctgcagaaagagatggtcatgttgggggaagcacccc

SEQ ID NO: 443074 - DNA, 122 bp, Homo sapiens
cagtggcggcctccgggtttgctggggccctgccaggggtccgacggctgcagggtggaccggggtgggacggggcgggggcgggtccctggcaggggcgggtccctggcagcggcagggcc

SEQ ID NO: 443075 - DNA, 122 bp, Homo sapiens
ctcaccaagaagacaacgttggcgtgctggtagagggctcgggccacactgattcgctggcgttgaccaccagacaggttgatgccctgtcaccaaagaggaggaacacatcatgccctcag

SEQ ID NO: 443076 - DNA, 122 bp, Homo sapiens
ttccagccatcccagcggagaccgcgaacgtacgggtcggcagggctggtgcaaccggtgcgtggagagcagggctcagtgggtagcaataaaaatgagcttgaggtgcaggttaaggggtc

SEQ ID NO: 443077 - DNA, 122 bp, Homo sapiens
tgaaagtctgagaatgtggcctgactcacagctcttacaagttgcttcaccactgaacctcgctgagtctcagggcctcacctaggcaatggggagaacacaacacagtgttgtgggaggat

SEQ ID NO: 443078 - DNA, 122 bp, Homo sapiens
gactcaggcagcggaggagtgtctctacggaatccctcacaggacaagcttctctatccgcggccgcttttgtttcacggcaaggaaatgctaggttaacccttttatgagtaggaaggaca

SEQ ID NO: 443079 - DNA, 122 bp, Homo sapiens
agaaagaatttaatgaattgtgctgggatcaccctcatatcgttctccctcaccaccccccgtcctccgggtctctccactctggccccagcagttggcgtgtcagttatatttatattata

SEQ ID NO: 443080 - DNA, 122 bp, Homo sapiens
taggatgggcaatctagggggcaggaggggccctggagtctcctccattgagtgtgcaggcgatggtggccacagggtaataacaacctcagcgagaccctgaggtctgcccctccttagga

SEQ ID NO: 443081 - DNA, 122 bp, Homo sapiens
tactccactttatagatgaggcagctgccactctcagagctgtgataatctggccaaggtcgcatggctggcaaatggtgcggcaggggtcacactacagctatctgactcatttgttgggg

SEQ ID NO: 443082 - DNA, 122 bp, Homo sapiens
ttaggatccctacaggtagcgcctctggatacatgcgtggtctgctgacccagagagaaacgaaaggtgggagggggtacctgggggtcgccagaaggagctggtagcagtgagggtacaaa

SEQ ID NO: 443083 - DNA, 122 bp, Homo sapiens
cgcccccagcggccgcttgaggaacaaggccgctcctcgagagggatgccccgccctttccgttagcgaaccctccccggaagtgacctctcgccctcattgggtgtcctcgggaaaagggg

SEQ ID NO: 443084 - DNA, 122 bp, Homo sapiens
tggctgggccaggcatctcagagtccaggtccaggctgcaggtcatcaggcggcctttggcggacagggccaggagcttggtgccacctggtgacagacacacatggggcctggtcagcggc

SEQ ID NO: 443085 - DNA, 122 bp, Homo sapiens
cagagcaggaaaggaacgactgactgttcgccatctgggtgtaattctaacctctctgcacgcccagcccgactcgtggcctgagccgcacttgtcctcctgcctcgcccactagcaacagg

SEQ ID NO: 443086 - DNA, 122 bp, Homo sapiens
gaagtgcggctacgtggaatgctcggccaagtacaactggcacatcctgctgctcttcagcgagctgctcaagagcgtcggctgcgcccgttgcaagcacgtgcacgctgccctgcgcttcc

SEQ ID NO: 443087 - DNA, 122 bp, Homo sapiens
cctcaccatcctggacacactcgtttgtcaatgtccctctgaaaatgtgacgcccagccccggacacagtactccagatgttgtctgaccagctcagagagagtacagtgggactgttacct

SEQ ID NO: 443088 - DNA, 122 bp, Homo sapiens
gccataagtctccacggtcacaatatccactcactaccacttattgttgtctttcaacagcggcatataaaatctgtaacacagttcatctcacacctaataaaacagactcacacaggcat

SEQ ID NO: 443089 - DNA, 122 bp, Homo sapiens
gcccgggagcgcggggaggggtgaaagggcggggccggcttgcgtggcgcctgcgttctgcgtgtccgcagagcccggagagtccctgataatctaagactcatagccaccgactagcaatt

SEQ ID NO: 443090 - DNA, 122 bp, Homo sapiens
tcaggtttgaaaatatcagagttttaggaggactaaaatcctcccaggttcctgtgacatcgcaacggaaaaagccttaggaatgatctagacgatcatcatctgagattgtgggctcctcc

SEQ ID NO: 443091 - DNA, 122 bp, Homo sapiens
gttctccccattttggggtgtagcttggattcctgagcccagttttagtgcgtggccgaccgggaggccggcgaggcgctctaggccgagcggcttcgtctctatgaccacaaggggcggtc

SEQ ID NO: 443092 - DNA, 122 bp, Homo sapiens
ggctaggggtggagccagatgcacaggacaccccattggccaggggaagcttagaagagccggaacccgggagctagagaagcgaaatgacatttcctttttaaatagctggagtcggggcc

SEQ ID NO: 443093 - DNA, 122 bp, Homo sapiens
gtgaaagaacaaagcttccacagcgtagaaagggaccccagcgagttgccaatgctggctcgggcagcctgcttttattctcttatctggccccacccacatcctgctgattggtagagccg

SEQ ID NO: 443094 - DNA, 122 bp, Homo sapiens
cctaaagtctggcatgtgggaaggagaggcgtggagtctaggactggaactcctgtttctcggaggggctccttcaaggaagcagcagcagtgacccagctgttgccagctgcagtggaaat

SEQ ID NO: 443095 - DNA, 122 bp, Homo sapiens
tattttgttaccaaagccctccagatggtatcagctgttcaagaagatacattttggaagcgttgggaaggtagggtcaagaatggcagtgtggtcaccatcctagcattaactgctgggca

SEQ ID NO: 443096 - DNA, 122 bp, Homo sapiens
aggtacctactgatctttctagagaggcagccttcagacctatgttcccagaaatctctacgtttgtgcctttcccaactagagaattaactcttgcggggcacaaaacagcctctatttct

SEQ ID NO: 443097 - DNA, 122 bp, Homo sapiens
ttggtgtagggaaccaggctgatgagcctcggatgtgtgtgacacggaccaaagggaacacgggctcagccacgtgagtttctcgcagtaacactgcagtctcgctattgccgaaacgtgga

SEQ ID NO: 443098 - DNA, 122 bp, Homo sapiens
ggaggctgaggcaggagaatcacttgaacctgggaggcggagattgcagtgagctgatatcgctcttggtgacagagcaagagtccgtctcaaaaaagaaaacaaaacaaaaaagtaagctt

SEQ ID NO: 443099 - DNA, 122 bp, Homo sapiens
tttgggagtcttgtgtcctttccattaacctagatgaagcacttagaaggggctgggtcacggtaaggactgcacagtgggaagcattttgatcacgattgtcactatgattcttcctgtcc

SEQ ID NO: 443100 - DNA, 122 bp, Homo sapiens
tgcagcctcgctctgccccagcacactcacgcagcccggcccagcctggtgggcaccactcgcagcctgagggcgaagacactgaggtgttgctgcaagaaacttgtggccccaatcttatg

SEQ ID NO: 443101 - DNA, 122 bp, Homo sapiens
ggccagtttgggccgggactcctagaatttgaatcgggggtggtctaacgctgtcgcctgcggggtgtgcaggaggcccctagtgaagccaagagttcgtagagcctgggcgccgctctatg

SEQ ID NO: 443102 - DNA, 122 bp, Homo sapiens
actagagggaagaaaaacaaagaaaaccaggaggcatgccagatccaacccaaggaatagcgactgcatgaagaagggaaggaagtccagcttcagagacagacctcacgaagcagccacaa

SEQ ID NO: 443103 - DNA, 122 bp, Homo sapiens
ctccacagcggagcaccagcccagtggacacccctgggtgtgaatatgaacagcacagcccgcccccagcagggcagcccccagagcctgcccagagccagcctggcagtccctctgcccat

SEQ ID NO: 443104 - DNA, 122 bp, Homo sapiens
tgacactgcaaatgagtaagaaggggtttcctacggggtcaggtgtcatgctttgcacagcgatgcccaccagcacgttcaagggaaggcagatgtttcaagcctgactctcacactcagca

SEQ ID NO: 443105 - DNA, 122 bp, Homo sapiens
accactcggccttcccctgctcctgcctgccaggtgctaaaaatgccggggatgcgcaggcgcactgggagaggccgcagggcacgctgggcagtgcttctgggccctctgctgctcctgct

SEQ ID NO: 443106 - DNA, 122 bp, Homo sapiens
cacccacaggcggccgcccagcaccccggtgcccacatgcctattccagaagctgctccccgcccacccacaggcggccgcccggcaccccggcacccacgtgcctattccagaagctgctc

SEQ ID NO: 443107 - DNA, 122 bp, Homo sapiens
tccctcacgtcgatggcgatgtagttgagaccattctggaagccggcagaggtctctctgcgcatgggcgatccaccgctcccaggacaaccgaccaagcccccgggctgacccggggtcca

SEQ ID NO: 443108 - DNA, 122 bp, Homo sapiens
acgaagaagccgccctcggccaggtcgcagccacatgctgggggaggacgggcgaggtggcgttagcggcagaggggaccatctccacgtcccccaggcccgaggtgcacccccctccacac

SEQ ID NO: 443109 - DNA, 122 bp, Homo sapiens
gaagatttattttattttttaaagaaggagtagcctcctagctggttacaccaccctaaacgtggactgggcattgtaatggctttagttcatgaaaaatagggaaacttttcattacatgt

SEQ ID NO: 443110 - DNA, 122 bp, Homo sapiens
ttatggaatatctagagagaaggaactgctaagggacaagatgagcagcagcaatgcctacggcaagagaacttgctcctgataaaccacagatactgaataatgggcaaatgaatcattta

SEQ ID NO: 443111 - DNA, 122 bp, Homo sapiens
cggttcctcttccccctccttctcactgtttgttgtgtgtttgatgtgttaaagcaggagcgagaacccgagcagcgccatgagcaacactaccgtcgtccccagcactgcaggtccgggcc

SEQ ID NO: 443112 - DNA, 122 bp, Homo sapiens
aatattttttcaaatacttgagtgatcagttacagacactaatctccaaaaatctcaatacgggttctaaggctaggtgagactatcctctaccctagaaggacatgcactttaaggacagg

SEQ ID NO: 443113 - DNA, 122 bp, Homo sapiens
gggatccaggttgtgacatgctgacagatttgaagactggatctaatgggagagcagaaacgatatcctatattagcctctgtgtgttgggcataacgatggcaggtagccatgccaggaaa

SEQ ID NO: 443114 - DNA, 122 bp, Homo sapiens
ctcctctgcttcaggtcagggtcacggtgttacacactatggctcctcctgtttacctgccgcctgcaggcctgagctcatgaatagccaagcaaaagcctttgccctgaaaactagagttt

SEQ ID NO: 443115 - DNA, 122 bp, Homo sapiens
ctcctcgggttcccatggaggtcgttgctgagtgtgtgtcatgaagtgcctgaccattagcgggagggcaaccctgctctcatttcaatctctagcaagctctcactcagtgggtaatgaaa

SEQ ID NO: 443116 - DNA, 122 bp, Homo sapiens
ttgccctgaagagcgctcctccttccggtgaaagtcgtcgggttcccagccgggagtctgcggagttctcatactctgttacccagcttcctttgtatgagtgctgttgcgcacttccggtg

SEQ ID NO: 443117 - DNA, 122 bp, Homo sapiens
aaggcctccaagttgccttctttcccaaactataacagggaaaaacatttgctgagccagcgaattatgctgctgctttaaaaaaaaaaaaaaaagagagagagaagcttttttttcctttt

SEQ ID NO: 443118 - DNA, 122 bp, Homo sapiens
aaagcgctctacagccaggaaaagtgaagcgaaaacggcttccgtagactccgccaccaccgagtaacagaccaactctgacagcccgaagatcgcacttccgcttccggggcatagcaccg

SEQ ID NO: 443119 - DNA, 122 bp, Homo sapiens
ttgggcctaggaagtcaggccttcaggtttcaagaatacggatagtgtgtagggaagggacgtgagaaaagcccttggacgtgactcaataatgatgctcagatctttcacactcaccctgt

SEQ ID NO: 443120 - DNA, 122 bp, Homo sapiens
tcttcccagggcgcgacggggtcctggcgcgcacccgaggggcgggcgctgcccacccgccgagactgcactgtttagggaagctgaggaaggaacccaaaaatacagcctcccctcggacc

SEQ ID NO: 443121 - DNA, 122 bp, Homo sapiens
atgggaataatagtgtcttcccttcagtgagaaccaaatgagacagtactttctgtacatcgaatgctggtgtagagcagttagaacaaatctgtagatctgtagatcgatgctggtgtaga

SEQ ID NO: 443122 - DNA, 122 bp, Homo sapiens
gggtgccggatgatgacgtatccttgcacctggcgatgattggttcgcgtggagaggcgtcgtccgacaacgcgactcggaacccggacctatgttctcgcgagagttagcggcctccggtg

SEQ ID NO: 443123 - DNA, 122 bp, Homo sapiens
gcttttgtggtcatttgtggacatgtgcagagcaggagatttgaattgccctgtaagagtcgcccagttctcagctgagagtaacaaagcgatgctccgccttcttgtttcagctctcacac

SEQ ID NO: 443124 - DNA, 122 bp, Homo sapiens
aacaggatggagcaggctcccaagcttgaccatgcatggtttgcacctgggggatgcacccgggggtgcttgaccatgcatggtttgcacctgggggatgcacgggggtggggtgggggggg

SEQ ID NO: 443125 - DNA, 122 bp, Homo sapiens
aatgcaggtagaagacagatttcccagggagagaatgtacacattagggttaatggcaaacgtgagcagtttttatgtgtgacactggataagggcagacagagggcacttcccaaacagaa

SEQ ID NO: 443126 - DNA, 122 bp, Homo sapiens
ttgcataaaaactgttgaattgagtaagacttcacctttttttgtaacacagagctctgacgcaaagagtcattatcaaatcatcccatgaactttaggaagttttttaaatgaaagcagca

SEQ ID NO: 443127 - DNA, 122 bp, Homo sapiens
aattcctggttattgtccccagtgattacaacagtctccctaatttcagctgtggctccccgttttgagccaccaggataatcctgcattactccaaactctctaagtaaactcgtattcaa

SEQ ID NO: 443128 - DNA, 122 bp, Homo sapiens
tagaaaggaaagcgctctggggccatcgcgctagttagcttatgttaaacaatctcacctcggctgaccttataatttctccggcggcaaggacaacaaccaacgcgttactttctatttca

SEQ ID NO: 443129 - DNA, 122 bp, Homo sapiens
cttactcgaggtggaaccaatagtaacccagttcttacttactttgtcatagtcatattgcgaagagcatctgctatcaaatctaaggtacaggcagcgagctcctgggatatggaccgttt

SEQ ID NO: 443130 - DNA, 122 bp, Homo sapiens
tcggtcggcccccccacgccggcccttacaaaggcccccattcatgccttgcgcacaaagcggcccattcaccctggccccttgggcctcccgcccccggccgccccccgcgcctcgctatt

SEQ ID NO: 443131 - DNA, 122 bp, Homo sapiens
ggagggacttcctgtttgcttcctatctgcttcctggttctgtgagcatcaccatgtcaacgcctatttatgtctcagtggctgttcctttgtgtagctgcactaaattcagtttacagtag

SEQ ID NO: 443132 - DNA, 122 bp, Homo sapiens
tcagcccagggaacccgccctcaccgccatggtccggctgccgtgcagaccccggatggccgcctgagcttccccttgactcccgaacttcacaaaggcacagcctggggcaggacagaggg

SEQ ID NO: 443133 - DNA, 122 bp, Homo sapiens
tctcagtgtttcagacaacaacctagttcatcagtaactgagaatactcaaggtcctggccgggcttcaagactgcagggaaagcatgcagtgggccaggctctgtgcttctcaggcaggac

SEQ ID NO: 443134 - DNA, 122 bp, Homo sapiens
ccttcaagtggtgggacaagaagtcaatgctggcgtaggtgttggcagggggcagggcaccgggacccggccccccgcacccgccgccggtgctgccgacgcccacagcgctgatgagaccc

SEQ ID NO: 443135 - DNA, 122 bp, Homo sapiens
atcccggccgcctgggctccaggagccccggaaccaggataagttggatggctgccgcggcgaagcggggggcggggtggaccgtgcccggtattttctatacgggttccggggcccggtag

SEQ ID NO: 443136 - DNA, 122 bp, Homo sapiens
ctggaagaaggaagaagccagactggttagacagtactcttaactcctagcccagcctagcgtgccctgcccctctggccactgctgcagacacctgccttaacacacacacctctaggact

SEQ ID NO: 443137 - DNA, 122 bp, Homo sapiens
gagctcactactactactaaaaacattttgaagttaacacccccttatgcctggctcattcgtgcattcaacagatgtttactgagcacagactgtgtgttggagactggccactggtttac

SEQ ID NO: 443138 - DNA, 122 bp, Homo sapiens
gggccccttccagctcttgctgtgcctgaggcatcatcaggcggtgctgcccggagaggacgctgtgcagcagtgggcccacccgctcagccctcacgagcaacgttgcctggtgctccccg

SEQ ID NO: 443139 - DNA, 122 bp, Homo sapiens
atatccagtctagacaacttcctaatctggtggcctgatggggaccacttttagctgtgtcgtttttatttgttcctttaagtttcctttgtgacagaagaactagaggaactagaggggct

SEQ ID NO: 443140 - DNA, 122 bp, Homo sapiens
ctccccgcacagttcaagagcatacagcatcatctgaggacggctcaggagcatgacaagcgagaccctgtggtggcttattactgtgagtctttccgagtggccgcgccctttctttccca

SEQ ID NO: 443141 - DNA, 122 bp, Homo sapiens
gccgcagtttctggagggagccgctgcgggtctttccctcactcgtcctccgcgcgtcgccgctcttcggttctgctctgtccgccgccatggcccagtgagtgactcgccaggggcagccc

SEQ ID NO: 443142 - DNA, 122 bp, Homo sapiens
cttaagcgattctcccatcttagcctcccaagtagctgggaccacaggaaggtgccaccacgcccagctcatttttgtattttttggtggagactggttttcaccatgttgcctagactagt

SEQ ID NO: 443143 - DNA, 122 bp, Homo sapiens
tgattgggagaaaataagtgggaaacaagagtagcttggacagggggcttggacggccagcgcattgaccagaagcggcccacactacacgcgcgcgaacacacacacacacacacgcacac

SEQ ID NO: 443144 - DNA, 122 bp, Homo sapiens
ggggcagttggagccttgtagagaccattcaccttagctccagacttcccagtggcacctcggggtccccgctgaccccgtggaccctacagagggaagaggagttgtcagagaaacccaaa

SEQ ID NO: 443145 - DNA, 122 bp, Homo sapiens
gagctgtccagcgcagccgccctctaccccggatccagaagtcccctccccgctggctcccggactccccgccttaaaggcacaagctccttttgtctgggcatccccctccccctccccag

SEQ ID NO: 443146 - DNA, 122 bp, Homo sapiens
aggatgcgtgtggatggagcagaaatgttaacacacatgggaataacaaatcactacgtccgagacagcgattttggggagcacacagggaggggacttcatctgggaggaacgcattatta

SEQ ID NO: 443147 - DNA, 122 bp, Homo sapiens
aggacagctggccgctcaggcgaccctcagcccggcggggaggccatggcatgccccgggcgttcgcttgctgtgaattcctgtcctcgtgtccccgacccccgagaggccacctccaagcc

SEQ ID NO: 443148 - DNA, 122 bp, Homo sapiens
ccctgtgtcgcgatgtaggccttctgctgcctgcaggcgttgggggtatgagcccagggccggcagggagacccggcgtggtactcacctgatgctgcccgggagggtcaggaccaagccag

SEQ ID NO: 443149 - DNA, 122 bp, Homo sapiens
gtgaaaatccctatcctgttttgttcagatcgaattaccggtgcatgcagcccccagacacgtaccctctgcttgctcaatcgatcacgaccctctcacacgcacccccttagagttgtgag

SEQ ID NO: 443150 - DNA, 122 bp, Homo sapiens
caggaagcatggcacctgcatctgctgctggggggggcctcagcctgcatccactcatggcgggagggtgagagccggtgtgcagagaccacatggtgagagaggaaccaagagagagggaa

SEQ ID NO: 443151 - DNA, 122 bp, Homo sapiens
cccagtgggtgagcgcgactccagactgaaaattttgaccgttctgcttcactgcctccccgcaagaggcgggccctggccagatggaactcacctggcattcccaaggtatctgcacaagt

SEQ ID NO: 443152 - DNA, 122 bp, Homo sapiens
cggtgttcacggccccacagaccgtctgtgcacacatgctgtacatgtggcagtgagccacgggtgagggaggaaacgtcatccacaccttcgccctcccctgaggagtccgtggcacgcag

SEQ ID NO: 443153 - DNA, 122 bp, Homo sapiens
gcggggctccggtgacgtgtgtggggtcctggctctggcccctggcacaaatgcaggggacggggcccgggtcacccgcctgtctgtctctcgctggcaccgccgccggggcgtgggcagga

SEQ ID NO: 443154 - DNA, 122 bp, Homo sapiens
aagccgactgcgcctacgtggactgcgggttcgctccgggccgctcctccctgctgttcacgaggaaacctaaagtctgtgttgacccatgaaacctgatctcgttctttctcccctcctga

SEQ ID NO: 443155 - DNA, 122 bp, Homo sapiens
ctcacggccgcgcgtggccgtgcgctctgcctatgggggcccggtgggcgccggcatccgcgaggtcaccattaaccagagcctgctggccccgctgcggctggacgccgacccctccctcc

SEQ ID NO: 443156 - DNA, 122 bp, Homo sapiens
ggaaagttgggtgatcaaatcccaagttgtagctctcgatgggtcgagggcgatggccagcgctgtgctgggaacgggcagccctgccctgccctgccctgccctgccctgccctgccctgc

SEQ ID NO: 443157 - DNA, 122 bp, Homo sapiens
gcccgccgcggcgccctccccgcccccggggcgctcattggcccagcgcctcgcgcccgccgcccattggcctgcaccttcgccaatccgcccccgcctcccgcgggctgcgggagctcagc

SEQ ID NO: 443158 - DNA, 122 bp, Homo sapiens
aacgtgtgttggcaggtaggaggagtggccatcagggcttcaacatgacattacacatttcggcactacacaaaggtgcccaggtggggaagacagtgagggctgaaaactgcctagaggga

SEQ ID NO: 443159 - DNA, 122 bp, Homo sapiens
aaaattaggcggatgtcgtggcgggcgcctataatctcagctacatgggaggctgaggcacgagaatcacttgaatccgggaggcagaggttgcagtgagccaagatcatgccattgcactc

SEQ ID NO: 443160 - DNA, 122 bp, Homo sapiens
ttagcacatgactatgggctaggcattccgcttggttatcccgcttcatagacgtgagcccggttactccgacacaccgtggccccaggcagcctccccgtcctcaccaccttttcttctgt

SEQ ID NO: 443161 - DNA, 122 bp, Homo sapiens
ggcgatccgcccacctcagcctcctaaagtgctgggattacaggtgtgagccactgcacccggtgttttcggctttagagacaggttgttttgtcacctaggctggattgtaatggtacaat

SEQ ID NO: 443162 - DNA, 122 bp, Homo sapiens
ttcatccaggaaggcgctttgtgtccctttgagaccctcctgacggaaagtggcagccctcgcgggtggggactgcaagggcctcaggggcgcccggcacccaccttatggcgcgtgtgggg

SEQ ID NO: 443163 - DNA, 122 bp, Homo sapiens
gagagagctggaattgaagcctcttccttctcccttcatctgaaaactcggaacagggaacgtttgagaggttgatcaattcctgaactttcaaaggtagccggagaatcaactctagggag

SEQ ID NO: 443164 - DNA, 122 bp, Homo sapiens
gggacgcgcctgtcccgggctccaggctacgggcaagaccacagggctcctgacctttttcggcatacatgtcaccagtgctatctggaatgtaggtggacactgaggctcatctcctgaga

SEQ ID NO: 443165 - DNA, 122 bp, Homo sapiens
agcggggtcacgtcatccagcttgtgcataatgtaactgcttgtgtttagccttttcaggcgttccccagggtttctgcgtgacctaaaaacctataatcctgagaaacacccaaatgggcg

SEQ ID NO: 443166 - DNA, 122 bp, Homo sapiens
ttggacttttaaagattcacacacaaaaataaggaaaaaaaaaattcactcctaggcttgcgattgatgtgtccggtttctgcaggagcacatgtgtatgtctactcaacaaactgagttta

SEQ ID NO: 443167 - DNA, 122 bp, Homo sapiens
tctgttagtttgcctctccttcatctatcttttcttttcttttctttttagatggggtttcgctcttgttgcccaggctggggtgcagtggtgcaatctagctcactgcagcctctgcctcc

SEQ ID NO: 443168 - DNA, 122 bp, Homo sapiens
aatgaggcggccctgacctcctggggttagcgatcctcccacctcagccccctaaagcaccgggagggcaggtgtgagccacggtgccagccccaagttcccgacattctttcctaaaacac

SEQ ID NO: 443169 - DNA, 122 bp, Homo sapiens
gtgccagcgtgacggctcggggtgtccgctcccctctgggtcgaggccacagctgagtcacgttgctgctcgggctgctccctcggggggcccttgtccctcaacctgctctggtgccccac

SEQ ID NO: 443170 - DNA, 122 bp, Homo sapiens
ctatagaggtggggaaactttcagagagaattaattgtgtcctctaaaagcaatgaagtccgcttggttagtttgaagaacgatcatgtatcagtttataggaattgagacttttttttttt

SEQ ID NO: 443171 - DNA, 122 bp, Homo sapiens
cctcaagcctctctttggctttctggaaatgggcatgttcattctcatccccaggtgtctcgagatacttgtcaacggcatcaggggtactggctgctgttgtaggaactataaagtagaag

SEQ ID NO: 443172 - DNA, 122 bp, Homo sapiens
taaaatagaaatgaataatccaaacagcaaaactaagaaaccccaaaataagatatttcacgggatactgtaaatttagtaaatacttcttagaaatacgcaaattaattggaagtgccctt

SEQ ID NO: 443173 - DNA, 122 bp, Homo sapiens
ccatgctttgaatattcacacacaccacccaaatgatgaatactatctggggaggcttgccggccacagttcatttacagcacgttagctaaatgtcattattctttgcaaagtgcaggcaa

SEQ ID NO: 443174 - DNA, 122 bp, Homo sapiens
cactccctcccagctcccacatcttaccctgaaagaccaaggtaggggcgtcccagcccacgccctccggtccttgcgttccaggcttcctgggccaaggggttgcccgctgccctgaagat

SEQ ID NO: 443175 - DNA, 122 bp, Homo sapiens
gaattctgatgggaattatcaccagcctgatatagtacatacttagacttctttgtttgccgtctagctctaaccacaatgatgtaagttagaggagttcttatctgttccatacactgctg

SEQ ID NO: 443176 - DNA, 122 bp, Homo sapiens
tccagatcttgaggaagctatcccaggaccctgtcgccacagccatgccatcgtcagtcacgcccaggcagctgacgcggttgtcatgcccagccaagacacctgggagcaaacaacagcag

SEQ ID NO: 443177 - DNA, 122 bp, Homo sapiens
gaggtgtggagggagaggcgtgagcgggaaccagggctgcgggcggcgcttgcgggccagcgggagttccgggtgggcgtggccttggcgagctctgcactctgagcagcccgccggccctg

SEQ ID NO: 443178 - DNA, 122 bp, Homo sapiens
ctatcgcatccaaacagtggcgcagggccaggcggcattcatggctgatttccaccaaatcgcatcatccatctgctccccaggttccctaattcaaagccagggtgtggtacccgccgcta

SEQ ID NO: 443179 - DNA, 122 bp, Homo sapiens
gacacgcgtttcaaggtgggcctggagtgctgttcttttcactgatttttctcagtttgtcgtccgttgagtggattcggagctctttcatctgggcggtcacatcatccactcatcctgca

SEQ ID NO: 443180 - DNA, 122 bp, Homo sapiens
ccggaggcggtgaccactgctttacagccgcatccgcaccggtgccacgcagaaatactgcgcgatctgggctgctggagctggcagctagcgcctctcgctactatagaaacgcgcacaca

SEQ ID NO: 443181 - DNA, 122 bp, Homo sapiens
cgtggcgtgtgctgggcagtgttcccctgcgtggatgtcgcgtttgttcctccatttgcccgttggagcgtgtggagtgtttccagttcttgactgtcacaaagaaagcggctgtgaacatt

SEQ ID NO: 443182 - DNA, 122 bp, Homo sapiens
ctcctcaagtgagattttatgtgggaatttttaaagattggcgtcgccttgtagaagatgcggcttgtaattgaggccttgtaccatttactggatggaagcgcttgtttggtcacctgtcc

SEQ ID NO: 443183 - DNA, 122 bp, Homo sapiens
tgttccaggatcatcaggacactctgctggaggtacagagaagccaggtgctagacagagcggcgctcagcatccagaaagtccttcggggctacagatacaggtgccggccccaccccaag

SEQ ID NO: 443184 - DNA, 122 bp, Homo sapiens
agtacagctgatgtcagtgaaagaggaagagaagaaaaccgtaaaatgaagcagagatgccggcctactacttgcacctggaatctgaagggggcacagatgtgtgggactgggccctgacc

SEQ ID NO: 443185 - DNA, 122 bp, Homo sapiens
cctagtcaccgtcctcacatgcgtgcgtcagtgacctggtgaatattcaatgtgatgacccggtcactgtcatcacgtgtgtccatcagttacctggtgaatactgaatgttgtgatgaccc

SEQ ID NO: 443186 - DNA, 122 bp, Homo sapiens
cttcatactttacatgatcttcaaaatgtaaaactgttcttttgaatgaaatgatactaccgatactaccctcttaatcatcaggtaatgaatgaaatgatactatcctcttaatctcaggc

SEQ ID NO: 443187 - DNA, 122 bp, Homo sapiens
gctttcattccctgccccgagcggcgctccccgctccgtgcacgcatctccgctgagggccgccctgacgcacggccttctgccttgaacacagaacccctcagcccttcctattagccgtt

SEQ ID NO: 443188 - DNA, 122 bp, Homo sapiens
gctggggagaggggtgggagccccatcctggtttgggtgccccagggggcgctcactcggcgtagcctgtgctccagggcaggcggcggcccgtgtccggggggctttgcacagcccggccc

SEQ ID NO: 443189 - DNA, 122 bp, Homo sapiens
ggagagaagccaaaaaatatatatgttccgtggtcagagtcttctttctgataagctacccgagcattggtctaaaacatctgttttatctgttgattttggtttgttgttttggggagtgt

SEQ ID NO: 443190 - DNA, 122 bp, Homo sapiens
aaggactggacaaaacacatttacaggttatgtagtccaaatctactcctaaaaagactccgaccttctctagctttacaggtaagatttaccaactctttaaaaatacatagtgtccttgt

SEQ ID NO: 443191 - DNA, 122 bp, Homo sapiens
accctgagcacatgaagaacgtcatcgccctggcctttgactaccgggcaggcacctctccgggcacccccaatcgcatcttcttcagcgacatccactttgggaacatccaacagatcaac

SEQ ID NO: 443192 - DNA, 122 bp, Homo sapiens
aatattagtgaacattcaggactttgctagatttcccaatctgggtgaaggccggagaggcggaagatcaagcttctgtgttcattcccttctggaatcctgcggtccaacctgagggcccc

SEQ ID NO: 443193 - DNA, 122 bp, Homo sapiens
gttttggcccgccgggccctcgtagggcgaggggagctctgggaacggggcctgtgcgcacgcgcatctgacggttgtctcggttactcatgtaagcggaaattcggtgggctcttaggata

SEQ ID NO: 443194 - DNA, 122 bp, Homo sapiens
aaatggaagcatcaaggactgttttgcctctttcgggttagctggtagtgagcgggagaacgagggaaggcgggcggggctgcagtctctccacgcccttttcatttccactcaaggagacc

SEQ ID NO: 443195 - DNA, 122 bp, Homo sapiens
cgcagctggggagagagcacgctccaacgctgccgtcggtttggtttaacagccacaagccgtcgtttattccgctacttccaattcctctacagaacagcgtgagatgctgcaccgcccgg

SEQ ID NO: 443196 - DNA, 122 bp, Homo sapiens
gagggaaaaccaaaaatgttgctgcaaatcctcccaaccaccacttggataatgcatcagcggcaatttctccagcgggaaagggagggggcgaggtccctgaagcagcccctcggctcgga

SEQ ID NO: 443197 - DNA, 122 bp, Homo sapiens
gcccctcgctttgcacaactgcccccttcagcagcagccagcctcaatgaaagcctgatgcgcctttgggttgtcaggacgacagctccatctgaggcctggctgatttccttaagaagggg

SEQ ID NO: 443198 - DNA, 122 bp, Homo sapiens
agcactgtcaaacgctgtggacacaggtctcttgcatacagaccagatacactccactcccgccctgcagcatggggtaccctcctggtggctctgaacatggggaggagtcaccggtcatt

SEQ ID NO: 443199 - DNA, 122 bp, Homo sapiens
gtgtgatgaagtcagaaagatgctcaggagacagataatgaaaggctttagatgccattccgaggagtttaatcctaaagacattaagaaggaaggcccattgaagtgcataaggaatgatt

SEQ ID NO: 443200 - DNA, 122 bp, Homo sapiens
ggcgagcagaagcagctgggaagcctgtcccacgggagggacatcacagggcccttaagccgagagagatgcatctgggtgtggggggtatggggtggggtctcggttgagcagcagttcag

SEQ ID NO: 443201 - DNA, 122 bp, Homo sapiens
agatagcccccaagttctatagctatagggttcccatcagttgaaacagatttgctttttcgctattcctcttcgtagccccaaattcgttgttggaggcggtctccgctgtgtcatgccat

SEQ ID NO: 443202 - DNA, 122 bp, Homo sapiens
ggggtgtagctcagtggtagagcgcgtgcttagcatgtacgaggtcccgggttcaatccccggcacctccaccagttttgggagtgcgcactttctcctctcaatggaccgcctttccactt

SEQ ID NO: 443203 - DNA, 122 bp, Homo sapiens
ctgaggtcaaatgtgtatgttttatcaaacacccaaatgtgaatgtttaaatgtttacagcggtgtaagggagtcagctcatgcttgctcaactgtcagttcattacaggctcaattcccaa

SEQ ID NO: 443204 - DNA, 122 bp, Homo sapiens
gacgcaactcgacctcgtttgcaagaaattctgtatccaactctcttcagtgcgtttcgccgcccctagtctagtctggctagcccccaattcctttaaaaggggttaaaacgggtgttgca

SEQ ID NO: 443205 - DNA, 122 bp, Homo sapiens
agcggccctggagggaaatccccaacaaaaattaattttaaaaatggctcatccaggaaacgcatataagggctgatcgcccagccttttgagccttttctggggtcataaacctctggaga

SEQ ID NO: 443206 - DNA, 122 bp, Homo sapiens
aatggcggcggctgtgcggcgccgcggccgcgcggggaaggattcccgggaggcactctgcgccgctcctgctgcaccgctccctgacgtcctggtggggaggctctgaggacacagcgttg

SEQ ID NO: 443207 - DNA, 122 bp, Homo sapiens
ggattcacatcacagagctttgccatctccccaaagagacatcttgggagtttggggtctcgactggaggaatttgcgtgctctcaccttccctctgtggccagtttcgaagactatgccaa

SEQ ID NO: 443208 - DNA, 122 bp, Homo sapiens
aagcccattgttctatacctgatttttctattttatttttaaggtctttttggttcatcacgggtacaatatgttgtagatcatgcaatgaaaattgttttcctcaatactgacccctctat

SEQ ID NO: 443209 - DNA, 122 bp, Homo sapiens
aaggcacttttgtctttcttggttcccactgaagattttaccccacctagcccttcgacgcgtctgtgcacggggccatttccaatatggcagtagccccgcgactgtttggggggctctgc

SEQ ID NO: 443210 - DNA, 122 bp, Homo sapiens
tattagacctcaagaagatagtgttgttgcttacaaagtcagtgcctctagctagttgtgcgcactgagcctctggctgggggcattagctctctgctcactaagcttctttattatatttc

SEQ ID NO: 443211 - DNA, 122 bp, Homo sapiens
acccacggagatcaggcaccatgcaggtcttcatgaggcaccgtgcaggtcttcaggaggcggcgtgcaggtcttcacggggcggcgtgcaggtcttcacggggcaccgtgcaggtcttcac

SEQ ID NO: 443212 - DNA, 122 bp, Homo sapiens
caaaatgcagctggctacaacagcgcctccagtctgcagcctcctccagagtggtctccacgctgggttatcctcatgccctcttactgttcctggtctggggtcttgcacatcatagccac

SEQ ID NO: 443213 - DNA, 122 bp, Homo sapiens
ccctgggattgtgcccaaggagcgcgaattctcctcgtgtcggccttgaccccgcgcggccggtaccgtccccaaagccccccacccgtggcctttaagtttaacttaatacagttcagtgc

SEQ ID NO: 443214 - DNA, 122 bp, Homo sapiens
cgccttctgtccccgtaagtcccacccccgtcccccgcttcggccaccgcgcttcggccacggcgacttggccaacaacagcggcagcagggtctccccattgagggaagcacgcaccccta

SEQ ID NO: 443215 - DNA, 122 bp, Homo sapiens
gattcactcgtttctgtgaacctttctcctctttatcccccttgatgttttcctaccacccggccctgttgtgaggtaacactgtcctcaggagaaagctgaaaaatgcattgccgagctag

SEQ ID NO: 443216 - DNA, 122 bp, Homo sapiens
gccattttctccctggagaggctggagtgtccaaaagcttggccgactgagattgctagtcgtgtcagggcgggtgcgggactgaagaagggcgagggcgagcggcggggactggggaaggg

SEQ ID NO: 443217 - DNA, 122 bp, Homo sapiens
gccctttaaagctgcggttagaaaggcagttagggaactcaatgatgggctggaaggagacgattgaacgcacagccaaatgcacagttagaaatttgatattaaacacgctctctcaagta

SEQ ID NO: 443218 - DNA, 122 bp, Homo sapiens
ctgtccctccccaccagcctctctctctcttcaggctgtccctgtcacaggtctcatatacgtgccagtgcccccatcctcccctaaggtgtcagcttacatggacactggggccttgccct

SEQ ID NO: 443219 - DNA, 122 bp, Homo sapiens
aaactggatagcagagctgggggggcacaaaaagaggaagacaaactgaacaaatatggccgagatgatggcactgcctaccccattctggctaggtggggtgcatgtggcccctgctttct

SEQ ID NO: 443220 - DNA, 122 bp, Homo sapiens
gacctctccccaaccgactaccacttcttcaagcatctcgacaactttttgcagggagaacgcttccacaaccagcaggatgcagaaagcgctttccaagagttcatcgaatcccaaagcac

SEQ ID NO: 443221 - DNA, 122 bp, Homo sapiens
tccggctcctgggtgtcactgggatggtggggcagctgcctagctggagcctgggactcacgtgcccccaaccccctctctcgcagagttatgtcatgcccaggccagcagggggctccatg

SEQ ID NO: 443222 - DNA, 122 bp, Homo sapiens
atgtgggggaggggagacaggggcctttgaatacagcgcgggactcagagggggtccccccgacctaagacgtggtaaactgaggccggcgaggagggaggctgagtccggggaccaggcgg

SEQ ID NO: 443223 - DNA, 122 bp, Homo sapiens
tgagcatggctagtaattactgcttcccccacccccgcccagcttcacccgcccccaccccgcgctgggtctgcagccattactccagctgtcactgggcggaaagcaagcgccgtcccccc

SEQ ID NO: 443224 - DNA, 122 bp, Homo sapiens
tctccctgccccaggagccctcccaggcgctgagtccctgctgctgcagcatccagccaccgacccagctcctgctgaccacgatgtcgggtaactcggctgcttctcctagggtcgggtca

SEQ ID NO: 443225 - DNA, 122 bp, Homo sapiens
gctgttagctgcattcctgtttcatgatgtgcagtgtcatctccttgcagcgtgagccctcgctgcagcacgcaggacgaaggccgcctgccactggaacgcggtctcgcgggtgtcggggt

SEQ ID NO: 443226 - DNA, 122 bp, Homo sapiens
ccgattcgaaaaaggaactttctcgtaacagttgtacaaccaggctaaagagcacaccctcgtcttccctgaaagggaggaaacatgcaataatgtgaggtaattaaatttagccttagaaa

SEQ ID NO: 443227 - DNA, 122 bp, Homo sapiens
agaaggattagaaggagagggggtgaaaatgacttgcatttttagaaaaggtgacaagtgcggcttttgatatatctttataagagcacagcctacaaaatggttctaaaaagttaagggga

SEQ ID NO: 443228 - DNA, 122 bp, Homo sapiens
tgttcctttgctcctcacaagtctctttctcttttacagctgggcctacacttcgtcgcacggtaagaagaacgcctgtctcttgtgctttgggctcttgtcgccccgctttcctctgttcc

SEQ ID NO: 443229 - DNA, 122 bp, Homo sapiens
ggacgcggaagtcaggcccggggaggggaactggagttagagcaagtggaagagccctggcgactcatttggtggggatgaatggggagaggaaaggcatccctgctgccatagttttaccc

SEQ ID NO: 443230 - DNA, 122 bp, Homo sapiens
agaagcacatgccacatgaaaatagtcactaagaataaatcaagccaccaaaggagcccgcgtcagtgcaggccaggccgcaggcaggatgcaaggaaggcgacactgaccccagctggttt

SEQ ID NO: 443231 - DNA, 122 bp, Homo sapiens
tgtcctcacaagaccttaaccctcacattaagaccaatcacctgaaaaaaagcaccatgccgtacggtcaggttgactatcctgctacagttaatcccttcatatcatataatgaggaacta

SEQ ID NO: 443232 - DNA, 122 bp, Homo sapiens
gttgtgcctggtgctgccgctgtgttggtgacgagaactgataacagcatctcacaacagcgtagccccggcatcgcactttgttttttggttttaggacaccagttacttgataccgaagc

SEQ ID NO: 443233 - DNA, 122 bp, Homo sapiens
tagtgtcttcaaaaacgagaacccttgcaggaacagagcatcagaaactgcacagggagccgcaagcaggcctgctctaggcaacgagggcgctggccccgggacggatgctggagcatcct

SEQ ID NO: 443234 - DNA, 122 bp, Homo sapiens
gactctgctgtcaccctcctggagcctcccaggcccaactgtaggcagttaacagcttctcggaaaagagagactgacccccaagagcttccaggaaagggggaggggagatattcaaggtg

SEQ ID NO: 443235 - DNA, 122 bp, Homo sapiens
cctggtgcacacagttctataagtcggctgctaagcaccggcggaggtgctgcatggaaccgtggcccctgtggcggggaccagcccgcggcccgccacctccacggagggggggacaggag

SEQ ID NO: 443236 - DNA, 122 bp, Homo sapiens
tagaccctgctctgcagagcactttgctaagggctaagaagttgacacttcagggcatcacgtgaccggatcccaaggaacttactgtgaattggaaaggcagtatatattgaatgataaag

SEQ ID NO: 443237 - DNA, 122 bp, Homo sapiens
gggtgagggtttcacaggactctgagtgagcccaggattgggcgtgtgagtgaggaactacgggcagggtgagttgtgtgtacaagtatgtgagtaaagggttagggtgtgtgtaaaggatt

SEQ ID NO: 443238 - DNA, 122 bp, Homo sapiens
ttgaggccgaagatgcgcactttggagaagatatccaccaggttgccgttgcagagcccgcggttcttgctggggctgctccgcctcctgctggcagacggccggtcccagtgctgctcccg

SEQ ID NO: 443239 - DNA, 122 bp, Homo sapiens
ctcagtcaccgccagccagagatgccggcctctgtccggccgccgggacatgtgcagggccgccgcccctcccacggccctgcgggggatttatggcttcgttaaaggcccggagaggggct

SEQ ID NO: 443240 - DNA, 122 bp, Homo sapiens
ctcgccggccctgccccaccgctttttataacgcgaggccgagcgccaccagtccccgcacgtccagagtctaaaggagtggcgggggcagtatctgaacagcccgtgcaccgcctcccgcg

SEQ ID NO: 443241 - DNA, 122 bp, Homo sapiens
gaagtatccctttgtgcaagtgtctgaaagaagaaatgttcaactataagcacaagaatgcggcaaccatgcttgttaaaattggccttgaggactcctcagtatctttggagatcttatat

SEQ ID NO: 443242 - DNA, 122 bp, Homo sapiens
agtagggggaagtaggacggtgtgcctggagggcaggtgataggaggggagaaggaatctcggaaccccctgggcagtcccagccctgctgtttgttgatctggtctctcctttctagggat

SEQ ID NO: 443243 - DNA, 122 bp, Homo sapiens
gaggctcggctggggcagctgcgagggcggggaggacccgggcctgggcgccgcctgctccgctccccccagccaggagcccaggcccaggtgcgggtctccttcaggcggcccctcccgtg

SEQ ID NO: 443244 - DNA, 122 bp, Homo sapiens
aatcccggggacaagggcatcctctgggtccttatcacagggtaaggggtccaccagacccggacaagcgctcctagctggaggagggtcgcgttcctgccggatgtggaaaggaagtccag

SEQ ID NO: 443245 - DNA, 122 bp, Homo sapiens
cggccgcgaccgggcccaggtacttgagggccagcatagccgccagaatggcgcagaggccggcggcgaacaccagccccgacagcaggcacacctcgcgccggttccagcgcggcagcccg

SEQ ID NO: 443246 - DNA, 122 bp, Homo sapiens
atttctaatctttcctctagggacagcgtcgagctccctactgctggaccgtcccagctgcgtggctttaccaagtcaccagaggttagcttgtctgcaagaggctggtgacacgaggaaca

SEQ ID NO: 443247 - DNA, 122 bp, Homo sapiens
cgaaagcaaggggaaatgcctgttctctgccaggagaggcgagggaattcagccaggtcacgctcagaaaactagggcagcctctcagttgggcccatcctagcttttgagtgtgacacgtc

SEQ ID NO: 443248 - DNA, 122 bp, Homo sapiens
agcccagacctcccggtccccatcctccatcggggtcactccgcgggccctgcctgcgcacggaagctgtccccactgttcccctagcgaggcagaccagggggcccccggaagttccaggc

SEQ ID NO: 443249 - DNA, 122 bp, Homo sapiens
acggtgcttgtagctgggcagtcttatcatcagagtggagcctggtaaccacgacctccccgccaggtcctgtgtgttgctagctggagaagggtagttgaaaactcagaccaagcacagtg

SEQ ID NO: 443250 - DNA, 122 bp, Homo sapiens
aggcgggaggcaggaccagaccccagcatttcagcgtgaaagtcttcgcctttctttccgcgctgtctttcccgcgggcggagcggcgtacctgagcgcggtccccacggaggatcagtgac

SEQ ID NO: 443251 - DNA, 122 bp, Homo sapiens
tcgccccggccacacccttggtctccccgctgggggtcgctgcagacgcgccaataaaaacgcacagccgggcgagaagtcttccgtctcgttgcattattttcttttggggaggagaggga

SEQ ID NO: 443252 - DNA, 122 bp, Homo sapiens
caatcggtcagagcgttcggctattaaccgaacggtgagtagttcaagaccacccagggacgcctgttctagcttttaaagcattcatgtattatcatcactagagaatctccccctattct

SEQ ID NO: 443253 - DNA, 122 bp, Homo sapiens
gggctgcgcggtgcttgcagtccggcatgggttctgggtgggcacgggctcggagggccccgcactccgggcagcaggctggtgcctgctgggcttgatcagaggctgggtcccctgcttgg

SEQ ID NO: 443254 - DNA, 122 bp, Homo sapiens
gtatgataaaacagatgtggaagagttctgcctgccatcatagagcttacagccagcaggcgagacagttgataatcactcagtatttgtttgatcataatcactataaagagaggtatagt

SEQ ID NO: 443255 - DNA, 122 bp, Homo sapiens
ggggagaggatgatatcactcccaatatctcagaagttgtacatcccccatgatcctgttcgtcatatccagggaggcacaggatgacattccattgaatttcgcgacaggcgtacacacac

SEQ ID NO: 443256 - DNA, 122 bp, Homo sapiens
tggtcgagctttgtgaactttgtcttcatgccccgacaccctacttcccaaagcctggaccggtaaagttcttttcaccagaaaggacaagggcaagtgagtgcaagagagaaagtggcaca

SEQ ID NO: 443257 - DNA, 122 bp, Homo sapiens
gcgggaccagcgcctgaggtgggtgcggagcgggaggccgggcgggcgggcgcctggggccgccccgccgacatactccgggtcgagggggagtgaccggccagggcacggagtccggctgc

SEQ ID NO: 443258 - DNA, 122 bp, Homo sapiens
aagcaatcacagatttaacatttgtggttccagctattcaggaccaattcccaaactccacgacatgtaacaatttgtaattttgctaggacacagtttgatgcttaggttttaaggctggt

SEQ ID NO: 443259 - DNA, 122 bp, Homo sapiens
tccccactgtagagatggaggcacgagagctgggcaggctgacctgccgagtggccgcggcggacactgtcctagagagccgtccagactcccagcagaccttgcattagcaccaggtaaac

SEQ ID NO: 443260 - DNA, 122 bp, Homo sapiens
ctcccctttccagtcctactgactctccaggtcatttatggaagataagatgcaaatcagcgctgtctgcagaaactgaggactcggcgctgagaggtggggctctgtgtgtcagccttcct

SEQ ID NO: 443261 - DNA, 122 bp, Homo sapiens
gaacctgcggaccctgctccgctactacaaccagagcgaggcgggtgagtgaccccggcccggggcgcagatcacttactccccgctccatgcctcacggacggccctggtcccctgagtct

SEQ ID NO: 443262 - DNA, 122 bp, Homo sapiens
acgagaaaggcaacttcaggcggggcgggagcgtggacggtgggtgggaccggacgcgggcgggcaggggcggggcgcgggcgcccctgcactagtcggaaaaaaccgagaggtttctcttc

SEQ ID NO: 443263 - DNA, 122 bp, Homo sapiens
ggcagctcagttcacattgcctggggctttatggtacaggctgggctttgtcataaggtgcggcctttagtcctcattcccaccacctggttttgtcgtaaattcccctctagtttcccctc

SEQ ID NO: 443264 - DNA, 122 bp, Homo sapiens
atctaggtagagcatggagagacattgcagagggcaggagctctctggctgagccttgatcgtgttcaagccacaaccacagacctaggcgtggtccctcagtcaccttgcagccttggcct

SEQ ID NO: 443265 - DNA, 122 bp, Homo sapiens
ggcggcacaagcccgcattcgcccgggtcaggagctgctctgtgtgaggagcgctgtctgcgcagccgccttgcacttccccactcctcctcccccctcctactcgtcctccacctccttcc

SEQ ID NO: 443266 - DNA, 122 bp, Homo sapiens
aggatttgatgcgtggggaaaactggcttctccccatgcgtaggacactataggggcccacgcgtgtcttccccgcagcccagcaagaaagggggcgccgggggtgccctggcggataacag

SEQ ID NO: 443267 - DNA, 122 bp, Homo sapiens
agagtccataggacatggagagtcccggccgtggtgaggacacggggttgcggcagctcacgcccactgcagtgtccggaaggcggtgctaggtccacctcatttacggggtcgggctctca

SEQ ID NO: 443268 - DNA, 122 bp, Homo sapiens
cagcaaccaggccctgctgcagcttgaggcggctcggtgcctgcatgagctctctcactccgagcagtccactgttgctgaggcctgcctgccagccacttcttacctcctcacctacctct

SEQ ID NO: 443269 - DNA, 122 bp, Homo sapiens
tgaggccgcaaatatcactttactcaaattgggactcgccggccgaggcaggctgacctccggctttgcagcagcacctccgtcgtgacaaagccagccagagctgcttcttgcttggcccc

SEQ ID NO: 443270 - DNA, 122 bp, Homo sapiens
tctgtaacattactctccagccagcgcggctcctattggctaccgccaactcacggggctcgctcattggcccgatacctcccattgtcctgaccagagcccgtttgctattggctgtctcc

SEQ ID NO: 443271 - DNA, 122 bp, Homo sapiens
ggggccctggtgaccggtttggttagtctcgggctctcgagtctgccaggagtctaacaacgcagttctcctcttcggcggtcttaggtttcctcttcaatggcacagatttttgcccatct

SEQ ID NO: 443272 - DNA, 122 bp, Homo sapiens
tatgctaaaatctgtgtttatattcaagcagactcgtagtaacttaaatgtgactagggccgattttattggttctggcacacttatgtatcataaaatgattttctcatcatccccaggtg

SEQ ID NO: 443273 - DNA, 122 bp, Homo sapiens
gtcgtagctgggaaggggaccaggaagtgggtgtcaggtccaagagctgctagaaagaaacgaaactgaaagcagggaatttcccaagtttggggaagacaggaactgcagcgcccctcccc

SEQ ID NO: 443274 - DNA, 122 bp, Homo sapiens
atctgcctgcctcagcctcccaaagtgctgggattacaggcgtgagccaccgcgcctagccgggaaacagtttttaaaataaagttacattgggaggccaaggcaggcagattgcctgaggt

SEQ ID NO: 443275 - DNA, 122 bp, Homo sapiens
tggacggggtcgcacagctttggaccgggtcgagggtctggacggggtcgcgggtctggacggggtcacgggtctggacggggtcgcaggtctggacggggtcgcaggtctggacggggtcg

SEQ ID NO: 443276 - DNA, 122 bp, Homo sapiens
ttatttatttatttttttgagacaaggtctcgctctatcgcccaggctggagtgcagtggcgagatctcggctcgctcaacaggaataattttaatagcaaaaatttaaaaccccttcatta

SEQ ID NO: 443277 - DNA, 122 bp, Homo sapiens
gacacagaatgtcctgacctcagtggggtctcaccacgaccctccactgtaggggggtcccgctgccaccctccacgctagaggggtctcaccacgaccctccaccctagacaggtcccgcc

SEQ ID NO: 443278 - DNA, 122 bp, Homo sapiens
caccttgggcagcccctggaccgccgccagagctctcttggagagggtgaggacgccgagcgtgtgatgagcgcctagtgagtattcactgtgcatgatagatgactggcctggaatccttc

SEQ ID NO: 443279 - DNA, 122 bp, Homo sapiens
ggccggccgggaccgccaggtgtgtgcttgagtgtgagcgtgagtgtgagcgtgtggctccgcgcttgtctgctgtgtggtcgcgttctccgggtgtgtttcggagtctggtgtctttggtg

SEQ ID NO: 443280 - DNA, 122 bp, Homo sapiens
ggaagaggataattacagaccatagatacgcatgtgctttccttctagaaggcacgttcacgcgtattctcagtttaccttcgtgaaacggtggggtcacaccgcatgctgtgtttattgtg

SEQ ID NO: 443281 - DNA, 122 bp, Homo sapiens
gagcacccaggtttccaagcatttctcacccagccctgaagtgtgcccgctaggaggccacgtggcaggccctgggcgtgctgcctttgaagaccccaggctcacctttcttgttggtgtga

SEQ ID NO: 443282 - DNA, 122 bp, Homo sapiens
cacacacacacacacacacacacacacacacacacacaaaataaatgggacaagaatctccgtaaagtaggtgatgattttgcctatggacaggatcaggattaaaagagagtggggtggaa

SEQ ID NO: 443283 - DNA, 122 bp, Homo sapiens
cacatgatcgaatctccgccactcccggagaagaggcggtgagtcggcgcctctacgggccgcaacgtaggacaaaccactccaggacgcatttgcactggaggaaggcaggcccgccccct

SEQ ID NO: 443284 - DNA, 122 bp, Homo sapiens
ggagagaaagccgggacttgaggtgggaaccccggctggcgtccggtagggggaggttcccggggaagcccgcggaaggcgaggtgcctggcctgccatgtaggggctcgttccaagccgca

SEQ ID NO: 443285 - DNA, 122 bp, Homo sapiens
gcttgttttttccccttgccttatcccatacctcctctcagtgggcagtctgccaggagacgtgaggggaagcctggatctgtgtgtatgtacatagtagacatgtgtgtgtgtgaatagct

SEQ ID NO: 443286 - DNA, 122 bp, Homo sapiens
aacggggaaccctgggtggtttcctgggaatccattggccaaggggagggtgaccctgtccgcacacatcggttactatgacaatataaccacagcctccagttgccatggcagctgcctat

SEQ ID NO: 443287 - DNA, 122 bp, Homo sapiens
atggatgttgtagtcatgttacttttcaaaatgaattgacttggattttgatcacaacttcgtgcacaataggcctccaatgtcagacatgcacaaggagaagagagtggtgctccccagtt

SEQ ID NO: 443288 - DNA, 122 bp, Homo sapiens
acaggaaactgagtttatcctcagagcagtgcaaaacttcctgctgtaaggttttactttcgtatttgttttttgtttctaaatctgctgattgaaaggaagcctgtttatgctttcttgcg

SEQ ID NO: 443289 - DNA, 122 bp, Homo sapiens
ggccgcaagttcgccaacagagtggttgtcacaaaatactgtgaccccgactcttatcaccgccgggacttctggtagaggcggctgggggagggtgggggcagggctggctgggggcttct

SEQ ID NO: 443290 - DNA, 122 bp, Homo sapiens
ccaattttaaaatgagcttattttattatgtctgcaaatatggccaggcacagtggctcacgcctgtaaccccagcacttggggaggccaaggtgggtggatcacgagggcaggagttcaag

SEQ ID NO: 443291 - DNA, 122 bp, Homo sapiens
ccataccacaggaaggctttggtgaggcagcagcacccagccgaggcttagaaatggaatcgaggcaaaatttaccccattaactcccacaattaaaacaaacaaaacgcatgggtttgcat

SEQ ID NO: 443292 - DNA, 122 bp, Homo sapiens
agcaggtaccgggagaggcggcaacatggagcgagcaggacacgcactcacacacatcggcgcgggcgcgcgcacctccgcgcgcaggggccgggcggggggcggcgggcggggcgggcggt

SEQ ID NO: 443293 - DNA, 122 bp, Homo sapiens
gggcagagcggttgtggaaaacagcctgagcctggccacagacatacttcccagatgaaccgtgggctcactcaaacgtatgtaaccagagcaataaaaacacatgtccacacaaaccagga

SEQ ID NO: 443294 - DNA, 122 bp, Homo sapiens
ttcagcccaaagaattcctgcatttgcttcaatttttcaaccactgggccactatttctccgcttttcaacttgcctcccatcattcttcaggttgtagtatttttccaggtatttctgaca

SEQ ID NO: 443295 - DNA, 122 bp, Homo sapiens
ctccagccctctcctgggggatcgcacggtgcaaccaaccccaaaaacgaagctgcgcgacgccccctcagccccgcgggcttcccattggccggttgccgctgtcactccctcctagcctc

SEQ ID NO: 443296 - DNA, 122 bp, Homo sapiens
aattattatgcatataatacattctacaaaatgcagttctaataacatctccccatccctcgcctctaaaattaactagataacatcctgggtgaacttctattttgagaattgatatggtt

SEQ ID NO: 443297 - DNA, 122 bp, Homo sapiens
gagcctaaaaggaagatgggtcctgggaggggtgtggtgctgagtctggagcacctcacgcgggtgggcctgttagacttcctcctcccagtcaggagagtccaggagcactcagacgtcct

SEQ ID NO: 443298 - DNA, 122 bp, Homo sapiens
aaagaaaatgtaaatgttctgaggaagggggaacagtactcattatttcccctgtcgggtcgaaggctgactgtttctaactggaaaggaaagtcagctggcagggtatgcggaatggccat

SEQ ID NO: 443299 - DNA, 122 bp, Homo sapiens
cccaatgctgccacgggctcacaacggtaaggcccgtctttgctgctgtccctctgtctacggtcatccacctgcagcccttaccattcagacctgagctagcagaggaaaaccttcctccc

SEQ ID NO: 443300 - DNA, 122 bp, Homo sapiens
cacccagcaacttgttttcattttgtactaaaactgcactctgggcttgcgggtcagccccgggagacgccactgctcccttttccttggtgatgaattccccacctttggggaggggaggg

SEQ ID NO: 443301 - DNA, 122 bp, Homo sapiens
gcgagctctccccctgcgaatgagcacctctcacaggattctgtctgtgttctctcgccgcgtgtctagtcaagcacccgctggcaactgcggcttgggctggtccctctggctccttatct

SEQ ID NO: 443302 - DNA, 122 bp, Homo sapiens
gcagaatttcagcgcctaagcagacaaggtcaaagtaaaccgcttcaccgctgcttctggcgcaggggcccagagcgcgtgcagctccccagcacagaccaacagcaggagaggggtccggg

SEQ ID NO: 443303 - DNA, 122 bp, Homo sapiens
accgccgtggtagcccgtgagcgcagctgtggggtggtgatggtgggatttgggattgggcgggctggtgtttgtttctgttttgtgttttgtcaaatccctggggctggatatcattaggc

SEQ ID NO: 443304 - DNA, 122 bp, Homo sapiens
ggcaatctcagaatagaggtttgcagaaaccgttcctagaggcaccaaaacgtagttaaccgggtgtctgaccacatggctgccaggagcctagtgagtctgcgcacacgcactacctccgc

SEQ ID NO: 443305 - DNA, 122 bp, Homo sapiens
ctccggggagcacatcctggagggctgttcgccggtttcgggggtggatgtggacaaaggcgcgggcggacggccggcctccggcgagggtgtgtgtggcggggctgtgcggggcgggggag

SEQ ID NO: 443306 - DNA, 122 bp, Homo sapiens
gtggcgagtgccaggtagctgctgcgactcttgaaggtgacgggatcggccacgatggcacgcaggccaaagcgagcattgagctcacagtaggtgatgtcaccatccttgcactggtccat

SEQ ID NO: 443307 - DNA, 122 bp, Homo sapiens
ccgcgcgccgggaggctgagagttcggcgccgggagggtcccggggacagaagagcgcctcgcccggttgccaaggcaaccccacgcggctggagaagccggcgctcgcagcccggcccggg

SEQ ID NO: 443308 - DNA, 122 bp, Homo sapiens
tttatgtcttgggcattccccgccaccccactgatcctgttctggaggggttatatgacacgtttgtgaaacctgagatatgctagctgctcctaggccatagaagtgtcaggtttgcttgc

SEQ ID NO: 443309 - DNA, 122 bp, Homo sapiens
cgggtcagccgagcatttccgcttcccacagccccctgggaacgtgaagtcaaagcaatgcgcacgcgcagtggctttgaaggcggggcaacaaagcctgtggccgatgtggcgctcctcgg

SEQ ID NO: 443310 - DNA, 122 bp, Homo sapiens
cgcaatactcgcgctgcctccgtggtccctgcctggctgaggtggcagcagggggcgggacgcgcagcgctatggcagagggcagcggggaagtggtcgcagtgtctgcgaccggggctgcc

SEQ ID NO: 443311 - DNA, 122 bp, Homo sapiens
attgcaatattcaatgttgttaaggcatgcattctcccccaaatggacctgtagacacaacgaaatccaaatcagaattccaggagtctttttttgttgtagaaattgagaagctgatttta

SEQ ID NO: 443312 - DNA, 122 bp, Homo sapiens
tgggcaggtttgtctgtctagagaaataacacctccctgtgccaacaacagggaaactgacggggtgagatgcacgttacagcagcgagggaaactgacggggtgagatgcacgttacagca

SEQ ID NO: 443313 - DNA, 122 bp, Homo sapiens
cagccagagcccagggaaggcagacaagcagcggcagggaccctaaaccatcttttattgcgcacttcagccgtgagactggggctggcctgtgtgccctaggcgtagtattgtaggttggc

SEQ ID NO: 443314 - DNA, 122 bp, Homo sapiens
agcgccgccccgttgggtagagcccggcccttccctgtcctgggcccgcagacagggtcccgccccgctcctgtcctcagaccagcccatctcccggcgctgagtccacctccagatccagg

SEQ ID NO: 443315 - DNA, 122 bp, Homo sapiens
cagaagacttcttttgcctcatacagtccttttatatctgttccattatgcaattacttacggtggctatgtgctttatgggctgatgtaacctttttttcatgtgtcatttcactcaaaag

SEQ ID NO: 443316 - DNA, 122 bp, Homo sapiens
ggccagtgctccgcagccgccgccagggcctttatacgctcaccggcagcacctccccaccggcttctcattaaccagcaaggcacaaggagcagtggggccaaggtccctgtgcagccgcg

SEQ ID NO: 443317 - DNA, 122 bp, Homo sapiens
aaacaaattatacctctcgtttccattcctggagtctcagcttgatttgaatgggaatatcgcatagacgtctaccaagggcagttcttacctaaaagggagagctgtttggacatctgagt

SEQ ID NO: 443318 - DNA, 122 bp, Homo sapiens
cgcggggcggggcggggcggggtggggtcgcggggcggggcccgggctaggccccgcccccgcactgagccgcccccgcccccagctcctgtcccactgcctgctggtcaccctggccgcgc

SEQ ID NO: 443319 - DNA, 122 bp, Homo sapiens
cgcagaagttgtggccgcagggcagcgtcactgggtcctggtagagccccaggcagatggcgcaggtcagcttctcctccagcagctgcgcggccatggcccggcggcggcgagagccaggc

SEQ ID NO: 443320 - DNA, 122 bp, Homo sapiens
caggggacactggtcccgcctgatgctgagctgaaagtgagtgtggccgagtggtgctctcgaagtgtgagctgacgaagctccctctgttgcatcagagacatgcgcaagggccttgtctt

SEQ ID NO: 443321 - DNA, 122 bp, Homo sapiens
ctgctccaacccctccctgaacccacagggcagagccaggggtggtccaatggcctgagacgaggggacagggctggcctattaagaggagccaccagagaaggcacaccagacacagactc

SEQ ID NO: 443322 - DNA, 122 bp, Homo sapiens
aagttaaaggtgtgtgtgtgtgttttgtgcccccagcaacgtgtactcgtgcagcatggacggcatggtgctggtgtggaatgtgagcacactgcaggtgaccagccgcttccagctgccgc

SEQ ID NO: 443323 - DNA, 122 bp, Homo sapiens
ccctctccgtgtggagccacagcgccacatcccgggcattgcagcgactgctgactggctcggggaacggccaaggcaatgcctttctgtgatcagatgcaatctggacacgcgtccccggg

SEQ ID NO: 443324 - DNA, 122 bp, Homo sapiens
ccttccggtagcgggtcaccgcctgctggatgaggctgaaaactttcatgtggccgtccccgcacggcacgaccacccgggtccgtccgaagcacacggtcactttcatgccgccgccgccg

SEQ ID NO: 443325 - DNA, 122 bp, Homo sapiens
gacaggccctgcccacggcctggaaggcgtggtcctgtgtgccacgtgacagcctccgcgcgggccgcagggggttggacacctctcccaggatggaccaatctttttttttttttttcaag

SEQ ID NO: 443326 - DNA, 122 bp, Homo sapiens
gatgctgatgtccctgagcagagaggtctttaggggaaacagccttgttcctacctgggccggcactgagggggaggtatccataaatatgtgctaagtggccagaactgagttcctttcct

SEQ ID NO: 443327 - DNA, 122 bp, Homo sapiens
gagagatgagctgagcccacgtccacagaagcccattcccagtgggaggaacagcgtctgcgcggccctgaggtggtgcacccagcatgtccaggaacagcaggtcggccagggctggaggg

SEQ ID NO: 443328 - DNA, 122 bp, Homo sapiens
acgccgtccctcccccatccacacatctacagcgcccaagcccccacccccgcctagacccgccacccatggcacagcgcccacaggcacccgctgcccaagccaccaagccgcccgggatg

SEQ ID NO: 443329 - DNA, 122 bp, Homo sapiens
gcctggccctgatctccgggcagccaccacctcctcggtctgccccctcattaaaattcacgttcccaccctgtgtccacttcatgattcctcgcaagctgggcccagtcctctcatcccaa

SEQ ID NO: 443330 - DNA, 122 bp, Homo sapiens
agatcctcactagaacccccaagtgtagacactggacttgtgactaccctatttttcagacgtggacgctgaggcttttaaagaagacggcctttgcttgtcccaggttaccaacaaccact

SEQ ID NO: 443331 - DNA, 122 bp, Homo sapiens
cattccagggtacttgaggagaatcccctcagacagcgggcagggcaggataacaatctccggaattcccaagcccgtttccctcactcaatgccttctcttctctagccccaggtggctca

SEQ ID NO: 443332 - DNA, 122 bp, Homo sapiens
gagcctccgaaaacacccaagccctggagcctgagctgcctgcggcccgcgcctcccctccggccctcagctgctctctgctacaaggaggtgaggtcccttgaccactcaaacagccagat

SEQ ID NO: 443333 - DNA, 122 bp, Homo sapiens
aagcccacagactggggccaatgtactggcgtccaggacgcgggcgtctcatttcagccgcgtgtgatcttgtgaaatatgtaactgatcgtcaacccatctaccagaacacagctcctaaa

SEQ ID NO: 443334 - DNA, 122 bp, Homo sapiens
ggctctatgcaactgtaccaggccgtagactcaccaagccagtcctggctgtagaaagaacgtgggaactctgggccatgtggattttcacaagctgagttgttgagagacctggactacct

SEQ ID NO: 443335 - DNA, 122 bp, Homo sapiens
gcattactcattgccctattagttacaaaaccaaaataatcaaacacagtggtgtcttaacgttggaaagcaaccccaccaaccatttgatctaggagagaaattaataacaatgccagccc

SEQ ID NO: 443336 - DNA, 122 bp, Homo sapiens
cgttcacctaccgcaatcccagcccacgcctcccgcaagaccaccgccgtgccgggccagcgcgcttgcgcctcgagcaagcccgctcctaagccccgcctcctgcccttttcgccaattgc

SEQ ID NO: 443337 - DNA, 122 bp, Homo sapiens
cagcacctctgggagctgctgggttccacagctgctgctgctcgtctcactccaatagctcgagctcatcttcttccagtggtcagcaagggacctcccagatgttctacctaaggaacaaa

SEQ ID NO: 443338 - DNA, 122 bp, Homo sapiens
ctacctcctgttgcgcaatgattgggtcctgaattttatgtaaatcatatttatgaacaacgtccagtaataagtgcagcaagattagggctctaggttttctccagagttctagatgttaa

SEQ ID NO: 443339 - DNA, 122 bp, Homo sapiens
gccgcgcgcctcctctccagcccgcagcaagcgggtgccacgaggcactcagccggtccccgaagttcctctcacgcggccccaagaccaccaccgtagtccaggccaacaagcgctgccgg

SEQ ID NO: 443340 - DNA, 122 bp, Homo sapiens
tacattaatgaatgaaaatcagtgcatgtcctggagccaaggtaagaccagtgatgacagcgccactttaaaatgacaaaagacagttctggagcaagtgggatccttggagaactgctctg

SEQ ID NO: 443341 - DNA, 122 bp, Homo sapiens
cgggaacccggagaggagcgagccagagaggcgcgagcgagagaggcacgagcgggaacccgggctgcgcgccgcgcttgcgggccagctggagttccgggtgggcgtggtcttggcgggcc

SEQ ID NO: 443342 - DNA, 122 bp, Homo sapiens
aagtagatattgacagctattcacctttcacggtgctggggccagattagggatcactcccgtgaggagggccttcaccctgttctagaagcacatggttgtcctcctgttgttggcacatt

SEQ ID NO: 443343 - DNA, 122 bp, Homo sapiens
cccgaggagggggcggcaaggagagggagggggcgcagcggggaggaacgccggggtgaacgttgaaggagtgttagagatccaagcttggaaacctggcaaggttagttttgttctatttg

SEQ ID NO: 443344 - DNA, 122 bp, Homo sapiens
ctttgaccgctggcgtaattaggagaaacgcagaaggcggacgctccccaatttccccatcgagccttctcctcccgagtctgcgaagcccctggctcaggagacaccggctccgcgcctgg

SEQ ID NO: 443345 - DNA, 122 bp, Homo sapiens
ccttagcttgctttcctcctccctcctttttattttcaagttcctttttatttctccttgcgtaacaaccttcttcccttctgcaccactgcccgtacccttacccgccccgccacctcctt

SEQ ID NO: 443346 - DNA, 122 bp, Homo sapiens
cggttccgccgcgtttgtgggctggtagcccggaatacatttcccagaggccttcgcggccgacgtgcttcgcgcaggaacgcagccgcctcccgactggaggacgcggtagcggagctgct

SEQ ID NO: 443347 - DNA, 122 bp, Homo sapiens
tggcaaagcacccagcaactgtaaccactagatgaatgcaatggggtgttatcaggcaaacgggaataagaacaagtattatgaaacagctagaatggaaagtatgcaaagaggaatttgaa

SEQ ID NO: 443348 - DNA, 122 bp, Homo sapiens
tttgcgccattgccctggtggttccgcctcgtgggttagatcccaaattacgcccgctctcgatccttaataatgggaaggggcttccacttgtcgccctccgcctcctgcacctcagtgac

SEQ ID NO: 443349 - DNA, 122 bp, Homo sapiens
cgcgctgggaggctgaggcggggtcccagcgagccggcggctgggaaacaatggcgcgagcgtgacgtgggccggaggcgtcgcggcggcgcggaggaaggggctgccgtggggcgggggcc

SEQ ID NO: 443350 - DNA, 122 bp, Homo sapiens
ttttgctggtgaaaacattctggagagtcctgaggcattgcagggcatcagtctcttccccgtgaggactttgcataaaaactgttgaattgagtaagacttcacctttttttgtaacacag

SEQ ID NO: 443351 - DNA, 122 bp, Homo sapiens
gcggccgcctgccggagggccccggggctgccccagctccagggcatgtagtgatggctgcggagaagagaatgcaagtaggttgagcaacagattcgagtgcgcgcgcgttggggctgtga

SEQ ID NO: 443352 - DNA, 122 bp, Homo sapiens
ctcggaaaatcccaggctggttcggtctctctgctgcccggacctgtttaaatgtccagccgtttgggaactgtgtacccttcgagaaacactccaaggccccagggacaccggaagccgtg

SEQ ID NO: 443353 - DNA, 122 bp, Homo sapiens
gcggaaagctccactacattggtctgggcatttttttggacatgacctcaagaacacaggcgagaaaacaaaaaataaacacatggaattacatgaaactaaaaacttctgcacatcaaagg

SEQ ID NO: 443354 - DNA, 122 bp, Homo sapiens
acctgcagcagagacacaaaccaagaaaccgaaatcccgggaacagacacggaccacaagcgcttcctcccatagccctgaaaccatcagagaatctcaaagttggaagagctcttgaagat

SEQ ID NO: 443355 - DNA, 122 bp, Homo sapiens
aaggtgagcacacaggcagcatggggacagccttgggcggcaggggccaccctccctcagcgcctcccacagcctcagcccctgtgacacgcaccagcatgcgccaccaaccttgatgaggt

SEQ ID NO: 443356 - DNA, 122 bp, Homo sapiens
gagaactggtgagtctgaaattaatcaaaacccggcaggggacaaaggaagggatgctgtcgccctcctaagtctcagggagacacgtcagcttgagctctgggcaatttcagcctggcagt

SEQ ID NO: 443357 - DNA, 122 bp, Homo sapiens
taagtattggtataatataatctcaaattgtctctttcagaattctcatgcaaagactcccgggttgccacagagatccctgtccatagggaggctctttcccatctctcctccctcccact

SEQ ID NO: 443358 - DNA, 122 bp, Homo sapiens
acaagtttagctagatgggcccagagggacctatgagttaattatatacatacaatgcttcggctaacacaatttagaaagtatttgaagttcagaaaaatggaaaaacaagtccttaactg

SEQ ID NO: 443359 - DNA, 122 bp, Homo sapiens
tgcggcgatcgccaagtatggagagcggcgcgagaggcgggcgccgacggggtgcgggggcggggcctgcgaggcggggcggggcgcggcgctgcgcggcgcggctgccgggagtccccggc

SEQ ID NO: 443360 - DNA, 122 bp, Homo sapiens
agccatatcgggtttgtcagacatggttgcggaggaaaagcggagcgaggcgcgcgagtacgagcgaagtctggtctgcgcagtggccaccaccgagttgtcgccataatatttttaataat

SEQ ID NO: 443361 - DNA, 122 bp, Homo sapiens
ctcagaggcgcgctcccccttgggccggtgggcattgggccagtgctgtaagatcgtctccggaggctggtagagcttgttggggttcaggtgtccagagatgtagaggtagacgtcctccc

SEQ ID NO: 443362 - DNA, 122 bp, Homo sapiens
ggccaaggagggggagaaaggactgtgtgtagctgcacctaagcaggaaaaaaaagccaccgggtcttggccattctcctgaaggagcaattctaaaaagtagaatgtacttaggttttggg

SEQ ID NO: 443363 - DNA, 122 bp, Homo sapiens
actgtgctcaccagcaggtgccaaacaccaaacacagtggtcgctgtatgtccaaagagacgcagtcaatgaaagtcagaggaaggctccatgatgagcctcaaagacagcttggcctgggg

SEQ ID NO: 443364 - DNA, 122 bp, Homo sapiens
gcctacttccccagccttcccagataagtttagggcatatggagcagagagggtttcagccggaaggcatcaagaaaagagaagacaccccgctttcgaggggttgcccctgcaccgccaac

SEQ ID NO: 443365 - DNA, 122 bp, Homo sapiens
tctgcaaatgagttcctcttcctgctctgtgatcacagggttttccataggtgtcttctccgttatccctgagtaccttgagtatgagtcctggcatctctcctgcaggcattctcttccct

SEQ ID NO: 443366 - DNA, 122 bp, Homo sapiens
cagatgagaaattagtaaaatgtggttaccaagggactgcttctctgctctagctgtgaacggggtccttagcggcctgcatgcccgcgcctctccagactgagaccaaagacttccgcgcc

SEQ ID NO: 443367 - DNA, 122 bp, Homo sapiens
gggtgggtcagaaccctgccatggaactgtttccttcatcatgagttctgctgaatgccgcgatgggtcaggtaggggggaaacaggttgggatgggataggactagcaccattttaagtcc

SEQ ID NO: 443368 - DNA, 122 bp, Homo sapiens
atttcttctatctgattctaaggcgtaaggatgataagaaccacccacattctggctgggcgtggtggctcacgcctgttatcccagcactttgggaggccaaggcgggtggatcacctgag

SEQ ID NO: 443369 - DNA, 122 bp, Homo sapiens
gcagggcggccagctgaggggttgattttattttatttttttgaagtaaaggctgaatctcggcttcagggcttttgccaacgtctccactgacaggaaccagcaaacttcaggacccaaat

SEQ ID NO: 443370 - DNA, 122 bp, Homo sapiens
aaggctgctttcaggccgctgctcctgaccccggaggcttcgggccgctccccctgaccccggaggcttcgggctgctccccctgacctcggaggcttccggctgctccccctgatctcaga

SEQ ID NO: 443371 - DNA, 122 bp, Homo sapiens
tgtgacgctgcggcccctccaagccccgccctctctagccccgcccccgggccctacaggcggctcattgattggcctacttctaggaacccgagtctcgcgtgcttattggccctgtcact

SEQ ID NO: 443372 - DNA, 122 bp, Homo sapiens
ccggcacctcgggaggcagaggcaggcagatcacttgcggtcaggagctggagaccagcccggccaacatggcgaaaccccgtctccaccaaaaaatgcaaaaaccagtcaggtgtggtggc

SEQ ID NO: 443373 - DNA, 122 bp, Homo sapiens
acttgccaagaacctggatgtgaggaccgaagctgctccctgtccagggtccgcatttgccgacagagaggctccttgggactctgcccccatggcgtcacctgggctcccagcggccagca

SEQ ID NO: 443374 - DNA, 122 bp, Homo sapiens
ccaaaaggaccgcctccggaagacggcatttccaggagtgacgctaaggcttcctaggcgcggtttctcgggcactgcctgcaatgtcattcccagaagtactaccttcaggaggcgggtcc

SEQ ID NO: 443375 - DNA, 122 bp, Homo sapiens
agctgggcaggagttgagcccaaagagcttgcttacttgctgggaggcagggccgggcgacgccgacttcaggacgacttgggcctgcagaggtcgccgggaggcccaagctgggcgtggag

SEQ ID NO: 443376 - DNA, 122 bp, Homo sapiens
tcttaacatcatgaaaccctgcttatggcccattagaacttagactgtggtcagtgcgcgcgcgcgcgcgcgcacaaacacacacacacacacacacacacacacacacacacatatatttt

SEQ ID NO: 443377 - DNA, 122 bp, Homo sapiens
taaatccaatcacagctctcatcgagtttttttatactggtgtttcaacaagcacattgccgctgtggaggggaggggtccttggagttcttatgccaccatgttctttggtgtcacttctc

SEQ ID NO: 443378 - DNA, 122 bp, Homo sapiens
tttttttttttttttttgagatgggggtctcactctgtcacccaggttggagtgcaatggcgtggtcttggctcattggctcatttcagcctcaacttccatggggtcaggtgatcctccca

SEQ ID NO: 443379 - DNA, 122 bp, Homo sapiens
ggtctgtaaaaatatttaacccaatctgttcagaaagttactgtagctgcctttaagagccgaagacggcagctttgaacaattcctgctaccatcatgtagccagagtccaaatagtgttt

SEQ ID NO: 443380 - DNA, 122 bp, Homo sapiens
gcaggagtctccaatagcgtcaggtgtcccccggggaaaggccacaaggtaagggaccagcgacggagggggcttgtgcgggggcgtggggcgcagatggaggctacagttggccggagagt

SEQ ID NO: 443381 - DNA, 122 bp, Homo sapiens
gccaggcgtggtggtgtgcgcctgtaatcccagctaatcgggaggctgaggcaggaaaatcgcttgcacctgggaggcggtggttgtaatgagccaagatcgcaccactgcactccagcctg

SEQ ID NO: 443382 - DNA, 122 bp, Homo sapiens
aaaggagggccgtgcaggacgaagcccccaggacacgcgaggagacccggccgcgcgccgcgtggggcttgggagcctccgaggggccatgcccagcctggaataaccatttcggtttttgc

SEQ ID NO: 443383 - DNA, 122 bp, Homo sapiens
gtggtgctaaagcctgaaagcgaattcctcagacattggtccgagtcactgcgatgctgacgctgtggttggtgagtttggatgtcagtcagagtcggaggcagggtcaaatagggagaaat

SEQ ID NO: 443384 - DNA, 122 bp, Homo sapiens
acgcaggacaagagctctggcaaaggcgctgcagccacagaggtttccggccggaaaaatcggcaccccagagatcccatgagaacgtcacgtacagcactgagacggagccctaatgaaaa

SEQ ID NO: 443385 - DNA, 122 bp, Homo sapiens
gacatgggcttagactgcctggtgcacccagacaggtgcgtgccgcagggacagagtatacgatgtgtggtgtggggcgtgacccacttcctggtgcaagaacacatacacgcctgtggacg

SEQ ID NO: 443386 - DNA, 122 bp, Homo sapiens
gggttcagctgacccaggccctacccagctttgctccctatagccactttggtagcagaacgtgagatgggatccctgaaagccccatgccctgcccattaccagggacacataccccgtta

SEQ ID NO: 443387 - DNA, 122 bp, Homo sapiens
atacttataaaaccccattctccaagcaaaggcaaatgttgctatgagagctttcaagaacgggagttggccaggcatggtggctcacacctgtaatcccagcattttgggaggccaaggca

SEQ ID NO: 443388 - DNA, 122 bp, Homo sapiens
ggtctgcagcttcactcctgaagtcagcgagaccacgaacccaccagaaggaggaaactccgggcacatgtgaacagctgaaggattatctccagacacaccatctttaataaccgtaacac

SEQ ID NO: 443389 - DNA, 122 bp, Homo sapiens
tgggcatttacctttggctagctctgagctcaccgcagcatggtagcgggagcgcagctgcgcgggcaaccgccgggtttgtggccggttggcgggctcagtgccgcctcagtgggctctag

SEQ ID NO: 443390 - DNA, 122 bp, Homo sapiens
gggagccaccgtgcccagctgtaccttgttatttccaccagctatgtaatattccactgccggagtataacagggtttagctaactgatcccccatggatggatttctaggtgatcgctagt

SEQ ID NO: 443391 - DNA, 122 bp, Homo sapiens
atcgagggagggaaaacaagcgctcaagcactccctcgttggtcccaggacacaaggcctcgtccatctcacaaggcctcgtccatctcccatcacaccctagggcccaggcagaagcccgg

SEQ ID NO: 443392 - DNA, 122 bp, Homo sapiens
cgtctggtagactgagcctgtgggagctcctgtccctgcacaccgggcctgcgcctccctcgaagctcagagacgcagcctggagcagctctgaatgcaccactccctacccggatcctcca

SEQ ID NO: 443393 - DNA, 122 bp, Homo sapiens
actgcgggaagctccagcgttggtgcctgtttcgtctgcgcatgcgccgggacacgcctgcgcccttggccgcagtcagggctcccgagtggtcactctggttgacccgcgcaagctctggc

SEQ ID NO: 443394 - DNA, 122 bp, Homo sapiens
cacagcttttcctgacttgcacattcctgtttcaacttaaggcttaggatcctcttttgtcggaggagggagaaagagctctaaaatgccaaaagcaaacccacccatctgagatgagcctc

SEQ ID NO: 443395 - DNA, 122 bp, Homo sapiens
tgactacacctgctgggaccctcctgcaaacacacgtgtccatcgctacctgccgtggtgcgaagcagattccaggcgtgagctccgggccccacgggacccacacatggggagactccacc

SEQ ID NO: 443396 - DNA, 122 bp, Homo sapiens
agaaaatttcaagatacacagaagtggaataacccgatgaagccgcgtagagtcgctctccgacctcagcagttacgcgactcatggggcaatcttgtttcctctatttctgcacctacctc

SEQ ID NO: 443397 - DNA, 122 bp, Homo sapiens
ggccaacagccctcgggcgcccagaggatgagcagcctcggtatgcccgagtttcaggggcgcctgctctgcttgggagcccctcagtgaggcaggggaatccagatttagaaaggttgtcc

SEQ ID NO: 443398 - DNA, 122 bp, Homo sapiens
ggtcagtcaggccccagcacggccctagccccagcccccagccggaccgcacccttcagccgctgccctgacccggccagcagctgcgaaacccgtccacgcgaaattgagttcttggctgg

SEQ ID NO: 443399 - DNA, 122 bp, Homo sapiens
ccgggcttcgcttcgagcctcgcctttgagcctcctccgctgcccgggagccccgggctacgggctgggagtgagcaatctataaaggagcatgtacttcctgctttttcttggcaggcctg

SEQ ID NO: 443400 - DNA, 122 bp, Homo sapiens
ccgggccaggtcgggcctggctccctcatccgggcagcccggggcccggtactcggctcccgcctgggcctgcgctcacctggctcgccttgtagaactgcttcttcagccccgccaccgac

SEQ ID NO: 443401 - DNA, 122 bp, Homo sapiens
atctctaatccctgccctgagtctctcctcagagccgttatgaagaaaatgtgaaaataacgaatatggaatgtaaacatgtcttgtgcaccttgaggtctgactcatgagagcagatgctg

SEQ ID NO: 443402 - DNA, 122 bp, Homo sapiens
aattgggcaacctgaggttgcatcatgcctgagaatggcaaataaaaagtgaaatgttagcgagttagtgcctttccggcaggctggtattgtttgctcggtttaggattttcatctctccc

SEQ ID NO: 443403 - DNA, 122 bp, Homo sapiens
ctgaggggtaacggtatgctacaaaagtgcttctgagctactactcctggaggcttggtccgagtgaccgcagcagtgggcgcggtggaagagaaggagaacgtgttggcccgggcctccat

SEQ ID NO: 443404 - DNA, 122 bp, Homo sapiens
ctgtgcatgtgtgtgtgtgtatgtgtgtgtgtgtgtgtgcgcacgtgagcacatgcgggccggtgaggggtgtatatgagagctctctgcacgctcagctcaattttgctgtgtaagtatag

SEQ ID NO: 443405 - DNA, 122 bp, Homo sapiens
gcggaccctgtggcggggggagtctcctcaccggtgagcagctgcaggcgaaaacggcggcggcggcggctgaggcggcgatgcccttgtcttctccggaggctacggcggcgacgctctcg

SEQ ID NO: 443406 - DNA, 122 bp, Homo sapiens
gatgtaaaatggcaatttgacatagactaacagtgtgatgtgagcatctgcgtaaaaaggcgacatatggagcatgcccagtgtgggagtgcgtcctcctccctccgcctcccccctccccc

SEQ ID NO: 443407 - DNA, 122 bp, Homo sapiens
gaggcactttgaggagaccctgatgcagccgcctccctttctggagtgaaccgaaagcaacgcgacctgcctttcatcacgcagccggcctggcagtacccgtctccaacagggctggggat

SEQ ID NO: 443408 - DNA, 122 bp, Homo sapiens
tttaagcgctcttttctggatcaacaagagtttgctagtaaaaatctgagcccgccatctcgatgcttctcctgtctctaaaactggtgcccgggctgaggccccaggtgacagacgttttc

SEQ ID NO: 443409 - DNA, 122 bp, Homo sapiens
ggccatggggcttagttcctagcctaggaagggaaactgagactctgggaggggcaggaacgcccccaaggtcacttggaaagtcgggcaggatgtgctgttagggggaagacccgggcagg

SEQ ID NO: 443410 - DNA, 122 bp, Homo sapiens
ccaagtgatacttctgccttggcctcccaaagtgctgaattaagcagctcaccatccacacggctgacctcatacatcaagccaataccgtgtggcccaagacccccaccataaatcacatc

SEQ ID NO: 443411 - DNA, 122 bp, Homo sapiens
agaggcccgaaaacaattttaagatggcggccgcggcggtagcgcggaaaacaatggggccggggcggtggggagaggccgaggcttgaggtaggcagcaagcgccggctgggggtcgggcc

SEQ ID NO: 443412 - DNA, 122 bp, Homo sapiens
cgtgggtggcagggcacccggtgggtgagcggctctgaccagccgtgcctgctcctcacccgggtcctgcagggccctgacccaccctcacttgcaggacccccttgtctctcctctgagtg

SEQ ID NO: 443413 - DNA, 122 bp, Homo sapiens
gacccagcgcgccgggggagggcagccagggcttgggaaactctttcctggggcacctcacgcttcagcgtcaaaagacaatatagatagatgggtgccgggcggtggcgggggggactgtt

SEQ ID NO: 443414 - DNA, 122 bp, Homo sapiens
aggatgggcctgagaatccggagcgcaggctcgggccgctaggacaccttcccccgcccgcggacccagccttccagcatcaccggggttcgcggaggagaaagaggaaaggcgtttggcct

SEQ ID NO: 443415 - DNA, 122 bp, Homo sapiens
gagcatgggggctattggtttactctgctgccttaaacacgccggcttaaacagagttcgcgcactgacctctctagagtttgcctaataggaattcaatcaagataataacagcatttttt

SEQ ID NO: 443416 - DNA, 122 bp, Homo sapiens
gcggcggcagctctccatgctcggcggaggctgctcctgttagtcaagagttactttgctcggggagggacgggggcggagccgggggtgacgtcgccccgcgggctccgggcgcttctgag

SEQ ID NO: 443417 - DNA, 122 bp, Homo sapiens
aattagctgggtgtggcagcgagcacctgtagtgactacaccactttgttgacggccgtccggacctgcagctgtccgggccaggtggctgcccccgcctccccccggccggggcgctggtg

SEQ ID NO: 443418 - DNA, 122 bp, Homo sapiens
ccaaaagaagagtcccctattcctgaaacttactctgtccgtggtgctgaaacattgtaccgagacccgcccagacgggcgctgtcagccgctgaaaaaaaaaatcttccccgaggctgccc

SEQ ID NO: 443419 - DNA, 122 bp, Homo sapiens
agaataatacacacataattttgggaggcaggagggcccctcgttacaatggccaaacaccggggctccacccaaaaactgatggagatgacatgagccaatggtatacatttaagaggtga

SEQ ID NO: 443420 - DNA, 122 bp, Homo sapiens
tgccttcaggtacagctctgattgcagggctgattacacagacctcaagcctgtgaaaatcgtccactctgccccttggaatatacatacagagaaaattactaactggggcatcccaaatg

SEQ ID NO: 443421 - DNA, 122 bp, Homo sapiens
ctgaccttgtgatcctcccacctcggcctcccaaagtgctgagttacagaaatgagccaccgcgcccggccaaatatcagtagacttctaatcagaaactgtgcaagtcagaagaccatgaa

SEQ ID NO: 443422 - DNA, 122 bp, Homo sapiens
catctcctctaaagccatggggatcatgaattcctttgtcaacgacatcttcgagcgcatcgccggcgaggcttcccgcctggcgcattacaacaagcgctcgaccatcacctccagggaga

SEQ ID NO: 443423 - DNA, 122 bp, Homo sapiens
cgagcgcgggggtttgtttattttcgcggttggtagcggcgctggcgctggttagaggttcgccggtgacgtgagcgcccgagttgggggagaggaccagaaccacctgctggagaagggga

SEQ ID NO: 443424 - DNA, 122 bp, Homo sapiens
aaggtcacattataaattctttttactgaattgtgttcgcagccgccaccgcgccgccgtcgctctccaacgccagcgccgcctgtcgctgaccaagctccagccgaaggagaaatgaggta

SEQ ID NO: 443425 - DNA, 122 bp, Homo sapiens
gcagatacacatacatatgtctgccacagacacatacaagaatgatcacagcaacatcttcggttgtagttccaaactagaaacaacccaaatgtctatcaggagtaaaatggataaacaaa

SEQ ID NO: 443426 - DNA, 122 bp, Homo sapiens
aaatctgtaattctgtcagttcactcgtaagcccctcacctgtgcagtggggcagtgccccgctccagtgactgtcttcctggcacactctcgtgtcgttgcctatgaggctctcgctccct

SEQ ID NO: 443427 - DNA, 122 bp, Homo sapiens
agtccaagtgtctgagaccaacctgggcaacatagcgagactccagtccccccaccaatacgtcagtaaatatttagctttcacagtgtgtaaaacctagctttggtgtctatgagggtccc

SEQ ID NO: 443428 - DNA, 122 bp, Homo sapiens
agcgatgcgtggggcgcctggagaaggggcgcacgggcaggtggggtgctgcggggcccgcgcgtgggggccgcgccggccggggcggggtgagtcacggcccgcccgctcccattgtgcgg

SEQ ID NO: 443429 - DNA, 122 bp, Homo sapiens
ggggaggcagactgccccagccctccccaacacacgcaatggttatgagaagaaataaagcgaagggtgttcctgagattgaccccatgacctacacttagtacaaggctaagctctcttag

SEQ ID NO: 443430 - DNA, 122 bp, Homo sapiens
ctgtgtgtatcagagcagccctgtcatcctgctcatgagtcactaggcaaagcaggtcaacgtcaaaggttggtgggtggggacatagaatcctactaggtgcctgagaagagggacagctg

SEQ ID NO: 443431 - DNA, 122 bp, Homo sapiens
ccggaagtggaggtcctcgaagccaaagcagctggagaaggtgcagggcagcaggatctccgtgccattgacagcgtagatgtcggtggcctttcccacagacacctccagcgacagggtta

SEQ ID NO: 443432 - DNA, 122 bp, Homo sapiens
cataaaatagaacacataggattgcaaaaacaatcattgtactaaaatacagttatcaaccgataatcacatttgtgatatagtaacataaatgtttctttttttttttttttgaggcagag

SEQ ID NO: 443433 - DNA, 122 bp, Homo sapiens
caagataaaaccaaagctctaggagtgctgacagactgggtggcatcggacaaaggccctcgcggcccctcttgggccttgggcatctctccttcactccccgcctcaggataaagcttgga

SEQ ID NO: 443434 - DNA, 122 bp, Homo sapiens
cgacggggcaccaggccatagaattcccaggttctttcctccctctgttttgggagcggtcggtccccgagggcgtccccgctgctggtgctagggaagtgggcggcgggccaggccacctg

SEQ ID NO: 443435 - DNA, 122 bp, Homo sapiens
ttggaataggccatgcgtctcccacattgttttgcagccactttctagccttgtcactgccggagcaaattgtttagtttctctgggcttcagatccttggctgtaaagcaaatcaaaacca

SEQ ID NO: 443436 - DNA, 122 bp, Homo sapiens
cctccaggaaggcttccctgattttgcacgagtacacacacacacacacacacacacatacggtgagtgcatttacctggtctttgccttcgggcacgtaccagagtataacttaagctcaa

SEQ ID NO: 443437 - DNA, 122 bp, Homo sapiens
gagctcctcctgaaggaaggtttcgcacgctgtgtggactggtcgattgcagtttacacccggggcgcagaaaagctgagggcggcagagaggtaaggtctgtccaagaggccttccagctg

SEQ ID NO: 443438 - DNA, 122 bp, Homo sapiens
acctgctgctggcactgccgggccggggcgccgcagtgggcgggtggcctgtgggaggagcgcaatgaggcctgggggtggccgtgtgttgccatcctggcctctgccacttgagggtgagg

SEQ ID NO: 443439 - DNA, 122 bp, Homo sapiens
tctactcgaagaactgaccctcagctctcacaggctgccgccgagctgcaagcatgccgccgctccactcgggtaaacttcggagtgagttacctgcactcggagaagggccttacctgagc

SEQ ID NO: 443440 - DNA, 122 bp, Homo sapiens
aatcgcgcgctcctcacgctggagtaagttacgaaacatgatcgtcaggctctttgcaaacgcagagccccagaacgctggatggaggcctcctcggccctgcgggcggcctggctgcggta

SEQ ID NO: 443441 - DNA, 122 bp, Homo sapiens
tcggcgactgtgcgggagagtttatggggatgggcggggctgcttctgagcaggagtcgccgcccccacccccaccgttccgcctctgggcccgcaggctcctcccgggagcgctttcccct

SEQ ID NO: 443442 - DNA, 122 bp, Homo sapiens
ggccccacctctcagagcagggaggaggatgctgggccagcccttggggaccccaggcaccgtggccacaggagtcagagctctgcatgtctgcaccatgtcctgggctcctgtcctgctca

SEQ ID NO: 443443 - DNA, 122 bp, Homo sapiens
ccaagatagcactacaccgtcagcctctacagaagaccttgggtctgaaaattaaaacttcgggggaatctcaagcagcttctccaaagagtcttgcaaggggcctccctgcactaactgga

SEQ ID NO: 443444 - DNA, 122 bp, Homo sapiens
aggagtatgtagctataggtggcctgtggcatttgcttacagaaacaggcagaaggatgccgcaggcaccaggaggcacttgtctaagaacaacaacaacaataacaaaaagctgctgagaa

SEQ ID NO: 443445 - DNA, 122 bp, Homo sapiens
gcgggcgagcgagaggaagcaacaaagacaggctgcagctggggctggcgaaaggggccgcggccgccgggctcccagcgcgggcggagagggcgccctgggagcggcgcgggccgagctgc

SEQ ID NO: 443446 - DNA, 122 bp, Homo sapiens
ttcaaagctcgcgcctcaggcgacggcagccaacgggttgccggctggaggccccgccgacgccccgccccttgcgtgcccacccgcgccccgcagccccgcccccagcgccgaccctaagt

SEQ ID NO: 443447 - DNA, 122 bp, Homo sapiens
cgcgcctctccctccttccccggtgacacaccgagttctccctcggcctcacaaaagaaacgcatctggcctgcgagtcccgggcggctcgtgcacacctcaggcctcaaatgacttgtttc

SEQ ID NO: 443448 - DNA, 122 bp, Homo sapiens
agaacggagagggaggcgcgggggcgaaggctggcgggagccgcgctgagggcaggagcccggagccccctagggcagcgccgatccgcccgccccgtcccgccgagctgggcctccgtctg

SEQ ID NO: 443449 - DNA, 122 bp, Homo sapiens
gctttccccactcatgtcttctactcactagctaagcttggggtgggtgtccccattgcccggaaaattactacacagccctcatatcaaacttgttttgagaagcataaccataaacccat

SEQ ID NO: 443450 - DNA, 122 bp, Homo sapiens
agaatctggcctgagatcttagagcccagccccctaaggacagggaaccaggtccctgcacggcacccacgcaggtgtcccggtctgcataagcctcgtgtgcctttgtaaagtccacctac

SEQ ID NO: 443451 - DNA, 122 bp, Homo sapiens
tttcccactcagcccaggccgctgccttcctcctcaactctctccagccggagttgggggcgaattgaaaccagcctctccggtggccacgactttgaggaccatggaatggttgctgcaga

SEQ ID NO: 443452 - DNA, 122 bp, Homo sapiens
gagcttgagatttgtaaggacctgcatagaaggcgcggctcaggctgaagtagagcaggacgataacaaagtgaaagaggagaggcgaggagaggcgggaaggggcggagcacgtgtttcgg

SEQ ID NO: 443453 - DNA, 122 bp, Homo sapiens
attcccctacctgctccttttttcttgcaacatgtggattactataccctccctctttctcgtttaaatattaaagccctcaaaatcattgttggagaaaggcacagacctttctccagggc

SEQ ID NO: 443454 - DNA, 122 bp, Homo sapiens
cttcattgggctacttctgcttccttgcaggtgttagggagctgccagtttctctggaagcgcttccccgagggcccctctattctcctgtagccccccacaatacagtaatcatagttaag

SEQ ID NO: 443455 - DNA, 122 bp, Homo sapiens
gagtggctgggcttccagggcagaagcagcacccccagaagaggtggcccatgaggagcacggggggctttggggtgcgtggttcctctcggagccagcggcccctggtcccgagcgagtgt

SEQ ID NO: 443456 - DNA, 122 bp, Homo sapiens
cactcctgagtcccccagacctgtgtctacccggcacacgtgctgtgtcccagggagagccgctgcgtcctggggctctggtgtcccggccttgacctggcttggtctcagccctgggcctg

SEQ ID NO: 443457 - DNA, 122 bp, Homo sapiens
ctgcccctggagcagagggatagcgaaagcggggctgagcgcagcacggaccgatcccatcgccgcgctcgccccgcgtggaggcagccgggtgcccgaacctgaaggaggacccggtgccg

SEQ ID NO: 443458 - DNA, 122 bp, Homo sapiens
gttagtgtgactgaaatgcaaaggatactttttggggtgctctgaacagctttctggtatcgtgttgagttacattggaagagagagtaactgctttttcagttacagtcttgtggcaaact

SEQ ID NO: 443459 - DNA, 122 bp, Homo sapiens
accctcttcccccctttccttgtgggctgcttgtatttcagacagctgtgaagaatgtaacgggcattcactaaggggcaatctggactccagcagggtggtattaatgatggcatacaacg

SEQ ID NO: 443460 - DNA, 122 bp, Homo sapiens
ttttgtgtctggcttatttcactcggcataatgtcctcaaggctcatccatgttgtagcacgtgtcagtagtaccgcctgcctgccggtgctgcgcccgggattaagtgcatgtgaagccat

SEQ ID NO: 443461 - DNA, 122 bp, Homo sapiens
cgagaaaggtccaggtctcgggagagagatcggagaaggagccgctcgcgatccccgcaccgaagacgctcccggtaagggcagaaaataagccaagagttttatttaccgaaagtccctaa

SEQ ID NO: 443462 - DNA, 122 bp, Homo sapiens
gcagcacagaggatgttttccgagcacaccccaacagcaaaaaaccgggtgccccagccccgttatttagggaatgatgcaagccggaaggggtgttcagcagagtgcctcgtatttttatt

SEQ ID NO: 443463 - DNA, 122 bp, Homo sapiens
aggctccagactgtcagagagcgccaccagcgaggagagcctaatttgcccaatcaggggcggcccttgagataaccagttactggaagatgccctagagatcgagccaatgggagtgcgcg

SEQ ID NO: 443464 - DNA, 122 bp, Homo sapiens
tgctcggccgccctcatggcagacccccactgccttctcatggcctctaggccggacactcgggagcttctccgagaaacagcaagctagcgagcgaggacccctacccggtccggctgaag

SEQ ID NO: 443465 - DNA, 122 bp, Homo sapiens
gatttctccagagcacggactgacttaacatttccattactgggaatgtaatggttgctgcgtcaggactctggagatgatttttttatttggaacgatataatttttggaatttccttaaa

SEQ ID NO: 443466 - DNA, 122 bp, Homo sapiens
cgctcagaacttacatcgcctccatattgccgtctccatagatacaggacgcgcaggaaacggcgtcttcagatatcccagggcaacgacggcagcccgagtaagtcaagattcgtagaagg

SEQ ID NO: 443467 - DNA, 122 bp, Homo sapiens
cttgtcacttggcttccctgagcctcagtttccttgtctgaaaaagtggagtgataatctcgatttctcaggtcaactgtgaggttgaaataagatattggtggtgacagggcctgtcacag

SEQ ID NO: 443468 - DNA, 122 bp, Homo sapiens
cagctgtgaagtggggctgtgacgcccagaggcactcaggcattcagacctgcactgacccgggacaaagacctcagcgtggggtgtttttcttcctttcaggaagccccccaggcgctgat

SEQ ID NO: 443469 - DNA, 122 bp, Homo sapiens
cgccctatgttcgttaccctaactgaccactgccatcaagattgttaagcattttgtcaccgttaaaggatttcacacaagctgttcctcccactcaaaccttggccaggaaactggtggat

SEQ ID NO: 443470 - DNA, 122 bp, Homo sapiens
caacttgaaggaagccatgccaggccctgcgcttgtttatgctttgactaacgggacttacggtatgatgctgaatgtatctgactctgagcgttttagtaatgaccactgaaatattttcc

SEQ ID NO: 443471 - DNA, 122 bp, Homo sapiens
acacgtcctctttagcagatgctttctttataagtgtgacttatgttagaaaaggtttaccgtttttccatttcaaaagtaatccatggtcattaggggtaggaggaggaggaagagagagg

SEQ ID NO: 443472 - DNA, 122 bp, Homo sapiens
aggatcctgtgcaccagctccctgatggacaggtccaggttggggtccacgaggaaggtccggctctgcctcccagccaggggctgagcactgacgtacctcccgtccacgcccaccagcac

SEQ ID NO: 443473 - DNA, 122 bp, Homo sapiens
atggccgtgatgaccgggttctgcatgtaccagaaggtgaggttgccgtgcacgcagccccgacgctcgaagcgcacacacacaggcaccggagccggcagggccccctcaggcatggtgca

SEQ ID NO: 443474 - DNA, 122 bp, Homo sapiens
cctgcaggtaatcactaatttgaatgcccaacaggctttggaaaatcaacatatccaaagcgggcctctggccacccagccctttatccacaaacctgccctgtctatattttcccccatcc

SEQ ID NO: 443475 - DNA, 122 bp, Homo sapiens
taagagtttgtttaaaacaaaacaaaaaaagcaaaacagaaaacgtttttctcctgttatcggagtttctctacagtgaaaacagcaaaaaacaacagggcaaaagaatcactactaaacta

SEQ ID NO: 443476 - DNA, 122 bp, Homo sapiens
acgggctccgcaggctagcgcacctgagtaacaactgggcgggcagccggcctctgcgcccgtttatatcgctcctcacaaaatggcgcccgcgccacccggaaatgaaaccttctgattgg

SEQ ID NO: 443477 - DNA, 122 bp, Homo sapiens
tttacatacgctttgatcttgttttactcagttctgggttctgacgctcttaaaggaccccggagcgggagttagttaggaggggtttccttttcagtgtgctcgtcatggttgagctcagg

SEQ ID NO: 443478 - DNA, 122 bp, Homo sapiens
taatcactcaaaacggttatttcaaacaggtagagtgctgggagggaaatgcacaaggtgcgaatagagtgtatagagggaccctcatgcagactcagtgaggttgttacgaagggatggga

SEQ ID NO: 443479 - DNA, 122 bp, Homo sapiens
cgtagagctggtactcgtcggtgaagcgggtgcaggtcaccgtggtggccatggcggcggcggacgggctcggcgtgcgctcggctgcgctcgggcggcggcgactccggctcccgctcgcg

SEQ ID NO: 443480 - DNA, 122 bp, Homo sapiens
ttacagctcttaaggcagcacttctggagttgttcgttcctcctggtgcgctcgtggtctcgctggctttaggagaaaagctgtagatcttcgtggtgagtgttacagctcataaaagcagt

SEQ ID NO: 443481 - DNA, 122 bp, Homo sapiens
cagccctggcgtgcagatggatcgtctgtgccagccttcggctcttgtcgagcaggtggtcgctgtcccagtcatcaccggcgttcctcgctctgcacttccataccggctgcagtccttcc

SEQ ID NO: 443482 - DNA, 122 bp, Homo sapiens
tgccctggccggcgatggggaggagccggctccggcagtgagaggataggcacagtggaccgggcaggtgtccaccagcagctcagcccctgcagtcatctcagagccccttcccgggcctc

SEQ ID NO: 443483 - DNA, 122 bp, Homo sapiens
accacagccctagcagaccccctgccctcaggggcccccagaaacagttgtgcctatggacgtggctgtgtgtgcggagagctggctgattcaggccagtgttctgggacgaagagaagccc

SEQ ID NO: 443484 - DNA, 122 bp, Homo sapiens
tgcctagatcccctttccctggctcggtttagctggtggggagcagtccacatcacaccccggggagctgggcggtggcaggactttaccagaactctctccttcccatttctccacgcacc

SEQ ID NO: 443485 - DNA, 122 bp, Homo sapiens
tacagtttccagaatctgccagaactggggaactgggcaacaaggcgttcataagtcttccgtgctttgtctataggttgattctaaaattgaaaaccaataaacagcatttacaatgttag

SEQ ID NO: 443486 - DNA, 122 bp, Homo sapiens
gcccgcagccaccaccaacccctcccctgcctctcggccctccccgccgggcggggccagcgacgccatcgtgacagctccttaaagggccagtgcccagcacagggttcggccgagacggg

SEQ ID NO: 443487 - DNA, 122 bp, Homo sapiens
gaaagagcagcaagggtgggctctgctgccgcccagaggccttccgtggtaagacagccacggaaagcacagcgcgtgccgctgcgacggggcgtcccgggggtgacactggcatgtgacgc

SEQ ID NO: 443488 - DNA, 122 bp, Homo sapiens
agaaactcaaacgagaaaagatggattcagccttacaggttccgttgggaaaacggtccccgtggatgctcggctgtggctattaaccacacacactcattaaacagctttactgaagagaa

SEQ ID NO: 443489 - DNA, 122 bp, Homo sapiens
gtcggttctgcttggggcatgggcagagggaggctgctggggccaagccccggctggacgcgagggaagaaactcgtcccaggacccgcacgcccatacctggctgtcccagagctcttccc

SEQ ID NO: 443490 - DNA, 122 bp, Homo sapiens
ctacccacagtccccttttatggagatcacagctgtggacgggcctggccgctgctgaaccggaagactccagataaggtcaggaagcctgaggcctgccctggccccggatgagttggccc

SEQ ID NO: 443491 - DNA, 122 bp, Homo sapiens
ttctgcaatgaatgcctcaagggttatgatcccagacaccgatgtcaccagaagaccttccgcggaacggacgtcaggccaagcagtcctgagatctgctggcttctacctaaacgggactt

SEQ ID NO: 443492 - DNA, 122 bp, Homo sapiens
cacgctcccaaggggctggcctgagcgagtctgcagggcctgacagacagggcttgggcacgacttctgcggctgcagattgcgctgggccatggtaaccaccacgccggcccgagggcgct

SEQ ID NO: 443493 - DNA, 122 bp, Homo sapiens
agtgaaggcttttgttttcctctctgttgtcacattccaaagaggtttaggggtagcagtcgctcttcacatcgtcaattgtccacatcaagtgtctataactacatcccctccacacccta

SEQ ID NO: 443494 - DNA, 122 bp, Homo sapiens
ttctgcatcaagctttgtagaagacgtacataaacacctagaaaagatgtgccaatcaaccgggattttcaaatgccacacacataccaggctgtggcattgccacacttaacagttaacgt

SEQ ID NO: 443495 - DNA, 122 bp, Homo sapiens
ttacacttcggatgtaaaatggcaatttgacatagactaacagtgtgatgtgagcatctgcgtaaaaaggcgacatatggagcatgcccagtgtgggagtgcgtcctcctccctccgcctcc

SEQ ID NO: 443496 - DNA, 122 bp, Homo sapiens
gcaacgcgaaagcatgcatagttaacgctcctgactgtgtgaaaccctttgtcgcggcaccggctccgcgagggacccagggcccggggcttggcaagggcccgagacatttcttggaatgg

SEQ ID NO: 443497 - DNA, 122 bp, Homo sapiens
atcccctctgtccagcaaacgcggtgcccctccactcagccaacatccggggaatgccagcggcaggtgggtgcccctctcagcctggggacatgccctgtgcacatagatctggcccggga

SEQ ID NO: 443498 - DNA, 122 bp, Homo sapiens
tgtcttctcacaccccacccccctaaataatgctctattttaacgtatgccacacagtagcggccagtgaatatggcagctgaactaaatggcttggtaaacttcatggttggtcatcctcc

SEQ ID NO: 443499 - DNA, 122 bp, Homo sapiens
tataaaggcgctgcctcaggccagaggcctcacaaagcgttgggtgagactcctcttgctcgtcatgtctggccgcggcaaaggcgggaagggtcttggcaaaggcggcgctaagcgccacc

SEQ ID NO: 443500 - DNA, 122 bp, Homo sapiens
acacagcgataaggcctttccctggcgcaatctgcttccgggagtgacggaaactgctagcggagagaaaaaactgggaggccagggggcggggcctgggcgagccgcgaccagcaaggggc

SEQ ID NO: 443501 - DNA, 122 bp, Homo sapiens
actgttatcatgttagagtaaattagatttcttgagggaagtgtattaattcttccatgacgtaaaataacttctatgtagctggagattaggaatgtatcagacctcgaagaggggaggct

SEQ ID NO: 443502 - DNA, 122 bp, Homo sapiens
tcttcctctctaagcagcacaggcaaaagtgaaatggaaggaaaaaagagctatagaccacgatgaagatgattaaagagagtacagagcagctgtcaaagcaaatatcaagcaacattaat

SEQ ID NO: 443503 - DNA, 122 bp, Homo sapiens
aggctagtaaatggtgaagtacttcccggccagagggcacctgcgctcgggaggtttgggcggcttggcgtcggaggagagccccacccgcggaggaacccagccttgccaacggagctggc

SEQ ID NO: 443504 - DNA, 122 bp, Homo sapiens
gcaaaatgcacttatatatttgttacactgtattgcaagatagcacacagaagttggctgcgtcaagtagaggcgacatttattaagtgaaaatcatggagttgggatatctctcaattaaa

SEQ ID NO: 443505 - DNA, 122 bp, Homo sapiens
ccattccaagccttcccactggcatgcccgcctcactcctaggttattaagcactgcaaacgaaggttgcctagggcatggtgaccagccccacaggtcccccgtgcttctcgcggctggag

SEQ ID NO: 443506 - DNA, 122 bp, Homo sapiens
ggggcgccgagggctccggggacggcgggcagaatccgctccgagcacgcggggcagacgcggcgccagatgcagccgcttcggctagcgaacctccagcatcgccagccgcttgccggcac

SEQ ID NO: 443507 - DNA, 122 bp, Homo sapiens
gacgcagccagcgtccaacacacggagaaggaagaagcagaggccagagacgatggccggcgcttagctgtgagccccatgagcttccaatgctcgccaggagaccgtgtgtctaggagagg

SEQ ID NO: 443508 - DNA, 122 bp, Homo sapiens
gggctgcccctctctttttggccagccgcagagtccagtgggtctcccagccagggacgtcgtgggagaatcaggaagtcaaagccacacagccgagaagcggcagctggcatctcggaggc

SEQ ID NO: 443509 - DNA, 122 bp, Homo sapiens
tactcccttacaaatcggagtcaatctcacatcttccaataccagttagtcatatgcttacgaaaaccaaattgacatctgcagctcggacctcccctgaaccaagcccaagcgcggaagag

SEQ ID NO: 443510 - DNA, 122 bp, Homo sapiens
gccgcgccctctgcccacctgcccccacacagccaccgcctccggcagccgccccatctccgccccttccggccagccgagcctcatggcttagatggcgtccatggccgcaggggtagccg

SEQ ID NO: 443511 - DNA, 122 bp, Homo sapiens
aggaatgaacgaggtacctcaaccaggtacatttcagtacgacctaaatggtgcccagcccgggttcctccttgcaccaaaagcgaagcacatctgggggtttttcccggcgggacgcgcca

SEQ ID NO: 443512 - DNA, 122 bp, Homo sapiens
tgaggctgcaatttccggaccatttccctggtgctgggtctgtgggaagatctccttggtcgtcagcacctcttcctcaggaccagcgggtcattagagtcttaaccaggggcccggtggcc

SEQ ID NO: 443513 - DNA, 122 bp, Homo sapiens
acaattcacccacacgtaagggtcctgtacagaaccctggccctctgaagcatccagaaacgaagccagctgacaatacccaacttacaccacagttaaaggaacaccaaccctcccagatg

SEQ ID NO: 443514 - DNA, 122 bp, Homo sapiens
acttgtggcgcgtgtcgggaatacagggcgctctggctcttcttggggcctccgctggtccgaccatctggcagctctcttaaccaccacggccaccccacgaatggaagtttgggacgtgc

SEQ ID NO: 443515 - DNA, 122 bp, Homo sapiens
tttgtagggctcaaaatgtgtacagatcaccctgttagaagtctagaagaccacattccccgtaaaagttgcttcagtctggttatttacctataaaacaagaaaattaaacaaagttctct

SEQ ID NO: 443516 - DNA, 122 bp, Homo sapiens
agcgggcgccgggagtgaggttcaggcgggagcacgcacgcgggtgggtttgcatccctgcgtgtggcagtcggattcccgctccctgccttgagtcccctaggcgctttgcatcagcgtgc

SEQ ID NO: 443517 - DNA, 122 bp, Homo sapiens
cacgctcggagaagtgcctccgcgagcagccgcctgtaccagcctggccgcgcagcctgacgtcacaaagccagccacgcgcctgcgcggcccacaggccccgcccctggacacgcccttgc

SEQ ID NO: 443518 - DNA, 122 bp, Homo sapiens
cacggctttcctcacgctcccgctgtaggcccggcgtcttgcgtctggcgtcatcgacctcgttagccaatggattgttggcagtttttacatttcacctcgcgatatctcagcgcctcggt

SEQ ID NO: 443519 - DNA, 122 bp, Homo sapiens
agcctgggcggggagggggagccaggaagctgcgagcgcgctggggagcgcagctgcaggcgttggggcggcaggagccgcggagccggcgctgagaggggctgcggccggagcgggcggct

SEQ ID NO: 443520 - DNA, 122 bp, Homo sapiens
ccttaacctctcaggctgggatcaatgtcccccaacccccacctcacaccccacaggccacggcagctcagacttccctacatcacaagctccctgtatcagcactgggtctccttctatct

SEQ ID NO: 443521 - DNA, 122 bp, Homo sapiens
cgggagggacaatggggcattgttctggggtcggtgagaccgggagacagtctccccccacgagattcccccccctttccacagacactgtgttccatgccagttccccagtaagctggagc

SEQ ID NO: 443522 - DNA, 122 bp, Homo sapiens
gtaagagtgacacgtggccctgggggcgggggtgccatctaagggtttcctctaaagcctcgggcgctggctataccaatgaagagggagaggcggagagcgcagcagcctgctaaagtaaa

SEQ ID NO: 443523 - DNA, 122 bp, Homo sapiens
accactgcttctcaggcacagacgggcagagggtgtgggccaggctgggcctgagtcacacggaataatttcgtctcttgctcctctgaagcattcctgggggatggggtggggtggggtgg

SEQ ID NO: 443524 - DNA, 122 bp, Homo sapiens
tcatggcagaggtactaaatatgtattatggaaaaattccagtgatacggatgcatttggcgggagtgatgccttggaagtagctccctagagactggctccaaggcctggttgggacgcac

SEQ ID NO: 443525 - DNA, 122 bp, Homo sapiens
accccgcacttaacgtcaggagcccccagtgccgtgagtgactgaggctggcatggcaaccgtgcctgggagaagggaggttgtgcaggggctgacagagagtggccaacaaccccatttcc

SEQ ID NO: 443526 - DNA, 122 bp, Homo sapiens
tacgcagaacaggagccgggggagcgggccgaaagcggcttgggctcgacggagggcacccgcgcagaggtctccctggccgcagggggagccgccgccggccgtgcccctggcagccccag

SEQ ID NO: 443527 - DNA, 122 bp, Homo sapiens
tgcaatccgctcacatggggcctgtgacatcacttcctccgccaggggcggagtggaaggcggcaggcggaagggagggggccggtgcgagtgaggagaagctgggcgtccgccgcgacttc

SEQ ID NO: 443528 - DNA, 122 bp, Homo sapiens
gtacctagtaggtcaatccagtcaccactggctgccacgacaaaaagtcactgcatctttcgggacctgggccttgctgcttcacatggaaggtggcgacacaggtgtccatgaggctatga

SEQ ID NO: 443529 - DNA, 122 bp, Homo sapiens
agagccagcgttcaactaggaccaggcatgctgccacttggggacatcagtgcaaggtgtcgccacagctttcactcccaagcatggatggcagggaagctgggatgcagctttggaagctg

SEQ ID NO: 443530 - DNA, 122 bp, Homo sapiens
ccgctcccccgagaatcgggcctcgccctgctgggcggctggacctgggcaaagcctgggcgcgctcccgcgcagcggcgccatgaagcgctcggggactctgcggctgctctcggacctga

SEQ ID NO: 443531 - DNA, 122 bp, Homo sapiens
gcaagcgggggctcacaccatactcattcccagttccaggggggcctgaaggaggctgaccgctggccccagccttctcggtcggagactgctgttgactgtgaccgccacacacatttatg

SEQ ID NO: 443532 - DNA, 122 bp, Homo sapiens
tgccgtcaccgctggccactgggcacacctgtgggctccaccagccacacagctagaactcgccctgctgttgccgatggcctgggtggctttggggtttcaccttcaaccggcagaagaaa

SEQ ID NO: 443533 - DNA, 122 bp, Homo sapiens
gtcagctcaggggacagaggggtacagagtagcctggaggcggcgccaggtgggagctgacgaagcctgcgggggggctgaggccagcgtggtggagggagccagcgggagcgctgcacttt

SEQ ID NO: 443534 - DNA, 122 bp, Homo sapiens
ttcttctcctggctcgcccgggtccccgcttcctcacccgcaggtcccaatagctcccggcgccccggctcggttcggcttggcaccaaaatgtccgcggcctccacctctcgctctcccgg

SEQ ID NO: 443535 - DNA, 122 bp, Homo sapiens
cccaggagaaaccacacatcctggggctcaaaccactgggccgtgtgactcgtgcgcttgcgcggcagggagcagcgggactaggaaatctcctctgagaggacagtcaatcagaaggcgct

SEQ ID NO: 443536 - DNA, 122 bp, Homo sapiens
tgctcaggggccttctaagacctctccccttgctgcacataaaggctgtgcagagggctccggacctcccaggggagcaagggaagcaagctgcagaaggctactttcaagctgtgcctcaa

SEQ ID NO: 443537 - DNA, 122 bp, Homo sapiens
atgtgacgggaaggatttcaggcatttcaagtgccccgcgcagtgactggcccggaattccgcgcgtcttcccggtagcgtttttcctttgtctttggtagaggactgggggtgggtggggg

SEQ ID NO: 443538 - DNA, 122 bp, Homo sapiens
gctggaagctcttggtcccgaaattcatggcggtcgacatgttggcgactccggagtctgcgagcgccttgcgagcgtacgcagggcggccggcggagcgccgagcaggcaccccgggagcg

SEQ ID NO: 443539 - DNA, 122 bp, Homo sapiens
gtggtgccaacagctggaagctgtcagccctctgcagtccttgcagatgaatggcaagttcggttttttttgttctgttttgttttttgagacaaggtctgactgtcacctggggtggagtg

SEQ ID NO: 443540 - DNA, 122 bp, Homo sapiens
cagtgtaagaactccgcgagcccgtgctcactattcacagaactcagcagaactcagcagcgtgtttgtcaagggcacttactcaggcccaaggccgttggaacgctgcccttcgaccctgt

SEQ ID NO: 443541 - DNA, 122 bp, Homo sapiens
tgggcacggactggcagtggagcgccgtggaaccctgaagcaggtatcccgggttgcactcgaatcggacgatggagccggcagaaaactcagaaccaattctccttccgtatctgggctcg

SEQ ID NO: 443542 - DNA, 122 bp, Homo sapiens
catccacagcctgtgctgcctcgcctcccacagggggctgctgtaagtgaaattctgccacgtcaacgcaggaaacatagcactctccttccacatcttgttttcatttcacagaagtttcc

SEQ ID NO: 443543 - DNA, 122 bp, Homo sapiens
cgaccgccggccgcccagcccagcccggcacacgcatgcatgcaggccggccagcatgaccgtgctcggccccctgggcactcggtcccagttggtccctatacccgcccctattaaaccaa

SEQ ID NO: 443544 - DNA, 122 bp, Homo sapiens
aacctgccctcacacatggcagagggacacatggggtgcgaggccccggcacacagtccacgcctgggagtgcacgcttcccgtgactccgggccctctcaggagctgcctgtcgctaaggg

SEQ ID NO: 443545 - DNA, 122 bp, Homo sapiens
tccagaagatcaaggggaccattctaaggtgccccgggaataggcggctctccccggggccgggcgtcctggggcactcctacccagcagcccggctgcaggtagacgcgaaggcagtggcg

SEQ ID NO: 443546 - DNA, 122 bp, Homo sapiens
ggggggttcgccacgtgtcctggttaattataaccgggcgtctcgggtgtcctcgggcctcgcctccttacaagggcagccacggggccctgggtggccgctcccacctcccggggaagggg

SEQ ID NO: 443547 - DNA, 122 bp, Homo sapiens
acacatgcgtcatccggctgaggggtgaatgcaggctcttctggcggcgggctcaggaaccgccaggcagtggtgtcctagctcacctggaggggtcgcggggtgaagcagattttctgatg

SEQ ID NO: 443548 - DNA, 122 bp, Homo sapiens
tcaaggccaaactttctgatgaagtaatcaatctcccaaaatttctctacactggttaaacgccacttagtcaaagcctctattcttttatctgagactttccattgtacataaaaacagac

SEQ ID NO: 443549 - DNA, 122 bp, Homo sapiens
aattaaatgagaaatcataatccaaaatcccatgtgttccatgattacaaattatctatacgaacagatgaagactaaaaggaaatagcaacaaagatgacacaaatgcctggatgatttag

SEQ ID NO: 443550 - DNA, 122 bp, Homo sapiens
tgccaatgctatgcgtatcttccgatggtttttttctaatgtatctaaggcccaggctagcgaacaacagcaataataatgatagtaatactgttggccaggaccagagaggcccagggctg

SEQ ID NO: 443551 - DNA, 122 bp, Homo sapiens
gccctctgtcctccgggatccgggacggcggcccctctccggctacgaggggttcgttgacggagtcctgttttggctttgagtcgctgcctcttgtttctgagatttgagcgtccggcagg

SEQ ID NO: 443552 - DNA, 122 bp, Homo sapiens
tgacaagaacatttgagcttccttttccgccataggtaacgctttttattatttgatcagcgtttttattgtcttccaggttttaatatcataagaaagcacatatgtcttcctcatctccc

SEQ ID NO: 443553 - DNA, 122 bp, Homo sapiens
cggaccccggcccttcctccttgacaggctggggtccagccccgagacattcctaggctccgcccccgagcagacgcgcgcgctcagccccagcgcagagaaccaatcaccatccgtttcca

SEQ ID NO: 443554 - DNA, 122 bp, Homo sapiens
atttaacctgtgagtcccaaataacctggatacactctgtcgactcctgggctctccctccggcagcccagtgatgtttcaaagcccaaggtccccacctcatgtgacaggctgaggatggc

SEQ ID NO: 443555 - DNA, 122 bp, Homo sapiens
ggggccgcggagcaccagcaggctgcgcggttccagcagtagcgaggtggtgggccggggcggaggccgaggctgcagggcgggttgagggtcagcagggctcaagaagtcggggggtgggg

SEQ ID NO: 443556 - DNA, 122 bp, Homo sapiens
ttatacctttatccttggctactgtgccctccatcccaaaggccccaaaaaatgagccatcgtgctctgggtggtaaagcctgcttgctacctccctgctgactcagagcgtgtactggatt

SEQ ID NO: 443557 - DNA, 122 bp, Homo sapiens
gcgccccctgcaggcggcgcgccacaccgctggccctccggcaccgccccctcccggccccgctccgcccgccgccccccggtactgcccaccttcagcccaccccgcagcccccgcgctct

SEQ ID NO: 443558 - DNA, 122 bp, Homo sapiens
agtcatagtgacataggacatatacttggttatggatcttgggagaaacctcaacattgacgaagataatttacaaatttgaaactggaatctagaggcactggccacaaagagctggaggg

SEQ ID NO: 443559 - DNA, 122 bp, Homo sapiens
aggatcatatgacagaaggaagggctgaagagtgtgagaagctagacctctgcaggttaccgaagtcaagaacctcattaatcggtaacaagaagtgcagagcgggcttttgagtccatgcc

SEQ ID NO: 443560 - DNA, 122 bp, Homo sapiens
ctaaaaacaacaaacagctcccaggagggatttgtgtctgtcctgagagtcaaggatttccgcccccggatggaggctgtggcctgtggagctcttagcaaagaaattccccagagaccaga

SEQ ID NO: 443561 - DNA, 122 bp, Homo sapiens
tgggcttaatctggcctgcaggctgtatttagccacccctgctctggtcctaaattacttcgcagtgatacaagaatttctaaaagttacactgtaaggttttggcttagaacttgatatta

SEQ ID NO: 443562 - DNA, 122 bp, Homo sapiens
agaaggcgttgttgacctttcggggagcaagttaataactcagccgagttgatgaagtgacgttctttctgaaaggggtcgtctcctgggccccttttctcagtcggcatttagcaggtagg

SEQ ID NO: 443563 - DNA, 122 bp, Homo sapiens
gacttttctccggagcctctggcaactcgtggagtctatataaggtggggcggtggggggcgcggaattctctactttggattggtttgtttgttttaaatctagggtggtgggcagttgcg

SEQ ID NO: 443564 - DNA, 122 bp, Homo sapiens
ggaggcaaggaaatgtggcgtggagaacccactgggcctggctctccgtcctatggtctccgtccatcgttttacagtcagggtgtacatttgatgaggaatctctaaatgggattttgggg

SEQ ID NO: 443565 - DNA, 122 bp, Homo sapiens
agggcataaaatcaatgtttgtttatattgataatcatcccttaaactcagatccaggggcgtcaagagacctgagcccggccccggtgtgccgcgcactggccatgtgtccggagagggct

SEQ ID NO: 443566 - DNA, 122 bp, Homo sapiens
gtcccatctgggaaagcaggcacggatgcggggacatttccgcccgtcaccctggcaaagcgctcgcagggctggagggacagagttctcagatccaagtagagaaaaccgggaacggttcc

SEQ ID NO: 443567 - DNA, 122 bp, Homo sapiens
caacacacacacagtgtcatcatgtatgttgcatgtgtcatgcagtactctacccacagacgtaccaatcatttttaattatacatgattgccactgtctgcagtagggtaccacacacagc

SEQ ID NO: 443568 - DNA, 122 bp, Homo sapiens
gttttcctttaacaatctttacctgtgggaatgcagagacccccccgccctgcgagaggccggcagccagggattccccgctccgcgccctcatcaccccccggaaaccacaaccgctgcgc

SEQ ID NO: 443569 - DNA, 122 bp, Homo sapiens
gagggctctgtttgaggtcaccctggagaccggcctcagagtccagggagagtgcgcgggcggccgccggctgaatgaagcctgggacgcgggagccgcgccgcgcgcagtgtctgcagtgc

SEQ ID NO: 443570 - DNA, 122 bp, Homo sapiens
agtctataaatgaacgggatagatgaccggtccagcccccttgttttacaggtggggaaccgaggcccagggagatgtgaattgcctggctcgtagtcacttagcaacaatgtcccagctct

SEQ ID NO: 443571 - DNA, 122 bp, Homo sapiens
cgcacaagccctcgtctgctacgggattggggtaaattggcgctggatccagagtgcgcgcgagaggcactggcgggcgggcttggcaccggcgggcgggcttggcaccggcaggcgggctt

SEQ ID NO: 443572 - DNA, 122 bp, Homo sapiens
ctgggccactcccggaggccgccgcgtgggaaaggtgggggcgggggcgggcgaggggagcgctatctgtctgtctatctccgcgtccccccagcgcccagcgcccgccgctccgagcccgt

SEQ ID NO: 443573 - DNA, 122 bp, Homo sapiens
gtcatgggaaaagtgtgcatggcagcatttactctgaggtaataacatggatacatttcccgttgctcaagacttgtacatagagtctgaagacaaattcttcctatcttgctgagaaatta

SEQ ID NO: 443574 - DNA, 122 bp, Homo sapiens
gtttcccacccttgtttctaaagacacttggcaactgggacctgggccacaaaaggcccacgcttgagctcctggcaaatacttccatgactggtaggtcattttcccttggtagggaaata

SEQ ID NO: 443575 - DNA, 122 bp, Homo sapiens
tgatagatataaatgaccattctcccatgttcactgaaaaggaaatgattctaaaaataccggaaaacagtcctctaggaactgagttccctctgaatcatgctttggacttggacgtagga

SEQ ID NO: 443576 - DNA, 122 bp, Homo sapiens
ctctccgcgttcttccagcgctgtctttttagtaccacatgcgcaggcaggtgatggcggcgctggtcgtatccggggcagcggagcagggcggccgagacggccctggcagaggtgggtgc

SEQ ID NO: 443577 - DNA, 122 bp, Homo sapiens
gtcagggagggcaccggcacttagttggccctcagtcaacagtgtgtgttattggttcatcgtggagatgaaggtaccgaggctccgaggagaccccggttctaggtcgcaatctagcaagt

SEQ ID NO: 443578 - DNA, 122 bp, Homo sapiens
aatttttttttcagtgaccgggtctcaacatgttgcctagactggtctgaaacttctgggcgcaagcgctccctctgtcttggcctcccggaatactggggtgaatttatttcttacagaac

SEQ ID NO: 443579 - DNA, 122 bp, Homo sapiens
ccattttcccagagcgagaggcagtgacactgagcgggcgcagggggccgagtcggagaccgtgccggagttcgggagcggcaacagagtgggcatagacactccgagcagcctcgccgtcg

SEQ ID NO: 443580 - DNA, 122 bp, Homo sapiens
ccggaatgttttcatcatgccccaaagaaactctgtacctataaacagtcactacccattcgtccccttctccagattctgccaactattacattactttcagtctccatggatttgtctat

SEQ ID NO: 443581 - DNA, 122 bp, Homo sapiens
tcctccctaagagcccccactctaccccctccacctctccgggcagcagacccacctccgcgaagcagcagcagcagcagccagcctgcagtccagatcatggcctgggcacctgctttcct

SEQ ID NO: 443582 - DNA, 122 bp, Homo sapiens
acgtaagctgtacacatccgacggcgatgtacgagtgcaggtgcctggatggaacaaacgcgccatgcagcagggcaggtgttgctaaaaggggcggctacgtggagaggcagggggtgcgg

SEQ ID NO: 443583 - DNA, 122 bp, Homo sapiens
cccgaaaggggaaatcaagtgccctcccggtgagctcggctggagaggtgcacttcaaagcgaggcggctggggcgccctaaccaggctgtgccttccgccccctccaggcggccattagca

SEQ ID NO: 443584 - DNA, 122 bp, Homo sapiens
agtttctttactgaggacctcagagccgaatggcctctatggatgccatagagaccaatacggactgagggtttaaagaagatggtgtccgccgcaggaccgctctatcttctcgggtgaac

SEQ ID NO: 443585 - DNA, 122 bp, Homo sapiens
tacagccctattagctgcctgtatcccagacatctcctgttttagggtattctacctcctcgtttttcagtttcgccagcaactgggctctaccaatagcttcaaggagggagaagcttcct

SEQ ID NO: 443586 - DNA, 122 bp, Homo sapiens
agggagaccaggcacaccttgtttgttaccaacctatcaacaatgacggaaaccaatcaacgacagaagatgctccgcttcctcaaagaaacagccaatggaccctaaagagtgaatgaggg

SEQ ID NO: 443587 - DNA, 122 bp, Homo sapiens
gagagggacgggctgcatgtgctccccgcccccgagaggcctgcgtcatgcggtctcgcccgctctgcgccaggcgtcctgctaacgtgtcctggagggactctcagttcctcccgcccgca

SEQ ID NO: 443588 - DNA, 122 bp, Homo sapiens
gcctgtgctccccgggaacctcagtcagtgtcacttgaactccagcaccggacctggccccgtccatccagcctctgccccgagagccccgcccgtatctccagaggacacgccctgccagg

SEQ ID NO: 443589 - DNA, 122 bp, Homo sapiens
tcctgcggctgggcgggcgggtggggtccgggcttggggggctgtcggggcagatgggcccggggcctggctgtggggagggtgccctgctgctgtccaggctggcgtaggggtgggactca

SEQ ID NO: 443590 - DNA, 122 bp, Homo sapiens
gactagagagtcaggtttgtaggccatgtggctagggacaagccccaggttaccctgtagcggtttctactgccactgccctgagcacatatctggcagctcgcaaccccaaatactgagca

SEQ ID NO: 443591 - DNA, 122 bp, Homo sapiens
gtcacagacccacacaccggggacagaacaaagaacggaagttccccctcgtttcgcttccgggtcggttgttcttgccactcacccgtacccccaacgcccacttgttctgtctaggaaaa

SEQ ID NO: 443592 - DNA, 122 bp, Homo sapiens
tatcccaggagagctccttgagtgtgactgagaaatagatctggggtcctgtcaccaaggcggtgtataaacagtttacaaatgacagcagatacgaatcaccgaagccaggcagaacaccc

SEQ ID NO: 443593 - DNA, 122 bp, Homo sapiens
ccctggtcgagacggttctatccttttgcaaagaagccggaaagagctgggtcccgggggcgggggacagactgagaggccaagcaggccagtcgtgacgacagccaggcccttagaagtct

SEQ ID NO: 443594 - DNA, 122 bp, Homo sapiens
atgcaggtgttgaatgacttcctcacagttgctgaaaaacctgagaaactacacgtaaagcgcttagcacattacctggcacacatcaaatattcaaaacaaggccagtaactattatgcta

SEQ ID NO: 443595 - DNA, 122 bp, Homo sapiens
acttcctatgacaagtgcgattggcgcccactgctcttggcagttgaggtgaggacacagcgtttctgtgacggtgaaggggacagggtttggagggagattcagacattaaacaaggaaac

SEQ ID NO: 443596 - DNA, 122 bp, Homo sapiens
gcttaaaatggattatgttaatttgtcttcctttggtggtggtgggggtgtccagatttgcgactagcaaaatatagtgaggactatattctgataggtgcccttaggatactttttttgct

SEQ ID NO: 443597 - DNA, 122 bp, Homo sapiens
tcgctgtgcacgcaggtcctggccacggggcggtgggtggggctgcccctcgcctggcctcgcccctgctgcattggtgccaccttctggttacaggcagagggtggggtgaggacttgggc

SEQ ID NO: 443598 - DNA, 122 bp, Homo sapiens
catgaggtaagcactaaggtgtggagatggctgtgcaagagatgacaaagtccagcaccacgcttgagagtgtccaatcatctcttctggggcagcatagttttctacaatactgattttgg

SEQ ID NO: 443599 - DNA, 122 bp, Homo sapiens
gcggtgcgggggcggagccagggtccgggaggcagtgtgggcggggtctgaccaaggagccggagcggcgaattctaacgccacctttgaggctggcgcagaaccgaagggctgagtctggg

SEQ ID NO: 443600 - DNA, 122 bp, Homo sapiens
aaagaaggggcacaaagaaggctttgtgctgctgagctgagaggctctgctgggggaatgcggttggcagagaatatgccacaaacttaaagagaaaagaaaatagaaagccagtgtagaca

SEQ ID NO: 443601 - DNA, 122 bp, Homo sapiens
cgttgatcctggcgacgtagacagggacagacagctgggtctgaaacctaagcgagcctgcggtttcttccgggaacgccgagttagcaaaatggccgcttgtctccattttaaatttaagc

SEQ ID NO: 443602 - DNA, 122 bp, Homo sapiens
tttctagaaatgtgctgctgaccacattagcatatcccaaactaaatgtaaatgcacatacgctgagttacagtcttggaaactgaaatctgttttgagctatagaaaatgaaaaagtgatg

SEQ ID NO: 443603 - DNA, 122 bp, Homo sapiens
gacggcgcccgtccggatccgtagcgtttcgcggacgccgggacaggcggccccccgcggcgcaccccgccctacacgtccaggacgtggttgagataggagatgtagcagatggccaggcg

SEQ ID NO: 443604 - DNA, 122 bp, Homo sapiens
ccacgagactctctcggtttttgagccggatccaagcaaaatcggcaggaaaggaaaacacggggtgctggcaccgactattcaaacgtctgcacctggagatctcagattgattcaatgaa

SEQ ID NO: 443605 - DNA, 122 bp, Homo sapiens
cttcaggccctgggccccgcctcaaggaagagccagccgtaatggggactctccaggcaccgcctgcccccagcgtgggggtggccactcctgggccccagaaagcctcagagtcctgccga

SEQ ID NO: 443606 - DNA, 122 bp, Homo sapiens
tcccagctggaccatggcgcctccgcggaacgtggtgaagattgccatcaagatgcgtgacgccatcccgcagctcatccagctggaccaggtcacccggctggtcccgcctccatctgccc

SEQ ID NO: 443607 - DNA, 122 bp, Homo sapiens
agtaattgcagctgacttatctcagcttgatgaatgatgaatttgtgagttcttcctacccggacctcagagctgccatagaccctgtcccgtctgagcagaggtccacagtgaactctgtt

SEQ ID NO: 443608 - DNA, 122 bp, Homo sapiens
cggccatttgccagctgtgtcctcggcaaggccctcccgctcgctgagcctcaatttcttcgtctctgctaagttaacatgtccttactcccaggatgagacgagagggtgcttgccaggca

SEQ ID NO: 443609 - DNA, 122 bp, Homo sapiens
catgatctgcccatgttagcctcccaaagtgcagggattacaggcatgagccatcgcgcccggttggaagtatcatgttttgaactagagggaaattactgaagttccacagaaggacataa

SEQ ID NO: 443610 - DNA, 122 bp, Homo sapiens
ctaaaatggggaaatgtaatttcccttcccggagggggtgggaggtatgatggggggtgacgggaagctggggtttcgggacatccaagctccagactcactgctaagctcccacgtccagc

SEQ ID NO: 443611 - DNA, 122 bp, Homo sapiens
gggactatcgcctatcaccaagcagtaagactatcaccaagcagtgagaccactgcctatcgccaagcggtgagtactattgaacccctttcacttgctattctgtcctattattccttaga

SEQ ID NO: 443612 - DNA, 122 bp, Homo sapiens
gcgcgcaggcgcagccactcggagtgggcagggcctggctgggtgttgggcagggcctggcggtgtgtggggtaggcggggggcgtggccgcgattagccgcgcgcggcgtgggggcgtggt

SEQ ID NO: 443613 - DNA, 122 bp, Homo sapiens
aacaaggtgaggcagagggtgtcgcgtggtcttctgggaaatgtagttcgtctgccaggccggaaccaccgctcaaccggctcgcgagactatgcaccccacaatgcgccgcgcgcgcagcg

SEQ ID NO: 443614 - DNA, 122 bp, Homo sapiens
cacagagtttataacttccttaagatctgaccatctccccaaccattcaagaagcatacacggaatcagagtcatcttcattatagatgggacatccttctcccgaatgagtccttccttct

SEQ ID NO: 443615 - DNA, 122 bp, Homo sapiens
cacagcccctctctgccttgggcagccccaacagccccccagaccctcagctgcaagagccgcattcttactgatttgactcaagaggctcccacttcaaaggtgtgagaagagtaaaaaag

SEQ ID NO: 443616 - DNA, 122 bp, Homo sapiens
cagaggccgaggaggctccggtccggccgcctctgcggacccccgcctctgtgtgtgtcacggtctctatggagatctcccgcagaggacagcacgaacagttccccgcggtgctgaggcct

SEQ ID NO: 443617 - DNA, 122 bp, Homo sapiens
ccacttggcttcccgtaacccaggcagctggggagcctgggctgtggccctaggagggggcgcggcggcgggctctctccttttgttgttgtttcctcagcctggggagctgaaggggagac

SEQ ID NO: 443618 - DNA, 122 bp, Homo sapiens
gtctgcggatgcacagcactcagcacacagtaaaggtgtgtagctgaataaccgcatcaacgccctgggttgcaggaggaaggaaagactgggcacccctaaggtgctgttgtcatcgtgcc

SEQ ID NO: 443619 - DNA, 122 bp, Homo sapiens
attgccatttagaacagagcaccttgtgatgactaagctctttcaagtatctatgcttaacgtgatggcttcaatacccttttgctatatagactcatctgtagatacttggtacaagttcc

SEQ ID NO: 443620 - DNA, 122 bp, Homo sapiens
cagccacccttcgatgaacccatgtcggtggaggaagggggaagagtgatggggtagtctcgaggttcagacatggcacacgtttgggagagaagctcacctctgaggagtggggaaagagg

SEQ ID NO: 443621 - DNA, 122 bp, Homo sapiens
tgggggattcaggcagggagcgtttacctcctcactgtcaggggctcgggctctgctcagcgccgatgacagatccgccgacaccagcagacagtaagcaacgcgtggagaggaggctggca

SEQ ID NO: 443622 - DNA, 122 bp, Homo sapiens
gcgcttcggatgctcagaggcaaaccccctccccttgggaggcggagtcggacaaggctccgtctcgttccgttccgtcacgtccggtggggcggggcttcggggctttcccctttgagggg

SEQ ID NO: 443623 - DNA, 122 bp, Homo sapiens
tttgtcttccacgggtccacaggcaaagacccacaccaccacagccacaacgaggaaacacggaagccagcgttctacaaacatccacggagcatctcccacgtgcagccgttctcatcata

SEQ ID NO: 443624 - DNA, 122 bp, Homo sapiens
tgcaatggcagagagcctgtggattgtctctgggatttcctccctacagaaatgcagagccgccactgactgaagtgctcaggtgggggcagggcggctgtgctggagacccaggtcgggaa

SEQ ID NO: 443625 - DNA, 122 bp, Homo sapiens
cctggtccctgccctcttcagaccagggctgtagggggatgtcctgccactggcaggggtcggccgcctgccctcaccctcctggctccggcgggcgcggctggaatgtttgcctttgctgt

SEQ ID NO: 443626 - DNA, 122 bp, Homo sapiens
caatagtgtagaaaatgagggtctagtggctattaaagataagatgccgcccccctcccccgccccagtgttagaaccctaggagaaggagatgcaccagcggctccacaagggaaagacag

SEQ ID NO: 443627 - DNA, 122 bp, Homo sapiens
cccatctggctgggattggctttgggacaacaaggtctgggtgtctggctgcagctcggccgagtcacgtgacctccctctgtggtacattcgtctgctggggacctgcacccaccaacccc

SEQ ID NO: 443628 - DNA, 122 bp, Homo sapiens
attctaatcattacttcatttgtattactctaagccataggaaaagggacctaacaaagccgatccaaaagggttaatgcctcttggcagtgttctctttaatctatgacataggtaaggag

SEQ ID NO: 443629 - DNA, 122 bp, Homo sapiens
caggagtttgaggctgtagtgtgctattatcatacttctgaatagccactgcactccgcccgggtgacagagcaagaacctgccgctaaaaataaaaataataaaagatgaaagaaaaatag

SEQ ID NO: 443630 - DNA, 122 bp, Homo sapiens
ccccacccctttttctccccgagtcttaaggacttgggcaattgccagttcccagaaggacgcgccgggggcttcaggatgtttgattccctaccggtgaagcgcttgtccaagtcttccgg

SEQ ID NO: 443631 - DNA, 122 bp, Homo sapiens
ctctgcctcaccatcatccttgcccactcgtgctcccacccccaggggcaccagagccaacggctgctcccccagcctcggaccttcctgcgcggctcaaccaagcctagaagtgggggcgg

SEQ ID NO: 443632 - DNA, 122 bp, Homo sapiens
ccatgtatccaaattgttccttttttccagaataatatgttacaatgtgggagattatcccggagcctggtaggataagtacatagacttcagggtgaccaaaaaatcagaataaatgttgg

SEQ ID NO: 443633 - DNA, 122 bp, Homo sapiens
tggtctccctagccctaactgggcggtagggtaggtgacggctccgccaggagcaggctccgaaagtccaggcagggaggtacccccgcgactgtcctgacaagaaacgactgtcatggtca

SEQ ID NO: 443634 - DNA, 122 bp, Homo sapiens
taggctcaacctcttctgcctcaactccttggccaattgctgcaactctttcagtatgcccgagatgtcctctggcggcggcaacttcggaatgctccgcagggcaatgtagggccccggga

SEQ ID NO: 443635 - DNA, 122 bp, Homo sapiens
attaaaatctgaaatgtggtgtgcacgctgtatgagaggtgtttcgggtcgtgagcgtcacgcctcaagggaaggcccaagatcttggacatcttgggggctggagcagcgtcacaaaatag

SEQ ID NO: 443636 - DNA, 122 bp, Homo sapiens
cctccgtgggctctggctgtgtccctgtgctcttccggcagtgtcagggggtagtggcctcggcctggccgccggcccgggccgcctggtacatgctgaggattgaggagatggtgcccatg

SEQ ID NO: 443637 - DNA, 122 bp, Homo sapiens
aaacccacggacccagacaacccggggacagagctgcattagctcaggtgccagaggatgcggcagacgccatctcatttcttatcagctggaggatgtgtgaccctgtggtcagtaaatca

SEQ ID NO: 443638 - DNA, 122 bp, Homo sapiens
agttggaagccaacaagaagctgactcctacctctggagagggtctggggcagtttgggtcgagagtcctttgtgtcctttttggctccaggtttgactgtggtatctctggccagagtgta

SEQ ID NO: 443639 - DNA, 122 bp, Homo sapiens
ttccccgcccttgctctcctggacctcagtctccccatttgtaaagtgatgcttgggcctcgggctctgtgaagcctgaaggtctccctctgggtgggcgggacagggagcacctctgctgg

SEQ ID NO: 443640 - DNA, 122 bp, Homo sapiens
gagaaagtgactcctaaccgcaaatgcatgggttctagggaatcctgggcatcactgcttcgtgcacacggagcatctggagcccacagggggcaacccaaagcgtcaggaaggactgaaag

SEQ ID NO: 443641 - DNA, 122 bp, Homo sapiens
aggactggaaatctgggaactgctttcattaagggtgcccagccttgaggattgtgtccccgcccagttttagctagaagttattctggcaagagttcacggtgtctgactccttttataaa

SEQ ID NO: 443642 - DNA, 122 bp, Homo sapiens
tgttccttgtgagggtccacctggctctgaacctcctaggagaccaccacctgccccccacgatggggacagaaaggtaaaagaccaaaaaaggataaggggaatgtttccaggaatctgac

SEQ ID NO: 443643 - DNA, 122 bp, Homo sapiens
tcggtctctcaggctggcccacaaaacccacaaaacccacagaacccgcaggcctctccgcgccttctccatggccctgctcctgaggaaggcccttggccacggggattccgtcccagact

SEQ ID NO: 443644 - DNA, 122 bp, Homo sapiens
gcctcacacgattctcctgcctcagcctcacagagtgctgggattacaggcgtgagccaacgcgcctggtcttccaaaggtttttaaaacatgaaataaaatgtcaactactagatgtgagg

SEQ ID NO: 443645 - DNA, 122 bp, Homo sapiens
aggtagacaggctgaagctggaatactgccctgtccctgacacctgctggggtgttctggcggggcccggaaacggaagccctctcctggctttgttgggtttcctggggaaggcggagctg

SEQ ID NO: 443646 - DNA, 122 bp, Homo sapiens
gttgttggagtgtacgtgtgtgctcccccaggcagtggaggccagccctccttggaggggcggctgcctgatgaaggatgcgggtgaggttccccgcctccacctcccatgggacttgggga

SEQ ID NO: 443647 - DNA, 122 bp, Homo sapiens
caggcctccctcagggccaggggcgatggcaccccggggacaggcagacctccttcctgccgtcagcacccccttccttatcactgtctggtctccgagcttcggctgcagcctgaggtgtg

SEQ ID NO: 443648 - DNA, 122 bp, Homo sapiens
taagggcgtgtatgcacccttcagaattcaaacagtgaggcacagggaagtccctctgcccgatccgccccacgccccggttccttgtgtgttcttctagatatttaccagcgcttacattc

SEQ ID NO: 443649 - DNA, 122 bp, Homo sapiens
gccgggaggggaccccccacccgcctccacctgaaaagctccttgacccgggttcatgggcgctggaggcgtcctggaatatccctggagtaaaaggcttccaccatcatcatcatcatcat

SEQ ID NO: 443650 - DNA, 122 bp, Homo sapiens
ctggagctttatctgcggctgcactcgcttctccctcctgcagacattcttgctgctttccggtcccacgggacggctcccaggctcccgcctcacggcaagaaaaataaaggcctccccgc

SEQ ID NO: 443651 - DNA, 122 bp, Homo sapiens
gacccacgatgcgagtgggaggtggcggagatacaggcgtaaggagccctggactgccttcgggatgacacagaaacaggcctaacctgaggccactaactgggcatgacggggccatcttg

SEQ ID NO: 443652 - DNA, 122 bp, Homo sapiens
caagtagaagaaagaaaatctagtcttggaaaaaatttgcacactggagaagatattctccgtggagtggtcacagcttaaaatggaaatgtaaggactgaagatgaaggcagtgagaagga

SEQ ID NO: 443653 - DNA, 122 bp, Homo sapiens
ccctgtgagggccgcctgctcaggtccccgggtgcagaactgtggggcgttcgtgggcggcgtcccgtttctgacacgcagtgtgatggggtggcaatggagggcaaggggcccggctcgca

SEQ ID NO: 443654 - DNA, 122 bp, Homo sapiens
gcctttgtaaataaagttttattggaacacagccacacccattcatctgtgtcacatctacggctgctttgtcactacaacagcaaagttgagtagttgcagcacagactttgcgtggccca

SEQ ID NO: 443655 - DNA, 122 bp, Homo sapiens
tggtaggcttcatcttcctcttggtaaactttcattaatgctaccatggtgttggcttttcggtgtccttgaataacctagagagcaaatgtgaataaagctcaagtcaggacagtgtaata

SEQ ID NO: 443656 - DNA, 122 bp, Homo sapiens
cagcccggcggcaacggcggcggcgcgcgcgctccccggacgttctcacgcgcgcgcgcgcgccctgccccggctccacctcctagccccgcccccgcaccgcgccgagtggagagctcacg

SEQ ID NO: 443657 - DNA, 122 bp, Homo sapiens
gtttacccaagggcctgccttgccttcgctctctgctggcaacacagattcttaaagggccgaggctggtttctcttctcctgggcctgggggaccctcttctctctggatgcttcctggga

SEQ ID NO: 443658 - DNA, 122 bp, Homo sapiens
ctgtgaagatccggaggaagagcatgccaggaagatagaagaacaaatgcagagagtccccggcagctgtgatcttggcatattcaaggaacagagaggagagtgtggctggatggaggagg

SEQ ID NO: 443659 - DNA, 122 bp, Homo sapiens
ttgcactctaattctgggctcaccacagtaaaacccagcactgggaagtcctacacagcccgatgacaggctgatacccacagacatagcccctagacctatccctacaccagatgggaaca

SEQ ID NO: 443660 - DNA, 122 bp, Homo sapiens
attctcatttttgtccgagatgtcccactgtgttcacggacagacagtgtggcatcgtgccgagatgggggcttggggcacaggtgccggtctacctgttctctacccaggcgtgatggaac

SEQ ID NO: 443661 - DNA, 122 bp, Homo sapiens
ggagagcctgcagggcaggtgagtcccccagggctctctcgctgggcccctgtgcgtgggcggagcaggagcttatggtctaatccggaccccctcagcccaaattccaaccactgacttgt

SEQ ID NO: 443662 - DNA, 122 bp, Homo sapiens
gctcatttaagtaaaatgaactggagtagctgaattgtccaaaaccttgctttctggagccgagttcagatttgtttctggagatagtccttgttgaaggtttcaacccacagggttctcca

SEQ ID NO: 443663 - DNA, 122 bp, Homo sapiens
tcattggccaagccagctccgggcaccctgaggttccctcacagcgaatccaccgaagagcgctcccatccacagccggctctttgaatacttaaagaaatgtaggaaaagcaaaactcaca

SEQ ID NO: 443664 - DNA, 122 bp, Homo sapiens
tcccttctggacgcattcctcctccaggcataacttccaacacgaaggtcagaatgaatgcgagtcgcccagagccccacacccagccctgggaagggcgattccctctgggaattctgcca

SEQ ID NO: 443665 - DNA, 122 bp, Homo sapiens
gatgcggctccccagggcgagtgctggggtcccggggcaggcgggcggctggagcgctctcgtgggcgggcgcaaggggcaggctgggcgggcgcaggcgggagcgtagcagccgctccact

SEQ ID NO: 443666 - DNA, 122 bp, Homo sapiens
gctgttctcgtgatagtgagtgagttctcacaagatggtttaaaagtgtggcacataccccgcttgctttctctgtcttctgccaccatataagacatgtcttgcttccccttcaccttctg

SEQ ID NO: 443667 - DNA, 122 bp, Homo sapiens
ctcataaggcattcttaccacttctggagctgagggctgcatggttttctgaagtgtcgacgctgtcccaggcactgtgctaagctgagcacttcacatgcagaacaagggaaaaggcactt

SEQ ID NO: 443668 - DNA, 122 bp, Homo sapiens
cagctctgttcattgccgtggaaggccacgaagggtcctcctcctcagccatctcctggtcgtcttcgtaggagggtgggtttagcctgggtgttttgtgctgcacgattctggagtagtac

SEQ ID NO: 443669 - DNA, 122 bp, Homo sapiens
gtcgagctacggtcgcggagcagtggaaccgagactgccccgcggagccgccggtatgagcgcccctcgccaccccgtgtcccaggcccggcctttctgacaagaggtaggcgcgtcgtcgc

SEQ ID NO: 443670 - DNA, 122 bp, Homo sapiens
tggagtcttcgacttggaagacaaatgtaaatgaccctctatgagccacgccgctttgaacgcaacccactggagattctcggttctcctgtatcgattcaggaaaactccaaacaagtcca

SEQ ID NO: 443671 - DNA, 122 bp, Homo sapiens
ccttgtcccctgccctggggccccctctggccacacagctcacagggcactcctagtgtccgggctgtcttttgtcccaagggcccaaggcccccaatgtcccccgccggatcccactccaa

SEQ ID NO: 443672 - DNA, 122 bp, Homo sapiens
gccgaggcgcgggctccactccctgaagtggagggacccttgaatctttccttgcgtaggcgcgcggcagagcagcgatttggcgaaaagggccgagactcaggatgcctgcaatgcgagcg

SEQ ID NO: 443673 - DNA, 122 bp, Homo sapiens
cttttccatagattgtaagcagttctaagtaggaaaggtttggctctcaggagctttcagcgggacatttatatttgtaaataaaaaggaaatattctttgggcagtgtttcagaatcacct

SEQ ID NO: 443674 - DNA, 122 bp, Homo sapiens
cccggagagaggggagaggccccctggtgacttatgacccccgcaggagtaaccagagagcgcgcgcgagcgcccagcgcctggctcaagacgaagatttaaccgagaacaaaagaacgttt

SEQ ID NO: 443675 - DNA, 122 bp, Homo sapiens
agcgccgcagcggggaatctgcagtaggtctgccggcgatggagtggtgggctagctcgccgcttcggctctggctgctgttgttcctcctgccctcagcgcagggccgccagaaggagtca

SEQ ID NO: 443676 - DNA, 122 bp, Homo sapiens
agggggctcaatctgctctgagacagaaggtccccaaggggaccagggtctggtgggctgcgcccaattcaggccccttggcacaggtggtgccatgctgcggatcctgtgcctggcactct

SEQ ID NO: 443677 - DNA, 122 bp, Homo sapiens
gccgatcgccgccctcctgccccggggtggggcccaggggcatcagcagccgcgggctctcggccgccgcctgggaactcagggtcagatttagtttcacaacaacgtctcctcgtcacggc

SEQ ID NO: 443678 - DNA, 122 bp, Homo sapiens
ttgacgacttgcacgggttccttcgactccttgatttcccaggactccgggctaccagatcggccgtccagctggaatcaaccgatggaggctccgctgcaaactggaatggtaaggggtgg

SEQ ID NO: 443679 - DNA, 122 bp, Homo sapiens
tagcctggtgggacctccagaggtggaggggtgggttgcctgggcccagctacccaggcccgttgcccacccactccacagcccagagtgggggctgaacaagcacccagcaggggggctag

SEQ ID NO: 443680 - DNA, 122 bp, Homo sapiens
tcattaccagattctatcagttccttcttcaaaatatatcttgcttttgcacccctgcctcgattccactgccacaacctcagtatgagcagccataatttaaatcctggtctactttaggc

SEQ ID NO: 443681 - DNA, 122 bp, Homo sapiens
aaggcggtccgtctagagttgttcgttcctctcgtttggagttgttcattcctcccggtgcgttcatcgtcttgctggcctcctgcagaccttcacggtgagtgttagagctcataacggca

SEQ ID NO: 443682 - DNA, 122 bp, Homo sapiens
tgtgactggagagtggtataatatactctaattgattctgcatcgtaatgtgatttgggccggaatgatgatcacaacaccaatgagaatttccatgtatatgcaatttccttctcccagat

SEQ ID NO: 443683 - DNA, 122 bp, Homo sapiens
ctgctgaaaggaagatggttgatgcttctgagcaatgaaggccccatggagtcctggattcggtgtggccttgcatccgtggtgcaccccgtgctggtggatggctcaggacggtaagcatt

SEQ ID NO: 443684 - DNA, 122 bp, Homo sapiens
aagggctccccatcctagtacagtcactctccagtgtcctgcggtttctctgagtcaagccgatggaaccacagccttctcttcacaggcctacccctaccaccactcccgcctactccttt

SEQ ID NO: 443685 - DNA, 122 bp, Homo sapiens
agatcagcaggtttcagaagcccccaaagaaatggggaaagcccagaccgcggggcagcacggccaccgtgccagctactaaagtcacctcgatgaggtcaggaggtgtttcttttcttatc

SEQ ID NO: 443686 - DNA, 122 bp, Homo sapiens
atggaatcttgagcaagtttatggaaaattattgagccccctcttttcatgatcactgttcgctgtgtgtcccgagggcactaactcagagtgtcctttgaccccttcatcagtgtgtcacc

SEQ ID NO: 443687 - DNA, 122 bp, Homo sapiens
atccctcagttgcccatcaaagttgcctacttctcatttcctcaccttctgggtcttcttcgggctctcctggagtcctgtgtgttattactctgctgttttcaactcagccacagtgaatc

SEQ ID NO: 443688 - DNA, 122 bp, Homo sapiens
ttcccaaaccctgaaagagataaaggcaacccaatgaaaccacagagaggcagaagagaacgggcagaagtacagaacagaaatggagaagctgaccacgactccatctcttctcattccag

SEQ ID NO: 443689 - DNA, 122 bp, Homo sapiens
cccagatttttctgggatgctagtttgagattttccattctacaaacgtccagccactcacgagttctaacagatgactgatcttagctgagaagcatgacatagatacaagggagtcacac

SEQ ID NO: 443690 - DNA, 122 bp, Homo sapiens
catgacccttgtaaaagtgttgttaaagagagaaaaacaaaggaaaaagccctaaggaggcggacttcatgattaggaccacccaaggagagtctctaacaaaagaaaattgagttccataa

SEQ ID NO: 443691 - DNA, 122 bp, Homo sapiens
gcgcaagcctgtacgcagctgactgcgcctcccgcggtggccctcggcggtcctctgccccggcctggcctcctggtcgccgctcagccccgcagctcctcccggaggtctgcaagccccgg

SEQ ID NO: 443692 - DNA, 122 bp, Homo sapiens
agtgaaagagaaatgaatggaagaccaaaaatggggagaagaaattgtatctgatataagcgtggctctacctgggagaatggccattccgaattactggaaacaggaagaagacttgctat

SEQ ID NO: 443693 - DNA, 122 bp, Homo sapiens
ttggcggggacccgagctgaagggggcggggccgctatatcagcagagtccctgtcgcagcgcaggcagttgggctgctggagtgcggcgccaccgcggaggacaggggcagctggcgggca

SEQ ID NO: 443694 - DNA, 122 bp, Homo sapiens
agggcggcgatgttatctctgggataaagggccggtcctaacgcagtttgtggtagaaggcgcagcaaaagcgcctaccgcggcgagtcccaggcagctcactctccagtcactctccgagg

SEQ ID NO: 443695 - DNA, 122 bp, Homo sapiens
ccccattaaatggctaattgccaaaaaagaggaagcaacatcttcagctctagcaagtctcggggatgtctcactcattgtgaggactgtgaggattcggtatatatttttaagtgagtgaa

SEQ ID NO: 443696 - DNA, 122 bp, Homo sapiens
actgagttgagacgacaattaaggtatggccgactccatactgcctcctagccgtctcctcgagtagttcatgccctgttaacttaagtcgtgaagctgctggtgtcaaagcattccttttg

SEQ ID NO: 443697 - DNA, 122 bp, Homo sapiens
ggattaaaagagagtcgtccaagtcccggccggccccgggggcgggtccctgtctagccccgcatgctccgcgccaatgggcggtattgttgatcacgagtctccgcccccttcgccttgag

SEQ ID NO: 443698 - DNA, 122 bp, Homo sapiens
ggagaaggaaaagactgaggacccccgggatcacagcacttcccacgcacaaaccacacacggggtctggactctgccctgaggacgcttccattgtccccgcagtcggggcagacgcaaga

SEQ ID NO: 443699 - DNA, 122 bp, Homo sapiens
ccagcacctcgggaggccgaggtgggcagatcacccgaggccaggagctggagaccagtccggtcaacacggcgaaaccccgtctccaccaaaaatacgaaaaccagtcaggagtggcggcg

SEQ ID NO: 443700 - DNA, 122 bp, Homo sapiens
gagtttacgtgacgacatcggcgtcagcgtcacggaggcgtcggccacgttcagcggacacgggagcaagatggcgattccgggcaggcagtgagtgatccgggagttagggtcaggctggg

SEQ ID NO: 443701 - DNA, 122 bp, Homo sapiens
attcggaagtgtggcagcagataggaatcgaagggcactcattcgcttggctctctgtcccgcccactacccggaagtgtggcccgggtccagaaccaagagcgcatgctcaccttgtagct

SEQ ID NO: 443702 - DNA, 122 bp, Homo sapiens
atgcccatcaatgttggtgaaataaatatcatttgtgcttgccatggcttcgatttttgtcgtttgctgagtatgtgcaaggtcacatgctggacctcagcattcacttctatctcattttg

SEQ ID NO: 443703 - DNA, 122 bp, Homo sapiens
acggcttctctctcctcaccactttgggcgcttttggcacgtgccgcgtggggatgggggcgctgccaattaccccggaacggcggggcggggaggaccagggtgggcgtggccgcggctgt

SEQ ID NO: 443704 - DNA, 122 bp, Homo sapiens
cacatacatgggacctgaatatcactggagcagaggtctcaaaatattgaatgactttcccgggctctctgagctgatttcatggcagaaataaagttagggagaaagtgtttggcctcaca

SEQ ID NO: 443705 - DNA, 122 bp, Homo sapiens
agccggcctcccgggacccgcgcctgtgctgctgctctactgcgcgccctccaaccaccacggcggggtaaagtctctctcaatctcactaatgcctcgcttatcagccctgcaggctggaa

SEQ ID NO: 443706 - DNA, 122 bp, Homo sapiens
tgacgagctcggccctccctgcctgttttctcccttgtaattacggagctcttgcagggccgggtgctggcccagaggagggaggtgctgttctggatttgccgttccttccccgaggatgg

SEQ ID NO: 443707 - DNA, 122 bp, Homo sapiens
ctcactccactcaccaacatggggactccatagccgagagtcttgttcttgcgaaaagcacgcatcaccgcgggtgcaaacatgagtgaactcttccatcggctcagaactccaagcgggcc

SEQ ID NO: 443708 - DNA, 122 bp, Homo sapiens
gctggcggaggcgcgcgcgcagtcccaccgctctgagtcgctgagtgaagcggcgcctcgcgcgtcaggcaatctggccaattgcgcatcttttccgcctaccgcacggccccgcccctgcc

SEQ ID NO: 443709 - DNA, 122 bp, Homo sapiens
ttgaatccgaaggcgcctcgcgattgggtgctggggccgggtacgtcagatagactgtgacgtgcagtcttcctgtttccttcagctgtgtcttaaagtaaatcttgttgtggagcggagcc

SEQ ID NO: 443710 - DNA, 122 bp, Homo sapiens
tgtgagccagccactctcattgactgggagtggctgcctggacctcctgagctttggctgcgttctgagggaaagagtgctcatgttgattattaatgtctgtcatggacaaaggggtagga

SEQ ID NO: 443711 - DNA, 122 bp, Homo sapiens
cttctctcgatggcaaatgggcgaaatcaagatgacttaacttggtaaatttagagagaacggctcggagcaagtgaggtctaacgggcagctaaaattatctccaaataagagattttgac

SEQ ID NO: 443712 - DNA, 122 bp, Homo sapiens
ctgtgccctgattggctcactccgcagaccgtggggcggagcctgatggagtttcgtttccgcggtgcccgagggacgccggggtaacggaaaccttggccaccttctacgaagactagaga

SEQ ID NO: 443713 - DNA, 122 bp, Homo sapiens
tgctaaaggaaaattaaataaatttgggtttttgcaaaagaccctaacaccgagctctcccgtgatgcagcacagcttctcggaacccaactcttactatttcctcggatcccctctctgga

SEQ ID NO: 443714 - DNA, 122 bp, Homo sapiens
cggctccccggggttcgcggccctgggacaggggacttggggcctgggagtattcgagtccggggggttgggggcagaacggaaggctcagtaacctggaattttagggcctgggactggga

SEQ ID NO: 443715 - DNA, 122 bp, Homo sapiens
cccgcccctgagccacagtgaccttgcattccccgccccctgccacacctcctgcgtgcccgagtgtcacccttaaataccgctctacacccagagagggacgaatacacctctgaagacag

SEQ ID NO: 443716 - DNA, 122 bp, Homo sapiens
gtattttcccacttagagaagcttttgtacactgagcatgtggctgtttaaatgccccagcgggacatccagaggctgcaaaaacgggaaaaattatttggaacaatttgctttcgttcaag

SEQ ID NO: 443717 - DNA, 122 bp, Homo sapiens
gtgtaacctaaggtagcagattacatgctcgttctggtggaggagaggtgccactgagggcgtgagtggtctcagggcttaggttaaggcttctttggaagaaattgaaaccacatctctaa

SEQ ID NO: 443718 - DNA, 122 bp, Homo sapiens
aagaggaccctggggacgaataggaacagctgagcaaggcaaggctgagccccgggcgggcgggttgggggaacatgcctagctagagggcggcagcaggaaagcagagaaggcatccctgc

SEQ ID NO: 443719 - DNA, 122 bp, Homo sapiens
acttgggtgcaattgcttcaaggtaccccccctagtggactgagctaggaaatgtatgtacgtgtgtaacccaagacatacaaatgcatgtatgtttattttgaatcaatctatacatgaat

SEQ ID NO: 443720 - DNA, 122 bp, Homo sapiens
ggtcatgccggagcctctccccaacccccaccgtgggcttccgcgtggcccgaacctccccgactgacactgccccctgctctgtggtgcccagtcccatcgaccacccaaggactgaggag

SEQ ID NO: 443721 - DNA, 122 bp, Homo sapiens
ttgtgctcagtttgagaccttgggacgtctgttgtggctgagagcattgagcagggccagcgtcaggagcgggcagcaagttgcagataggcaggctctgagcccatcaccaagccacagaa

SEQ ID NO: 443722 - DNA, 122 bp, Homo sapiens
gccaattcatacccttcagctgctgtctggttgtgaggccttgagaagtcccaaggcttccgactacagtgttctcaccttaaacccaggagatgagtgaaggcttgcaagacgtggttagg

SEQ ID NO: 443723 - DNA, 122 bp, Homo sapiens
aactcagtgcccttggtggggtgagcgcggtggccgcgccactggccaggtccctggagccggcaccactcccacttcccgccccgggccctcaaagcatagacccagctctgcgccctggg

SEQ ID NO: 443724 - DNA, 122 bp, Homo sapiens
ggcacgtttttgctcagggactctgcgcaagaggactacctcttctctgtgagcttccgccgctacaacagatccctgcatgcccgaattgagcagtggaatcacaactttagtttcgacgc

SEQ ID NO: 443725 - DNA, 122 bp, Homo sapiens
ctcacttaactcaaaacaaatgctcgctctgccggctccgcgcccgcctctcccggctcccgggccctgccgtcctcttgttccgtctgccttcagtctggtgccacagggcggagcagggt

SEQ ID NO: 443726 - DNA, 122 bp, Homo sapiens
aggtggactccacaccagactggtgttgccaagaacacaggcttcttttcttccatctcccggtcagagggctttcttactgggaggacggagtacttcagcatatctcatcctgctcccag

SEQ ID NO: 443727 - DNA, 122 bp, Homo sapiens
caagccaagcaaacaagaaataccttggccgtgtcagaggcgttggaaccagagtgactccgttttgagtgagggctaggaaaatgaggctgggacttgctggtctgcattctcagaaagtt

SEQ ID NO: 443728 - DNA, 122 bp, Homo sapiens
gggcgctggagggggcggggcccgggcgctgggcggggcgcagatggctgagcgcaaccgcgtccccgcatgggatccttccgccaaacgggccgagtaaataggcccgcccccaatgccgg

SEQ ID NO: 443729 - DNA, 122 bp, Homo sapiens
cgatcctgcgaagccgcgagctccagtattcaggaagtggtgactcagataggattattccggccccggcttccctttcttccccttcttcctccccacctttgtggtgattccacgactgc

SEQ ID NO: 443730 - DNA, 122 bp, Homo sapiens
gacccgcggctgtcttgagctcttgctgccggtcgccccgcctggatgcactgggacccgcgtacccccttgggttcatacccacactgtgctggagacctgtgtggcgctggcacagcaaa

SEQ ID NO: 443731 - DNA, 122 bp, Homo sapiens
gcagattgaactggcaaagattcagaaggcttcattggtgacttaggaggagatagggggcgtgtcattaatacaaaggcatagtccatctgctcaaagaagtttataatctggtgaggagc

SEQ ID NO: 443732 - DNA, 122 bp, Homo sapiens
ctcttaattgtaatggagatgatggaagggggagagctatttcacagaatcagccagcaccggcactttacagagaagcaagccagccaagtaacaaagcaggcaagttaaccccaggtacc

SEQ ID NO: 443733 - DNA, 122 bp, Homo sapiens
tgctttacctgggcatgtctaggcaggtcctcctttgctaggacgtgcccttttctgtcccggaatactctaaacttggcattttggcagcgtgaagttttcccgttgtgactttctccttg

SEQ ID NO: 443734 - DNA, 122 bp, Homo sapiens
gacgtggaggttgcagtcacccgagatcacgccattgcactccagcctgagcaacaagagcgaaactccagcttaaaaaaaaagaaaagaaaaggcagagtattccaaatgcagtatctgag

SEQ ID NO: 443735 - DNA, 122 bp, Homo sapiens
tggtctattttttaaagatttggtctcaagatttgctctcaaaatctaaaataggccaggcgtggcagttcacacctgtaatcccagagctttggaaggctgaggtaggaggatcacttgag

SEQ ID NO: 443736 - DNA, 122 bp, Homo sapiens
ttgtcaaaaaaaaaaaactctaagagctttctttactctcgaggatgactctgagttctccgagttgggctggctcgaatagaggggcgggtctgtcaagttaataggtcctggaggtccgt

SEQ ID NO: 443737 - DNA, 122 bp, Homo sapiens
tcagaatctaactgtctttggacatatgctccttaaagaggtaattaacatggccaggtgcggttaccgctcgctcacacctgtaatctcagcactttgaaaggctgaggcaggtggatcac

SEQ ID NO: 443738 - DNA, 122 bp, Homo sapiens
gaccagagttatttttgttttagtcagcctggactattgtaattaatgctaagacactggcgggaacaaggcttttattataatacgagggtgaggatggctttgactgacctttcttctgc

SEQ ID NO: 443739 - DNA, 122 bp, Homo sapiens
accatgcttgcaaggatctgaccgccgcctaggactgggaaagtgggttcccggcaggggcggggcctgggcgggggcgaggccgactccacccttttgcagtcctcgcagcctcccgcgac

SEQ ID NO: 443740 - DNA, 122 bp, Homo sapiens
aacatcttggggtttcagtggccacagcagaagaagctgaaggatgtgctgatattggaacgggagagccagagcagctttccaaacactgaaaacccgacttatcctgtgggcgggagcca

SEQ ID NO: 443741 - DNA, 122 bp, Homo sapiens
tatattgttggaacttaaagagtgaagagagcaagcgtcagcacacagaggctcatgtgccgtgctagagagcttggacttagtcttgcaaaagagaagaagcctgggccatgcaggagtga

SEQ ID NO: 443742 - DNA, 122 bp, Homo sapiens
cagaggcagaatttagagcccttttggatggcagctgggatctgagctgtcaaccggaggcgagtcaacacactcaggctcgctgcagctctgcacagagagggcagggcagtgatgctgtg

SEQ ID NO: 443743 - DNA, 122 bp, Homo sapiens
accagtgctggaacccgaggggccgggcgaggaacgctggactgggagcaggacccttctcgcctcggacaagactccttgtctggggacccagcccgacttcattgtagctgggtcctcga

SEQ ID NO: 443744 - DNA, 122 bp, Homo sapiens
aaatcctaacggcaaccccacctcccagggtttccaccatgacctctgtccggagccccccggggaccccaggttcctgccgtcctggttcaagtcacctccacatgtggcctccttcccgg

SEQ ID NO: 443745 - DNA, 122 bp, Homo sapiens
taatctctgcacagggaagagaaagtcctggtgtgtccacctttggtttcctgtcttcagcgaattctgagcaccatggagtagatgatggttagccatagggtacaatcaacggtcgatgg

SEQ ID NO: 443746 - DNA, 122 bp, Homo sapiens
gggaggcctgggcagacacggctggtgactcacacagccggcccaggcacacggcagtcccgccacgttgtaagggaggctcgtggcagctgctgtccctgccacccctttgactcaacctt

SEQ ID NO: 443747 - DNA, 122 bp, Homo sapiens
gtggttctgctcctgcacatttccaaaggaagctccctgtgggtgcgcgtggaagctgagcgcctcagtggaatgtcctggaacctcacttcgggatcctttgtcgagaccaattggccaca

SEQ ID NO: 443748 - DNA, 122 bp, Homo sapiens
tgcctccggaaactgtactacctgacacctctttggtcagggtctacctctgggtatgtgcgagctggcatctctcacctaggcgggaagacacaggaatgcagggggaaccagctaaggtg

SEQ ID NO: 443749 - DNA, 122 bp, Homo sapiens
ttgttgttctgttctccaaatgggttgatcttcacttagacgccagtgcaacacacaattcggccctgaattggctccttagtttcagtccgtgtttccatctgcatgtctcagtcacctca

SEQ ID NO: 443750 - DNA, 122 bp, Homo sapiens
taactgtctctgtggtttcttgtccccagtgtgtctgtttgagtttgaagttccaactcacgcacttgttttcaaacctattcggaattcctcccatcactgagggctggagggtgggaagg

SEQ ID NO: 443751 - DNA, 122 bp, Homo sapiens
tcacccaacagctgaaagtacatttccaaatgcccaagagctcactgcccgcctgtgccacgggcacctccaacacaattccaagcctgagtctgctgctcctttgcttgtcacagccagtc

SEQ ID NO: 443752 - DNA, 122 bp, Homo sapiens
ctacgcactctgcaagttcctggaaaaacaaggagttggcatgccacatttccagcccctcggcccaactgcttcaggacccctgcctgccagcctccatacgtcagggccacagtttcaga

SEQ ID NO: 443753 - DNA, 122 bp, Homo sapiens
aactgtcagacagaccgtcctgtcgtggcatgacttgaacataaccgtcccacgtggggacgcattccgcaccggttgctggaactgacgggggctgcagtgctgaatacctctgggacgct

SEQ ID NO: 443754 - DNA, 122 bp, Homo sapiens
cccaccccaccctgcggcggtggcggtggcggtggctgcagctgtgcagcctcccctcagcgcagcatggctcccttttcggtccctcgctcctccgggccgctcccgagccaccttaaaat

SEQ ID NO: 443755 - DNA, 122 bp, Homo sapiens
aaaaaaagccactggtcaggtgcagtggctcatgcttgtaatctcagcactttgggaggtcgacatggatcacttgatctcaagaatttaagaccagtttgggcaacgtggtgaaaccttgt

SEQ ID NO: 443756 - DNA, 122 bp, Homo sapiens
tagggggcgaggtcgaagggcgggcacctgcgggtggggcggggcctgaattagcgggagcgcccgggaggggcggggccggggcctgcgtgagcgggtcggggagggggcggagcctgcgg

SEQ ID NO: 443757 - DNA, 122 bp, Homo sapiens
tactgattctactgttgctgggtaagtgggcagtttccagcttagggctagtataaatagcgctgctaagaacgtcctggtgcaagtcttctggcaaacacataacactgctgagtcacagg

SEQ ID NO: 443758 - DNA, 122 bp, Homo sapiens
agagctgttggctgcggggcactctggaatgaactcgttttccgtcgttttggggattggcgattgtcctgaggcgtgttactggaagtcgagagctgtgatgaatggttccacaaggatgg

SEQ ID NO: 443759 - DNA, 122 bp, Homo sapiens
gctccagaaggaggatacaagcaattctgggaatggtagtccagacgctcagtggagtagcggtcagcttggctccggcaggcgaatcaggggatttctgggaaatgtagtccagacgctca

SEQ ID NO: 443760 - DNA, 122 bp, Homo sapiens
agagctccggtttccctgagacatcatcaagtttgaataagcaagcaacaagcttaggcgcgtgaactcccgcgtgccggagagagcacatggtggtttaaagtgccacattcccttctggc

SEQ ID NO: 443761 - DNA, 122 bp, Homo sapiens
cgggccgattcgtgggtcggtgggtcgtgggccgtgggtcggcggggccagacaactcagcggcgcgcggcgggggcggggctccgaactttgtctctaagtttccggttctgtgctcagcg

SEQ ID NO: 443762 - DNA, 122 bp, Homo sapiens
gcacaaacacaagcaccctctccgggagaggggtgtgagcttgggctgctctgccatgcacgcctcccacagtcaggtatgtgagggggtgggcgtgtcttgtacactgcctgtctgtcagg

SEQ ID NO: 443763 - DNA, 122 bp, Homo sapiens
ggccttcagcgcctggcgtctatagtcagtctttcctcactgtcgggaggttcaggtagccgggctcctgttacgggcaccatggggacagaagggacgtttggtggtttggctgaatgtgc

SEQ ID NO: 443764 - DNA, 122 bp, Homo sapiens
tcccattattacttggaacagactttttcttcttttccttgttctgtttttttcctggcccgttggcgaggttagagcgccaggttgtaagaatcgggtctgtggacctcataccagatagg

SEQ ID NO: 443765 - DNA, 122 bp, Homo sapiens
tcgcgcggggcctgtccagctctccttcggagatcttgcaggagctgggcaaggggagcacgcatccgcagcccggggtgtcgccacccgctgccccggcggcgcccggccccaaggacggc

SEQ ID NO: 443766 - DNA, 122 bp, Homo sapiens
cttgcactcattctccaagcccacacgtgatcggatttttctggtacattaaggcaagaacgtgggatacagaaaggcctctgtccttgcaataaggcagagggtctaattgagctgactaa

SEQ ID NO: 443767 - DNA, 122 bp, Homo sapiens
cgtcctggccgtcccgcccgccgtccgccgtccgccgtccgcccggccctcgccccctcccgagctgtccagcgcagccgccctctaccccggatccagaagtcccctccccgctggctccc

SEQ ID NO: 443768 - DNA, 122 bp, Homo sapiens
gcctgtgatgtcaagtctgggggaaatgctgctggaccaggtcacacaggctccttctagcgaaggatttcttccacaccatggtctgagctgaaagatgattcaggagtactttgcatttc

SEQ ID NO: 443769 - DNA, 122 bp, Homo sapiens
tcagtagagttcattcatgcattcaagagacatgttgaacaagagcccgttaccctggcacgtcaaagtaagatcaggccttctcaaggatctccctgcctggaggaaaaaggaagataaac

SEQ ID NO: 443770 - DNA, 122 bp, Homo sapiens
tttagttctccagacaacctcccttccactctggtctcacacaccccagccttcaccctgcgtcagtggacaagggggtaggagcctgcagagcagaaaagtacaccccaccccctgcagaa

SEQ ID NO: 443771 - DNA, 122 bp, Homo sapiens
tgagatggtcaaaggttgatggtatgtttcagccaagagcggaaagaaaggcctttcatacgtttaacagttcctcctggaatctgggccccaaattccaaccaagatatctatttgccttt

SEQ ID NO: 443772 - DNA, 122 bp, Homo sapiens
tttacaaagaatatgcctacctgccttttgcacttctggtaaagatacgaggtaggcagacgtgaagatttgcaaagaactgggacagactggcaaccttcccttttggaaggcttctagca

SEQ ID NO: 443773 - DNA, 122 bp, Homo sapiens
gagggaaggaagcaagtaccagggtaagcaggatggatggatggctctcccccagaggggcggcagcacacagagttctggagtcagactcagtagagggccagttttgactccactgccaa

SEQ ID NO: 443774 - DNA, 122 bp, Homo sapiens
aagtgacagatttgttatggagtcaatggcaggaagaacccaatcaatacatctcatacccgcccacttcactaaaagcaagcattcctatgcatgcccacacattcaaatagatgcacaag

SEQ ID NO: 443775 - DNA, 122 bp, Homo sapiens
cagacgctgctcccggcccacctcaccacacccgcccccggctgtgcccacagtcccacccgatgcagacactgctcccggcccacctcaccacacccgcccctggctgcgccacagtccca

SEQ ID NO: 443776 - DNA, 122 bp, Homo sapiens
ggtcaggtgtccggctcggggcttctgggccccctgctccccaaaggtgtgcagctcccgcgtcccctgccaggtcctttaggtctaagagggtccctcttgtccagcgcaccaggctccac

SEQ ID NO: 443777 - DNA, 122 bp, Homo sapiens
aaagcactgggtccagggcgcctgctcgcggtcacccatagggtgggtggacacccatggcggcttgcacgttgcacgtcccccggctcagcaccgagcaagtgggcctggaccctgaagga

SEQ ID NO: 443778 - DNA, 122 bp, Homo sapiens
ttgtactgttgtgtgtggattgcttattcccgaagtgtaacttgtttggaaaattaattgcgaaagaaaagtcatttttttgagccccagagttttcagaatattttgcgcaatgccatact

SEQ ID NO: 443779 - DNA, 122 bp, Homo sapiens
gagacgctgttgctctatgaggcgtgtctgtgtttctctagttcgcggctccagcagtcgcgccaaggggcagctgctactcctgccagatacaccagttatcacaggccgctcccaggcct

SEQ ID NO: 443780 - DNA, 122 bp, Homo sapiens
ccgcccacctcggcctcccaaagtgctgggattacaggcgtgagccaccgcgcccggcctcgtctgtgttttttcaagttcagcatgttgagtcaaggctggggaccactgaatgaaggatt

SEQ ID NO: 443781 - DNA, 122 bp, Homo sapiens
gctggagctctttgtctaggaagtgcccgagcgctctgcgcaaggggtaggggcgtagggcgcctggggtccgccccttggttccctccccgacgcagccgccggcccgcccgccagtctgg

SEQ ID NO: 443782 - DNA, 122 bp, Homo sapiens
acgggcggatgacttccttcgggacgcagatgagggacgggcggatgacttccttcgggacgcagatgagggacgggcggatgattccttccggacgcagatgaggaacgggcggatgattc

SEQ ID NO: 443783 - DNA, 122 bp, Homo sapiens
aagggtttctgggaggagatgacgtttttgctaaatcttagaggtatctggaggaagacacgctggaccctagaccaatgccctgggctgacgcttccaccgtcacacctggacccctgcca

SEQ ID NO: 443784 - DNA, 122 bp, Homo sapiens
cacacacagacacacacacacacatacacgggcacaagggctctttcttcttagggcaatcgagccagacccttcttcggaacacaaagttttcccccacgtcactagtggctgtgattcaa

SEQ ID NO: 443785 - DNA, 122 bp, Homo sapiens
aagaggaagagagcaggaggtggtcagggtgtctcccgaaaacatcgcatgtcgtggctgcgtctccatctggttgaccttaaattctctactttccattttcattgtctgaaaatggagga

SEQ ID NO: 443786 - DNA, 122 bp, Homo sapiens
atgatcaggccatttcaatgtaatctcttcatctttttctttctctctgatatttgtttacgtaagtccatctcaaatattatttctaaaatcaatctattagataattgtgccaatctctc

SEQ ID NO: 443787 - DNA, 122 bp, Homo sapiens
cgactttcgcacgcgcagggctgtcaggctgactgtgcacccagaacaatgcagcctcatcgctaccgggtcctgttgactgtcaggccctgggactcagctgcttcagctcctaaactggg

SEQ ID NO: 443788 - DNA, 122 bp, Homo sapiens
acagtcgcagcttaaccccgttgggggcgccgccccgctgaggtggttgcgtctccaagtcgtgagcctccaatagctgctcccgctttcgcgtcgcaaccccaggaccccgggaaattacc

SEQ ID NO: 443789 - DNA, 122 bp, Homo sapiens
ctgaggccatttcccagctctgttctgctggtctatctcttcttctacttgctcccctcccgcaatcagaccgggagccccctgtaagctcagactgttcctcccatcagatcacctaacta

SEQ ID NO: 443790 - DNA, 122 bp, Homo sapiens
gcccgggcaacagagtgagactccgtctcttaataaataaatacataaataggctgggcgcgatggctcatgcctgtaatcccagcattttgggaggccgaggcgggcggatcacttgaggt

SEQ ID NO: 443791 - DNA, 122 bp, Homo sapiens
atagatccttacccccaaggcaaaaaattcatttataatggaacaaaaagcatgaacttacggaatctgaaactttagcagatgccctctcgttccttcaacagtgaagtgaacacctcggg

SEQ ID NO: 443792 - DNA, 122 bp, Homo sapiens
tgtaacacacttcctcttctccacactatgcacatatccagccgcgtaaatgatctcatacgaattataggcacggaggaggtaagcaaaaagtgttccaccctggttcccaatccccccgc

SEQ ID NO: 443793 - DNA, 122 bp, Homo sapiens
gctagtgtaagacagaaccaggactagagcccaggtattccctagtccacagcctgtgctcgtcaccaccaccctgaattattgtaggggagggaactggctcaaaaagagtaagtaaaggg

SEQ ID NO: 443794 - DNA, 122 bp, Homo sapiens
agaccaggattccaaacacactgcacgagaatattgtggatccgctgtcaggtaagtgtccgtcactgacccagacgctgttacgtggcacatgactgtacagtgccacgtaacagcactgt

SEQ ID NO: 443795 - DNA, 122 bp, Homo sapiens
tcgcgggagccggagccggagccggagccggagctggccgcccgcgcccttcatgccgcccgcagcccaccgcacgtactccgcgcccgcctggctttggcgcccccacctgcgggccttgg

SEQ ID NO: 443796 - DNA, 122 bp, Homo sapiens
ttattttaatatttcatcttttatgaccgtcctggtttctggcagccatagtccctaccccgacagcccccagcccagatggcattcaaatcttcctggatgggcttgatgcccgtcactca

SEQ ID NO: 443797 - DNA, 122 bp, Homo sapiens
cggtgcgaacaaagagaaaataaataaagcagtgaacttcagaactagagggcatcgacgcggcagctgattttgtctgcacacggcccccgtagcctttccgtccaaaatcatttacgcgg

SEQ ID NO: 443798 - DNA, 122 bp, Homo sapiens
gctgagctacagagccacactctgcggctgcttgtgtggttcgagtgtgaagtccagggacgctgagggtttataggtttttatctaagaagactcttggccacagtcaatctccagaggtt

SEQ ID NO: 443799 - DNA, 122 bp, Homo sapiens
cgccgggacgtcccctggccagtcctgggaaacgtggggagctgggcattgaagctctggcgagaaggtcggggcggctggtacccggccgccgggtcctgcgcgtctttgttcccagcccc

SEQ ID NO: 443800 - DNA, 122 bp, Homo sapiens
gtgcacagcttggcattgctggagggcgctgggcacaccttgtgtctcccgcctctgtggcgctgtgggctcctggatggaagcaggagatgggaaataaacatggatcgctgaatgcagtt

SEQ ID NO: 443801 - DNA, 122 bp, Homo sapiens
tcccggtccccgccgaataagttgtgatcactgcagaaaaggtgtcccattgctcggggccgcaggcgtcagagagcccagggcaagtttcaggggctaccggggtccctggctaccccgcg

SEQ ID NO: 443802 - DNA, 122 bp, Homo sapiens
tcgacttcccggcggtacggcaagccccagtctgatgcacgaatcctcagagtataaacccgaggcatcagttcgtagtccaggttttctgacgtactcacggcaccagtgaaatggtcaat

SEQ ID NO: 443803 - DNA, 122 bp, Homo sapiens
ccgggcagagctgcaggtgcaggaacccaagggggcggctccgggcaacagcggtgatcgcgacagtgaaaccagaaaaagtggtatctggccattttgatttttcaaagccttttatctca

SEQ ID NO: 443804 - DNA, 122 bp, Homo sapiens
aaagcacgccctcaagtttaacctctcctgtagttggtaacccatctgcattcttttgaacgtcacaaggaagaaacggtgcccggcgcagcttgccctggagcgtagctggagtgcggctg

SEQ ID NO: 443805 - DNA, 122 bp, Homo sapiens
tccctccttcagggttctcgccgcagggtggaagaaggccagcgaacacactgaggggcccggagaagcctgggccaggggagcccaggccacccatacctatctgtggcatgggaaggaat

SEQ ID NO: 443806 - DNA, 122 bp, Homo sapiens
gcctcccgccccctgcatcctgggaatcgtagtcccaatcctgctctggaactagcagtgcggcctgctcgggccagctccgcctctatctggcgccagcctaaaggtcccgcttctaatcc

SEQ ID NO: 443807 - DNA, 122 bp, Homo sapiens
catttttcaagctgcccatcctgatgttaatcttcaggatgccaagaccccaagagagctcgctagtttaactgtcttgttaaacagccataaagaacaaattataatccaatacatgcttt

SEQ ID NO: 443808 - DNA, 122 bp, Homo sapiens
ggaaggtctgattgaggctgggtccctgatgactgtggggccaacacaccagccctggaccgccagcctccaggtcttctaggtgatctaccttatggaagcctgtgatttgtgggtgttcc

SEQ ID NO: 443809 - DNA, 122 bp, Homo sapiens
aatccagggtccaggggctggagcatccgggctccccgtgcttgcgcttggaagcagaaacgccttcaaccctcacttctcacaggacctccgacccacctacctgaggctcagccccagag

SEQ ID NO: 443810 - DNA, 122 bp, Homo sapiens
ctccagctcccgggatcgcggggaacgtggattccgaacaagggcaactgcggactcccccgtgggaagaaagggagggaagcggaagggaaaaagcgcatgtgcagcagcacgcggcagct

SEQ ID NO: 443811 - DNA, 122 bp, Homo sapiens
agccctgcgcgcggatctgttgcgtgcgcgttgggctctgtgttgaataatgaaaaactgcgagatggggctgtcccgtcttactgtgtgactgatgagtggaatcactgctctgcgtgttt

SEQ ID NO: 443812 - DNA, 122 bp, Homo sapiens
gcatcttttttttttttttttcacggttattaaaaccgagggtggggggcggaggacgcacgtgggaacccaccaggcgcctcagcttctgcactacaactcccagaaggcgccgcggccag

SEQ ID NO: 443813 - DNA, 122 bp, Homo sapiens
tggaacgtggcagacctcaccgtgcaggaacagggtgtgggtggcggccgcgggctcggacgtgactcaagcacagatgggtgcccgtcccgtcaagagagcacacgcaatggacggcggca

SEQ ID NO: 443814 - DNA, 122 bp, Homo sapiens
tttgaaggagttataccacatgttatggtatcatgtgtcatgtgtttaaaaaaataccaacgtgttctagttatttggcaatataggaaatatgtgttctagttatttggcaatataggaaa

SEQ ID NO: 443815 - DNA, 122 bp, Homo sapiens
gagctgtgaaacccctcacgctgttgagactccatggggctgtcagggagcgacggctgccggggcctctgcccgcaggcttggttgcacccagagccttactccatctgtgtccaactggc

SEQ ID NO: 443816 - DNA, 122 bp, Homo sapiens
tgacgtcactcaacctgtagctttgattggctgggctgcgagggtggagtcgtgcagagccgctgctggcggaggtcgtggtgatctcgcttgatctttgagagggaaggtcctgaatcaca

SEQ ID NO: 443817 - DNA, 122 bp, Homo sapiens
gagggagggaagccggctacgaattagcctaagttattaaagatggcgacggagcgcagtcgctccgcgatggactcgccggtcccggcctctatgttcgcccccgagcccagctccccggg

SEQ ID NO: 443818 - DNA, 122 bp, Homo sapiens
ttggtggtctcttcacatggacgcgcatgaaagcttcctccaaaaggaaagccagaggcacgcaggcctaggttgcctcgccgccccctgcgccttttcctgcagactggtgcatagtattt

SEQ ID NO: 443819 - DNA, 122 bp, Homo sapiens
ggctggggggtggtggtgtctggagactgggcctacctgcaggggcatcctccggagttacgggccgggaaggaggggtcatttagggcgtgaggattccccgtagagagggatttcagcag

SEQ ID NO: 443820 - DNA, 122 bp, Homo sapiens
gaaagagccttctgcgccttccttccaaccgacttcgagcggctccgtcccctccggcttcggatctggaactaacgctgactaaggccgaaggaggaatgtgtctttttctttgtgggttg

SEQ ID NO: 443821 - DNA, 122 bp, Homo sapiens
ggacatatccagctaccacagaaccaggaaacgggcacccctaacctcacctctgtgcaacggggcaaagcacaaatcattacagacaaaagtgggagctcattaatatctcccttcccacc

SEQ ID NO: 443822 - DNA, 122 bp, Homo sapiens
taagaaacttgtccctcactcttcccgccagctcaaacttcctgacaagcattcagctaacgccccacatatatatcacgtgacggtcctcctctgaaatgtcaggcccccagcccaattct

SEQ ID NO: 443823 - DNA, 122 bp, Homo sapiens
tagccaggactcttcagccactcagaggcctctacctcaggacctcaaccgatgattgggcgagcgcagtacgggcgttgcctggggaacgccttccgcgcctcgaagtaacgtcagcacgt

SEQ ID NO: 443824 - DNA, 122 bp, Homo sapiens
ctctaagcgctgtggggaagggagcggccggcgggtcttgccccacgccccgccccgcggcgctcaaggagcccgctgtcccggagcacgcgagatcccagcgctgcactccgagctcgcgg

SEQ ID NO: 443825 - DNA, 122 bp, Homo sapiens
ggacggacagccacctcccgcaagagccccggggcggccagcacgggaacactgtgggcacgtgggcatcaagagagccccctgcacaatcccacgaggcggcttcgacaccttcaggccag

SEQ ID NO: 443826 - DNA, 122 bp, Homo sapiens
atagacccataaagttgactcacaaacccaagataatgcagatgatagggaataggagcccggtttaaatctaggctgatttgaccatatagtctgtgctccatcatactgaattcacttca

SEQ ID NO: 443827 - DNA, 122 bp, Homo sapiens
aagcacggtctaactcatacacaattaacttaatagttaatttggttttaattataggctcgtaatactacattcatgcctcacaattatataattcatacatgcatgtatggattcttttt

SEQ ID NO: 443828 - DNA, 122 bp, Homo sapiens
accagtgaagctgattttccatttatgggaatgactttaaaaatcccttttaaaaataagcgtaagaaaaagaggaatttaatataaagaaagactatcaagtaaagctcatgttgcaggca

SEQ ID NO: 443829 - DNA, 122 bp, Homo sapiens
gaatagtttactttccattgcatgtatcacttgggtgcagtaacttcttaggactctgagcgccgctgttcacctactaggagagaaaacgcagccagagctcaatccggattctcagggct

SEQ ID NO: 443830 - DNA, 122 bp, Homo sapiens
catcacccaccttgaaagacagaccattcccaaagctttagaagtttcccgtaaacccctcgacaagctcatctttatctgtctagcccagaggccacctctttactcagctttacttttct

SEQ ID NO: 443831 - DNA, 122 bp, Homo sapiens
cacctaagggagcctggtggtgcatgagcactcggcggccggaacacagcgggggcggggcggtcgcggcgcctccacttccggccaaggcgggtcctcccacctcggggacggtgctggag

SEQ ID NO: 443832 - DNA, 122 bp, Homo sapiens
atcatcctctccctttctgggtattagaaataatatcagagagtgggtggtcaccccctccgatattgggagtaatatcctctccccttctggatattaaaagcaatatcatagtgagggtg

SEQ ID NO: 443833 - DNA, 122 bp, Homo sapiens
cttgcccttgccagaggggtcgaagcgctccttgtgggagcccgtgaacttggtggtgtccgtgagcctcgacactgtgggcgacgagatggctttctgcaagaggagcaggaggaaggggg

SEQ ID NO: 443834 - DNA, 122 bp, Homo sapiens
agcaagcgcttttcaggagctcactgcaacaccgggcaaacacttcttccgccagggatgcggttaggacaatgccacgtggcgtcacagtatgctgttatttattccaataaagacctcgt

SEQ ID NO: 443835 - DNA, 122 bp, Homo sapiens
tgtcactgtggctcagaggcaggccatctgctgcagtgtttccctggaaacccccagcaacgcccctcccggagctcctccgcggtctcccccactccatccccgcgcagcggaggagcttg

SEQ ID NO: 443836 - DNA, 122 bp, Homo sapiens
gggaaggactcctggaaccacagaaagctgtaactttctgcaacaagaagggtgtcaagacgaagccaacataggcagaattaaccaatagagaagccagaggaaaatttccaaactgcctt

SEQ ID NO: 443837 - DNA, 122 bp, Homo sapiens
ggcagcaccagggcgcggtaggcggcgataaggcgcgtgcagtccacgtgccagcccaggcgctgctgcaagtatggagtcatgactctggcatccagcaagctgaggcctggcaacaggta

SEQ ID NO: 443838 - DNA, 122 bp, Homo sapiens
catcctggaggccaagccggatcctcaggtttggccagggggcggctggggccggcgtgccggcggggcgccggcggggccgcgggggtttgcggcgctggctgggattcgcgctccgagcc

SEQ ID NO: 443839 - DNA, 122 bp, Homo sapiens
gacgtcgtcccagagggagaggtgctggagggaaagtggccactccaggcgggcagctcccgtagcaaacagcaccatcaatgctccagcagcactcactcaagtgcagcatcggcctcctc

SEQ ID NO: 443840 - DNA, 122 bp, Homo sapiens
cctggttccagggaagggcggtgacccccaggcctcacaattgcaggcatttcccaggaacgcccccccccagggagctggccagagccttggccttggctttgtctgagtctgggtttact

SEQ ID NO: 443841 - DNA, 122 bp, Homo sapiens
gcgaggcctgatcaggctgcttgctcgcggggacgccaggacttgaaacgtcccgtgccacgaggcccatcgcgcccacaagtggcgcgggtcactggcacctccctagtctttcctcttga

SEQ ID NO: 443842 - DNA, 122 bp, Homo sapiens
tcccaccagcccacgggggcccgggcagcccctctggatgtggctggagtctctccagggcgggctccaaagtcccacggaggaggcgagcgtcggtcttgctctgacctgaggcagccccc

SEQ ID NO: 443843 - DNA, 122 bp, Homo sapiens
ctggtcagcgctgattaataagtgttttttgttgtgaagtgttgaataatagaggatggccggtgacccagtaaggactaaaccttgcgctggtttattgtggcaagctgagaaaggggctt

SEQ ID NO: 443844 - DNA, 122 bp, Homo sapiens
cggccaaggggtcaggcatgctaatgacaaaattaccatttaccttttacctggcaggcccggtgcctgacattataaatgtaggtaacctttcacctgaagctctcttttgctctagtaga

SEQ ID NO: 443845 - DNA, 122 bp, Homo sapiens
taattctgcacaacatccagctctgagagtactgggatgcagcagccctggcatagccctcgaccacctcatgagggacactgttaatgtgagcaacagcagggcttctgaaagcaacctcg

SEQ ID NO: 443846 - DNA, 122 bp, Homo sapiens
tttacgaaatgtccacaaggtcaccacctgctgagcgccatggtgggagagactgtgaggcggcagctggggccggagcctttggaagtctgcgcccttgtgccctgcctccaccgagccag

SEQ ID NO: 443847 - DNA, 122 bp, Homo sapiens
ccaaagcaagagagggtggcgcgtgccagacaccaacggtcggaaaccgccagacaccaacggtcggaaaccgccaagacaccaacgctcggaaaccgccagacaccaacgctcggaaaccg

SEQ ID NO: 443848 - DNA, 122 bp, Homo sapiens
cctcagcttgcagggaggtgtggcgggagaggcacgagcgggaaccggggctgcgcggggcgcttgcaggccagctggagttcagggtgggcgtgggcttggcaggccctgcactcggagca

SEQ ID NO: 443849 - DNA, 122 bp, Homo sapiens
gttcataagagaaagcattgctaagtgatttgataagggtttattttggagggtagagatcggagtgtatttgaccacgtttactctggagtatgttctgatgtggcctgtgggtttctttt

SEQ ID NO: 443850 - DNA, 122 bp, Homo sapiens
aatcctactctgtgcccctctttctattcctttctttctttctttctttcttttttgagacggaatctcactgtgtcacccagactggagtgcagtggtgcgatcctggctcactgcaacct

SEQ ID NO: 443851 - DNA, 122 bp, Homo sapiens
ggccaacctctgaagccgcgtcctactttgacagctgcagggccgcggcctgggtaagggcgaaggggttgttgaacggtcgcgggagccggggcggggttgggaggtgagtcgagggactg

SEQ ID NO: 443852 - DNA, 122 bp, Homo sapiens
tgtgagttcaagttctttgtgaaaagactctctagtcctctgaaaatcccaatggagaaacgcctaatggaggaatgaaaaataaaatggagttttgaagcaaaaccttaaggaagaaagtg

SEQ ID NO: 443853 - DNA, 122 bp, Homo sapiens
aattttgtttatgcaaatggtaatgagtcagtcttcagagagaacattgtccagccttcacggagcaccatcccacttccaacctgcttccctccttcttcaccctgtccagggtcagtccc

SEQ ID NO: 443854 - DNA, 122 bp, Homo sapiens
gcaaggaactgccttccttctggaaccagaaaccatgttgggacacagctagcctcaatacggatatgcaaaatgcatcttaagtcttttgtgtgcttggtattgaagacaggctaaactca

SEQ ID NO: 443855 - DNA, 122 bp, Homo sapiens
ggacaagtatagtcgtcgctggatctctgcaaagagactgtcgaagcggctgcggttcagcgtaaggtctgttagggagacctgaagccctgtgccaggaacgcagtgctcgcttagcccac

SEQ ID NO: 443856 - DNA, 122 bp, Homo sapiens
cgaggcagaagaatcgcttgaacccgggaggcggaagcccctggttccccgtggggtgtgcgctcacctcggttttccttggccaggttgtcggccatctcccagtagtcgtagctgtgcag

SEQ ID NO: 443857 - DNA, 122 bp, Homo sapiens
cacgcatcctctcctgaaagcgaggaccaggtgctgtattgaagagctgggcgctcggtccgcaggcaaggacagcagtgcccgcggccaaggacggtgctggactggatggtggagctgga

SEQ ID NO: 443858 - DNA, 122 bp, Homo sapiens
gcgctggccaccgtggaagccgtacaggttcatcttgtacttgtggtctggctccaggcccgagatggtgaccccatcctcgtgtcccggcacccgcaccgccttgggctgcccgtccccat

SEQ ID NO: 443859 - DNA, 122 bp, Homo sapiens
ccagggcgacctcagagccaatggggccggccttctctccgcttctggccgggctccagacgaaccccactttactgcaaagccgcgagaccgattgcccgggaagtctaagcctgctagcg

SEQ ID NO: 443860 - DNA, 122 bp, Homo sapiens
cggccccagcgctgagggagcactgagccgacccaaggtctgcaaggagttcgcggcacccgcccgcccacgccggacccggagggcacgtccgccgggaggggcagttcccacgaggaaag

SEQ ID NO: 443861 - DNA, 122 bp, Homo sapiens
tcttcctgtccgaggtcagcgaaagccgtctaaagcagctcaatctcaaccacgagtggacgcccgagaagcttcgacagaagctgcagcgcaatgccgcgggccggctggagctggccctc

SEQ ID NO: 443862 - DNA, 122 bp, Homo sapiens
ccttaatgtactggaaacaagttggtcaggccaggtgtcaggctgagaaagcacacaagtcgtggagttccaggtgtcgagtttggcaaaggtaaatgaagcgcctcggcaaaggcgcggga

SEQ ID NO: 443863 - DNA, 122 bp, Homo sapiens
tgccgtcccagagtcttgcacactaccaagatggtggtgagtcaggacagtgaaacaggtcggctcttcactccaggagtgtgcgcgggcgccgggccgcgcaggcgcattactgctcccct

SEQ ID NO: 443864 - DNA, 122 bp, Homo sapiens
ggagcaagtggcaaaggagcctgagagtggagaggctaattcaatctggcctcctgatttcgatatgtgttttcccaatctgaggagcttggagatggcctgggagaggagaggaaaaaaaa

SEQ ID NO: 443865 - DNA, 122 bp, Homo sapiens
cactggccaggtgctccgagctgggtgattttctcccgctcaagactaggaacatacctgcgctttcggcgcagggaagactctgggcgagggcggggctgggaggagggccgcggggcagg

SEQ ID NO: 443866 - DNA, 122 bp, Homo sapiens
gagttaccaagtgactgagcaattccgctcctaggtatcagcccaagaggactgaagacacgtgaccacataaaaacctgtgcctgaatgtttatagcagcattatccataatagccaagaa

SEQ ID NO: 443867 - DNA, 122 bp, Homo sapiens
ccaggtggttgcggggaggaagcctcaggtcgctcccctccggtgccggggtgggcgcgtcgggacccactggcctcccagtcccaggagaggaaggaccagggaaaccagctgtctgcagc

SEQ ID NO: 443868 - DNA, 122 bp, Homo sapiens
tcggcctctggggagaatgtgagtccgggtgggtgactggggactttagaaccgggactgcggagacgctgattggcttctctagaacccgacacccaatgggagtgggaattggggacgcg

SEQ ID NO: 443869 - DNA, 122 bp, Homo sapiens
tgaatgggtagaattgaaggaaatccaggtactatcttttctgatctcattacccatcaacgaatcaatggaaatctcttcgcacagacctagaattctaactcacaagtcacccaagctgg

SEQ ID NO: 443870 - DNA, 122 bp, Homo sapiens
agcttagagtcatgggaaaatgtgatgaggttccgagtactgcaggttgtttgatagttacggagtaagggatttaaatggggatagttatggaggtagtattgacagtgataggtgaggaa

SEQ ID NO: 443871 - DNA, 122 bp, Homo sapiens
gacagggctgtgccgccctgtgtgcgcccagggctgcgtgaacggctcatgtgtggagcccgaccactgccgctgccactttggctttgtgggccgcaactgctccacggaatgccgctgca

SEQ ID NO: 443872 - DNA, 122 bp, Homo sapiens
gcttagtccgggcctcgctgcgagtctgtgggcgaggcgggaggtgcttccttggccaggcgggtggaggaaggtgtgggcgccgcatcccagcgtcgcggagcctccaggcgcgggcaggc

SEQ ID NO: 443873 - DNA, 122 bp, Homo sapiens
tccgacatgggtaactcggacagctttggacaggacgaggcgggccctggcaggagactgcggatgtccaggtgacagtggatgccagttcaaaaccagcactgctctcctcccgcgcccag

SEQ ID NO: 443874 - DNA, 122 bp, Homo sapiens
gtttaccctaacagcacactccaactctgttgaaactgccagatctatgggatggtttctcggttaattatcataaaaacaggagagtgcattttgtgactgaggtacacacatgtaagaaa

SEQ ID NO: 443875 - DNA, 122 bp, Homo sapiens
ctggtttttcagggagaagtcaagtcactggcccaggtcctcaagctggccagtgtggcccggtctgaccccgaggttctgcccgggtttctgtccctccagcctggcatcgtgaactcagg

SEQ ID NO: 443876 - DNA, 122 bp, Homo sapiens
agttggcaggcatccgcctgtcagagcctcggaggtactgggggcggaagttcataggggcgaggagggtccacagggacaagctggaagccttccaggcccgctatgccccgcctcctgtc

SEQ ID NO: 443877 - DNA, 122 bp, Homo sapiens
cccagctggcctgtaattggcgcagtcggcccaaggggcggctgttcaggcgcgggtgcgcgcgcagctgctgtggccctgcttggtgcgcccgctgtcaccgccatggctgccccgtgttt

SEQ ID NO: 443878 - DNA, 122 bp, Homo sapiens
tgtggccccccgcccccttataaacagccagtctacaagaggcgctagttgcaaagcttccggttctgggggaaggcgtggcttccgcgctctttgaaatgtccggcgccggaatgtctggg

SEQ ID NO: 443879 - DNA, 122 bp, Homo sapiens
aaaaacagacttgcattcattaaggaacagagcgcccctgtgctcttgggggccgccctccggccaggcctgctaagtgagggggcctgcagacaggctgagccgctcagacgcccccactc

SEQ ID NO: 443880 - DNA, 122 bp, Homo sapiens
ataataataaaaaagtctgtacatgttcagtacagacacaattttttttccaaacagtttcgatctgtggttggttaagtccagaaatgccaaacccacagagggctgactctaatgcccca

SEQ ID NO: 443881 - DNA, 122 bp, Homo sapiens
gtgagtactgcacgttgtcgcgggccagtaacgtcatcagacgtgtgtgtgtccctgcggcgctaagaaggggagactgaggctgaggctggggaacatcgggcagcatgagcggctgcggg

SEQ ID NO: 443882 - DNA, 122 bp, Homo sapiens
taaatgtgttgtaacatgaaacggtcccaatcaagcaagtcggggccctctcgctgtcgccgacagtccagagcaaggaagtacacagcagtcctgaacctcagttttctgcaaaccagagg

SEQ ID NO: 443883 - DNA, 122 bp, Homo sapiens
aggttggggcaggccgggtggggcccagcgagtgggcgggggcgcgagcgggagcggaagcgggcccgggccgcactgctgccgcgtctagccgcctcccaggctgcctgcgccgcgtggct

SEQ ID NO: 443884 - DNA, 122 bp, Homo sapiens
tttttttagctgctgcgtcatgagcataatttatgcaaagagctttgccgcatgctgcaccgcccgcgccagccgccgggggcggcgggctgggagggcggtcagggaagggaggggagcac

SEQ ID NO: 443885 - DNA, 122 bp, Homo sapiens
tcctccttccggcacaagagccggccttagtgcgggccgaagcgctgtcacggttcaccccgccccctctgggcgtgaaagacggggccaagctagccccaccccttccgtagggacagtct

SEQ ID NO: 443886 - DNA, 122 bp, Homo sapiens
accagcctgcaagactccaagggcgggtggccggcttccaccccagcccccgtgccggtccggctttttagtacacaagcgactttggggtccccaggcacgaagggatgtagtgcaaaggc

SEQ ID NO: 443887 - DNA, 122 bp, Homo sapiens
aggaattaagctgtgattcagcaggaggaggcacacacaggaggagctggttctcacactcgctgagccgcgagcgctgggaggctgggcactgagccgcagattctcatttctcaaggcca

SEQ ID NO: 443888 - DNA, 122 bp, Homo sapiens
agcccgggtgctagtccaggcagagtcgggtgctagtccaggcagagtccagtgctagtccgcggcctcaacagagctgtcggctgggctccggaagcccacccggaacctgatggaggcag

SEQ ID NO: 443889 - DNA, 122 bp, Homo sapiens
gaaacactaacttagtacaaagtcgattgaatcattgcctttctgcatttatttgactgccgtttcccaaatgtcagcttactgaataaaaaactaccctgaaattctgctttccttggact

SEQ ID NO: 443890 - DNA, 122 bp, Homo sapiens
cacctcttcccacatacccctcctccaggcacacgccattacatcatcctgttttgctagcgccaaggccctatcactacgatctggttcactcattgttttcttgtctatgtcttcctcca

SEQ ID NO: 443891 - DNA, 122 bp, Homo sapiens
gcagggacaagttccttccatagggcccgggtggcccccagagctgcaccatttatgatccggtcctttgcagaacgcaagggacagacacatgaaccctgacctaggttcttgtgcagaaa

SEQ ID NO: 443892 - DNA, 122 bp, Homo sapiens
ctcccaggggagcctccctggcctgtgtcagatatccggcacccgggagccccctcaggccgtcagcatcaaggagtctaggtcctcaaatcggcctgcgccggagaggaccgtggttgggt

SEQ ID NO: 443893 - DNA, 122 bp, Homo sapiens
aaagtcaaggtgaaacatttcaaatgttgtgtatcaactttttctcatcttgttgtctatcgatttattttcatggagaataatatgtgactcataggcctctgtttttggaaaccagactg

SEQ ID NO: 443894 - DNA, 122 bp, Homo sapiens
gaactcagcattccacaccagcagcctcatgatccaggcctgcctcacgcgccaggatcacgagagccgcctctaacccacccccaaaacaacaaaaggatgcgctctggccttgccaactt

SEQ ID NO: 443895 - DNA, 122 bp, Homo sapiens
agataaaggaagacagtaagtgtggtgggagatcacccgggggccacagcgcccttgcatcgtgctccttattccctttcccgaaagctaccccaccccagtagcctgccccttcagtttgc

SEQ ID NO: 443896 - DNA, 122 bp, Homo sapiens
gtgaaggaggctggccccgctgctcaaaatctgagccctacagacacctcctacagcccccgcccccaccgcacacatccccgagcattgcaggatatatttgacttctgtcgcctcctgca

SEQ ID NO: 443897 - DNA, 122 bp, Homo sapiens
gctgagtggctgagaccaggggagcactgctcagaataggatgagggaatcggtgtcacccggccatgagccccgggacacagagcacaaccggacagaagcacctccgggaaggcctgtgg

SEQ ID NO: 443898 - DNA, 122 bp, Homo sapiens
acatcctgcccctggaccttactctagttcttctttcatccactggtgtattcctttggccggggacacacacatttgagaaacttcccagcttccctctatctgaggctcactccattaca

SEQ ID NO: 443899 - DNA, 122 bp, Homo sapiens
cgcggcgcaggaagtactggaggcccgagtagttgggctgctcatagagcatccagcagccgctgtccacgcgcgccgagttgcagcggctcaagtagggctgcaggttggggtggtcgctg

SEQ ID NO: 443900 - DNA, 122 bp, Homo sapiens
gagctaaactcggtctcaaaaaaaaaaaaaaaaaaaaaaaaaaaaaaagactctcactcccgttaaccattaccccactgcttccacagcgtcttcaaggaggcgggacctgggaggggatg

SEQ ID NO: 443901 - DNA, 122 bp, Homo sapiens
aggtttgcagcttcactcctgagccagcgagaccacgaacccaccagaaggaagaaactccgaacacatctgaacatcagaagggacagactccggacacgccaccttaagagctgtaacac

SEQ ID NO: 443902 - DNA, 122 bp, Homo sapiens
tggcgatgagtttgaaattgcagagtggacggggtggatgcgtcggcctccatgtgggctcgggggctgagctgtgatttctgatcgaagcggcttcacaccgagtctctgtgactctggac

SEQ ID NO: 443903 - DNA, 122 bp, Homo sapiens
cagtcgggggtgcggggctgtgacctagaggcttcagtgtcgatccccgaggtgttcgcgcgcgccagctgtcctcgcggccgcctgcgcgctggccgcctgcgcgctgccagcccgcccgc

SEQ ID NO: 443904 - DNA, 122 bp, Homo sapiens
acctgggggtaattggctgacatagcctccactgggccaatgacaggacataataacagccgaagcgtttactccacggggaacaaagttgtgagggcattgttaagcgctggagatggcac

SEQ ID NO: 443905 - DNA, 122 bp, Homo sapiens
gcagacgctgtcttcttgctgtgacctcacatggtcatccctctgtgtgtgtgtctgtgtcgtgatcaccccttcctgtaaggaccccagtcctgtttgatgaaaccctatcttcacatgca

SEQ ID NO: 443906 - DNA, 122 bp, Homo sapiens
cgccgccacgcctgactggtttttgtatttttggtggagacggggttttgccgtgttgcccgggctggtctccagctcctggcctcgggtggtctgcctgcctcgacctcccgaggtactgg

SEQ ID NO: 443907 - DNA, 122 bp, Homo sapiens
tagacctaagcctggcgcgaaactacatttcccacaatccttcgggggctgataaggctccgcaatggtctgaactacaattcccacaatccagggcgatttccgctttgtcgcgtttcctc

SEQ ID NO: 443908 - DNA, 122 bp, Homo sapiens
ggagggaaagaaggtggtgcgaaaacgcgtttgaacttgggtcctgccgctgcccgtagccggcgtccccaacatggcggctccccaagacgtccacgtccggatctgtaaccaagagattg

SEQ ID NO: 443909 - DNA, 122 bp, Homo sapiens
tccaggctctgacgtttttgagatggtgagcagcatggcttggtggcccccaggaaggaccgggcctgatgaccacagaggtctcccaagcactgtctgctgcctgaggctccggggccttt

SEQ ID NO: 443910 - DNA, 122 bp, Homo sapiens
caagagctcccagccgcaggggctctgagggtgttgtgggtccactctgagttcagcactcgagaatttttggattaggtggagcctgatgggaaaaatcacaaggccagggctcactacct

SEQ ID NO: 443911 - DNA, 122 bp, Homo sapiens
ccacacaatggactcacaacctgacacacgaaaattcacagagaaacacagaaaggcacacgtgacactcaaagacagacccacacaaaagccatgcagcaaagccttttgccacacatgca

SEQ ID NO: 443912 - DNA, 122 bp, Homo sapiens
agtgagcccagaaatggacaaggcaggatttcctgtttaccccacatagggtggggagtgcggggactaaggggtcctaagaagagacagcatttgccggaggaaacagtggggtttccagt

SEQ ID NO: 443913 - DNA, 122 bp, Homo sapiens
ggtccttgaggagggctactgccagctatgagataggaaacaaatagtagaatagacccacggaggctgctatgtctccataaaagagagaccaaatacaggggtgaaaagtgattcaggaa

SEQ ID NO: 443914 - DNA, 122 bp, Homo sapiens
tcccggggcccccactttagcctgttgcttctctggtcgctccaggtcggtttttcccggcgactctagtgtggcttccaaacttctgggctctgggctcacttcggaatttgcccccgccc

SEQ ID NO: 443915 - DNA, 122 bp, Homo sapiens
taaaaaggcagggttaggaaagcctgaacgccgccacactgttttttctccaggaagaaacggggcgtggggctgccggtagaagggggtggctccggccgctcccccgcgccgtcctccgg

SEQ ID NO: 443916 - DNA, 122 bp, Homo sapiens
gtggagctgagaagcccgatggtggtggaggttcccgtcatgggccagacttgcgtgggccgtgagcctgggtgggcggacatgccatcagggctgcagggtaccggcatatccttggggag

SEQ ID NO: 443917 - DNA, 122 bp, Homo sapiens
cagagtaacctcatcagaatcatcttctgctgttggtagatctgtcttttatgacatactcgcaactgtgctaaaggtagtgttagcttaggtaaaatagtacctaacaacaatcacaagaa

SEQ ID NO: 443918 - DNA, 122 bp, Homo sapiens
aggaaatttgttatccatgccatttcagtgagaaccaattctattaactcctccgaagcccgtgctttatgactgggctttcagaagggagtcttgaataaacttttcagtgatttcacaac

SEQ ID NO: 443919 - DNA, 122 bp, Homo sapiens
cttccgaacctctgagctccggacaggctctggaagtgctttagcttctttcctacacagcggcacccgccggcttccaggcttcacacttgtgaactcttcggctgcctctgacagtttat

SEQ ID NO: 443920 - DNA, 122 bp, Homo sapiens
ttactcatttcaaacactacctcattcaaaaaggcgaccataaattcctgaggctggaaacgaacgaacggcaagccccgaagaaacacgctcttttaaaaattaaatcttgtgctactgtt

SEQ ID NO: 443921 - DNA, 122 bp, Homo sapiens
gacactgtggacaatgaacacatgggccgccgctcatccaaatgtgagtaattgttggcccgcagtagccctggagttctggctcccttcagcatatcttgtatctactcatatccactggc

SEQ ID NO: 443922 - DNA, 122 bp, Homo sapiens
gagttgcacttccggggtcttcaggagattgatacgtcattacgcacttgacggcagcggcggcgacaacccggaaacgggcggggcgcgggccctgggtaggttcctgtggtattaggtgg

SEQ ID NO: 443923 - DNA, 122 bp, Homo sapiens
gactggaagagaaaggaaagcttgtagccaatcacagtgggctccgcccaaggtcacacacgatttgtccaatcagaaggcactttcccttgggccatgttgggttcacgagtgggtttgga

SEQ ID NO: 443924 - DNA, 122 bp, Homo sapiens
tcgtctgtgctctgtgtttggggtgtgtcctgcggcaccgtccctgagcgctggaacgtgcgcggccccgcagggcagtgcggccggggaatgcaccgagctgcgcgcttccagcgccgtcg

SEQ ID NO: 443925 - DNA, 122 bp, Homo sapiens
agccagagcgtcttggcagttctcagcaccttgacatcacttccttgctaccactcagagcggcagtgacacagttcccttatctcagaaggccagaagacggctgtcaaaggtcacaggga

SEQ ID NO: 443926 - DNA, 122 bp, Homo sapiens
ggccccaagagagggacccagatggctttctcctgaggggccgagttagggtcactgccacggagcctcagcgggccattctctgcccctcctgctgtgagcggtgaggcaggcggcagggc

SEQ ID NO: 443927 - DNA, 122 bp, Homo sapiens
cggggcgagggcagcgcgcagctttgttgtgtctcgtctgagattcgggaagcttctgtgcgtaggcgatgcagtttgagaggctgaaaacgtcacgacgcgaaatctaagaaatgtagtca

SEQ ID NO: 443928 - DNA, 122 bp, Homo sapiens
cccaggtcgtactgagtcttttgagtccaacagaaagctcagaactttgcacacagcaggcgcttaataatagttgaatcgaacgggttctggggcttgccagccgcgagaccgtggagcgg

SEQ ID NO: 443929 - DNA, 122 bp, Homo sapiens
tccatggtagcgccggctctccctggggcggagcgacacgccggtagagcaccgcggccgcgcactggcctccggggaggccccacccccgtttatggcctagggcctttccctacgcaatc

SEQ ID NO: 443930 - DNA, 122 bp, Homo sapiens
aggaaggagaggcatccatattccctgtccatttagctataagagaagctggaaaatggccgtgagtcggtctcgtgtccagttagaactaactcatcagggtgcgcatctgcagtcttctg

SEQ ID NO: 443931 - DNA, 122 bp, Homo sapiens
ggctcgcaacacaccacacaaagtcacgaagtctgtgccagaaaggagtagccaaaccaccgccgggaggcagccgaggttgtgtttaaggtggcgattgagggcagtaggtgacaactcga

SEQ ID NO: 443932 - DNA, 122 bp, Homo sapiens
gctgcaagcccttgagaacgcgccggagcaatgggagccggcccatgaaaaagtaggcagcgaggccgctccgggggcctctggcggggcccgggtcctcctccgtagtggggctgtacacc

SEQ ID NO: 443933 - DNA, 122 bp, Homo sapiens
gggataagtcacggatcagtacgtgcccaatacttgacgagtgtaaaacagaccttgggccgggtgcagtggctcacgcctgtaatcccagcactttgggaggctgaggcaggcggatcacc

SEQ ID NO: 443934 - DNA, 122 bp, Homo sapiens
caggggttaaggagggactggtgcccactcttgcctacagctcctgcgcagggctccagccgccaaatcttcccgggatggtcgggaggtggcataagaggttttgccaggaaccactgcac

SEQ ID NO: 443935 - DNA, 122 bp, Homo sapiens
gcagggagactaccagggctggcggtagctgggcgtggtcgggtcgggggcggctgtgggcggccggcaggcagcgcgcggggcagccctcggcagacggccaatggcggcggtgctcgggg

SEQ ID NO: 443936 - DNA, 122 bp, Homo sapiens
gggaggggagggggcggtgcaggcatacgtcagacgaaaggcgccgatgcgtcagaaaagcgcgcctcgcggtcttccgagctgctgggccgggaggcgctgagggggcggggccttgaggt

SEQ ID NO: 443937 - DNA, 122 bp, Homo sapiens
agcagccggtgagtagccatatcaagctccttagggaggctccaccccatcctctggggccgcccttcctcggcgtccacggccccgcgggcagttacctgttctaggtgtttgtgcccccc

SEQ ID NO: 443938 - DNA, 122 bp, Homo sapiens
aggtacctctggctgtaggtagggatggtgcccccccactgtacactaggcaggtacctccggctgtaggtagggatggtggccctcactagtaccccaggccagttcccatgactatgcag

SEQ ID NO: 443939 - DNA, 122 bp, Homo sapiens
ttttaaataaacacaaaaattgggcacagccatttgactgtgttggaagccacaaggtggcgctgcagactgaagagacggaggaacaaaattgaccagaatgctacggaagtccttgacaa

SEQ ID NO: 443940 - DNA, 122 bp, Homo sapiens
aggcctctgggccttccttttggtgtggtctcaactttacacttgggaatggcaaagcctcgcggcaagggacggggtcggggttgcacctgacccgaggaggcgttgggcggccttcctct

SEQ ID NO: 443941 - DNA, 122 bp, Homo sapiens
cgcggggccgtggcagtgccaccaagggcctctttaagcccctttgaagccgcggagccccgcgccgcaggaggccccgccgctatgccagctatgccagctatgtccctgctgccgccggc

SEQ ID NO: 443942 - DNA, 122 bp, Homo sapiens
gcgccaagggcagcccgagccttacgagagcggcagttggctgagcgagtctctcgcctccgtagttctcgtgtgtctttggccgcacagcctctcgggagttgtagtttccgttcaactcc

SEQ ID NO: 443943 - DNA, 122 bp, Homo sapiens
ctcgaccttgagaaccctgaacaattagtggcagggctggaatgagaatcctggtaaacccgcctcctaagccggtgttcggaattaccccgccagggcccgtgctgctcagtggtcctctc

SEQ ID NO: 443944 - DNA, 122 bp, Homo sapiens
gctgatctccccacagcccggtgcaggcggaccaagattgtcaacacagggaggttttgccggagtgagcacaaagtgaatttctgcaggcccttgagtgtgctgggggatggggacacaag

SEQ ID NO: 443945 - DNA, 122 bp, Homo sapiens
cgggtagaggtggagagctacgctgaagaggacgcctcctgcctgctgcggctatgtcatcgcctgaggcctcgtcccatcttccgtgaggtcatacctgagaaagacagtgacaggaaggt

SEQ ID NO: 443946 - DNA, 122 bp, Homo sapiens
cagcagggtgccccagcccctcgagtccagcagcgtgttgttggcacgggtgcctgcaggcgagggcaccaccatgcccactaggatgcctaggaagacgagagcccacagcgtgccctgca

SEQ ID NO: 443947 - DNA, 122 bp, Homo sapiens
actgctgcactccagcctgagcaacagaggctctgtcaaaaaaaaaaaaaaaaaaaaagccgacatgcatgaagacacagctagtaagtgatggagacaggattcagactcaagtagccagc

SEQ ID NO: 443948 - DNA, 122 bp, Homo sapiens
tgttcacaacgtgggtattgggagggcaaggatgactacctccgtcagacagatgtgaaacgtgccaagcccagccctaaattgagctttctaaacaccgagtcgcggtcaggctttccagc

SEQ ID NO: 443949 - DNA, 122 bp, Homo sapiens
gaatgtcagctccctgttcctgctccccaaaggacggcgattacctaagggcagcagctgcgacgggttggtagtagcgttagccgccatggctacgccggaagtggcctgccttcattgat

SEQ ID NO: 443950 - DNA, 122 bp, Homo sapiens
catacacggaaaggaagaactgcccatacgtattcgagtcttccaatctgactccgagcccgcatccccctcaatcgtctcttttccccactccccagatcacggtgctgcttggtccccct

SEQ ID NO: 443951 - DNA, 122 bp, Homo sapiens
ggaagagacaaacgaataaattaacaagataatttctgagagcagtaggtttaatgaagccgtaaagcaggacacatatccctgcacaatctgtgcgcctgctcagacgtaacaccccgcag

SEQ ID NO: 443952 - DNA, 122 bp, Homo sapiens
tcagccgagcatctgatcacgtctcctgtcactcagggcctaaaggggcgaggccttaaacgttatccagtcagggacgctgggctggaaaccgtccaatcagacacgaagctggagcggac

SEQ ID NO: 443953 - DNA, 122 bp, Homo sapiens
ggcagacggtgtatcagaccttgcgtgctgggactcactttcagcctgcaggtccagcgccggggacaggccccaccaggacacggagccgaagccgctgccggagccggcaggtgtggtca

SEQ ID NO: 443954 - DNA, 122 bp, Homo sapiens
ttaacacttcatcgtccatctgatgcgcggggcccagcactccatcgcgaacatttgggccgtggccagccgcattaaaggttattacggaaaacgcgacctgcaaacgggcgagaggcatg

SEQ ID NO: 443955 - DNA, 122 bp, Homo sapiens
gtaaaatgtttatgggaaacaaggcggccaggatccaaccaaggcctcagtgaggtcccacgtgtcccccgtggcgagatttcgccctcccgccgttgaggaggaagagtgtgagaacagac

SEQ ID NO: 443956 - DNA, 122 bp, Homo sapiens
cggaggtgtaggtaggaaccggaatacctcggaagccgggaaatggtgagtgtccgaggccggggttcccgagacagggtacagctggttgtaaccgaccggaaccggctgtggcgggaccc

SEQ ID NO: 443957 - DNA, 122 bp, Homo sapiens
ccaggcgcgcggctttccggaggtgctccgtggcgggctccagccggtcctcgtcctcctcgatctgcgccatctccatgtgcacttgacagcggagaagcgtcatgaggctgcgggggtgg

SEQ ID NO: 443958 - DNA, 122 bp, Homo sapiens
gagtcagaggtgagaagctaaagtcatgatctcaccaagggatcaagaggtcgatattggcggcttgtgacggtaaacacggcaccatcctcctcctcatcccagacggacacaggggcctg

SEQ ID NO: 443959 - DNA, 122 bp, Homo sapiens
cacagcgccccactccacgccgggacccaggcccctctccaactccacctccgtgttttccgcatattgtctcccagttacccgtggcccctgcagggatccaggctcccgccggccggtgg

SEQ ID NO: 443960 - DNA, 122 bp, Homo sapiens
ggggagcagggcctttgtgtgtgtgaagggccatgagccatcggaatggagtgcagttagcggtgctggtgaggagaatgacagagcagcacaacccaatgactaggggatcttgacgagcc

SEQ ID NO: 443961 - DNA, 122 bp, Homo sapiens
caatttgtaagtacattttgatcttaactgttttaggagagatcatcagaaaaattggcccgatcaaaaagaatgattaacatatgaccagacatgaatatgtgagctagcattagtcatgg

SEQ ID NO: 443962 - DNA, 122 bp, Homo sapiens
atgtggggaaaaacatatttgctgtgtccctaaagaaaaggataaactatcacacattcacgaccaaaaagagacaagtgagctatatatctagttgcgactcctaattcagaattttaagt

SEQ ID NO: 443963 - DNA, 122 bp, Homo sapiens
ccatctgtgaaacagagctacggacagcaggttcacgaagcattgtaaaagtaccagcaccgcgcccacacatcctccaccggccgcgccctcacgtcctccaccggccgcgccctcacgtc

SEQ ID NO: 443964 - DNA, 122 bp, Homo sapiens
ctgtagcccatgtagtagacggttctagaaagaaagagagaagggaagtgcttaccgtcgcgggactggctgtattcggctctcactgcacccctggggagactgactctgcgtcagccggg

SEQ ID NO: 443965 - DNA, 122 bp, Homo sapiens
ttagcaagtgctccataaaatagtggcagactcttgagcacctgctggccgggagctggacgctaggtggcctccgctagccctcccggttggtctggaaggcaggcacaagtttctcagga

SEQ ID NO: 443966 - DNA, 122 bp, Homo sapiens
catctacatcagatgtagcctcagaggaaggagtcagtcatagaatggataaaacaaccgcgtgttaaagctttggttataattggtgtggagaatggagaacacagttgatcagcagttga

SEQ ID NO: 443967 - DNA, 122 bp, Homo sapiens
ctccttgtcctaaaatagccttatcttttggtctagcaaagggcttaatcatccgttttacggcacagttttaaacatggccgccccaggtaggagtcaagtgggcgtcgccatcatacctc

SEQ ID NO: 443968 - DNA, 122 bp, Homo sapiens
acaagaaaacagagcaaggagaccaaagagactctggtcagctttaaacggtgcaacagacgagacctctttaagcagcggacaccagagggagtcagaaataaagcaaaggagggagaggt

SEQ ID NO: 443969 - DNA, 122 bp, Homo sapiens
caggggctggcacagacattgctggccccagaatgctgaggcccattctttgccagggggcgcatgtaaccatggagggacagtctgcccctgtctgcaatccttgggctgtgcctgctggg

SEQ ID NO: 443970 - DNA, 122 bp, Homo sapiens
cgggctcctggccaatgggtgctgtgaagggcgtggcccgcgggggcaggagcgaggtggcgggggcttctcgcgtcttttcccccagccccgctccaccagatccgcgggagccccactgc

SEQ ID NO: 443971 - DNA, 122 bp, Homo sapiens
ggctcgcgcacatgctattcccagagctctgcttccgagacggtggtggctccccggggccgcacctgtgcctccgccgggcctgtggggtgagtgggatgctaacgcctggccttggagag

SEQ ID NO: 443972 - DNA, 122 bp, Homo sapiens
gattacaggcgtgagccaccgcgcctggcctacaaaaagtatttttaaaaattagccaggcgtggcggtgaatgcctgtagtcccacctacttgagaggctgaggtgggaggattgcttgag

SEQ ID NO: 443973 - DNA, 122 bp, Homo sapiens
tcaggctgggcatggaccagccttcagatggcagaagtggaagatgagcctacttgtgagcgatgtgactttaaggaaatgaagactggggaagaataattagtgtttataagacatttaag

SEQ ID NO: 443974 - DNA, 122 bp, Homo sapiens
gacccgtttcctctgactgagagacgtggctggggggctttccatctgcttcgcctccctcgggcaggcagctctgagatgcccggagggatgtgatgccccatcgccaaattggggtctct

SEQ ID NO: 443975 - DNA, 122 bp, Homo sapiens
cttggtgccctccgacacggcgtgcttggccagctccccgggcagcagcaggcgcacagccgtctggatctccctggaggtgatgatcgagcgcttgttgtaatgcgccaggccggaagact

SEQ ID NO: 443976 - DNA, 122 bp, Homo sapiens
acggccgccatcttaacagcgcgttcccgttggcgtctgaggtaagtttttgtttctgggcggcgttcggtggtgtcccggtgcagccacgcgagagtagaagggtggaaaggggaggtgcc

SEQ ID NO: 443977 - DNA, 122 bp, Homo sapiens
cgcaaagtcagagcaaagcccatcaggccactaaccggctatgtgattgctggggattaccgcccatccccgcaccgctccctggggacggcaaaccctccacccggaacagatgactgaga

SEQ ID NO: 443978 - DNA, 122 bp, Homo sapiens
tcaggtcccactgccgggtctggcccagcctggatgggttgggtgcctctaagcagtccgcgtccccttcggtcgccggagagggaactttcaaacttagttaggaagccagactgtccgcg

SEQ ID NO: 443979 - DNA, 122 bp, Homo sapiens
cttgagatcagccagaaaagtcaggcaacttttcagggactgggagcgaggtctcccggccgggcctgggtccagtctctgtgggcagtgcagtgccgagccccacccctcaagccgtgccc

SEQ ID NO: 443980 - DNA, 122 bp, Homo sapiens
cacgctaggccagcgctggcttcgggacagctccactacggcgagggccacacgggtggccgcggaagggatgaaaggatttggaaggacaccagccttttcggactttgcaggatccaggc

SEQ ID NO: 443981 - DNA, 122 bp, Homo sapiens
agagatttgaactttggtaggaaggtttttaccactcactgtgggtctatcttcacagtccgagtgattataactcccaaagtgtaatatgagactcaactgtaactgcagaatgagagctg

SEQ ID NO: 443982 - DNA, 122 bp, Homo sapiens
ctctttaccaaacactttcacgttaccttaagcacacagaaaacttcctatcaaagactacgagctgctcccatcggaaaatataccttaagaaaaattctgcaatgttcacaaattgtttt

SEQ ID NO: 443983 - DNA, 122 bp, Homo sapiens
ctcctcaatcttctccactgagctgggcgtccagcagctagcacagtacctacgcgacaacggacaaagaataagtgcttgtgaactgagctttcttaacttctcgatggaccgttaggcca

SEQ ID NO: 443984 - DNA, 122 bp, Homo sapiens
tagatgcagccattgttaccaggccttgcgttttcctgcagccagagtccatttgtatcccgcatctatattttcttcccggcatttgtttctgaatgggagcttgctacatcggagtctct

SEQ ID NO: 443985 - DNA, 122 bp, Homo sapiens
catcctcaggagggctccccctttactggtctcccttcccttctccatgaacaataaagacgatgtctttctcaacctgtgcttagaatcacgaacacacagaggccaggcgtggtggctca

SEQ ID NO: 443986 - DNA, 122 bp, Homo sapiens
cctggagaagaggttttaatcctgcacaggaaacagattcttcctctcagtgggaacccacgttggccatgctgttgctaattcactttggttgatgtagcagggagagtaaagaatggcac

SEQ ID NO: 443987 - DNA, 122 bp, Homo sapiens
tgcagcatattttccattacaccagactgcctgttgtgatttacattcaaaacaacttttcgaagcaaatgatggaagcttacagatgactgaagagattagtccctgttttatcaacttcc

SEQ ID NO: 443988 - DNA, 122 bp, Homo sapiens
actgtggcatatatttcccactagattgggtcaaaaaagtttgaaagccactaccctatacgacgtagcaatattgcacaaggagtgggatcaattcaaagtagccacttaataaaattggc

SEQ ID NO: 443989 - DNA, 122 bp, Homo sapiens
gaactcatgggaacagccagtggccgccagtcgagctggtcacagccactgagttacctacggtgccttgatgatgattctctctttaatactggaaatgggagtccttaggaaagcagaca

SEQ ID NO: 443990 - DNA, 122 bp, Homo sapiens
tgggttcgcagctccctggaagtgctgcggttctgtctggcctgacagtcccagccagggcgccccgtgccacgtgctaaggagacatgaccaggagaaggcgaagccggcgatggtacgta

SEQ ID NO: 443991 - DNA, 122 bp, Homo sapiens
tcctgacagccctccggaggctcgccttgtgtgcgcctccacgccaccgttgccagcccgcgtgtgcctctgcagcctcctagctgccacaatggatagcctggcggcggaacgcagacctc

SEQ ID NO: 443992 - DNA, 122 bp, Homo sapiens
cactagggccgccatgggcaatggtcagtggttccgatctggtccgacccgggttcctttcgtctcctctggcgtgcgcgtccctcgatcccggggaagccgccgctcggtgtcgggtctct

SEQ ID NO: 443993 - DNA, 122 bp, Homo sapiens
tcacgggcatagtggatgcaactaaaacgcacatgaggagaagttgcctcaggccaggtgcggtggctcatgcctgtaatcccagaattttgggaagccgaggcaggcggatggatcacgaa

SEQ ID NO: 443994 - DNA, 122 bp, Homo sapiens
aagcatttaatatgccttttggatctgccctccacatgtgttactcagtggttagactgacgtgggtggcggtttttattatagttcagaccttaaaggctttactgtatttctttgccagt

SEQ ID NO: 443995 - DNA, 122 bp, Homo sapiens
tgaccaggccttggaatgcctctaatgtcttttccaactcccccatgtccactatgttctcgtcacactggcttccttaagtcctctagcaatgccagccatgctcttgcattagggtctct

SEQ ID NO: 443996 - DNA, 122 bp, Homo sapiens
agcaatttgactctagagcccaagttttacattaaaaactatagccagcaattgcattaacgtaatcccatacctggcaaaaattaaaatgtgctcgaaacaatattttaagagctttgaag

SEQ ID NO: 443997 - DNA, 122 bp, Homo sapiens
ggcggtcgcggcgaggttcctggcgcagccgcttggaacttcgcattagaatcgggaccgcgcaaatgccctggctgaagtgtcaccctattcaagaaacactgctgtcaggaacaaaatgg

SEQ ID NO: 443998 - DNA, 122 bp, Homo sapiens
aaactccttccaagttcattagcaaaggtgctacctcggcctgcgggaccacagcggatgcgcggccccagtcagcacacggtgaggggcgttaacaccaaaactcccgctccagggcgagc

SEQ ID NO: 443999 - DNA, 122 bp, Homo sapiens
gcgcccgcgaagcgccggcacccacccgcacgtcctgtgggggcatccaaccgtgtgatgcgcagataagggccccagagggcacaccgcagccaccgcagggtgagctctggagggggtct

SEQ ID NO: 444000 - DNA, 122 bp, Homo sapiens
ggatacccttacctgtgtaccatgagattatgtgtttaattacaccttctctagaggccacgtcctgtgagagctcgcaacagtggcctgacctagtctgggagcaaggtggtcagagaagc

SEQ ID NO: 444001 - DNA, 122 bp, Homo sapiens
aggatctgggggttcatttgtagattctctcaagcctacaatatgggttctcccctcctccgccactagtgctcgccctttcgcgcgcgtgggggacgggcgaggggacccctcggccccca

SEQ ID NO: 444002 - DNA, 122 bp, Homo sapiens
ccaaatgcccgcttctgggttggaatcccaccccgccgcttacagctgggtggccctgggcgccagaatacctatttttttctttataaaaatctcttatttggatataattgacatgcaat

SEQ ID NO: 444003 - DNA, 122 bp, Homo sapiens
aggtaagaatcaccatgtaaaattcagcctccattttccacttagcaactgttcatgcttcgcttggggaaaaaaaaaattctcccagataagagaagcaaagactaggaaggaaatgtgcc

SEQ ID NO: 444004 - DNA, 122 bp, Homo sapiens
tcaaagaggccttccctgctgtgtcccacctgcccagttccttgtgctgtctggaggctccgccctgccccacctgacctgctggctcactacagagctgcaagcccctgacaatgggatcc

SEQ ID NO: 444005 - DNA, 122 bp, Homo sapiens
tcccccaccagagccaccctcgtaaattgagatttatggctgcggcaggcggggcgggggcgtgtgcaggcaatgaggatgttgtgggggagacagggagagaccaatgaggcagccgcggg

SEQ ID NO: 444006 - DNA, 122 bp, Homo sapiens
agtccctgaggaaggagtcgattccggcctaaagatttcttcactgagaccaggtcaccccggactccaacatctgtcaattagaacagagacaggggaattagaaccatctaggagtccct

SEQ ID NO: 444007 - DNA, 122 bp, Homo sapiens
tataacaactctcaattttctatcgtcctttacctccaccacgagagggcgcatggatttcggtcagagaagtgacttgggcctgggcaggaggccaggctgggataattacttccaggtgt

SEQ ID NO: 444008 - DNA, 122 bp, Homo sapiens
cagtggtggccgaggcagaggctgcggctgctctttgctgcagtggggcgcatgcagccgcgaatcggcacctgggcagcaagcgactagcttgcaggttcaggtggaacgcatagacgcgc

SEQ ID NO: 444009 - DNA, 122 bp, Homo sapiens
cgcagggcctgaaggcagctgctccagcagcgatggtggaacggaagtggaatccagggccggttgggggtggggtgtgcctggcacatgcgccgcgggcactgggtggggggcctccgaga

SEQ ID NO: 444010 - DNA, 122 bp, Homo sapiens
gactgtggaggagggcggatggagtggagggttcaccgaccgcgtcgcccttctgggtgtcgcagctccttcctcggcagtcccggggcgtgagagcgcgaccggccgggagttgggggacc

SEQ ID NO: 444011 - DNA, 122 bp, Homo sapiens
agccgcggctggcgcgtgcgggcgcagagctcgggaggctccccggccgctgagtgtgcgcgctgagccccgccgctcccgctggccgcctccgctcttctgcagcctcctctcccgccgcg

SEQ ID NO: 444012 - DNA, 122 bp, Homo sapiens
gtccctcccagcacactgcctggggcagccccttcctgcactcagtcctggccaggccggcgggggctgctccggcccctagcactgagaaccacgtgtgtgtcccagaagtggtgctgcac

SEQ ID NO: 444013 - DNA, 122 bp, Homo sapiens
ccacaccggggagtgcggcgaccagacggccagctgccgaatctgaggcctcggtgggtccgtcgcccgcctctcttggacaagtccaggcgatgtgagcacgcccagcctcctacatttca

SEQ ID NO: 444014 - DNA, 122 bp, Homo sapiens
gactccagccccggcggggactatgaggaagatgagatcaagaaccacgccagcgaccgccggcagaagggccagcaccatgagcgcacaggccaagatgggcacctctatggcagctctcc

SEQ ID NO: 444015 - DNA, 122 bp, Homo sapiens
taaatatctccctgagtacactggccccacactgcagtgaacagccatgaaaagctgaatcgtttttgctgatatgagtacagatgcgaagggggaccctgcctccccattcaagcatgcct

SEQ ID NO: 444016 - DNA, 122 bp, Homo sapiens
aaataattgggagataattctcatattgaaaaattccaaaaaatttatgtactctaccctcgagaagatggaacataattctccaccccataagcatgagtcgagcctagtaaatgtttttc

SEQ ID NO: 444017 - DNA, 122 bp, Homo sapiens
tatccttattcagggcgtaattcctgatcctggtccccggagacaacacccacccttgggcgaatcattcctggggacggaggaatgagggaggcgtctctttatttccgggggcggaggag

SEQ ID NO: 444018 - DNA, 122 bp, Homo sapiens
tgtatggatatcattcaataaggttcttaggttagtagcagcagaaacagactatggctacggtaaacaaaaatggaatttgttggagggattatcaagaagcttaaagctcatggtcagaa

SEQ ID NO: 444019 - DNA, 122 bp, Homo sapiens
agacacagcacactgcaaacttgcagaggctttgagcgctgcacagagcaggacacccagcgggggccagtcatctccgctttctcaggccacagtcagggaagcataaaaaagaaccttgg

SEQ ID NO: 444020 - DNA, 122 bp, Homo sapiens
ggaaggggtgaggccatcgggcggctgcagagagctccagcgcaagggtggggggcgatgcgccagggtgggctgcgctgggcgctacctttcacaaaagaccagggaccccaacgcgcccg

SEQ ID NO: 444021 - DNA, 122 bp, Homo sapiens
gcacactttgcacaggaggagcctgcagcttggacaggctacttgacttgtccagggacccgcagcagagccaggatttgaacacaggctgatctgactcccaaagctgtgcttaactgaac

SEQ ID NO: 444022 - DNA, 122 bp, Homo sapiens
tccgccaggtccatggccgcggcttgggggcggggggcagagaaaggggggtgccggagccgcctcctgatgtcaaggctttaaaggggccggggagccccgcccctggccctgaccccgcc

SEQ ID NO: 444023 - DNA, 122 bp, Homo sapiens
acccgtcctcatcatggacgcgttttgtaaactgttaggggctgtgcggtcacaaggcttcgctaggccatcgtcatcaatttaaggatctccacagtgtggtctttacaacctccctggga

SEQ ID NO: 444024 - DNA, 122 bp, Homo sapiens
aggcggaggggcgggggctcaaagcgcgcggcgaaggtgcagcagttaccagggtgctgacgtcagctagaggcagggcaccgcggaaggttgaatccacgccctggctgtgcgcaggcgcc

SEQ ID NO: 444025 - DNA, 122 bp, Homo sapiens
gtgcttgttattatggggcatttagaaaagcttctgtccactgtgtattctctttggcaacgctctagacactttgagggttgctgtcagatctggcccaacctctcctatgtgacgggaag

SEQ ID NO: 444026 - DNA, 122 bp, Homo sapiens
attatggcagaaacccagagtagaggcctctgctggtgagggagcctgcagcactctccacgctggtgggtcctagcatgcccaacagacccccatcccttcccatcagccttgggccttga

SEQ ID NO: 444027 - DNA, 122 bp, Homo sapiens
aaactggggcgagatcaaacacaccatcaaagaattacacacatatccttgtggccacatcgcttttgttgtttgtttcaaggatgctgtgtgtgttactagggttaagactcttctccttg

SEQ ID NO: 444028 - DNA, 122 bp, Homo sapiens
tggtataagtggcacgtgctagggcaagtcccaccgctagggacgggaacagcttctctccgggaagctgccatctccagcaccaggcattgtggtagaagaccaattctgagctaggaaca

SEQ ID NO: 444029 - DNA, 122 bp, Homo sapiens
ggttaggggaacagcctcagagtccagagttgggggtttctcccccagctttgcaaaagccgtctatgacctcagagaaatcacaccgtcgctgggactcagtctcgtgaacacgcggataa

SEQ ID NO: 444030 - DNA, 122 bp, Homo sapiens
tcacctcgggggccggtggcggcacagccagcagcctcagcgtccggcccggcctcctgccgctgcccgtggtgccctcccggctgcccaccccggctacagctcctgctccctgcaccacc

SEQ ID NO: 444031 - DNA, 122 bp, Homo sapiens
ggctggcgccgcttcctcccgggcacccgccgctctgtcgctccgggcgcccaggctcaccgggcatttctaaattgtaaaaagtttttatcagatggtatgggctgagcaacgctgggatt

SEQ ID NO: 444032 - DNA, 122 bp, Homo sapiens
caggccggagcgcagggagcgtccgacatgccggagccttcgctggatgtaagttggggtcgccactcgccttggcctggggctaggcctggcgccgggacctgcccgagagaaggggtggg

SEQ ID NO: 444033 - DNA, 122 bp, Homo sapiens
gttgacgtcacacggaaccggtgctccggaagctaaaggtggccatgctgtgtgggaccacgtggccagaggcaagagtgtcgctctagtagtatatgcaacagtttaaactataggcatgt

SEQ ID NO: 444034 - DNA, 122 bp, Homo sapiens
ggtcaggtagcggttgaagtggaactccttttccagctccagggtctggtagcgggtatacgcggtccgggcccttttcccgtccggcccggtcatatctggagcagatagaggaaagccgc

SEQ ID NO: 444035 - DNA, 122 bp, Homo sapiens
gcatgggcgggaacgggggctgtgcacggtgcttgcgggccagctcaagttccgagtgggcgtgggctcagcgggccggcactcccagcggccagccggccccgcctccccaggcagtgagg

SEQ ID NO: 444036 - DNA, 122 bp, Homo sapiens
agtttgcacagtgtttctctctgcttgcacggcatttctttgggtgcagcaccagcctctcggttgtttgcatgccgtttctttgtgcatagcacccacctcttggcttgtaccgtgtttct

SEQ ID NO: 444037 - DNA, 122 bp, Homo sapiens
caatcagagcagccagccaccgggaagtgcctcggagactccgccccagaccagcgctgccgcttgccagccccccagttgaccccatagagcatgcgccgtaggcgtttctaagagatgga

SEQ ID NO: 444038 - DNA, 122 bp, Homo sapiens
attgccactgaattatatattttaaatggctaaagtggcaaactttatgcttatatattacgttactgcaataaatttttttaagatggtaagagaactaatgaattcacagtgaatctgat

SEQ ID NO: 444039 - DNA, 122 bp, Homo sapiens
cacatatatgtgtgtatgcacgcatacatgcgtgtgtgcacgcatacatgcatgtgtgtgcgtgtgcacgcataccagcatgtgtgcgcgcacgcatgcatgcatgtgtgtgcgcacgcatg

SEQ ID NO: 444040 - DNA, 122 bp, Homo sapiens
ggcaggtcgggcggcgaagccggcgagggcgaggccatgggcttgagcggtcggggttggcgaaccccgcgtgtggccggtcccggcggcgaggcccgtcccgctgaagcacgcggggactc

SEQ ID NO: 444041 - DNA, 122 bp, Homo sapiens
ggtggtgtttcaaaacatatacaggcccacttggccccacttggactaaggtgaaaggaacgtacagcaggtagaacgtcaaagaggacgttccaacagttggacaagttaacgacaataaa

SEQ ID NO: 444042 - DNA, 122 bp, Homo sapiens
gcgcgccggtgtatctggcagcggtgctggagtacctgaccgccgagatcctggaactggcgggcaacgcggcccgcgacaacaagaagacccgcatcatcccgcgtcatctccaactggcc

SEQ ID NO: 444043 - DNA, 122 bp, Homo sapiens
ctccaaggcctcggagggacaggatctgggcgcacctcaccggttgccatggtaacgcagcgccccagcccctcgcgctccgcggtggagggaggcgcagccaatcggaagcggcggagttc

SEQ ID NO: 444044 - DNA, 122 bp, Homo sapiens
cccgcgggccggggtgaggattttccgcctcgctcaggcctctgcctccttgtcaatctccgttcctcccccgccccgagatatgcgcaatagagcatgacggagcgcaaggcgggaagccg

SEQ ID NO: 444045 - DNA, 122 bp, Homo sapiens
cacccgctgcttccaaatctgtgccaaaatattctatgctgcacagataaaatcctctgtcggttctacaagcctggcttttcctatagagaaccctcttataagcaaaaagtaaagctctc

SEQ ID NO: 444046 - DNA, 122 bp, Homo sapiens
agaggtcgcctcgggccagcgagtcttgcagaccttcgagcaggaacctgataggagggacgagacttggctaaaggtcactcggcgagtccgtggcccaaaggacttgccaactttctgtg

SEQ ID NO: 444047 - DNA, 122 bp, Homo sapiens
gttcgggaaaaagctggagagagtcggggggcgcgccttggggaggggcatttgtccctccgaggaggctcgcacctcggcctggacacgcagcagatactggcacccacccttcacttacc

SEQ ID NO: 444048 - DNA, 122 bp, Homo sapiens
gttgacattgtgagccagtctgaaaagccccgtccgaaatttctggcctcacccatgttccggtcaacgtgttcggatgctgttttcccagggactctccgagtctgctcaggccggccctc

SEQ ID NO: 444049 - DNA, 122 bp, Homo sapiens
ccgggccaccgaggccggggaggttccttctctgggtgggttagccccaagcaaggaagccgtcaaatcggggtccagattctagcctgcctctgtgagacctctgtgttgtgggggctgga

SEQ ID NO: 444050 - DNA, 122 bp, Homo sapiens
gaaaaagacgtgaagaacatcagacagggagcagcgcgagggcgccagggagggaggcagcggattcttcgggcctctgtgaagagggggcatgaaaccggtctgcagacaaggaaagagca

SEQ ID NO: 444051 - DNA, 122 bp, Homo sapiens
aagcgacccccctacagtgacagagtgtggctccgggccggacgccccacgctggcctcccgttcccatatcccggccatgagagcacgcggccgcaacacttgtcttcaaggagccatgat

SEQ ID NO: 444052 - DNA, 122 bp, Homo sapiens
cctctgccatgattgtaagtttcctgagaccttctagtcatgcttcctgttaatagcctgcggtactatgagtcaattaaacctcttttcttcataagttactcagtctcaggtagttcttt

SEQ ID NO: 444053 - DNA, 122 bp, Homo sapiens
cagctcccccactttctccccaccctccaccagtggcaaagccagccccttcagggcgcacggtgtctgcccccaaggagggcccattccgttggggttaatgttggccacctctttctgtt

SEQ ID NO: 444054 - DNA, 122 bp, Homo sapiens
aacccggataccgagcctggcctcccaccagctagagaacccaccaagttccaggaggggcggggccgagggcggtccgtgccacagctgtgggcggggttgtccgtgcttgcgccagagcc

SEQ ID NO: 444055 - DNA, 122 bp, Homo sapiens
ctggttctgggccttcccagacaaaagccagagacccggagcctctttctgagaaggaaccgggcgtccccaagatttcctctagccgagtcccctgggtcccccgaggaccgggacagctc

SEQ ID NO: 444056 - DNA, 122 bp, Homo sapiens
ttcctattttttcctgatttgctctgagaagaggccgaaacaccggggtacacccaagaacggagagggctttctccccacgtgttagccagggggcacatttcccccgcggcggccgccca

SEQ ID NO: 444057 - DNA, 122 bp, Homo sapiens
cttccaactcttccacatgtttgggctctgcaatgttggggaagctgggattgtccctctcgttgagaaatcagcttgatgggaaggacccaccccttaagtattcagcttgggggtcgggg

SEQ ID NO: 444058 - DNA, 122 bp, Homo sapiens
agactcagggcccgtctggtgcggcccgggctttgctccgcgctcgccccctgcagctgccggggccgccgcaacttttcaaacctcaccgcaccgacagctctgtcccttcttttatctgg

SEQ ID NO: 444059 - DNA, 122 bp, Homo sapiens
tccagagatccgtgcaaattgttcagcactgtgccaggcgtgttgccagtgctccatactcgcttatctggtaccttctgtgtgcaggctgtgtgaggagctggggggtgagcaaggccctt

SEQ ID NO: 444060 - DNA, 122 bp, Homo sapiens
ctctcatcacaggggcggtggggcgcgcccgcctccagcctggctctggacccggggccccgccacctcccagcagcgggcgcagagagccttctggttacccccgaagctgaggattgcag

SEQ ID NO: 444061 - DNA, 122 bp, Homo sapiens
cagacaagggggcgggtggaggaggaagcggccaagtccacagtcctgctcccgtgccgccgagcaccgcccacctcagctgaccagccctgtccgctactaggcctcgcctagaggaggga

SEQ ID NO: 444062 - DNA, 122 bp, Homo sapiens
tgggttttttaaactagggcctggctctctgccccaggtcccttcattcccgcaggcaaccgcctgcccagcccaggttcagtcccatggccgtcccatcctcctgtcaggggtggcccctg

SEQ ID NO: 444063 - DNA, 122 bp, Homo sapiens
agtggaaagacggatggacgggctgtgacagggacagcccagtgtgaccccagccctggccgtcgcggttgtggcattctcgctgtcagggggctgttcccgtggctctcatggctgtggag

SEQ ID NO: 444064 - DNA, 122 bp, Homo sapiens
cctcccgaccacatgaaggagcacagagaacgtacacgctcaactgattgtaacagcccacgttagaaacagactgatgcccccaaagcaagtaggtatgcgcatgtctgcaccgtggggta

SEQ ID NO: 444065 - DNA, 122 bp, Homo sapiens
agagaaaaggctctgtcacccaccactcatgctgtcaggaccccgggcaccaacaccacccgccccacagcccacctggcgccaggtgccgctgcctcctcggctgcacatccccgccgtac

SEQ ID NO: 444066 - DNA, 122 bp, Homo sapiens
ctaaattagtcctctacagctgcaaagagaaaaaagcttaagatctcttcacacaatttccgggattccagcaggctggagtcaaagcacagttttccttgccacaaaaccctcagccttgt

SEQ ID NO: 444067 - DNA, 122 bp, Homo sapiens
ccacattccagtcatttttcctgtaagccccagtgtctctgaggattattccgtctgtcccgcttcccctcttcctcattgttgtaattcaccaacatcctcaacactttctgtcattcacc

SEQ ID NO: 444068 - DNA, 122 bp, Homo sapiens
cggtgcgctgggacaccctcgaggcggctcagcgcccgcggttcccagcgcgggcggggccgcggcagaggttcccaaaccggttgcacagaaacagcgccaccccctactgcccgcggggc

SEQ ID NO: 444069 - DNA, 122 bp, Homo sapiens
aaaggccctgagtgtgcatgacacccgcccatcaggagacagctgtggtgtggtggaaagcgtgtcagccatggaggaaacctgggcccccagctccataactggccaggtctctgccccga

SEQ ID NO: 444070 - DNA, 122 bp, Homo sapiens
ttccttggctccttctgctccctgggcagtgccagcctcgggtccacacctggaatccaccgtctttcctgtgaaaaatgacctcagtgcatcgaaggcccccaggggccgcaactccatga

SEQ ID NO: 444071 - DNA, 122 bp, Homo sapiens
ggaaagggccttttttttggttgagctggtgtcccagtgctgcctccgatcctgagcctccgagcctttgcagtgcaatgtcccgcctgctgcatgcagaagagtgggctgaagtgaaggag

SEQ ID NO: 444072 - DNA, 122 bp, Homo sapiens
tttaggaaaataatttaccatgtaataaattattatcatgcagtggcatgatcagctcatcgtaacctcaactcctgggcacaagcaatcctcccttctcagcttcctgagtggccaggact

SEQ ID NO: 444073 - DNA, 122 bp, Homo sapiens
tgtggggccgggatgggctcccacctgcatgcctgtccccgcaggtgtgacgggcagcttcgcggagtgcagtacagcaccgaatcgctcatggaggagatggccagggcggaccgagtgag

SEQ ID NO: 444074 - DNA, 122 bp, Homo sapiens
atgtgcacacacacacgtgcgcacacatgtgcacgcaggtcccagcatgtgggcttcttccgtgggcaggcacagaggtcgggtgtcggcccagaggttcatggaggcgctaatgagcggct

SEQ ID NO: 444075 - DNA, 122 bp, Homo sapiens
tgtcatcctaacagctaacacagagttcctcttcgaagaaactttaagaaaatatgttcccggccgggcgtccgccgccccatctgggaagtaaggagcccctctgcctggccgccgccccg

SEQ ID NO: 444076 - DNA, 122 bp, Homo sapiens
gcaatgagcacaggccattcattggtaaatacccaggagttgtgaccaggtctgagctgccgagtgattcctggactaccacagagagggagggagagagggctgggtgctgagatcaggca

SEQ ID NO: 444077 - DNA, 122 bp, Homo sapiens
ccctgaaatcggggaacagcccgagcaaccacctttggaggccccaggggcagctgcccccggtgctgggcctagcccagccgaagagatggagaccgaaccgcctcacaacgagcccatcc

SEQ ID NO: 444078 - DNA, 122 bp, Homo sapiens
aagcttatcagtcattctcaaacaggagcttaacttacttaggtgaacagttcatgatgacgcctttaagctgctagaccaacccaaactccgaatttgcagtttctgacctttcaccttga

SEQ ID NO: 444079 - DNA, 122 bp, Homo sapiens
tggaatgcaccaaacataaaagcattttttttcaagctttactttcactttcgagagtgccgtctatttgccacacacttccctgatgaaatgtctggatttggactaaagaaaaaaggaaa

SEQ ID NO: 444080 - DNA, 122 bp, Homo sapiens
ctgacatcttcccagggtgaacataaaagaacccccttcagctggagcacgcatctgcctcggggcgggccacagcctggcactgccaactgtgccgcccgcccggcctctcccgcaccacc

SEQ ID NO: 444081 - DNA, 122 bp, Homo sapiens
ggccatggtccttgcggagaaccgaccggctgtgaaggccgcgcagaacgaggtgaggggcggggctggggtcctgatgagggtagcagggccaggcagcccctcaccacaccactgccccc

SEQ ID NO: 444082 - DNA, 122 bp, Homo sapiens
gagcacgagagcagggccaggaggggcggggccggagacgggggcggggcgcgctgggcccgacgccccgcccagcgcgctctgcactaactcgctgccctccactgcaacttcttattccc

SEQ ID NO: 444083 - DNA, 122 bp, Homo sapiens
ccacactgcactgacacagcctgaccgagagtcaactcctcaccttgggtatgtacagaacgaatggaactgtcaaactgctgtggttttaaaggcttcttaaatcaacagagatgaatagg

SEQ ID NO: 444084 - DNA, 122 bp, Homo sapiens
tctcaccccggctttcaccacagacaggttcacagtgaaggctccgtgctaccgggagcccgacctgagccagaagccccggttcctggtgggcctgcggtcccacctgctgccccagggct

SEQ ID NO: 444085 - DNA, 122 bp, Homo sapiens
aaaatccctgccagtcctcattctgtacatctgaattcacaacaatgaggagcaggtggccgcctccttctgcagtctgtcccagtgcacatactgcagagtctgccttgctatctctccct

SEQ ID NO: 444086 - DNA, 122 bp, Homo sapiens
cggccctgaaacatgaacatgtgtcagacagccccttctcccatactctcagaagggcttcggggctggggttttagaaggaactggaattacttttatgagtcatcaaagcccagaattaa

SEQ ID NO: 444087 - DNA, 122 bp, Homo sapiens
cagcgcggacatcccggagcccgagccgagcccgaggcgcgagcggcggagcgcaggcggcgcatgcgcgctgacaggaaacgcgaaaggaaccagctaccaggcctcgcaggaaaattaat

SEQ ID NO: 444088 - DNA, 122 bp, Homo sapiens
cccaagtcatcctcaaatcggcctggaattgggcctggaagagcagcaagtcggcctccccgggcccaactccgtcctctcggcggcctctccaggtgcaaaacttcctcgagtcagcctct

SEQ ID NO: 444089 - DNA, 122 bp, Homo sapiens
ctgttttgtgctttgccgattttggattttatttttcacaaaatttttatttaaaaaactcgtcaccttttggaaatgcccattgccgacttgaatttttttgtatgaagtccctcctgatt

SEQ ID NO: 444090 - DNA, 122 bp, Homo sapiens
tcgtggagcagggcgagccagggtgtccagaagcctctagtggaaaccggagcagtacatcgcagcagccccagcgcactattctgtgaatccgggatccgggtgggggccctgcagagcgc

SEQ ID NO: 444091 - DNA, 122 bp, Homo sapiens
catcataatcgatgtattcaattgagttgttttagcaatcaatgtatatcactgcatgatcgatttggcttcagcagtcagcatggaataaggagatggctaaggtaatacaatcagcaatg

SEQ ID NO: 444092 - DNA, 122 bp, Homo sapiens
cagcagatctatccacagccagggaccactccctaaagcccgccgcaggcccagccctcacgctttctcttcgcaatggactttgcagcaaccacgtcggccattggctcagctcggccctc

SEQ ID NO: 444093 - DNA, 122 bp, Homo sapiens
tttttaaagtccacttccaagtcaaaggttgttaggggctgttagctctcatttgggagccggagttcttactgtaattgttcatgagctcatggaaatagaggggtttagtttgtctgttt

SEQ ID NO: 444094 - DNA, 122 bp, Homo sapiens
cgctctcaggtccatgtgagtcgtgcttttgttctatttgctgtggtgatcgtggcggtccgggagagtgggtcgggaggactgggcggctgtcgggtggaaccggagacctggctcgtttc

SEQ ID NO: 444095 - DNA, 122 bp, Homo sapiens
gataacaatgcaccaccgaggaggtggggagggataggaaaaatgaaaagagaaaatcagcgcatgcgtactctgatttgggaagactccaaagagaaaatcagagcatgcgtactctgaac

SEQ ID NO: 444096 - DNA, 122 bp, Homo sapiens
tcgccgcagctgactatatccccactgtcgaggacatcctgcgctcccgggacatgaccacgggcattgtggagaacaagttcaccttcaaggagctcaccttcaagatggtggacgtgggg

SEQ ID NO: 444097 - DNA, 122 bp, Homo sapiens
tccctggacacctctatgttctaagggtcgcggagccccccttcctggcaaagtgctgcgcggtcacagctggggcgaggggagcggaggtgtcggggcgctcctggaggatctgggctact

SEQ ID NO: 444098 - DNA, 122 bp, Homo sapiens
gattgtgtgtagttctctgaaggaaggtgccacctctctctccacctctgtttgaaccaccgcctacttcttgcctgttctctgtaaaccctgcaaggacaaatgcccccataaaagctctt

SEQ ID NO: 444099 - DNA, 122 bp, Homo sapiens
tgaggcaggcggatcatctgaggttgagttccaggccagcctgaccaacatggagaaacccggtctctactaataacacaaaattagccagaactggtggtgcatgtctgtaatcccagctg

SEQ ID NO: 444100 - DNA, 122 bp, Homo sapiens
tcctgagtttatatgagaaatgagagaaactgtctacctggagatgagtcagcaggtaggcggggtggggagctaacaaaagggctattgtgtcctctagagtcactgggtgcccataacaa

SEQ ID NO: 444101 - DNA, 122 bp, Homo sapiens
aataacagacgccgggcggcagtgcagctgttcccgcagctgtggtttatttactaacagcgcataggtctttgtgtgccacagcccccagtgcctagaatagggcctagcagaaccagtgc

SEQ ID NO: 444102 - DNA, 122 bp, Homo sapiens
acataccaaagacctggcactagtttagatactcagcgaatggatataaacacctgcttacgacaccctctggattgctagtctcccgagtcaaccgtactgcacgtgcagttcagaccccg

SEQ ID NO: 444103 - DNA, 122 bp, Homo sapiens
aaggcactcttccctcgattctgtcctctgtgattttttccctactgaaggttaagaaaccgagggtcagagaagacgagtgactggcccaggatgacgcggctatgaggttgtcaagcagg

SEQ ID NO: 444104 - DNA, 122 bp, Homo sapiens
aaaacgtgaagaaaatgtctctttggcctccctgatctacgcttttaatatttcttttaacgttgctcttttcttccaggaatctagcaccatgtgctgggttctgtattagttatgtattg

SEQ ID NO: 444105 - DNA, 122 bp, Homo sapiens
aatgaaaattgttcacgtttcaagatggcaagagcagagcactaaactaagtctagggcccgactgagcacagcacacccacgaagccagccttgggtgggagatcagaggagggagccaca

SEQ ID NO: 444106 - DNA, 122 bp, Homo sapiens
aacagcttccagcactgcaccacccatgaagtcaactggaaatattttgctagggcctaacggtgtgtttattgaaaaggcacagctttcaagagaaagtgtttatagcaaccactttacct

SEQ ID NO: 444107 - DNA, 122 bp, Homo sapiens
aagtaaaactttcttgatattactctatctttccccaggaggactgcattacaacaaattcggacacctgtggcctctcccttctatgcaaagcaaaaagccagcagcagccccaagctgat

SEQ ID NO: 444108 - DNA, 122 bp, Homo sapiens
taaactgtgtgaggctctgtaccaaattataccaatggtgacttcctaatcactggattacggctaaacgtgtgtccctacttaagagctccagggtggcttcctgattttcccacctttct

SEQ ID NO: 444109 - DNA, 122 bp, Homo sapiens
atctcgctcccgcgtggctggaaagtcggacttcagggccgcagtctgccttcttggccgcgagaggcacttcccttgcccactccccaggctggctggagtccacagggcgccacgaccgt

SEQ ID NO: 444110 - DNA, 122 bp, Homo sapiens
accaatgatatgaaaaaccatcgttgtatttcaactacaagaacactaatgaccccaacacgcaaaaccaactcgttaataaaattaattaaccactcatttattgatctccccactccatc

SEQ ID NO: 444111 - DNA, 122 bp, Homo sapiens
ccttttgcacacgtaaatatcacaaagtaaacttttaaaataaggcaaggcctagggcctcgcgaggcttctctgaggagcgaggaccagtcagtcacagccagtttccactgcctccacgc

SEQ ID NO: 444112 - DNA, 122 bp, Homo sapiens
ctggagtaaagtagcatgattttggctcactgcaacctcactgaaccccccaggttcatgcggttctcctgcctcagcctccggagtagctgggattataaggcgctcaccaccacgcccag

SEQ ID NO: 444113 - DNA, 122 bp, Homo sapiens
acgaggggcgggggcggacggcgggggagatcctagctggcggagaccgacggatggggccgccctaacctcaatgaggctcacgggtgagtcactgggaacattcctcgccgctcgcacgt

SEQ ID NO: 444114 - DNA, 122 bp, Homo sapiens
tgtctgtgtctccttccctctcccctgcccacctcactccatcctggatagatccctccccggaagactctatctgcccacccctcagtgactagctcttctggaagaggggcatttccctc

SEQ ID NO: 444115 - DNA, 122 bp, Homo sapiens
catcatctgccctatagcacacttgaccccattgtataagaactaagtgttggctgggcgcggtggctcacacctataatccaagcactttgggaggctgaggtgggcgaatcacgaagtca

SEQ ID NO: 444116 - DNA, 122 bp, Homo sapiens
taccccattggttcacagtcgctttaccatatacagtcagatctgcaggccagccgtgttcggtactgaccgccagaacttttgtcgacaacacgtccctggtccccactggccccctcatt

SEQ ID NO: 444117 - DNA, 122 bp, Homo sapiens
ggctggtgaacaggaagagcacagaatctctgtggggcgatgctgcagcggctgaaaccacgtcaagtcccccagagcccggcattctatgtaagcatccacctgtgacgccgtggagcagg

SEQ ID NO: 444118 - DNA, 122 bp, Homo sapiens
aaaaaaaattagtaaaaatacattttcaaagaatcttcacatttaaaaattaaagctaggcgcctgtaatcccagaactttgggaggccgaggcgggtggatcacctgaggtcaggagttcg

SEQ ID NO: 444119 - DNA, 122 bp, Homo sapiens
agaacacactcagcaggtctgacctgcaggcaggctcagccacttcccaggagcttccttcggactaaagggcatgcctacctcttcagggggcgcccaggccctggtaactgcatcaagca

SEQ ID NO: 444120 - DNA, 122 bp, Homo sapiens
gaaggctgggcagctcgctggctggctcttgagacggacgtcttacaggagacctgggcgcgggctcctgataaggatcaagcctgtcgtggccaattgaggcttttttcaaagtgatcctg

SEQ ID NO: 444121 - DNA, 122 bp, Homo sapiens
gcaagtgaggactagtcaccaaggtggtgtcaggctgattcatccactgaagccctgggccgggaggctttcctctaagatctgtgggaactgcgcagggccctcctcaatctaggcctcag

SEQ ID NO: 444122 - DNA, 122 bp, Homo sapiens
tggaatgtcttcaccagatgtttactcgagaacttgcaatctcagtcttcaacatgtgagcgcattttaagagcagtattttagatcggaacccaattaatgattttttttcttttttaaaa

SEQ ID NO: 444123 - DNA, 122 bp, Homo sapiens
ttaaccgcgccccaccccgcctctgccctgacgcggctcgggcgggctgcgggaggcgagcgctgtcactcgacgagccccccgcccccacctacccggggcgcactagccgctgggcgcgg

SEQ ID NO: 444124 - DNA, 122 bp, Homo sapiens
tattctttaacagtatgtatttgatacagagcctggtgccccaagaatatgtgttcatgacggaatgaatgattgagtgaatgaatcaatttagacaagtaggtgtagactttccatggtca

SEQ ID NO: 444125 - DNA, 122 bp, Homo sapiens
agcatgccagaccacagaccaaggtctcagcttccctctggaactccactacaagcagatcgtatcggtgagtgcttaaacacagtggcatgaatagagcagcccactgtctcattacttta

SEQ ID NO: 444126 - DNA, 122 bp, Homo sapiens
gcaggggcagccggggcgcagtcctgcggggcgcgcaccacgtgcttttcagccaatcgccgcggccgcttgattcaaagtgaactcctcaaagcagcagccacgccgcctcctctcctagc

SEQ ID NO: 444127 - DNA, 122 bp, Homo sapiens
tcacgtggggctgggcttgtgagggtgccaccagccctccaggtctcaccggccacaccgcggttcggcatttcagttggggtcggtaacacgcagaagtaaaggaactgaggcatgcaaag

SEQ ID NO: 444128 - DNA, 122 bp, Homo sapiens
gatgctgggtgtgtgacctcagccatggaagggccacctgccaccggggggctgggccgtcgggcctttggttgtggagggaaaagagtggccacttgctggagctgggaacgtgcagtgat

SEQ ID NO: 444129 - DNA, 122 bp, Homo sapiens
ggtcactggaccgtgctttacgtggcacggcaggttggcacgctacgcagatgcccttttcgttaacatttccgcttgccagttgctccgggttttaatcctgggctggatgcagaagtgat

SEQ ID NO: 444130 - DNA, 122 bp, Homo sapiens
gatctacgactgggtaacttataaagaacagaatttattcctcataactgtggaggcaggcggttcaagatctaggtgctggcagggtagggcccggctctgcttccaagatggcgccttga

SEQ ID NO: 444131 - DNA, 122 bp, Homo sapiens
ctttcatttcaaactgttgatcctgggagtctctggccttgtatttatgacttatcaattcggtacacaaccacttttccctctcaaagggtgaaatgctaagattattgcaaaatggccct

SEQ ID NO: 444132 - DNA, 122 bp, Homo sapiens
cttctgagggagctgcagggatttcccgatttcctgcgtgcctgtgttaaaagttagaagcgggatctgctggcagcttcgaaactgagcatgacggtggaaacatctaattttattagttt

SEQ ID NO: 444133 - DNA, 122 bp, Homo sapiens
ccggatcccggcgcttggaaaagcccactctgtgtcttggcactcgggccttacagctgccggggactggctgcgtgaggtcctggggctggcgtggctgcggccgggtgggtgggtggggg

SEQ ID NO: 444134 - DNA, 122 bp, Homo sapiens
cacttcttctgcctgctgccagatgactctcacatgtgaatccttatttcctcaggaatgcggatcagggtttggcaagtatgttttcagtaaataattgctgaatgttcaacgcttaaagg

SEQ ID NO: 444135 - DNA, 122 bp, Homo sapiens
tttgccgctgacgctagtggagagctcttctcgccttcaccttcctggtggctgtctcgccgggactgtgccgctggtgacctggggggtgttaattacctaacacttttcaaggggaaaat

SEQ ID NO: 444136 - DNA, 122 bp, Homo sapiens
gaaaggagcattggtggcggctgctgggaagacacggggaatggaacgggcctttgcttccgcagcacaaagcgtcacgaggtggggaggaggaaaggccggcgactatctacaccgccgcc

SEQ ID NO: 444137 - DNA, 122 bp, Homo sapiens
gggtctccagggtccactccctggcattcctggagggctctagtgaaagcgtgattatcccgggcagccttcagcagtggaacagcagggaacgccagggttaggaaaagccgtgggaggga

SEQ ID NO: 444138 - DNA, 122 bp, Homo sapiens
tcctcgccttttcgggatggctgggaggggcgggaagaggcgctgaagggcccgaggcaccggccttctacaaggggctcttcgaaatcaatcaatgcgcagaatcccgagggaggctcagc

SEQ ID NO: 444139 - DNA, 122 bp, Homo sapiens
ccagcagagccaacatgcctccccacagcgctacatctccgagccctacttggccctgcacgaagactcccacgcctcagactgtggtgaggaggagacgctcactttcgaagcagccgtgg

SEQ ID NO: 444140 - DNA, 122 bp, Homo sapiens
tgtgatctgcccgccttggtctcccaaaatgctgggattacaggcatgagccaccactcccggccagccaacttactttcaacaaaggcaccaagtacacacactggggaaaggacactctc

SEQ ID NO: 444141 - DNA, 122 bp, Homo sapiens
cgcatcctggctaaggtgcaggagatgcgggaccagcgcgtgtccctggagcagcagctgcgtgagcttatccagaaagatgacatcactgcctcgctggtcaccacagaccactcagagat

SEQ ID NO: 444142 - DNA, 122 bp, Homo sapiens
tcttggcctctagttgctacagaaaggcggctgctgcacctctgtaagtttgaaaccattcgctccgcaccccaaatgtcctctggcccttgctgaagcttcatttctttttctcctgaggg

SEQ ID NO: 444143 - DNA, 122 bp, Homo sapiens
ttgttcaacataggacttggaggggagaacaaatgcaaattaacataacaataaatcccccgccatgaatggaaaatgccgtccaggcagcagggcaagcagagaggtccccaaaacaatca

SEQ ID NO: 444144 - DNA, 122 bp, Homo sapiens
catcctgggcagcaactgtacagttacctagctttctcttctccaagcagtagagctgcccggaaaaagccaggcagaagtgctatggggcaggctcgggcaccccagattagggctccaga

SEQ ID NO: 444145 - DNA, 122 bp, Homo sapiens
cgcctttctgagccgccgggcgagggtcccgcagcccgccgctcacccacagccgcaccgcggatccagctccggtccttgttcccggggcggctaccgacaacccctatttccgggtccag

SEQ ID NO: 444146 - DNA, 122 bp, Homo sapiens
cgcggcacttcggattttcagcacatgggccctcagcgtcccctcccccgccacgcccgtcgactttctgggagttgtagtccaagtgtaaaacggaagctcaaccacgaatcttacctctc

SEQ ID NO: 444147 - DNA, 122 bp, Homo sapiens
gggcggggagcccgaagccgggaattccgcagttaccgagagtttcgaggagatgatgggcgtggaggtgggacagggggaccaaaccaccctcctgctccccgaggccgcactgccagcga

SEQ ID NO: 444148 - DNA, 122 bp, Homo sapiens
acattttcatgtttcggatgttgtccacctgacttgatgcatattcaaatgtctctctcccgacgtgggaggccggagtcagaacctgacagacctgccgtttactaactgggtacccaggg

SEQ ID NO: 444149 - DNA, 122 bp, Homo sapiens
cagtctgcagccagcggccccacaagtccgcgctcttcgcccaggggggcggggcaggggcggggagtcgcctgccaatctttcagccacacccaacatggaggcttctcgtcttcccactg

SEQ ID NO: 444150 - DNA, 122 bp, Homo sapiens
cccgtgtctgcatatctgagtggtcagtcaatgattagtcggagcttatgctcaaacacccgaagccagtaagagagctgttcaaagttccatcctttttccagtcaaccccagctcttact

SEQ ID NO: 444151 - DNA, 122 bp, Homo sapiens
gttgagtcaggacctgcagccccgtgtcccggcgccagccaggtgacgggtgcctgcttccgttggcactgaaagtaaacgcttgttgagagccttcccacttgatattttccttagaatct

SEQ ID NO: 444152 - DNA, 122 bp, Homo sapiens
catttccatccatattccttttcttaaagactacctagaagactaacaagcgtggccaggcgtggtggctcacgcccataatcccagcactttgggaagccaaggcaggcagatcacttgag

SEQ ID NO: 444153 - DNA, 122 bp, Homo sapiens
ttcacaggaaacaaaaccgaaggcagggtttggctcctggtcacgtgacaacaaagggctcgtgctgggacctgggaccacctcaggctcagaggaaaggcatgtcccagacccgttccatt

SEQ ID NO: 444154 - DNA, 122 bp, Homo sapiens
tcttgctttacgagcagtcagccagtatcgactgaacacaataaatgcaggggtgcgaaacgtgattgctcgggttcgagttctgtcggatgcaccgatctaagcagaacctttcccgaaga

SEQ ID NO: 444155 - DNA, 122 bp, Homo sapiens
agacacgagggccgctgcctcccgccgcgttcctggcgcccgctcctgccaaggtgcctgcgggccgagccctcctgaccagaaaacccgaccaggtggctccgcgcccggggcgccctctg

SEQ ID NO: 444156 - DNA, 122 bp, Homo sapiens
ctaccaccctaaaataagaaaaaaattgttttttgacagttaggctcactcagtctaaaccgcagcccccgaaattgggaggaaaacagctgtgctgaattaactagggatctggggccgac

SEQ ID NO: 444157 - DNA, 122 bp, Homo sapiens
attcctctctcctttttgctttttgccaactagctgtttctccacagcggagatctgagacgagtatgtggctgattcgggcaaaacaaaacaaaataaaaccaaacgaaaccaaaacagac

SEQ ID NO: 444158 - DNA, 122 bp, Homo sapiens
gtggagtccacaagacaggcggcagcttcaaggccggcaagttccgcgtctggggggctgcgggccgcccctgcgggaccggggggatctgggcgggacagggcggcccggcccacgccccg

SEQ ID NO: 444159 - DNA, 122 bp, Homo sapiens
tgaacactgcaataatcaataaaatgagaagaaccaataggaaggttaaaaactggatgacggaattggaacataaaactggagaggcccacctaggttaattgtataggggcaaatatagt

SEQ ID NO: 444160 - DNA, 122 bp, Homo sapiens
aaagattttcctagagcatggcctatgacgtcaaggatccaggtagcgcccggaggaaagcgccaaaggaggccgccatctttcatacagcagcccggaattttgcgcatgcgcctctgatt

SEQ ID NO: 444161 - DNA, 122 bp, Homo sapiens
gcattctcttgccctgcctcgacaaacactttgccacatgtgggtgaatgagagggcagacgccaatgggttaggattctgagacccctgtgtccctgtggggtttggagcaagagactggt

SEQ ID NO: 444162 - DNA, 122 bp, Homo sapiens
tctgtgggaatcgatttgactgaatttgcagtgggttcagattccttcagcagagacttccgggctgctcccaaactcattctgctctggccttgaaggggactcttgactcgtggcttcct

SEQ ID NO: 444163 - DNA, 122 bp, Homo sapiens
tgtccgtgcttacccggccggccggccaggctctggagcacgtgacccgagaggaggctgcggctcaaggccattttcaaatctcattggcttggttgtcatgtggtcggcagaggcatcca

SEQ ID NO: 444164 - DNA, 122 bp, Homo sapiens
agccactgtgggccaggctcagggcagggcaggcgattccagtggggttgggccccctggcgcctgctgcttactgcagtttcatgcaggcctctgctccttgtctttcttacctgtaaaat

SEQ ID NO: 444165 - DNA, 122 bp, Homo sapiens
agcggaagagcccggccggcggcgctggttgtgaagatggagcgccggcagtcacgcagccgggggaggctgcagattacattttcaggcctcccgggcttttgttctgttgaaagggacaa

SEQ ID NO: 444166 - DNA, 122 bp, Homo sapiens
tcggttttgcacaccccgctttccagcgcggagtcgcggcgggtagggcggcgtcgcgtgcgtgacgtcatccagcggcgcctcgcgaggctccagtggccttgacctcccgcggcgtggga

SEQ ID NO: 444167 - DNA, 122 bp, Homo sapiens
gggcacaggcgcttgcgcagtagggtggccgctcccggccgcgtgcagcgcgaacgtcggcgcaggcgccaaggctctggcagttggccagcacaccactacgcatgtgtgtcaactctagg

SEQ ID NO: 444168 - DNA, 122 bp, Homo sapiens
tccctctgtgtatttattgaagagaaccgcttggtttcaggaagctgggcgcgggatatccgaagtgtggaggaaacagacaagtcagggtacagaggtgggggttgggcaggggcgcaggg

SEQ ID NO: 444169 - DNA, 122 bp, Homo sapiens
gggccagccggggacggaaaaagtgagtgcgcggcggcgcggggcggcctgacgggaaggcgggaggcgaagtgctgactgcgccgcggtctctcagccgccaacacaccgcggacgcccgg

SEQ ID NO: 444170 - DNA, 122 bp, Homo sapiens
ctcggtgacatcctgcggactgaccgtcgacaagatcccggaggggctgcaagcaggctgcgaggctggctgggcaccatccacccccaagccctgcgccagcttctcctcatcctctggcg

SEQ ID NO: 444171 - DNA, 122 bp, Homo sapiens
tgtgtctggagctcagtctctctgggtgtctgttcctgagtgtcagtgggttcctgcccacgtgtgtgtgcagctctgccatcgtctttgacacagaggtaggaaccccactgggtgcctgg

SEQ ID NO: 444172 - DNA, 122 bp, Homo sapiens
gatacggtccttaatattccaagggggagaggttgaccctcctcccaatagcacagaaagcgtgcaccaccccagggatattgttcccatgatccaggagagaagaggatgatgttactttc

SEQ ID NO: 444173 - DNA, 122 bp, Homo sapiens
agaaagagagagagtccagagattgagcttaattcccaagagagctgcagagcttcctcccgagccgattagaaagccgcggtctggaaatcccacgggcaaggcgataatccggggccagc

SEQ ID NO: 444174 - DNA, 122 bp, Homo sapiens
gaattgtgttgggagcccagacacccatagtataagggaactcttcagcattatgtctcacgaaacttagatcagtgtgtggtcttgatttaaatccatgtaaccaagggtttctatttatg

SEQ ID NO: 444175 - DNA, 122 bp, Homo sapiens
ttgctcgccttcctctttcagaagactcgaaatcggccagcaggtctgcgagatttgaaacgcgactgttactccttgttttccggttctggccgcgggagcctctcgagaagcgtggaaag

SEQ ID NO: 444176 - DNA, 122 bp, Homo sapiens
aagctcgcttccggggttattttctcagagaaagcacaactcagggtgcctgatctctgccgagacgcacgccagcggctgctcacctgccggagacagctcagtgaccgcccagggaaccg

SEQ ID NO: 444177 - DNA, 122 bp, Homo sapiens
ttctcccacctcagagccacctgttaagtcaacaaaggctggctggggctggctggtgcccgccttccctgcaggtaggtcctggacagcagctctggagttggcactgtcctgactggcat

SEQ ID NO: 444178 - DNA, 122 bp, Homo sapiens
gacagggtgtggccagtgcaccaagcagaacggccaggcaagctgcgcccagacacatgtcggagtctcgtgtggccactgggtccgcctcggctggaatctgccatccttctcccaccaca

SEQ ID NO: 444179 - DNA, 122 bp, Homo sapiens
cggcgcctcccggaacccggccggttagtggcggcttcgaggccatagtgagacatgagccggagtagccatagtaagtgagggcagcctggcagcggcattaatcggggagtggatagctt

SEQ ID NO: 444180 - DNA, 122 bp, Homo sapiens
caaggtgcgtccacgcctggtttaggcataaatcagggcagaagtgtctgtttgtgtgcacgggcgcgtgtggcttctccctggccttcaacaaaacagaaccaaaattcatcctttctctc

SEQ ID NO: 444181 - DNA, 122 bp, Homo sapiens
agaggttttgcccaggcagggcctaaaatggatgggtcacagggcatattaacaaatccacgtttaacagaaggtggccaagagaaggtacctcatgcaaaagtcaaagaggcggtctcctt

SEQ ID NO: 444182 - DNA, 122 bp, Homo sapiens
gtagcccgtgcacaaccaacgaccaccacgcagggaggaaacctggtcttagtgtttggccgcgctagtggaatcttctgggcgcctggtacgttcttgtccccagcactctgtccttccac

SEQ ID NO: 444183 - DNA, 122 bp, Homo sapiens
caggacaggtgcttccaggctccattaggggtgtccagcgccttcttttgccctaggcagcgccctgaagaacgcgtcggggcctcggttcgcggacttgaggagtggaccgaccgagcgct

SEQ ID NO: 444184 - DNA, 122 bp, Homo sapiens
gttcactaatcgcaaccagccccaccgcgggagacggggagagccctggctgctgcaggccggcacctgggtagatgttaccttttcccgcacagggtcagtccacagacgtgcaccagcac

SEQ ID NO: 444185 - DNA, 122 bp, Homo sapiens
ccctgccgcaccggccattccccccacgagcccagacttcctggaagagctggggtcctgcgtgccacctgctccgcctccttcggcctgcaatggttcattctgtgtcagcttggccaggc

SEQ ID NO: 444186 - DNA, 122 bp, Homo sapiens
aagacaatctctgctccttctctcatcccacaggctttacccgttccctaactcccaccgcgttcatcctgtgaacactcctttagtgatgaccttgtgccaggcttgcactgcctctggga

SEQ ID NO: 444187 - DNA, 122 bp, Homo sapiens
agggccgggctggggaagacgcctggggcactgcccggcgttaacaaagggagccgataccgaccggcgtgggcgcggagcgggcggccgccaccgagcgtgctgagcaaccgcagcctccg

SEQ ID NO: 444188 - DNA, 122 bp, Homo sapiens
acctcaggcgatctacccgccttggcctctcaaagtgttgggattacaggcgtgagccaccgcgcctgacttgttaactgtgttcacaggagcattattgacagtagacaaaaggtggaagc

SEQ ID NO: 444189 - DNA, 122 bp, Homo sapiens
tgacgcctcggcctctgggtggctttaaaaccctgtgccaatagtagactgggtgctgagcgcttcccaaattccatccccttaaatactcacaaagcagtaggaaagagatagggaccctt

SEQ ID NO: 444190 - DNA, 122 bp, Homo sapiens
ttgctgtcggcagagggatccgtgttggaatccggggtgcgcgggccctcaaggttgccccggatggcgggtgacagtgctgtggggctttgccctgtggcttccgccgtcggcacacaagg

SEQ ID NO: 444191 - DNA, 122 bp, Homo sapiens
ggaacccgcagggatggagcagcaccgccgcctgactgcacagaagggctggggcagggtcgctgtgcctctcggcctccttgctgccaccgtctctgagcctcggggcgcctggtgcaccg

SEQ ID NO: 444192 - DNA, 122 bp, Homo sapiens
ctctctaggagttgcagtccccaaagtgatcaatccagctagtgaaatcactgtatcacacggagacaagacaacggcggccttcaggaggagaccatcgcttctcctggcggcaaggctcg

SEQ ID NO: 444193 - DNA, 122 bp, Homo sapiens
agtgtgctaaaccgggtttgcgtaggtggaaggggcggccgggctctttaaggtgggtcccgccccgtaggcctcccctcgcgccagcccctcccatcccggaaaggctcagcccaagcccg

SEQ ID NO: 444194 - DNA, 122 bp, Homo sapiens
tttgtcaggtgtagagtccaggcccggggaagagaggcagtcaacagaggccagaaaggacgttgctatggtttccacgcacgttgtctccctcggcctgtttctttgcgcggcgctggcga

SEQ ID NO: 444195 - DNA, 122 bp, Homo sapiens
gaggggaaggcggaggcgcggggagcgtgtttggggcgccgcggcggggagggtggcggccgctggtgcgcgcggggcgctgtgtatgcgcgctcccccgctcggggaggaagatggcccaa

SEQ ID NO: 444196 - DNA, 122 bp, Homo sapiens
attgcagggatgaggaaattgaggccctgaggtcgaagaggagctggtaagcgatgatgccgagataggccccggatcgcctggctctaaatccccagcccgggccccgacacacagtccca

SEQ ID NO: 444197 - DNA, 122 bp, Homo sapiens
tgtgcggatactgtgtgcgcccgtagatgcgtgtatttatacatacatttaatttatgtacgccccctcccacaaatctcttttcattttccccaggaggagacactttaaatgccccagga

SEQ ID NO: 444198 - DNA, 122 bp, Homo sapiens
tggacattctctgggaggtggggcataccatagcccaaggtgacatttcccaccctgtgccgtgttccccaataaaaacaaattcacaagagttggttcatgttctttattgaacaccttac

SEQ ID NO: 444199 - DNA, 122 bp, Homo sapiens
agataaaggaggaggcggtggcgggcgagggggtggagtgcgaggcggagggaagaggggcgagttccccaggctgcgagagccagcggcttcagatctgccaaggcactgaggggcgcgcc

SEQ ID NO: 444200 - DNA, 122 bp, Homo sapiens
caaggagtcagagtggacctgtggctctcccctgagaggataccaggattcgaggctcagcgccctgggaggagtgaacccctcagtttcctgagcctcatcagaagcagtctggggaggct

SEQ ID NO: 444201 - DNA, 122 bp, Homo sapiens
agctgtgacactcaaaaaattccacacacagactctggcaagcacctaggggtgactcggcgccatggtctggaagttgctctccccccagaattcatcagttgaaacccccactgcaatgg

SEQ ID NO: 444202 - DNA, 122 bp, Homo sapiens
caatgtgcagccatggggtaagcacaggagctgcatgccctccgctggagtgaaaagcatcgtcagtatttgctccctggggcttgccagctccccttctctggcttctgactgttgggttc

SEQ ID NO: 444203 - DNA, 122 bp, Homo sapiens
gccctaaccccagcctttgttttccatttccctcagatgtgacaagccgaggcggtgagccgggcaggaggaaggagcctccctcagggtttcgggaaccagatctctcaccaggaaagact

SEQ ID NO: 444204 - DNA, 122 bp, Homo sapiens
tcacccacaggaagctcgggttgggggcaggcgaagagggaggtgccacgctgggctccccgccctgcaccggcactgaccccgctgtaccacggccctcttgcggacagccccggggacgt

SEQ ID NO: 444205 - DNA, 122 bp, Homo sapiens
caagtgttccatccaattctctgtctctgcagtatctctgatactgtgtgtgtctatcgccgtcatcgatgctgatgcactgtacagcaaggccaccatcatccctgtgtacttactgagat

SEQ ID NO: 444206 - DNA, 122 bp, Homo sapiens
agagggcaaggtgtgactcaaccaactttatccagtgcaagcactttgtaggattagctccgagagccctatggggtaggcacagctgtcactgttttagagatgagaaaattgaggtgcaa

SEQ ID NO: 444207 - DNA, 122 bp, Homo sapiens
aattctgtcactgacaaggtagcaaagccatagcctgatactcctcaggacacctcatcacgcccactgggaacatggcacacactggagattccagtccaaggactttggaatgtcaactt

SEQ ID NO: 444208 - DNA, 122 bp, Homo sapiens
taccgtgaggccttcctgcaaagaagtgccaatctcaggcgccagggcacagacccagtgcgtgtcacagatcctgtcctgagtgctaggccgggtgacgcccccaccaggattaaagatca

SEQ ID NO: 444209 - DNA, 122 bp, Homo sapiens
cccgtgatctcgaggacaggtcggcctgcgtgtcgctgggctgctttctcacccgagggtcgttgtcgtcgagagcagaaccgcacagcctcaggagttgcgtgggggtgtgtgcttctgtg

SEQ ID NO: 444210 - DNA, 122 bp, Homo sapiens
taggattacaggcatgagccaccacgcctggcctaaagcactcttaaaactcaataatgacgaatgtctcacgggattacagggaaaaaaacctcaataaaaatattaatatccaattaaaa

SEQ ID NO: 444211 - DNA, 122 bp, Homo sapiens
agagtcacattcctggatgaaaaattgccctccattggcatgtgccatcatagaataggtcgtggaaggaccgtttggttctaggaggaagagagaccagtaaaaataagcaccctttctct

SEQ ID NO: 444212 - DNA, 122 bp, Homo sapiens
ggctggaacaggccgtagttcaggacatctttcaaactctgggttaatgtacacaggatccgctgctttgcaacccacactgtggcatccgggttaaatcgaatgcatttctgccaggaagg

SEQ ID NO: 444213 - DNA, 122 bp, Homo sapiens
ctcctgggctcaagctatcctcccacctcagcctcccgagtagctgggactacaggtgtgcgcaaccatgcccggctagtttctgaatgttttgtggagatggggtcccactatgttgccca

SEQ ID NO: 444214 - DNA, 122 bp, Homo sapiens
gggtacagatggcagacaggttctctgtgccctcaggcccctccacaccatctccatgcacgatccccactgatgcctggaatctcactgtgggaaccatctctccagcaaaacactcttcc

SEQ ID NO: 444215 - DNA, 122 bp, Homo sapiens
gcaagtttatggaaaattattgagcccactcttttcatgaccactgttcgttgtgtgtcccgagcgcactaactcagagtgtcctttgaccccttcatcagtgtgtcacccggccaattcgc

SEQ ID NO: 444216 - DNA, 122 bp, Homo sapiens
ctgcttcttccctctcgcgggtaggaactttgagccccgcctctcggctcgtccaagctccgccttccccgtccacctgtgtgcccagcccctgacgttaccggtcggcttcagcggcctgc

SEQ ID NO: 444217 - DNA, 122 bp, Homo sapiens
gggctcgtacccgcctccaatctgctcacctgttcgttccaaccgtgcagctggctgtagcgcaccctgcagaagaggaacccgtccaggtgcacggagtacagctgcaaacacacagacac

SEQ ID NO: 444218 - DNA, 122 bp, Homo sapiens
agccacttgcagacttgggtcttcacaaatcagcagaatgaatgacatctggggacacctcgtcaccactcccccgaggtctcccttcccaaggatcccaggctcctcacactgtccatgca

SEQ ID NO: 444219 - DNA, 122 bp, Homo sapiens
ttaggcttcctggcgcagcctctatccaggaactctgtcccatagctgtactgcccaggtcgagctttctaaccccaagatgccactccgttcagacgttcccatcctccatccctgagacc

SEQ ID NO: 444220 - DNA, 122 bp, Homo sapiens
gggtcgtcgcccccgggattcatcttccgggccgtggctggcgcggcccgtgccgctgtccgcccctccccgcgcgctcctgccccgcgccccggctacccgtgagaccccgcggggccgcg

SEQ ID NO: 444221 - DNA, 122 bp, Homo sapiens
ggcagtgcttgtggtgggggttatttgcagcgttaccatggcaggctgccctttccaccacggccaccccgtgattttctctgaaaactgcgacagactcgcagcctgccctgaattttctt

SEQ ID NO: 444222 - DNA, 122 bp, Homo sapiens
cagttcaggctgcatataagaattgcctggctccatttcaaaccaattgaactcaactctcgggaggtggaggccaagcctgggtattttttattttttcaatatttatttatttatttttg

SEQ ID NO: 444223 - DNA, 122 bp, Homo sapiens
aggcccttccccactgattaataactagttcatcattatcatcatcatcatagtcattctcgttattgaggaatggccttggccttgtgccaagaaacatggatctgcactgtcccaagtaa

SEQ ID NO: 444224 - DNA, 122 bp, Homo sapiens
cagttgctactttactggcttgaagacattttgtttcactcccaattgacacaaacctggcggttactgtcagactctgcaagttaaaggctcacttctccacagaactacccttacttcag

SEQ ID NO: 444225 - DNA, 122 bp, Homo sapiens
gagaagccccaagggctccacgcgttcccctccaggacccctcctggggaccccgagccgcggcctggaaagcccatcgtgtttgcatcatcacctagaaatggtgggaagtcgggtcaaga

SEQ ID NO: 444226 - DNA, 122 bp, Homo sapiens
aagaatagaaaagaaccactttctaggacacttcaaataaggacatttttgtctggactccgttcttttgacgcctgtctccattagactcctccaacagggtgtcaggtcaggcaggtgtg

SEQ ID NO: 444227 - DNA, 122 bp, Homo sapiens
cagctgaactaaaactttggaccagcctgtttcactccaaagcctttggggctcaagcttcgcatggtacaatcctctgagtctgagtcactggtgagtcacttttggaagttgacaagacc

SEQ ID NO: 444228 - DNA, 122 bp, Homo sapiens
acagaatgagttgaaaacatcagctatgaggtcagactccctggattggaatcaggaacccggccgtttcctcctctgccaaatggggtttgggacagtaaccaacccctccgccccgtcga

SEQ ID NO: 444229 - DNA, 122 bp, Homo sapiens
cgctgactgggtgcgagtggggaagctgctaacccgacccggattggcgctgaggtggcccgtggggcaggtgagtgcggggcgggagtcagcggagacccaccggcgcctacaagttcccc

SEQ ID NO: 444230 - DNA, 122 bp, Homo sapiens
gcaagctagtacaataattggccaataaagcaagccttacccaatgatccttatcctaggcggggcctaatgggaacgtatggccaatcagcggcggcgtttcttttgcggctccacgtcgg

SEQ ID NO: 444231 - DNA, 122 bp, Homo sapiens
agctcaaacaatgtctgcctatgcaggccagactcagtattcggggatgcagcagccagccgtctacacagcctactcacagacaggacagccctacagcttgcccacttacggtatttcac

SEQ ID NO: 444232 - DNA, 122 bp, Homo sapiens
tcagcctgcgaaccctctctccgaggtcggccctctacttgcttccggttgcctagaagccgaggcttgcgaaacgaagcccgatagaaactacatcctgctctagtgaaaaacagcgtttc

SEQ ID NO: 444233 - DNA, 122 bp, Homo sapiens
ggtacggcccgctttggctcggggtgtctgccggagaagcgccttacagagggacccgggcggtgggccctgcggcaaagtggcccacgcaccctccacaccgctcccgggcggccgcacct

SEQ ID NO: 444234 - DNA, 122 bp, Homo sapiens
ataggtataaatattgatgcttatattttagatttactgtagtgaaggaaatttgccagtcgtccatcagtgttaaatgcccaccaatgtgtaaaagaaatagacctaaaatattaataaat

SEQ ID NO: 444235 - DNA, 122 bp, Homo sapiens
cgcggggacagcggggagggccggccgcagcctgccgggctgcccccacggcgcggaacgcgcgcagcaacctccaccaggcctccgcgtctggactcccgccctgcctctgggcctcctcc

SEQ ID NO: 444236 - DNA, 122 bp, Homo sapiens
aggactccaagcatgggcctggccttgcagcaaccctcctggtctgataactgggggagacgcagcgggaacaggccttgagagccacacagggcagggctgatgctctggatttgaaagaa

SEQ ID NO: 444237 - DNA, 122 bp, Homo sapiens
acacgcacacatgcgcgaacacacagacccctcccctcggctggcttcccctccgggcttcggagctcaagtccccggagcccatcccccgggatggacccggtctctcagcttcgcgggtc

SEQ ID NO: 444238 - DNA, 122 bp, Homo sapiens
gcaacggcaacgccattctcaagcaagcgcatcaatatatttagttccggcctctttgcacgtcatttccggcaccggcatggccgggtgagctgcaggctaccttatttaagaccgggaat

SEQ ID NO: 444239 - DNA, 122 bp, Homo sapiens
cccatcactgccaggctgtgatctcccccttgtccccttgtggccatcagcctgaacatccgtgcctcctgcttccccagccccacactgaccccactgggccggggcagccagggtggggc

SEQ ID NO: 444240 - DNA, 122 bp, Homo sapiens
cgggagcaaccctaggagaatgcctagacacacacccaaaaaagcagccaggcagcagaacgcggggtcacacttcgacccctcagagaacgatcgctcccaatcaatactacgtgctcagg

SEQ ID NO: 444241 - DNA, 122 bp, Homo sapiens
catcttcgtgtatgtgcatgcatttgtgtgtgtgtgtgtgtgtgtgtgtgtgtatacgtacgcgtgttgggattaggggtgctctctgatgggctacagagacaataatgagagatatttgg

SEQ ID NO: 444242 - DNA, 122 bp, Homo sapiens
actcttttcccatagtaattaaagaaaatcttactaatttagtcacagcctttctcagcacgatttcccaaacccagttccacaatttaggcaatgtcctgtacttttttgtactttcctgc

SEQ ID NO: 444243 - DNA, 122 bp, Homo sapiens
cccgagagacgcatggaggtgactggtgccctgccctcccccctgcgctctggaacagtgcggggggggggggggcgcctccagagacggacccaaccccgagagacgcatggaggtgactg

SEQ ID NO: 444244 - DNA, 122 bp, Homo sapiens
ccaccccgggctctgaagccaggaaacccaagaggaaatgactgagcccgtctgggtccccgcccgctcgcgctcccctggccacaccctccgcctggacgcagcagccaccgccgcgtccc

SEQ ID NO: 444245 - DNA, 122 bp, Homo sapiens
cctggtcccttgttttctgtcctgtcatttttggtgtgggtgccacaaagaacctccaggcgccctctgcagggactcagtgtccagtcgcttttatttctggcagggctttcccctgcctc

SEQ ID NO: 444246 - DNA, 122 bp, Homo sapiens
ctaatggggtgtcgaactcccccaccccagccctcttcctccactatgggagttaccaaacggctgtcatcctttaaggttctttgcacaggacgcgataacagctgttccagagaaaaggg

SEQ ID NO: 444247 - DNA, 122 bp, Homo sapiens
tggtgtactgttgagggcggctgaaggccagttcctgatagattttctggatacagttgtcgcctatccggggagcgggaggcagccctcagactttggtgctgggagacatccttcagtgt

SEQ ID NO: 444248 - DNA, 122 bp, Homo sapiens
taggctgagcattgggttcaggtgtagtcagactaggcaacaattataaaattccccgtccgtttttcacctaatggtttagttgatcatcactgcctagctctattatttcattaggagtt

SEQ ID NO: 444249 - DNA, 122 bp, Homo sapiens
gaggcccaggcccaacgcctctggtgctgttcccctgcagtcccagccccgcgtggctcgcgctcgtctgtgaggaagacacctccagaccttggggtccccgcgcttcctcttgctcctcg

SEQ ID NO: 444250 - DNA, 122 bp, Homo sapiens
cgcagtccgttttgttctgttagtgctagtcgcagtccgttttgttctgttagtgctagtcgcagtccgttttgttctgccataacagaatacccgagactgggtcatttgtaaggaacaga

SEQ ID NO: 444251 - DNA, 122 bp, Homo sapiens
ttccaatggactgcctccagcctcccccctcggtcagtctgacaagccttctggagccgacgccctgcagtccagtgggaagcactctctggggctagactctctcaacaaaaagcgtctgg

SEQ ID NO: 444252 - DNA, 122 bp, Homo sapiens
ggtgatccgcctgtctcggcctcccaaagtgctaggattacaggcatgagccaccatgcccggccctagtgggtgcaaccttaagcaagacagaggatatttactttcctatatcgatatga

SEQ ID NO: 444253 - DNA, 122 bp, Homo sapiens
agggaagggaattaaggagtgagcagagtgttagcaaaggattccaggaggaggtggcaacgtgaactcaggcacagactgagaaacaactgggggtgggcagtgtttgggtattaactgca

SEQ ID NO: 444254 - DNA, 122 bp, Homo sapiens
ctttctctctactcgcaaggctgaggccagcatgaccttgtcccagcagttccgtcacgacgccctggtttctgcactcagacggccaccctgtgccacgcaggatgggcgcgggagtcaca

SEQ ID NO: 444255 - DNA, 122 bp, Homo sapiens
gtggctgccttctcgggagactcaaattctttggatctgcgcacgattcctgggtcccatcggggatgactggaaacccagtcttgacccatctccaggacctctacagaggcctctcaggg

SEQ ID NO: 444256 - DNA, 122 bp, Homo sapiens
ggccgctccctccgcctattccctccttgctcgagatggatctgcccgtgggccccggcgcggcggggcccagcaacgtcccggccttcctgaccaagctgtggaccctcgtgagcgacccg

SEQ ID NO: 444257 - DNA, 122 bp, Homo sapiens
gcagcggtgggaggcttccgggggagctgcacgggcgacgggtcggcggagacagaaaagcgccggacgccggggtgatcatggacgcttgacaacctgcgggcaggcgccgggaggccgag

SEQ ID NO: 444258 - DNA, 122 bp, Homo sapiens
gcgtcctgttagccctgctcagcctgaataactcaaattctccgaattcgcagggtaatccgcttcgcttggagccgtgtaaactcaggctgacatacacactcaagctgtatatgtaaata

SEQ ID NO: 444259 - DNA, 122 bp, Homo sapiens
cccgcccgggacgcggggcgccgagaggctcggccaggcgggagctgcgctcggggcggccgctgcacctgcccgggaccccgccggccgctccccgcgcccaccccttccgcccttcgccc

SEQ ID NO: 444260 - DNA, 122 bp, Homo sapiens
tagccctgtcttgacaaccgtctttgcttgagcagtgggagtgaaatgcatatcaggaggcgggtcgtacactgggtgagacaaaactcaacacagtagttgaggttgatctcaggatgatg

SEQ ID NO: 444261 - DNA, 122 bp, Homo sapiens
ctccaaaatctttgtcaggagagccatcctgacggtacctttaggaagcccatagatacccgccacaacctgtgactttcagggtcaattgcgtctcaattcgcacgtctatccagaacctg

SEQ ID NO: 444262 - DNA, 122 bp, Homo sapiens
catgtagtagagcaatctttagagtcttctttgcctcttccttttactgtttacatgtatcggaaggttttagtaaaaccttgtataccacagggctctgttttgggtggccttcttttccc

SEQ ID NO: 444263 - DNA, 122 bp, Homo sapiens
ctgggtccgcacctcctcccagggctctgcgtagtgggctgcgtcagaccctggggagtgcgagcaccgtttgagaagcaccaaacacaagcgcatcgtccgcctcttccattcaacacaga

SEQ ID NO: 444264 - DNA, 122 bp, Homo sapiens
attaagtatatagtaattgcaacaacataaattgatgattgaatcttggaaacattatgccgtgcttccattgacagtaaaaagtggcagtaaagatggatattgcaaattatatttgtctt

SEQ ID NO: 444265 - DNA, 122 bp, Homo sapiens
ccaagggtagccgtctgcagggccccagctaagcagcccgcggagagcgagcggcgcgtgcgcccccgctgattggctggcacaaccggcaccggagccaatgggagcacgccttgttgtca

SEQ ID NO: 444266 - DNA, 122 bp, Homo sapiens
tccagatgcttcatgcagagcacagaatacgagtagcgcaaaggcatttcagatgatgtacgtttggttcacatgtagtgagcacctacctgcaaagtgtacagcagtcattgctattcagt

SEQ ID NO: 444267 - DNA, 122 bp, Homo sapiens
ccaaactttctgcggggccccgggaggggtgttccggagggaggctctgctgaggtggttcggggagggggcggggcgccggcgccgggacggggagcggggaccggcggggggaggtgccc

SEQ ID NO: 444268 - DNA, 122 bp, Homo sapiens
aagacccgagattccgtgagtgccaccgcaccttccggttcccgccggaagtttttcaaacgccagaaggtccgcctcgcttcttccggaccaagttagccacagacctccaaggcgcggcg

SEQ ID NO: 444269 - DNA, 122 bp, Homo sapiens
catgagcagtctcatccttcaaacaagtctggtgcacacggtgggacttggctgggctttcgcctccttagatgcagtgcaggcaaacatctctagctggactggagacccccaccttcacc

SEQ ID NO: 444270 - DNA, 122 bp, Homo sapiens
cccacaagagtgattcagagggtgacactacacacgcagccggtttgctgcggaggaacacggggctggggcgtctgctgcttttagagcaggcctgccctttgtccaggagggaggtatcg

SEQ ID NO: 444271 - DNA, 122 bp, Homo sapiens
ccgcgagactcgcgtcctcgctgtccccgaggggccccaccccttcccggttctaacctgcgacctggccagaggcaagggtaggtcgacttcctgcccggaatttgccgttggcttctcct

SEQ ID NO: 444272 - DNA, 122 bp, Homo sapiens
caggtatgcagtgtaaaagcagctaggagattggctggcattagtggctgaagaatgagccgtcctgaacagctggaccagctgtaatcaaatgtgtgaacagctggagctgcttgctttta

SEQ ID NO: 444273 - DNA, 122 bp, Homo sapiens
aaactgatggttttcccacaagataggcactatttggttacaaaacctgacctgatctaacgaggaacaattttctttcttcctttctttttgtttttccttttttggagacagggtcttgc

SEQ ID NO: 444274 - DNA, 122 bp, Homo sapiens
tccttgttttatgggcccagatggcttgtaaatgactcatacatagcagatacaggaaatcgttttgagatgttgaatggagcttgcatcatgctggtaagtaaacataaaaacatggaaag

SEQ ID NO: 444275 - DNA, 122 bp, Homo sapiens
tcatttctcttttgtccacaggattgatgggaaaacgctgagctaggcattcatgatccccgtgacctgaagccaatttatccatctagctaagtcattcattctcctcttcctcagcctct

SEQ ID NO: 444276 - DNA, 122 bp, Homo sapiens
tcccggccgcgtccacgttggtttccttctcgttgtcttggtctctcctgattctgttctcgtgtcagtctgccctgcctctgttactccaaatctctgtggtctctctccctctctacctt

SEQ ID NO: 444277 - DNA, 122 bp, Homo sapiens
tcctccgcggggatcagtgtcacctccttccctccctgctggagctccactctgcctccccgcctcaccccgctctgactactgcgtcccattaccggctgtccgggtcctcagcgccaaca

SEQ ID NO: 444278 - DNA, 122 bp, Homo sapiens
ctatgggtataaaaaatagctggacattatcttcttcccaggctcttctcccctcttctccgtcaggctgcattgctggtcatttttggctcctgttggaagcaaactgctctaatgccttt

SEQ ID NO: 444279 - DNA, 122 bp, Homo sapiens
tcttttattagttctgggctgtcggtggctgagcccatcctgtcatcatcacctccgggccgtttccacgctgattgggttgggtacacagcaaccacagagttttcctattaaggcctgag

SEQ ID NO: 444280 - DNA, 122 bp, Homo sapiens
aattcatttcatcagttcattcgacaaatgtcctttgagtgcctcaggtgcctgaccttgcgaggggtttcacatcatcaggcaacaccatgtgagtcctttttgtttgtttgtttgtttgt

SEQ ID NO: 444281 - DNA, 122 bp, Homo sapiens
tgagcacctaggggcgggtgctgagtgctgggcggcctcatgtctgcagggcagggtggtcggagcagcccggctgggatgggagtgtgggggctacaggcacctaggggtgggcgctgagt

SEQ ID NO: 444282 - DNA, 122 bp, Homo sapiens
tgcaatgatttatatgaatatttaagactaatacattttcaaaagggcagttaaggttgtcgtttactattttctacccagaaatgcttttgtttgaaaggagggaaggaaagcttcagtga

SEQ ID NO: 444283 - DNA, 122 bp, Homo sapiens
ccccagcggggactggggggaaggacggggagttgggggcaccaagtcacccggaggaggcgaccccagctagctgcgcttgccctgcttcgctggactgtgaagccccctccgctgcggct

SEQ ID NO: 444284 - DNA, 122 bp, Homo sapiens
agctcctccctaccttgcgatacgaagcaccctcctccgctttagcgactcgctggttcacgtagaacacacgggggatgctcagcctgatgcagtgcaagtcactgccaacgagcgcccac

SEQ ID NO: 444285 - DNA, 122 bp, Homo sapiens
ccgggagcccatttcctgcggctaagagttgttaatggagcttaaggaattatcttaggccgggcggccgggagagccgtatatctcccgcgcctgttcccttgtcgagcctgaatatgctg

SEQ ID NO: 444286 - DNA, 122 bp, Homo sapiens
acctccctgcctgattctcctgcctcagcctgccgagtgcctgcaattgcaggcgcgcgccgccacgcctgactggttttagtatttctttggtggagacggggtttcactgtgttggccgg

SEQ ID NO: 444287 - DNA, 122 bp, Homo sapiens
tccttgtgtggagggaggacggaatgttgagtgttcacatgtcctgggccttgctttgggcgcatgagagcccctggcagcctctgcccagggctgggtggggttgtaaggacccctctaac

SEQ ID NO: 444288 - DNA, 122 bp, Homo sapiens
tttagggggctagagtccatggggctgctctgggccctggaatccaagaaacctttttggcgctttctgaagcgggacgtacagattccctttatcgtggagttggaggtgctggacggcca

SEQ ID NO: 444289 - DNA, 122 bp, Homo sapiens
ccccacccccattgtggcctcttcgccagggcgcaggcgtggctcttggtcaggcggttacggccaggaggcgtcggagcctggcgtggtagggctgtgctgcgcggtccttcccattcacc

SEQ ID NO: 444290 - DNA, 122 bp, Homo sapiens
caacatatttttgtgtgcttaccaagtgctggcaagaggaagacttcttttggtaggaaacgtaaactaagccagtagtgtccaaaaggcttacatcttggacaaattcagcattttaaaag

SEQ ID NO: 444291 - DNA, 122 bp, Homo sapiens
ctcttcgggcctttcccactatgggctcttactttccagaagctcctccaattccctgtccgcttcggccccgacactacagccttcctcagcggcggccatcttgctacctccgacttgcc

SEQ ID NO: 444292 - DNA, 122 bp, Homo sapiens
gttccatgccgtatcgtcgcttttcccctctgccggcctcaaaggccttcagagtccctgcggcctgcccacgccaaactgcgcccccattgtcgcttgtgggcacattctgtgagagacac

SEQ ID NO: 444293 - DNA, 122 bp, Homo sapiens
gtgtcacggaggtttgtttgtctaggcgcttctgtagtagtggcattctggttgtacagtcgtatacgggtctctctcttcaaaggtgcacgcagtctgattgatccctgtgcctcggaatc

SEQ ID NO: 444294 - DNA, 122 bp, Homo sapiens
ctacgacaatgtggtctaccgatacctgtatgtcagcatcgccatcgcgctcaaatccttcgccttcatcctgtacaccaccacgtggcagtgcctgaggaaaaactataaacgctacatca

SEQ ID NO: 444295 - DNA, 122 bp, Homo sapiens
tttgttaacaccaacaattagtttcacacccagcgtgtaagacagaagggtgtgctcacgcgtctgcccattcttggaattaccagcttcaaattcatcaacaccagcagcaacaatcagga

SEQ ID NO: 444296 - DNA, 122 bp, Homo sapiens
gagtgggcgttgtgcgcagacactgagcgtggctgggggagacgccacagaaacagaggacgcaccccgacgtggggaactcgcatccacccagggaacggcacacatctgcctccactgcc

SEQ ID NO: 444297 - DNA, 122 bp, Homo sapiens
cctgtgacttctcatgcccgaaacccactcctcaccacgtcgttcacctaaagccagcgccgctgcagcccctaacttctggtcacgtgtcccaacggagcatcctctcttccttcctactc

SEQ ID NO: 444298 - DNA, 122 bp, Homo sapiens
tattccttttctggaggtaggtgtttccctctgcccatcctttgaagagctgcaccaccccgagtaggaagaacccttgtggccagagtccttgggcctaccagagacctctacacttccct

SEQ ID NO: 444299 - DNA, 122 bp, Homo sapiens
agctcctagggaaggtgcttcagtgtttttctgcgcatgcccgagacggttacgtagttacggagcttgcgctctcagcagttgagtcccgactccaagtggcgattccgcctcagagccgt

SEQ ID NO: 444300 - DNA, 122 bp, Homo sapiens
gaacaaaaatggtggcacggagcccagtttccaagccagcggtctctctagtacaggctccgaagtacatcaggaggatatatgcagcaactcttcaagagacagccccccagagtgtcttt

SEQ ID NO: 444301 - DNA, 122 bp, Homo sapiens
ccagtttgtaacaacagccctgaaggaaatctacaggcagctgccaccatggtcagggagcggtggtcgggacaggcctctctgaggagggaatctgagttgagacccggagaatgaggagg

SEQ ID NO: 444302 - DNA, 122 bp, Homo sapiens
atgtctgtgcttctaagaaaggtgttccgaagcgggagagagggacggactcttacccaccgggcattctgtggatacaggagagcccagcagtgcctctctatgggctgaaaggcagcaag

SEQ ID NO: 444303 - DNA, 122 bp, Homo sapiens
gtgaaagagacagacaatgaagtaagaatgctactattgcagttcgtcactggaacctgccgtttatctctaggaggatttgctgagctcatgggaagtaatgggcctcaaaagttttgcat

SEQ ID NO: 444304 - DNA, 122 bp, Homo sapiens
tttagagatgcggcaagctgaagtgacatttactccccgcggaaggacacaggaggcagacgagtggtgaagctcattatctggtgatgcagccgcagacgtaatggtcaaagaacaagact

SEQ ID NO: 444305 - DNA, 122 bp, Homo sapiens
ggcttctctccccagccccacccagccccagccccaggaggaggagcctgtctggatggacgcagcctgaactgacccacaaacagaccaaaaaagtcactctcaaagagctctcggtaggt

SEQ ID NO: 444306 - DNA, 122 bp, Homo sapiens
tttccatccttggggaagttagcagctctcttaagaggaaggtgcggatgggacgggcgccgcagcaaaacaaggcttcaaatccagagtagaaactactactcttgttagtactccgtact

SEQ ID NO: 444307 - DNA, 122 bp, Homo sapiens
aagcacaaccacaaactaagacacaattacactgtaatcccaaaacgtgtataagtcatccggcacacacacacctctgtttgcgcattctccctgattcaaccacatcaaccataaacact

SEQ ID NO: 444308 - DNA, 122 bp, Homo sapiens
aggcagaaatgggtccagaaggcaaggtcgaggttagagccaagcctgtgggcagggctacgggcagggggcggggaggaatgtgggtccaggcccagaggaaaaggttgaagttatagcca

SEQ ID NO: 444309 - DNA, 122 bp, Homo sapiens
taacacatttaaatataaatatgaaataataaagatgagtccttgtcttccaagaagtagcggagcgggttttatagacatttgcatacaatataatgtgttctgaagaccgggacgatggc

SEQ ID NO: 444310 - DNA, 122 bp, Homo sapiens
tgtggattatgtgcccacccttaatgtttgctttttgaacagacccagaaaagggaaaaccggttgtctgccaaagtgtggacagtcttagctggctgcatctcctttggccagttgctgcc

SEQ ID NO: 444311 - DNA, 122 bp, Homo sapiens
cccatccagacctatatttctgccgtcctgcaggtgatcaatgttgatgggacgaagaggcggaccctcctggaggacaagctcccgcacatttttgggttcacgctgctgggggacttcat

SEQ ID NO: 444312 - DNA, 122 bp, Homo sapiens
aatagcagtgctcactgggtgctggtacagtttcaggtattgggctgggagttgtccagtcgtcaccttctttaatcttcacgacaactctaacatcgagtgctgtagttcccaatttactg

SEQ ID NO: 444313 - DNA, 122 bp, Homo sapiens
gacggttttaggggcggcagagccgagaccttggaccaaatcaagggggactgttgctagcgggacgcggaagtcaggcccggggaggggaactggagttagagcaagtggaagagccctgg

SEQ ID NO: 444314 - DNA, 122 bp, Homo sapiens
catcacggctgtaatggttaaaaactctcaggcagcttccttcatgatgggatggcaacacgttttctctaagcaaatatggaggaggatttgtacagagcaactgtgcaggagctgaactg

SEQ ID NO: 444315 - DNA, 122 bp, Homo sapiens
tcggagcagccggctggccccgccgcggccgagcaatgaggagtacaccctccgggccagcgactgtggagggtgtactgggtaccccagcagtgacagcccaccggcgctgcgttcgattt

SEQ ID NO: 444316 - DNA, 122 bp, Homo sapiens
ggggaaaggagggggaggggatgtagaacagacctagactgcctcccccaacccccatcacgaaggagagtggattgaccccaacactcacgctgctgccgctacccccggttcccccagga

SEQ ID NO: 444317 - DNA, 122 bp, Homo sapiens
aatccttcatcctcctctgggcagggcagcagagatagaaggcacagccggctgagaccccgccgggcctcaggaagtctccactgttaaacccagcctgcaaagcccttccctcttaggga

SEQ ID NO: 444318 - DNA, 122 bp, Homo sapiens
tcctcctgtctcagcctcccaaagtgctagggttccaggcatgagccactgcgccctgcccggagccttatgttaacatgtctattacaggacctgacatgaagaagagacttaataaaagg

SEQ ID NO: 444319 - DNA, 122 bp, Homo sapiens
cctcgtagagcgcagtgccgtccatgttgatggtggcacccacgggcagcacgaagcgagcgatgcgccggtcgatgtggttgttctccagcaggcacttgaaggtgatgggcagtgtggct

SEQ ID NO: 444320 - DNA, 122 bp, Homo sapiens
agtgattaccagagcaattaaacagtttgattaaatgagccatcataacaatgatgtctgcgggaaatcggccctcacatataaagaaagatagtgcgaaggggctggcagaggcgcggata

SEQ ID NO: 444321 - DNA, 122 bp, Homo sapiens
atgccggcaggacttctggaagggaaacctggaccagggccaccccgggcacagggaacgcggctggcaaggcgcatcctcgccgctcagtctccgtctccccgcatctctcagacgtcaac

SEQ ID NO: 444322 - DNA, 122 bp, Homo sapiens
tagtggtgtcaccagatcaaatacaggatgcccagccacattggaatttcagataagcagcgctcagtgtttccgtataagcatggcacgtgtgagatttgggacatacttataccaaaagt

SEQ ID NO: 444323 - DNA, 122 bp, Homo sapiens
actgccacgggctcaggatgtcgcatccctccagacccggagcgcacgcccgggtctccccgccagcccccatcggcctcccctggcctccccgagggatgcctgcacctgccgggaggcag

SEQ ID NO: 444324 - DNA, 122 bp, Homo sapiens
taccgctttaataataataccagaaaagcgcagcagggagggggtggggggcggcaacggcgacgactaacctcgctgtttacgtgaccgactcactgtgactctctgggtaaaaaaaggaa

SEQ ID NO: 444325 - DNA, 122 bp, Homo sapiens
gcgccgcccgcccggccgctcgcacaccccgcgccgccgccgtcgccgccgccgcagctgcgttattagagctccacggcggatctcggggctcttctgctcgctttttttcctcttcagaa

SEQ ID NO: 444326 - DNA, 122 bp, Homo sapiens
tgtgctctgtaggagtggagggcacacctgctctgtgctctaaaccccaagctccactcacggggatgacagaatgaacaattcctctctgccgcagatgccactttgagggaagaccgagt

SEQ ID NO: 444327 - DNA, 122 bp, Homo sapiens
acagcccctcctgctccttggcctaagcccctcccacttgacgcagggattacagcaggccgtccaagccaagtcagtgagcataccacattcctttggccttaggagttggttcagataac

SEQ ID NO: 444328 - DNA, 122 bp, Homo sapiens
cgcagccaattgccaggggctgtcccgcctactccccgtcctcgcagccacttgcctgcgcgaaatgcctgccaacttctgactggcaggcagtctggcaaatcaaatcgcgacctttgaaa

SEQ ID NO: 444329 - DNA, 122 bp, Homo sapiens
gccgcggcctcctccgcctacaacgtgctgggatcggcaggggctctggcccgctccggccgacctgccagcccaccccagcaggacgctgcagggcgccgtccccagcgagcctgggtaga

SEQ ID NO: 444330 - DNA, 122 bp, Homo sapiens
gccatgcacctctgagtgacggcactgcgccgctcttcaccagggcacagggaagggagacggccacgcacctctgagtgacggcagtacaccgctcttcaccagggcacagggaagggaga

SEQ ID NO: 444331 - DNA, 122 bp, Homo sapiens
gagaccagcctagccaacatggtgaaactccgtctctactacaagatacaaaaaactagccgggcatggtggcgggagcctgtaatcccagctactcgggaggctgaggcaggagaatcact

SEQ ID NO: 444332 - DNA, 122 bp, Homo sapiens
cctagccgggcccagcccccgagcagtgcagcctcccgagtgcagagtgcagcccctgcccgccctggcccagctgcccatgtctaccctgctggatcccaagtaatgatgatcccttccca

SEQ ID NO: 444333 - DNA, 122 bp, Homo sapiens
cacaatggaaaagaatgcggaatctgccatcttgtttctctcagttatcacagagaagagcgtgggggttgtcttttatttccaggcgcataaaattcctgtctctaacagctcggaccttg

SEQ ID NO: 444334 - DNA, 122 bp, Homo sapiens
acaccaacaatagcggctgagcgcagaggcctggagagcctgggcgcagacctagctgcccgcacgatgttctgattgaaatcaacagcaatattaatgtcacaccctgtttatctttatga

SEQ ID NO: 444335 - DNA, 122 bp, Homo sapiens
tgctccccgcgcacccggcaggatctcgcctgaccttgttttccttgcgagttcgggcaccgactccctggctttgggaccacctttgagttttgttgcttctatcagatgggacggggggc

SEQ ID NO: 444336 - DNA, 122 bp, Homo sapiens
cccggaccaggtcagcggggtgttgacgaggggtggggtgaggagggaagaggagggggccgggatccagtggtgggcaccccagtcccgcttctctgatatccaagggtccagggtcctct

SEQ ID NO: 444337 - DNA, 122 bp, Homo sapiens
cgtggtctgacttatgtcttaggaggaccactctggcttgctgcccagagaaaggactgtcgagggaacaagagtgggagccagggcatcacttgtgaagctgttagtgaacccagatgcaa

SEQ ID NO: 444338 - DNA, 122 bp, Homo sapiens
aaaaagaaaaagacgctctctctctgggggctacacttgggagttcagctgcctcccagccggtgtgtgtgtgttttgtgtgttgccgggggagggtgttttgtacagtgcacaacatacct

SEQ ID NO: 444339 - DNA, 122 bp, Homo sapiens
agagacagacctttgcaattgctcacccctccctgcccccaaccaccctgcttactttcgcgaagcgcattaggatgtgggctctggcttgagctccaaaatagcttgcttgtcaattgcga

SEQ ID NO: 444340 - DNA, 122 bp, Homo sapiens
tggtcagaaacctcgccagtcagggagcgggggtggtgctagagagccgcgcacggtcgccgttacgtattggtgtgccgaccaatcagcgccccgcactggttccgcgctcgaccaatccc

SEQ ID NO: 444341 - DNA, 122 bp, Homo sapiens
atacctgagatagtttggatatttgtccccatcaaaatcgcatgttgagatgtaatcccccgtgttgaagttgaggcctgacaagactagtttagatcctgggggtggatcccaaatgaatg

SEQ ID NO: 444342 - DNA, 122 bp, Homo sapiens
cggggctgaagggagaggcgcaggagccctggggagagtggtccctgcccttccgcgcctcgagccatcgctaccgcccttcggaaccagtgcagcggccgatcagtaaacacagagactgg

SEQ ID NO: 444343 - DNA, 122 bp, Homo sapiens
ttgttacaggtgtggaacttgttgctccgagccctcgcctggcagctcactctggatctgcgggttctgaggagcctcgggacccacctgggtgcagttgccttcagggacagaccatctta

SEQ ID NO: 444344 - DNA, 122 bp, Homo sapiens
ctttcccgactaacttcaatctggagagatggtaagttatctaaccggctcttcttttggcgagactgctctttctccttaatcagagccccccatgccctttgcagctcagagtcgtcttc

SEQ ID NO: 444345 - DNA, 122 bp, Homo sapiens
actctgagtccagcacaacctccagtggggccagcacagccaccaactctgagtccagaacgacctccaatggggctggcacagccaccaactctgagtccagcacgacctccagtggggcc

SEQ ID NO: 444346 - DNA, 122 bp, Homo sapiens
gccgccttggacaaccatcaggcagccaggacacagaggggcagagcaagtcagcattggcgccccttcctcagatccctatcatcttgggaaacagtagcccagaggttcaggaagatgtt

SEQ ID NO: 444347 - DNA, 122 bp, Homo sapiens
agcctccagtcgcctctctgtgcatgcacctcggtcactggtctcgactaatggtttctccgggagcccagttaacagggaaaaattcgcatggcctctcggtttcttcggtccgaaaatcc

SEQ ID NO: 444348 - DNA, 122 bp, Homo sapiens
aactcaaaatttgaactttgcatagaaaatgttaggaattttttttgtctgtttaccttacgttttgcagtattttgtttctttatgggtgtatccgagattatgaaaagtcattgaagcca

SEQ ID NO: 444349 - DNA, 122 bp, Homo sapiens
gcccgcgagagccgcgcacgcgcactcggccccgccccgcaaccgctgctgttgacgcggcgccctccccagtcgcaggctccagacccggggcccgcctgcccgctccacggaggccggat

SEQ ID NO: 444350 - DNA, 122 bp, Homo sapiens
ccctttgcttacatactcttggtgacggggagctcattcactgactcataacaatgaccacgattcataccgatggagcacgctatgtgctggccactgtgctgggccctttaccgacctta

SEQ ID NO: 444351 - DNA, 122 bp, Homo sapiens
aagagaggcaaaaatcctttttagcacactgacccatcccaatctgtggttactcatctgcgatgcttgctggtagttttgatagcaaaaggcaactgggaaattggttttgctattaagtg

SEQ ID NO: 444352 - DNA, 122 bp, Homo sapiens
gtgtcagaagttccagtttgtgctgactcaggaggacagaggctccgtgggctggaaccccggacaggagagggtgtgtgagccccgtcccctgcccagccaggaggaaatcccccgctccg

SEQ ID NO: 444353 - DNA, 122 bp, Homo sapiens
ccatatactacatttcctgggtcaattaattcccaattagcccagagatgaggagcagtccgccagctgctagcctcataattttgttttctttattgtccttcattgcttcaatgaacaga

SEQ ID NO: 444354 - DNA, 122 bp, Homo sapiens
tgttgtgacagggacccaggtggaggtaattgaattggggtttgggcggagggggtggtccgggctttcccgtgctattctcgtgatagtgagtaagtgtcatgagatctgatgggttgctc

SEQ ID NO: 444355 - DNA, 122 bp, Homo sapiens
atctaagagggtgggggaggctttaagctccatctccattcttccttcaggatctgaagtcggtatataagtggagactcagtattggatggcttgtataaagcaaataatgctttttgctt

SEQ ID NO: 444356 - DNA, 122 bp, Homo sapiens
cgcaggtgataaacaaaggtttccccgctgctctggctagggtcagttatccggcctccccgtcaatcccactccccgtaattacacacaaaaggtgcctgagatccacagctaatttgcgg

SEQ ID NO: 444357 - DNA, 122 bp, Homo sapiens
aagaatccctccctttctaaacggccaaatattaccctctccctgacactcctccagggtcggtggccaccccaggcttgaggggattccagggaaagttctcttgaggtggggtccatggg

SEQ ID NO: 444358 - DNA, 122 bp, Homo sapiens
actgccccagatgggcgaggtggggtggacacggttcttgggccggccctgatgattttccggggcaaacttggctcgagggctctgtctcgctggagcctggaatcgcagttgcgcttggg

SEQ ID NO: 444359 - DNA, 122 bp, Homo sapiens
gggtgatggggtaggctgtagagatggggggttcagagcaggggactggagccaccctaccggggttccaacgtggaagctgcatttactgtctctggccttaggaaagtaacttagccttc

SEQ ID NO: 444360 - DNA, 122 bp, Homo sapiens
accagatcctcacccgcgacgccaagggcatcagccaggagcagatgcaggagttccgggcgtccttcaaccacttcgacaaggtgagcagcctgccacctcctcggcctctcccctcccgc

SEQ ID NO: 444361 - DNA, 122 bp, Homo sapiens
tggatgaaatcctaatgagtcaatttcctaacctgccagagaggcagcctaggggaaccacgggaagtgccctctgctctcaagaatgcctggagctaagaggggagccttagtaccccgaa

SEQ ID NO: 444362 - DNA, 122 bp, Homo sapiens
cagagcagggggccagcttcccccaatcaccggtgctgctgtggaggaagagcttggtggcgctaggacgtccttgtgaatgtgacttggaagagcagtttgggatttttttcattgcctgg

SEQ ID NO: 444363 - DNA, 122 bp, Homo sapiens
aggaatgacacatgtctaaactatgtttcagtgagcaattcccaaactgatttgaccatgcgtttcctttacaaacctataagttccaggaaacaatgctgagaagtgttattttattatcc

SEQ ID NO: 444364 - DNA, 122 bp, Homo sapiens
cattgcagatccataatcgaaccaccccagccagaacttctgcctgtacagctgctgtcacggagcagactggaatctcacccatggagacaggcaggcaaagagatgcctctgctgagatg

SEQ ID NO: 444365 - DNA, 122 bp, Homo sapiens
ccaagaagctaaaagctgagggtggggttgagctcaggggagtaaatcaacgcacgttatcgtactcagaagccaaacactccaaggcaggaatctgcacccagagaacctcccaagattca

SEQ ID NO: 444366 - DNA, 122 bp, Homo sapiens
gagtggggtgacaccttaagaatctcatctatattattgacaggtaagagaaggacagaacgagtgtcctagctgatgatgttaagggaaaggagaggggacctagaaaaagaaaatgtctt

SEQ ID NO: 444367 - DNA, 122 bp, Homo sapiens
ccccgacgggggcgccaagatgtcggaccacagggagaggctgaggaactcggcctgcgccgtgtctgaaggctgcaccctgctatctcaggctttaagggagaggtcttcgcccaggactt

SEQ ID NO: 444368 - DNA, 122 bp, Homo sapiens
gaaggagggggcagcccgctcaggaggccaggggggcatccgtgcccggctcaggcccatcgacgcagacaccattgacatttacgcccgcgctgtgttccctgcggcgtttgcggccgtca

SEQ ID NO: 444369 - DNA, 122 bp, Homo sapiens
ttcctcctggtttcaagtgatccaagtcctcgccccacctggcccccgacccttctgctgcggacccctgcccaagggcctccgcccaagtgtggctcccttgggcccacaccccatcaggc

SEQ ID NO: 444370 - DNA, 122 bp, Homo sapiens
gaggtgggagggtcccgcccgcatagagggatgttctggagaagccgggagcagagtccgcgggcacgcggtgggcgagggacagtgcaggtgccgggtgcgggggtctccgggacagtccc

SEQ ID NO: 444371 - DNA, 122 bp, Homo sapiens
tgtcagggtgtttggtaagaactgtatatagtcagaattacctaaatcacctagaggtaccgtttacatggttttgtgtatatagagttggcttgcattttaggggccattttgtataaaaa

SEQ ID NO: 444372 - DNA, 122 bp, Homo sapiens
agcattgtgtttggtgttataggtaatctagagatgatttgaagtacacaggaggatgtgcgtaggttatgtgcaaattcaccattttatataaaagacctcagcatatgtggatttggtat

SEQ ID NO: 444373 - DNA, 122 bp, Homo sapiens
actgcagatcatcaaataattatccatttccaaatggtctaatgacagcagatacaaaggcggctcacttaaaaccttccgttaacagtcacactgcatcaaatggtgctagctttaagtag

SEQ ID NO: 444374 - DNA, 122 bp, Homo sapiens
accggtcctgccatcacctaggcaggtctgttcttactgctagagtcactgagtgctcaccgggcgcggcggggcaagtacacacgggctctctcagcacatgtcctgggtcaggcatgtgc

SEQ ID NO: 444375 - DNA, 122 bp, Homo sapiens
agtacagggaaggggtcctggcctgagccttgggaatcctgagtccttatctcaacagaccgtaagtaggaaacttgcctccggtaccatgtcactgcttttgagcatatcatcctgattga

SEQ ID NO: 444376 - DNA, 122 bp, Homo sapiens
cgagcgactggatgaataagagatgaatgaagccaagaaacacccaaactgttccagtgacgttttactttttcaatggccctgaggagaaggtagccagcagtcctgccagctgccacctt

SEQ ID NO: 444377 - DNA, 122 bp, Homo sapiens
tgcatttctcctctgtgctcactgccacacgcagctcaacctgagctacacagccagatgcgagatgcttctctgctgatctgagtctgcctgcagcatggaccttggtcttccctgaagca

SEQ ID NO: 444378 - DNA, 122 bp, Homo sapiens
ctagatcccttccaggtgcagttcacaatagggttcgccctcctacaaatctaatgcagccgctgatctgacaggaggtggagctcaggtgaaaatatgagtgatggggagcggctgtaaat

SEQ ID NO: 444379 - DNA, 122 bp, Homo sapiens
agtgctgttgatgctgcctccaaaatattcccatcttgtttccataatagcttctgtcaccgctcttgacaggccagccattaagtctttggcaaaactgtaagaattattaacatatgagg

SEQ ID NO: 444380 - DNA, 122 bp, Homo sapiens
cgcgggggtcggagtccgggcccactacctgggctggcggtggacctggctgactcatttcggtccggggagctcactttgaggggagttggagtccgcctagccacttaggcctggactca

SEQ ID NO: 444381 - DNA, 122 bp, Homo sapiens
ccaccaggctgaggtgctgggtgatgagaagcactgagcgggagtaccgctcagggctttcgtacaggagctgctccacctgaggaaagacatcggaccgtcagagccggggactaccctca

SEQ ID NO: 444382 - DNA, 122 bp, Homo sapiens
cccctcccttcccaggctctacggggcgccgcggatccgcgaacagccgtgcccggctagcgggcggcccagcaagtgtcaagacccttcggaacgacactttggcactcctcctctccccc

SEQ ID NO: 444383 - DNA, 122 bp, Homo sapiens
cctcctggctgcccccagcagcgcttacctgtccatccaggcatgcaggagcactgtgggcggcccgaggcctggatgtggcagcggccccttttggaacagaaggagggaggacaagggtc

SEQ ID NO: 444384 - DNA, 122 bp, Homo sapiens
agccccttaaatagaaattccactacaaaaatacagaggagatagggtgtttcctgtatccgcctcattcccatagaaaactataagggaagaaatagaacttggaattaaagcagcagcaa

SEQ ID NO: 444385 - DNA, 122 bp, Homo sapiens
agggcccactcgagagtgggagcgtaggccgcaggggctgcacgtctgtatcagatcaaccgaatggtttcccaagtgccccagcagcgtctagggtagagatagtgctttctgcgcaaaca

SEQ ID NO: 444386 - DNA, 122 bp, Homo sapiens
tcagtaaagctaaactcagtctccgactccggcccacgtgaagaaattcccaccggaagacgagttaggagagctttatatgagcaggcgctaaacctggtttaggtatttaggcagcgcgc

SEQ ID NO: 444387 - DNA, 122 bp, Homo sapiens
ggctccaccctggaggacacagtaagaaggtcctgcagccccagaggagggtgaagggaacggggtccccacctcaccttgagccggtagttccccacggccaggtagaagacgtaatcccg

SEQ ID NO: 444388 - DNA, 122 bp, Homo sapiens
ctgcagcccagtttctgttttgaattccaaggggtggggctgctgtgccccactttatctcgctatgtggcctggcccaggaaccacagtgcaaggtgaatttagactctggaggtctcaag

SEQ ID NO: 444389 - DNA, 122 bp, Homo sapiens
catggctcccggccctcacgcagctcggccaccgcccaggcacacgcacgggctcacccgcggggccactcacacacgtgtgcgcgctgcctggccacgctcggatcccctccttacttgct

SEQ ID NO: 444390 - DNA, 122 bp, Homo sapiens
acagggactgccactggggtcaaaggagcacagctccaggaagcagggcggccgaggcgccgctccgtgcgcgctccccggcgggaccccgcgcccctgcacgcccctcccgcagtccctgc

SEQ ID NO: 444391 - DNA, 122 bp, Homo sapiens
gtttggcactgagaatacaaagatgaatagacatcatcccagagctagatgcgcgtcagacggtggtcactaggaggcgtggccgaaaacaaagaagtccatggaacgtggccagagatctg

SEQ ID NO: 444392 - DNA, 122 bp, Homo sapiens
aacaaggttcttgcagcgagggaggctctcggctatctccgccgccggcgccgcggccgccgctgctgcattcagcaccccgggcgagtggacagctcccacccagaccccgcgcgtcacgc

SEQ ID NO: 444393 - DNA, 122 bp, Homo sapiens
acgcaggcaagcagcgcgcccggaagaggagagcggctgagggtggggcgagcggtggcgcgccgctgcccagggcccctgagccactagagtcgggcctcgtggctcttccccagggcctc

SEQ ID NO: 444394 - DNA, 122 bp, Homo sapiens
tcactaaatatcctacaatgcacaggacagccccacaagaaagaatgatccagccccaaacgtcaatagggctgtggttgagaactcctgagccacacgatggcagcggggctacctaattt

SEQ ID NO: 444395 - DNA, 122 bp, Homo sapiens
gccccctccccgccccacctgtcatcccagctctggctgcgctggatttcccgggggcttcgtccaaaggccccatcgccttcttcgatgcttctttggtaaaagcagctgtcaccacggcc

SEQ ID NO: 444396 - DNA, 122 bp, Homo sapiens
cgtaaaatcccttgccagtttacccagtctgctggagaggctcaccgtttctttttcgagcgaattacacagttgtcttggcagcgtgatttgccctctggttcctgctttatcagtttggt

SEQ ID NO: 444397 - DNA, 122 bp, Homo sapiens
catcatcaataaggctcaatctgaagctccacgctttcccaaacatctttcctggctccccgaattcctacctgcttatgtccatgagctccagtcccactggggtctggggctttcctgga

SEQ ID NO: 444398 - DNA, 122 bp, Homo sapiens
ctgctagtactctgccgcttctctggcagatcttatcttgtgtttctagcattctgggcacgaatacagtcttagggtttagagaacagagtaatggggcagaggaatgtgggaagggactg

SEQ ID NO: 444399 - DNA, 122 bp, Homo sapiens
tacccagccaggtccctccagcctttgccacctgttcagacgagaactctccatcggccacgggaaccccacgggcatcggggccccagccctgtcccagctgcagggacaggagcagcagg

SEQ ID NO: 444400 - DNA, 122 bp, Homo sapiens
atcgcccccagcatctcttcgtcaaagacaaataaagcctagcctcctgcctgggttgaccggttctccggtggaggggaagagagagagagagagtgagaacgaacgagaacgctggcgaa

SEQ ID NO: 444401 - DNA, 122 bp, Homo sapiens
cgaacgcccaaacggccgcaagtcgaagtgatcccatctgaagaagacagcgcgaggaagcgagaccctgctgtgtgccggcccccggagggcgccccgggccctgtgggtcggagggtggg

SEQ ID NO: 444402 - DNA, 122 bp, Homo sapiens
gacccctggcagcatggtgtgccatgggccaggctggcaggaggtgccctccatgaggggcgcccacctgtgtgcccactgaacatgcgggaaacatgcaggtgaatgggggccttccctgt

SEQ ID NO: 444403 - DNA, 122 bp, Homo sapiens
gcctgcacgcagccccgtagaatgagaaggggacggtcaggccgcggggaaagcactgatcgcatttgccacccaagaggtctttggtcacctctaggagagcaattgtactgggtcaggag

SEQ ID NO: 444404 - DNA, 122 bp, Homo sapiens
tacccccagcagatcctggtcaccttctatcacaaaatcttttcatttgtattctcagcccggcctcttttgttaacttttttccttaatttctccccattctttttccaacttatcagtaa

SEQ ID NO: 444405 - DNA, 122 bp, Homo sapiens
actaagtggcaggccaagccaccccggggcactgggctcacctgggtgtgggcaatgacacggatgacttggcagtacttcttcatgctgctgaagtccttctccagctgcttcttgccatc

SEQ ID NO: 444406 - DNA, 122 bp, Homo sapiens
cagcgcgtctcttggggccaaacgcattccattcatgccccggcgggcagcacgcacgtccgcacctcggctcccagcgcacaggctcactggcgatccgggcccgacttgcttagggagag

SEQ ID NO: 444407 - DNA, 122 bp, Homo sapiens
tggctcacgcctgtaatcccagcactttgggaggctgagggcgggtggatcatctgaggtcgggagttcgagaccatcgtggccaacatggagaaaccccatctctactaaaaatacaaaat

SEQ ID NO: 444408 - DNA, 122 bp, Homo sapiens
acttggcttgttgtttcagtcccatctttaaagcatgagctcacctcaccccctacgccacgctgtaccccttgcgctgcccgcattaccagtgtgtacatgcaaattctctggggtgagct

SEQ ID NO: 444409 - DNA, 122 bp, Homo sapiens
agatgtgcaggcagctccgtcttccagcagagacacgctggagccgactccttccgttcgcggggcctgggctccatgtcctacaacaacacaaccgcgagccccttcctttccgcacatgt

SEQ ID NO: 444410 - DNA, 122 bp, Homo sapiens
cgttagcagacgcgtcaaaagtaccagaagctggcccccggcgcatgcgcagagatgttccgtggtgggcgcggctcttctcttgcccaaccaccgccctgcctcctccctccccaagccgc

SEQ ID NO: 444411 - DNA, 122 bp, Homo sapiens
gcccccgacctgttacccggcgacagtccccgccgccccgtcgccgggcacagactcagccgatccacagccatgagtgcgaagcctctcaggcagggcaggcaggcaaaccgcaaacccac

SEQ ID NO: 444412 - DNA, 122 bp, Homo sapiens
ggaagaaaatggtttctctttgtggttctcctttgcacggctcctatgagagaggttgagcgtgtgttcatgcagatcagtacgatttggcatagtcagaattaccagagtgagctccaagg

SEQ ID NO: 444413 - DNA, 122 bp, Homo sapiens
accacttgtgtaatttttgtctgatatacgttcagcccagtgaactagccagtcttttcacgattgtggtttatacttttctctagacagtggtgaagctgatgagtgaaatgaccaatggc

SEQ ID NO: 444414 - DNA, 122 bp, Homo sapiens
catggagggcatagtccttggattcaccggcacaggtcctgagccccatcgtctcggtcccggggtacagagaactagcatctctgcttgactcttcctgtttgtcactttttcctccccgc

SEQ ID NO: 444415 - DNA, 122 bp, Homo sapiens
aggcctccagggcgttcctccacagcttctcggtgatgtagtcggggtgcaaggagttctcgaaggccaggtagaacttgtaccgggacagcgtctccatcatggtccccttgggcaggggc

SEQ ID NO: 444416 - DNA, 122 bp, Homo sapiens
ctgcgtgcctggcaggtgccgcagggaagtaggggaaaggttaaggagaacaccagcctccggagaaagagaagcaaaggtgattgcatagctgccagctggaagccgactctcgtcatagg

SEQ ID NO: 444417 - DNA, 122 bp, Homo sapiens
agagtattctgaaactctatagtttttcctttctgccagtttttattgcaaattccagcccgtcttagactccccaaactcaaatctttttctccccagagcaactttgcttggatttcctt

SEQ ID NO: 444418 - DNA, 122 bp, Homo sapiens
cgccttgggtgacactcagaggtgattcacccagcgccgtcccccgggggccgccactctcggagacaggctcagaaagagttaacccaaccgccaggcacaaagaactaagtgctatatgg

SEQ ID NO: 444419 - DNA, 122 bp, Homo sapiens
gaccctctgttctctgccccagggcttcagccaccctgcaagcccctccggacaaggcaacgtcagcccaggtagaaaacttaagagtccctcctagaaaaccagtgatgtgctggcccttt

SEQ ID NO: 444420 - DNA, 122 bp, Homo sapiens
ccaaaccctacagcctccccagaagcccagaatccgcggcccccagcgtctgtccgggagcgccgtgctgggtcgctccccagtcatctctccccgcagctgccgcgaccctggcagctaga

SEQ ID NO: 444421 - DNA, 122 bp, Homo sapiens
cacccgcgcccttcacaactcctctcggtttgcaaactgttacattagccaccaacctctcggcggcgtctcgcgcaccagccggccccggacgcggcgcgcgctcattggagcctcggccg

SEQ ID NO: 444422 - DNA, 122 bp, Homo sapiens
ttgctggctggggcagttccaagaggcttttcattcagtcttctcctagatccagcaggtcgtgtgctctaattcttgttttggagatggccaacattccaggctgttatgttatgtgagca

SEQ ID NO: 444423 - DNA, 122 bp, Homo sapiens
cgccaggtcattcagaacctgaaacccccagcggaggtggagagccggggtgagtcctggcgtccgagacgtggaggacccagcccccggagcgcgttccgttagtttacagagctttttca

SEQ ID NO: 444424 - DNA, 122 bp, Homo sapiens
gacgtaccggtgctatgctaatgacctcgtctaacccttacagcagtaatacttcaaggacgacagcgtgaccccaattacagatgtgacgtggaggctccaagaggttcaggaacatgtct

SEQ ID NO: 444425 - DNA, 122 bp, Homo sapiens
ggggatgagtggctgacttagtggataaaaagaccacaggaggagggtatgctaaggaaccgacaggccaaagcattagaaggaatatctctactgaaattagcaggaattatcacatgaat

SEQ ID NO: 444426 - DNA, 122 bp, Homo sapiens
catggcatccagaactgtaagataatcatttggtgtacttttaattcactgtttgtgggacgttgttataggagcaagaggatgctaatagagggtggtcagggaagatcaggggactgatc

SEQ ID NO: 444427 - DNA, 122 bp, Homo sapiens
gatccttaagcatgttgtgtctaatgtcgcctgaaatctggatctgaattagccctccctcgcgagaggaggatgagtgactgaaacaaatccttgccaggcaccctgcctctgggccccca

SEQ ID NO: 444428 - DNA, 122 bp, Homo sapiens
actgtaggggtcgctgcaccgaagcatgagacagcgtcagggccctaaaccattgggacccggtgcctgcaactgcctggagccctgggcagagccgggtgtggatcagcctagaggccgcc

SEQ ID NO: 444429 - DNA, 122 bp, Homo sapiens
aggggcggggtcaggcgcgctgccggccccaatcctcagcgcctgcccgtcgagcgcacgcggctttgccggaagccctcctgctcccggcgagccaggccccgactaggccctactgcccg

SEQ ID NO: 444430 - DNA, 122 bp, Homo sapiens
aaggatgttgcatttcctgaaaaagtgccacactcttccaaatgcctgtgccctttcccacgcgtggggcccctgcccatttcgtaaggcagatccgcctccatgccgcactgcctcctccg

SEQ ID NO: 444431 - DNA, 122 bp, Homo sapiens
agcaggtcctctctagccggccgcttatctatggtttctgctatagggcgctctagcctgcgccaaggggtagtgagaccgcgcggcaacagcttgcggctgcggggagctcccgtgggcgc

SEQ ID NO: 444432 - DNA, 122 bp, Homo sapiens
tctgtgaaatccattttggtggctagctgtgttttttttctgcctctcccctattgaggtcgcagtccttggttcataaccccagtaatcatgttcacatcaactccctgcgatgacagaac

SEQ ID NO: 444433 - DNA, 122 bp, Homo sapiens
agccccaggagggactgcgggctgggccaagtccaagaatcgaggcattcccctgcccaccgttcgggacccgagtgtcagccccaccgcggattcccaggatcggggagggccgctgggca

SEQ ID NO: 444434 - DNA, 122 bp, Homo sapiens
gaccttccctcctgtcctgaatgtggtgtgtctgtgtaccttgcatgtgtctggtgcccccgggtgtccctctgtgtgtagctgggttttatgaccaccctcgtgcggcccggcacgcccgc

SEQ ID NO: 444435 - DNA, 122 bp, Homo sapiens
gcagcttctttatctgaagtgtgtgttctctatctagccttctccatcatggcccatactcgggaacagtttgacattttagcaccatatggctgagtgaggatccaaaggccacacaaaaa

SEQ ID NO: 444436 - DNA, 122 bp, Homo sapiens
tggaagaaacacaaacatcttgctaagcaagaaccaaacgtttcaagtacttttttttaacgacaagtgattcaaacaagaaataaaaataaaagaaagaaaaaacaacctggttctaggcg

SEQ ID NO: 444437 - DNA, 122 bp, Homo sapiens
aaggtgtcagtgcagaacaggtatggtcctcctcaaaaccaacagcatatcactgcacatcgaagcacacctcaggcagagaatgaggagtggtaatgtctttattgcaattgtattttaat

SEQ ID NO: 444438 - DNA, 122 bp, Homo sapiens
aatgacagcgccaatgtggcagccatctttgtacagacgggaagtctcggcgcgagttcccgccccctcgtctagttggaaaccgaggaggcggtctcctccggcctgttagcccgcctcgc

SEQ ID NO: 444439 - DNA, 122 bp, Homo sapiens
ttccacaggagccatcccagggttgggggatgctacaatggggagccggggcatttctgccggtcagcagagaagggagaggccagtgtgaccttcccagcccgagtttgaatggtcctgtg

SEQ ID NO: 444440 - DNA, 122 bp, Homo sapiens
caggaggaagtatggccgctgccacttctggttcacaaccaagagctggaaacccagctccgagcagatggaccaagaccacagcagcagtgacagttggaacaacaatgatgctgctgcct

SEQ ID NO: 444441 - DNA, 122 bp, Homo sapiens
ccccccaccgccacaagacaggcagaggaggaggaggtgaggatgtgggaaggaaattctcggtttaaaaaaaccacattgtggttctaaatgtcatcaaaggtgaaacttgcttccttagc

SEQ ID NO: 444442 - DNA, 122 bp, Homo sapiens
aggggccatgggctctgacggtataattgcctgcgcgtgggaaaggggcatcctgaacagcgtgtccaaagccattgcccccgagaacagggaagctccgagtgtcttcacgaccacgagga

SEQ ID NO: 444443 - DNA, 122 bp, Homo sapiens
actgggaagcaagcaacggtctcctgacttcatttgtgttcaccatttgaaaaatgcaaacgaaatagaatctggtttttctttaacagcaaaactttgaagcctgagatatctagatatca

SEQ ID NO: 444444 - DNA, 122 bp, Homo sapiens
gctcatgatggaccacatgctcagcttggagagaaagaggaaatttacaaaagcataaaacgtggttctgtttttctcagggaccttagttaaggcagaaaaataaactcatacagcaactg

SEQ ID NO: 444445 - DNA, 122 bp, Homo sapiens
gggagcacgtggagaggctgcattgagctgcgcgctgtgggggctgcacgcccagtgaagcgcgtgaagagcgagtagtgatgggttctgcgccactggggctgtgaacgtatgaggggctg

SEQ ID NO: 444446 - DNA, 122 bp, Homo sapiens
gggtggcggaggctgaggcgatgctgtccaccacacgtggcacgcgggcagccttgactacgcaagcccctggggcacgtacacgtgtgttttcacacacactgcagcctgtaaggttacta

SEQ ID NO: 444447 - DNA, 122 bp, Homo sapiens
gcgggggtcagcgcacaggccatggacagccaggggcctgaacgtttcccaggaaccacccgggagccttagagtaaagcaacttcaggacccggggcatccgcatgtccgcactcaaaaga

SEQ ID NO: 444448 - DNA, 122 bp, Homo sapiens
cttctgctcaccgctactctgtctgcgcctgcgtgctttggctccctggatctggtaggccgagttctgttctggggcctgagtttgcaaagcattccctttgccaggttaggttgcgtgga

SEQ ID NO: 444449 - DNA, 122 bp, Homo sapiens
gaacatgaggagaacgccactgacgctgggtgcgccggctttcccagccctcgtgcataacggggagggagatgcagaagttttttccaacatcggtgcaaaggggaagctgaggttttcct

SEQ ID NO: 444450 - DNA, 122 bp, Homo sapiens
ctctcccgttcgcaccaaccgcttcctgcccctcccaccttccccctccgtccaggtaaacgtcggtgtgagcaggtccaggcctgccaggaggggtgctcccttcagcaggagggaagagg

SEQ ID NO: 444451 - DNA, 122 bp, Homo sapiens
gaacgcgcaccgtcaatgcagaggaaactccaggcgcagggcccagcaccaagtgagcatcggaaaatgctggacaggacactgtggcggctgctgctgctggagggaagtggggggttcct

SEQ ID NO: 444452 - DNA, 122 bp, Homo sapiens
cttgagtctcggaatcttccacaaaatgctacccatctcaccaggtcgagtgaggagggtcgtgttatgtgtaagcactttgtgaaatctaaagcacgaggcaaacgtaaagcattgtaggg

SEQ ID NO: 444453 - DNA, 122 bp, Homo sapiens
tccccagctgcccacagccagaatcctcaccacgctccacagacgtcactgcggcggggccgggtccctgagtctcaggtcccatcagatctaaaactctaaaaagatgtttatttactgaa

SEQ ID NO: 444454 - DNA, 122 bp, Homo sapiens
gtgtcgctccttcccaaaggtggggcacccgggagcgagcagggtggtggggcgcccctgcgtcccgtttgctgctccctcgctggattggggcacccgggcctgagcgctagtgctgcggc

SEQ ID NO: 444455 - DNA, 122 bp, Homo sapiens
ttttaggggctgggaatgggggaagggggggggggtcagccactgcccatgctgacccctcgggcctgcatgtctggagacaccagttctgtgggcaccctcagggtgcaggctgcagccag

SEQ ID NO: 444456 - DNA, 122 bp, Homo sapiens
atccaggctaagatattttgttataacagcatgaacagactaagacattgtgctaacaaccgttccatattcgctgttccagtctctgctgaattcataatatagagttcaaaaacagttag

SEQ ID NO: 444457 - DNA, 122 bp, Homo sapiens
tacacaggcctgagcgaagcgtctccatcgcatgtcacagctcctgcactcagggtcactcgagaggacctcagctctgttcctgaggctactttaagctgcaacatcaccgacaaagagca

SEQ ID NO: 444458 - DNA, 122 bp, Homo sapiens
agccgttcctcaggcaggacacgaaggtaaaggtgaccccgaagagggacaccagcaggtcgctgaggctgatgttgaccaggaggaggtgagtgggagtgcggagccgctggaacttgtag

SEQ ID NO: 444459 - DNA, 122 bp, Homo sapiens
aacatgacattattccaaaataaaaaccacaactctaacgagtcacgtcaacatacaattcgaaagattgtaatgcggacctgctattctacctggaaaagtagatacttggcattcaaaac

SEQ ID NO: 444460 - DNA, 122 bp, Homo sapiens
gcgcccttgcctcgccccagaccgcaggacccaggacttctttctttaaaagccggtctccgcctcttcccaaggccgcggttctttatatccgccctgcgaggtcccgcggcagccccagg

SEQ ID NO: 444461 - DNA, 122 bp, Homo sapiens
ctttgtcttaagtgcattcacgcacttactcttggccttatgtacacagccttgcccggccgccggggcacataggggttttatcgggcgtgaatgtaaataaattatatatatatattgct

SEQ ID NO: 444462 - DNA, 122 bp, Homo sapiens
cctgaacctcttgataattcagtaattcagtttcctcacctgcaaaacaagcatagtgcccgtacctaccttgcagggttgctgtacgtattaaagattatttcaaaaatgcccctagcaca

SEQ ID NO: 444463 - DNA, 122 bp, Homo sapiens
cccaacatcacacagctagactggagctgagctgtgctatatttcattctcagatggcctcgcactgcagtgctttgccctaaacactcctgggcagtcagttaagagccagccctggttta

SEQ ID NO: 444464 - DNA, 122 bp, Homo sapiens
tgggataagcctcttgccgcaagtctactccagagtgtgttgtgatcttcctttagcccacgtgaggaagccagggctcacatcacttaagagggcacagtgcgctgggcgctgtggctcac

SEQ ID NO: 444465 - DNA, 122 bp, Homo sapiens
ctggagcggacagcacagcttccgggatttggcggggcctttgtctctcgctgcagccggcgctccacgtctagtcttcactgctctgcgtcctgtgctgataaaggctcgccgctgtgacc

SEQ ID NO: 444466 - DNA, 122 bp, Homo sapiens
agagccatgcctgcggggacagcttagagagtagagggtgggctgaactccagttactctcgtacagggatccacctttttgcagaaatcacagtgtggctatggtgtggtttgatttcata

SEQ ID NO: 444467 - DNA, 122 bp, Homo sapiens
atccagcctggaaaatcttcatcacagggtccggttcctcgagccagccgggccccaagtcggagggttctccttgaacccagcgagtgggcccaggctccctgcagccacagaggctgcct

SEQ ID NO: 444468 - DNA, 122 bp, Homo sapiens
tcgcccctccccgcccaccggcctcgcagtcaccgcggacgccaatcttgtgcatggagtcgccattttgctcctagagaggccgccaggagacccggcgctttcttccttctgcagctgag

SEQ ID NO: 444469 - DNA, 122 bp, Homo sapiens
gcgtgcgtggctgcctggccggcgctgaggggctgagcgtacgcgggcggcggggtgggccgctatgctgcaactgaagcccagtgatctgacagtatggaagtgctttccttccgctcatc

SEQ ID NO: 444470 - DNA, 122 bp, Homo sapiens
cagggatccgtcctgagcgtgccgggacctgaggtatgtgcctgcccagcttctaagagacgggcctgcggggacctgggtacaaggctgggtggggtccgggcaggcgcgagggtgcgtga

SEQ ID NO: 444471 - DNA, 122 bp, Homo sapiens
cagccaaccctatttccaaaccaggtcatattctaaggttccggatggacgtgaatttggcgggacactatgtgacccactcaccttctgctgtcccccggagtcaaaactatctcagatgg

SEQ ID NO: 444472 - DNA, 122 bp, Homo sapiens
caggacgtcgaagtaggcagtggcccagtaagtggggtcactggctggcagctgcaggagcgccttgagcccggagccgatgcgcggcggggggctgcggcccaggtgggtggcgtggatgc

SEQ ID NO: 444473 - DNA, 122 bp, Homo sapiens
gcggccgcttacctcggctcaccagtttgaagctctgggatttcctgcttcttttcctctcggagaactccatggtgcggggaaggcggcggcgggggctgaggaggcggcggcagcggcgg

SEQ ID NO: 444474 - DNA, 122 bp, Homo sapiens
cgccgccgcgaacccgcagccccgctccctgcgccgccgcctcagtgggcccggcccgcgcgtagccccacagccgccgcggccaccgaccccggcacggccgccatctttgttttcgctgt

SEQ ID NO: 444475 - DNA, 122 bp, Homo sapiens
aaatgccacgctggtgacaagccctctctggcttgtttattttgtcttgttggagatgcacgtgccccttgcagccttgccggtggtcttccttgccagtggtcctccttcctggtggtcct

SEQ ID NO: 444476 - DNA, 122 bp, Homo sapiens
cagcgcccccagaccttggagaagcgcgttgtctgctccaggggcccagagccacctgctcggaatcttacctacaaccttttgcttcctacccaaatacctgatcaagagtaaagggacag

SEQ ID NO: 444477 - DNA, 122 bp, Homo sapiens
actctctccagggacaaatgccccgcagctgagagaggccgcccagctatccagcggccgcgcagccagccaagatttcaacacaggtctgccctatttggtcaccatccccgacagtgctg

SEQ ID NO: 444478 - DNA, 122 bp, Homo sapiens
ccaaggagactacatttcccagaatgccacacgccctttgaccccagctacagcaaaagacgcgccggggagcgcctgaagccggaagactatagcttcccggcatgcagcacgcttccccc

SEQ ID NO: 444479 - DNA, 122 bp, Homo sapiens
aggcgggatgctcaaggatgcccagccaggctcgggacttgctcttcgcaagtcctgtcgcgcgctcgctgccccgccggttcaggcggtgaggccaacgcgctccgccagggggaacctgg

SEQ ID NO: 444480 - DNA, 122 bp, Homo sapiens
aagctggaccggctgtgccctgtgtgtgggagctggctcgtggggcttggaggtggcgagcgggagagtgaccacgcccctctcttgcagggaacccgagcgtcatgttagggtgaagcaga

SEQ ID NO: 444481 - DNA, 122 bp, Homo sapiens
cggggaccggccaggccgcggcgggtgctgtttctgtttcactttccttcactctgaggccggcgcgctggcgggcgaggagcggcggcggtggcggccgctgggtaggtaccgggcgggct

SEQ ID NO: 444482 - DNA, 122 bp, Homo sapiens
gttgggaggagtagatttggctgaggacaagcccagactttcgtcacagggacagaccaacgtgttaacacaaagggagaacacgggagcatcctgcaccgtgcatttcagccacagatcac

SEQ ID NO: 444483 - DNA, 122 bp, Homo sapiens
gcggcgttgaggagctgcggcgcgcccctctcaccgcgattgttcacttgccaggcgccacgtgtgggcgacgtcactgggctttatgctttcatcgccgctatctgcctacgtgagctgct

SEQ ID NO: 444484 - DNA, 122 bp, Homo sapiens
ggggcagtagcaacctgctaggagcgggaggcggttgttcccaggaggaagcagcttctccgcccaggaggcaaagggcagcgggctcgaaactacaggacttggaaagtcttaggcggaga

SEQ ID NO: 444485 - DNA, 122 bp, Homo sapiens
ggagttcctttttggatacaggtggcttggccccagacttacactcttagatgttgttctcgacctttggacccagactagctcactgggacattagactatacagtaaagggagaagggaa

SEQ ID NO: 444486 - DNA, 122 bp, Homo sapiens
ggagagtggtcatcgctggactaaggctaggttgcataaatatttagttagagatatgagcgtgtttcttgaagctgtacatgtgtcggagtttccttgctgttcctgcaaagtcaggcctg

SEQ ID NO: 444487 - DNA, 122 bp, Homo sapiens
aaagcatgattctcaacagagcctcagagtctccctgagaagacagcagagctccaggagcgtggtctcctcgggcagatgccaggactggagctgagagctgcagcggcggagtggtttta

SEQ ID NO: 444488 - DNA, 122 bp, Homo sapiens
tgggcaacaagagtgaaactccgtctcaaaaacaaacaaacagcaatccctaaagccacgcggccgccaactccagggagctgatgcttccaaccactgcacgttgctcccgggctgtcgca

SEQ ID NO: 444489 - DNA, 122 bp, Homo sapiens
aggacatcgattttaccgtcttccccatcggagtcccggaggctgcgctgcggtgtggagcgaaggcgctcagctcttggcaagttcatggcggagcaggtgcttcagtcgcaggggatgtg

SEQ ID NO: 444490 - DNA, 122 bp, Homo sapiens
cgtcatggacccgggctcatcttcagtgtcctgaaccaagaggcagctagagccaggtgtcggccctcaaaggggccaaaaaaggggccttcacagtcaccccaggtagatgcccacgcgac

SEQ ID NO: 444491 - DNA, 122 bp, Homo sapiens
ctcaatacttgctagctagggtgtattttctatggctacataacaaattaccccagacagcggcttaaaactacacgtgtttattatgtcatagttctacaggttagaaatctgcaggttca

SEQ ID NO: 444492 - DNA, 122 bp, Homo sapiens
gctgggattacaggcgcctgctaccatgcccagctaatttttttgtaattttagtagagccggagtttcaccatgttggccaggctggtttcaaactcctgacctcaggtgatcagctgaaa

SEQ ID NO: 444493 - DNA, 122 bp, Homo sapiens
tccacccatcccattccccgtgccccatgtgccttggattccaaagaaaatcctaggcatcgtatcatttcatccacaaatatgtcagtatggattcaaaaataagggctctttaacaacat

SEQ ID NO: 444494 - DNA, 122 bp, Homo sapiens
ctaacctcgtgatccacccgcctcggcctcccaaagtgctgggattacaggcgtgagccacggcgcccgggcaagaaaaaattattcaagggagtctctctcgagcctattctggctgccta

SEQ ID NO: 444495 - DNA, 122 bp, Homo sapiens
cttaaagattacatctctactttcctgataggcctgtggataccaggccttgacattctgcgtgaaggtttaaatgagttgttgagaacttcagatatactttcagctaatctccattttca

SEQ ID NO: 444496 - DNA, 122 bp, Homo sapiens
tttcctcattgggtgaaaaaaattaaaaagagtgagagactgaaaactgcagcccacctacgtttaatcattaatagtgagcccttcagtgaacttaggtcctgattttggagtttggagtc

SEQ ID NO: 444497 - DNA, 122 bp, Homo sapiens
atggtttgaacccgggaggtggaggctgcagtgtgctgagatcatgccactgcactctagcggatctgcagtggtggatctgcctgggcaacagatggagactttgtctcaaaaaaaaaaaa

SEQ ID NO: 444498 - DNA, 122 bp, Homo sapiens
tgaccgagctggcccagagcagatggcggctcagcgcccaggctcagggcgtccatcctgcgtcccatgagctatggctgccgaccccgatgggtgccgcgctttccagtttgctccctccc

SEQ ID NO: 444499 - DNA, 122 bp, Homo sapiens
taatccctcccctcccctagtcctgtgccttatttctcctggcggttttgtccccagcttcgaggactgagaggggaaaggttgacaagagcggggctgggctccggcatgggcgcaaaaac

SEQ ID NO: 444500 - DNA, 122 bp, Homo sapiens
acccaatctgcctggttttatagctctcataaccttcctttatgaacacgctgtgacagccggatgtgggcattgattatggcagcagtcttcagccacattcctatttaactgcaaagcag

SEQ ID NO: 444501 - DNA, 122 bp, Homo sapiens
aaaaaaaaacactgtggctgcttgtgtggcaagtgcagttataaacaatagctcagcaggcgggctgtccctcaaacaactttatttacaaaaaccagcgttagctggatcttgggccttgg

SEQ ID NO: 444502 - DNA, 122 bp, Homo sapiens
actcatccaagttagtatttttatcaccaaatcctaagactatcagaaaacatctgaggccgaccaagcaccgtgtgaccttgaggaagtcgcctgaccgctccaggtcatgtgcgaggcct

SEQ ID NO: 444503 - DNA, 122 bp, Homo sapiens
gagatcccttcaccataggctgaaactagatgggagactatactatgctttgcttaacaacggagatacagacacactccgagaaatgtatctttaggtgattttgcagttgtaccaacatc

SEQ ID NO: 444504 - DNA, 122 bp, Homo sapiens
gaggctgccctcgctgcgttccctacgaagggcggagcaggaattggtgtaggaaggggacgggtgtttccttgttcggaatggggttggctcctctttgattttttacttctggtgaccca

SEQ ID NO: 444505 - DNA, 122 bp, Homo sapiens
ccaatagaaatcggccatctgggaacccagcgttccgaggcgcagcctaacatagtgaaccgacgaaggtccaatggaaaaagacggccatgggcatagaccaatgacaaagtggcaggggc

SEQ ID NO: 444506 - DNA, 122 bp, Homo sapiens
ccccttcacatccaacgtgaccagccggtccctcgacacacatgcgctcagccacctccacgcatttcatacccaacgtgaccagctggtcccttgacacgtgcgctcagccacctccatgc

SEQ ID NO: 444507 - DNA, 122 bp, Homo sapiens
cctgcactggccagggctgatggggaggaagacgtgggccttcccacccatgacggagagcgggcaatgcggccagctggaccaactccctgctcactgggaggggctccccttggacaggg

SEQ ID NO: 444508 - DNA, 122 bp, Homo sapiens
tgaagcaaaccctttgagtacggtttgcgtccacaaagcgtagggtgagaaccttgggagcgactgggcccgtctttgctccctcggtggggttttgtctcctggcttcccccaagtgcgag

SEQ ID NO: 444509 - DNA, 122 bp, Homo sapiens
gacgttcaggccccggaaccggcccccgcatggtcgccgctccggcccgggcgggcgcagcgctggcagccccgttttccgccagccgggctgccggagagttagacctcccagcctcacgg

SEQ ID NO: 444510 - DNA, 122 bp, Homo sapiens
tcacagagagtaagagggatatggctctctcacctcgctggatggctctgtggagagacgcgatgactcggagctgagggaggaggaagagcagggggaagatggctcagacttcacctgaa

SEQ ID NO: 444511 - DNA, 122 bp, Homo sapiens
gattaaagaaaaggctgacaaggccttttcttcccaccctgagtgcacggatctcctagtcggatgttttgtgggagaccactgtgcaacagcctgttactccgtgcaattgcatccagtcc

SEQ ID NO: 444512 - DNA, 122 bp, Homo sapiens
ggtattgttgaccacacaatcataggaacaaacagagtcccagctgctcaacaccagggccgttctagctggtattcagagacgtagagtggcacagctcctcagactgcacgttttccctg

SEQ ID NO: 444513 - DNA, 122 bp, Homo sapiens
cgcctcgtccaccaacggcgggctgcactactcagagcccgagagcggctgcagcagcgacgacgagcacggtggtagcctcgaactcctccccgccagcccgcctgcccccctccctcttc

SEQ ID NO: 444514 - DNA, 122 bp, Homo sapiens
caggtgcaggtcttggtaaatcactgcagaactgttctggggttcccgctggcggctgggcgcgggtgcagcctaggaggagaggcgcgtgaccgtgcgccagctccccgtggggctcctgc

SEQ ID NO: 444515 - DNA, 122 bp, Homo sapiens
gcgagaggggcctggtcagactgcagaccccacccaggaggaggaagaggaaggggccgccgtggcccgggcacccccagggtaatggaagtcaggtccatatgaatattgcagaacgtgaa

SEQ ID NO: 444516 - DNA, 122 bp, Homo sapiens
cggcgcattcttccatttcctgccttaatggggggcatttctggggacacccgtgaactgcgggctggggcttagccttgttggttgccctgcataggttggctgcgtagtgctttacgttc

SEQ ID NO: 444517 - DNA, 122 bp, Homo sapiens
gcatctcgaaaagggaccagtaggagtggcggcccaggtctgagctgcgctgccattgggcgcggcgacgagagggggcggggagcccgtgaggctggttacgccgagggaagccccgactc

SEQ ID NO: 444518 - DNA, 122 bp, Homo sapiens
cagtcgcgtcgggcctcccgagggggctgcgagtgtcagtcggctctccgcacgtgtccgcggcctcgcggagcaggtaatcagactctggggaaggagttaccagcactctctccggcgag

SEQ ID NO: 444519 - DNA, 122 bp, Homo sapiens
caagtttgtcatttctgcaacccccaggtctgaccagtttggaacctgggctttctgagccggtctagtgggttggttgagagatgggggtttttctggtaactgcatttggtgctagccag

SEQ ID NO: 444520 - DNA, 122 bp, Homo sapiens
tgggagatagttggtcgagttttgtgccttagcatagttatctgggtgatttacacatagcggcttagtgcaaatagtacaaagatcagaagtcatttagagagtggggctttcagttaaga

SEQ ID NO: 444521 - DNA, 122 bp, Homo sapiens
tccgtactatcttttcccagtctcggttcgacgactccattttcctcggtgggggcttagcgcactggaggagcggcgggcttcagacaggtaaagttccgactggagagcgtgtttctcgc

SEQ ID NO: 444522 - DNA, 122 bp, Homo sapiens
tcccacaaggctgtcagtccagaaagtattttaagttaattcgaaaatgaaacccagctgcgcatggtggctcacgcctgtaatcccagcactttgggaggctgaggcaggcggatcacctg

SEQ ID NO: 444523 - DNA, 122 bp, Homo sapiens
ctttggacctactgcgcaggcgtcatcctgttggaacctggtcagctgggttagagagatcgctacatgccagcctggcctgagtcttttctgtctcccagccgttaaaggttttaggacca

SEQ ID NO: 444524 - DNA, 122 bp, Homo sapiens
ccttctccgtggggccggagttcagcgcgccgcaagatgctgggacacaaaggtggtaggcgaggatgcaatacaaatgatcagagctactccggattcagaaattgtgggggtgggtggac

SEQ ID NO: 444525 - DNA, 122 bp, Homo sapiens
tatctagctaagcggaacatgtgcttcatctgtgggatgctgaaggagatgagtgggcttcgcagtgaatgtggcagttcaaaaaataccttcattgtttggacctgcatatttagctgttt

SEQ ID NO: 444526 - DNA, 122 bp, Homo sapiens
gctgtgagcccaggtgggaccacccagttacaagagcgttaggcctggctgtgtaggagacgtgtgtctccacaccagagtccttgcggcatatgggaagccttcatggtcctcatggtggg

SEQ ID NO: 444527 - DNA, 122 bp, Homo sapiens
cccgtcacgccccaccaacggccacgtgcaaggtcacgccctcagcccccgagggccacgcgctaggccgcgccatgcccccacaactgtcacgcaccaagctgaacccacgcctcccatca

SEQ ID NO: 444528 - DNA, 122 bp, Homo sapiens
aaaacaactgtacagtgaaactaacctgaaattacacgtctactttctttcaccggctggcgctgagatgggcaggtgctggagcagcccccctggaagtgatgcagcatccaggaagacgg

SEQ ID NO: 444529 - DNA, 122 bp, Homo sapiens
tcagggactgagtgggcggggccttaagcattatccaatcagagacgctgggctggaaaccgtccaatcaggcaggcagctggagcaaagaggacggcttccgggtttggcgcggcctttgt

SEQ ID NO: 444530 - DNA, 122 bp, Homo sapiens
cgcgaggtccggcgagtcgcacgggccgcacggcgcatggtagtgcagcaggaacccggccgttttccagcctccggcaggaaaacaaacaaaaggctgggtggcttctactggggacgacc

SEQ ID NO: 444531 - DNA, 122 bp, Homo sapiens
ccgtgatgcaggcgatgcctggagtctgggggactgcccccaggccagaccgtgcacccgcgctcaccttgtctcgaaagctcttacagaaggccatgtccgggtctgtgtcactgcccgag

SEQ ID NO: 444532 - DNA, 122 bp, Homo sapiens
gtggccccagcccacactacctgtggtggtgatgaaggcgtaggacttggaggtctgccccgcccgcaccccgtggacctccacgtggtaggtggtgccgggcctgaggtcgggcaggctga

SEQ ID NO: 444533 - DNA, 122 bp, Homo sapiens
tggccccaccagggaagctgctggcttctgctgataccaggggctactgggccctcggaccgatgggaggggcaagtaacgacagatggtgcacggcctggggaagttgagaactccactag

SEQ ID NO: 444534 - DNA, 122 bp, Homo sapiens
catctcactggctccagattgttctccaggcatccagggggcatttatgctcatgcccagcgctggtggctgcctcgatgctattgtagatgtccaagtcctgagccctcggactgctttca

SEQ ID NO: 444535 - DNA, 122 bp, Homo sapiens
tctccttgctcctcaagtgcagaggcctgggccagcccctgggccactctgtctgctgttcgctttggacgtctgcagcttgctcccccaggtttttctctagataccctgttttgtgtggc

SEQ ID NO: 444536 - DNA, 122 bp, Homo sapiens
gggtcactgcactgggaggaagcccgcctgccaagggctgtgtctggaacctgttcatcgcgctccactcagcacagtgagatcgcctcttctgttactcggtctccagggggcgggacctg

SEQ ID NO: 444537 - DNA, 122 bp, Homo sapiens
tttcttttctctgtcacccaggctggactgtagtggaacaatcacagttcactgcagcatcggcctcctgggctcaagtgatcttactgcctcagcttcccgagtagctggaactatgggtg

SEQ ID NO: 444538 - DNA, 122 bp, Homo sapiens
cgcccctgaacccccgagcttgtgtgcaccccctgcacccctccggctgacacatacctacgactgtacactcactcccgtcgcccctgaacccccgagcacctgtgcaccccctgcacccc

SEQ ID NO: 444539 - DNA, 122 bp, Homo sapiens
ctgcccgttggttccgcccgagccgttctactccaggcagacgggaggagaaacacggcgcgctcagcgtcccctgccccgttggttctgctcgggcccttccactgcaggccgacgggggt

SEQ ID NO: 444540 - DNA, 122 bp, Homo sapiens
ggggacttggcacacgtttggttttttgtgaggagagcagggggctctctggaccatgggcggggctgcctccctaggggctcacagctccgtggcgacctcgtcacccttccccacagagt

SEQ ID NO: 444541 - DNA, 122 bp, Homo sapiens
ctggggccggctgagtggcacttaagcgggccatgccatgcaaccctgggcgctgccaaccgtgggcgagctctgggtgtgcgggcggcctggcgcggcgctccgctgtgtcagcgtgttat

SEQ ID NO: 444542 - DNA, 122 bp, Homo sapiens
ggggttactgcggccccggcgtgggtggggcgcttgcaggtccctccccgcgcaagtgctcgccccgcccccggggccgcacccacagccccggctaccccggagaagcctgacttgagaac

SEQ ID NO: 444543 - DNA, 122 bp, Homo sapiens
gcccttacctggtgagctggggaaacggggccacaggggagtcaggcctatgggggtgtccggacagaggggccgggtgcgtgagccttccggggtgcctccgccaggcttgagcattctgt

SEQ ID NO: 444544 - DNA, 122 bp, Homo sapiens
tgttaccttctacaaaaattgcagtacaagtggaagaaaataacacggaaaatgagtgtacgtttaaaaagatatataaacatttgataaaagaaaagcaccgttgaaatacaaattggctt

SEQ ID NO: 444545 - DNA, 122 bp, Homo sapiens
cgaggtgaaaaccaaattgggttgggagggtgcacatgacacttaaagcccccagagctgcggtgccatcaaccacacactgtggacaggaggctgtcagtgggcaggctgggtccaccttc

SEQ ID NO: 444546 - DNA, 122 bp, Homo sapiens
cccgcgccccgcagccccgcccccagcgccgaccctaagtttcggcgctcagtggtccggcgctccccaaggctcggtgtccagcgtcaaccccgaggtctctatgccccgcctcccgacgc

SEQ ID NO: 444547 - DNA, 122 bp, Homo sapiens
caccacatgtgactcatcaaagtttattatggcaattaattacacaaacatacaggcggtcggtcatccagctcagaagcactcaaaccagtagagtccattagtgatttctctttataaat

SEQ ID NO: 444548 - DNA, 122 bp, Homo sapiens
ggaaatgtagtcccgccaatcagtggagtcgcgggcacttccgctccagggaagagggggcgattgtcacggcacattccacggtagtttcttccagttccgcgactcgcgggcccctccta

SEQ ID NO: 444549 - DNA, 122 bp, Homo sapiens
ctccctgcagaagatggtgaccgccttgggcactcactggcacccagagcatttctgctgcgtcagttgcggggagcccttcggagatgagggtgagagtgaactcgactcccatcttaaaa

SEQ ID NO: 444550 - DNA, 122 bp, Homo sapiens
gggatgcagcacgccgggcataccttgaaagagaaaggctttcgtcccattatgcagccccgggacctgacgcactccggtcgtggactccccaagttctaactctgttaagacgtcaatct

SEQ ID NO: 444551 - DNA, 122 bp, Homo sapiens
agagtttatttaggtgcctggaggctgggcccagtgctcccgcagcataccagagccatgcgggtgctccagacggccgggtgactgtgacgatggcacgagatagaagcatgtctgaaaag

SEQ ID NO: 444552 - DNA, 122 bp, Homo sapiens
ggctggggcgcctccacctcctcttcctaaagcggcgaggcgcagaggagcggcatcactcgagcccaggtcccagccaccaccactcacagcgctcggcgttcaggaagaggagcagcagc

SEQ ID NO: 444553 - DNA, 122 bp, Homo sapiens
ccctggctttttttaccgctgcatttgtctgcctgcaaaacgaccggcgaggtcccgcctcgttcctctgggcagcctgggtgttttcacttgttcttggactgggccaaggtggtaagttg

SEQ ID NO: 444554 - DNA, 122 bp, Homo sapiens
gcactcctcagcccttgggtggtctatgggactgggcgccgtggagtaggggacggcgctcgttggggaggctcgggccatgcaggaacccatggtgtgtgggggaagctcaggcatggtgg

SEQ ID NO: 444555 - DNA, 122 bp, Homo sapiens
ttttgaaggtgctgttcctcaacctatgggacaaggcaaagatgccctgttactttcctgcggattccctagcagtagagcacacaaaaatggttgagatacacaaagaatatcatgcttgg

SEQ ID NO: 444556 - DNA, 122 bp, Homo sapiens
cgatttgcatttctatgaaaaccggactacaggggcaactccgccgcagggcaggcgcggcgcctcagggatggcttttgggctctgcccctcgctgctcccggcgtttggcgcccgcgccc

SEQ ID NO: 444557 - DNA, 122 bp, Homo sapiens
ccaccttagccctgccccaccctttgtctctgtggggtgggggtgactgagagacatcatcgagagagacagacagatggacagggacagagagacagagaatgacctcgcctcctttgtac

SEQ ID NO: 444558 - DNA, 122 bp, Homo sapiens
acgcctccggcccccagcgtggtgctgctggctgggacccagccgcagggtggcggggcgcgctgcatgaccccgccaccgccgtccccactcctaggcacacaggtcaaggaggaccgcgc

SEQ ID NO: 444559 - DNA, 122 bp, Homo sapiens
gcggcgacgacgacgaggaagacgccgaggcctgggccatggaactggcggacgtgggggcggcagccagctcgcagggtgcgccgcagccagaggagccagcggcctccttgggtgtaaat

SEQ ID NO: 444560 - DNA, 122 bp, Homo sapiens
agtcttaactcattgcaacctctgtctctttgttcaagcgaatcttgtgcctcaacttcccgagtagctgggattacaggtaggcaccaccacgcccatctaatttttgtatttttagtaga

SEQ ID NO: 444561 - DNA, 122 bp, Homo sapiens
tggcgtttgagctcagactggtcccggaagctcttcccacacacagagcatgaatggggccggtaacccagatggacgcggcggtgacgacttagtccagaagcatcacagtaggtcttgtc

SEQ ID NO: 444562 - DNA, 122 bp, Homo sapiens
caggtgtcggccaatcagaagccggaacaggtgtcggccaatcagaagccaggcttgaaccgctcgcccatgtcccgccggcggaagagactctccgcggccacgccccgagccctcgaatg

SEQ ID NO: 444563 - DNA, 122 bp, Homo sapiens
agggcacaaatcataaatgtatagctcaattattacaaagtgcacatcccaccaacaagacgagaacatgaccagtacaccagaggtccccccttatgcccttctcagtcaccaaccccaca

SEQ ID NO: 444564 - DNA, 122 bp, Homo sapiens
tcttggcacagctcggccctcagtccccttaagccatagcatggcagctgggctgacagccggaaccaggcgtcctgtctcctccctgcgcagtgactgtgccctggcctggagccctctct

SEQ ID NO: 444565 - DNA, 122 bp, Homo sapiens
gctggggaggcaaatgttgggagaagcagaaagctggaggggaccttgtgcaggggccttcgaggctatagacttgaaatgattgtcagcttgttcagttcttgatagaatctttctggtcc

SEQ ID NO: 444566 - DNA, 122 bp, Homo sapiens
aagcgttgcggggaaacgaaagccggaggcccaggcggggcaggagccctggggctggggcgcccttccggcctctcctcctcgccgcgagatgtgcgcgataaacggccggcgctcgggag

SEQ ID NO: 444567 - DNA, 122 bp, Homo sapiens
agccagctgcaagtcgcccacgctctccaccgacaccctgcgcaagcggctctaccgcatcggcctcaacctcttcaacatgtaagtcagccccggcccccagcccggagtcctgggcgtcc

SEQ ID NO: 444568 - DNA, 122 bp, Homo sapiens
tcggggcgggcctaggggccaatagggggctccggggtgggcctggaggcctgaggccaccgggggtccccgggcaggtgatgggggcttgcggagcgggggcgccgacctctgacccacga

SEQ ID NO: 444569 - DNA, 122 bp, Homo sapiens
actcacttttccgtcttactatttttgtcattctaattacgaatacaatgggtggtttagcggagggagagtagttggagcccaagctgagggactcggcttcagccttctcgaactccaca

SEQ ID NO: 444570 - DNA, 122 bp, Homo sapiens
cgagggggcggagggggagcccgggaggcttcggattgctgggacggcccgtgactgctgcgtccacatctgcagactggccctgtggatgaggagaccttcctgaaagctgcggtggaggg

SEQ ID NO: 444571 - DNA, 122 bp, Homo sapiens
ctctaggatgtttgcgtaagaacctcacctaacgatgcatttcctggacgggatcccagtcgttaagcaatgcgtgactatgcatcgcgatgcatgactatacattgcgatgcgtgactata

SEQ ID NO: 444572 - DNA, 122 bp, Homo sapiens
cgccccgcctggtttataggtcccggcccgagcctccggccgcccgccgggtttgtcccgcgatccccgaccatgcccgccgacctcagcggtacttggaccctgctcagcagcgacaactt

SEQ ID NO: 444573 - DNA, 122 bp, Homo sapiens
catcctcccccaccagggctctgacagcaggcacagagcagcagcacgggcagggtggagcgggagcagcgtgtgggggcccccgccacccccagagctagtctcagaccaggaagggagct

SEQ ID NO: 444574 - DNA, 122 bp, Homo sapiens
ggactcagcctcaccatcgctggagttggaagccatcactcagtcctgttctcagggcaccggcactacggtggctgggaaggctcatgagacctgccgtgtctgttcggctgtctgtcccc

SEQ ID NO: 444575 - DNA, 122 bp, Homo sapiens
gttgaggtggcggccggaggactggaagcccggggggaaaggtccccctgctggccccgccgggaagagcactgcgtccccctaggacactgacatgcctgccctgtatgtgcactgcagcg

SEQ ID NO: 444576 - DNA, 122 bp, Homo sapiens
agagatgaggaaaccgaggcacagagagagcaaggaacctgcccatgtcacagggctcgtcggaggagttacattggtccccaaggctcatggcaataactcttgcattcagcgccaggtcg

SEQ ID NO: 444577 - DNA, 122 bp, Homo sapiens
agcccctcagcgtctgccgcccgcccttgggcctttccggccagcccctccctccgcccacgcccagaacagcccatgctcttggaggagagcaggtgggcttgaccgggactggcccctca

SEQ ID NO: 444578 - DNA, 122 bp, Homo sapiens
aaaagtacgatacccacactgacctggaactctttaaaccattaagatatatcactttttcgcagttcagtccatattttttgcaaaatgttctgcttagtttttctgctaagaaattactg

SEQ ID NO: 444579 - DNA, 122 bp, Homo sapiens
aagtggcgcgcatcttcggcgccgccgagaaatttctcacggtctctcgctgccccagggcgccaaaaggagaccaagaatggaaactgcgcatgcgcacaaccaacagcgctcccgcccct

SEQ ID NO: 444580 - DNA, 122 bp, Homo sapiens
tgcctggtgggaagggctgatgccgcatactcggattgctgggttctctggccgcccttgcgcccgccctcgcgcatgggatcacctcgccgggatgagtaaaccctgccctggcgcaggga

SEQ ID NO: 444581 - DNA, 122 bp, Homo sapiens
ggtaatttctcattggggcctgctcgctctctgcttatcacccgcggcctgtatccgctgcgtgctgtgtgagcagagataagattcattaataaagaaaagttcaggaggagctgctcgcg

SEQ ID NO: 444582 - DNA, 122 bp, Homo sapiens
gtgcagggcagggcgtcccaaggctgtggaggcctcatcggaaccggcgggaaatggcggcggtgggaggagtctgtgaatggagttcccgctcagccctctgtcctcagtcccctccggtg

SEQ ID NO: 444583 - DNA, 122 bp, Homo sapiens
gggggccgaatgggaggtgggcgaggcctgagggtctggagtgggcgtagccgtttctggcgggggcgtggccttaccggggaggggcgggcgcctgccgccagggggcgccgcggggcagc

SEQ ID NO: 444584 - DNA, 122 bp, Homo sapiens
aagtgcccgttgcctctgaaccttgcactttgtttacttactcattttgagacggggtctcgcccggtcgccctggctggggtgcagcggcccgacctcggctcgccgcggcctctgccttc

SEQ ID NO: 444585 - DNA, 122 bp, Homo sapiens
cgggggctttcgcacccaccagaactagcttctaacctcggcttggccaccaggaagctgcgtgaccctgggcacaccgacacacctctcttgagcctggtctgcacgctgggcattgccga

SEQ ID NO: 444586 - DNA, 122 bp, Homo sapiens
gctgtgaaggaggggcgctacgtgttcctgttccgctccaagcagtccctagtgctggagcgccagcgcctggacaagcgactggctctcatcgccaccatcctggaccgcgtgcgggacga

SEQ ID NO: 444587 - DNA, 122 bp, Homo sapiens
caataaatactaactgagcacccactggccccacagaaccatcttaaagaatttcctcatcgctattttgggacatcagaaatactttaaacatatatatgaagtgtcagacaaaatctgca

SEQ ID NO: 444588 - DNA, 122 bp, Homo sapiens
catttcttttgcagattcggaggccgggactttcacgctcccgggagcgcactgcattggcgcgattcaagagctgcccgctttatttaattaatacattcaaagctcgcttgggagcccga

SEQ ID NO: 444589 - DNA, 122 bp, Homo sapiens
gtgccagccgcaatagggcggccgtgggtgcaaacggaggggagcgccggcagctagcaccgcgcggcgactaacgggccgccccggagactcctgggagctcaggcccacgcgcgagtgcg

SEQ ID NO: 444590 - DNA, 122 bp, Homo sapiens
gaacagcagtaggagccaggggttcctagagaagaaccctgttaggagagcagaccagcccgcgctcccagtccccgccccctcgccccttctgccccgcccttagcctgcctcttcctaga

SEQ ID NO: 444591 - DNA, 122 bp, Homo sapiens
tggcctccatccctcacatgacatcaggtgtttggtgtgcctacagtatctaaattctttcggtggagtagtttggatattgatctccctaaaagccatgccctgatgtacttgtgtctagt

SEQ ID NO: 444592 - DNA, 122 bp, Homo sapiens
ctctccatttagtttcccagattggcatctgcaggtcagactgtagttctcagctttgaccgtggcttcacctcggggccaccttctggcatttgcctgctcacgctgtagcactctccatc

SEQ ID NO: 444593 - DNA, 122 bp, Homo sapiens
tcctccgagtcccactcctcacctaggacgccccaaactgccatgggttagggtggggatcgcgacccgcgcgaaagaccagccctgcgcttccgccgggggacgcggagcccaaacgccgc

SEQ ID NO: 444594 - DNA, 122 bp, Homo sapiens
gccagaaagcagtgtgtccagagggacctgtggctcacaaggaaagctgcccatggcaaccgctctccccacccactctaagagaggggagaggcctcccactctggaagagaagaggggcc

SEQ ID NO: 444595 - DNA, 122 bp, Homo sapiens
tgaactcggttcagaggaatggtggctaattcttatgtgtaaagtggatcttcccaaccacgaaaatcagggtcattggaaccacaggctcagtcatgtccctgagggttgccagattgcag

SEQ ID NO: 444596 - DNA, 122 bp, Homo sapiens
cagactccgtctgcaatcccggcaccttgggaggccgaggctggcggatcagtcgcagttcggagctggagaccagcccggccaacacagcgaaaccccgtctccaccaaaaaaataagaaa

SEQ ID NO: 444597 - DNA, 122 bp, Homo sapiens
actgcgacggtaccggggcggcggggaaggaccgagaggcgggaggagcagcggctcaggcgcctgcaaactggtggcctgaacgaggtagaccatgactgtggtttcagtggcgtcactcg

SEQ ID NO: 444598 - DNA, 122 bp, Homo sapiens
ggcaaagtgtgagagcctttagaaggaaagagcagggctccaagcgccgcgaagaatggccgaggccgacgcacagcagacgctggagtgcagccctcctagccaagcttgggtttcccctt

SEQ ID NO: 444599 - DNA, 122 bp, Homo sapiens
tgcagaagtctgttccgccatggatgatccagaaggccatggcgcaccagtgaaccaccacgaagatcccaaaatagagctggaagatggaagcaaagagggcaaaagagatcactcgggat

SEQ ID NO: 444600 - DNA, 122 bp, Homo sapiens
gcatgggaaaatcacagcccagaagaccctcgggttgcacgtgtgactgacgcactcccccgagagaggccaacacctcacagcagcctgccgcagcagcgaaatgcctgcactgaggctgt

SEQ ID NO: 444601 - DNA, 122 bp, Homo sapiens
ggatgattggaacgtttggtccgccaatcaccgtggacagaggaggggcctggagggtagcgcttatcacccacgtgtttgcagacaaacctaagggtcccggcagcgatccatgcgtgtgt

SEQ ID NO: 444602 - DNA, 122 bp, Homo sapiens
agaaggcggggcgggagctctcgcaggccaataacgacaggacgggccgcctggcccacccggctccacccccaagccaggcgaggcaggttccgaggttggaacacctggcgagtcctcgg

SEQ ID NO: 444603 - DNA, 122 bp, Homo sapiens
tgaaaacttatagtgcatctgatgggataagagccctggagaaaaagcagagaagagacccggaataaaggaatctgcactttcaaactgggtgccctggggagacagcacctgagcaaagt

SEQ ID NO: 444604 - DNA, 122 bp, Homo sapiens
aggcaccccttcgagcagtgagcattcacacaggttgttataatgccataggggcaaaagcgacattttttcacactcagcggaagcaggacctacgtcaggaacatccacacgtgtcatca

SEQ ID NO: 444605 - DNA, 122 bp, Homo sapiens
ccgcaggtgtggggcgagttcggcctggcccttggggacaacggcatccgactgcactcgcggggagaagggattgatgctctgtctaaactctacaaaagtacagtcctacaacatctggg

SEQ ID NO: 444606 - DNA, 122 bp, Homo sapiens
gaagaaagaaaattctgcgccaaatgggaaaacccttaaagtctgcatagttttgcttgtcggtaagaacacaggtaggcggcgggaagagaggtggcaagcagccccaacgctcgccgaga

SEQ ID NO: 444607 - DNA, 122 bp, Homo sapiens
ctcgctgggaggaggacgaggacgcctgtgatcacatgctctggtctggaggcacggccgcgggccccgggtcagtgtgaatccgcggggttactcctcagtcggatctgagctctgaaacc

SEQ ID NO: 444608 - DNA, 122 bp, Homo sapiens
gggtggggaagggcttccctgaggccagagggaaagggcccggtccccagaagccaccgacggaggcagacaagcccaatggcatgaaacggtccccctcagccactgggcagagttctttc

SEQ ID NO: 444609 - DNA, 122 bp, Homo sapiens
tcttttctgttttcctccatttttcctataacttgagacagattttctcaggcaagaacacgtgtcattgccctaatgggattctaagcctgggcatggcgttaaaggtggcttgtccaaat

SEQ ID NO: 444610 - DNA, 122 bp, Homo sapiens
taagggaaaaagcaattcctggagaaacgtggaagcggaaactagccccgttccgctctccgcaagatccatcccgggtttcccttgaagttatagggaggagaaaggcgaagggaggaggt

SEQ ID NO: 444611 - DNA, 122 bp, Homo sapiens
gggaatcctagacccctcattttacagttgaggaaacaggcccaagtagcatgacttgttcgcgccgctagtcgaaggagcagcagccccgatcccttgactctggggcactgctttccctt

SEQ ID NO: 444612 - DNA, 122 bp, Homo sapiens
gccccagaggccccagaggccgaggcaggctttgttctctgctgctgggactcagccctgcgggagcacagggaggacagctggaagcccagcccctctgtggctctgtccacagctgggga

SEQ ID NO: 444613 - DNA, 122 bp, Homo sapiens
cacctgtcatctcagcactttaggaggccaaggcaggagaatggattgagctcaggagttcgagaccagccttggcaacacaggaagaccctgtctctacgaaaataaaaaaattagccagg

SEQ ID NO: 444614 - DNA, 122 bp, Homo sapiens
tgcagtattttgctaagggggtcccatctgtcctcctaccccatgtgtgtttccctctgccgtgcagagatgccagccccaggaaggatgtatgaggtgtgggggaatccctgggggcaggg

SEQ ID NO: 444615 - DNA, 122 bp, Homo sapiens
ggatggctttcagttcactcctgtatttgtttttgatccacttgattccttggagctgggcgtccacgatcagcggccaccgctcggtgttgcccaggatggtggcattctcggtggacatg

SEQ ID NO: 444616 - DNA, 122 bp, Homo sapiens
tgatccttcgttctgaatctagaaaagtcactggatatgcccctcccccgccccccaacacggtcttatgttctgaatgtagaagtcactggatgtgctgacacacacacacacacacacac

SEQ ID NO: 444617 - DNA, 122 bp, Homo sapiens
cctctcttgctgaatgtgggcattaattttttgactgcagctctgcttctccagccccgccgtgggtggcaagctgtgttcatacctaaattttctggaaggggacagtgaaaagaggagtg

SEQ ID NO: 444618 - DNA, 122 bp, Homo sapiens
cctagagcccacccttagagctgcgcgctttagggtgagccaggcacgatgccttgccaacgtggccgcccccttcctcccaggcggaattcgctcaggcaacattggccccttgagatcca

SEQ ID NO: 444619 - DNA, 122 bp, Homo sapiens
ctgcagccctagaaggagtctgacttcatttccctcactatcccccatagaagctcagtgcgtgacatataacaaattgctgattaatatctgttgaaagaataaagcaaggagggagggag

SEQ ID NO: 444620 - DNA, 122 bp, Homo sapiens
tttgtcccgcctctttcgcttcacggcagccaatcgcttccgccagagaaagaaaggcgccgaaatgaaacccgcctccgttcgccttcggaactgtcgtcacttccgtcctcagacttgga

SEQ ID NO: 444621 - DNA, 122 bp, Homo sapiens
tcttattggaatgtttctaggcatgtgccttaggataaattacataacctgtctgtgcctcggtttactcatctgtaaatggaagatgctagcaacacctacatcgtagggttcctgggagg

SEQ ID NO: 444622 - DNA, 122 bp, Homo sapiens
aggcagggggcccgagtgggactttgaggagcagcccgggcagcagcctgtgcccagggccggccctagtgtcccagtaggccacaccaggctatctgcagggtgaccatgattccgacaag

SEQ ID NO: 444623 - DNA, 122 bp, Homo sapiens
aaagagcgcctggcttacaaggctacccaccgcctgctgctcctgggtaaggccgaggggcgcgcggcggctcccggccccagcggagcgcacagccaggagcggcgagcgccaggctgggc

SEQ ID NO: 444624 - DNA, 122 bp, Homo sapiens
gattcctccacaggaagtcttttcttatcaaactggaaccccaagtaacttgctgagcaacgggcagagcaaagggctatagcccctggactcatggtggctagaattgccaggaagtgggt

SEQ ID NO: 444625 - DNA, 122 bp, Homo sapiens
gccctgctcttcttctccgtctatgcccagctctggctggtgcttctgtatgggcacaagcgtctcagctatcagacggtgttcctggccctctgtctgctctgggccgccttgcgtaccac

SEQ ID NO: 444626 - DNA, 122 bp, Homo sapiens
aaaggtaaactaaaacagcagagagctggtgagaagggggccgtgggtcctggctccagccgcccatgcacagaggcagccgcttcccccaggtcttgcccggagccaggttctcaggatta

SEQ ID NO: 444627 - DNA, 122 bp, Homo sapiens
tcattcgaggctgagttttctgggtaatgtagttccctaggcaacaaggagggtaaagggcgcaattcccagaggcgcttctgcaggaaaagcccagcttcacctcgggagtatccttaaga

SEQ ID NO: 444628 - DNA, 122 bp, Homo sapiens
tggaaacaggacggaggcagctcgccctgacctggcctggaagggcggattccctgctggcgcttcttcaggggacgtggcactagccccacgccccgggaagcggctagtgtgagaggctg

SEQ ID NO: 444629 - DNA, 122 bp, Homo sapiens
aggggggatgttgtgggaatgtctccccatccttgggctggctcctggcccccactcacccggcaggccagcacgctcagagtccgttcatgcagattcatgatggggtagttcttcccctt

SEQ ID NO: 444630 - DNA, 122 bp, Homo sapiens
tgtgtgtctggccctttggggacagcgcttaaagtcggggtgggcgggggaggggatcaccgacattcagtcttgagtgacacaccagatgaccccaccggagaggaggagggtggcacagg

SEQ ID NO: 444631 - DNA, 122 bp, Homo sapiens
tactcaggaggctgaggcaggagaatggcgtgaacccgggaggcggagcttgcagtgatccgagatcacgccactgcacgccatcctaggcaacagagcgagactccatctcaaaaaacaaa

SEQ ID NO: 444632 - DNA, 122 bp, Homo sapiens
cttaaatttcatcatcacaggattgccatggcattcaaatggcataacgtgtgttaaaatcgttcccactattctttgacactagtggtaccaaactgtactctttaaatctttgcctgtgc

SEQ ID NO: 444633 - DNA, 122 bp, Homo sapiens
tgtaacaacatgcacacgctgggagcccgtctgcctggcggggtggaatgtcgcttccggcgtggccctgccatggcctgggagggggagcccatgcgccacaacctagggggcaacctggg

SEQ ID NO: 444634 - DNA, 122 bp, Homo sapiens
aggccatggaccagtaccagtctgtggcccaagggttggggacccctgacctagtgtgtgcggtttctcccttggctactagattcttgctttcagataataccctaaattatcatagggcc

SEQ ID NO: 444635 - DNA, 122 bp, Homo sapiens
ggaaatctatcgtctctcgcccttgcacgggtcacgattatacaccttcgtgacctttagcgggcttacatatgtatctttttgtgttccgcaggctatgaccacctgctgtatgtacaata

SEQ ID NO: 444636 - DNA, 122 bp, Homo sapiens
tgtcctgctgggtctttacctgtatcttcctccatcagaccattgcagtacatggcatgtcgttcaatctttgtgggtggaaagcattggtcacatagcgggcaggatacctggttactgga

SEQ ID NO: 444637 - DNA, 122 bp, Homo sapiens
gtgggggtggggcgggcgagaccgaagagcctttggttttccttgctcggccgccgccggcgcccaatgggctgcagcgcctgcctgtccgccaatcagggcgctgtttggtgagagcttcg

SEQ ID NO: 444638 - DNA, 122 bp, Homo sapiens
ttcagagcaccctctcgttctgtcagcacaaacttccggctcaaaaactgcccgttgtcccggccacgcttccagagaaaaccctcacggtaccctgtgggggaaaggggacacgagtcggt

SEQ ID NO: 444639 - DNA, 122 bp, Homo sapiens
gagcaggtgctggtattcacagctgagagacttgaaaacagatcacatcacaggactcttcgtagacactccccagtaccagcccagagcctggtagctctgctaggagactagattcagaa

SEQ ID NO: 444640 - DNA, 122 bp, Homo sapiens
cgggggccggggcggagccggcggccggtggcaccacacatacggaccaatcgccgtccccgccgcggcattcccggccccaaatcacactgcgggaagctccagcgttggtgcctgtttcg

SEQ ID NO: 444641 - DNA, 122 bp, Homo sapiens
cataacaccaacccaattttgaagtttttctggaagttgtacaagaaggaaaataacacacggtattggtaagaaaatttttaaaacagcaatcatagaatccaggcagtggaaaaggtgta

SEQ ID NO: 444642 - DNA, 122 bp, Homo sapiens
ctggaccaggtctcctcccgcaggcgcctggccccgcccctcccctcagtcgccgggccccgcccctccccgcaggcgcctggccctgcccggcccggtcccgcccacatcagaaagctcag

SEQ ID NO: 444643 - DNA, 122 bp, Homo sapiens
gaggccaagggcctggtcagcggggcgggtggctggggtgggcccaggtgacagcgaggccgagtggctgagacccccacatgccaaggccccaagagcctccccgcctgtccggaacactt

SEQ ID NO: 444644 - DNA, 122 bp, Homo sapiens
ttaatgcaagttagacatggagttagagggtcagataaataacgaagagaattaagttagcgatagaaagatctaaggatactagctcctgggcacctagggtgcaaactgacttgtggcag

SEQ ID NO: 444645 - DNA, 122 bp, Homo sapiens
tatgactgggttttctttctcagtgtcttgctcaagaggttacagtatttttttgtgtgacgagcatggacggtaagtattcctttcaatggcattttgtgtagagttgtgtctgtggtgga

SEQ ID NO: 444646 - DNA, 122 bp, Homo sapiens
ttaacagcatttgcagtgacctggatgagactggagactattattctaagtgaagtaactcgggaagggaaaaccaaacatcgtatgttctcactgataggtgggagctaagttaggaggac

SEQ ID NO: 444647 - DNA, 122 bp, Homo sapiens
cacacagtaagttactatgcccgttttaccatggaaaccaagagaggtttagtaactgtccgaagatcacacagttataagtggtggatcctgtgaagccaagaagccttagctcccggctc

SEQ ID NO: 444648 - DNA, 122 bp, Homo sapiens
gagacgcgtcgcttgcatgcgcgcaccaataggagggcagtgggtgggggcgccctcgtccgcgcccaattggaggctgccgaggcggggccgagccgcgaagcccagcccccttccagctt

SEQ ID NO: 444649 - DNA, 122 bp, Homo sapiens
gaccatgctgcaaaagccattgaaaaaagaaaggcaccacactcaccagcaaactgtgttcggactctggcagctgcagttgttatcaagccactgtcctccccagagtggaagcctttccc

SEQ ID NO: 444650 - DNA, 122 bp, Homo sapiens
acacagccccactatgcgtcctctatcatggttcccattatactggacggacaatgtagtcgggcgtctggctcctttgagagcctggacagcctttagagagatgacttcgcatcacaagg

SEQ ID NO: 444651 - DNA, 122 bp, Homo sapiens
cacctccttccagtgtgacagccagtaaaatctccagacatttccaaatagcacttgaaccgctgcagtgaaggaaggctcatctaactgtatggttgaattattgaaacagattattgaat

SEQ ID NO: 444652 - DNA, 122 bp, Homo sapiens
agcacacgaaagcccaatttccttcccgggagggggcatgtgcatggtagcttcagcccacgcaagcctgggttcctgcatggctctctgttttgcatgtgtcctgggtttggctgtgtctg

SEQ ID NO: 444653 - DNA, 122 bp, Homo sapiens
gggcatttgtatttgtggttgctagtaaggccctgtgtcagttaatgaccccggcaaacgcgccacacattcctgtgtcccctcgcgtgcttccctgctgctcgcacgccgagagtcgcctg

SEQ ID NO: 444654 - DNA, 122 bp, Homo sapiens
atctcctccatctgctgccactgccattgtgggtaatgctggtctcatgccatgaagtgacgtctgaatccactgggggcagtccgctttccccacatcagacaagccctgacccagctgtg

SEQ ID NO: 444655 - DNA, 122 bp, Homo sapiens
gtgtctcaaatttccttctgtctcctacttaaaaggacctatgattgcacttaaggcccacgctgataatccaggataatctccccttctcaggattcttaatttcatcacatctgcaaaat

SEQ ID NO: 444656 - DNA, 122 bp, Homo sapiens
cctctaccttgtcacaaggacagacggctttttgtatcccaggttcttgccttggtgtaccggaagaatcttatcacaggtgggcttggagaatgagtgcaaagttttatttagtggaagta

SEQ ID NO: 444657 - DNA, 122 bp, Homo sapiens
agagaacggggagtggagccactggaggaccggctgctcgggtttattcggtagccgaggcggttaaacagttcagggctggaccagcccggactggagcagggtgcagcctccagggttgc

SEQ ID NO: 444658 - DNA, 122 bp, Homo sapiens
cccaaggactcgtccaccacccagggaaccggactgtgaggttcaggtcagcatggagggcgggaggcgtggcgcccacagaggggaggggagccaggcccagatgacagacgcctgcagac

SEQ ID NO: 444659 - DNA, 122 bp, Homo sapiens
ccgcccgactggggccgcgcaggagtccgcactgcaaccgcggtgcccgcgctcgggtcgcgtcactgccctgaccagggtcagttggtgcagtccagaaagggccagggtagaaaccagtg

SEQ ID NO: 444660 - DNA, 122 bp, Homo sapiens
caccctctctgccgggttctatattttgcctttctttgttctcaaaatagtaggcgagcgcggccggcgctgccctggcgaggggtgggggctccgcgctcgctcgcgcgagccgagttagc

SEQ ID NO: 444661 - DNA, 122 bp, Homo sapiens
gcgcgtggcgaggcggacgggaaggctcaggggcggcgaggtagagcgccaagcatcccgcgtcccagactgcacgccctgaccccgcggcgttcggctcccacagccccgcggggcccgcc

SEQ ID NO: 444662 - DNA, 122 bp, Homo sapiens
tctgccagtgctcaatccataatgctggaagtaagctatttagatggttacagaagctcccgtatttcagtatttttagaaacagtaatttgttttttatttaatatggaattttctagttt

SEQ ID NO: 444663 - DNA, 122 bp, Homo sapiens
tagcagggagtctttcagctaaacagttgtccccccgcccccgccccaatattttaatcccgctgaagtgattgatttgcccttatgacaactatcttcccaaaaggcagtttgttaaaaga

SEQ ID NO: 444664 - DNA, 122 bp, Homo sapiens
caaggagggagccgaggggccgcgtgacactgcacgggatcgctgcccttcccacacgcacgttctgtctcacgcagttgctgtgcatttggaagaatcttgcatgaggattactgattcca

SEQ ID NO: 444665 - DNA, 122 bp, Homo sapiens
tgtcactaggtcatgcaggatggaatctaagtgagatgagagggactgagggaaggcatgcgtgagtgagcaaacatgtcaggcaggatgtttcaaagatttgcaatgacattttgttacag

SEQ ID NO: 444666 - DNA, 122 bp, Homo sapiens
cctcagtctgtgatccctcgcgtttcaatccaattcaaaccatgctgcagccaattcgttcgcgcgtgcgtgtgccatcattgtgagtggaggagactgcccgatatgatcccagtcattgc

SEQ ID NO: 444667 - DNA, 122 bp, Homo sapiens
agttgaagtacctggctttcctccgcaagcggatgaacaccagcccttcccgaggccccacgtcttctggcagagcttgcgagccgggccgccccacgacagcagccagccaggccgcctag

SEQ ID NO: 444668 - DNA, 122 bp, Homo sapiens
ggcggcaaaaatacttcccgtctctccttttcgcctattggctctgtcaaaggtcgacttcgtgacgtcaaagagcctgggccaatcagagcacaccggactgcgttttcccgaacgcccgc

SEQ ID NO: 444669 - DNA, 122 bp, Homo sapiens
gtcggcgccgagcgcgcagcctgctccaccgccgcctcttggtcccgccgccgccgctgccgccgccgccgggcaggtaacttcatgcgctcattgtcccccccgcccgcccccccatcccc

SEQ ID NO: 444670 - DNA, 122 bp, Homo sapiens
attttgccaagcctgtgtggcgaaaaacggccatcaggggatgcatttaggacgcaaggacgtcgctgtgctgttcccctcatttccaggagacctcgtggcagagccacggcgggggcttt

SEQ ID NO: 444671 - DNA, 122 bp, Homo sapiens
tggagtccccaagactcacctagagctaaagaaattaattggagaggtgtccagtggctccggggagacgttcagctaccctgactttctcaggatgatgctgggcaagagatctgccatcc

SEQ ID NO: 444672 - DNA, 122 bp, Homo sapiens
gatcaagttcagctttaatcattaaaccgtttcacacttccctgtgaatttttactaaagcggggaaactgagccaatgcatgcacatcaactcagagggtgggtgctgtggataaaggcag

SEQ ID NO: 444673 - DNA, 122 bp, Homo sapiens
cgtccgcgttgtgctcatccagttgcttttgaggttccggccccctccaaacctctgaagcgctccgtgcacgcgacgcggcggcggggtaagctggagccctcgccgcgagccctctccgc

SEQ ID NO: 444674 - DNA, 122 bp, Homo sapiens
gcctagtgggggccggggtcaagtccactcggtatttgtggcttcactcagcaggccgcccgtcccctccgtggggccattcgacagtccctgggtaggggacggttgcactaggaggtaaa

SEQ ID NO: 444675 - DNA, 122 bp, Homo sapiens
cccacgaagacccacccacggagacccaccctgaccccacggagacccttcctgaccccacggagacccaccctgaccccatggtgacccgccctgaccctcagctctgtcaccgtccattt

SEQ ID NO: 444676 - DNA, 122 bp, Homo sapiens
tgcaaagtcgagattgcaaagacagcgcaggtcacacatcctgcctgactccagattgcacgtcaccgtttattttctgtgccctgtgccagaaaacgagatatgtgccatatgctcgctta

SEQ ID NO: 444677 - DNA, 122 bp, Homo sapiens
tcccctacttcatcagccccaggcatagcaacaccttcacctgctcctagacacagcccccgctgggacctcaccatctcaggaaggattatttagaggattattatgtgtgatattctgta

SEQ ID NO: 444678 - DNA, 122 bp, Homo sapiens
ccgagtgaactctaggcgcagctggaccggggtgagggcgcgcggtgagcccaggccaagcgctggaagaaacgaactgggggccgagttcgggcggcgatctgccggggacccagtcctga

SEQ ID NO: 444679 - DNA, 122 bp, Homo sapiens
ccacagtagttactcatctgcacgatctggggacagggcgttcatctcccaggacccggccgccctcaccaggccccctgagctccccaacagctctgccggcaggcagagacaagagcaag

SEQ ID NO: 444680 - DNA, 122 bp, Homo sapiens
taaatctaacaatatcaaccaatgaggatttggataaacatacattgtttatccacacaacgtgctgctgtgcagctgtagggattgagtgagttctttatgtactgatactagtcagtctc

SEQ ID NO: 444681 - DNA, 122 bp, Homo sapiens
cttttacttcccctaatctgtcacctccagtcatgccctaaataggctgagcccacctttcggtctcctctgctttcctgaatcctttccccaaacagctttccagtgtggccaccctgact

SEQ ID NO: 444682 - DNA, 122 bp, Homo sapiens
ttgggctcttgaaggtgtgggccgccgccaggctccggccgcccgctcgcgttcctccctcgggaccctctggctggctgcgcacagctgcttccggctcctgccatggttctccttctctg

SEQ ID NO: 444683 - DNA, 122 bp, Homo sapiens
ccctgcttcagcgttaacattttaagtatgttgtaaactgccctcctgggcactgcccctcgccgtctgcatggcactgcgctgggttgcccgcctttagaggagaggctctgcctggtgcc

SEQ ID NO: 444684 - DNA, 122 bp, Homo sapiens
gggggcccgccggccgctccgagtgcggggtccgccgagcccacgcccacccggaactcgcgctggcccgcaagcaccacgcgcagcccggttcccgcctgcacctctccctccacacctcc

SEQ ID NO: 444685 - DNA, 122 bp, Homo sapiens
catcaggatgcgcgaggctcggggagggggcgggattagagtccaagagctctctgctagcgggcgcacttcgggcgctggaaactgcaaatcccagattgctcgttggataaaccggctga

SEQ ID NO: 444686 - DNA, 122 bp, Homo sapiens
gggagttctgaagaaatgacactgtgaacttggagttcatcaagtttatcccacattctacgtaaaaaaaaaaacattttagtgtggccaagtttcaaaaaaccattctcaaggctaaatga

SEQ ID NO: 444687 - DNA, 122 bp, Homo sapiens
tacccaagccccatcaattacctgtgccatagttagcatattgagcctcacagctgggttcgctggactccccacttcacagccagataaactgaggcttggggaggggcgctggtgagttg

SEQ ID NO: 444688 - DNA, 122 bp, Homo sapiens
tagggttccgtggtatagctaccactgtgagtttttatgtcaccattattttttaaagtccgctggtcctgtggaccgtgacagatatgtattacataatcctggatgtgtggcagaagctg

SEQ ID NO: 444689 - DNA, 122 bp, Homo sapiens
ccccgggccctttcaccgccgcggccccgccctatcctcctccgcccaccgcccccgtcccgcccctgctggacctcgccgtttcgcaagcatccgagttctccagccgaggctcgggactg

SEQ ID NO: 444690 - DNA, 122 bp, Homo sapiens
atgggcggggacaatggcgggatgggcggggcctaggggtcggactgccggacctctcctcggcgcgtcccagcgacttttttaggcctgtttgtcgcccagcagtactcgattcttcactt

SEQ ID NO: 444691 - DNA, 122 bp, Homo sapiens
tttccagtctgactcagaccttcaggagccatgaaattttcctgttgggatgagaggaagcgctggcggtcgtttcggcagcttaatgaaaccagaaatagataagcacgagtgaggggtga

SEQ ID NO: 444692 - DNA, 122 bp, Homo sapiens
gaggaagcggtagaaggaagctttctctgtcgggtttgtctttttttaaccccagaaaggcgtgacgtgctaactgccgtcgcgggttagagtccgcggccaagcccgcgcccgcccacaaa

SEQ ID NO: 444693 - DNA, 122 bp, Homo sapiens
aaagggctctctctcatccctctcagactttcttcatctcaatatgtgggagcttaattccgacaactgctcaggtcaaaattgcagtctctttcatacacaatattctatctttaaataca

SEQ ID NO: 444694 - DNA, 122 bp, Homo sapiens
aatgtggctttggaagggaacttagaaatcatctggaatgttgtatcctggagaactcctcgccccacaccagcgccagcacccctccccaaccccctacaccacctccacctttatactta

SEQ ID NO: 444695 - DNA, 122 bp, Homo sapiens
gccgtggccaggagcccgacgtgagcccagcagttccgccgccttctgctcgctttcctccggtcatgggtcatcagcgtggcacaatgtgagagcagaggcacacctggacggccttggcg

SEQ ID NO: 444696 - DNA, 122 bp, Homo sapiens
gcttgtgaagctggagaggctggtgggaagctgtgcatcttccttcgctgaaagacagcacgggggaggcctgtgaagcctgttcactagatgaggtagaaaaatcatttttgtgttttgtg

SEQ ID NO: 444697 - DNA, 122 bp, Homo sapiens
tttctggctctttacacgtgaggattctctgcagcagtgcaaggcagcctgagggtgaggcgccactaataatgatgtgttttcagggggcgcctagtcctcgccatgatgctgtgggggag

SEQ ID NO: 444698 - DNA, 122 bp, Homo sapiens
aggcacggcaggtagacgccgatgaaggtgcccatgcgcggagcctgcgacagagcatagcgtgtcccaggggctcgtaccccacacccagagggagccccctccccaggctgcactcaggc

SEQ ID NO: 444699 - DNA, 122 bp, Homo sapiens
cgaggagtgatgattcttttttctggtgtcagccaagtgttttatcacctaacgcgatcccgcggcacctggtagccactgataatggcaacctggccttctccacctcctctgccgctgca

SEQ ID NO: 444700 - DNA, 122 bp, Homo sapiens
tctggagctccagcggcagcaagagacaaaggccgcgccataccagaaagccgtcctcttcgctccagctgcctgcctgattggagggtttccagaccagcctccctgattggattatgctt

SEQ ID NO: 444701 - DNA, 122 bp, Homo sapiens
gcctgagaagggcctcggaggactggccaggttggagaacgatttcaactgcgtactggacgacacacagaagactgcggggagccttagcccctacccggcctgcagtgctctctggggca

SEQ ID NO: 444702 - DNA, 122 bp, Homo sapiens
gcagcattgtgctagaggtctaatgagacactgccaccaggggctctcctgctgaactcccgtgtaacctactgaatgctttgaaaaaacctacttaggtaattctacagttgtgaattggc

SEQ ID NO: 444703 - DNA, 122 bp, Homo sapiens
gcttggttggcgttggcgctctgcagtgcagtggagtgttagcccagctccctatatggtcggggattagcttggcgctgctgaggctgaggctgagccaggagctggaggaggaggtggag

SEQ ID NO: 444704 - DNA, 122 bp, Homo sapiens
taattgccctaagctgacaatccccagtggctggtcagtgaaggcagagctcagagttaacgaggtcatggccatggtttcatgagggtgaccagggagctttgttttgccctacagccatg

SEQ ID NO: 444705 - DNA, 122 bp, Homo sapiens
cccacctccgggcccccagctcccgttgagggcttagagactacaattcccggcaggtctcgcgctcgcgctgctgcggcttcatagacccggcgctgcaggatctgctgggagttgaagtc

SEQ ID NO: 444706 - DNA, 122 bp, Homo sapiens
agcaggacacttacgactggcaggcgaaggacatgccgaagatggggatgcagcggaagacgccctcccagcggacgtagctgacccgccgcagccactgcccactgaagaggccgtgcttg

SEQ ID NO: 444707 - DNA, 122 bp, Homo sapiens
gttctttccagagacaaggcagacagaacgcagaccggccacgtgctgggcaacccgcagcggagagacgtggtgacatgtgaccgagggctgcccccagtggtcttcctccttatccggct

SEQ ID NO: 444708 - DNA, 122 bp, Homo sapiens
tggggtggttagctgttgtcacttacctccctacgatcagttttattgtgttggtaaagacgccattcagagccagggcaaggctggcagctgcaaagcaaagccattagttgaaaggatct

SEQ ID NO: 444709 - DNA, 122 bp, Homo sapiens
ggagcgcggcatagggcggagcggagccctccaggttcgattggattgctccaaacaaggcggaggaggggcctgagcctgggacccgcaggaagtgagagggtgaacccggaagacagggg

SEQ ID NO: 444710 - DNA, 122 bp, Homo sapiens
ccgcactcctcagccctttggtggtcgatgggaccaggcgccgtgaagcagggggcggcacgtgtcagggaggctcgggctgcgtgggagcccactgggggttggggggtggggagggctca

SEQ ID NO: 444711 - DNA, 122 bp, Homo sapiens
acacttgaatgaagagaatggtggcagaatgagtgagcaagcagattgccccagaggggccggtaataatcacgtgagggataatcagattcctgcgtattcagcatcttctctattcatgt

SEQ ID NO: 444712 - DNA, 122 bp, Homo sapiens
ggtgatgtgcccgccttggcctcccaaagtgctaagattacaggtgtgagccaccgcacccggccacattcagatcttttctaaagatgctggttgcaggcccctatacaccctcacataat

SEQ ID NO: 444713 - DNA, 122 bp, Homo sapiens
tcgcgtgtctccgtcgcggctgggatttctggctgccctcgtgaactctccgttgcacgccggtgacactgctgcaccgagaccgaaactcctgctgctcatcaaagccagaatcttccaaa

SEQ ID NO: 444714 - DNA, 122 bp, Homo sapiens
gagctggctaccaggaaggactcctgcgtttccgagagccaggtcagcgtctctaggagccgtggtgcaggtgcatggtgcccagcacggcactgtcgtaccgctcctgcaccttcacggac

SEQ ID NO: 444715 - DNA, 122 bp, Homo sapiens
acggggagaccttccaggtagtgggaacggcacgggcaaaggcgcagaggtaggagtctgcgtggacaaatcttgatcaaaacgaaaggttacttagccacagcagggacactgcgtcacga

SEQ ID NO: 444716 - DNA, 122 bp, Homo sapiens
cctgaataactcattccatatacctgtatttggcaacattgtccagaattttcacatgcacgtgcattttccatacacaggaaactggttaggcatacacctcagacaggtcagcagacata

SEQ ID NO: 444717 - DNA, 122 bp, Homo sapiens
gcctgaatcccagaataccccagagaggatgcgtgaagatgggtccctgaaacaagagcacgtttgcaggtaaaaatccccaaggagctttggggtcttggaccaaggtggatgggtgcagg

SEQ ID NO: 444718 - DNA, 122 bp, Homo sapiens
tcgggctttcaattaggagccaagctgagaaaagtaggcttttctttatgcacgcctcgccgaggtcaggttacgacctctcaaccgtcttcaatcggcggtggcatccatattcatgaagg

SEQ ID NO: 444719 - DNA, 122 bp, Homo sapiens
ggacggggtgggcactacacttgtcctccagcctgcgggagataactagctccatattctcggctccctaagatcggggaaaagcccgttttctaatgggactttttaatttagttttcgtt

SEQ ID NO: 444720 - DNA, 122 bp, Homo sapiens
tgtggacggctgcacctgccccgcgggcaccttcctcaatgacgcgggcgcctgtgtgcccgcccaggagtgcccctgctacgctcacggcaccgtgctggctcctggagaggtggtgcacg

SEQ ID NO: 444721 - DNA, 122 bp, Homo sapiens
taagtattcagcaggtcttgcctttcatattaatttttatgacctgggatgttgcctgtgcgcgtgttgtgttgtgtttcgttgtgtctacaggctcactttcctcctcctcctgcactctc

SEQ ID NO: 444722 - DNA, 122 bp, Homo sapiens
gggcgcgaccgggaagcctctcttggcgtcccttccccagccgcagtttgggcaggggagcgagggccgggaggcgtctaggctgtggcgaggggagaagcatcccccatccctccgctccc

SEQ ID NO: 444723 - DNA, 122 bp, Homo sapiens
aggctgggctctcgagcgccgcctgtcgcaatcccacggccgctgcagcgcaccccctcccgtcccctgccctgagcccgcctcgcgtctccaattggctgtctccattctcccgcccctcc

SEQ ID NO: 444724 - DNA, 122 bp, Homo sapiens
gcaaagcgatgtgatcacaagtgattttttgttctaaacaaagtgatttcctgttagcaccgcgcagaactgtgtaggcccagtgaccctggttggtgtccggatgatttgattaaaagggt

SEQ ID NO: 444725 - DNA, 122 bp, Homo sapiens
gcaggggtgaggctttgccggcccctgagcgtggagcggcctttccagtcggggtgaggccgttcaccgagagatgaggccgcccaactgggaaaattgggctcagccattgaacagcagtt

SEQ ID NO: 444726 - DNA, 122 bp, Homo sapiens
acttcaatcattttgccacatgaaaatccaaaaatctagtacatatttatatccaactctcgtgctgttctcctccctttcaaaacataagaccaaatcaaattaaggcaaccattcaaaat

SEQ ID NO: 444727 - DNA, 122 bp, Homo sapiens
ggggctgggggagacagacaataaacgaaacaaatatatcaagtatctgttagtaaaaagcggtatagagaaaatccaggcaagggtaatggagagtttcagctagggggagggtcgcaatt

SEQ ID NO: 444728 - DNA, 122 bp, Homo sapiens
ctccactgtactcagacccaggtagcacaggattgtccatcctccagcagctcagtgcaacggtgtgaactcagcctgtttcagagcctccacaccatggtgagtcatacagggccgggacg

SEQ ID NO: 444729 - DNA, 122 bp, Homo sapiens
ccaggtttcaaggaaagattggaggcaaagcgcccaggacacagtaggcactgccacgggcggctccagaatttccgtgtaggagagtttcagaagccagaccagaggaaggggtcggtggt

SEQ ID NO: 444730 - DNA, 122 bp, Homo sapiens
acaagcaggaataaggaaattaataggcaaaagataattctcagtatttgctttataggacgagtcagcaaaagtcctgtggatatccctgaacttggctgggtggtaaactaattccgact

SEQ ID NO: 444731 - DNA, 122 bp, Homo sapiens
gtgtgttgatgctgagtttggccacgccatctccctgggttagagactgcacagtgtcctcgccctggactgccacggggactcggtaggctggagagccatcagggttcgtcacgaacacc

SEQ ID NO: 444732 - DNA, 122 bp, Homo sapiens
ctaccagagacatctcatgccacgggaccagacaggtactgcccgccttggaaacctggacgtggaagaagagaaagctgatggccaaccctcattgtgggtggccaaaacttctgacccca

SEQ ID NO: 444733 - DNA, 122 bp, Homo sapiens
agcccgggtcagtttcgcgggggctggaagttggtagcgggtcccctcacctgctgaggtcgctcacgaaactgccgctcttctcatccaggaagcgcttccagccgtcggccgtcttcacc

SEQ ID NO: 444734 - DNA, 122 bp, Homo sapiens
gaataatgaaggtcaagactgtgattcctgtatctttgacgctctcggtataagcaccgtcgtgggcacagggcagtggcctttatgcaggagtttaagagggaatgaaggaatgaatgggc

SEQ ID NO: 444735 - DNA, 122 bp, Homo sapiens
gcccgcctcgcccgggcaggtgcacaaaggtgagtgccccgcaggctggctctgtcctctcgaagccctctaaggtcggacagctggagacagatcctcatcctgctgcccggaagcagccc

SEQ ID NO: 444736 - DNA, 122 bp, Homo sapiens
cccggcggggccaggcacgggcagaagggccaagagggccacaggtgggcgcggagcggccggagtgggcggggactggatgagaggggcggggtctaggagagaggggcggggcggcggcc

SEQ ID NO: 444737 - DNA, 122 bp, Homo sapiens
agttgacaagaaggaatatccacaaatgtaaaaatgcaagatcaaggcttggcccagaaacgatgcctaaaatcaaggggttaaaaaaaggagagcagaagagagatccaagtccaacctgg

SEQ ID NO: 444738 - DNA, 122 bp, Homo sapiens
gacatctaaaggaagcattgcccagaaaacccaatccgtaattttaataagcataatttacggaagagtcaactactgtgtgatttctcctctgactgtcatgggaatcccttcctttcctt

SEQ ID NO: 444739 - DNA, 122 bp, Homo sapiens
gcgcagtttgcagttgcagctctggcactggcgcgggatggcggagcttcccttggatggcgtcagggtcactgagtgcacagcctacctggtctgagggtctgctcctcctggacacctct

SEQ ID NO: 444740 - DNA, 122 bp, Homo sapiens
cctccggagctagctcccggcgcggagctccgcctacggcccgtccccggcgcggaaccccgcccacgagcccgtttccagcgtggaacaccgcccatagcccgtccccagcgcggagcccc

SEQ ID NO: 444741 - DNA, 122 bp, Homo sapiens
ggcttagttgctcgctccttaggaaaggaaaaacttgctgcctgataaagggattaaggccggagtaacacaaccagttctcataccaaggttatcaggcatttgaagtacacataggaaac

SEQ ID NO: 444742 - DNA, 122 bp, Homo sapiens
atccaacagtgaacaaaaatacatgtagacccagatattcccaagcataataaattgcaacgtttataagtattaatctgatagatttatctgacttccaaaagatgtgacacatgaactaa

SEQ ID NO: 444743 - DNA, 122 bp, Homo sapiens
gtcgcgctgctgtaaaggaaacctgccccgcgcagcggcggtggctggagcgggagaaaccggactttgtgcaactttggccatagtggccatcccatgaatctgtttactagcttggtggt

SEQ ID NO: 444744 - DNA, 122 bp, Homo sapiens
cgcaggtgtgtgtgacaacacaacctgtagctccagcttctgtgtgctgggatgggtgatcgggccttctgggtgacgcaggtgtgtgtgacagcacaacctgtagttccagcgtctctgtg

SEQ ID NO: 444745 - DNA, 122 bp, Homo sapiens
tcggcctcgcgagatttctttcagcgcagtcttccctttgatctgagctgtctcaggcctcgcgccgctggatattaaacctgccggccggtagctttcggctcccctgcggaaaccgccat

SEQ ID NO: 444746 - DNA, 122 bp, Homo sapiens
tggcctgcatggtgtgtgtgtgtgcacgtgtgttgcacttcacagcttggacaggacacacggctcaactttgtagtgttcttggctggcccgaggtactgggatgccgcattcagaccact

SEQ ID NO: 444747 - DNA, 122 bp, Homo sapiens
ctctatcttattgagcacacttttgacggtggagatgccgctttattgcaaatccctccccggactcctcctcttcttccaaaattcaggctgaagacaattgccctgattccctaacctaa

SEQ ID NO: 444748 - DNA, 122 bp, Homo sapiens
gggaggaagggagcctgcttgccgggtcacctggcattgggagctgtcccctgcctgctgcgccccgcctgccattgttggagttctccagtctgggctggtctggatgaggaactggcggg

SEQ ID NO: 444749 - DNA, 122 bp, Homo sapiens
tacgtgtgtgtgtgtgtgtgcgtgtgtgtgtctgtctgtctgtctgaaagatttcctccccggctggaggccagtggactctgtttgaccctaactctttgactcactccttactcttgcct

SEQ ID NO: 444750 - DNA, 122 bp, Homo sapiens
ccccttggacacatggatttaaatcgtagagctaagactagtaaaagcaactgctgtgcacgtggctggtgctcagcatttgctgaatgaatgtatgcacacctaagcaaataaccaaacta

SEQ ID NO: 444751 - DNA, 122 bp, Homo sapiens
tggtttttgtttcttagagagacactattttgctgtcacccagtctggactgcaggggcacgatcatagctcattgcagcctcgaactcctgggttcaagtgatcctcctcccacctcagtc

SEQ ID NO: 444752 - DNA, 122 bp, Homo sapiens
cgcagagcccacaggctgggactctgagaccggttccttctttatcaaacctctcccatccgcagcgggaggctgggacggcaggtagcgtcctccttgtggggctcacatcgaggatggtg

SEQ ID NO: 444753 - DNA, 122 bp, Homo sapiens
taacacttcttatggcttatctgttggccttggacatcagcacatgcaaaagtaaataaccggatacccttgggtcacatgttttcatactttgattaagaattacacttggttaaagatga

SEQ ID NO: 444754 - DNA, 122 bp, Homo sapiens
gtctgccattctcttcttaccccctcaaccgagtaaggatcactgcccatcctgtgtacccgggttccactaactttatctcctgaggaatgcctcaggaatgctacaagaattggcctaca

SEQ ID NO: 444755 - DNA, 122 bp, Homo sapiens
gcgcgcgacggcaaggtctgaactctgttacccagaggccctagcaaccaggaggcggcccgcgctggttaaattctcacattataggcagggtggcgagaccccgccccggaaatgcgtgt

SEQ ID NO: 444756 - DNA, 122 bp, Homo sapiens
gggagaggcccctccttcacgccctgcttctctccctcgctcgcagtcgagccgagccggcggacccgcctgggctccgaccctgcccaggccatggccggcaacgtgaagaagagctctgg

SEQ ID NO: 444757 - DNA, 122 bp, Homo sapiens
atgccagtctcctgtggctctgtcccctccaccttcctcccgtggccccatccaggaaatcggcccacaagagaggccgacgctgcttctgaccagagctaccgagcgcctctctggagaca

SEQ ID NO: 444758 - DNA, 122 bp, Homo sapiens
atcatcgtttctgtctccttgctactgaggctctctttcctttgatccagatggtgtggtcgctcgattctcccagtgcctggctgagtttcggacgtggttaagaaccaactggttgaggt

SEQ ID NO: 444759 - DNA, 122 bp, Homo sapiens
gggtgatcctgttctgcgctgtgtacaatgtgagatcggtgcgttctcctgatgttttgccgtggcttggggattgtacacgggaccagctcacgtaatgcattgcctgtaacaatgtaata

SEQ ID NO: 444760 - DNA, 122 bp, Homo sapiens
aagcactgtgctggacacagaatcaaacacaagaggtattatcccattttatagacaagacggccaaaaatttgagaggtcacttaaacagctagtagatgaggaatggattttggaccaag

SEQ ID NO: 444761 - DNA, 122 bp, Homo sapiens
ctgttgtaactatgcattaggccttatacagaaaagacgctgaaattcggttaggcttcccgagacgctggctatagaaacgaccccaaatttctacgtttgagaacactgacttccattct

SEQ ID NO: 444762 - DNA, 122 bp, Homo sapiens
actacaacaagccgatccccgcccagtacttggagcacctgaaccacgtggtgagcagcgcgcccagcctgcgcgacccttcgcagccgcagcagtgggtgagcagccaagtcctgctgtgc

SEQ ID NO: 444763 - DNA, 122 bp, Homo sapiens
gagaggcaaaaagctttagctggacacccaccaagcccctggcaacccaaacacttcgagcgatttacctcttgctgttacttcccaggcacctagccgcataagatcttgcaggacggggg

SEQ ID NO: 444764 - DNA, 122 bp, Homo sapiens
agcccacaggaagcaatcctcggcctctcaccccacaggctgagtgagcacagtgacatccggctgagctctgttctggccaagagcatgtcacatccccaacaagagaggtaattcctgag

SEQ ID NO: 444765 - DNA, 122 bp, Homo sapiens
cgcctgctcaaggccagcgagccaggacttttctcagtgggcctgcacacgggcgaggtgcgcacggcgcgcgccctgctggacagagacgcgctcaagcagagcctagtggtggccgtcca

SEQ ID NO: 444766 - DNA, 122 bp, Homo sapiens
tgggccatgggttttcatgaggggcacatgtgagctggtaagtaaattacacctacacctcgtgtaccggggaactccaggtcccgaaggtagaatgacctgtcaggaggcctatcagtatg

SEQ ID NO: 444767 - DNA, 122 bp, Homo sapiens
agcggtccgggctcagggtcgggggcgtaagtcacttggcgctgaccagcggagtcgggccggggggaaggcgctagagggagcccaggaggagccggtaccgggctgcgggcgcttccgcc

SEQ ID NO: 444768 - DNA, 122 bp, Homo sapiens
caccaaaaaggcttcactcttcacccctaagatggtagtaatgtaactaccccagtgttacggtaaaggtttaaataagataatgtacagaaaacactgagcaccacatatcaatagtaagt

SEQ ID NO: 444769 - DNA, 122 bp, Homo sapiens
ggacattgttggttgctagtatcagaaacccagctcaacctggcttagagcagaagagggcgcccctagccaaaaaatctgcagtcatctgattggccaccctagtatctagagttggagtg

SEQ ID NO: 444770 - DNA, 122 bp, Homo sapiens
taatgtaactgtgaacaagagacaaaaatctctgcattcatggagtttacattttattgacggatcaaataattaacataggctgcggagtggtggctcttgcctgtaatcccagtgattag

SEQ ID NO: 444771 - DNA, 122 bp, Homo sapiens
gtgatgcatacgaagtgttcatgctggcgggacctgtccctggggatacttcgggggttgcgtgatttaatgcaagcagatggcttaaattgggtcactggcttgttattatacatgtgtat

SEQ ID NO: 444772 - DNA, 122 bp, Homo sapiens
tatctgagcacctcaattttccgtccctctacgatcgtcccattcagcttctcccgggctcggtcagcatctgagctagtttcaaaagttacaaacccaaaaccctgtgagcagaggagagg

SEQ ID NO: 444773 - DNA, 122 bp, Homo sapiens
tgcgcagcaccccttaatcggagcgctctagaacccgtgcagcgagcagcaccccacacccggagcgctccagaatccatgaagccagcagcaccccacacccggagtgctccagaatccac

SEQ ID NO: 444774 - DNA, 122 bp, Homo sapiens
tatgttcctgttttaaactgatacctctccttaaatactttttgaaaacttttcttggggcgggggaggttatcagtcatctgtacttttatgagataaaactggctaaaatttccgtaaat

SEQ ID NO: 444775 - DNA, 122 bp, Homo sapiens
cctgcatgcttactgtcggttcttatcttcgggaaactgattgtaccttgtgtgtgaattcgcctgtgtgccctccaaagctctagctttctggtgctaagcggtgatttcctcctggggaa

SEQ ID NO: 444776 - DNA, 122 bp, Homo sapiens
aaggaaatgggcagaatttcgtaaatgctgttgtgcagatgtgttttccctgaatgctttcgtattagtggcgaccagtttctcacagaattgtgaagcctgaaggccaagaggaagtcact

SEQ ID NO: 444777 - DNA, 122 bp, Homo sapiens
cctatgcacttcactctgtgtaaattatacctcaataaaaggaaatgtacagacaaaaagcgactgctgggtgcagcagacccaactcaccgctaccacactctttagcaataattataaca

SEQ ID NO: 444778 - DNA, 122 bp, Homo sapiens
tcaagctttagagcctggctactcacagttgaagcctgattgcaggtcagcaatgctaaacgttaaatgcctcttatatttaggggataaggactccgtggaggttttctctggtcccagct

SEQ ID NO: 444779 - DNA, 122 bp, Homo sapiens
ggcgcgtgtagtacttttctgtgacgacctgggccgccttcttcacggtttgggtgtgaacgcggcccatgttggctggtccttggtaaaagaggccctatcagaggtttctaacacacatt

SEQ ID NO: 444780 - DNA, 122 bp, Homo sapiens
cacttggatcagttccacacttttctgaatttcacgtcttcctttcttggttttcatcctcgttttgctggagtgcattttcgggaaggacgtgatggagagctttcagagcccctcggcat

SEQ ID NO: 444781 - DNA, 122 bp, Homo sapiens
tgggtgatcgggccttctgggtgacgcaggtgtgtgtgacaacacaacctgtagcttcagcgtctctgtgctgggatggatgatcgggccttctgagtgatgcaggtgtgtgtgacagtgca

SEQ ID NO: 444782 - DNA, 122 bp, Homo sapiens
cccaagttctccatcaagacgcaggacaggtgggaacagggcccaaggttctgttcctggcgagcagctgctttctgccccactagatcttaaatcgaggactcagagatccccttgacatg

SEQ ID NO: 444783 - DNA, 122 bp, Homo sapiens
agcggagcaccccagtcctctcccctcagtggtctagcgccaaggatgaggcggagaccacggtgaagtgacctctgagactcagtcgtcgagtgctagggactagtcgaggctggaggcac

SEQ ID NO: 444784 - DNA, 122 bp, Homo sapiens
gggtgcgggtgcgccgagccctcgggaggcctggctctggtgtgggctgcggggagaaggcgcgggaaggaaggaaggaggcgaagcggtgcgggagggaggcggccgttgccatggaagga

SEQ ID NO: 444785 - DNA, 122 bp, Homo sapiens
ccccccacccttcgagcagctccatcacggtcgtccgtgcagcttgggcgtatgggaatacgtcagaggcgttttgctcgcctttccaaaagcaaagcaagagaaggaagcttgtcgcgggc

SEQ ID NO: 444786 - DNA, 122 bp, Homo sapiens
gaggggacctgcaagtgcggagactgaggggcggcggctgacgagcgaccactccgagcacgcccgccctcgcgctcggcgacgtctggagggctcctcgcagctcccggccccgctcctcc

SEQ ID NO: 444787 - DNA, 122 bp, Homo sapiens
taaccgggcttcttatctttctctgagaattgactcctgaaatatttgggtttcggattccgtgtcttcactacctgaccggtcaggtctggcttgctcctccgtatcttccagacatagcc

SEQ ID NO: 444788 - DNA, 122 bp, Homo sapiens
gtatattcgttattttgttttaagcaaacctacaccaagtttcaaggcttcaaactccctcgacagtttggaatcttattttgaaacaattctaggtcagtaaagatcccttaaggggagat

SEQ ID NO: 444789 - DNA, 122 bp, Homo sapiens
aggcaaaggtgagatggttaacacaccctcagaacattttctgatctcctgcaagtggttcgggcgcagaactgggggcactgggtaggtaggggaaagaagacagagaagacccctgttct

SEQ ID NO: 444790 - DNA, 122 bp, Homo sapiens
atgtgaagaataggagagaacagcagtttgccacagcagggccctggccagcactccgcacggtgctctgatgacttgagaaattttgtggaagctgggagaaagaaagagcttacaaagca

SEQ ID NO: 444791 - DNA, 122 bp, Homo sapiens
gggaagatgaagactgaagtcctggccgttatgagtttgaagccctatgagccatctacgcggagagagctgtatacgctcttggatgtgtgtttagcggccaggctggggtggagaggtac

SEQ ID NO: 444792 - DNA, 122 bp, Homo sapiens
gtgcgtgactcgcgtgtgtgcagagacgggtgcgcgtgactccacacatgtatgcagagacgggtgtgcatgaccacgcgtgtgtacagagataggagcgtgtggacatgtgtgtgtgcaga

SEQ ID NO: 444793 - DNA, 122 bp, Homo sapiens
ggagggcgtcgtgctgcgtgtctgggtctggctgtgtgtgtttgcgcgcgtgcgtgcgtgcgtgcatgcgtgtgtttactgcgaggaggcatgcagccttatggaagctgggccgggagcag

SEQ ID NO: 444794 - DNA, 122 bp, Homo sapiens
gcgcggcacggggacgtgtaaacctccgtccccagggagcctggagcacctctcagagggcggagcagcggccattcccggcccgtggcaggctcccgggcggcggccaggtgcacacgcag

SEQ ID NO: 444795 - DNA, 122 bp, Homo sapiens
ccagcccttgccaccagcacagggagcccaaaacctgtcgcctgggcgcggagctgggaccgccgaaagccgggagcactgggcgcccacgcgtgggctgacactcggtccccggcacggcg

SEQ ID NO: 444796 - DNA, 122 bp, Homo sapiens
gaatgaggaatactgattgatttagttgggaatgaaatcataaggggtcgaagctgtcttcgtgcactgagttagttccagggtggaggtcagtttcttggtatgggatactggtctgggtg

SEQ ID NO: 444797 - DNA, 122 bp, Homo sapiens
cgaccctttccttttgtgattccccagtcactgtctgtggttgtgtgatcgtgcaccctgcgcatgctcagtcccaggatgctttgcctccgcggcagtcatgactccagagccatctgcat

SEQ ID NO: 444798 - DNA, 122 bp, Homo sapiens
ttgagaggctgcggtttcctccagaaactctgccctttcgcgcgtaactcgattccagagcgctggtgcaaactgacccacagtcggtccggccccaggaagccaaccctgacggggctttt

SEQ ID NO: 444799 - DNA, 122 bp, Homo sapiens
tgaatccgggaggcggaggctgcggtgagccgagatcgtgccactgcactccagcctgggcgacacagtgagactctgtccaaaagaaaaagaaaaggaatggagttcagaaagaaaggggc

SEQ ID NO: 444800 - DNA, 122 bp, Homo sapiens
gtgaatgaacgatctaagggagcgactgagggcgcgtgacgggcccgccgggcactggttcgtggagcgtggcggttacgggcggtgcacagcgcccgcagcccgctcctagcgagctggcc

SEQ ID NO: 444801 - DNA, 122 bp, Homo sapiens
aaataagatcaacagggaggcagtccagtgtagtgaatgcacattcaagatcaggtgaatcgcagctccatcacctttctctggtgtccttagttactggagccagtgtatatatttaagtt

SEQ ID NO: 444802 - DNA, 122 bp, Homo sapiens
ggagccgcggctgggggaggcggagccggggtgggcagtgtggtgtatctctctccaccccgggccgcgctccgggagggaaaagggactgcagaccccctgtccgtgctccctgctgagac

SEQ ID NO: 444803 - DNA, 122 bp, Homo sapiens
aggaggcggctcgggagtcagccgcctgcccggctgcggggccagcgctctggcgcctgccggaagtgctgctgctgcacatgtgctcctacctcgacatgcgggccctcggccgcctggcc

SEQ ID NO: 444804 - DNA, 122 bp, Homo sapiens
cccctcctcattcacaaaaaattgacccacgttgaaccatgatgcttctccccactccagcgtcgagccaggcggcgataggccaccccgcacgcccgtcagccggcccggccccgcccagc

SEQ ID NO: 444805 - DNA, 122 bp, Homo sapiens
ctagcctcacagcaccgcgtggagttgcttgttcttttacataggaggtcacattctcttcgtgtaatgccaccaatggtgccgattctccccagtggggctgtgagaaacctacgccctct

SEQ ID NO: 444806 - DNA, 122 bp, Homo sapiens
gagccttccgcacgcgccctcccccgcccctcctggctgggacactccagagaagggacacggggtctcccagaccccctggcatacgggcaagagggcccggccagcactgctgcagatcc

SEQ ID NO: 444807 - DNA, 122 bp, Homo sapiens
gacaggcccctgctggcccggcagcctgagcttccacacttttccagggcgtctcgagttcgcccacagagctgttgtttcaggataaaaaatgcccttgtattccacgttccagttcagag

SEQ ID NO: 444808 - DNA, 122 bp, Homo sapiens
aggccgggacgcgatgagagatttacaaggtgtcctttcaaaaagaattcccagtggagacgaggctgaaacgtcttctttacaattacaaccaaaataattagaaaagcgcaaagtacatt

SEQ ID NO: 444809 - DNA, 122 bp, Homo sapiens
tctggccacagacagctctggcaaatatcgaggctgcccttgctcattgtggccttccctcgtgtcactgcccttcatccttgtcataagtgtcccccactcccacccatggattagatccc

SEQ ID NO: 444810 - DNA, 122 bp, Homo sapiens
ggccagcccgggctgcttaagtccctagtctcggccgggcacgaggacagcgcccgggagcgactgcagcctccgaccccggctgggccagcccgggcttcagctcacgcagccgtcggggg

SEQ ID NO: 444811 - DNA, 122 bp, Homo sapiens
ccccgcgattgtagtcctagaggcggagtcctcgccagagttcagcaaaggttcgctggccgaggcgggtcccagaccggcgaacccgacagtggagggcgtgaccagttgtgcaaaaacta

SEQ ID NO: 444812 - DNA, 122 bp, Homo sapiens
gacgcgaacggcggcaaaggccctcttcccctgaaagctggcgaggcgcgcgcgctcccgcggcacgccgcgcctccgccctccgcccgccaacccgctggtccagtccctcttcgcgcccg

SEQ ID NO: 444813 - DNA, 122 bp, Homo sapiens
cccccgcgcagccctgcaaatcaggctctcagctattggctgcctcggtggccaggagggcgaactgggcggagtcttggggggctcgacacgatggggcggggcttggcggggaaagaagc

SEQ ID NO: 444814 - DNA, 122 bp, Homo sapiens
ggcagctttagacttgaagcttttggaggccacatctacacagacaggtaaggggcgtctcgaacacagtccttctgaaattcttggcgaatctcccctccctcccgcaggcttccgtctgc

SEQ ID NO: 444815 - DNA, 122 bp, Homo sapiens
agccacagtctggccctcgcccttccctgctgtggcccctagctcacccggcccatctcccgcagcttggtcagcatcaccacgatcgtcgaattgttctcccacagcatgcgccagaagtc

SEQ ID NO: 444816 - DNA, 122 bp, Homo sapiens
cccccgtgaccgccctccctgccgagggggcacctgtccgggtggtccgcagcctgcacacggtaggtgcaccctgggcaggtgcttcccccgcaggagcccctccggccaggtgcggcccc

SEQ ID NO: 444817 - DNA, 122 bp, Homo sapiens
gtgctgtgtcctccttgttagatgtgtcttcagcctcatccagggcttctctgaggcgaccgtcaaccaaggggctgggataaggcagagagagcaggacaggcagctgggccccaggagca

SEQ ID NO: 444818 - DNA, 122 bp, Homo sapiens
atcctgacacctgtttttagaaaaaaggttttattggaactcaggatgcccattcatttacgtattgtttaaatctgccttcatgctacattggcagagttgagtagttgtgacagaaacca

SEQ ID NO: 444819 - DNA, 122 bp, Homo sapiens
accccagcgccaggacgcgggctccttcccgggagatctcggtgtggatgtggtggtagtcgggcgggcactgggagaactgcagggaatgcagggggatgtcacgggctgccccgcgcccc

SEQ ID NO: 444820 - DNA, 122 bp, Homo sapiens
tgagcgtgggcagcctggagtcaggggagcctggggaccacggccttggtcagctctgcacgatcagggctgaatcaggaagtggcagatctagcaacaaagtccagattcctgaccgatat

SEQ ID NO: 444821 - DNA, 122 bp, Homo sapiens
tgacttcaggagtgataccgcagactttcaccgttagtgttacagctcttaaaggtggcgcgtccggagttgtttcttcctcccggtgggttcgtggtctcgctggcttcaagagtgaatag

SEQ ID NO: 444822 - DNA, 122 bp, Homo sapiens
tctacctgtctcatttgagttgagtgtgaattgtttaggatattgcaattagaggtggtgcgggctggctggttgctataagccatcttaacatttggctaagctcactcctgtgtgctggg

SEQ ID NO: 444823 - DNA, 122 bp, Homo sapiens
agctgcgctcggcggagtgcatcgacgaggcggccgagcggctgggggccctgagccgcgcgatctggagccagcccgagctggcctacgaggagcaccatgcccaccgcgtgctgacgcac

SEQ ID NO: 444824 - DNA, 122 bp, Homo sapiens
ttacaggcgtgagccaccgcgcccggcccatactagctttcttaatcctcacaaaaatcccgggaattaggtgctatcattatccctgtttcaaaaggagaaactgaggttaggtaatttgc

SEQ ID NO: 444825 - DNA, 122 bp, Homo sapiens
gctgcgccggctcctggcagggtgtgtgctttgatgggctctgggggcagagccagctggcggcggcaactccgttgcccagggaacagccattgaagtgtgcgctcccgagtctgcaccag

SEQ ID NO: 444826 - DNA, 122 bp, Homo sapiens
aggagcagggtgccggtggggcggggcgcggttaggacagggcagggcgttggtaggagccgggtgccagcaggagtagggtgcaggacgcgggtaggatcgaaacctcatgctggaaaggc

SEQ ID NO: 444827 - DNA, 122 bp, Homo sapiens
gaacttaggccttaggattaagtagacttaggtttggttccaaactctaccacttgctaccgtgtcaccacttacagctctgtcattatcactagttgtccttcccaatgtcccttaactac

SEQ ID NO: 444828 - DNA, 122 bp, Homo sapiens
tgcatgggcttcagggaacccagaaaccctctgaaacacagattttcagtgtctgaaatacgacaaatgtttgtaattcctgagaattccaatgatgtaaagtatatggaagctgtcttctc

SEQ ID NO: 444829 - DNA, 122 bp, Homo sapiens
aatatgatctgtggagaatgtacacagtttaaacacatcaataaatactttaacttccaccgagactgctcgtttcactgactgcggcattgatctgcgtgatggtcctacccccttcctcc

SEQ ID NO: 444830 - DNA, 122 bp, Homo sapiens
ccgccgtccctgtgtgcgtgtctgtgtcccaatcttcttctcttgtaaaagaaacgagtccggctggattagggcccacctccatgccctcatttttcattaattacctctttaaggcccta

SEQ ID NO: 444831 - DNA, 122 bp, Homo sapiens
cgccccagtgccgagacccggggcttcaggagccggccccgggagagaagagtgcggcggcggacggagaaaacaactccaaagttggcgaaaggcaccgcccctactcccgggctgccgcc

SEQ ID NO: 444832 - DNA, 122 bp, Homo sapiens
aagttagctctctggtcatttgttagatcactagtcatagatgagagtatgggtgggtcccggcaaaatgtggcttaacaagccctccaagtgattctaacacaccgccaaagtttgagaac

SEQ ID NO: 444833 - DNA, 122 bp, Homo sapiens
cagtggcaccccaagctcactggaagccttggggacaagggaggatccaggagaaagggacgggtgtagagcacagggcagaagcggagggccagccacttctcctgctaccaccagggcca

SEQ ID NO: 444834 - DNA, 122 bp, Homo sapiens
ccttcatgactttgggcatggctgctgagaccaaatgtctgcctgtctccaggagatgcccgctgacttctgtgctcctggaatttctcaccgtattctaaggttccaaagggctttcactg

SEQ ID NO: 444835 - DNA, 122 bp, Homo sapiens
caatgcttgtcctcctttaagacaaaaatccctaacattgtgctgtcccttgaacacgtccgtgtgtgacctaggtgcaccgtgtctgtgcgcgcgcgtgtgtagcgtctgagcgtgagcga

SEQ ID NO: 444836 - DNA, 122 bp, Homo sapiens
taggagcccaatgagaggcggcaattccgtagtggaggcgggctctgggagcaacggccccgccccttttgggggttcaccgaggttgggggagggatggggcctggctcaaggcggagaag

SEQ ID NO: 444837 - DNA, 122 bp, Homo sapiens
ttttagatatatatgcgtttttaaggctaaatagtattccattgtgtgtgtgtgtgtgcgcgcgtgcatgtgtatatgagcccattcttctgaaaagtatctttcaagccaggcaaaaatgg

SEQ ID NO: 444838 - DNA, 122 bp, Homo sapiens
ctttttcggcgaggatttaggtttcatcggagttcatttatgtttgcagattgcgccctccgttatgaaaacacatcctttccttctactcccggaggaggcctgctgcgggagggaagctc

SEQ ID NO: 444839 - DNA, 122 bp, Homo sapiens
ctccaaaatctgactctctctccagccccgatctcagtgtgagccgaacctcagaaaagacgctttttaagggcgacacagggttggctttacagcggggccaagaagactacctgggggta

SEQ ID NO: 444840 - DNA, 122 bp, Homo sapiens
tccgccatctttttgttctagtcttgataacgggaataacatccacaaaacgcaaggtggcgctgctggctaaaaagagagagagaaaaataatttcacaaagaaaggatgttacagattcc

SEQ ID NO: 444841 - DNA, 122 bp, Homo sapiens
tcttgtcccccaggctggagtgtgatggcgagatctcgggtcactgcaacttccgccccccgggttcaagtgattctcctgtctcagtcccccgagtagctgggattacaggtgcctgtcac

SEQ ID NO: 444842 - DNA, 122 bp, Homo sapiens
cccctgtccccactgcaccccggacccctgggccccactcacggccttccccatggtgcccggtgcctgtgctcccacccaacagagcctgggcccggaccagtcctgatatacccagggag

SEQ ID NO: 444843 - DNA, 122 bp, Homo sapiens
tgactggtttttgtatttttggaggagacggggttttgccctgttgaccgggctggtctccggctcctgacctccaatggtctgcccgcctcggcctcccggggtgctgggattgcagacgg

SEQ ID NO: 444844 - DNA, 122 bp, Homo sapiens
ttgctaaggaaggagggggagtcatggtgcctccctaatactccttggcaggaaatcctccgtgcaatccatcttcaagcctgtgtgttggtcattattgttacagcagcattttagcggct

SEQ ID NO: 444845 - DNA, 122 bp, Homo sapiens
gaacttggaaggaggcccccgagcctcccgcatcaccccgcatcccttctgcccacctcccgcacaaaacacaatgttcagagcactcaaaatgacaaggaggccacatagatgcccgacaa

SEQ ID NO: 444846 - DNA, 122 bp, Homo sapiens
gccacgcgcttttgcagggtgtgtgttcgttctcacctgcagaaggaggcggggactgcacggacgctcatgtccctcccagagctggagcttatgggagcctccagcaggattcaggccac

SEQ ID NO: 444847 - DNA, 122 bp, Homo sapiens
tgctgaggtctgcgtggtctgagcagaggagagcaggctgggattcggggaacccacggccggatgtcagggctgtaccagcctcttgtgctttctgtccacacctcccagccctgacctga

SEQ ID NO: 444848 - DNA, 122 bp, Homo sapiens
gtcggggggctgcagagggaattaccttctttcatttgcaaatgttactgggggacacaccggctcccagtagggtttccgccaaggctccgcgaaacgccactagagggcgccgctagcga

SEQ ID NO: 444849 - DNA, 122 bp, Homo sapiens
gctttgtcacccgttagcaggcagatagagcatgtgtttcacattattaattcgaggcaacgttagggctggttgaggcagcttttaagaaagcagagtctacacatccccatctttcatcc

SEQ ID NO: 444850 - DNA, 122 bp, Homo sapiens
ctctcacccctgtggcggaggcctgcatgtgaccctgggccagctaagctggtccttagacgcgtgcctctgcgtctctcacttcctctctttgttggagggggagggacggagaagaggag

SEQ ID NO: 444851 - DNA, 122 bp, Homo sapiens
ccttctgagtcaaagaaggccccttctggtgcgttgagagagacactaggctcgggagagcgctggcctctccagtaaatggtggggatccgcacgcctcaaagggctgcgccccgggaccc

SEQ ID NO: 444852 - DNA, 122 bp, Homo sapiens
ctgcggtcctagagccggggacccagagacccccgcgtaggaaggggtgcggcggggaggcgcgggggtggcggcggcgatctgggagaaccctggaggggaccagctgcgacacccaccgc

SEQ ID NO: 444853 - DNA, 122 bp, Homo sapiens
aaattatttgaagctaaaaataaaaatatttcaggaagtgccaactcaattcattttgcccggaaaagataccggatattcttgcaaagagtatggtagcctgggttgcaaaggggttcggg

SEQ ID NO: 444854 - DNA, 122 bp, Homo sapiens
gatcaggatatctctaaagtaaggagaggaaaaagaaaagtatgtgtcagaagtgggattcgaacccacgcctccattggagaccagaatccccaccgcggaggaagcttagcttgagtctg

SEQ ID NO: 444855 - DNA, 122 bp, Homo sapiens
ccggtgcagttccaagtagagtcaacataaagccaggcacttgtgagatggagaccggggcgaaactgcaagcagatgccctttgctgactgttgaagaaagaggatctggctgaaagaccc

SEQ ID NO: 444856 - DNA, 122 bp, Homo sapiens
gtcctgtcacttagttcaactatttaccagtggctttgaataagacacttaagtgaccctcgtctgaaggatcaaaatgcttacgttgcaagaatgttatgagaagtgtttgtatagtgccc

SEQ ID NO: 444857 - DNA, 122 bp, Homo sapiens
cctctcccctgggcttcctgtgtcctctcccacggggcccctttggggagactcaggctgcggcatcgtggtggccgtggggtggggcaggcttccgaccacaggctggaaccacgtccgcg

SEQ ID NO: 444858 - DNA, 122 bp, Homo sapiens
tgtgagtagtgggcatcgtgtttgtggacagagtttctccgtgtcgtggccatttcgattcggaactcgggtgaccgctgctgttcccagcctcctgggccgctgctttactgcggtgggga

SEQ ID NO: 444859 - DNA, 122 bp, Homo sapiens
ttgttctaggacaacacagaaacatttgcgaggattttatggagctcatgtctgaactcacggcctgttctgtggatgactagaaccagctgtaaatgaaaaatgacaagcaagagatggag

SEQ ID NO: 444860 - DNA, 122 bp, Homo sapiens
acacaggtgtccatgaggctatgaggcggccttgggctgcggcgtcgtactggctgtccacgatgtctgtggccgcggccgccccttcgtacagtggggatcccgaggaagagggcgccgag

SEQ ID NO: 444861 - DNA, 122 bp, Homo sapiens
gaacgtgcaatagggcaaagcgctggcagctgggacagaaagctgcagggctgggacctccggcctccatccaaaggtagggctcagggctgtgtgctccaggctgctctcccgggcacccc

SEQ ID NO: 444862 - DNA, 122 bp, Homo sapiens
cgcaagagcttcctgggtataatgggcatgttccaggagtttcataccagtgaagtgaatcgctctgtgaagcatcccactcttacactacccacagtcccatgaattaaacacacagcgat

SEQ ID NO: 444863 - DNA, 122 bp, Homo sapiens
cccaagccctcagtatctctctgaatagcatcagagtgtccctaagttgcccaagtcacacgcaactctggatataaccctagacccatccctcttcctcagcacgacacccaatatttagt

SEQ ID NO: 444864 - DNA, 122 bp, Homo sapiens
aactccccctgcctcctgccacttctcgcctgggcgtgttgtccttaagtgacaggggaccgccttgcgtctcctcactcggccggttttttccccggctgtcgtggcaggttcccagtgtg

SEQ ID NO: 444865 - DNA, 122 bp, Homo sapiens
gggaccacgcgcccgcggccttggagcctcagggtcactggtgcgggctccgcaggaaagcgcagcccccagcaggcacccaccatcccacccccgcatcccaccccaggggaaaccgcgcc

SEQ ID NO: 444866 - DNA, 122 bp, Homo sapiens
gtgagcagcttggctcatgtataccttagaaattattgttaatttttaatatatacttcacgttgacatttcttagacatacgcaagaaagtaaaaaccacatttgggccagtgatgttaac

SEQ ID NO: 444867 - DNA, 122 bp, Homo sapiens
tggacctctgggaagtgttttaggcacccttaggaattcccacactgtgctctgggaactcgtaaactagctaataacctctgaattttcattaaggatggaaattctgaggctgcttttct

SEQ ID NO: 444868 - DNA, 122 bp, Homo sapiens
gtacccgcgcgcggccagggaacgcttgctgagggcgctgctgtcgttggtgttctgtaccgcgcctgcccgacgctcacggctccgggggcccatggccagaagagactcaggaatggcag

SEQ ID NO: 444869 - DNA, 122 bp, Homo sapiens
gctggccttagagttggggacccagaggccagagtcaaagcagcgctgcatgtggtacttcgcgttggtggggtccgtcttgctgatggcatcttgcagcatctgcacgtctttcacatgga

SEQ ID NO: 444870 - DNA, 122 bp, Homo sapiens
gccacccccgccctccgtcccgctactggtttctttcccggccgttgcgacggaagctcgcgccgggggacgatccccactacgataaataaagtgggctcaagaggcccaaccaacctctt

SEQ ID NO: 444871 - DNA, 122 bp, Homo sapiens
ttctgtccacccagctactggttcatttgagtagatcggagtcagatgagtacatgtttacgggaggcgcttggttacgggatccagataggaatctttatctgagctgcttgtcagtttgt

SEQ ID NO: 444872 - DNA, 122 bp, Homo sapiens
ttccctagctataccccctacccaaaccaggcgacctccccactttcttctccatcattgcggtttgtacttatgtacacacccatctggcatggttgtgtggttgatgaaactgggctcct

SEQ ID NO: 444873 - DNA, 122 bp, Homo sapiens
cagaaaggttaggactgatcatttggctcttgccggaaatcgttccgcccggtgaggtttcggcgtgagacccgaggagggcggggaagaggcgtgacggagattcctgaggtgtagtagcc

SEQ ID NO: 444874 - DNA, 122 bp, Homo sapiens
tgggacttggactcaacctgatgggcttctgggcccagccccagacaaacccccggcaaacgtcccattccgaggaaagcatgagcagatggagtatggaagaaatgcccaagacggcaggc

SEQ ID NO: 444875 - DNA, 122 bp, Homo sapiens
cttaaattactgtgcttatcagccatttctcgcattcatgtgtaggaaaaaccatggagacgtgtccctggagggcaggttgtaaactgcaacagttactaggaagtcagtcctttacatgc

SEQ ID NO: 444876 - DNA, 122 bp, Homo sapiens
actggtgctctggccgtgaatccatccaggcgccaggagatgacaatccggtaccaaggccggcagtacaggctgaggatggcatttctccaaaaggtaaccctggccccttacctgggccc

SEQ ID NO: 444877 - DNA, 122 bp, Homo sapiens
tctcttataagggatcggatcattgctcagcctctcccttgagtggcacttagaaaatggcgctattcgtaagctgactggtattgggcccaggactctggctgaaggggtgggcatgctgg

SEQ ID NO: 444878 - DNA, 122 bp, Homo sapiens
gggcgttttccttcgtgcagctgcgcccttgcctctgctccgtctgtcacctgtcaggcacgccagtgctaccttctggaggggctgtggcacatcctccatgctggtcctcctccccatca

SEQ ID NO: 444879 - DNA, 122 bp, Homo sapiens
actgcagactaatgggacggaggggggtgacttctcagggttcctcctgggcaggtgctccggaaccttttctcagcacgctggcctggggcacggccgttcctcctgcccagccacgttgg

SEQ ID NO: 444880 - DNA, 122 bp, Homo sapiens
gcggaacgcagtccaggcggggccggggctagggaccttgccagagctggttctgtgtcgcgcgtcagaagcgctagaggtcgttgcgtggcgtgggtggctcggggagtgggtggctgagc

SEQ ID NO: 444881 - DNA, 122 bp, Homo sapiens
gactggaggccggtgaagaatcgcaggcctcccgaagtgtgccagcttgcagggcacggccgacgaggtgtgcggcacggggccgcgccggactgcaaatgtcattatctgttatttaccac

SEQ ID NO: 444882 - DNA, 122 bp, Homo sapiens
gaagggacgttacgctaccgtccgtaatatcaccccaagccctagcattctcaggaaagtcgcttatgaagctatgactcaagtgccgcagtgcttgggcccacgcttcgcagcgtggaatc

SEQ ID NO: 444883 - DNA, 122 bp, Homo sapiens
gagcggccctacgagtgcgctgagtgcgagaagagcttcaactgccactcgggcctcatccgccaccagatgacgcaccgcggcgagcggccctacaagtgctcggagtgcgagaagaccta

SEQ ID NO: 444884 - DNA, 122 bp, Homo sapiens
caatgattgaaatcacctgggaagcttaaacaatcgccctgccctcacccaggccacccccggacccgttaaatcagaattgctaggggtggaacccaggccttagtggtttttaaaaaccc

SEQ ID NO: 444885 - DNA, 122 bp, Homo sapiens
gatcgatgtgaaagcagtccactgcaagctgagcagtgcacgtggggtgtaggggccttccggaccaacagggggagcagtgtggcgcaagaggaagaatatggactttggtgtcagcatgc

SEQ ID NO: 444886 - DNA, 122 bp, Homo sapiens
cacctcaggggcggcgctcagagggacctcctgctgccggggagggaggagcaaagtctgcgtggtccccggtctgcgtggtccccggcagctcctccctgatctgcttacctaacagacct

SEQ ID NO: 444887 - DNA, 122 bp, Homo sapiens
caagaagtaccgttacagggcagactttttgtccaatcaacacctcaacactttgggtcacgtgaccgcagagtgcgaggggcggagctacagtctggcgcgaggaaccgttaagatagaca

SEQ ID NO: 444888 - DNA, 122 bp, Homo sapiens
tcggagaactccctgcaaggagtggtgcgcctttttagaccgggaaagtggccgccagggcgaccccctccgggtcaggcccagcccagcgcccccaaaggtccagtgcagtccactcactc

SEQ ID NO: 444889 - DNA, 122 bp, Homo sapiens
tagggaatgacagttatatccagggccaatataaactgactatgcaatgggatccaagagcggaaataggagagacattctatgatggaagtgcaccagaatgactccatgcttttatgcaa

SEQ ID NO: 444890 - DNA, 122 bp, Homo sapiens
gaactaggagcgctcgagtcccagcgccgtggcccagtcaccagacggtgggtggggagccgggctgggccctcgccctggccacagtgcagcccgctccactagctgggacccggcttcct

SEQ ID NO: 444891 - DNA, 122 bp, Homo sapiens
cacccccacctccttcccttatacggctccctaagccagtgctggtgctgtccagccagccgagcggcctggcagcagctctgaaaccttgtcctcatgcctgaacctggaggtttgagagg

SEQ ID NO: 444892 - DNA, 122 bp, Homo sapiens
agtcagtaactctccgtgatcccagatgaagacataagaatcggctccttgagaatactccgagggcctccctaaagaaaattgatgcagaatgctgcagcttacatgggattgggttctag

SEQ ID NO: 444893 - DNA, 122 bp, Homo sapiens
ggcgccgccgggtactgcccagggcgatctcgcgaggcttcccccacaggaacaggagggcgggggcccaaaggaaaggtgataagttagggaagcctgagcaaacgcttcccatatcggaa

SEQ ID NO: 444894 - DNA, 122 bp, Homo sapiens
ggtcccacctctcctccccatgcttctctaagctggccctgctgacagtttagaagttgtcgccacaaagtaggcagctctatagactcacatctcaggaaaactgggttaaaatgtttttt

SEQ ID NO: 444895 - DNA, 122 bp, Homo sapiens
gcagtatatacgagtatctctatatatagtactaatggatttggtgtgcttcccccttagcgtccccctccctctgctcctcctccttcagcctggtctccccctcttctctgccctccacc

SEQ ID NO: 444896 - DNA, 122 bp, Homo sapiens
tttaaactttgtattatgctattcaggaggttgacaaacagccttttcgggaatgggactcgaactcgtaagccacgtctgttcctccatttcccgcctcagctggatgacggagagggatc

SEQ ID NO: 444897 - DNA, 122 bp, Homo sapiens
cggcgccgctcgcgcagcttttgtctggcccggttgggagcccaggacgggagcccgggccgcccgcctcccggcaccccttctctctggatctttcttcacacccatcactcgccaatgac

SEQ ID NO: 444898 - DNA, 122 bp, Homo sapiens
gtgccagacggcagcgccggtgcctctgcacccgaccgcagctgagaacgtgtggctgcccgtatgattctgctcagttcatggtgtctcctcagccactgtgtcctgagccaagagatttg

SEQ ID NO: 444899 - DNA, 122 bp, Homo sapiens
cctcgccgtggagctgcaggcgggcgccgggggaccgggactcgccgcgctcgtggccttcgtgcgcgacaagctgagcttcctcgtcaccgcccggcccaccgctgtcaacatggcccgcg

SEQ ID NO: 444900 - DNA, 122 bp, Homo sapiens
gtacggtggccaggttggtccttccatagccggaagtggccttcctgagaggcgtggctgcggcactcttgccggatagggtggcccggcggggctaggaaagcgtgaaatctcgcgcgatt

SEQ ID NO: 444901 - DNA, 122 bp, Homo sapiens
cggtaataacagtgtcatctccataagccattctattagtggtaacaaataatagccccacgcctgcaatatctcctttaatattcccaacgtccgctaagcgcgtctcatcaccatttaaa

SEQ ID NO: 444902 - DNA, 122 bp, Homo sapiens
ctgggtgggcactcggcctgtgctcttctcaggctgtgtaagggaggctacctcggaccccgggggtgacgaagacgattcggcaggaacttctgggaggcctggagggacaggaaatgagt

SEQ ID NO: 444903 - DNA, 122 bp, Homo sapiens
tgcgcctttcctcctcccaacgtggactcctgcccggcgaagtgcctcacttccttctcccggtaactgattcgaatttggtgattgttagtttggagctagcgccagtgtttccacggaag

SEQ ID NO: 444904 - DNA, 122 bp, Homo sapiens
gagagttcgtttccatggtgacgggttccgcgaaggttttcctggggtgaagaggcagggcgttgaataatcgccatggcgacagcagcagatgacggtgtcccttctgagtgctcctacct

SEQ ID NO: 444905 - DNA, 122 bp, Homo sapiens
atctgaccccgcccgctcgccccaccagcctcatctcctgtgctccttggctcctggcttcggaggctctagtcagacttaagggctttgttgtcctcccagcacctccttggtttcctgcc

SEQ ID NO: 444906 - DNA, 122 bp, Homo sapiens
gggagggaggcggcggcgggaacgggtcctctgggggctgtcgcctccgcgcctctgcgccgttcccattccgccccagattgcttcctgctccgccgtgcgcagccggccggccggggagg

SEQ ID NO: 444907 - DNA, 122 bp, Homo sapiens
gtatacagatttagcaccagatggtggattggacaaaacaacatcaaatcttcctttcagcgaagagtcctatgagcctaaaggaaatggagaattaaagtataatgtggccaattctggac

SEQ ID NO: 444908 - DNA, 122 bp, Homo sapiens
tctctgaggaacccccagtggactgagaaagcttcttctgtagccctgattcttcttacacgtttctagtttcaaagttcagcttccagttgtacattcctgacagcactaaaaatccaaca

SEQ ID NO: 444909 - DNA, 122 bp, Homo sapiens
tcagtctatatcagtcctccagaatgacagctttgatggtatcagtaactggccagaagtcgtcagtagctctgtttatttacagaatattgttctcttcattagcatggaattcaggagcc

SEQ ID NO: 444910 - DNA, 122 bp, Homo sapiens
cagcggcgccgccgggggactgggttcaggaggccgagcaggaacccgtgcgtcggcgctcgcggcgctgtgaagagacggcgtccgcgcagctcctctgcctctggctcggaggagcggcg

SEQ ID NO: 444911 - DNA, 122 bp, Homo sapiens
gatgaagacagcttgcaccatggcagcctgtttgaccagtacatgctttggttcctcctgcgtcacgtgacgcagagaggtcgtcaccaggactggagaagtggtgaagctgaatttccaga

SEQ ID NO: 444912 - DNA, 122 bp, Homo sapiens
gatgcgagtggacagttaagctgtattcagctgcctgtcgactcccagggggtaggtacgcgatcatgagccggcatgcctcccgtgccccatgcccgtgcccctccactccgcctccgtgt

SEQ ID NO: 444913 - DNA, 122 bp, Homo sapiens
cgtcccgtctcggctgcagcagatgaagactggaccatatgccgatcgcttggctggacccgtgaatctgagagacttcccattccattttcaaaacttccagcaaagccagatgtatgaga

SEQ ID NO: 444914 - DNA, 122 bp, Homo sapiens
acggtacctttaggaagcccatagatacccgccacaacctgtgactttcagggtcaattgcgtctcaattcgcacgtctatccagaacctgcggggaccacgtccccatcctcccgcccggc

SEQ ID NO: 444915 - DNA, 122 bp, Homo sapiens
cctttgtggctattcttccatgtttctgacctcttgctcttggggtggggtgacagctaccggaagatttctggggacacttgtagcggaggagatgttgaagcgcgactggaaggagagct

SEQ ID NO: 444916 - DNA, 122 bp, Homo sapiens
tgggcgacacagcgagacctgtcaatcaatcaatcaatcaatcaatcaagaggaggctggcgggagcatgctcgtgaccaccgggggcgacatagaccctaaccctaagtccaaccccaagg

SEQ ID NO: 444917 - DNA, 122 bp, Homo sapiens
tttagcatcctaggttcctcacacgcctcaccctgaatcctggccctcccgcagccccagcgccatttgtcccatcagtgacaagattcatattctgatgtagactctgttgccagagccag

SEQ ID NO: 444918 - DNA, 122 bp, Homo sapiens
gcgcctaagcggcgctcgctgggagggcctggccatcttcgcgcggtggccgggcgctcccggggtcccctgcctgtgccccgttcccccatccagaacctgggctggaggtgctagggagc

SEQ ID NO: 444919 - DNA, 122 bp, Homo sapiens
atcccccaggcaagggcggagcatgtgtcttgggcccacacctgcttagtttatgaggaccggctgctttccagtggtagcccttttgccatggaggtctgggagagagagcagagggcggc

SEQ ID NO: 444920 - DNA, 122 bp, Homo sapiens
ccttttaactcacactctccttcaggggtcggggtatttgggtgcaaaagtttactatcacgcacaggtgtagagatgtacaaatacgatccaatttagtggaaactgtgtcttgtaagaga

SEQ ID NO: 444921 - DNA, 122 bp, Homo sapiens
ctgtgcgtttccttagtcgccctttcggggcttgttctaatgagtgctacagaaaaatgacgaagtggaaaatatagaccatgaaatgaaaatttaaaagaggaaatggtgtcacaaagaca

SEQ ID NO: 444922 - DNA, 122 bp, Homo sapiens
gcgtcggtggcgagggtggtgcagaggagtccggctgggcggagggaggaaggatgggtgcgggtaactttttgaccgccttggaagtaccagtagccgcgctcgcaggggctgcctccgac

SEQ ID NO: 444923 - DNA, 122 bp, Homo sapiens
gggccggctgccgtgcccaccacggctgaggaacatggttttcgagtcggtggtcgtggacgtgttgaaccggttcttgggggactatgtggtggacttggacacgtcccagctctctctgg

SEQ ID NO: 444924 - DNA, 122 bp, Homo sapiens
ctgcactcaccagttgctgcacgacggcctctgtctcctcgggggtcattgtgtcggtcacgcagtccttgagtttagaggatgtgtttctttccggctccgtgaggtggtatctgttgaca

SEQ ID NO: 444925 - DNA, 122 bp, Homo sapiens
tcattttaaaactgaacttgacgttctaaagtttttctggaagtgctaagtgtcaggaagcgccaacacattcctgaagatgaacaaggtaaagcacttattagatatcaagacactagaga

SEQ ID NO: 444926 - DNA, 122 bp, Homo sapiens
gagtccagaatctgtttctgtcaagtcagtcgtccccagctgcacacggggactgctgagcgctgcgctctcacgggtctgttccggacagagggtggcaggggtgagccctgatcccttac

SEQ ID NO: 444927 - DNA, 122 bp, Homo sapiens
caaaaattagccgggcatggtggcgcacacctgtagtcccgactactcaggaggctgaggcggaagaactgcttgaaccccagaggcggacactgcagtgagccaagaccacgccactgcac

SEQ ID NO: 444928 - DNA, 122 bp, Homo sapiens
tggttctcagtaggacattctcaatacaccacagtggtaggaacattggcagcagaaggccgtatgggataccatggtctacgtttccttacaaggtcccagcttagtgccacagtcattta

SEQ ID NO: 444929 - DNA, 122 bp, Homo sapiens
tctgcagcccgtccactcctactctgggaaatgcatacaaagcaagcagtccccagagcccgcgtggcgcctagtaggctcccagtgagcggcgacgcaggacacaggggtggaacacgtgg

SEQ ID NO: 444930 - DNA, 122 bp, Homo sapiens
acctaactccaagctcttcccaaaccacacaattcactgatggagccaataagacaggaacggggaaagtgaagtacaggatgggtggtggagagtaataagcacttctaggtccattaaat

SEQ ID NO: 444931 - DNA, 122 bp, Homo sapiens
tgggactttggacgcatttccagctttctctgaaccgggctggcttcctagcagatagggcgggaccgtcgggttgagtgacggccggtggcccgccctgggcgtgacgttgttctagtgtt

SEQ ID NO: 444932 - DNA, 122 bp, Homo sapiens
agtttgtatgcattcttgcgaggtacaggtgctgactcacttggctacaggtatggcaatcggcttgctctttcatctgggtgagatgcaaatcccatactagctggggaggagcagcttac

SEQ ID NO: 444933 - DNA, 122 bp, Homo sapiens
cccaagggagccgctccagctgcatccgctcctcccggcacccccatctaaaaatgtgttcgcgcccgcactttcagcactcccagatgacaaaacgctgtgtttgtgtataagtgaaagcc

SEQ ID NO: 444934 - DNA, 122 bp, Homo sapiens
aacaaaatgtccacccgaggatggtagaggaagtcccgccctgacgttggtgaggaccaacggaaacgcctatttcctgggttttcattggcccagagccgccaagtttcctgggtaatgta

SEQ ID NO: 444935 - DNA, 122 bp, Homo sapiens
caaaggggatggtcagggtctttgacctcatgggagatggcgcatgcaggcacgtgcacacgcatagatgtgtcagccagaaacaaaacctggtagccgcagccggacagggcctcccgctt

SEQ ID NO: 444936 - DNA, 122 bp, Homo sapiens
gagtgcacgatgctgagattgacccttttttaggtccccggtgttctgtgactgaaaatccggtcagctggaggctacggacctccttgctgaggctagtttttttgtttttgtttttgttt

SEQ ID NO: 444937 - DNA, 122 bp, Homo sapiens
gcggggaccttgggagcatataagcattatgattggctgagttctctgaggtcggactagcgactgtccaatcaaaagcttcttcttcttcgggttttccgctgcgcgccccgcggtggcgg

SEQ ID NO: 444938 - DNA, 122 bp, Homo sapiens
agggcgagggtgaggagggcgacgacggcggcgagaccgagagccgcgagagctacgacgcgccgcccacacccagcggcgcccgccttatccccgacttcccggtggcccgctccagcagc

SEQ ID NO: 444939 - DNA, 122 bp, Homo sapiens
cttcttttatcaactaaataactgccagttccacataaaacacttctcctaccacaaattcgaatcatgaattttagtattttcaaatcacaataaatttacaaaaagggtgaattttattt

SEQ ID NO: 444940 - DNA, 122 bp, Homo sapiens
ctactgctcactcttttggtctacactgcttttatgggctgtaacacttactgcaaaggtcggcagcttcactcctgagccagtgagaacacgaacccaccgggaggaacgaacaactccag

SEQ ID NO: 444941 - DNA, 122 bp, Homo sapiens
tttgttgtgcaaatgataaaatgagactttgattcttgatggaagggattgttacagacacgcctttctttgggataaatacctgactcaagagtgtcctaagggcagtgttctttggtagg

SEQ ID NO: 444942 - DNA, 122 bp, Homo sapiens
gttcacaatagggtttgtgctcccgtgagaatggaatgcctccgctgatctgacagcaggcggggctcaggcagtcatgcttgctcacctgccgctcacctcctgctgtacagctccgttcc

SEQ ID NO: 444943 - DNA, 122 bp, Homo sapiens
gacatcttacaacaggagcaaagataattactgttgagtttgaccagagtccaaagttaacgttaatgccatcagtcctcttcattatgccaggagcatggagtctgtgatgcagctcactc

SEQ ID NO: 444944 - DNA, 122 bp, Homo sapiens
catttgtctcccctgccctgagagtgacgatggtcctggaacttgactcggccactgaaacgtgggcagaagtgatgtatgctgtttgcaggaagacgcacttacacatcaatgcaggtcct

SEQ ID NO: 444945 - DNA, 122 bp, Homo sapiens
gggaaaaatccaaaatctctaccatatcttcatgacctggctccatgctgcctctcaaatcgcctacccctctcaccctcacttgagccacactggatgctttgctgttcctcaaacacacc

SEQ ID NO: 444946 - DNA, 122 bp, Homo sapiens
ccggattccgagaacagaggcgtcggggccaaatgggctgaatctggtacctcactcccacgcccccgggtggacagcgaccctcctcggccgcgtcccctcgtgggtttcccccaaccaat

SEQ ID NO: 444947 - DNA, 122 bp, Homo sapiens
ctaaaacgtgaatttcgagatattcaaaatcgagggccctagagtgacacacatagaaagcgtcaaaaaaacttcgtgcagcaaggaaaaaaagttgtaagggtgactgactcttctaggga

SEQ ID NO: 444948 - DNA, 122 bp, Homo sapiens
gatttgattgagcagctactgtgggcaaagtactctgaactacatcgtgctgttgtggtgcgcttggaagatgtctagtagctgattatagttaagagtatgatctgtggtaaagggaggaa

SEQ ID NO: 444949 - DNA, 122 bp, Homo sapiens
gaagctggtgagactgatattatcccatttacagatgaggaaagcagggcccaaaaggttcgggaacttgtctgaaatctcacagctctcaggtcattgtcttccaaagggggacccaagct

SEQ ID NO: 444950 - DNA, 122 bp, Homo sapiens
ggtcacagctctcagagagcttgggaggacctgactgtagacttcaccaggctccaagaacgaaaagggcagcaagtgtagcatatttgttggtcccacttctgacaggccaagtgagcaca

SEQ ID NO: 444951 - DNA, 122 bp, Homo sapiens
cagtttcctcactgggaaaatggggctattgttcattctaactcttgcgtgaggatcaaacgagttgactgtgtggcacagtaaaaagaggcttttttagtgctggtaatggatattctcat

SEQ ID NO: 444952 - DNA, 122 bp, Homo sapiens
ggtagggcagagcaatctgagtcctagttggtggagttctgcccggatggaagctccggccgcggagtgatggtggcctcagcgaagatgggccgggcagggaccatggcggtggcagcaga

SEQ ID NO: 444953 - DNA, 122 bp, Homo sapiens
atctgacacccttcattagcgatttgacataagcagaaaagacagatcctgcagaatggccgcacaacgggaagggaccagctcaggcggggagaaggcagcacccgcccggctgggaaggg

SEQ ID NO: 444954 - DNA, 122 bp, Homo sapiens
tgcttttaatgtagcccatcctcctggaaagggcagattaaaaataagcttggctgggcacggcaggacagagtgctaatatcatcttgtgctctttccaggtgcagcctgatcttcctctt

SEQ ID NO: 444955 - DNA, 122 bp, Homo sapiens
gggacatggctctgctctgattgtcaaggctgccccagacagatctcctgctaattccaacggcctcatacttatactattatgaattaagataattctactcttctattatctcaattttg

SEQ ID NO: 444956 - DNA, 122 bp, Homo sapiens
acacctccatccaagagcccttggtgggaagcacggctgtaacagacagtttgtgttcagcgctttcactaaagacttccttattgcaggcagaaaagaaaataaagttgtgagagaaatat

SEQ ID NO: 444957 - DNA, 122 bp, Homo sapiens
gggggccgccgggtcaaaaggggtgtaaatccgataagcctcccggaggtgctctaaaaacgctcctggtgactcatcgggcccctggatgacttcagtcgccttagacaagtttatgggtt

SEQ ID NO: 444958 - DNA, 122 bp, Homo sapiens
agcccccaggcttgccctagcctttgcaaataatagagacattaacaatgatgactgttacgagcttccgttcactgagcacctgctatgtgctggctgtgtaccaggcactttacacgtgc

SEQ ID NO: 444959 - DNA, 122 bp, Homo sapiens
ctccagcatgagcgagagagtgagactccgtctcaaaaaaaaaagatccttatctaatttcgtagtggttcaaactttagtgtgaatctacagggattctgattagtggggctgggaatgtg

SEQ ID NO: 444960 - DNA, 122 bp, Homo sapiens
agagaaaggcgggtcctggagctggtgtaataagctctttgccttatttaaatgagcatgcgtgaaggtcgccccggtgcctgagtcacgttcctgtactcaatgcgcctgcgcttcctgaa

SEQ ID NO: 444961 - DNA, 122 bp, Homo sapiens
ggcgatgcccagctgaagtggtctgggcctcgtggcagcaccagatccagggtgaggtcacgctgctggtccgcagagtacacaggccggtagcccagcagctgcagcgcgccggcgcacac

SEQ ID NO: 444962 - DNA, 122 bp, Homo sapiens
ggacctgcagataatgaggatcgactgtactttacacctcctgggctaagaggcgaaacccgagctatcctgcaagcacctggcgtaacaagatgcctttccacagcccttctagtgatggc

SEQ ID NO: 444963 - DNA, 122 bp, Homo sapiens
aagttagtaatcaggacgctcataaaatatttaattttcccgatgtttttaagagctatccgctgagagatttgtaccctgtgaagagagcaggttcaagagatgacagattagaccatctt

SEQ ID NO: 444964 - DNA, 122 bp, Homo sapiens
ctttaatgccaagttacacaatcagaaagacaacaatctgtttccatttgctttttacaacgtttgtgtaacttcagggcaaaacttagagcaagtccactggcaaacccgggaggcggggg

SEQ ID NO: 444965 - DNA, 122 bp, Homo sapiens
tgggcacccgttgaaaactgttaagaaagccatgtgtacagcctggaaaacacggtggagcgtcacatcattaggtgggtgatgggattagtaccgaaaaacagaccgacaacacgcagtta

SEQ ID NO: 444966 - DNA, 122 bp, Homo sapiens
gtatatgaaaataaacagaacattttaatgtggggcatgaagcgctattataagaggcctcgttaggatggttttggtgctgggttaatgcaaagacagggcacttaactcagacatgaaaa

SEQ ID NO: 444967 - DNA, 122 bp, Homo sapiens
ctactaaaaatatgaaaaattagctgggtgtagtggcgctcgcctgtaggcccagctactcgggaagctgaggcagaagaatcgcttgaacccacgagtcagaggttgcagtgagccaagat

SEQ ID NO: 444968 - DNA, 122 bp, Homo sapiens
tctgaactgctctgtagaaaaacaaacaccacacaatgcaattgatgaatggcaggttcgcgataaatcccaatggttagtattaaaaatgcaaacactgtaacccttgataaaacagagct

SEQ ID NO: 444969 - DNA, 122 bp, Homo sapiens
atgagtgaggtgagtgatgcttcgacctggagagggaaacttaggagtgagaagggacctcggctgaaggattagtctcaggaaatgtgagggacttagcagtgctgaggaacaaattaatc

SEQ ID NO: 444970 - DNA, 122 bp, Homo sapiens
aattccagggatcgagtgattgacgtgtttgcttatcggctcctcctgtctctccagggacgggtgcccaggtgcccccaccccacctccatcggcccagggggagaggggacaccagatcc

SEQ ID NO: 444971 - DNA, 122 bp, Homo sapiens
ggtccggcccaggccaggcggcgctaactgcgcggtccggagccggtccctggtcctccgcgcttgccccgcccccaccgccctccactggctcggctccgccccagcggcaacgccccgcc

SEQ ID NO: 444972 - DNA, 122 bp, Homo sapiens
tttattatgctcctactatgtgccaggcactggttgtaactgccatctgattggacgatccgtaaacgctgaggcccagtctgtgcggttcacttgcgttcctccacgcgccccccagcaca

SEQ ID NO: 444973 - DNA, 122 bp, Homo sapiens
cccgcagggacatagaaccaagccccaggctggcccagctacaagaccgcctctgggtgccgcacttccggaggaaaatggcggagtgggcggggcggcgcatgcgcagagagaaaagctgg

SEQ ID NO: 444974 - DNA, 122 bp, Homo sapiens
accccggccgccaggagcccagagaccccccagcctaaataacaatggcgctggagagggcgtggccgcgcgtacctggggtgggggaaggggagaaaggcggccagttcggatctgagcca

SEQ ID NO: 444975 - DNA, 122 bp, Homo sapiens
ctccaaggttccagggatctcatgagaaaccctggggaaccgccccccgtctcctctcaccgcaaaccaaccagagccagttcagcggcacagaactgttagggacattatttttgggcagg

SEQ ID NO: 444976 - DNA, 122 bp, Homo sapiens
ccccggggaccccgcgcctggggctcgtctggctggagcgcgtcctcgtttaccaacgggcgaagatcctccccaagggttaagaatggtccctgtgttccttgtctccaccggggggctct

SEQ ID NO: 444977 - DNA, 122 bp, Homo sapiens
ggttcggggcgggtcttagggagcctttgaaggccgaatccgggcagcggtgtagctgggcgtggaaggcggaggacccagcagggcgtgaccggcccagtttccgctccctccgggtcccg

SEQ ID NO: 444978 - DNA, 122 bp, Homo sapiens
gataacatttcagtctttcatatagaccaggccggttttcacggtcttcccggggagcagcgctcctgagaatggaaaaggagatgaaaagctttttccagcagcacatgacgcccgggcag

SEQ ID NO: 444979 - DNA, 122 bp, Homo sapiens
agtaacaatagatgttgttataacttcatcgattcaatgtaagaatgactttgctacctacgtttcaataggtttttgccaaagcatatatctgactgtaaaaatggaatgctgtttttgtg

SEQ ID NO: 444980 - DNA, 122 bp, Homo sapiens
gaagaattacacgacctcatgtctatcttagaaaaataactttaatggtggccgggatttcgattgtggtactactgaatgatgtgacactaatggctggtactcactaggcagtcactgcg

SEQ ID NO: 444981 - DNA, 122 bp, Homo sapiens
acgaaagcaggtaaccaccaagacagtattttaaaaaacactcaagacacagacccaagccgggttttattgaaatgccaggagcaggcacatgtcaaagtagccaaggaaggggggacagt

SEQ ID NO: 444982 - DNA, 122 bp, Homo sapiens
gaccaggatgaggtccatttattcagagccaggcgcccatctcaggactttggcccccggcggcctctccctgtgtcaagttctccagatatgggacagatcagggcaaagcagggcctctt

SEQ ID NO: 444983 - DNA, 122 bp, Homo sapiens
tttacataccatgtttatgttcttctgccagtttgagtcctatagagcaaagacaaatctcggcgtggcatttttagctctaagccaaatgttcagacgcccacatgccttaacttagtagg

SEQ ID NO: 444984 - DNA, 122 bp, Homo sapiens
cctctacctcttcggtgttcccgggtacctcggattgctcctttacggcggagaatatcgcgcattgccactgccgctcctctccctcagtatcaacgtagattcaaacattctgctttgtt

SEQ ID NO: 444985 - DNA, 122 bp, Homo sapiens
acagtccggacgccgaggccggcgagaccgctacaggacagcgtccgcggcgcccgaacgcgcgctcctccgcctcaacctccccggcgtgcgccgccaacagcccgggtcccggctctcgc

SEQ ID NO: 444986 - DNA, 122 bp, Homo sapiens
ttcacaggccttatgtggagagagaggagcccgacgtagcggggcacacaccgtatgcctcgttgatactaaatgcaaaaccaggcgaggctaatccacggagatgaaagtcagctgggggt

SEQ ID NO: 444987 - DNA, 122 bp, Homo sapiens
aacaaaggctatagcagctgctttgcaggcttgcaaattccaggatccactaggtgcatccgctagttgctatccgtgtgacaagccagggcattttaagaaggaatgcccaaacagcaaga

SEQ ID NO: 444988 - DNA, 122 bp, Homo sapiens
cagattccacctagagctagatgtgtcttaccagatctaatattgactgcctctgcctgtcgcatgagaacattaacaaaagcaattgtattacttcctctgttcgcgactagttggctctg

SEQ ID NO: 444989 - DNA, 122 bp, Homo sapiens
aggcccatcactgatgggcctaagggcctcatctgatactctaagacgggcttctcctgccgggcctgggtctctcggacttgagtctctctacaacgaacctctcgggcctgggcttctcg

SEQ ID NO: 444990 - DNA, 122 bp, Homo sapiens
tgtgtgtatcacctgagaaaggagagaggaagagagagcaagaacacaagcgagtgacagcgcacaaactattaagtggccacaaaaatggagaaaatattaaaaatatgtgaatctaggta

SEQ ID NO: 444991 - DNA, 122 bp, Homo sapiens
tttagcacatcttaagagtctgcatttccactagcctaattcacactgggcccttctcagcgtttcttaatgctacgctactcccacttcctttcctctgtttccctcacttcagccctaaa

SEQ ID NO: 444992 - DNA, 122 bp, Homo sapiens
ggcggccttcccaggccccgcttttgacttttggcggcctctgcaggcctcgacaaggcccggcctcctgcctcccgaagcctgcacaggcccagcctctgcctcacagcagactctccacg

SEQ ID NO: 444993 - DNA, 122 bp, Homo sapiens
ttcccccctaccaagcccaaattgatcctgcagggctttgaatgataaaacagataccaccgcaagtcacagtcaaccagatctcatcagcagctacttgcagaggagataatgaagtcagt

SEQ ID NO: 444994 - DNA, 122 bp, Homo sapiens
ggaacagggcaagggccaggctgggtggctccgttcttttcagaacaatagccggaaaggcggtggggaagaggctcagagtgaccgggctggggaccctggcaggagggcagagggtccag

SEQ ID NO: 444995 - DNA, 122 bp, Homo sapiens
agccactagatgtctgctcagctccaccaagtcacccgctctgccagccagcaccaaggccggcccagcttgctattcctgacagcaggtccaccaggtgttccccgacaccccacagctga

SEQ ID NO: 444996 - DNA, 122 bp, Homo sapiens
acgcttcatcccccacacctccagccccagttacctggagcttctcagaacccactttgccggtgctaaaacacaagagggggtgaaagtggctgccagtaatggccagaaaccaaccacca

SEQ ID NO: 444997 - DNA, 122 bp, Homo sapiens
gcaggggtcacccactgctcttccggacgcaattttgaggaggtcggagcggaaggacgtcgtggagattgcttgcgctggggtgccacacttaggctgagctgcaggttttcgcacagtcg

SEQ ID NO: 444998 - DNA, 122 bp, Homo sapiens
tcctggccccaggagagccgggttccatgaggtgcactgagcatgctctgcagggtccggcgtgggagggacgcgctggcgctccccaggcccgggcggaagcggcgctcgcaggcgctgaa

SEQ ID NO: 444999 - DNA, 122 bp, Homo sapiens
ccatgcaaatttcattcactgtttggggtccggagtcgatggggctgacattctaatcctcgggggtttcccactattacaaagcgaggctggtgtggatcccgctttgtgctctgtggacc

SEQ ID NO: 445000 - DNA, 122 bp, Homo sapiens
gccccaggcgcctataccggattccattttcagttcaggcccaaatccccgggggttggtcgaggctgaggcggggctccgtcgaggctgaggcggggctcagcggcctgggctgaccgcag

SEQ ID NO: 445001 - DNA, 122 bp, Homo sapiens
cgccctcacgacattgtacctatcccgaaggaaacggggctcagtcacccaaagagcccacgagaaaggccgagcaggagaggggaaaacacacacacacaacagagaaccattgcatttat

SEQ ID NO: 445002 - DNA, 122 bp, Homo sapiens
agggacacatccccgttcctccagacccgcgcccctccaacaggctggtgggtcgtggtgcgagacgacgtcaatcagagagaaaataaaggagtggtgcgcaccacgtagccaggaaggca

SEQ ID NO: 445003 - DNA, 122 bp, Homo sapiens
agcgctcagcgtctagtctgcgggcccttcccggttccctccctctctcctcccgccgcccgccccctgccgaggccatccgcctcacagtagcaaggttgtctctcgtctactcccttccc

SEQ ID NO: 445004 - DNA, 122 bp, Homo sapiens
ggacaccgaggccttcgacatcgcggccatgtggaacccccgggaggcgcaggcgggggccgcccccaagacgcggcaggacatgctgcccgagatcgagagcctctcccgctacgtgcctc

SEQ ID NO: 445005 - DNA, 122 bp, Homo sapiens
tcccagctgaccctgggcattgcctacctgcacagcaagagcatcgtgcaccggtgagggcgctgccacccagactggggcctttgccctcaagggggttttatgcacatctcccatttcct

SEQ ID NO: 445006 - DNA, 122 bp, Homo sapiens
agccccgcagccacatacccgccttccagcgacggtcatcgtccgtgaccatgtccacaccgccgatgaggttgtcccagaactcctgcaagttctccgactctggcagcttcccggacatg

SEQ ID NO: 445007 - DNA, 122 bp, Homo sapiens
atcgaagctccgatgtgtccggggaaggtctgggaagccaggccaggtccgcattgtggccgggcggtgcacgcagcccctgctcccgggcccctttctctccccctccccacgaccaggcc

SEQ ID NO: 445008 - DNA, 122 bp, Homo sapiens
aagaccgcaccctggaggtgagctgtgcacagcccacaggacaggaggcacgccacctgccgggactgggctgggtgcacagaattcagtcactgagttttacagctggaagttgcatctag

SEQ ID NO: 445009 - DNA, 122 bp, Homo sapiens
gagctggactgaactggccaggccacgtggagacaccacggtcgacgacggctggagggacgtttcagaggcgagtcctgggtggctcctcgccttgggggctcctggccctgaggctggcg

SEQ ID NO: 445010 - DNA, 122 bp, Homo sapiens
ctcccagcctcactgcgccccatttcccgccccgcccgacccccaggtttcggctcaccccgggacccggccctagcccctgcccccagcccaggaccgggcccagccacgctcgcccagac

SEQ ID NO: 445011 - DNA, 122 bp, Homo sapiens
catcccttcttctcggattctagccgcgccgtctccctcatctgtcgttcgtagaaccagcgcgtattacctggttcatctctgaagagatggaaacattcatttctagagcttcgatggga

SEQ ID NO: 445012 - DNA, 122 bp, Homo sapiens
tccagtctcaacgaggaccgtgggcggctgtggagaaccggaagggtttctcccccggagcgatgtgtctgtgtgtgtgtcacacgcatactcagccaacttcgctcaaagctgctgaaaca

SEQ ID NO: 445013 - DNA, 122 bp, Homo sapiens
ccttttttcattcttgtactacagccatctctagaggttacctatcagttgagctgagaacggggagttgttgcagatggagatgggaggttgcaatttaaaaatgatttttttttttagtg

SEQ ID NO: 445014 - DNA, 122 bp, Homo sapiens
gaagaaggactgtgggcagctcttagcagcaaggagccatttcctggaagggttcagtcccgacgttgtttatgcttacaaatgagggcagggccaaggggagaaggaatttctaacggaac

SEQ ID NO: 445015 - DNA, 122 bp, Homo sapiens
cccggtccctgctgtgcaaagactgagcggtactccggtgtactttttccctgtcccaggcgtgcagagtccacgccgcgcggccaggtgccccaatagtgtacctgaaagtagggatgggg

SEQ ID NO: 445016 - DNA, 122 bp, Homo sapiens
actgtggcgtctgagggcgactatggcgagacaggcattgaggcctttgagctagaggctcgtgcccgcaacatctgtgtggccacctcggagaaagtgggccgtgccatgagccgcgcggc

SEQ ID NO: 445017 - DNA, 122 bp, Homo sapiens
aaaaagtaaaaagaaaattagccaggtgtggtggcgcacactgcagtcccagctcggactcggaaggctgaggtgggaggattgaggatggcttgagcccatgaaactgaggctgcagtgaa

SEQ ID NO: 445018 - DNA, 122 bp, Homo sapiens
tctagggagggatgagagaccgctccgagggtggagacccctcctgagtgtggggggtggcggtgctggctctccccgcatctccttcccctccctctcccaatctctgggtctgttttcct

SEQ ID NO: 445019 - DNA, 122 bp, Homo sapiens
tccagcgccgccgccgccgctgctgccgccgccgtcgccgccttacccccacccggctcccgaggccccaggctccttccgccacccgcgccggctcccgcccgctccccagctcgcccccg

SEQ ID NO: 445020 - DNA, 122 bp, Homo sapiens
tctcccccacccaaggtagcctcggcccgcgcccaagtgggtgtggctgcgggaaagccccgcccccaggacgcttctccaatgggaactgccctcgtgtccatggcaacggcggcggccac

SEQ ID NO: 445021 - DNA, 122 bp, Homo sapiens
gctcaccaggtgaggcaggctcaggtaacacacgatggacatgaggatgcccacacagggcgtgataaagtaccccagggcagaggtctcggcgtccacgccacctgcggaggaacttcagc

SEQ ID NO: 445022 - DNA, 122 bp, Homo sapiens
aaaagatgtagtagggaaaaggagcgacagctggctaaaggggccccccacaaccctccccgacaccctaggaaagcagcctctctccgctgtcccagggtgccatggagatggagagcgcg

SEQ ID NO: 445023 - DNA, 122 bp, Homo sapiens
gcaagcgtgcctaagggagcacttctcggatactcaccacaggctggtagacagggtacacgtcccccacccagcacatgaatatcatgaaagccaggaaaccgaagagctgcatacacatg

SEQ ID NO: 445024 - DNA, 122 bp, Homo sapiens
tcagccccaccggcagcacgcagaagccttttctccagcttctgggcccactgagctacccgtcagcacctcctggccagtgctgaatactcctgtgcatattgaacaggcttccttttatg

SEQ ID NO: 445025 - DNA, 122 bp, Homo sapiens
gagaaagcgctgtagccaagactcaggttcgcgacgtttacgcccacgaagactcgggttcgccatgtttaccctcacgcatctacaacagtcctggatttttatggatcactgttcgcaat

SEQ ID NO: 445026 - DNA, 122 bp, Homo sapiens
gaaaaagagggatggactttggctaattacataatcaccttatttcacctcccaactacacgccccaccatgaatgccacctagcttgggacacagccagcaagggaggataaggggacccc

SEQ ID NO: 445027 - DNA, 122 bp, Homo sapiens
tgttcttatcttctaagtgaaatgacctagacgttgggggagggcagccccaacccacagcgaagagcttaagtactgggatccgagacgggatttcacacacctgtaactagcaccagagt

SEQ ID NO: 445028 - DNA, 122 bp, Homo sapiens
gtcgggtcctgagaccaggtaagcatctgcggagaagccaggtaaccctacggctgccgacgactgtcaaaggctccggagagaggactgcgagccgggacgcctgggtttttcccgacttg

SEQ ID NO: 445029 - DNA, 122 bp, Homo sapiens
gaaaagccagtgcagctgttaccacggagacagatgtgttgtaagctcaagctttaccagcgaacacctcagcaccaaaggctgaattgatcgccctcactcaggctctccgataaagtaga

SEQ ID NO: 445030 - DNA, 122 bp, Homo sapiens
agaggtggcggggtgcaggagccaggctccaaggctacagcaagtcccagcagagtggggcggcccagtgagatcacgtaagtgaacatgctttgtgagttatgaaaagctccctgttttcc

SEQ ID NO: 445031 - DNA, 122 bp, Homo sapiens
atatggagggggttacactaatataattaaaatgtattgatagttttaaaaatacttagtcgtataaactatctaatgggtgtgttcaagtctaagttatattaatgccagtggacgttaca

SEQ ID NO: 445032 - DNA, 122 bp, Homo sapiens
cccggcaagaatactggtttggtaaatcaacagagtctgaatgccactgaaaacctcccccggagtgagtcaccaactcagagcttcagaaaaacgtcctctcccagtgatatgacagcact

SEQ ID NO: 445033 - DNA, 122 bp, Homo sapiens
gtaatcacatctagttaagtgtctggagggactcagtgtgtgtggtcatcagctggtctccgcacagagggggcgcagagacaagagcagagacaagagcaactgctggagggacctgagcc

SEQ ID NO: 445034 - DNA, 122 bp, Homo sapiens
acagtagcaaaatatgtgtacaaaacctaccaggaagaccagggacagacccctaccctccggtcaacatgagacaaggagagggaaggaaggctgagaatggggcaggagcccttgcagca

SEQ ID NO: 445035 - DNA, 122 bp, Homo sapiens
ccaaaataatctgacaaccaatagattatcagtctttctccatttccctttctataatttcgatatctttactcattcctacctcttcttctaactaagcacagcgaagacatgacatatac

SEQ ID NO: 445036 - DNA, 122 bp, Homo sapiens
tgtagatgaaaggagacagagacttctgtgaatgatctgcccagcgtcatggccgcggtgcgcagttagcgcccccaggacccctcccatcggcccttgagctcagcccgcggcttctgtcg

SEQ ID NO: 445037 - DNA, 122 bp, Homo sapiens
gggcagaggggctcctcacttcccagtaggggcggccgggcagaggcgcccctcacctcccggacgggagcagttcctttaacttaacacattttgttttgtttgtggaagaagcatggagt

SEQ ID NO: 445038 - DNA, 122 bp, Homo sapiens
tatttaatcaatgagtttaaaaaatagacaaaagcttctgaaacatgggactgaagtaggcggagcattataaaagcctaaggtaattggtagtgaagagttggaaaaacttacttagtcta

SEQ ID NO: 445039 - DNA, 122 bp, Homo sapiens
ctggcaaccagagtggcccgaggaactttctgtggaggaaatttagtgaatcaggggctccgggctggctccagagtggggcttccaccagctggtgattcttcctggaggatgaggctcag

SEQ ID NO: 445040 - DNA, 122 bp, Homo sapiens
gagtcttgggcctggttcgagtcccagctccaccactttctagtcttgtggctttggacgcgttacttaacctctttgagcctcagtttccccatccgtcaagtagctcatagcgagagtac

SEQ ID NO: 445041 - DNA, 122 bp, Homo sapiens
tgataaaaaccttgggattctcacagctgactcttctgtgagccacgtcagggatgcatacgcatttccttccacttgacataaatatcaacccaaacacagctgtcttatctctttaatgt

SEQ ID NO: 445042 - DNA, 122 bp, Homo sapiens
gctgcacagggacgtactggaaggacccaggccggttctccatcctcggctgggctcaggcgccgccgggctccttttccgagggggctacgttgcctccgcccccagcagctccgccacca

SEQ ID NO: 445043 - DNA, 122 bp, Homo sapiens
tctgtgtggtgttcgctggggaggttcaacacgtttatggcctagctgggctccttgtgtcgcctactggccggcggagatggaggccgggcttctggaccctccgccctcccttggcactg

SEQ ID NO: 445044 - DNA, 122 bp, Homo sapiens
ctgagcactaccaaggccagtcctgagcaggcccaactccagtgcagctgcccaccctgccgccatgtctctgaccaagactgagaggaccatcattgtgtccatgtgggccaagatctcca

SEQ ID NO: 445045 - DNA, 122 bp, Homo sapiens
caaaggtgaaaagccacagtcttgctctgaagcagtattaagtcaagcagggaggccgggcgccatggcttacgcctgtaatcccagctacttcgaaggctgaggcaggagaatcgcttgaa

SEQ ID NO: 445046 - DNA, 122 bp, Homo sapiens
aaacgccaccagatcgtatctcctgtaaagacagccttgactcaagcatgcgttagagcacgtgtcagggccgaccgtgctggcggcgacttcaccgcagtcggctcccagggagaaagcct

SEQ ID NO: 445047 - DNA, 122 bp, Homo sapiens
tgtctttctgtacattttagtcaacgtgccactgtggtgacatgcatcaatcaggcatctcggggcagcatgccctccagtgccagcattccgttcggggcagcacccggccctgcccagcc

SEQ ID NO: 445048 - DNA, 122 bp, Homo sapiens
acaagcgtgtcccccattgacaaggagccctattcagactgcaggtgcgaagtgggccggcgcgcccgaccacattatgtcaaggttgttggagattagtgttcagccctaataactaaagc

SEQ ID NO: 445049 - DNA, 122 bp, Homo sapiens
cacttacatacagcccttacatgctagtgagcttctttaattcagtcctttttaacatttcgtgtgcataggaatcacctggaaagccttatgcagaatcctgagtcacacccttagagatt

SEQ ID NO: 445050 - DNA, 122 bp, Homo sapiens
ggaaaatctcagcctctgcttcccacctcctcagcccctgcctcaacaggaagcccacagcgcaagagacgccattctagggccaggaaggaagagcctcagaccctggaattgccatgtac

SEQ ID NO: 445051 - DNA, 122 bp, Homo sapiens
ctgtaattctggggtccccctggcagccccattcccacagctccagtagaagaatatctccgaagggctctatccctgcagcagggttctgcctgggcacccaggctttccaatacaccctt

SEQ ID NO: 445052 - DNA, 122 bp, Homo sapiens
gagcctctggcatagttagctactagtgggtttggggtctgggctgaggctacctggggccgagttgaccacttagatgctcttcttagcgctcagtggggagtaggcattcgagaagaaaa

SEQ ID NO: 445053 - DNA, 122 bp, Homo sapiens
tgggaaggaagtgatgtgggtgcgatgggggaagatagttggtaaagacacaaacattctcggccagttggcaaacattgggagcagcaagctggaggcaaacagatgtcagtatttagcaa

SEQ ID NO: 445054 - DNA, 122 bp, Homo sapiens
ccctgggcgcggcgctgagtgcgcgcggaccggtctacaccgagcagcccggagcgcccgcgcctgatctcccactgcccgacggcctcttgcaggtgcccttccgggacgcctggcctgta

SEQ ID NO: 445055 - DNA, 122 bp, Homo sapiens
taaggtgcctgcagtgcttttccgacacctaaatctctgctttgtcctgagagaaacaagcgtcacgaacttagctcactgttggtgaagtgacggccgccagggaagagtgcagggatctc

SEQ ID NO: 445056 - DNA, 122 bp, Homo sapiens
ctgtctctgcagagctgggaagcggggcagctgcctgatcctgatgtggagccaagagaccgcactacacgcttgtgggaaagaccttgagctgggatctggagccccaggtttcaggccaa

SEQ ID NO: 445057 - DNA, 122 bp, Homo sapiens
agggtttgaggctgcatcgagtggtgatcgccccactgaactccagcttgtgtgacagagcgagaccctcaaaagaaaagcttctttagaaatcgcatcctctttcagctaccacactgttt

SEQ ID NO: 445058 - DNA, 122 bp, Homo sapiens
ttcattttacatgttgctgccagcttaaattatcttaagagataattttgcttgtattgtcggtgacactttgcctgtctgccagagtaaggacagattcctctaattttaaagatagtgta

SEQ ID NO: 445059 - DNA, 122 bp, Homo sapiens
ccaaaagtatgacttaatcactaatttgcgacaggcattatgctaggtgttagggaaagacgaaccatccctgattccttggacttccattaaaatgaggcgtgttgagggaaatccacgcc

SEQ ID NO: 445060 - DNA, 122 bp, Homo sapiens
acagggcggcggctgccgggagtctagacaggagccgaaacctcgaagaggcggcggccgcggagcagggaggagggtgtgatcaagtggactccagccccgttcctagataccgtgttaac

SEQ ID NO: 445061 - DNA, 122 bp, Homo sapiens
ccggctgcgtcccttttcgtccatgtcctagcagagactacagagcagtacagaggctctcgctgaaaccagtcccaggctccacagagtcagatcacggcttcacaccagtcgttctggtc

SEQ ID NO: 445062 - DNA, 122 bp, Homo sapiens
acatcactgcaaataaggtcagggtctggacagaaatctgaatccaagactcctttttcccggcagctgccccccaacccccttcagcaattttcaagcagtaactgggctacactgctgac

SEQ ID NO: 445063 - DNA, 122 bp, Homo sapiens
cttcgcaagtcagctaccttgggacctctaggatcttccgacatcccaaagctgtcttcccgtaccgcggagcccggaaggggctgtactttttcggcctctaagcactacggtggccgagc

SEQ ID NO: 445064 - DNA, 122 bp, Homo sapiens
gcctggccagatgcgcggagggaccccacggccatatgacgggctctggccttgcctcctcgatcctgcctcacccgtgcccaggtgcctgaactccgcagaagagaggagcaccagcacgt

SEQ ID NO: 445065 - DNA, 122 bp, Homo sapiens
gggttgtgtatggtctgacatttcccatttggtttcattgatttatgacttgttttctgtcggaagtaggtattttctttgtattttctttttttctcccttcactcttgccttagaggagt

SEQ ID NO: 445066 - DNA, 122 bp, Homo sapiens
gtaacacacaatcactgtcttctaaagtgaagaaaggcatcaggattgcggaaagacatacgtcatcatgagtaaagggtcagtgatgtgactccaagtcaacatcaagataagatgaagct

SEQ ID NO: 445067 - DNA, 122 bp, Homo sapiens
ggctccccccagcatcctctttctgtagcccccctgcccggtccgcaggatccggttctccgcagaaccacccctaccccgccacgcctgtctggcctgaggagctcccctcccagccgccc

SEQ ID NO: 445068 - DNA, 122 bp, Homo sapiens
caggcttcctttcccctgccgtgaaccttcagaacctgtctgtgcgactcatgcggctgtcgagggcagtaatcctctaaatggttgaactacagtggacttccttgagtagtttttaaaaa

SEQ ID NO: 445069 - DNA, 122 bp, Homo sapiens
aatacataagcttgatctgccctgaccagaatgtaagtcccttgttttgtacatatgaaacgtaagcttaaccagctcacaagatccttcagggccagaaaccatgtacagcttccacatat

SEQ ID NO: 445070 - DNA, 122 bp, Homo sapiens
gggccagtagggtttgcttaaaaaaaaaaaacaattaatgagatagaaaatttgtcctctcggtgaactcttatggttgccctagcaaagggcagacaatgcatgattttgaagcacaaagt

SEQ ID NO: 445071 - DNA, 122 bp, Homo sapiens
ctttggctcctcgggcgcggggctggctgcagttgccacggtgctgccattctccagggccgcgtggaccgtaacctcggcctggatcacctccccgggcgccgactcggcctccgactccc

SEQ ID NO: 445072 - DNA, 122 bp, Homo sapiens
gccctccagcatttttggcatcactgcggaggtgtagagaatatccaggaaggacagattcgccaagaaaatatacatgggtttgtggagcctctgggagctaaccactgctacaataatca

SEQ ID NO: 445073 - DNA, 122 bp, Homo sapiens
ttggaaaacagagaaagataccttaaagaagttgttataattttttattaagtatatggacgtaaaaacttggcttgttaagttaggcacacaaaaacaattactgcactggttaacttgaa

SEQ ID NO: 445074 - DNA, 122 bp, Homo sapiens
ggaccctgccctctcaaagtgatcacagtatcttacttcatggaactactcacccagggccggccagactacattctgaacaaaacagatattgaaaagagcatttaatgggcacctaaggc

SEQ ID NO: 445075 - DNA, 122 bp, Homo sapiens
ggaccccgtttccacccaggaccacaggctcaagatggcctggtagatgcagccggcacgcgcctctcctccgacgggaacagaaggagccggtaggttttcacacttgcagcagatccgct

SEQ ID NO: 445076 - DNA, 122 bp, Homo sapiens
agccgtgcccggaaatcccgcctacctccagcggccaatcattgcgagggcggggggcgtcgaccagttattgcgaggactgtaggcgtcttacgaggcaccctgcccctagttggcaggca

SEQ ID NO: 445077 - DNA, 122 bp, Homo sapiens
tccgcctcgcccctcgaggctcccgcgtgggccggcgggcagtgcgtgggccacaggaagcgggctgactggacccggctcaggacttcgcacaagggcagctctttgtttacagctcctct

SEQ ID NO: 445078 - DNA, 122 bp, Homo sapiens
gctgggcctggagacacccctgggaggcaacagcggggcctgcagatgctcttctccagccggagctgggactgttcaggctactggtggcgggatgtgggcctgagagcttggttgcagaa

SEQ ID NO: 445079 - DNA, 122 bp, Homo sapiens
ccaacaggtaggcgagaaaccaggtaggcgagaaacacgtttctcagttatgcagcccagcgtcgaggaaaaataacagcaactctacaaaatcagaaatcagcgtctaaggactaatgagc

SEQ ID NO: 445080 - DNA, 122 bp, Homo sapiens
tgtggagactcagggagttctgggatggcacagagggcccaggctggtagcaaccaaagccgtgggaaatgtgggagggatggcaggtgtcccccgaggagtagcccaggtgccccggaggc

SEQ ID NO: 445081 - DNA, 122 bp, Homo sapiens
ccgcgccagggtctggggatccgaagctggggggcggcggcccctccggcgctttctgctcgggactgccgcttgccctgtctctgttgccgccgccatcttagacccgcgggtgggcggcc

SEQ ID NO: 445082 - DNA, 122 bp, Homo sapiens
aacctgagcccagatgagccaaagcccttccttcctccagtcagcctggatcctctcatccggcagaactgtcgccttgcttctctgaagcggtgaatgccctggggctggggacgcacagg

SEQ ID NO: 445083 - DNA, 122 bp, Homo sapiens
ctcgcccgcagcccagcacgtgtagaatccagatgtggcttctgctggagccacgtgttccggcctgagcgacgtcgcacgtggcctcctggccgcagagcccatggcgcggggggccactc

SEQ ID NO: 445084 - DNA, 122 bp, Homo sapiens
ccggcgggcctcccctcatctcggctgggtagaggtgccgggtgtgagctcggcgtggcgcgcacgcgcagacgctggctgggctgagccgatactcgcgaggcgccctgtcacatgagccg

SEQ ID NO: 445085 - DNA, 122 bp, Homo sapiens
ctaccctgcacatttaattatgcatcgcaggtacaggactggtctcttctgctggaccaccgcatatacgaaagcaagggagaagaaagtgcaatactgcctctcaagacacaagtgtttac

SEQ ID NO: 445086 - DNA, 122 bp, Homo sapiens
tacagaaacaagttgaagtacctggctttcctccgcaagcggatgaacaccaacccttcccgagtcccctaccacttccgggcccccagccgcatcttctggcggaccgtgcgaggtatgct

SEQ ID NO: 445087 - DNA, 122 bp, Homo sapiens
ctattttccaaaaagtgaaaagctctgaaggtcccacaattcatggtacatacaggggctcggaggagggaaactgcccagctttcccccggcacagctgcaggggtagggggtatagataa

SEQ ID NO: 445088 - DNA, 122 bp, Homo sapiens
ggtacgaacgggcacagcactctggccagggcgggtgccagagctggctgggcgctcttccgtgcgctgcgtctgcaatactggtcatccctctgcggggacatgggggcctctccagggct

SEQ ID NO: 445089 - DNA, 122 bp, Homo sapiens
agaaacaagagcataaggacgcgcacagacaccgtgaggacggagcagggacacgggctccgccagctccagggaggggctcagtcagcacagagcactaggggctgcacctgaactgccag

SEQ ID NO: 445090 - DNA, 122 bp, Homo sapiens
aatccagctttgcagggacggggatgtggtgcctttcccggaagagccggggtcctggggcgtggggagctggggctgggtcgtggggagctgggactggggtgtggggaggggcccagggt

SEQ ID NO: 445091 - DNA, 122 bp, Homo sapiens
ccgctccaagcctttgagcagttcgtgtgggtccgctcccaagctagggctgggctgttgcgcttgcgccaggggtcgcatgcagtcacgcgctgccgaccgcttccggtgcgccgcgaggg

SEQ ID NO: 445092 - DNA, 122 bp, Homo sapiens
gaggcctataagggtgcgggggggacggggcccaggaggggagtggagcctcaccagccacgtcctcatggccctgctgctcttgctgttcctgggcctcctggggctctgggggctgctct

SEQ ID NO: 445093 - DNA, 122 bp, Homo sapiens
ttcccgtcgccgcaaccgtggggccggccctgccttgccagtactaggggacttcctctgcgcgccggcttcctgcccagctggcatttaaaccaccgcctggggctgcaggatgctgctgc

SEQ ID NO: 445094 - DNA, 122 bp, Homo sapiens
ttgggggaggcgtgtgggacgggggccctttggctggggacgagtgacgctggcgacccccgaaggaaaagcttctggtgtccaaggctaaactctggggtgactgttttgagggcagtgtg

SEQ ID NO: 445095 - DNA, 122 bp, Homo sapiens
ccttcgggcgtgtccctcttctgggcatcttttcaggatttcattcctacgtccaactgccgttcacaactgccctttccaactgctccagaactcttggccctggcattccgtgatgtaaa

SEQ ID NO: 445096 - DNA, 122 bp, Homo sapiens
ggagcccctgggatgacccatcccaaggtcccagcctaagtctgaggttccagggctggtcgcaggccgtccttgcagccctcgccagagcgttgtctgcacctccgacactaggtggcgcc

SEQ ID NO: 445097 - DNA, 122 bp, Homo sapiens
gggagggtgggagagggatgagggatgagaaattacctattagatacaatgtacaacattcgggtgacagttacactaagagcccagatgccaccacaatgcaatatacccatggaacagaa

SEQ ID NO: 445098 - DNA, 122 bp, Homo sapiens
cctcgcctgcgactgtgacaagcctgcggccgcacattgtcagcgattgtgggaaagggccgcgagcctttccgccgctcccggccgccctaatgagggaacaatcgggctacgcggcgctg

SEQ ID NO: 445099 - DNA, 122 bp, Homo sapiens
aaaacaccaaactcatagaccttactgggctccaattccagcggggtccgctcactccgacgagggtgacctgacccagagggttgggccaagtcctgggtaggccaccagtgcttgccctt

SEQ ID NO: 445100 - DNA, 122 bp, Homo sapiens
gtatgttggggaacttcacggaaggggctttgttacaggaacccaagtcaccatcctccccggtcctgtggcaggaagcggtgctaggcgcagctggagtggttttagagcagcctgaaata

SEQ ID NO: 445101 - DNA, 122 bp, Homo sapiens
ggcgggcggatcacctgaggttgggagtctgagagtagcttgaccaacatggagaaaccccgtctctactaaaaatacaaaattagccgagcatggtggcacatgcctgtaatcccatctac

SEQ ID NO: 445102 - DNA, 122 bp, Homo sapiens
gagttcaggcaatgtctacacaaaagcacagcatttttgcaggagtcaagccaggcacatcggtgtgggcatccgccttcatgcctcacctggtctcctcctttcctcgcctctgtgtctgt

SEQ ID NO: 445103 - DNA, 122 bp, Homo sapiens
gcctgccattgcctgttgtccccgtcctctgtggccctcttggcttctgtatcactgtcacgcgtagcagggccaggcttgctgaactgaaccgaagcaagaagacaagggaagggctgtgg

SEQ ID NO: 445104 - DNA, 122 bp, Homo sapiens
cccttctcccagttcttagtcactttcagcgcatcgtcgtcacgtggccatttgtgcagccggctctcgggggaggggtaaacaaccctggtttacaccgttgcccaaggggtgagtgggcg

SEQ ID NO: 445105 - DNA, 122 bp, Homo sapiens
cgcaccggagcccgcgggggcggccacagcccgccccgcccggaggacgccccctcggggcgccgcagccacgccccccgcccggcgcgccctccaccactctccgagccgcgcgcggccgc

SEQ ID NO: 445106 - DNA, 122 bp, Homo sapiens
cgcagccgcaggacccgaagctgagagcgcgttctggcatccgcgcgatttccgccgcggcgccccaagacctggacggcctgggaccctgggccaatgaaagaaagacttaaagtcacgcc

SEQ ID NO: 445107 - DNA, 122 bp, Homo sapiens
caacaatcttgaaaggttggaactttaagaagtgattaggtcataaaggctcttcatgaacggattaatgttgtttttgcagaagtgggcctattgtaaaagcaagcttggccctttcttgc

SEQ ID NO: 445108 - DNA, 122 bp, Homo sapiens
agagctaaagcaggtgcccccaactcatctacagtgtgatatgccagagtccttccccttcggtccacaggggacaaaagccactctcatcttcatcaggcactcctggccctgcctggctt

SEQ ID NO: 445109 - DNA, 122 bp, Homo sapiens
atctgtacgagggagcagaagggcattccaggcaagaatagctgtgcaaaggcggggaagcgggagagtgatgcttttgaagaactagaaatccagtgtgttaaaacatagaatactggcag

SEQ ID NO: 445110 - DNA, 122 bp, Homo sapiens
tgcagcttcccatcgggaaggggctgctgcttcctgggttgaaggctcccctcctcccagcgtgatttgccccaagtaacttggctgatttctcggtgatttcctgggtcagtgggtaaagc

SEQ ID NO: 445111 - DNA, 122 bp, Homo sapiens
ttatgggtcaataaaactatgtgggaacaaaatactagccaacaggtttttacataagcacgagaccagaagaaggggaaacaataatataatttgattgtcaatggcatcaggctagtacc

SEQ ID NO: 445112 - DNA, 122 bp, Homo sapiens
cttttgggtccccgcctgacagctcttgccgtctgtgcctcacgtccacacggatgataacgaacccctcatggggctgttgggatgacgaggtgagacggcatctgtcagctcttacagag

SEQ ID NO: 445113 - DNA, 122 bp, Homo sapiens
gcaggactagaaatagttaatcctattttacagtccccagcaaataaccagtttcagagccgggctgattaccaatctcggtttcagggatagtcaaaagctagcatcaatatgaagttaga

SEQ ID NO: 445114 - DNA, 122 bp, Homo sapiens
gcggcgggctatatagcaggagggctgctgcgttggcaagaaccgcacaaaaggggcccccggaggggagcaagggcattttcgtgttctctttttttctctttgctgtgctagaccacggg

SEQ ID NO: 445115 - DNA, 122 bp, Homo sapiens
cctctaggaggagccgcgcagctcagttgagagtgacacgcaccaactccagctcctcgccgggaagacttcatcccagcaactcggaatgcttggcccgggcggcactcggcctctccgca

SEQ ID NO: 445116 - DNA, 122 bp, Homo sapiens
ggttagcgtggtacaaaaaaaaaaaaaaaaaaaaaaaaaactgctgtaatcaagacctggcgcatctttgcaaattacagataattgtaaacgtccagattatgataatagcatcctaatcc

SEQ ID NO: 445117 - DNA, 122 bp, Homo sapiens
tgaagccaagcagtgtctgaggggtctaagggcctggtgcccacagacagtgctgtcagtcgtctcttcacccaccagtcccatcacggtctcgtctcagttttcttcctctgtaattactg

SEQ ID NO: 445118 - DNA, 122 bp, Homo sapiens
gggacagatggagaatccagctcagacccaggtaagctgctttggaaggcagagaaccgccggtacctgctttaacgttagcgtcgctgggggtaagcgggaagcagccatgtccaccagag

SEQ ID NO: 445119 - DNA, 122 bp, Homo sapiens
gatacattcacttctccaaggatgagactttaggcagttgctccgacagaatacccaaggcgagaatgcttcttacatctagaaacgcaaagctcttagagaagaaaaccatgttgaagcaa

SEQ ID NO: 445120 - DNA, 122 bp, Homo sapiens
cggctaggggaggcacggagaggctgggtcaggccgagggtgaggggcgggtggcccaggcggagtcggagtataggaggtgccttccgccccaccccccacaccaggtaattttcctacga

SEQ ID NO: 445121 - DNA, 122 bp, Homo sapiens
cgaggctcgggctgttggtctagcagggctgtttgtaccccttgcattgtcatttttttgcgctataaagctgcatcacgtagaagcatgttgactggaaggctccattcgtgccgaaaagg

SEQ ID NO: 445122 - DNA, 122 bp, Homo sapiens
ttgcacaggaatcatcacagcagtaaaaactctccaaagaggaataagagaagtctaattcgggtcagatcttcagagacaggtaagataagcctgcaatacaaggtttcctggaggcctaa

SEQ ID NO: 445123 - DNA, 122 bp, Homo sapiens
ttatcagcctaagcatgcaaagaaacatgtgacctgtgaagtaatccttcaccaagagcacgtgccaaagctggtcaatattgggccagaaattctccccatcccaccccaccctgccctgt

SEQ ID NO: 445124 - DNA, 122 bp, Homo sapiens
ggcgggctcagaggtcttgctcctggggaagctgagaatctccgcgcggtggactgtggccggccaaccgaaattggcgcgaaacgtcgccccccacgtgaccggcgccactgcgtgcgggc

SEQ ID NO: 445125 - DNA, 122 bp, Homo sapiens
cctgcgccgggcatggtgcctcacgtgaggtcatttccacggccacgtgtgtcctcctgccgcttcacagacggtgacttccacctccatgtcctcagactccactctccacagagccctga

SEQ ID NO: 445126 - DNA, 122 bp, Homo sapiens
atatttgacgaaagcaaaacacttatgaccagtgtgctgctaatacaagtctacagataacgctgcatgaaaaattagttttcccaatcgtagctggcatagtccacattttgcattacact

SEQ ID NO: 445127 - DNA, 122 bp, Homo sapiens
atcccccgcagatataaatctgccctgccccaaagccgtccagagcgcaggcgctaaccccgccccatccgggcctgcccgagctcaacagcgccctgactcagcgcctctgagggcgcctg

SEQ ID NO: 445128 - DNA, 122 bp, Homo sapiens
aactcccatctgtgagcgtgtcgtcgaggtgtgcacctccagcgacttcgtgctcggcagcgcggacgcacctgcccgtcctccccgccagggactcaacttcctgggcctgggcgagaacc

SEQ ID NO: 445129 - DNA, 122 bp, Homo sapiens
aatacacagaagagagtctccaacattcctacatgatttagttacattatgttcagcctgcgttcacactgcagactctgtggtcatctccagactttaaggtctgtatggacaacctttgt

SEQ ID NO: 445130 - DNA, 122 bp, Homo sapiens
cctcgcgggtcccgcagggcgcgctgcaggtgcgctgggcgtcccgaagccccgccctcgcgtccctgccccgcgcccagctcctcacgctcggtgcccgcgccccgcagcggcagcgcaga

SEQ ID NO: 445131 - DNA, 122 bp, Homo sapiens
atgcctattatcccagcactttgggagactgaggcaggtgggtagcttcagccaggaattcgagacaagcctgggaaatgtaggcagaccccatctctacaaataaataaaaaataaaaaag

SEQ ID NO: 445132 - DNA, 122 bp, Homo sapiens
tggagaacctacccctggaggagtgttagggtttccgggctcggatgtccgcgagcttgacgcctgacctagttgtgtctgtctgggcggtgacgtttggtctgagctgacctttcctcaca

SEQ ID NO: 445133 - DNA, 122 bp, Homo sapiens
gtctctggaaacatgtggcctgctttggagtggccggccatggggaggcctccagatggccgcaagggctccccgctcagccacacccacatttcctcagcatcctcagtccagttctgagg

SEQ ID NO: 445134 - DNA, 122 bp, Homo sapiens
gcgatacttctacgcggcacgtcatccgagtgggcccgagaccccgcctctcggcgagcccgccctcttctgaagaggcgtttctggaccactgagccccgcctcccactgtgagcggaacc

SEQ ID NO: 445135 - DNA, 122 bp, Homo sapiens
ccccctctgcgcaggcccttcctctcgccaggggtagcgcccctgggtgacttgggtgtccggggggtgggggggcggccgtacacactgtgaagcgtccgcgccgccgccgctggctttgg

SEQ ID NO: 445136 - DNA, 122 bp, Homo sapiens
caggctggagtgcagtggcacagtcacagctcgctggagccttgaactcctggcgtcaagcgatcttccccctcagtctcccaaaatgctgggattacaggcgtgagccaccgtgccaggtc

SEQ ID NO: 445137 - DNA, 122 bp, Homo sapiens
gagtggggtgcggggaggtactttgagcaggcaaaacagaacaaaagggcacactgcacgcgggtctgacaccagaagaccccggtcgtcctatcattcccgaagggttaacatgctctcga

SEQ ID NO: 445138 - DNA, 122 bp, Homo sapiens
ttcacttgttcctaaatctctgcttgttctaacttggactagcccagtgcaaggcgtgctcggaattctgctgtgaggttgggggtcagggtgggaccaggcttcaggccctggactcaggt

SEQ ID NO: 445139 - DNA, 122 bp, Homo sapiens
cccagccgtttcgcgccgggaggtaggtggtgctgttgccgtgactgtcttcctcattggcgccgtgcagagaggcggaatgttcaactcctaactgcagcggaaacgtgggagccgcgcgg

SEQ ID NO: 445140 - DNA, 122 bp, Homo sapiens
gcgccccggcccgaagtgagcaaagtcaatgaaaagtttcacccttagcaaccctgcgcacggatccggcttccccacccctgcgtgatgcgtccctccgccctgcaggggcggggccaggg

SEQ ID NO: 445141 - DNA, 122 bp, Homo sapiens
ccagcggatgtgaccctggaccctgagacagctcatcctaacctagtcctgtcagaggatcgtaagagcgtcaagttcgtggagacaagactccgggatctccctgacacaccaaggcgttt

SEQ ID NO: 445142 - DNA, 122 bp, Homo sapiens
ctctatcgaaaggttcgtggtctctcgggcttaaaggaatgaagccatggaccgcagcgccgagtgttacagcttgattagagaaacgtgtggacccaaagagtgtgcggcgacaagattta

SEQ ID NO: 445143 - DNA, 122 bp, Homo sapiens
cgtgcccctgcacacctgccgccactgtggcctgtccctcagcgtgcccctgcacacctgcggccactgtgccctgtccctcagcgtgcccctgcacacctgcagacactgtgacacatcac

SEQ ID NO: 445144 - DNA, 122 bp, Homo sapiens
atgaggagccgaggactcctccgaagggctgggggcggtgtcagtagtgcctgtgtctgccggcacagtccctggcgcagagcgcaccttcactaaccggcttttttgtcctccttggaacc

SEQ ID NO: 445145 - DNA, 122 bp, Homo sapiens
agcctgggtgacagggtgacagaggggtattctgtcaaaaaaaaaaaaaaaaaaaagcgccgcaggaagtttcccctggggagaggatgtaaggtttatctagtttagcagcgaagttctaa

SEQ ID NO: 445146 - DNA, 122 bp, Homo sapiens
ataggagccagccaggaagtacctctctgagcggttggtgccgggtataaaagaaggccgcgcagccacggctgctcacgacgccgcggatcccgaagcctgtgtagcagtgagacatcagt

SEQ ID NO: 445147 - DNA, 122 bp, Homo sapiens
cacacagcagaccatggagacactggagctgctaaagctgagacataaacaataataatccgggcttgatgtttcagcccttcaggaaatttagggacatttgcttttcttttgtttgtcag

SEQ ID NO: 445148 - DNA, 122 bp, Homo sapiens
tacctctcaagactcagtatctcacccttctcctcaatgctgactcactcaaactaagtccgcattgaactccctcctaaacttcttttaatcttttgaaattgctctttcttgcctgccga

SEQ ID NO: 445149 - DNA, 122 bp, Homo sapiens
gccctgggctattacagcacatcctcagcatctagtacagtggctgctaaatacgtatttcgtgatcaggtatactaatcctttaacaccaagttcggaattaactcacatgcttcaaagca

SEQ ID NO: 445150 - DNA, 122 bp, Homo sapiens
cctccaccagctaccggagggaggagggaggatgcgctgtggggttgtttttgccataagcgaactttgtgcctgtcctagaagtgaaaattgttcagtccaagaaactgatgttatttgat

SEQ ID NO: 445151 - DNA, 122 bp, Homo sapiens
ctctttatttctgggtgtaggggtggggcttctctgtgttttctgtcctttgctcctgggcggtgggtatttggaaattcttgcagggaagggcatgggcagccttactcagaccgattttt

SEQ ID NO: 445152 - DNA, 122 bp, Homo sapiens
gcgctggagaccgggagaccacacagggagacagtgcacagagctgccgcagccatctgccgcgacttcatatgccgccccggaaactgacagacactgcttcagcaaggcccagcccgtca

SEQ ID NO: 445153 - DNA, 122 bp, Homo sapiens
ccgaagaccccgcctcctcatgcccctcacagtggggattcggtttccacgtgggaactgcgggacacaaacctcggtccccagcatcctgcccctgtccccacagaacccacatccttctc

SEQ ID NO: 445154 - DNA, 122 bp, Homo sapiens
ctttcttccccagctggtcctgtctctgctgtgctgacagagctgcgttgcacttgtttacgcgttacgctgagagtaaaccccaaaacgattggtaaactgcaggtgttccccgcaggccc

SEQ ID NO: 445155 - DNA, 122 bp, Homo sapiens
gaaagggttcgacagatacaacggcagcgcagcgcaggggcctgggcctgcgcaggccggcggagcacaagggacgcattcttccccgccgcccgggccccatgtgaccgcgccgacagcgc

SEQ ID NO: 445156 - DNA, 122 bp, Homo sapiens
acaccagcacatctcgtatctggttgctcgtggagtgggcaggatcagaggaaaggagggcgtttctttaacagttgctactcctgcaatgcaaacacgaggaataaacggcgtcggaacac

SEQ ID NO: 445157 - DNA, 122 bp, Homo sapiens
tcttctgttgccgggcaacgcgccttttaaacctgagggagcgggcgcgtgagcacatcacggcgcccgtgacagagccagcttaacggattaataagcgcagccaggtacccgcgcgaggc

SEQ ID NO: 445158 - DNA, 122 bp, Homo sapiens
cgggctctgccgccggatttgggggccgcgaggaagagctgcgagccgagggcctggggccggcgcactcctcccgccctgtctgcagttggaaaacttttccccaagtttggggcggcgga

SEQ ID NO: 445159 - DNA, 122 bp, Homo sapiens
aggcagcacggctccgcggactttttttcaaactcccatcaatgagacttcgaggaggagcgggcggcggcggcggctgcgactgcgaacgcggaggaaggccaggagccgcaggaggagcc

SEQ ID NO: 445160 - DNA, 122 bp, Homo sapiens
ggggacagggatcttcaccaggtagggagtctcttcctcatccaggtggtaaatcaccttcgtctccccaaccccaccgcccccagtgctgctacccgccatggtctcgcccgcgcgctccc

SEQ ID NO: 445161 - DNA, 122 bp, Homo sapiens
ccactgagtgaggcctgacgcccaccgatgcaaatgtcagcctggcaagaatgagatcgccggcaaggggtgggggaaggggagagaagacggaggcacaccggggtggctccggaaggttt

SEQ ID NO: 445162 - DNA, 122 bp, Homo sapiens
ccgccggggatcgctgggagcggagataaattcaatccccagggcaatcttggccccgcccgccccaccccatcctgtgcttaaatagagcctttcttgaagctgcgaacatttccaggccc

SEQ ID NO: 445163 - DNA, 122 bp, Homo sapiens
ccaggaccgagtcgaccagctcggctccctctgtgtagtggcccttggcccagttattcccggctccactctggcctgccagagggaaagtgaacattagacactaaaacataaggaatttc

SEQ ID NO: 445164 - DNA, 122 bp, Homo sapiens
aatcaaatgggagcccgaggtgattggagggtcaaggggatgtgacgcgtcccgcgccgccgccgccgccgctgccaggactctcagtgccggttttaatgggcagctccctcttcgccgcc

SEQ ID NO: 445165 - DNA, 122 bp, Homo sapiens
tgcgaacagctggtcaaaggcactctcaaaagttcaaggaaatgcccgtttgcggatggccgcagcaggcctgtggggctggggacagcgccaaggagctggccgttggttcctgagatgct

SEQ ID NO: 445166 - DNA, 122 bp, Homo sapiens
aaagaaaggaccacagaacgatgactggaccgttaggttactatttattacggttatcttcgctcaggcgcccccacgtgtcgatcccgagactctcggcttgcgcaggcgctctttggtgt

SEQ ID NO: 445167 - DNA, 122 bp, Homo sapiens
atgtgccaggtacccgtcgtctaagtactttacttacgggatccaatttaatctccccaacgaccctgagagaagaaaccgaggtgcagaggtgaaggtcacagcgccactgagtactggag

SEQ ID NO: 445168 - DNA, 122 bp, Homo sapiens
agatgaagccaatttagttgccctttctttgttcccgtgaccttgaggcacttaactcagcggagctcgcggtgcagggagcccggcagagctctggaatgaaaggcaggagaccttggagg

SEQ ID NO: 445169 - DNA, 122 bp, Homo sapiens
ggcaccgacactcagcagctcctcacaaagagtcctgaccagtgtgtcctctcaagtcagcggagagctgagccagggcagaagagcgggcgcagaagaaggagggcagaagaggggattca

SEQ ID NO: 445170 - DNA, 122 bp, Homo sapiens
cccgggaggggcgcgcccggcctctcccagggccccgtgcgccggcggctgggtcccccgcgccaggagcgctcccctctgggcgactccggctcatcgattccggcccagaggagcgcccc

SEQ ID NO: 445171 - DNA, 122 bp, Homo sapiens
tctggacagcaggcagtatatttgggtgaaaagccttgggtttccttacctgttggcagccgctgagacaagacaggaggagccagctcacctgagctcagctcttatacctgggggaaggg

SEQ ID NO: 445172 - DNA, 122 bp, Homo sapiens
agaccgtatcagtgtgggtccctgcccctgttattcctgactgagaaggacatcctgacccgggcccccagcacagctgccctgcccccacctgagttggtggcagttctgtgtttctctga

SEQ ID NO: 445173 - DNA, 122 bp, Homo sapiens
aacgaataaaacaatgaggaattaaagagcaagatctagagaaaacagaaaagcctgctacgtgagccacacatttagggcagctttctctctaggggtgtctgctatcatttaaatatgca

SEQ ID NO: 445174 - DNA, 122 bp, Homo sapiens
ctgggacccgacgccgcccggtgcccgcgctggccggcagagggcagcggcagggcgccgcgggccacacatggctgcgtgaccgcgggatgctgtctgtccccttgctcagggcggcgtgc

SEQ ID NO: 445175 - DNA, 122 bp, Homo sapiens
gaaagtctgagaaaccgtgacagccaagaagagcctaaggagtcgtgacaacgaatgttacgtgggatcccgggtgcgaccctggagtagggaaagatagaactaagtgtaaacagtaaagt

SEQ ID NO: 445176 - DNA, 122 bp, Homo sapiens
gcggccgccggagacgtcccgccgccgcgatcgcccgcgctcgcctctgcctccccgcgccgctcctccactcaccaaggcacagccgccgagctcggcagacacagtcccgggcacaacct

SEQ ID NO: 445177 - DNA, 122 bp, Homo sapiens
tgcccggcgggcgcggtccgtgttgaggggggctccgggggtggtgcactcctaggggggcgcccgatgctcacgctggggtcccgcccgggcggcctctggtgcggccgctgcagatgtgg

SEQ ID NO: 445178 - DNA, 122 bp, Homo sapiens
ataaattaaaatggaaatgcatattttctaattatgcatcgagccttagttgcatattggcgagggtggccacaccgaatgttaaattaagtctgcacaatagttagagtctatgtaacatc

SEQ ID NO: 445179 - DNA, 122 bp, Homo sapiens
cagagcccccatggagtagaggaaggcaaacacggccacggtgacaaagaattcggctgacgaggagtagtccccaactaagaagaccttggtggtgccccctcggcaggtgggtgcatcaa

SEQ ID NO: 445180 - DNA, 122 bp, Homo sapiens
tccttgcgggccagctccagttccgggtgggcgtgggcttagcgggtccgcactcagagccgcaggccggccagccgccccgggtagtgaggggctaagcacctgggccagcagctgctgtg

SEQ ID NO: 445181 - DNA, 122 bp, Homo sapiens
tatacactattatgtagctatgtcttgtaaaagtctctaatcggcatccattagatgagccgaattctcctggccaagccttagcctctcagggggctggcaccaaacagggaggctggagt

SEQ ID NO: 445182 - DNA, 122 bp, Homo sapiens
cgtggctagagtagggtctggagagagctcccactgtggcgagtcctgtcgttggattcccgcggcgccccgtaaggctccgccccggcggtgctaccaaaccctgttcgattttagaatcg

SEQ ID NO: 445183 - DNA, 122 bp, Homo sapiens
ccgggtctgttctttccgctcttcgatactcttcgcactttcaaatctaccactagcagccgccatacttgttgccatcgtaaagctaagaagccgcaagaaaattctagtttacgacggtc

SEQ ID NO: 445184 - DNA, 122 bp, Homo sapiens
caagcatctctactggatcgaccgccagcagcagatgatcgagcgtgtggagaagaccaccggggacaagcggactcgcatccagggccgtgtcgcccacctcactggcatccatgcagtgg

SEQ ID NO: 445185 - DNA, 122 bp, Homo sapiens
aagcgggcggaaaaaaattatggggcgtgcagtgtcacgtgactgctcggatttttgtcacgttgtctgtggatcctttcttatttctgtgttgaattccagcctgggtatttggaacctat

SEQ ID NO: 445186 - DNA, 122 bp, Homo sapiens
ggcacagggtctcttcttgtgcccaggggcctttaaccccggctgctgccacaggaaacccgcatgcccagcgcctccctggccgttccgggtcttggctccttctttctggaaccgtcaag

SEQ ID NO: 445187 - DNA, 122 bp, Homo sapiens
tgcatgctctgtccctggaaatcccacctgctggtgagcggccagacgagtgcccagtggcgggggacacatgcatgctctgtccctggaaatcccacctgctggtgagcggccagatcagt

SEQ ID NO: 445188 - DNA, 122 bp, Homo sapiens
tatggagttgagcgtgtggcagccgggtcacgggtaaaatcccttacgggggtcatctgacgtggcagctgctagaccagccgccacccaccacgcagcaggcctgctgagcccgggattct

SEQ ID NO: 445189 - DNA, 122 bp, Homo sapiens
tgttgggcgtgttacccacgattgcctcctgaatctattgtcatttttgtgtcctgcccccgaggttaggtggttcttcccttcttactttcctaaacttcaactcttaaaatgtgagcctt

SEQ ID NO: 445190 - DNA, 122 bp, Homo sapiens
ttctgccattcaaggtccagaaaaatgacagaggaagaagagttagaacagattctgaatcgttccgcctcagcaggaaggaaaccccgtccctgctccaccactggcgcaccttgaggacc

SEQ ID NO: 445191 - DNA, 122 bp, Homo sapiens
ttaaggaagcatcttgccaggagacacaaagctaacaagagtggagcctgcagctggagccgcagagcctaatcactacacccgcccatctctgctagggtttcatgacttcgtatcgggga

SEQ ID NO: 445192 - DNA, 122 bp, Homo sapiens
cctccaggctcctgctggtcccactcgccggtaattaggtctccggtcagcctcagctcccgagacacccaggcccagaaggacacgtaagggaaagcagctattcacttcggtcctgtccg

SEQ ID NO: 445193 - DNA, 122 bp, Homo sapiens
tggagacccgatgcagctggacagcctgtcagcggctgctctggagcctggggcctgctccgtgcgccctgtctgccctccgcgggccgtgctgtccaggctggcccgacagcctgactcga

SEQ ID NO: 445194 - DNA, 122 bp, Homo sapiens
aatacttaccatggagcatagaattctacaagccacaaactatcactctgaataacttctcggttgaaattcgatggagttaattcgatcacatcatcactagaggaatacagaccattcac

SEQ ID NO: 445195 - DNA, 122 bp, Homo sapiens
tggtcgggctgttgtgcatcttcctgacgctgtatctggatctgggggcggtgctgagcccggcctggatcacagctgaccaccagtactacctgtcgttgtgggagtcctgccggaaaccc

SEQ ID NO: 445196 - DNA, 122 bp, Homo sapiens
gggtgctgtggtttcctccgctgcacttaacataaaccaaagggatcttctctactcgtgcgtccctagtctctctccccccacgacgtaaacaccatgtggagagaagcctgggttttcct

SEQ ID NO: 445197 - DNA, 122 bp, Homo sapiens
caaaaagtgccagtgttctctgcctgtagaaacacacagattttcagaaacacccacacacggggaaaccatcactcttaagccacagcaaaagtcctcctggctctcggtgctggagcagt

SEQ ID NO: 445198 - DNA, 122 bp, Homo sapiens
gcatcacggagatccacgagcagacctacatcaacggtgagccggggcctgatgcctgctcgtgcctctggagggcccgggccctttccgcttgtgggttggggagagggcgatggggagcg

SEQ ID NO: 445199 - DNA, 122 bp, Homo sapiens
ctgggagcacttggccgtgtgagaacagggcagcatggtggacgggccagcatggcacggcgaggtctgagcccctggctactctccccagccctgagaactcaggctgctccgtaagctct

SEQ ID NO: 445200 - DNA, 122 bp, Homo sapiens
tcaaacagccctgagccccagccctgctgtgccacactcatcccagaccacactccttcccggatagtccccaaagcctgtgcagagacatgaactccccaggccctgcctcagggagcacc

SEQ ID NO: 445201 - DNA, 122 bp, Homo sapiens
gaagctcaaatgtgtcccaaaccagcaaacagaaaacagcataaaggaagatggatgggccgagccaggccaccacagaaacgcccccgtgtccaccctcctcgcgtggggggttcccctgg

SEQ ID NO: 445202 - DNA, 122 bp, Homo sapiens
aaatgagttcctgggctttaacgtcaaacagtttgagtttgcaaatattttcaccttacacgtgaatcaacacaggggatatgtgagaagacaaagctgttcacactgtcagcaagcttcca

SEQ ID NO: 445203 - DNA, 122 bp, Homo sapiens
agcccgtttccatcagaaccgcccagaggcgggcgctgccttccaggggtgaagtgttttcggaccccggaatctgtgggcggcctgcgggaggggctgaggcgcagttccctactcaccca

SEQ ID NO: 445204 - DNA, 122 bp, Homo sapiens
cataaccacaaccaaaacagtgccagacctgtcaccacctttaatctattgatgctcatacgcccaggtcacagccctcaaatcaagccaaatatagggctaaatccctcctcacccacagc

SEQ ID NO: 445205 - DNA, 122 bp, Homo sapiens
caaacgctccggccagtggcgaggccaaatgccattcacctagttctcagagttttaatgcggctgggtccacctggagggtatttaaaggggacgaaggcaaacgaagtgtctagttcctc

SEQ ID NO: 445206 - DNA, 122 bp, Homo sapiens
tgtccgggatgccggagcggacacgcgcggagaaagcgtcgctggggttactcgtgtggccgtgtctccggttttgtgtgcaggctacagcctgcctggtattggcgactgcctgtgcatac

SEQ ID NO: 445207 - DNA, 122 bp, Homo sapiens
tgaccgccggagaggagcagcctgcagcccgctggaggggccccggagccgcacctgggacgcctgtccccgacctctcagtgcccgcggatacgacgctcttgggtggagttgcgaggctg

SEQ ID NO: 445208 - DNA, 122 bp, Homo sapiens
ggccgttcccgcacagctgagacgaagggggcccatgtgcgcatgcgcttgcttcttccacgtacacagcaaccaaatctacgagcccagagttcggtcgacagacggaagaacagaagaac

SEQ ID NO: 445209 - DNA, 122 bp, Homo sapiens
agggggggaccgagcccgggcccgggctgaggggtgggggagaggccgccctgcgctgctcgcgcccccacacccgctaccggcaacgactactgtgaggtgacagagaggggacagggagg

SEQ ID NO: 445210 - DNA, 122 bp, Homo sapiens
cctgacggcagtttcttaagctgtccattagtagaagagcaagaaagccttggatgtcaacgcctcgctcttgagaccagccaccaaaccacgaaaagtgactttcttctcgtgtgctctct

SEQ ID NO: 445211 - DNA, 122 bp, Homo sapiens
ggaggaacctgtagcgggtgctgggctccaggcctgagatgaggatcttgctctggtcgccgtccacgagcaaggcctggggctgcccattcgtgtcctcatactggaccacgaaggaatca

SEQ ID NO: 445212 - DNA, 122 bp, Homo sapiens
ccctctgcccattgggccttcgggacagcagaggagcagtgtccggccatggccggagcccgcaggctggagctaggcgaggccctggcgctggggtcgggctggcgtcatgcgtgccacgc

SEQ ID NO: 445213 - DNA, 122 bp, Homo sapiens
agtgggaacatatacaagcgactgaacgtcgagaccagcagaccagcagacctgtggacccgcagaccagcgacggtggaacaacacgacagcgaaagagagaagaggagggatatctggat

SEQ ID NO: 445214 - DNA, 122 bp, Homo sapiens
tgctgggtgacatttctcagctgagggagcccatgcagccctgtgtggaaagcaaaccctcgagcagggtggtcttgaggtgacttgctgaccttgtataatgtcaagaggaattattgtta

SEQ ID NO: 445215 - DNA, 122 bp, Homo sapiens
ggcccctccgcctcaagtctgggagctgccggtcccactctgtctttgcctatggggattcgagagtttcccagcggcgcacccaggggcaagagcattgccgtgtgagtagcgccccgggc

SEQ ID NO: 445216 - DNA, 122 bp, Homo sapiens
gtcggcgccgggctgatcccacgcgcagcgcgcacctctgccctcacctagcccgggcgccggcacccgcccccgcacgcacctctgaggcttccccagcccaagcccgcactgtggacccc

SEQ ID NO: 445217 - DNA, 122 bp, Homo sapiens
ctgtcaaagcatagagccctgaaggacattccccgaagaggagccctgatctctgtgacgcgttggatagccacaccgaagcatcctctgacctccatagggcaaagagtagcaagaaggaa

SEQ ID NO: 445218 - DNA, 122 bp, Homo sapiens
cagcattgctttaaataattgtttggttaaaagttgtggtttccattctcaaccgaaatgcgtctccatgcagttttccttgggtccaaagcttaaggccttgggaagggggccaagaaaaa

SEQ ID NO: 445219 - DNA, 122 bp, Homo sapiens
aaaagccctggccttcttcctctgtgcccccatcccagccccacatctcagggagggggtcgccccaagccagagcagggctgagtctgcctgggccaggctgcctggccaataggctttcc

SEQ ID NO: 445220 - DNA, 122 bp, Homo sapiens
gccagcgccctgcacatactttgcacatggctgggggccagctgcgggtccctggggactcggatggcacagagggccccttcctgccaccatcacggctcagacctcacgttcctggagag

SEQ ID NO: 445221 - DNA, 122 bp, Homo sapiens
gaaactcccacccagtgcccctccctcttcagatccaactccacctcacaaaaaactttccgggcttcagtctcatagaaaagtcccacgatgattcgggcatcctggcgctacaacagaga

SEQ ID NO: 445222 - DNA, 122 bp, Homo sapiens
gtgatgatgggggcccggggttggtctgacagcagcagctccgtggggcgccggttcccgcggccccgcccggtgccccacaccgcacctccgggacgtagcttccccttcgcccccaccct

SEQ ID NO: 445223 - DNA, 122 bp, Homo sapiens
ttggcatattatagtgatggtgcaatctttctgaactgtcttacaaacagtgggaaccttcgaaagctttgggtggggtgagggagggagttgaccaagcccaggaattctggacattagca

SEQ ID NO: 445224 - DNA, 122 bp, Homo sapiens
cgcctcgatggggcgcctctagcaggcgggtgcagcctgtcccgcgtacccaggcgtcctcggtacccacgaaacggatccaaagagtctcaacactaatgtaacatcccaccctgacccat

SEQ ID NO: 445225 - DNA, 122 bp, Homo sapiens
gccgctataatgtttattatttgtgtagttattttaaaggcgatgtcagcctctaggccacggggtcataagcactaaataaggccccagggcagaaggtaaaaacagaatggggggaaaag

SEQ ID NO: 445226 - DNA, 122 bp, Homo sapiens
ccccactaggccaagtggagggggtccctccgtccaatgggcctggccagggccctacgccgcctcagcggcgccctggattcgggagacagccgggcgggcgatgaagaggaggccgggcc

SEQ ID NO: 445227 - DNA, 122 bp, Homo sapiens
taatggtcaaaaataaaacacaacacaataagacgaaaccaaacttacagatgaaacattcgtttgcataagagaagacagaaaaggccccctagaaccaactttcacccagtgctcaccgg

SEQ ID NO: 445228 - DNA, 122 bp, Homo sapiens
ggcgtggacagggctcaacggcagtagtaaatggccgcggtaaaatgactcaaggcagatcgcgctgagtcaaatactacacggcaagtatacaccgtgaccgcaccaaacaccttacaaag

SEQ ID NO: 445229 - DNA, 122 bp, Homo sapiens
gcccctagactgagccctgctgaccctgatgacagtcctatggaaggagccagtatcccccgcacatctcaggactcacagacatgtgggaggaagaaaatatgaatgtgcactaatctgaa

SEQ ID NO: 445230 - DNA, 122 bp, Homo sapiens
ccttgcccagccccagctcagtatttatgaaggttttctgacaaataggcaggctggccacgcatgggtgactgccttcattccgcacttggcttgtttacataggaccagcaccatttcca

SEQ ID NO: 445231 - DNA, 122 bp, Homo sapiens
ggaggccccaggggcagctgcccccggtgctgggcctagcccagccgaagagatggagaccgaaccgcctcacaacgagcccatccccgtcgagaatgatggcgaggcctgtggacccccag

SEQ ID NO: 445232 - DNA, 122 bp, Homo sapiens
caaaaatagtcacccatgaaatcaaatatacctgctagccatagcccataggcctaaccgcggggttgtgttgggtgatgtgagcagcctaggaacaagcccggaaaaggtcagctccaggg

SEQ ID NO: 445233 - DNA, 122 bp, Homo sapiens
caatctgaagaaagctgaggggaggcggcagatgttctgatctactagggaaaacgtggacgttttctgttgttactttgtgaactgtgtgcacttagtcattcttgagtaaatacttggag

SEQ ID NO: 445234 - DNA, 122 bp, Homo sapiens
ggcaaggaataaccggatgagcagcatgttctgcacagagctagtgttgaccgtgattctcgagggaaggttagagtccgtaggaactgccatatattattggcttctgaaaaataggccct

SEQ ID NO: 445235 - DNA, 122 bp, Homo sapiens
tccctcaggggaaaaggccaatggcacagaggactcaacttgatcattcccagaaagcgccgatccccgtgcctggcacatgagcactcgatgggagctgtcattgtcatcatcttcacggt

SEQ ID NO: 445236 - DNA, 122 bp, Homo sapiens
gctcccctacggggagcctgccctgtggcctcggtggcctgtgccagacagcgtgaccgtcgcccacagggaacactcagcacagcagagcaggctcggggaaggacagaaagtgacctcta

SEQ ID NO: 445237 - DNA, 122 bp, Homo sapiens
cccttcttaaatcctgggattttgcctgagaattctgaagcagttttattagtgtccgaacgacttccccactgcaagctttggaaaataaagtcacttttcttctattacaccccatccct

SEQ ID NO: 445238 - DNA, 122 bp, Homo sapiens
cagttcactacacttttgtgtgtgctctcattgcaaatggctcgtacgaagcaaacagctcgcaagtctaccggcggcaaagctccgcgcaagcagcttgctactaaagcagcccgtaagag

SEQ ID NO: 445239 - DNA, 122 bp, Homo sapiens
atgaatgagctggaatagacccaatgtcttactctgtggaaccttgcaaaagtgaagaaacgttgaagggttatttagggcagctggctgatgtcaaaactgccagaatgctaattaactgc

SEQ ID NO: 445240 - DNA, 122 bp, Homo sapiens
gcgggtgagcgccgccgggcaccgggcgggggcacgtggcgccctctggggaccgtccgccgcactgcctggcgtcctgcctggggaggcgcagcctagcccagcacctcccgccgtctcag

SEQ ID NO: 445241 - DNA, 122 bp, Homo sapiens
aagaagagaaagaggaaaacagatatttggcaggagataattccagcatcaaattgtcatcgttgctgaggcaagtaaaagaagtgccttgattttcaggctcttaattataattaagcact

SEQ ID NO: 445242 - DNA, 122 bp, Homo sapiens
ggtgtcaccggctgcacggcctcgctcatcaggaagaggcgctgcgcgtcctgcaggctgcgctccgtcaggttctcgttgggaccggtctcaggcagggtgccacactgccgcggggagcc

SEQ ID NO: 445243 - DNA, 122 bp, Homo sapiens
ccttcctgggggtgggacggctgaggccctgccggccctcactgcacccgccccgcagctcgtcccctccgaggtgctcatgcaccaggccatccacaccatcgagttctgcctgggctgcg

SEQ ID NO: 445244 - DNA, 122 bp, Homo sapiens
ccctagaggctgcccctcggttctgctccatggacggcgcaggcaggcccaggcctgtgacgagttcacggaagctccaggatgacccccgctctgcgccctcctccagcattccagaccac

SEQ ID NO: 445245 - DNA, 122 bp, Homo sapiens
gctagcaatataagctattcgacatattctgttgtggaaattcccaagctcccaagattccgataaggaacgtgctgcacgagctcagggcagcaaggagattagacaataaataaacaaag

SEQ ID NO: 445246 - DNA, 122 bp, Homo sapiens
tccgtcgggctctattcacgccgtgtggttttgtaacctccagcgtgtgtgcgtgggtttcggggtggggtggggtggggtgggggcggctatggacagagaaggggataaagcggcggtgc

SEQ ID NO: 445247 - DNA, 122 bp, Homo sapiens
tgttttaagcaaagccagtttttaggcaggtcaagactcacattacaggttcagagaaaccgtgagtgacaggcagccttgattacaatcaaagagcagctgcccaagattccagcaaccat

SEQ ID NO: 445248 - DNA, 122 bp, Homo sapiens
gaatgtgagaaccatttacagaccttacaggctgtagaatgcactctagaccataaagcacgtcagacccaattacaatttagcgccaagctacgtgagttttaaggctattacgacagggg

SEQ ID NO: 445249 - DNA, 122 bp, Homo sapiens
ctcctgcaggccggggcttccgatgcacccgtgtcgccattcccgttttacagatgaggccgagcaccgacttgccccaggtcccggctgtcctctgcaggctggggctccactccagcccc

SEQ ID NO: 445250 - DNA, 122 bp, Homo sapiens
agcggcgccaagaacccggccaagctgacttggcgactcctcgcagcccctgctctggcacgccacacctcagacgaggctttgaaagtagggcgcagcctgagaggccggccggaccccga

SEQ ID NO: 445251 - DNA, 122 bp, Homo sapiens
agcagcccagccaggccgctggactcgggctaggggcggggccagcgcagggggcgcaggcgcacaccgcctccgcggcagcatggcggacgcagctcctcaactaggcaagaggaagcgcg

SEQ ID NO: 445252 - DNA, 122 bp, Homo sapiens
gggatccgtcgatgtggagtgcaccttccttgcagtcgggggctcggtgccgggtgccgtcgttagtccaggaagaaggcggggagcttctcccgctcgaacaatttgcagctagttccggg

SEQ ID NO: 445253 - DNA, 122 bp, Homo sapiens
gacctcggaggagtccaatctgccaggacatgggcagccgcagagcttctgtaccggaggcgatgctgttatctttatttgtgtggatctgtgattcatgtggatctgtgaagcctcatgga

SEQ ID NO: 445254 - DNA, 122 bp, Homo sapiens
ccattcgccttgccgtggtccctgctgtgctgatttggttaagtctttttgccatgtcaccgcgcatttgcagctttggtcaccatacacgacgtaacccacaggcgctcagatgacgggga

SEQ ID NO: 445255 - DNA, 122 bp, Homo sapiens
gtttcctagctgcaggggcggggggctctcctcgccctcgggggacatctccccgggcagcggggtctggtacatactggcctcatatctcccggacagctgcccaagggattgcaagtgct

SEQ ID NO: 445256 - DNA, 122 bp, Homo sapiens
gccagccggtaagccactgctgtcaccatggctgcacctttgccactgccatcctcggagcggaggaagcagacatagcagtcgggcaccagccgccacacggtcttatgtagacgcttggc

SEQ ID NO: 445257 - DNA, 122 bp, Homo sapiens
aaagctttaagagatgaagtgagtggctcaaagtcacgcaacatgtcactggacaggagacgagacacccagagtcccaggcgcttcagcataaagaatgacccagcctcgactcactgtgg

SEQ ID NO: 445258 - DNA, 122 bp, Homo sapiens
ccaggaacaatggaatatgactcagcactaaaaaggaacgactttcgagccacaggaaggcgtggagaaacacatgcatgtcactaagcgacagaagccagtgtggaaaggctgaggggaat

SEQ ID NO: 445259 - DNA, 122 bp, Homo sapiens
accactgtgatgggagaagaagcccgcgcctcgcgcatgcgcattggctgggcctactcgcgctcagctcctggtagtcaggctgcgtcccctttaaataatgccaccgctgctcagtgaag

SEQ ID NO: 445260 - DNA, 122 bp, Homo sapiens
gtgtgatctggagcaactggagggtcttgagcagagaactggggtgttttaacaggatcacgctgactggtggtttgaaagtggcctgtgggagcttgctgtgttttgttttgcagcaatgg

SEQ ID NO: 445261 - DNA, 122 bp, Homo sapiens
cagctgctgagtcacttttgtcaaagagtggcctcggccccactttcccgatgcccatgtcgggtggcggcctccccttgccatggcacccagggagatcatttctcagtgcctcagtttcc

SEQ ID NO: 445262 - DNA, 122 bp, Homo sapiens
cgcggggcgggctgacgtcagggccgcgggggggcgggcggggcggcgggggctgaggagcgcgcgtgggccaccgcccctcgcagcccctagggacccggacggggcggcccgatggcggc

SEQ ID NO: 445263 - DNA, 122 bp, Homo sapiens
ggaagtctgtttcatccaccatctgctgggatctggaagggagcggcccagcctcctccccggcactgggggattagcagtcacttatctcagctgttcctccgttcggaggtgtcacagta

SEQ ID NO: 445264 - DNA, 122 bp, Homo sapiens
cgagcgactgcgcaaggagcgcgcccggtccgcagtctcctcgtccccggcgcgactccccgccccctcgtctgccaagggtgggcctggggcagccccttccacacctgcaactcggcaac

SEQ ID NO: 445265 - DNA, 122 bp, Homo sapiens
cgctaccaatcaagagtcgagatggctttgatggacaggcatagcgcgagtgcgggctttcgcccaaccggcgggccgctgtcccgaaaaaggaccaatgaggaggcggcaggggtggggcg

SEQ ID NO: 445266 - DNA, 122 bp, Homo sapiens
ctgataattgaattaatatcattcactaataaaaattccagaaacatgacagatttccctcgaaggagtcatcaccaggcaaggtaccaagacacaatctttcttgcaaagactgccttgtc

SEQ ID NO: 445267 - DNA, 122 bp, Homo sapiens
tccgaccatcagaagggacaaacgccagacgcgccaccttaagagctgtaacactcaccacgagggtccgcggcttcgttcttgaagtcagtgagacgaagaacccaccaattccggacaca

SEQ ID NO: 445268 - DNA, 122 bp, Homo sapiens
gcgcccggccggatttcccttttaaatgtgaaggcacctccatgctcatcgcgagcctgacgtccacgcggcgcccacccgcgggcgcgcctgccccgggcgccacctgcccggctgccccc

SEQ ID NO: 445269 - DNA, 122 bp, Homo sapiens
ctgagattctcctgctgactttgaagtgaggtgccatgctgtgagagggccctctcactacgaactgaggaagggtttctaggagcttagagtcccaggtaacagccagcaagaaaatgagg

SEQ ID NO: 445270 - DNA, 122 bp, Homo sapiens
ggccccttggggctaactagggagcctcaggcgcacgtccctctgttgtccacagcctgccgctgcgcttctgggtgaatgtgatcaagaacccgcagttcgtgttcgacatccacaagaac

SEQ ID NO: 445271 - DNA, 122 bp, Homo sapiens
tctcctgcgactgtgagccgagcttactgccttcagctgggctgcctggtcttccacttccggcgcgaacgttgacgtcacgtcgtggcgcacctcagtggcgtcagagcggcgtcgggcct

SEQ ID NO: 445272 - DNA, 122 bp, Homo sapiens
ggtggagtagaagtggagggaaggaggggtgatgctgaccccacactcgagccacagcctcggaatctctttacccgtaggcgccacacttggcacacaatgagtctgtgagttgaggggaa

SEQ ID NO: 445273 - DNA, 122 bp, Homo sapiens
gcgggcggcgtgaggagcggcggcggagcgcggggccgccgggaaccgagggcgccgggccgccccctgcccagtccttgcaggccgccaggccccctccagccggggccgtggagcaccgg

SEQ ID NO: 445274 - DNA, 122 bp, Homo sapiens
tgacactggcgtctcacgggctatgaagacggaatgcctcttaatgccggaattccaagacggaatgcctcttaatgccggtaggagcagaagtgcttttcctaagggggccgggttttcct

SEQ ID NO: 445275 - DNA, 122 bp, Homo sapiens
cgcagtggctttgaaggcggggcaacaaagcctgtggccgatgtggcgctcctcggcccgcgcttcagtggttatgacagtgttcgctctaaggggagaaggaatgtgtgaccatttccaac

SEQ ID NO: 445276 - DNA, 122 bp, Homo sapiens
ctcccaaagtgctgagattattctaattttctacagctcagtactagtttggcacctaagcgcacttagtaaattttttaaatgattccctagtattttctattttctatttactatagttc

SEQ ID NO: 445277 - DNA, 122 bp, Homo sapiens
gcattctgagtggaggtgcccctgaccttagacaaatctcctaagggtgcttggtacccgcgtgagctaactttatggctcaaaccaataggacaatttgctgaggtgtgggagcaccccct

SEQ ID NO: 445278 - DNA, 122 bp, Homo sapiens
cagctgaactgaaaaatggctttgagggcatcccggccccatttcttactagctgtgtttcgttgaggaagtcgttgatccctttgggcttccccggaaccggattataacaacgctcccac

SEQ ID NO: 445279 - DNA, 122 bp, Homo sapiens
agaggtgacttctgtcccaggagtcttccctggcatcccctctctgtggcagctgaagtccgtccaccagtgcaagccagccctgcttaatcaaaccgatgtctgcagggctccaacagaaa

SEQ ID NO: 445280 - DNA, 122 bp, Homo sapiens
gggtgagcggcggactgacccagctccagcgcctctgcagaggcttgcaatggcgtctctcgggctctgattggtcaggcctccacacgtgagcctctaggagccaatcatgtcggcccacc

SEQ ID NO: 445281 - DNA, 122 bp, Homo sapiens
cccccacccccggcccgggacggttacataaaagcgcggggcggcggtagatgggactcgcgggcgggcagtaggctaggccggggatgggcagcgccgggcgtccgtcctgccgggccgcc

SEQ ID NO: 445282 - DNA, 122 bp, Homo sapiens
aggtgagaagcccagtgcatctccgcctgttttaacaggttatgctgctctaaggaattgcgttccggagagcgtaagcggtgaagttttagctatttctatccttccaactgagaagccct

SEQ ID NO: 445283 - DNA, 122 bp, Homo sapiens
ccctcggccctgtccgcgcccaccgcccggctggcgcgcagacccggttccccgcccgcccggcaaccctgtgatgaagttttcacatacgttcatttcattgaaacaaaagtcttgtaggc

SEQ ID NO: 445284 - DNA, 122 bp, Homo sapiens
ccggagacagacgacgaggcccacggagccgtgggacaggggtgtcccccacccggcgcgcgcatgcgcgccacctcgccgctagattgaaagtgttcctaaggcccgaggagggaagaaat

SEQ ID NO: 445285 - DNA, 122 bp, Homo sapiens
agcctaggtccgggcaccaggacccgggcaagtgggcgcgaatggaccacggtgataagccgcccgaggaccaatgagtctgtgacctgcccgggctaaggggggcatgccctggtggggag

SEQ ID NO: 445286 - DNA, 122 bp, Homo sapiens
cagcttcttcctggagcagagtgcatgctgtccaaggcctgcagagctgggctctcccttcgactacggtaagggccatgtcctggctgaaagactccgcctctgggcagtgggggtcctca

SEQ ID NO: 445287 - DNA, 122 bp, Homo sapiens
atcggtcccctcttggcatcttcccacagacaccaggccacaggttctgatcccaaaagccgattcccagccacagcgctatgtccgttctggggtcccctactctggatgacgggggccca

SEQ ID NO: 445288 - DNA, 122 bp, Homo sapiens
actcaaattttgccagttccccagaaaatttcttttttcctttgtttttctttgttgagacggagtctctctctgtgggccaggtgggagtgcagtagtgcgatctcggctcactgcaacct

SEQ ID NO: 445289 - DNA, 122 bp, Homo sapiens
cggccagcacatctgggtgctgcaggcgtgggcagcgggcctgacctcgacgctgtttgccgttggcagctgcagacgacctcgtcacggagctacgtacccagcgcaccggccggcctggg

SEQ ID NO: 445290 - DNA, 122 bp, Homo sapiens
ccagtctggaaaatgaggagcgtctctgcccggccgctatcccatctaggaagtgaggagcgcctcttcccgaccgccatcccatctaggaagtgaggaagtgaggagcgtctctgcccggc

SEQ ID NO: 445291 - DNA, 122 bp, Homo sapiens
caacatagtgacactccatctgtacaaaaactttaaaaattagcctggcatggtggcacacgcctgtagttccagcgactcaggaagctgaagcaggagggtcacctgagcccaggaggtca

SEQ ID NO: 445292 - DNA, 122 bp, Homo sapiens
tgtgttgcctccagatctgaggggccatgacgaacttgcacctatcccaggacaggaacacgggagtactttgggtttagtaagttcattaccatgcacacatcatcccaaatttggtttct

SEQ ID NO: 445293 - DNA, 122 bp, Homo sapiens
ggtggtcttcctatggatgaatactcatgttctgcatcccagactccagccagctctcctcgccctccagcagcttcctacaggtggcaatctcaatgtccagggccagcttgacgttcatc

SEQ ID NO: 445294 - DNA, 122 bp, Homo sapiens
atggaagaggaaggaaaatgcacgttcaagaatgcaaaccctcgccctttcctcatattccgtgatgactgttttgagtcctaaacaaacatttcctatcaattttagcggggagtagggcc

SEQ ID NO: 445295 - DNA, 122 bp, Homo sapiens
gggggttgggtgggacgggggcggaaccaggcagtcctggggcggggccaaggctgagggcggggccggacagtgttgggggcggggccgggctgggagagggcactgggccggttccccag

SEQ ID NO: 445296 - DNA, 122 bp, Homo sapiens
acagcggaagaataagaaaccggaactaaacttctcactcatctgacttcctgcggtttacgacaacagactttggttgcaccggaaaagaacagattctcttccgtcgcagagtttcgcca

SEQ ID NO: 445297 - DNA, 122 bp, Homo sapiens
gcccaggtcttaccatcacagcgtcacaaactccaggtcgcctaggcgctgcgcaggaagcgcttgccagccccggacttctgcgcgcgctgcatgcccattggatgtgctcattcccaccc

SEQ ID NO: 445298 - DNA, 122 bp, Homo sapiens
ctgggcagggcggggcttttggcgaaaactgagtccctcctcccagatcccccactgggccggtggctcctgcagccctgccagttaggaacaaatgagaagagctgctgatttcctccctt

SEQ ID NO: 445299 - DNA, 122 bp, Homo sapiens
atactcttcccgacaagggcatctgggtcgagagaaggtggagcgggtcttcggcaaaggcgaaaccctggagaacgctgccccaccccaccctgtaagcgtggacgagtaataatctcccg

SEQ ID NO: 445300 - DNA, 122 bp, Homo sapiens
gagcattacaactctttaaagcagcacatctggagttgttccttcttcccagttggtttccggcctcactggcttcaagagcgaaactacacactttcagggtgagtgttacagctcatagg

SEQ ID NO: 445301 - DNA, 122 bp, Homo sapiens
gtctgaaaacaagaaaggggaatagctgtatgataactgcttgaaggcgagagggcccagcgacagctctgttttagacagggcctccaggcctcttagactcagtccctgccacgcaccca

SEQ ID NO: 445302 - DNA, 122 bp, Homo sapiens
ctacagtggggatgtatgggctgtactggggtccacatgaagatataaaggaccctatgacgagcacagagaatatatgggggtctaaaaacataacacagggaaactgagggggttctgga

SEQ ID NO: 445303 - DNA, 122 bp, Homo sapiens
gagtttaggtaaaacggatacaacattatattctcagaggacctgcaagctggactcttccggaaagcgtgtgtgcaccaagatttgctagagcctcatgccctggaaacaacccactgggg

SEQ ID NO: 445304 - DNA, 122 bp, Homo sapiens
cagggaactcagaataagaagagccagcacttttgagctcagcatgaagggaatccacagcgcagacttcatttccctgtgacaggatttcccaaattgactgaagaaaatagattacattt

SEQ ID NO: 445305 - DNA, 122 bp, Homo sapiens
gcggtcacttgtgagtggatgagaactgtgaggaaacagcctctcagcccggttcgtttccggtggtctcgcgtttgctgagctgtcgcctggctttctaaatctggtcccgggtgtgtggc

SEQ ID NO: 445306 - DNA, 122 bp, Homo sapiens
ccgccgcccccagcagacttcacatgtcccagcactaccagagcggcccggtgcccggcacggccattaacggcacactgcccctctcacacatgtgagggccggacagcgaactggagggg

SEQ ID NO: 445307 - DNA, 122 bp, Homo sapiens
ggccgcagccgcggcggcaataaaacatcctggcacgtgctccggctccaggcgcgcccacgccggccggctgatgtcaaactgcagctcggctggtgtagctcttaaagggcccgcgggcg

SEQ ID NO: 445308 - DNA, 122 bp, Homo sapiens
cctggtggatctgcagtacgaaggtgagtcctgccctgccccggccaggaagtgggctcccggaccaggccccccgcgctttcccgtctgcgcccgggcgcctgtcccggagcggctcggga

SEQ ID NO: 445309 - DNA, 122 bp, Homo sapiens
catccccatcttgctggtttggagccaacagtaacaggctcaactgctttcacaagctaccggaatttgacattccaggaaatcagcctcagggcctgtctccttggactaaagaagccatt

SEQ ID NO: 445310 - DNA, 122 bp, Homo sapiens
gcacccatcctttcctaaccccaaactgcccggcgccccgggctctccgcgcctgcgccgcgcccgaggaccacccccgcccaaccccgggtccatccgatcctcggccctctgcggcgggg

SEQ ID NO: 445311 - DNA, 122 bp, Homo sapiens
gtgttcgagcatgaagacaacaacgggccgggtcccgcaaagaggcagaaccgagtgtaccgtccgatccgggagacccggcctgagattccggcaaggttttcttccccgggcccggacta

SEQ ID NO: 445312 - DNA, 122 bp, Homo sapiens
ctgcgtagccctggcctccagcgtcacctgctggtccagtgggagaatgtcgcaccctgccgtcctggggtgaaggactccagagccccgagtgccagcctcagccctgccccgactccctc

SEQ ID NO: 445313 - DNA, 122 bp, Homo sapiens
gttctgcttaccaaaagttgcccgctaggcactcgcatttcatacctggccccatgccatcgagctgggcttctaacccatttaaagtttgagaattggttgagatcattttgactccaaga

SEQ ID NO: 445314 - DNA, 122 bp, Homo sapiens
tctggttctccttggcctgagcccccagcctgagccgggctgtccctgagttccctgacccggaagaagggacggccattatctttgggtgactgtcttcttatagctgggaatctctgggg

SEQ ID NO: 445315 - DNA, 122 bp, Homo sapiens
ctactactattaatatgggttatatccttttagaccaatatcaaccaacagaactctctgcgatgatgaaaatgttctgtagctatgctaatttctactagccgtttgtaactattgaactc

SEQ ID NO: 445316 - DNA, 122 bp, Homo sapiens
ctgcagtgtacatcctggcattgtgtggctacctgggttttaaaccagaatcagaagtcccggatcagagggcactgctgaggttcagcctcttctcttcttggccaggaggcagcagctct

SEQ ID NO: 445317 - DNA, 122 bp, Homo sapiens
aattcaacgaatgtttactgagcgcttagtccagtggtgcaggtttaaggctggaggcagcggaaaaggaaaacaaggttcctggtctcgggaagcttaccatgggggtgtctgtacgcgtg

SEQ ID NO: 445318 - DNA, 122 bp, Homo sapiens
ggccccatgtccacatgtcattggtgcccagtaggcatttgcagaacggacagactgtggcgactgagactccagcatcctgggctgggggcggccagggccctgactgtcgtcctggccct

SEQ ID NO: 445319 - DNA, 122 bp, Homo sapiens
agcatgcatagatgccaggcactgtacagaatcagaggacttatcttcacaataatcttacgagaaaggtatcattatccccattttacagatgaaaagacatgctcagagaggtgaggtta

SEQ ID NO: 445320 - DNA, 122 bp, Homo sapiens
cagaggatcagagccacgcccagtccgctagcactccgctcagcgttcactgcgcacagacggggaggagacttaccaatctgcaacagtattggtgtgaccagagcggtttccatggcgta

SEQ ID NO: 445321 - DNA, 122 bp, Homo sapiens
gcagcgcggggccacctcaccgcgagctcctcccgcagcccggcccgggtcacctcgactcgccaggcttaactcaataaccacaacaccggaaaaggaagcaaaggtcgaagttcatccgc

SEQ ID NO: 445322 - DNA, 122 bp, Homo sapiens
cgcctgttctccatcttctgtcttccacattagaagcaagggcggggacattgcctttcccggccgctgcggtgtcctggcgcagggcacgtgcctgagggcccttggtcatccgagggagg

SEQ ID NO: 445323 - DNA, 122 bp, Homo sapiens
ggaagaggcgagtgagcctgcccgtgcgtcccgcatggagacgtctggattggaaactaccgaaagatgtttcaaggaactctccctgggtgacacgctggttttcagacgtttgattcagc

SEQ ID NO: 445324 - DNA, 122 bp, Homo sapiens
ctatcttttgcccccttgttactgtgcttgtcctctaaacctgtccaagcagccatggagcgggaagggcaggcttgttgagagaaacagtgctctcaccacactggccagggctgccacag

SEQ ID NO: 445325 - DNA, 122 bp, Homo sapiens
agagaaaagtctgcaggtcccaattcggactgcaagcagacatctcaggaagtttctccacgcagcccatcccgggtgacacagcgttcactgtgattccacccgagccgcgtcagcagtcg

SEQ ID NO: 445326 - DNA, 122 bp, Homo sapiens
ctagggattgctgtccactcccagctcctgctgtcagggagaagcagcatgcagggacagcgggccaagtagtcaactgtactccctccctacatctgaaatgctgcctgggaccacttccc

SEQ ID NO: 445327 - DNA, 122 bp, Homo sapiens
ggactgagcggcaccgcccctgcccggcgacggtgagcccagcgccctctgccggccgcgcgcgggactcggggtcctactgggtgcctcttcctagatccgaccccacccagttgaaagct

SEQ ID NO: 445328 - DNA, 122 bp, Homo sapiens
ttgagccttagaaggtgggttttcaaaactgcagggcgtgacctctcccgcctcgaaaaacgtgaaatccttacaaggtgccgtctgttctaggctctgggacagaggtttctgctttcgaa

SEQ ID NO: 445329 - DNA, 122 bp, Homo sapiens
gccgaacccacagaagcaggaaggctaaggtagatgcagcaggatgaggagacaggcaatcgtgccaagagctgtcgcattaggttttggctggggaaagagataacgttgaaaacgaagag

SEQ ID NO: 445330 - DNA, 122 bp, Homo sapiens
ggctggatttgctgcgtcgccaaatgccggggctgatcggctgctgggcgtgtgaccccgcgcctttgaaatccgcagagccacgggtcgggccctcccgccccgcccgccgaccgcacccg

SEQ ID NO: 445331 - DNA, 122 bp, Homo sapiens
acaacacttggttgtaagtgagccaacagtttgtctctttctctgcccaaggcttaaggccgtgtttccccaactacgttcagtggaagaaaagatcccctggacaaataagtttgagaact

SEQ ID NO: 445332 - DNA, 122 bp, Homo sapiens
aggccttcaggaaatcccggggaagcttactgcggggatggctgtgagcttgccaggcggcgattgtgcacatcgtttccttacagcctccttcctgccgctctgccttccgtgcctcttcc

SEQ ID NO: 445333 - DNA, 122 bp, Homo sapiens
caacataaagcgcatggtgtggccgcggcgagtaatggcgctctgggagccctgcccaggcggcctctgctcgccctcctccacttccagctccgagctgggtgtgttgcaagtttcatact

SEQ ID NO: 445334 - DNA, 122 bp, Homo sapiens
ccgagggttcccagagctgtctcaccattgcaaaaacgttatagcaacagcctctgattacgacatggctgagatcaccaatatccgacctagctttggtaagtagactcgggaaaactaag

SEQ ID NO: 445335 - DNA, 122 bp, Homo sapiens
aatttcatctgaagttcaacagactctttcttccaggcacacaggcgttatgtggccgcacgggtccctgcccgttagaaggattcagccacaccccagctttccagttcctggggtctttt

SEQ ID NO: 445336 - DNA, 122 bp, Homo sapiens
gggagtggatgcagttaataggtaagacagatagttataaagtcctgattaactacagagcgcatagacatgtggaaacttgtatatgggtgaaagggaagagacagcaaagattatttacc

SEQ ID NO: 445337 - DNA, 122 bp, Homo sapiens
tcagggcaacttccaaactcatcacccttctgaggggtgggggaaagacccccaccacatcgggggagcagtcctccaaggactggccagtctccagatgcccgtgcacacaggaacactgc

SEQ ID NO: 445338 - DNA, 122 bp, Homo sapiens
agattaattaaaagaagaatgaactataatccttgaagataactgggcaattttttaagtcggaggctgttcttactggtgtgaggatttacacacgtcttcagtttttcagcacagaccag

SEQ ID NO: 445339 - DNA, 122 bp, Homo sapiens
cgccacgacccttctgcgcaggcgcgggggtggtgcctggcggaggcgcgaggtggggcgcggccggcggcgaggcgggacaaccgctgggcgggcgccaagcgtgcccgtgcgctggtgag

SEQ ID NO: 445340 - DNA, 122 bp, Homo sapiens
cccgccgccgccgccctcgccccgcgccgcctgccacttatcacaattacccgacgctcccgtgccattttgcttatgaaacactgattgctagttatgcggacttttaagcactatattaa

SEQ ID NO: 445341 - DNA, 122 bp, Homo sapiens
ctctgacccctcattttctttttcttggttgtatttactgatttgtcactatcaagagttcggccatgaaatattctgctattacgagaaatatttcagcccgggcatggtggatcacacct

SEQ ID NO: 445342 - DNA, 122 bp, Homo sapiens
gaaggattctattcgaattacttctgctctctgcttttatcacttcactgtgggtctgggcgcgggctttctgccagctccgcggacgctgccttcgtccggccgcagaggccccgcggtca

SEQ ID NO: 445343 - DNA, 122 bp, Homo sapiens
ttgctatgtagtgttccattaaatgaggtatccaagttgatttctgtgttcactgatgaacgggcattttggttgtgtgaaactttgggccataatgcataagtcactatgaacattcaggt

SEQ ID NO: 445344 - DNA, 122 bp, Homo sapiens
ccggtacagcgacaccctaggccgggagggcgcaatgcaggctgagcttaggctggcctgcgaggaagacgcggagaatcaaggggccggggagagaccggacagggcgagcggccgggctg

SEQ ID NO: 445345 - DNA, 122 bp, Homo sapiens
ggaatgcactgggctggccctgccggctatctcagccccgagacccacgaaggccctggccgtgctgtcctcacatcagcccggcccttttcgtccggcgtggagagttccagcctttacgg

SEQ ID NO: 445346 - DNA, 122 bp, Homo sapiens
ttccacctctccactgtgcctgacctaggccagcaccaggagggccttagaggcgggggacgaggcccagaaggaacagtgtggccccgtcagtgtggagtcctgagcttaggcagccggaa

SEQ ID NO: 445347 - DNA, 122 bp, Homo sapiens
gttccgaggttctgggcagccacagccccggaggccttacaggagcgacctggcaattcccgccgccggccgccagaggaagctgctttgctgctgtcgttgcccagcaactcgtagcccgg

SEQ ID NO: 445348 - DNA, 122 bp, Homo sapiens
gtccagaatgggactgcacactggactgtgccaccaatgaacaccaagaatgacctggaccgacagccccacaccccacaggctggggaacttctttcagctcatgaatcatcagtggggaa

SEQ ID NO: 445349 - DNA, 122 bp, Homo sapiens
agtattacgcgtccctaacaaggcttccccacaactcctgaaacaagagctctggcccttcggctttaaaaatcagaaccacaaactatggagtgtgagagcagcgaggggaagggacgcag

SEQ ID NO: 445350 - DNA, 122 bp, Homo sapiens
ttgaatgagagagagaacttgaattccctttggctactcatcagctgggtgactgacctacggcaaactccaaagcttcagttccctcatcaataaaatgaggcttcatatccacctctcac

SEQ ID NO: 445351 - DNA, 122 bp, Homo sapiens
acagaccttgctaattagcccctaaaggttacagtgattgaatctacaattacttactctcggatggaactcccattcatcatctttctcattttctttcaactattcatatgctactgtgg

SEQ ID NO: 445352 - DNA, 122 bp, Homo sapiens
gcgcacgcgcacgcacgcgcgacgtcaccctccccacgaagggggtaaaaaagtcccccgcgttcccagcttggggtggtttgcgaacagagtgaccagccgtttggtaaaagttaaataac

SEQ ID NO: 445353 - DNA, 122 bp, Homo sapiens
acctccagtgatccgcccatcttggcctctcaaagtgctgggattataggcatgagccatcgcgaccgacctacaagtcttgttgaccttaggatttaagtcccacctaaggtgcccagtgt

SEQ ID NO: 445354 - DNA, 122 bp, Homo sapiens
cctcgcactgtgaggcagctggcaggactgtgaagtaaggagtggagtttcctggtttcccgccttccatgaccctgtgccctagactcagcgcggcgggaaccttccctgccagccctgaa

SEQ ID NO: 445355 - DNA, 122 bp, Homo sapiens
cagcactggggctttatagatggctgtgttttccttgcacatcattagcctggagccacacgaaagaggaaaacagagaagtggagagtttatgctccctgctggtgtttaagaagccaggg

SEQ ID NO: 445356 - DNA, 122 bp, Homo sapiens
gcagctgcctcttcccagccccccaggccatggcacggagcctcaagcctattcatgatgcggacatatggcacctccacggggggcttggaggaaactgccaattgcgagagtgcagcgtg

SEQ ID NO: 445357 - DNA, 122 bp, Homo sapiens
tcacgtgttcagcaccagagaatcaggcaagccactgcaagcaggccagtgagttacagacgtggtggcatccctcccgcgttctggccttggagctggggtcggaatggtggcttgtgcaa

SEQ ID NO: 445358 - DNA, 122 bp, Homo sapiens
gtccaggaaggctccctagtggacacactgcaatgtagtgacaaagtcgaaagtttaacacgcttttctcatgaagaaccagatgactcttggtaaccatgtttgctgcccagcttctaact

SEQ ID NO: 445359 - DNA, 122 bp, Homo sapiens
acaaaaccacgaatcccccggctaaaactggtctaaagccagctactggtctctcagtctcgcttgtttggagcttttttcctgactctcggagcggaaccactaacctgccctacccggta

SEQ ID NO: 445360 - DNA, 122 bp, Homo sapiens
ctagctttttaaaaatagccatttctgtttcatcccaattaaacaagacccaaagcttcccggttaaaagggtaaaaggccaaaccagtctacgttttcagaagcaacgtgtccaagaatga

SEQ ID NO: 445361 - DNA, 122 bp, Homo sapiens
ctggggtgggggtaggcctcaaatgcagatcagtgggattgagtcaactcaggaaggaaccggggagccattgaagattcttgagcaggggtgcaacatacctagcagggaggaagaactgt

SEQ ID NO: 445362 - DNA, 122 bp, Homo sapiens
gcctccgccaggaaggggcccgagggcaagtatccgctgcactacctcgtgtggcacaaccgccaccgcgagctggagaaggaggtccgcgcgggccaggtaggagcgccttcggggcgccg

SEQ ID NO: 445363 - DNA, 122 bp, Homo sapiens
tgccggcgagaccctgaaactgaacctggaagcgctgtcttgagcctgagctggggcggccgcccgccgtaaatacccgaagagcggggcctcagtgtagcccgcagggccagcggcgccgc

SEQ ID NO: 445364 - DNA, 122 bp, Homo sapiens
ggacttgtggagtaagagccaccaattgtagttaaggccactgatgccaattaagatttccgtctccctggctaaattggtaaatcagaagcaatatcaatctcagaatggtaacaatcata

SEQ ID NO: 445365 - DNA, 122 bp, Homo sapiens
gcagtcagacctccctctgagaccctccctagctcaggcttagagctttgggatttttctcgatcctttctagctttcagatcatccccacgtaaagttcagactttaccagcccagagagt

SEQ ID NO: 445366 - DNA, 122 bp, Homo sapiens
ccactgtgaccgggccttggagatcctgctgcaccccagtggtgagagactgggacacaccgtgggccggctctgacctgcttctacatgaatgggggaagcatttcttaagtgcaggtttc

SEQ ID NO: 445367 - DNA, 122 bp, Homo sapiens
acggcaggaggcgggggaagcctgcagcgcagctcagcagcaggtggcaagccctctacccgctgggaacgttcagggttatcagcccgtgggaagcaaggtaggacccgcagcttgcaaga

SEQ ID NO: 445368 - DNA, 122 bp, Homo sapiens
ttgagccatggctggaacatgctgcccgtgacctgcggggctgactcacgtggttttccccgtagcagtcgaatctagctgttgagccgtggctggaacatgctgcccgtgacctgcggggc

SEQ ID NO: 445369 - DNA, 122 bp, Homo sapiens
taaattggatatcaacaacaaagagatgtaatccatacttgaatggtgtgaattagtattcgagatccagctctctatactgtgtggtcatgactcattcctaaagaatttgctaatgtttt

SEQ ID NO: 445370 - DNA, 122 bp, Homo sapiens
gccgtgtggctcccgtgggagcatgtctgtgtctgtgtctgtgtctgtgtctgggacctgcgtctggctcaggaggcagagagcagcagatacctgccaagccgcagcctcctgtctgggaa

SEQ ID NO: 445371 - DNA, 122 bp, Homo sapiens
aggaagaagacatggttggccttcatgagccccatccgctccactgtggcccgcagctcccggaactcatctgtcagctctttctgcagaagaggaagaggagctgttattcttctcatctg

SEQ ID NO: 445372 - DNA, 122 bp, Homo sapiens
gagattacaggcgtgagccactgtgcccggctccatttccattttccttgaaggaaatcacggaataattttcttaaagttatacagctatcagtagcacatcctcaattgtctgactccaa

SEQ ID NO: 445373 - DNA, 122 bp, Homo sapiens
tcccaacctacttcttggtgcaagttgaccaaatcgttttaagtggtaactctttccaaccgtagcagggttgttttctgttaagcaaagccgagatccagtgcaatacctggactgtcacc

SEQ ID NO: 445374 - DNA, 122 bp, Homo sapiens
atacagaatacacagtcacagtttatgccatgtttggagaagaggccagtgatcctgttacgggacaagaaacaacatgtgagcagcacagccattcagttgggatgctgtagtaaaagccc

SEQ ID NO: 445375 - DNA, 122 bp, Homo sapiens
ccccgttatccattggctgctcgttccgccgcaagttgggggcggggttagggcgcctttcgattgcatcagctggtccagccgaggccaagtcccgggcgctagcccacctcccacccgcc

SEQ ID NO: 445376 - DNA, 122 bp, Homo sapiens
gacgttcctcgtgagaattactgtgtgccatagacccgctcttcacatgaaattaggccacgcttaaaacaaacagcgtcgcagacagcgtgggaggaaaacagtggcctacatattaagaa

SEQ ID NO: 445377 - DNA, 122 bp, Homo sapiens
tgcgtgtgttggggaggctccggccgcactggagcccatggtcgggggtcgcggtgggtgcgggaatgggggaggtggcacgggggggtgcgcgggggggaggggggaggtggcggggggcg

SEQ ID NO: 445378 - DNA, 122 bp, Homo sapiens
aaatattttgggtttcatgctatgatgaaggatctgttccatttgcttccaatttagttgcgtaaagttgagataaaatcttgaaggaagggtcatagcaccatttaaatacccacaggtct

SEQ ID NO: 445379 - DNA, 122 bp, Homo sapiens
cgtttcatggcaacatcaaatgagatcacagtcctcatccccatagacttggttaatgggcgtgcccccaacctatcttcaaatctcagggtctcggcgacgccctggactctggccctaaa

SEQ ID NO: 445380 - DNA, 122 bp, Homo sapiens
gattttgtggtacgtcatggcgcccacggcttcatttaaaacattctggtggatttcctgcgtggactgtgcatcacagaaggccacggtggtcaggtctttcaggatgggcatatccacgg

SEQ ID NO: 445381 - DNA, 122 bp, Homo sapiens
ctgcggggttgtcctcggggtgggggactggacgctgtcgacagcaccttcctggggccccggctcccgtttggtggttggtcccagggcctgcccggttcctgacctctgcccggcggccg

SEQ ID NO: 445382 - DNA, 122 bp, Homo sapiens
taagtagaacagtcctctcactggattgatttaaagctctactgcaaaacacacttcccccgattaactcactgaccaacttagcttctttctcaataaattctttcttcagctcctcttct

SEQ ID NO: 445383 - DNA, 122 bp, Homo sapiens
acctctctgaggcttggagttcttctgtgcaaaatggaaatcacagcaatacctactcaccgggttgccaaatcagttaatatcattcattcaaacagcaaatgtccactgagtgcctgctg

SEQ ID NO: 445384 - DNA, 122 bp, Homo sapiens
cgggaagtactttaagctcacgtgacctacagccctgagggagtggggcgcttgaagacacgccttccacagtgtttatcattcacttaaaaggattaagcactccacccttgcttattgtt

SEQ ID NO: 445385 - DNA, 122 bp, Homo sapiens
ccacgaaagacaacagtggccgaactggatattttcttgaaaaagcctttaaaaggctcccgcccctcaacgctccgcgcggcccaggcatttcctggcagcggcctcgggttttgggaagc

SEQ ID NO: 445386 - DNA, 122 bp, Homo sapiens
gttattcgggaattaggcatctgccctgatgatgctgctgtaatccccatcaaaaacaaccggttttatactattgaaatcctaaaggtagaataatggaagccctgtctgtttgccacacc

SEQ ID NO: 445387 - DNA, 122 bp, Homo sapiens
gatatgaaaagttctattagcttaacttctagtctatttgcttcagttgctgccaaacatcgacagcctttcaaaccaggatccttccttatttagagaagtttgcaggagggcttccattt

SEQ ID NO: 445388 - DNA, 122 bp, Homo sapiens
gtttgaaagcagagttgggcaggaagtagagactattcacattttaaaggaaaggcgccgcgctcactcgcggctgcccatggtcctgtgagttccctctgagcaccctcgctacctgctgc

SEQ ID NO: 445389 - DNA, 122 bp, Homo sapiens
gctgcgtcgtccggcgatttaaagggctgctggccgggactcctgccttgtcgctgcagccgaaaatgccagtctaagtgcttgggcttccctggcggccataaaaagtgtcccccaaacag

SEQ ID NO: 445390 - DNA, 122 bp, Homo sapiens
cgtgtggaggcaaagagcctctcctgtaacagtgtggtccttccagccttctctcacatgcggaatttggcagacagtgatgtgagacgctcacatggcaaactttcttttctgtttctctt

SEQ ID NO: 445391 - DNA, 122 bp, Homo sapiens
gccaacacaataaaaacaagagctaccatttgttttacacctactaggtgacagcctctgcgcatgggtgatatgatttctatttctttagaatctgttgaggaagagattctcttgtagcc

SEQ ID NO: 445392 - DNA, 122 bp, Homo sapiens
gagaagtcgcagtgcgcactggaggagtacgtgaggagccagtaccccaaccagcccagccgttttggcaaactgctgctgcgactgccctcgctgcgcaccgtgtcctcctccgtcatcga

SEQ ID NO: 445393 - DNA, 122 bp, Homo sapiens
cgagacgctccgcagttgaaacgggatcgccatgcgctcgggcctggggggctgcctttccgggcatccgcaggccccaacctttagggaaggcgcacagtgtggatattcgccctgaggct

SEQ ID NO: 445394 - DNA, 122 bp, Homo sapiens
ctttcctatttgatcccagccagcttcctgctggggtgcaaagtatcagctgcgaaaacacgttcatgcgtattttcttgttaatagcaatctttaattcaaaaggtcgaaagtaaatctat

SEQ ID NO: 445395 - DNA, 122 bp, Homo sapiens
gtcccagccgcaggcgcccctgttgtttccttcgggcgggtgggttggagaagaagtccacgcgggattcttcaaaacggcgtacagggggattctagggccccatggttacttctttggac

SEQ ID NO: 445396 - DNA, 122 bp, Homo sapiens
ctgaggccgccgcaggggctgctgctcctgcatctgttacctccacatccccataactcacgactgcctgctttgaggaaggagagatttctctcagaggcactaggaaataatggaaaaaa

SEQ ID NO: 445397 - DNA, 122 bp, Homo sapiens
caggaagcaggaggctagctctgcagggtgggggcgcacctgggctgggctgcgcggaggcggcggaagcactaggcgcggcgcccacaggcggacggctggcgctgagcgcgggcgcgggg

SEQ ID NO: 445398 - DNA, 122 bp, Homo sapiens
aagggaggcagtaacccgagaggcgctgcagggcggctccccacggcgagggagggcaggcggagccccagctcctcccagccggctgagcgctcggcccctcctatggccgcaggggaaaa

SEQ ID NO: 445399 - DNA, 122 bp, Homo sapiens
tatttctctcttctgaaattttcctttcacactgtcaatgacaaggcaggagcaaactcccggattatgacacatgaacacattgtgtctccaggacagagaagcagtggaaccagaactcc

SEQ ID NO: 445400 - DNA, 122 bp, Homo sapiens
taatttggccgaaaaacaagctcaaatgtcctatgatgtgggaatggttaaattatgccacggccatacagtggactataatacaaccattgaaaatgttttcaaagactttgatgatggaa

SEQ ID NO: 445401 - DNA, 122 bp, Homo sapiens
aggcaaacgcaaagcgaacacgtctacaaggcggcaggagcgagagacagaactgggaagcgccggacttttaaaccatgagatctcgtgagaactcactcactatcacgagaacagcaagg

SEQ ID NO: 445402 - DNA, 122 bp, Homo sapiens
ctgtgtcctcaaagactcagggagacctgcggacaaaacacgggttttgttagttgacatcgcatgtatgcagtttggcatgacgacaccgacatgcaggaaaaaagaccatgtctgccgtc

SEQ ID NO: 445403 - DNA, 122 bp, Homo sapiens
gtggctgaggtgccaagatcccagacttcccaaaccagaattcagggcacagggctgacccgagagccattccggtggaatgcaatctcattccctttagccaaccatttatttacgttttc

SEQ ID NO: 445404 - DNA, 122 bp, Homo sapiens
aactggcccaatgactggctccctcacgctgaccactcctctgggctggcctcctgcactcgcgctaacagcccaggctccagggacagcctgcgttcctgggctggctgggtgcagctctc

SEQ ID NO: 445405 - DNA, 122 bp, Homo sapiens
ctcacgtggtgttcgtccctcacccgcaggccccggactcacgtggtgttcgtccctcaccggctgccctgggtccaggcccttcctcgggcacgttcagctcctgatcgcaaccaggggtc

SEQ ID NO: 445406 - DNA, 122 bp, Homo sapiens
ccaggtgctaccaaacaaatcctccagctgctggtacggggaaggtgttcagtgacacaccggaagcagcctagtggctgaggcgtccttctccctaccaacgggttgcgaaggaagtagtt

SEQ ID NO: 445407 - DNA, 122 bp, Homo sapiens
cccagaagtttcagccactgagattccccttgtcccggaggctggaggggaagacccaggcggctgcgctttggaggctggaccatcgtggggcttgtctgtgcccacttttcccccattca

SEQ ID NO: 445408 - DNA, 122 bp, Homo sapiens
agtccatcactgctggcgcctgaccacttggcctgaggcctgaggttgggcccaagcagccggcacccccacagttgcctcccactctcacatgctgaaaggcagagtccctccccgtcttt

SEQ ID NO: 445409 - DNA, 122 bp, Homo sapiens
ccaccccacccctccagcttcagcaccacctgtggctaaggcgctcagcacgaactgtcccggggcattttccagtgctggtttgaatccatggctctgatttccgagttttcccttcatct

SEQ ID NO: 445410 - DNA, 122 bp, Homo sapiens
atctcagctcactgaaacctccgcctcccgggttcaagcaattcccccgcctcaccgtcccgagtagctgggtttacaggggtgccccactacgtccggctaatttttgtatttttagtaga

SEQ ID NO: 445411 - DNA, 122 bp, Homo sapiens
gggatattacggccaatgagaatggagaaggtccaggacacgtgggtgggggaagctgagcgctgagaccaagggctaaagctgggaggtgagtctgtcaccttgagccgggcgagcgctgt

SEQ ID NO: 445412 - DNA, 122 bp, Homo sapiens
tgttctacaacggtgatgtccaatgcagtagccactagccgcatatggttactgagcaaacgaaaggtagctagtgcaaatgcagaacaggacttttcatttaactttgcttaatcttaact

SEQ ID NO: 445413 - DNA, 122 bp, Homo sapiens
aaagatgccccagagcccaggatgagactcaagtagccagtgtagcccataagacacctccgcacacacacaacccaggacctctccccatccctgagacaccagggccaaccagagggtct

SEQ ID NO: 445414 - DNA, 122 bp, Homo sapiens
acccagctctgacatcccagccctctcatcctcaggcttggcacttcggggctgcctcttcgtctcccttggggagtgaaaatagaggtctttcccaacagccagactcctaccccacatat

SEQ ID NO: 445415 - DNA, 122 bp, Homo sapiens
tccactggggcctaggaagttggaggtcaggtgtctgcggaagcaaaacaacatcccttccgagtctcctcgcccctataacagtcccccaggctcctcccttcactctgccttcagctatc

SEQ ID NO: 445416 - DNA, 122 bp, Homo sapiens
caggttcacacccgccccgccccagtcgggcccagtgcagggagacttgcacggcctcttcggagactccccatgcaacacctttgcacagacagcaggtgggctcggtagcggatggttct

SEQ ID NO: 445417 - DNA, 122 bp, Homo sapiens
ggagttatacgagtttttatattctagataccatttattttcagatatgttttgaaaatacgttattgtagtctataatttgcctatttaactttaaatggggtcttttgaggggcagaagt

SEQ ID NO: 445418 - DNA, 122 bp, Homo sapiens
ctcagtcccatccaggtaaggccggacaggtggctccccaggtggcaagaggcaagcgagcggcccaggtcatacaccgggcccctggcaccctcagcctggacaggaagggcgcgcgggat

SEQ ID NO: 445419 - DNA, 122 bp, Homo sapiens
gtcaggcctgtagtgaggtctcatgattgaaacaacagcagcaatgacctcatcattgtccggacagttaggggatcttagagggtgctctggaatgccagccttgtcctccttgtccctgg

SEQ ID NO: 445420 - DNA, 122 bp, Homo sapiens
attacttttcatatttatttatttatttatttatttaaatgagatggagtctcactatgccgacagcccaggctggtattaactcctgacatcaagcaatcctccaacctcggcctcccaaa

SEQ ID NO: 445421 - DNA, 122 bp, Homo sapiens
ccagcgccctggggaaggggtaccatgggggagctggcggcaggcacccccagcccgccgcgcgcctccgcctgagggaggctcagcgtcctctgccccagccccgccgcccaacgcccgcc

SEQ ID NO: 445422 - DNA, 122 bp, Homo sapiens
tggtaggaaaaaaagaaaaaatcagtacccctgctgttctccagagctgtcagcaggggccgctatccccacctttctcgggcaaaggcctctatagacctggggtagtggggggcgcggcc

SEQ ID NO: 445423 - DNA, 122 bp, Homo sapiens
gcggcggcgggggcaaaaagccaaagcggcgggggcaaaaagccgcggcgggcaaataaccgcggcaccggaggggggcaaaaagccgcagcgggcggcaaaaacccgtggcgggcataaac

SEQ ID NO: 445424 - DNA, 122 bp, Homo sapiens
gcgggaggatcgcttgaaccccaggagttcaagaccagtgtgggcaatatagcaagtcctcgtctcaggaaaaaaaggaaaaaagaaagttagctttttggcaaaactacttcctagtagat

SEQ ID NO: 445425 - DNA, 122 bp, Homo sapiens
aaacctgaggtgactgatgctaggtggtgggaagatgcgtcttctccccagagtccccaccgcaatggggacctgaggctgctgcgtcttctccccagagtttccaccacaatggggacctg

SEQ ID NO: 445426 - DNA, 122 bp, Homo sapiens
aaattaaatataaattggagtatcagtgtaaaagtgacattctaaatgttcctcactctgcgaggcttattttttagggactttgctataattctgaaagacttagttttacagtacatctg

SEQ ID NO: 445427 - DNA, 122 bp, Homo sapiens
ttctgatgttggttccttaggcttctagcaggcacgtgtcgcattgttgttaagcaaagccggtatgtatgtttgacaagttagcagcgtggcagctcagcttgcttcccagccctgccgca

SEQ ID NO: 445428 - DNA, 122 bp, Homo sapiens
tcacggagcgcgagcgcctgctggagacgctgcgcgaggcacaggacgggttggctacagcgcagctgcggctgcgcgagctcggccacgagaaggactcgctgcagcgccagctcagcatc

SEQ ID NO: 445429 - DNA, 122 bp, Homo sapiens
tgaataaaccaatcaggttagggaggcgggactagagaggcttcaaaaggcaccactcggcgtcatagcggagagattgacagggaatctggccaatgagaagggctcacttgttttctcgt

SEQ ID NO: 445430 - DNA, 122 bp, Homo sapiens
ggaggctttgccagagagagagctgcgtgctgctccagcccagcgggattccgggggatccgcctgggctaccgcgtcccaagagtgtcgcctcctgcccatcaccccgctagagggaaagg

SEQ ID NO: 445431 - DNA, 122 bp, Homo sapiens
cttgtcctgccttcatctgcacagagcgtgtagggcagatcttcatcacacacaacccttcgcaggcttgctaacacccctctggcaacctctctggtcatgtcttcccggtgtccaaccct

SEQ ID NO: 445432 - DNA, 122 bp, Homo sapiens
agcccaggagtcagctcctatctggagtgtgtgccccagagcagtccagtgagttggcctcgagcctctgccctgctggctgcctttctcacagacgagggtgttcagcccttcccccttcg

SEQ ID NO: 445433 - DNA, 122 bp, Homo sapiens
agaatggcggccgaagctaagcccctccttcctgggtggtagatcctggtgttggtagcccgagtgacggggcgtggggatgggagatggcttgaagagaattggtgactcctacctttcca

SEQ ID NO: 445434 - DNA, 122 bp, Homo sapiens
gcgccgtaaatgcaagcctgtagccaaatgcttcccccattattctaaggtttgtgtctgcgtgtgcgtgtatgtatgtgtgtgtttgcgctgtgcttttaaacagaaagaaaagcaaccaa

SEQ ID NO: 445435 - DNA, 122 bp, Homo sapiens
aagagaatttgaaattgtggcttcccggctctcatgcggaaaccttgcaccttacgtgggcggagtcggctggagcaggctacgatgggggagacctctgggggttccataacagcgcgttc

SEQ ID NO: 445436 - DNA, 122 bp, Homo sapiens
tcctctgcagtctcctaataatttgtgcatatctctgacattgctcatatcattcattctcgttacacccatcatctcccagagtagttataggtttgttttagtgaaaataaggacagttt

SEQ ID NO: 445437 - DNA, 122 bp, Homo sapiens
aacactgtacttctattgctgattaatagtcaatcaagacctatgggatggaaaaggacacgtaagaaataacagcaactggcacccacagataggtaaattggttttcaagcccagtgcca

SEQ ID NO: 445438 - DNA, 122 bp, Homo sapiens
gcctgagaaataggggaccagagtgtacaatttaacagtgtgacaggaagggatgagatgcgaagaacagtcatggtggaggaagtgaaatgtagaccacagctagtaaacagaaagactgg

SEQ ID NO: 445439 - DNA, 122 bp, Homo sapiens
catggctggggaggcctcaggaaacttgcaatcatggtggaaggagaagggcaagcaaggcgccttctttacaaggcagcaggaaggagaagtaccgagcttaggggaaagagccccttata

SEQ ID NO: 445440 - DNA, 122 bp, Homo sapiens
tttacaatgatgtattctagattctaacatttacatatgagagaagcttcataaatgttacgttttctgtggccgctatttctgtcttatctgtgctgtctacacagtgaggacagctgcag

SEQ ID NO: 445441 - DNA, 122 bp, Homo sapiens
taaggcccttctcaacatgtttgcattgatgtcctggaataataccctgaatcacagttccgggccaaattttaatcaacctgaatttttaaaatatgtataaccaaggatgcctaatgtct

SEQ ID NO: 445442 - DNA, 122 bp, Homo sapiens
ttccccgaccccacctgcaaaaaggcacttccttcttacagtcggctggagctgcaggttcgcaaggtccgtgaaggaagcccggctcagtgtgtttagttccgtctttttgggtctctacc

SEQ ID NO: 445443 - DNA, 122 bp, Homo sapiens
gtattcctggggtggacgtgagctcgcgctaaactaaggacaccagccgagcattcagcgcggttccctacgccctccaggaattttggaaagctatccaagctcggcgctatctttaaaag

SEQ ID NO: 445444 - DNA, 122 bp, Homo sapiens
acatacgccctccttgaacctcttccccatgaatgctttggcttttaaggaactttgtggcgtttctgctctttcggaggcagctgcccgaggcagcttcccaaggcagaacagggactgac

SEQ ID NO: 445445 - DNA, 122 bp, Homo sapiens
ctggaggccaaggtttccaattgcggctgacaagtttccttcccttctaaggtcagaggtcgagcctgggagaggccccgctcccctttccctccaggcccacccggcgcggtgtcctggag

SEQ ID NO: 445446 - DNA, 122 bp, Homo sapiens
tcttggagccgggccctgaggtgcccaggctggcgcatttcgggatgttggtgccagcaccgcgccaggtgcccggggtcacaggcgtcaatacggccatgcccctgccctggaggggccca

SEQ ID NO: 445447 - DNA, 122 bp, Homo sapiens
accgttggggcgaaaggggcgtcctgggggtgggagatgcgggtaaggggtcgccttccccgtcccccgccttcccagttcccgctttgtgcccttctgcccatcacccaccggagtggttg

SEQ ID NO: 445448 - DNA, 122 bp, Homo sapiens
tccagcagtctcaactgggaagacccaggactcctgctcttttctctaatccctgggagacgaggtccagctaaggtagagtaagcagtcagtgaccaggcaggctggtttgggaggtcact

SEQ ID NO: 445449 - DNA, 122 bp, Homo sapiens
acgtttctagtaacagaaaaattatggagctgggaaagcaatgggaataagtggctcaaacgtgagcaaatatgtaaaacttgagtaactaggaaaatagtggaaaaaatttgtctaaactc

SEQ ID NO: 445450 - DNA, 122 bp, Homo sapiens
atgcacccctattgctgctgtgacttgcacccatatccgtactgcttgtgctattccaagcgatcacgctcttgcggcctgtgtgatctctacccatgttgcctgtgtgattataagcttta

SEQ ID NO: 445451 - DNA, 122 bp, Homo sapiens
gaagaaaaagagcccccaggagaggaagtagcccctaacccgactgacaagcaatccgttcgcaaagacagaagggccttcagtgaattggtttcaaagtgcttgatttcttaaaaccagaa

SEQ ID NO: 445452 - DNA, 122 bp, Homo sapiens
ccatctacaacatagatcttggtctctccacaccattctcctgtaaaaggaaccaggaatcgtgaagaagtggctgattcccaagccaggacatggaaaacacaaggtcagtctgaaacatc

SEQ ID NO: 445453 - DNA, 122 bp, Homo sapiens
atagccaccgcctgggtgtagactcctgcaaaataattcacttccggtttccagatctcgcgagagagggaccgggaaggtcaaacctaattctgggatcccagggaacttattttcttttt

SEQ ID NO: 445454 - DNA, 122 bp, Homo sapiens
agggcagtctctgagataagaagtagctgccggtggaacaaattccccctacctgaagagcgccgcggctgccaggcttgtgatagtgtatttctcagagagcagattctgtgcagtactaa

SEQ ID NO: 445455 - DNA, 122 bp, Homo sapiens
gcaactccgcccctccgcagggcgggacaagctgagccgaaaccacacctgcagcttcagcgattggtggagaagttcaagtaggcactttctacgaggggaggagtccaattagtggacta

SEQ ID NO: 445456 - DNA, 122 bp, Homo sapiens
gcgggggttggctccagcccgtcttggccaccacactaacctcgccgctgctcgcgccgccgccgctgaacacttccatttctcggtcccagggctcgtcctgaggagcgaatggtagcatc

SEQ ID NO: 445457 - DNA, 122 bp, Homo sapiens
ggaagggttggggttccgctgcctgcaccaggcaagagcaccccgagcaaaggaagaagacgacttgcctccggagctatcactggggagtgggaatttggaaagttccccaactagggaca

SEQ ID NO: 445458 - DNA, 122 bp, Homo sapiens
gagtatatactctgggaggaagagagctttgaattggtaactcctgaatcctcacatctacgttagtgccgtaggagtgggtaccaagaattacttgtatgaataaatgaatgaatacatgc

SEQ ID NO: 445459 - DNA, 122 bp, Homo sapiens
cccacttatcccggacgtccccgcccttgatggggtcctggatcccttgctccttcgcaccgaggccgcctgagccgctccagcctggaaacagagacgcagtcacaaccacaacaaggcgg

SEQ ID NO: 445460 - DNA, 122 bp, Homo sapiens
ttaggggtccacacttgacctgtgggtcatgttcacccttctcccagggtgagaaactcccgtggggctcccacaagcacccccatcaaatcacccaccattcataccctctatcaccttgt

SEQ ID NO: 445461 - DNA, 122 bp, Homo sapiens
cagcgagagggaggagctgagatcatcaggtttccagaagctgccctgcatcctcgtcaccggatactttttggctgcccctaaaagttcacgtagtccagccagggtggggccccgctttc

SEQ ID NO: 445462 - DNA, 122 bp, Homo sapiens
aagccggcctgcggagtctttccttacgaagttaaaccacctagggcgcgcggccctgttcgcccagacctcgggctttcctgccaggctgggtttgccgggtcgagtcactttgctcgcca

SEQ ID NO: 445463 - DNA, 122 bp, Homo sapiens
gttcaggatggtaaactcttgtgtgacacagttctacctggagcatgtgaactccaaaggcggggtgctagcgctggctgttttaaaatgcatcagccttctacaaaaggtgtggtttaatc

SEQ ID NO: 445464 - DNA, 122 bp, Homo sapiens
gcctggagtgagatagtcgcagccggtcaggccccgcctctgggcacagcctgttcccgtcggaaccgcccgcagttggatacgtggcccccaccagccccaagttgaccaactccatctag

SEQ ID NO: 445465 - DNA, 122 bp, Homo sapiens
acgcacaggcagcccacgcagctttctcggtgcagcaccgggaatcttttctgaattcaacgtgcaccaacatttgagcagctgcctccaatatagaagcactgcatttagccaattttaaa

SEQ ID NO: 445466 - DNA, 122 bp, Homo sapiens
acaggcagaagcgccggggtgatctgagctgctccgaagtcaggaggggctgagggcggccgcggctgggaagcagggagcgcaggccgtggaatgcttcccaagcttggaagcagcaggtg

SEQ ID NO: 445467 - DNA, 122 bp, Homo sapiens
cgcggaaaccacgggggccctgagactgagtggtccctatcccacttctctctggggcggcgctgtagccagcggctgacaggcgcagcgaaaggcagccctctgctgtaaggaggaaaact

SEQ ID NO: 445468 - DNA, 122 bp, Homo sapiens
aaaggggctaaccaatctcctagcacgtggctccttatgtggctggacatggaagacatacgcctactagttttggcagcttctggtcctgacaaaggagcttgaagtgcggttttctggcc

SEQ ID NO: 445469 - DNA, 122 bp, Homo sapiens
cccagcggcgccggcaggaaagccgtgtgtcccagggaatgaagatggaaggagtgaggacgaaggccctgtaaatcagcttcgaggggaggagacgcatgtctatgagaaacgctgtgtgg

SEQ ID NO: 445470 - DNA, 122 bp, Homo sapiens
gaccgcagctatggaaaaccatgccaactcttcaggggtgccatagctcatttgtatattcgtcattaaaaagtaaaatgctatttgggtttccaagttaacccaaaaacccatgataagcc

SEQ ID NO: 445471 - DNA, 122 bp, Homo sapiens
gagtacgcatctgggatttcttcgtggttggattcgggcgctgcgttctggcgggaaaaccgctggaatgacactacggacttctgggtgcggcttctcagtgttgggaggcccacgatggc

SEQ ID NO: 445472 - DNA, 122 bp, Homo sapiens
tcagttttccaaagtgactgagccaattcacactcccaccagcaagagctccagctgcctcgcacacgagccaacattcagcattttccgtccgtcttccctcattccaggaggactgtgcc

SEQ ID NO: 445473 - DNA, 122 bp, Homo sapiens
aatcgcttgcacctctagtttattcgctcccctcctccgccttgcagggaacctagtgtacggctcacccagcccgcgccccaccccgccttgctggctctccgcgcccctgcccgggcccc

SEQ ID NO: 445474 - DNA, 122 bp, Homo sapiens
gggctggaggcgagccttcacctcctccaactcctcctgcagctgccgccgcatgcccaccgggtcctgtgggagccgaggagcctcgctcccactcagaggcctcagcttttccaggaact

SEQ ID NO: 445475 - DNA, 122 bp, Homo sapiens
gacgtgcgcgacctacgggctcaatgtggagcgtgtcttccaggacggtaactcgggtgccgggtgggagtcactggcagccgcggccccagtgctggcgataggaaggctcccagtgagag

SEQ ID NO: 445476 - DNA, 122 bp, Homo sapiens
cctgtactttggcagtgattaagcacacccgtggaggcgtcccgagggcgtggactccaacgcctacctctgctgggtctgacagacagaactggtgcagcgggaagaggggggacgttctt

SEQ ID NO: 445477 - DNA, 122 bp, Homo sapiens
agttgaggtctgtattgtgtgtcttacgggtgacggttcgtgtttgggcgctggaaggagcgggctttctgggcgcccctaccacccccgccccataaccgctttccagactccgcctgctg

SEQ ID NO: 445478 - DNA, 122 bp, Homo sapiens
gcggccgactggccaagggcaccagccctggagagggcacagggctcagcgtggccagctcggatgtgagctcattcccccgagaccaccagttctagttcctgcccctcccccaaaggctc

SEQ ID NO: 445479 - DNA, 122 bp, Homo sapiens
gccccagctcggagaaagggcggcgctatagagaggacgggccctgcctgcgagaggccccgggggagagagaagcctaaaaaaaaaaaaaaaaaatacagccgcgcacggaaatcaatggg

SEQ ID NO: 445480 - DNA, 122 bp, Homo sapiens
aggttcagtcctaaaaccagtgagaccagcgacccaccagaaaaaactagcaactgcagacgcgacgcctttaagagctgtaacactcatcgcgaaggtttgcagcttcactcctgaagcca

SEQ ID NO: 445481 - DNA, 122 bp, Homo sapiens
gacgtctcgcattccaggcactctatggagaggccgctagggctcctgtggcataaatgacgtgccgagagagcgagcgaacgcgcagccgggagagcggagtctcctgcctcccgcccccc

SEQ ID NO: 445482 - DNA, 122 bp, Homo sapiens
gctaggaaggcatggcattagtgctgtcggaatcctgataaaacatcacaaacttctgttcgttggtattagggacagtatagagtgagtgcttgaagaactgccttggcttaccaatctct

SEQ ID NO: 445483 - DNA, 122 bp, Homo sapiens
agtgcctggcatgcgatagtcattcaataaataattttaatttctaacagtttaatcacacgtcctttgtcttgtgaagcattatgagctgttggttatgtgttcttgaggattatttaaag

SEQ ID NO: 445484 - DNA, 122 bp, Homo sapiens
gacatggggaagctcggatgaggctgccagggaatagatgttgccgataaatggcagccccggcggccccggggggaagcccatcggccgcctctgcttcagcagctggcggacccctagcg

SEQ ID NO: 445485 - DNA, 122 bp, Homo sapiens
taataaatgaaaacccaacccttgggtttgtgttttgactcttgatacaattatgaaagacgcatcaggagatggcaagtggctgccagtacttccttttttctggaatattctctaattct

SEQ ID NO: 445486 - DNA, 122 bp, Homo sapiens
tttattaaatattaaaatatatttaatgtaatttcatgttttcaaaaaatttttttgaaacgtgtttggtggtctaccatatggtcaatctttgggtctgttttatgtgctggggagaagga

SEQ ID NO: 445487 - DNA, 122 bp, Homo sapiens
cggggatctaactcagatctgcaaactgcgactctaaagggttaatgagcaacttgcacccgccacctggccctctcagaggcgtcttgctagagccattgaattacagaccggtttgtatt

SEQ ID NO: 445488 - DNA, 122 bp, Homo sapiens
gttctgcccctccttggctcgtggaaaccacccgccctcacctgggcggtctcctgcccacgaccccgagctgtgggaaaaagggggaccagccgcacacccccctttacccaggtgctcgg

SEQ ID NO: 445489 - DNA, 122 bp, Homo sapiens
ctggggactaagccagctgggcaaagctgagctcaaggggaagacagagggtgccaagctcggggatgaaggggaagctgcaatcgctggggttcatgcctcactacactccgggctctgcc

SEQ ID NO: 445490 - DNA, 122 bp, Homo sapiens
gagaaagtcctataattctttctgaaaaaccctctcctctgacactctctcagaagaccccgccttccccatatactcttttggagactttactcagctttctcctcaactgagatctctga

SEQ ID NO: 445491 - DNA, 122 bp, Homo sapiens
ccactcagagacttcacctaactagagacaggcaaactgcaaaccatggtgagaaattgacgacttcacactatggacagcttttcccaagatgtcaaaacaagactcctcatcatgataag

SEQ ID NO: 445492 - DNA, 122 bp, Homo sapiens
cgcgccggggcgggacctagcgggggcggggtccgcagtgattgggcgtaggagcggggccgccagccagagctgggctgcagggccgcgcaggtttcacttcgctccgcgcagccgcctgg

SEQ ID NO: 445493 - DNA, 122 bp, Homo sapiens
ccgagagcgccggccccgcccccgccgttcgcgctctgaccagcccgcagagccagcccccgaccccgggccacctgggcccccgggttccgccggcactctcgccaccaccgcgtgggtga

SEQ ID NO: 445494 - DNA, 122 bp, Homo sapiens
attcttcctttgcagtctcaattctatttactccataacaagtaaactgttttatcccttcggctgggaaggataatttttaccctaccaagatgatgacaatgccactgcagtgctcaccc

SEQ ID NO: 445495 - DNA, 122 bp, Homo sapiens
tttccctctaacgacttcttcaagatcaggggctatgtcttattcgtttttttatgtccccggggattagctagttcttgggaaacaactgggacttgggattcaaaacagtttgctaagtg

SEQ ID NO: 445496 - DNA, 122 bp, Homo sapiens
acctcctgaaacctaggtctggccttcagggaatctgattccttggtctggggtatggcccgggcatctcctgaagctcaccaggtcacacagaggtgtagccccagctgggaaccactgac

SEQ ID NO: 445497 - DNA, 122 bp, Homo sapiens
acagctcatcaggccacgcgagtcctgcagggtggtctgggatggcccctcaccctctgacgtcctcttgggctgggccagtgaggagcagccacaggaaggcggagggtcgggggtggagg

SEQ ID NO: 445498 - DNA, 122 bp, Homo sapiens
cggcttacaatcgaggttccaccctttaatagctagactattagctagacaacactgatacgtatgctgtttagccttgcagctgatcagtctgcaaaatggaaataataatgtccatttta

SEQ ID NO: 445499 - DNA, 122 bp, Homo sapiens
gctagtaaggtgagttggaaaaatcctaatgcaggagaggaatttgttttttttgcatctcggtcctctcattttatagatgaagaaactgggacccaggatgattatttcccagccttttc

SEQ ID NO: 445500 - DNA, 122 bp, Homo sapiens
aggtctgggaagtgtctggaaaaacgtcgcatcgcagaaggcctgtggtgttaggatatgcgttttggtttttgtccaggttcctggctcccagcacccacattccttgttagaatgctggg

SEQ ID NO: 445501 - DNA, 122 bp, Homo sapiens
ctagaccttgtctcttaaaaaaggagcactcctcctgctctgtccatggcttcctggcctcgagtcccagataccaaacagagagggaagctgaagccttaggaaaatggcatgtaccccgc

SEQ ID NO: 445502 - DNA, 122 bp, Homo sapiens
gacagccagcacagtctcttaggaggttccggagggtggcagtgggaatgagcgtagagccgtgtcatttcggagggctgagtgcattccacacatcttcccaaagcccaccccaagaggct

SEQ ID NO: 445503 - DNA, 122 bp, Homo sapiens
catcctgatgccttggagtccaaggcccatgcctccctatccaccacgctgccctcccgccggctgggtaactctgcttggctgataatgaggagcttagcctcagaggtgtcctatcagcc

SEQ ID NO: 445504 - DNA, 122 bp, Homo sapiens
gggcgggttcagcaaacacgtgctcccccttgcggcgggaccgcgaagctcccactgcgtcgtcgactcagttgtctcgcgaggtttgttgcttggtcttggagccacaatttgagaatgac

SEQ ID NO: 445505 - DNA, 122 bp, Homo sapiens
tagattcgcacaaggaggacacaacctagatcccttcaatgtgcagttcacaataggggtcgcactcccatgagaatctaacgcctccacggatctgacaggcggcggagctcaggtggtaa

SEQ ID NO: 445506 - DNA, 122 bp, Homo sapiens
tatccaaggggcgagtggctcagccagggttcattaccaggctccggatcctgcttctcccggatcacagcaagcgctgtgcttaggcctggggtgggggacggattctccctgaaggcagg

SEQ ID NO: 445507 - DNA, 122 bp, Homo sapiens
acagggggcgggcgttcaacccacagagccaaacgctgccttcctgggcgtgctgggacccggctgctccatgggaccaaatgccccccacattcgtgtgcaagtaagaccccctgggcagg

SEQ ID NO: 445508 - DNA, 122 bp, Homo sapiens
cggccaagtttccctgcgcccccgttcctggtacccgcgccggcctccgtggctcctccacggctctctcctggaattaagcttccgggaagggtttggccgattctcagactggagaaggc

SEQ ID NO: 445509 - DNA, 122 bp, Homo sapiens
gctttctatggggacaagcagcctgtaacagttggagtccagtttagtagtgatgtctctcgaagtgatgagaatgtactagactcaccaaagcagaggagaagttttggttcattcccata

SEQ ID NO: 445510 - DNA, 122 bp, Homo sapiens
tgtcattcctattctccctttcacctctaccgttttccaacagatgagcaaatacggtaacgatagcattttggtctagttcctgcacaaactcattcctctgcataaaaggcagacctttg

SEQ ID NO: 445511 - DNA, 122 bp, Homo sapiens
gtccaagcatcgggatatgccgccagcacctggctgctgcagcaccgcgctggacatgagcgctccgcccaacccgacggcgtcagctggcgcgcgcgcccgcgaccgacgtgcgcaggcgc

SEQ ID NO: 445512 - DNA, 122 bp, Homo sapiens
gggtctccctcggagggtctccctcttgggagctggtgcagaaggctcaagcccactcgccggccctgcttgccccagggcagtgtggtccgggggggcgggctgtggggaaggcccactta

SEQ ID NO: 445513 - DNA, 122 bp, Homo sapiens
tccggccaccggggctcatcccgccgccgccagacccagcggtttggtgccggactgtagcgattttccgtcctgtagcttcgcgcccaagccggcagtgttcagcacgtcgtgggcgcccg

SEQ ID NO: 445514 - DNA, 122 bp, Homo sapiens
tgtagttatttgcagacttaaagaactgccaaccccacaagcatggtaataccaatggaacgggagtttcactcgatctggaaatcccccctcccccgctttccacacccaaccacacaagg

SEQ ID NO: 445515 - DNA, 122 bp, Homo sapiens
ggggtcctctccgccgccaggcggagttgggagccggacgatcccgcacgcagcgcgaggcgggaccccggactgactacatttcccagtctccgtcgctccgcgcggcccaccccttcggc

SEQ ID NO: 445516 - DNA, 122 bp, Homo sapiens
aagctctcattgccacatctacaaatgaaagtatcatgtttaaagagctcacaggttctacgaatggtcagtatttaatgaacgcaccccactacacagaaactcacccagctgcaaactca

SEQ ID NO: 445517 - DNA, 122 bp, Homo sapiens
accccatattctgtctgtcagctgggaaccaactgcacgtagacgggctgctctcaaacccggctacctctcgcggcgcgcgtcatgtgagccgggctactctgcttttgtgctcagggcat

SEQ ID NO: 445518 - DNA, 122 bp, Homo sapiens
ctcgtggtgcatcgctttttaagcctgtcggaaaagcgcagtattcgggtgggagtgaaccgattttccaggtgccattcgtcacccctttctttgattaggaaagggaactccctgacccc

SEQ ID NO: 445519 - DNA, 122 bp, Homo sapiens
aatgtttttcatttatgtcatagatcctgatcctgggcacctgtggagttagtatctctccggtcaagagatttttcaggcctcagacttctaatggtgagggttaagtagaagaatttgtc

SEQ ID NO: 445520 - DNA, 122 bp, Homo sapiens
actttgatcaattatttccttgccgttgtctgtcggcctgtcagcctacccccacccgaccgagaacgccttgacggtagtgaaatggtcttgccaatagactccagagcaggctccgccac

SEQ ID NO: 445521 - DNA, 122 bp, Homo sapiens
cgcctgggcacttgggctccgggcccttgggggcggcgtgtgggggggactttggcgacccgggtcagccggccgccccctgggctgctggtgggcgtcgggcggcggctcctcccccgggc

SEQ ID NO: 445522 - DNA, 122 bp, Homo sapiens
caaaactcccctgctcccaccgcaacttggaggagcggtggaccgatttgaaggaactgacgcagaggttttattcacgaaccttgaagaagttctgggcaagtgactcaacaggacccgcg

SEQ ID NO: 445523 - DNA, 122 bp, Homo sapiens
agccgcgcccgccatgagggagatcgtgcacatccaggcgggccagtgcgggaaccagatcggcaccaaggtgggcctggcgcggtgcagggcctctccgcgggtcggctgctggcgggccc

SEQ ID NO: 445524 - DNA, 122 bp, Homo sapiens
ctggtagatgcattttcctcagttcagaatgtgtggattagtaaggtggctctggcctggcgctggctaagccaatagaaccatactttgtggtgtcaagttgccatccctgagcttgctga

SEQ ID NO: 445525 - DNA, 122 bp, Homo sapiens
ctttggctggcgggacctggagcccagaaaagggggagcgcgcggaagcgccgccaaatgcggggactggctccgagcagctgagagtacagccccaaccgcatgagcacgacctgggccct

SEQ ID NO: 445526 - DNA, 122 bp, Homo sapiens
ctggcaaaactcctgctcctttttaaagccaagctcatgtcacctcctctgtgaagtcctcgctgactccccaagcggtcagtgtctctctcgtatgggctccccggcccctgcactgctct

SEQ ID NO: 445527 - DNA, 122 bp, Homo sapiens
gtgggctgccatcccaccaactcggtagggcgtggggcttctgctgggatcgtctgtttccggcccccacctgctctgcggagtgtgcagctccggccagcctctcccaccgcggcagctgc

SEQ ID NO: 445528 - DNA, 122 bp, Homo sapiens
caggtagggcagggaggaaaggggggcatctctggtgcagcccggttcggagcaggaagacgcttaataaatgctgatagactgcaggacacaggcaaaggtgctgagctggaccctttatt

SEQ ID NO: 445529 - DNA, 122 bp, Homo sapiens
cgggggggctctctgtggccagtgcaggctcgagggtgggaatgggcttccccagtttggcgtgcagcttgaagacctgcaacagacagagccgggctcccgcgtgagggccgctcccagcc

SEQ ID NO: 445530 - DNA, 122 bp, Homo sapiens
tccctctgggcctatcttgaagtcccctgtccctctccttctgcctctcacactgggtctcgggaggcctgccagtctgtttccccggaggctgagtaagagccccaattccaagccatatt

SEQ ID NO: 445531 - DNA, 122 bp, Homo sapiens
cggtgcacggcagccccacagggccgggtgcctggactgctagcaagctgggcggcattccggtgagggcgggtgccggagctggggtcgatgggtgctgctgaagggtgcggagggagtgg

SEQ ID NO: 445532 - DNA, 122 bp, Homo sapiens
actgtgcaaaagcggggcctcccctattttctattattacaaagaacaatgtgtcagagtcgtgtgtcattaggatttattataatagcactaataaaaaatccatttgggtactatgctcc

SEQ ID NO: 445533 - DNA, 122 bp, Homo sapiens
aaaaaaaaaaaaagtaaaagctctcagggagcgacttttcccttggataaggcagccacacgctaagtcccctctccatcggggaccctggggacaaacagaacggtgcgcatttccctccc

SEQ ID NO: 445534 - DNA, 122 bp, Homo sapiens
ccagatctcccctctgaagatccacatcccggagccggacctccggagcatggtcagccccgtcccctccccgacgggcaccatcaggtgagtagccccccagcctgcccttgggcccccag

SEQ ID NO: 445535 - DNA, 122 bp, Homo sapiens
gtgtagagaattcactgacccccgaaaaccaccgcctgccagaaacccacccagcccacccgcgccttggagaggccatcctgctgtttcagtgttgctgaaacagagctgggttctgggct

SEQ ID NO: 445536 - DNA, 122 bp, Homo sapiens
cggactcacagagcaaacacccagagaggggctgtaattcccagtgcccccagtgtactccggagccccacccccaacccccagcagcacccttctaaactgatacaaatggcaggtgctcc

SEQ ID NO: 445537 - DNA, 122 bp, Homo sapiens
cccggctccagagtcggccactcgtccatgcacagagaaggagaggtctcatgaagctcacgagagcccttcgcgactgagctcaaggaacaagaaaaggtcaacttgtttttgcgattgtc

SEQ ID NO: 445538 - DNA, 122 bp, Homo sapiens
tacaacccaatcgaggagaacaagatctgtggtgtgctccaccatgccatggttaagcaacgcagacagggcctgtgtctcaggagcaggcgccctctcggtgggccgccagaaccctcggc

SEQ ID NO: 445539 - DNA, 122 bp, Homo sapiens
ctgtgaaggaaatttccatttcccaacactcgctctagggagtatcataaatagaaacaacgggaagatcaagagttgcttgtatggcgagcctcaggcaggctccctgcacaatataaggg

SEQ ID NO: 445540 - DNA, 122 bp, Homo sapiens
caccaggcgcgtgcggaggcggcgagcctgcgagggcggccggtgcgggcgcagccggcgcgatgagtcaccatccctcagcacctccggaacacgaggctgcttggaagcagccgggcccc

SEQ ID NO: 445541 - DNA, 122 bp, Homo sapiens
agcaaaggaaatgccgcctctctctgtatcgaccaaacccaccatggctttctcttcccacgggtgagtcttgctttcccgagctgtacgggtcccaagccgatgccaggcattcagccagt

SEQ ID NO: 445542 - DNA, 122 bp, Homo sapiens
ggggtggaggggcggtaggtagcccacagagtcccagcaggcgggaagcaggcacaacagcggaccttagcacggggtgggacccaggctcggtccaggagcctcggcctgtccagcactac

SEQ ID NO: 445543 - DNA, 122 bp, Homo sapiens
aatagctgtggggaaaggtaagtcaacgttacgttctttctgacaaaggcagatacccaacgcttggcttttcctcttggacagagacagggagagggcgcgcgggcagagttaatttctaa

SEQ ID NO: 445544 - DNA, 122 bp, Homo sapiens
cgggtgggggctgcccttggggtggaggccgtggagcgcatcccgctgtgtgatcgggcacgtggcttcgctgccctgaacctccctttcccagtttaggcctaggaatgccggcttcctgg

SEQ ID NO: 445545 - DNA, 122 bp, Homo sapiens
ggtcacttgggaaactagtgggccaatttgcataccaaacccacagcctgtgggagggaacggaaagaagccatagtgtctggtggaccaaggcacagaggcaggaaagcaagacaagggcg

SEQ ID NO: 445546 - DNA, 122 bp, Homo sapiens
ataataccagaaaagcgcagcagggagggggtggggggcggcaacggcgacgactaacctcgctgtttacgtgaccgactcactgtgactctctgggtaaaaaaaggaaacttcttagaaaa

SEQ ID NO: 445547 - DNA, 122 bp, Homo sapiens
gggtcagcgaccaagctccatcctgagtggcactgaggcaaagccgtggcggccagggcccggctcctgattcacccgctcttgcagcctgggggcgacaggatgggaggtgcgcaggccac

SEQ ID NO: 445548 - DNA, 122 bp, Homo sapiens
tacctactagatgccagtagcatcccacccctggttgtgacaatcaaaaatgtcttccgacgttgtcaaatgtcagttaggggacaaaactgtctccagttgagtgctctaggataacccct

SEQ ID NO: 445549 - DNA, 122 bp, Homo sapiens
gtggtttctggctctgtggctgcagctgcactgggtccctccttgttgtgggcagggcggcgctcagaacacacactcagcccgggcgctcctgccccaccggtccctatgcccggccaggg

SEQ ID NO: 445550 - DNA, 122 bp, Homo sapiens
ggcaagcagatgtcgcaagccctatttattcagtcttcactataactcttagagttgagacgctaatgttcatgactcctggccttgggatgcccaagggatttctggctcaggctgtaaaa

SEQ ID NO: 445551 - DNA, 122 bp, Homo sapiens
gccggtgagtgcgcatgtgcacgttgagcgagctcttctgcgtgaagcgcttggcgcagacggcgcactggaaggcgcgcacgccggtgtgcgtgaccatgtgtttgagcaggtagtcgcgt

SEQ ID NO: 445552 - DNA, 122 bp, Homo sapiens
cctcgttcttctcttgagccctcaactcatcagcctaagcacctgagttcctctggtggacgctacattcctctccacggcctccaccctccaggttttcatccttcagcacatcacccttg

SEQ ID NO: 445553 - DNA, 122 bp, Homo sapiens
ggcaggaggatcacttaagcccaggagttcaagggctgtaatcagctgcgatttcaccaccgtactccagcctgggcgacatagtgagaacttgtctttaaaaaagtaaataaggctgggtg

SEQ ID NO: 445554 - DNA, 122 bp, Homo sapiens
cctgagacggggccagcggaggcagagccgggaggctgcgtgggcttctgggcaggctcacgcagacgccggccacaccatccacctggccgcctccatggacccttggtggcttttgtaaa

SEQ ID NO: 445555 - DNA, 122 bp, Homo sapiens
ctaccgggagctgctgctgctgaagcacatgcagcatgagaacgtaggtggtggctgccccggggagggggtgggggctgccctggggagtcaggggcaggcgcaggcggggcctcccggta

SEQ ID NO: 445556 - DNA, 122 bp, Homo sapiens
acctacactttgcaaagtctcccccatccccctcccccgagttcttccccgccgcgcgcccgcccctcctcgcggcttctgttgtgactcgggcagcctatcccgagggtgcggagctgccg

SEQ ID NO: 445557 - DNA, 122 bp, Homo sapiens
tgactgtggcccgcgccctcttctcctcttccaacggctcccgatgctcagagacccccgcgctgggccctctgcagcccagggatggggttgagtggtgcttctccacctggtgccgccgc

SEQ ID NO: 445558 - DNA, 122 bp, Homo sapiens
gggacacatgaaagacatcgagctaatttccttaataaatgaagagctcttggaaaccaacgagataaagaccaaaccaagacagaaaaatgggcaaaagggataaaactggcaattcgcaa

SEQ ID NO: 445559 - DNA, 122 bp, Homo sapiens
cgccggcctttgtccccaggcgggccaggctgtgctggccttccagcggtaccagattggcgccgactcggccctcttctcccaggactacatggaccccagccaggactccagcatgcctt

SEQ ID NO: 445560 - DNA, 122 bp, Homo sapiens
cagccatgcctctgtgccttctgcctggaacgaactcctctttaactttgaaggcccccgcggaaactccctctcttccaggaagtcttccctaactacccgctcctcttgccccagatttg

SEQ ID NO: 445561 - DNA, 122 bp, Homo sapiens
tttacatagctacaatgacatgatcacatagttaacagcacacagtgtaatctcataccccgaatcacatttccttgactgtcctcttttagcagctggtttgcttcagattgcaaagaagt

SEQ ID NO: 445562 - DNA, 122 bp, Homo sapiens
aaagtatcagcgtagaaggaattgtgtctgcctaggaaaagggtgtggcaagaggaggagcggcacttgcggagagctcggaacactccgccgagaatgacttttggagccatttggcagag

SEQ ID NO: 445563 - DNA, 122 bp, Homo sapiens
gagaggacaggaatgagttcatagagaaaaagccaaatgcatatttatctcacaattatacgtaaaagtcaaaaaatctgaaagcgatctaagtgtccaataggaagggaatgcttagtatc

SEQ ID NO: 445564 - DNA, 122 bp, Homo sapiens
gagggatggttgtcctcacccctgtgaggcaatatgctgtccattagtatccactgaatgcgtgaaatttttttctaatgggcaaactgaggctcagagaagttcctgtctggctcaaggtt

SEQ ID NO: 445565 - DNA, 122 bp, Homo sapiens
gaattttccagcctcaaatacggggcggactaattttcaggtccactccaacccagagatcggattccacttgatcttggagttcgcgaagtaactgccaagtcagagcgtgcgttccgcag

SEQ ID NO: 445566 - DNA, 122 bp, Homo sapiens
tcccccaccctgcgtgcacctcttgggccccacggaacctcggcggcggcgtccagggatcgcgtccggagctcccaaccggataccccccccaagcccgaaacggcgctgcccatcctcat

SEQ ID NO: 445567 - DNA, 122 bp, Homo sapiens
acagcctgggttccagtggaagggatggctttccagtccaggtctttgctgttcctcctgcggtctgcacaccagcagcaccatcatcacctgggagcttgttacagatgcagattctctga

SEQ ID NO: 445568 - DNA, 122 bp, Homo sapiens
gagccgccgagaggggatttggaacaaacaacggcggccatgttgagagcgcgtcggggccgctaaacttcccggcctgcgcccgcctcaccggccgcctcccctctcccggccgcaggatg

SEQ ID NO: 445569 - DNA, 122 bp, Homo sapiens
ggtggccgtccctcctgccagcctggttctgcttgcactgcgccttggacatggtgagcacgggataaacacttgttgtcgaatgctggtgactgttaccaggctagtgtcagttccaggga

SEQ ID NO: 445570 - DNA, 122 bp, Homo sapiens
gtgaggagggttgggggggtcatatctgtgtttccaggttctggggagaacaatgatccacgggtcaacgtgatcacatttccttctatccttcttgtattattatttttatttttgtcaat

SEQ ID NO: 445571 - DNA, 122 bp, Homo sapiens
agcttcctgagccgacagcagccgccgccaccccgccgcgccggggcggcctgcaccttgcggcagaagctgatcttctcgccctgcagcgactgtgaggaggaggaagaagaggaggagga

SEQ ID NO: 445572 - DNA, 122 bp, Homo sapiens
cggcgggcgccgggggcttccccctgctctttcctcctgcggtgggagaggccaggcccacggaagccccctgcggcccagcccacgctcccagggaccagagaggaccgagcggaggcggc

SEQ ID NO: 445573 - DNA, 122 bp, Homo sapiens
gcggggtggggccaagaggaaactgacaagtgcgcagctcttagagtcagtcaggtatcccgacactgcatccttccctacagccttgcttcgagtcagggtgcctcgcaatgctcagcttc

SEQ ID NO: 445574 - DNA, 122 bp, Homo sapiens
aatgcgatatgggggtattttatttccacccttagggaccgtgcctgccaagctgcctcccgggcgccccgccaccgcgggctcgacgctgcaccctgccaggaccagggccaggacagcca

SEQ ID NO: 445575 - DNA, 122 bp, Homo sapiens
agcgccctgctgcgtgcccgccagctacaatcccatggtgctcattcaaaagaccgacaccggggtgtcgctccagacctatgatgacttgttagccaaagactgccactgcatatgagcag

SEQ ID NO: 445576 - DNA, 122 bp, Homo sapiens
ggcgtgggaggcacctcgattcccttacagttgagaacaaggtgaggtactggtgggaatcggcggtgtgtgggcgcacgggggccaggagcggggcggggaccctgagcttgggccacgtg

SEQ ID NO: 445577 - DNA, 122 bp, Homo sapiens
tctccctggttcgcacatggcccctccctgtatccctactccaacactcacacagacacgcgccacagagacaatgaactctgctgaggacccatgaataggccccttgttgcaggaaaggg

SEQ ID NO: 445578 - DNA, 122 bp, Homo sapiens
tgacaaactgatgataaccttatattggcagtagggggtggggggggcggtggggtgggacgatcagctgtcatcaatttgcacagcaagtattatctcctgataagatgctggtgaatgca

SEQ ID NO: 445579 - DNA, 122 bp, Homo sapiens
caaacctgtgttgttcaagtgtcaacctacttaagacctcaaacaccgaagcccctcagtcgccctggaaggcagcagacgcagcttcctagcgctcccagctgtctgcacacaaggcgccc

SEQ ID NO: 445580 - DNA, 122 bp, Homo sapiens
aaaaaaatcttcttagccagttatctgctctccttgaacacaaagcaacaatctgttaagcgtgcctaataagattttttttaaaggaaagaactcagtagtataaagccacctcttcaaat

SEQ ID NO: 445581 - DNA, 122 bp, Homo sapiens
tttcatcttttatttttaaaagtaaatagggaagggggaaggagggggagccgtggcgggcgctacgtctgcgagctgattactccccgtctgaaagcggctccatttcccgcacggtgggt

SEQ ID NO: 445582 - DNA, 122 bp, Homo sapiens
tcgggttagagacggcttcaaaggtggacggggccctttgtcttgcctccgctttcttctcggcctttctccggcccctccctccctccctctctttgacctccccggtaccgacaggcctc

SEQ ID NO: 445583 - DNA, 122 bp, Homo sapiens
ggaaatggagctgggagaggtgacgtcaccttccgcacctggctcagggcggaaatggggcggggagagagtgacaccacccctctgcctgtggctggattggtgggcgtggcgggggcgtg

SEQ ID NO: 445584 - DNA, 122 bp, Homo sapiens
ccaacccaccagtgacttggcccgcaaaccacctggaaaaggagtctccagagaccccggcgcacagcaggccaggaggcagctgccccgggattcagagcaacctcggggcaaccctccct

SEQ ID NO: 445585 - DNA, 122 bp, Homo sapiens
ttgctaattggttccactttcttccttgttccttttcctttaccaagatggccgctgtgtcgttcgctcctcattggtcggattttccgcaggtgccgattctagccccacctactagctct

SEQ ID NO: 445586 - DNA, 122 bp, Homo sapiens
cttacatcctgcaagcccctttcccccacaggttcaactctggtacttccctttggaatacggattctctgagaggttttaaatttggacatagcactaatggttccagcttcatacccatc

SEQ ID NO: 445587 - DNA, 122 bp, Homo sapiens
gcgaccgccgccgaatgttcccgccgcgggctccgccccccggccaatcggaccggcgctcggtgaagcccagattctctttgttccgcagccatttcaggccccggacaggaggcagtgcc

SEQ ID NO: 445588 - DNA, 122 bp, Homo sapiens
ctctctctccctttcccactatgaatattaggtatttgctgcaggtaacttttttgtctgcgcaacagaacttctttggactggcagcagcggccttgagcagcttggccctgcagaaagct

SEQ ID NO: 445589 - DNA, 122 bp, Homo sapiens
tcccgccgccactcaccgaaccggaaccggctgccatgcgaaggggtttccggccgggcgcggaacgcaaaacccgggaaccgccgcgaaccggaaccgccttcacagcaccggaagagtcg

SEQ ID NO: 445590 - DNA, 122 bp, Homo sapiens
ccattagagtggcggcgcgtgtgggcgcccgtcgcgttcctccgcccgttctcgccgggtcgcaccccccaccccgagggtgtacttggtacggcccgcgccgcctcctttcctcgcccggg

SEQ ID NO: 445591 - DNA, 122 bp, Homo sapiens
ggtgggggctgccagctgggccggacagagctggggcccctggacaggtcgcgaggaggccgggtcggacagacctgcggcccgtggacaggtcgcgaggacaccaggtctcactggaggac

SEQ ID NO: 445592 - DNA, 122 bp, Homo sapiens
ggctgggtacctgaggtcaccagctcggctgtagaggcaggggcggcggaggcggaactgcggagttgctgggtccaccgacccttaccctcagcgagagaagtaaccgtaagtctcagctt

SEQ ID NO: 445593 - DNA, 122 bp, Homo sapiens
catgggcctgacaccatgggctgcagacaccgcttgtgggcggcacatgctgatgagggccggctcatgagaacggctgtgtgttttctgcacccaccacccagaaacaggcatgagtaggg

SEQ ID NO: 445594 - DNA, 122 bp, Homo sapiens
tgcgtttgagacctcactcagaacgattggttcatattgctaatattttcctcattttcccgtgtccaccagcttacactaccacttaagtggtgactcattaaatgtttgttgcatgataa

SEQ ID NO: 445595 - DNA, 122 bp, Homo sapiens
cacccagtgtgacatcaccgagcttccctcgggcatgttccctccctgggactgcccagccggcacaggaaatggctgctggatgaatgtgcaagtgagtaagtgtcttggatcctcctccc

SEQ ID NO: 445596 - DNA, 122 bp, Homo sapiens
ggccagaccaggctgggctccttgctgggcacacggaagcctctgccttgtgttggtgcccgtgcgggatgctgccaggagtgtgttggtggcgtgtgtgtgcgtgaacgtgtgtgtgtgtg

SEQ ID NO: 445597 - DNA, 122 bp, Homo sapiens
tagactctgaggtccatgaatgggatcagtatttcctagtgataacctattgtttctcaccgagaacataagaaatctttttaggtgacaaaggaaaggacattgaaaaatattagttgtac

SEQ ID NO: 445598 - DNA, 122 bp, Homo sapiens
atgatcactctgctattattccattcactgaaatttaaaatagcaatttacaacagcagccgaaaacagaagaactgcctctcttaactctgtgtgtgtgtgtgtgtgtgtgagagagagaa

SEQ ID NO: 445599 - DNA, 122 bp, Homo sapiens
cctgggaggcatgctgaagccaggcggccggcaggatgagtgtgaaagaggcaggcagctcgggccgccgggagcaggcggcctaccacctgcacatctacccccagctgtccaccaccgag

SEQ ID NO: 445600 - DNA, 122 bp, Homo sapiens
tgaacactggcccccgcggccctgagctggatccgctcaagccccggcctgccgcccagtcgcacgcagcctccgtaagatttcggaagcatagttttgggaaatttacaaagaggggactt

SEQ ID NO: 445601 - DNA, 122 bp, Homo sapiens
ctcgtcctgctccgagggggccgcggagcttccttgcggccggcgggagctgagtcacggcggccctgcaagcggttggccttatctccggacttcgctgctcccgaaagccctcagcccgc

SEQ ID NO: 445602 - DNA, 122 bp, Homo sapiens
ttctgataaaacaggtctatgcagctaccaggacaatggaatctacgttgactttagcaacggaacaacctgttaagaagaacactcttaagaaatataaaatagcttgcattgtaagtaca

SEQ ID NO: 445603 - DNA, 122 bp, Homo sapiens
aaaccatcctgctgagactggctaccccacctcatacagagtaacccaggttaagtgagacggtgcatgcacgttgaaccagagagacttcatggcatcctccagcccaaggtggcttccgg

SEQ ID NO: 445604 - DNA, 122 bp, Homo sapiens
acacatatacaactgagcaaatatttcatgacataacactttctcttactaagggtgacgcgctgaaattttgtattctgtcctatttcattttttaaaaatggtaaccatgacctgctaaa

SEQ ID NO: 445605 - DNA, 122 bp, Homo sapiens
aattcttaggaggggtttgggaagtacctgggaactaggcagtagcatctctcctagtgacgatcaaaatgtctccagacattgccaaatgacaactggaatgagggtgggtggcggtaaaa

SEQ ID NO: 445606 - DNA, 122 bp, Homo sapiens
tgagatacgaaaatcgtgctatgggctggcctgaggtttgttcactgcctcctggtggcacgtgccccgcggtctcaaagaggatccctcaggggctgtgagagcatcaggaggtagagcag

SEQ ID NO: 445607 - DNA, 122 bp, Homo sapiens
ttgaattaaattctccctgagcctcgcagtggccgtcacacgttcccctcctgcttttcgcgtctctaggatctccgagtgtcttgactacaacaaaccgttcagagttctcaagacgcagg

SEQ ID NO: 445608 - DNA, 122 bp, Homo sapiens
aaaggagaagggtgtctctgcagagggaaggaagaggctgggggaggagtgttagaggcacgcatgtgcagaatgtcctaacatgtcagtgcctgaaccaacctggctgttggccataacca

SEQ ID NO: 445609 - DNA, 122 bp, Homo sapiens
ggggcggttccccgggcctccaaacgcgaagccacgcccccacgcgcgtccgcctccgcgcggttctttctgacctcggcggcccccgtagctccgcccatcggagaagcgaccttacagcg

SEQ ID NO: 445610 - DNA, 122 bp, Homo sapiens
acccggccagccgccccgtccaggagggaggtgggggggtcagccccccgcccggccagccgccccatcgggaggtgagggttgcctctgcccggccacccctactgggaagtgaggagccc

SEQ ID NO: 445611 - DNA, 122 bp, Homo sapiens
aattgcccttttaaaaatcacagacaaatctgggcaaatagtaaagcattatttctctttcgattacagtagaaaccccgagacaactagaactgatttgctcaggagccctgtgggggaca

SEQ ID NO: 445612 - DNA, 122 bp, Homo sapiens
ctcgggtaccacgcgcctagtgggaagccgcactgacgcctgcagcatctcgcgagatttcgggctcagcccaagtactgcgagttcaccaaagcggggggaaaaaaaaaaagccagcgtgc

SEQ ID NO: 445613 - DNA, 122 bp, Homo sapiens
ggatcagtaagcattaggagtctacattttgggcagcagacgctctgaacccaatcccaccgggtcatgaataagaaaacatcattttaagagcaacaagggtgtgagagaggccaagtggc

SEQ ID NO: 445614 - DNA, 122 bp, Homo sapiens
cgccgcggggggagggtaggccgccacacgccttgcgcgcttattggacattgcccacgccgttctgcaggagggcccgcccttgtttgtctgagacactccttataggtggtcgctttctg

SEQ ID NO: 445615 - DNA, 122 bp, Homo sapiens
taaaatatccctgataaaccaaagtgcatatgcccaggacagtattgcaccttccccagtcgcgcgtgtcgctcgcatggcctcgtcaaagttggaagttaacagtcgtgagattagtacgc

SEQ ID NO: 445616 - DNA, 122 bp, Homo sapiens
ccaaatgccacagagagactggagaatgtggccttagggagaactggggatgactgacaacgtgtctgtggtgtctgagtgtgccatcagaggaagatgaagacacagccctggcacacaca

SEQ ID NO: 445617 - DNA, 122 bp, Homo sapiens
tgtccggtggtctactgcagcattgtgtactggatgacgggccagcccgctgagaccagccgcttcctgctcttctcagccctggccaccgccaccgccttggtggcccaatctttggggct

SEQ ID NO: 445618 - DNA, 122 bp, Homo sapiens
aggtaggaagtccctggttcagggaagacccagtctccctacctgaggcctgaaggtacccggccccagaccagccccaacctcttccagaagctgggggcttgcccctgggagggagctca

SEQ ID NO: 445619 - DNA, 122 bp, Homo sapiens
gcgtctgtccaattctgtagcatatactatgctaccataacataggaatcaatcagtcaccggctcagaaaggtggtggcacaaagatgttataaggtcctggattataataatgtgttgcc

SEQ ID NO: 445620 - DNA, 122 bp, Homo sapiens
cccaagccctctctgtgaattttcccatctacattgcctgcaatgtactaaagagatagacgttcaccagaaaattaaaaaaaaaaaatgccaaaggtgagaatttcaccaggattgtgaat

SEQ ID NO: 445621 - DNA, 122 bp, Homo sapiens
aaacacatagtgtttacctgcatgccaggtgcaatcttacacatattcatctaatcctaacgacgatgtatacaataggttctatcttcctcaccttaaaggtgtgagaaatgatggcacag

SEQ ID NO: 445622 - DNA, 122 bp, Homo sapiens
gggtcttggaagaaatagatgacacactcaaattgggtaatatgatgacagtgtaataaacggcaaacagtatttacaaagatgagggcaagatttgggaaaaccatcaaggaacagtgcaa

SEQ ID NO: 445623 - DNA, 122 bp, Homo sapiens
tttgttcattcattcaacaaatacttaatgagcatctatttatataccaagaacatttaacggcttcagataaagcaatgaacagaagagacagcgatctgtgtcctcatgaaactcacatt

SEQ ID NO: 445624 - DNA, 122 bp, Homo sapiens
ggtcccggtgggggtccctggtcctggggcgggtgagggtcgagcctcctctgtcttcggcgagtctgcccctgcggccagagccctcgatgtctcaactccagccactgccgcgggctctg

SEQ ID NO: 445625 - DNA, 122 bp, Homo sapiens
actgcacctgtttgcaccgctccgccgagggcgcctgggctgcggtggcggcgaagacggcgaccccgaccgtcggcctctttggcaagtggtttgtgcatcaggagaaactttccacctgc

SEQ ID NO: 445626 - DNA, 122 bp, Homo sapiens
cgtggcctccccggtgggcgggaccgtggtcaccgaggtgggcggtgccagaggatctggcggcggggcggggcggggcgcgcgtcctggcttcgcccttccccggggcggggcctccgggg

SEQ ID NO: 445627 - DNA, 122 bp, Homo sapiens
gagactcgcctttgggacccatctttgcttcctttcagttgcctcctggatcttctttcccgtcatcaaatgactgctgaacaggaaacctctttggtgctgtttcttgtgcatctgtccac

SEQ ID NO: 445628 - DNA, 122 bp, Homo sapiens
tgccctgaatcctagatttatgaggcaagagtgccagaaaacagaaattacgtcttaattcgtcctggttttgatgtggattacttttgtctagataacttcaacccagttaagctcaatga

SEQ ID NO: 445629 - DNA, 122 bp, Homo sapiens
aagcttgtgggagacacagagaggcaaaagctgagctgggaaaatggcaaggcagggaggcgccagagggagcactgcttaacacgtccgtggggctccaaggcttttaataaagggatcct

SEQ ID NO: 445630 - DNA, 122 bp, Homo sapiens
gtgcaggcgccctctcgcctggcgctgccccgccccctcccccttgccagggctccctgccgggccgacacgttggctttgttggtttttaatcatagggggggaatttaaataaaatgttg

SEQ ID NO: 445631 - DNA, 122 bp, Homo sapiens
cagatgctaggtactcagtcccccttaaatagaccttccaggaaaaatgttgtctagttccgaggttctgaatggagcatatggccagaaacaaatatcctacaaatgttgctccttaagca

SEQ ID NO: 445632 - DNA, 122 bp, Homo sapiens
acgaaatgcaatgtgtgtgatcgcttctctgccttttggctaagatcaagtgaaatgcaacgtgtgtttgagccctgggttgagaaagaaaacagctttaaaggacattgttgggaaaattg

SEQ ID NO: 445633 - DNA, 122 bp, Homo sapiens
cgaatcctttaatgagctcggtgaagaccccggggtcgctttccatgaggcaccactccccggcattgcccgtcatggccctggccacacaccgccccgatccacctctcgctctcagctgc

SEQ ID NO: 445634 - DNA, 122 bp, Homo sapiens
ggccgcggcccctgcccctttgggtgaaggagcgcttctcctttctgacatggtgcagagcgaaggaaggagagcaatggcgccgtgacactccgctgccgccaccgcgggcccggggcggg

SEQ ID NO: 445635 - DNA, 122 bp, Homo sapiens
ttcatttctacagtttacagttaccaaagaggatggcttgctcatttatcatatgaataacggtgatgatagttgctattttacaggaactaatgtgtgaggtcctatgctagaggcttata

SEQ ID NO: 445636 - DNA, 122 bp, Homo sapiens
ctggagggtgagggtgtgtgcgtggcagagtggagagaaatgaggagggggaagtcactgcgtaataaggacaatgataggaatgaagtctggctcagcacctgcttgggctgggcactaca

SEQ ID NO: 445637 - DNA, 122 bp, Homo sapiens
ggggagttgtttaacgggcaaggagcttcagtttcgcaagatgacaacagttctggagaccggctgcacaacagtgtgcgtgaactttaaattactgaactgtacgcttaaaagtgcttaaa

SEQ ID NO: 445638 - DNA, 122 bp, Homo sapiens
tcccagcaagcactgcgtccaacccgcgacgtcggaccacaaggcccagcatgccccgcgcggactacaagccccacaatgcaccgcacaccctttactggccggccccgcgctgctctcct

SEQ ID NO: 445639 - DNA, 122 bp, Homo sapiens
tcagggcctgaaaagaaggtgccttaaatatcatccaatcagagacgctgggctgggaaccgtccaatcaggaacgcagctggtgcggatagggcggcttccgggatgtggcggggcctttg

SEQ ID NO: 445640 - DNA, 122 bp, Homo sapiens
ttagtgcgtccattagcataacaaagtcaattaggcaaacctgaattttcacttttatcccgttcacagaacatcagtgtaaatggagacaggaagaagaaattggattgattctccacttg

SEQ ID NO: 445641 - DNA, 122 bp, Homo sapiens
cacgaggaaccagaaagagaccttggaagtggcagcggcagcatcgcctgacatgcgctccgaacttgcctctctggagaccctcaacgactctctgggttgggggggttattcgaggagac

SEQ ID NO: 445642 - DNA, 122 bp, Homo sapiens
tcgacgcttagtttcccctgaggagctgctctggcagccacaggccactgctgaatatcccgtttgttctccggcggcaggaggggcggctccgaggccagagccgccccctctcgtggggc

SEQ ID NO: 445643 - DNA, 122 bp, Homo sapiens
ccccggcccctacctgggcgctgcgttcacagaggctgccgcgggcgccagcgcggacagcgggtggctggtcccaaaaccttccacaacgcctgggccccagctccagccctctatctgcc

SEQ ID NO: 445644 - DNA, 122 bp, Homo sapiens
tggccaggctggtcttgaacccttgacctcacatgaactgcctccctcagcctcccaaagcgctatgttaatttaaaaaggaaacaggaatccatagcatgctttgagtgtcatcatgtgct

SEQ ID NO: 445645 - DNA, 122 bp, Homo sapiens
gctgcccccttccctgttatgtgcagatggcttccggaaagtggtccacatcgagcagggcggcctggtcaagccagagagagacgacacggagttccagcacccatgcttcctgcgtggcc

SEQ ID NO: 445646 - DNA, 122 bp, Homo sapiens
acatggaattgcactgcctgttctgtgagcgttctgatctccctggctgtaccacatgtacgccgcatacagacacactctacctctctctccctcccttcctcccgcccttcctccctccc

SEQ ID NO: 445647 - DNA, 122 bp, Homo sapiens
cctcttcccgggaaaaactcgggtggaaagaccatccgaggggagtgagccgcagaatcacgtaggggctgcagcgcccgccgccggctagccggtaatgcgcaggcacagggaggggcgca

SEQ ID NO: 445648 - DNA, 122 bp, Homo sapiens
gaggcagagccggggagtagttgggattttgctctgtcagtaacacatgtgtaagagccgcggagggagcgagcgagccggctagaggccagcgccgccgccgccgccgcctccgagccggg

SEQ ID NO: 445649 - DNA, 122 bp, Homo sapiens
tccttcactttcactgaattatcataccataaaggagacctcagaacaggtcacagccagcgctggtggtcagaatttgcttcacccctgccctgggccctatccgctgtcagctgcctgag

SEQ ID NO: 445650 - DNA, 122 bp, Homo sapiens
agtggggatgcgccagctgccccacactggagaaggctcattcaaagataacacaaatcccgcccttcgccgcaagtggattatcctcccctagagctactgcccggttgctactggacccc

SEQ ID NO: 445651 - DNA, 122 bp, Homo sapiens
gattgtttgagcctggaagtcaaggctgccatgagccatgatcttaccgtgagccatggccgtaagccatggccgtgagccacgatctactgagcctaggctgagtagtcaagtcaaaactt

SEQ ID NO: 445652 - DNA, 122 bp, Homo sapiens
cccccggacttccctgtaaatgtcagaggcccctccgctgggatagggtcggtctgagggcgcaggcgagtccctgctgacccctgacgcctccgacggggggaggggcaggccgggtggga

SEQ ID NO: 445653 - DNA, 122 bp, Homo sapiens
gaacatgcatggaacaacagctgtttgtgtagcaatatgccgagatagtcccacaaactccggtcacaggtttaaataaggctgccacgaacttggaaggcatcaaactgtcagagaaggtt

SEQ ID NO: 445654 - DNA, 122 bp, Homo sapiens
ggattttaaaaagagagaaagagagagtttgggtctgatttgaataatggcctgtgttcccgagagctttgtgctttggtaagcaatgtgggctgattattgcctcatgcttttctgaaaca

SEQ ID NO: 445655 - DNA, 122 bp, Homo sapiens
cccccgcagccggctctgcgtgaattacactttccttattgcgattcccctgccccgatgcgaccaaggggcccgcccaggagcgcagagaaaccattaaggggtcacaggaccgggctccc

SEQ ID NO: 445656 - DNA, 122 bp, Homo sapiens
ggattcaggcgcttttacgttaagggttgaatttttgtgtcaacaggcacctcgggaggtcgcctagacaactgagcggagcaactgagataacccccgctacgtgtggagtgacctagtcc

SEQ ID NO: 445657 - DNA, 122 bp, Homo sapiens
actcggtctggacgaccaccgccgactccgaagcaggaaccctcacaacccgagcctccacgaaattcaaacttgccgcaccgagccgctgattggaggggctttaaccaacacttccgggg

SEQ ID NO: 445658 - DNA, 122 bp, Homo sapiens
gaggccatgtgctttctggcccccgataactctctgctcctggcccgctatttgtacctccgagggctcgtttatctgatgcagggacagctgctgaacgccctcttggacttccagaatct

SEQ ID NO: 445659 - DNA, 122 bp, Homo sapiens
tctcttaggggcgtgtttattcagacaggcgccctcccgtttctttgcggtagacaaagccgcccaaccgccccgcgggtggcaaagtgtgccagcagccatcgttggcacctcggacagcg

SEQ ID NO: 445660 - DNA, 122 bp, Homo sapiens
ctccagccagcttcgacccccagctgtgcgtcagtccctcagctccgccccccagctgcgcggccgtccctcggctccgccccacagctgtgtgaccgccctgcggctccgcccgcagctgc

SEQ ID NO: 445661 - DNA, 122 bp, Homo sapiens
agtggggctagggcgctgagtcagccctgcaggagtccagctcccgcctgggcctagggccgccacctcccaggcccaggatggcagcggctgctcccgcagtccccacgcactccagcctc

SEQ ID NO: 445662 - DNA, 122 bp, Homo sapiens
tggcacttttttctgttcttatcttagaactcctttaggctcagcctgtgactcatatcccgtcagttgctagttctaagggaaacacacccagggaaaacctgtgggtggcatgaacaaag

SEQ ID NO: 445663 - DNA, 122 bp, Homo sapiens
ccgccagggcctagggatcacacaggatccggagctggtgctgataacagcggaatcccccgtctacctctctccttggtcctggaacagcgctactgatcaccaagtagccacaaaatata

SEQ ID NO: 445664 - DNA, 122 bp, Homo sapiens
tagaatgttttccgaatctgctaaggaccaccgataggaccccagctatggagctgtcagcgtaaatatagaggctggttacatgggctcctcaaactctcccaccgtataaccctgcttga

SEQ ID NO: 445665 - DNA, 122 bp, Homo sapiens
agatgtgatggcggcgcgaattcgagctgggcccggatcctggaggaggcgtggggctgacgaatggggcgcccgggacaaggcagcctaaagtgaggctgctggttgggtggggtagatgc

SEQ ID NO: 445666 - DNA, 122 bp, Homo sapiens
aactcctgggatcaagcaattctcacacctttacctcccaatgtgttgggattacaggtgcgagctaccatacctggcgacagtggcagtttttaaaagctcccaggtgattccaatgcatc

SEQ ID NO: 445667 - DNA, 122 bp, Homo sapiens
gcaagatgcagccgtggtttgtcttaagagtcctgaaactcagttaaaatacctgatgatcgcgtttcattaaaaaccccaaggaatttctttacaccatgagcattctacaagtttcctac

SEQ ID NO: 445668 - DNA, 122 bp, Homo sapiens
cctgcccctctagctgcttgcgggtcttccgactgtctcctgaggctcaggtctaacccccgccacctcgcccgctgagtccacctctccctgagtctccctgctctcgccacccctcttct

SEQ ID NO: 445669 - DNA, 122 bp, Homo sapiens
ccgttttcacacggacccgagcgtgacaaggccttgccgccccgcccaccaggcccggcacgcttccccattggtcaggaccccctcacgacagcctcggcgtcccgcccagccacgctcac

SEQ ID NO: 445670 - DNA, 122 bp, Homo sapiens
ggattacaggcatgagccactgcacccggccattttttttttttttttttttttaattttcggtagcaatgggggtctggctagattggtctcgaacttttgagttcaagtgatactcctgc

SEQ ID NO: 445671 - DNA, 122 bp, Homo sapiens
ctcaagtgatccacccgcctcggcctcccaaagtgctgggattacaggcgtgcaccaacgcgcccggccatttttaattttttaattgtagaggcaggggtcttgctatgttgcccaggctc

SEQ ID NO: 445672 - DNA, 122 bp, Homo sapiens
tgcagtgttcccgtgacgatgaggcaaatccaaatagtcaccggagtcgagcaaacacggcggcccctgcctcccccggcggctccacaatggccctcagagggtccgcggcagccaggccc

SEQ ID NO: 445673 - DNA, 122 bp, Homo sapiens
ctcaagtgatccacctgcctcagcctgccaaagtactgagattacaggtgtgaaccaccacgccctgctggtctttgcttttaaccgtgacagactgcagtacagcttcttgtttgtagctg

SEQ ID NO: 445674 - DNA, 122 bp, Homo sapiens
cccgtccacgcctgcgccgcgagaggccgctaggtggaaggggacttcggttccgcacgtcgtcatgttgttggatggcaccagtatgtgacgttcctaggaacttagctctgaggaaaaaa

SEQ ID NO: 445675 - DNA, 122 bp, Homo sapiens
ccttgtgggtgggcgtcaaaccccgcacctgagtctgctgcggctctggtgcctgcccggcgccattgtcagggtgggtgtcctgggccctctggataccccctgtctggccggggttgccg

SEQ ID NO: 445676 - DNA, 122 bp, Homo sapiens
accaagaaggacgccatgagagcgaaggccattgggtaaccaccctttgctctcgcgctgcgcgtctccctgccatcaaccgccactgggagcggttgagggcggccggcctcgcgctggaa

SEQ ID NO: 445677 - DNA, 122 bp, Homo sapiens
tgatcgccggagaccctgggccttggaagaagtcgcctccccagatctctaagcaggccgcgcgaccctcgagtctcaggtaagcgggaaatcccacttcacaagaaagcccctctctccga

SEQ ID NO: 445678 - DNA, 122 bp, Homo sapiens
catgcccagacacgtctggcatcgctaactcctgagatttctgcatttcctctgtactcccgggagaaaggagataagcgcctttgatggcagttcctgttttaatggttgtgagttcttca

SEQ ID NO: 445679 - DNA, 122 bp, Homo sapiens
cacggtctttcgagcctcagcgggcgggcggggatccgtggcgaaagtgcagctcagtagcgccgcggcgccacgtttaccctgcgcagacgccgtcgccgccgctgctgccgccgccgctg

SEQ ID NO: 445680 - DNA, 122 bp, Homo sapiens
ttgtcctggctgcaggcagtccgaacagtccgcttcctggaatattagccaggcaggatacgccctgggcgacagaaactccaactttcgccagcggcccccaagtactgcctgggcggtgg

SEQ ID NO: 445681 - DNA, 122 bp, Homo sapiens
ctcaggtgatctacccactttggtcttctaaagtgctgagattataggtgtgagccaccacgcccagctccaaattaaagttttagtgagatatgatgtgattgtttctgtacttagcgctg

SEQ ID NO: 445682 - DNA, 122 bp, Homo sapiens
gaattttaaagttagccagatgcagtgtcatatgcctgtaagtcccagctgcttaggaggcggaggtgggaaggattgcttaggcacaggaagttgagctatgatcacaccactgcaccact

SEQ ID NO: 445683 - DNA, 122 bp, Homo sapiens
acatcaactagacaagtaatggaggtaggagtttaagcaactattcctcctctgttccatcgactcccagcaccagccagaaggaacttcagatggatgttcctcccactgccaacacgccc

SEQ ID NO: 445684 - DNA, 122 bp, Homo sapiens
tcattttaaccacagataataagaataacaacctccttttattgagtgattactaagtaccggccctatgctaagcactctttacacattagctcacttttgctaagactgggcagggaggt

SEQ ID NO: 445685 - DNA, 122 bp, Homo sapiens
ccgctccctcggtccttcgagcagtgatccctccgcggccaacctccccagggaaaccagcgattcgcggttcagatagcgaccttcgcccgcaggttcctgctctgccttcagacttcggc

SEQ ID NO: 445686 - DNA, 122 bp, Homo sapiens
gctgtgccctcattctaggtgcattctttggctggcatatttgtgggcacagagtattcacgaacaaggtttcagcagtttatagtccctagggggcggggtgagtcaaaaacattgactgt

SEQ ID NO: 445687 - DNA, 122 bp, Homo sapiens
tcaggcccagccccctttcgtcagaccccgcccccagccctgctgagcgaccccgccagtcgggtccatcctgcagtaaatgcacaacccggacggaagtgcctctccgacagcagatccag

SEQ ID NO: 445688 - DNA, 122 bp, Homo sapiens
tcctgcgggggcagatggaggcgcgggagccttccccgggaggtgaccgaggccagtcagcggccccggggacccaaggccggggactctcggcggccggtggacgggcagggccggcccgc

SEQ ID NO: 445689 - DNA, 122 bp, Homo sapiens
ggcggccggcagggcggggagagtgcatcagcctcagagaagccatggggggctgggggccgggaccgcggcgctgactgtcccgagaaataggaaaagagaaaggcacagagcggacacga

SEQ ID NO: 445690 - DNA, 122 bp, Homo sapiens
ttctgacacaggtgcatgttttccttttaacaggagagaaaagtgaggagcagtgattaccgccacagaaatatcctttcatggcgtgtcctccggcatggtctactcagtgtggtggagcc

SEQ ID NO: 445691 - DNA, 122 bp, Homo sapiens
cacagtgaacggggcaggctcaggtaggtttcccggggggagttctgcagcaaagtaatacggtgcacccccactcatggcattttggtatgtgacaggaacctggtagcattccatggctc

SEQ ID NO: 445692 - DNA, 122 bp, Homo sapiens
gagataacattggaatgtcgtgtgtgtgggaaaacctttagcaaaaattctaatcttaggcgacatgagatgattcacactggagagaaaccacacggatgtcatctatgtgggaaagcctt

SEQ ID NO: 445693 - DNA, 122 bp, Homo sapiens
tagtattcaattgtgaatatataccacatttttcatccatctttctgttgatgaacatttcgggtgatccatattttggctattgtgaatagtgctacagtaaacatgagagtgcagagatc

SEQ ID NO: 445694 - DNA, 122 bp, Homo sapiens
ggagtcaaacccttctgaccatccaagggcaagcacaagtttcctgagcaaatctcaaaccgatgtgcgagacaagaggaagagcaaccacttaaatcatctatctccagggcagcttacta

SEQ ID NO: 445695 - DNA, 122 bp, Homo sapiens
taagctccagcttagcgggtcccaagggctccccggggcgcgccccggaagccgcagccgcgcatttcattattgccttggccgtggcctcgggtgccttcccggagcctctccgtcttctc

SEQ ID NO: 445696 - DNA, 122 bp, Homo sapiens
gacttcttctaaaataaggacaggccgggcgatcctagtctgggatatgtagagggagttcgatcaaccatgggatgaaaagggaggtggccaacctccagggttctcccatctctgcagtt

SEQ ID NO: 445697 - DNA, 122 bp, Homo sapiens
cagggctccgggtccccacgtctctgccaacacttcctacttcctgtgtttcttgatccccgccatcctattgagcgtgagacaggtcagaagctttgaagatgggctttcgtcttgtccca

SEQ ID NO: 445698 - DNA, 122 bp, Homo sapiens
tacgcagacccagtagctgacctgctggacaaatggggggccttccgggcccggctgtttcgagagtcctgcgtcttccaccgggggaactacgtgaaggacctgagccggttgggtcgaga

SEQ ID NO: 445699 - DNA, 122 bp, Homo sapiens
ggctaggtcctggtgggacccttactctgggcccaggccaaagctaaggtgtgtgggtggcgactgggggaccctggcagtcccagggctgcccaggctccaggaccctcaggaccaagacc

SEQ ID NO: 445700 - DNA, 122 bp, Homo sapiens
ctgggaagacgggctagggagctcagtggtctcaggtctggtttcagagttccgcctctgcgtgcctcagtttaccctttccccctttgcccaagggggcaaggtagagcgctgtcggggat

SEQ ID NO: 445701 - DNA, 122 bp, Homo sapiens
ggatcgggccggggagctgggctgggcgtctccaagccccctgcggtggcgaggcgggagcgacaccctcccgccacttcgcgaagtttcgcgagccggcccctcgggccgcttccctccct

SEQ ID NO: 445702 - DNA, 122 bp, Homo sapiens
tttttgtgagggcgagggaaccagacgtccacgttgtgattctgcgcgcagaagggtcatcggagtccgggggtgtcgccgcggcccccccgcccctcagagggtgtgggaatgggtgtggt

SEQ ID NO: 445703 - DNA, 122 bp, Homo sapiens
cggcctggcatgggaagcgctgggtcaggttggggcgcggggctccgctgggctccaggccgcggggtccgggcgcgaaggcggggtccgagccgtggcgcacctcgcgggacgcgctggac

SEQ ID NO: 445704 - DNA, 122 bp, Homo sapiens
tttcaacagactagagtatacggggtgaaactgcttcacttgattcaataaaatcgtttccggtaacaggccccaggaatcctagacctaagcctggcgcgaaactacatttcccacaatcc

SEQ ID NO: 445705 - DNA, 122 bp, Homo sapiens
gataccaggggtactaagaggtgcttagacaagggctggtgcccggcccagggtgcccagcggggccatgccatggcagataaagctcaggacgtcaaaaactcaccatggaccccaaggca

SEQ ID NO: 445706 - DNA, 122 bp, Homo sapiens
gccacctactctgtggccagccctgggccgggcgtgggggacatagagacgagtcagacccggaccctgccctcgagacgctcccaggtctggtggggagacagacacgtcatcaaaaagac

SEQ ID NO: 445707 - DNA, 122 bp, Homo sapiens
cctttgcagccaaagaggttctccttggagtggggtcgcctccaaaccccaaattcccggcgcttctctgcaaccgcacccggggctaggtgccagataattatcttcctctccgggagagg

SEQ ID NO: 445708 - DNA, 122 bp, Homo sapiens
aggcaggattcacagtggtttgtgattctcccctgactccaagactccaagcctaatccccgcccctgaccagcttctcctctctgaaggggaatggaccccccagctggttgccggcccaa

SEQ ID NO: 445709 - DNA, 122 bp, Homo sapiens
cccgccacagagcccgcagcacgccgccgccgcagcctaggtcacgtgagtacccacgcgcgcgtcttgccagcggattcatcaccggcctgctcagactaggttctgcccactctgacctt

SEQ ID NO: 445710 - DNA, 122 bp, Homo sapiens
cttagaagcacacagccaggttcacacggaatgtcgtggaaggacacacccgggttcacacggagcattgtggaacacacccaggttcacatggagcatcatggaacaacacacccaggttc

SEQ ID NO: 445711 - DNA, 122 bp, Homo sapiens
aagacaactggcatttctggggtgcatgcttggtgctgcctcagcacgatgtgaaggctgcgtgtgcaccgtcccatcccggagcctcccgacttctcttggggaggggatcatgatcactt

SEQ ID NO: 445712 - DNA, 122 bp, Homo sapiens
cttcccacggaggtccatcaccttcagcttcaggtccttaatctgtaggtgagaagcgcccggggctcactggagaggcagctagccacaggacacccttcctgaggacctcagactgctag

SEQ ID NO: 445713 - DNA, 122 bp, Homo sapiens
ccatgacgtctgccaggaagacagcaaactttcacatagaactggaaagatatcaatccacggagttgcaaaagaaaagtattaatagagaaatgcttgagtccagcaatggaatctgccac

SEQ ID NO: 445714 - DNA, 122 bp, Homo sapiens
acagatgatgaatgttttgacaagacatactagcaatgtagtaatattcaccaataaaaacgaagaaattacggataccatgctacaaaatagacaaacttcaaaaacattatgctctggac

SEQ ID NO: 445715 - DNA, 122 bp, Homo sapiens
agaacaagagagatatacacaagctcaatgtgactcctcactacaccttagtttcttagtcgaacttggtaggtgtgatttatatccaaaatacagtcagggattgcattttcaatatttaa

SEQ ID NO: 445716 - DNA, 122 bp, Homo sapiens
cggcaactctgggcccttacgcttctgctgttctatcatggcggcaaccggtctcttcagcgccgccactgaccgcgctgccgctctcaggcgccacgcaattggttccaaattagtccttc

SEQ ID NO: 445717 - DNA, 122 bp, Homo sapiens
gaactccttgaaagaattatctatgtttgttgtctgcgttgctatccttctgttatgtttcgaatattttagtaaggctttttcaagtgacaccaaaaaatattcttgtcagggttaccaat

SEQ ID NO: 445718 - DNA, 122 bp, Homo sapiens
gcggcacgggcgacgcaaggcaggtattgcaccctggggcaaggcaaggtggacaaccagcggatgcggcgcggccgcggcctgggcctgggccctccgcgtcgcccactgccccactgggc

SEQ ID NO: 445719 - DNA, 122 bp, Homo sapiens
cgggctgcgctaccacctgcgggaccacacgggcgagcggccctaccagtgtggcgagtgcggcaaggccttcaagcgctcctccctgctggccatccaccagcgggtgcacacgggcctgc

SEQ ID NO: 445720 - DNA, 122 bp, Homo sapiens
attcaaatcttagtctacctgactctagagcccctattccactgtgcctttaagtcaagacgaagtctcagtattaatggagaactcattttcccattagtagatggatttgcccaacatgg

SEQ ID NO: 445721 - DNA, 122 bp, Homo sapiens
ggatgtcaccatactcggtgccaggcgcgggttcatcatcaggaagtcgtgttctcatggcgaacaacttctggtgaagttctgatcaaatcacagcatgagcgactctagatttatatact

SEQ ID NO: 445722 - DNA, 122 bp, Homo sapiens
taggcccaatgctccaatgagccgccatcacaaaaggtagcaaaaaagcaaaccattcagcggatgcctccccgtaaccagcatctgacctggaaacagcgtgcagatgctggagaaggagg

SEQ ID NO: 445723 - DNA, 122 bp, Homo sapiens
agtagaggtctttgtgcctttagtattcaatagattttgatggactgcctgctctgggttcggctgggaatacgcaggtgaaggacaaacaggcgtaagggacaattgcagagattcatact

SEQ ID NO: 445724 - DNA, 122 bp, Homo sapiens
aaaacatgatggagctaggccactggaaaccctgggtactgctctcatcaaaacatgaaacggttggtccttcactgagatcccaaagatcgaagtcctgggcctactgcccagacaattag

SEQ ID NO: 445725 - DNA, 122 bp, Homo sapiens
gccgagtacgcaagttcaattatcggcagattaggtttctactctccgtgccccgccccgcgccatcctggggagcagcgggaataaatgatccgcccctggccagtgctcacccgactgac

SEQ ID NO: 445726 - DNA, 122 bp, Homo sapiens
cggtgctgctgcctaactccttcaagagcagagccgccacattcacaaagcgtctggaatcggaactgatcgtcctctctgctctttctgctttccttccaggcccttccaccgcagccatc

SEQ ID NO: 445727 - DNA, 122 bp, Homo sapiens
tggccagatgctgacacatgtgggcggtggcggtcagcgtcctccgcagctgatgggtctcgttggccaaggagcggcacaggacgtcactggcggcccgggcgcgctccccttctgccatg

SEQ ID NO: 445728 - DNA, 122 bp, Homo sapiens
ttgggagaggggtgaggtggcgaaattgacagcttcattgtccacctccgggttctagaacgtggaaaacccgcgggtgtcggctcgtggcggacgcttgagggcagggggcgctcgggctg

SEQ ID NO: 445729 - DNA, 122 bp, Homo sapiens
ccacttccttttatgggaaccctgccccaaaatgaatgacctaacaatgcaggtttctatcgcagtgccacaagccactgttaccccgagcacattttgtgacttcagggtgatttcactag

SEQ ID NO: 445730 - DNA, 122 bp, Homo sapiens
tttggactcccccagctcagcacatgagtcttctaaaatatgcctcccagagtcagtcaccgggatctgcagttgttctggtgatccatggtctgtattcactactctcgccctctgagaac

SEQ ID NO: 445731 - DNA, 122 bp, Homo sapiens
cgtgatccgcctgcctcagcctcccaaagtgctgggattacaggcgtgagccaccccacccggccaagaatagttactctttaagatgcaatgttttgccgggtgcagtggctcacgcctgt

SEQ ID NO: 445732 - DNA, 122 bp, Homo sapiens
gcagaccagcctggcagcagccagaacacagataacctcctgggcagtctgatggacagccgagtgacacatgaaagcaacatattttgatgtggctcagagcagggaaggcacggcactga

SEQ ID NO: 445733 - DNA, 122 bp, Homo sapiens
gaggtgaggagtgccagtgcggtggcttacgcctgtaatcacagcactttgggaggcagacgtgggaggatcacttgaggccaggagttcaggaccagcctgggcaacacagtgagattttc

SEQ ID NO: 445734 - DNA, 122 bp, Homo sapiens
ctgaaaactctccaggctactattcctgatggagacccccatttccgtggcggcccctgacgccggctgtcctccaggaataatctggggtccgctggtgccgccgtggctgccgttgcatt

SEQ ID NO: 445735 - DNA, 122 bp, Homo sapiens
ggagaggcggggcgaggtatctgagagggggcgtgacctgggtcttggggcggccggccccgcctgcctccctctcggtcccggtagactagacggaagtgggacagagtagaagtcaaagg

SEQ ID NO: 445736 - DNA, 122 bp, Homo sapiens
aattaatatgatcgttgttttcagtcttaactccttcgttggaatttttgttggccatgacgagcaccagagtctcctcagcttaaaagaggtaccaggtccacactgagcgagcatagcag

SEQ ID NO: 445737 - DNA, 122 bp, Homo sapiens
ttcactgcaaatcaccccttcctctcccgcctcctaagtctgtcgagcagacctaggggccggctacagttgggagggcaacgggaaagatcaagccacaatcattccgaattatcgcccca

SEQ ID NO: 445738 - DNA, 122 bp, Homo sapiens
ggaggaagcggagagttgagcggccacgcagttggggcagaggcctcggggcaggggtggcgcggactccatcgctggcgttagctctcggagtgccaggtggagcggcggaaagccagagg

SEQ ID NO: 445739 - DNA, 122 bp, Homo sapiens
cactctgcagctgtgccaggccctgccccacacccagcccaggcacccaagccctccctccggccttctctgctggggcttcacacacccagtacagagcagggaatgttctgcaagtgcag

SEQ ID NO: 445740 - DNA, 122 bp, Homo sapiens
tacaaagaggatacaacagctactcctatccagggatgtggacttgatgagagtctagcacgttcttattacctctgcatggccacaggggttttgtgggctaatatacatcgatctgggtg

SEQ ID NO: 445741 - DNA, 122 bp, Homo sapiens
tccttgaggtgccgcctaatggcaggcttgtgggcgaagcgcacgtcgcagtaggagcagcggtagggccgcgctcccgagtgcaggttgaggtggtcgtgaagggtggacttctgtgtgaa

SEQ ID NO: 445742 - DNA, 122 bp, Homo sapiens
aacttttttttctttatgcctccctccacctcagtctcctttcaggacatttgatgaatacgcaagtccaatgaacatgttgtcttttttatattcacttcagctatacaaaagagagaagt

SEQ ID NO: 445743 - DNA, 122 bp, Homo sapiens
tcactgcacgtaccaaagggaatcgggttccctcatgcatttaggaaaaaagaaagaccacgtgggtgccagatatcggggaacctgccccgatattcatgtaggttcttttctattttcct

SEQ ID NO: 445744 - DNA, 122 bp, Homo sapiens
gtcaacaaacacctagcgagcctgactcatgcctagccctatcctgggaaccgaggacaccgaggacacaagcgaactgaacacttctggtgtggttggaggcagatgcccaatgggcacag

SEQ ID NO: 445745 - DNA, 122 bp, Homo sapiens
gcgagctccgcaccgggcgggtgggctgggacgagcgcaggggcagcgacagggaccagccggctgcgggacgcgctccgcccgggcggctgcggctgaatggatccaatatggccacttcc

SEQ ID NO: 445746 - DNA, 122 bp, Homo sapiens
gctccggcaggcgaatcaggggatttctgggaaatgtagtccagacgctcagtggagtctcggtcaatttgactccggcaggtggatcccagggaattctgggaagtgtagtccagacgctc

SEQ ID NO: 445747 - DNA, 122 bp, Homo sapiens
tgcaggctaggagtgaggtcgggttgggggtaaataatccggggcgaggcgacagggccgcgctgggtggggcagaacccgagcctgggggcctcacggagacacccgcccctgtccagcca

SEQ ID NO: 445748 - DNA, 122 bp, Homo sapiens
gaggaaaagcgtccacggaaagacaaatgatccatacagtctgcttgtccacggacaagacgggcctacacgggatgtttttagggtaactgaaaaccgtctacaatcctcctgagtaactg

SEQ ID NO: 445749 - DNA, 122 bp, Homo sapiens
ggacgggcctgtttgcgtgccggggccctgcacctccccttcctcggcccccctccttttcgtttctggtccagtcccccacgaatggggcttcgtgggagctgggaacctcagccggaggt

SEQ ID NO: 445750 - DNA, 122 bp, Homo sapiens
ggaagtaatgaggacaggaaaaaagtctcagcaagcaggcaggaaggtcagatgaagaaccggaacatggttcatcactgctctgggcactcgggcacaggagctctaggcaaccatcaaca

SEQ ID NO: 445751 - DNA, 122 bp, Homo sapiens
agggcttagaggatatcctgccacatcccccttcccttccaaatatcaccccttcttcaccgagacccccacttcctgggctctgagcctctggccccagctcttgttgtttgtttgagctg

SEQ ID NO: 445752 - DNA, 122 bp, Homo sapiens
tcaaaacggggctcaaggctcttggcttggagcaggcagggttggccctgtccgggcccccggagtgactcagcccagtcctggccctctccgggactaactctcttcctctaaataaaggg

SEQ ID NO: 445753 - DNA, 122 bp, Homo sapiens
ctgcaggggcgagaaatcctgcttccaactgcgatttcagctttcttatggaaatgaacgcgacggcccgttcgccccgagcctccctcccgttcccagcccctcttcagcttaccctttcc

SEQ ID NO: 445754 - DNA, 122 bp, Homo sapiens
gggtgaaccacgaaatggatggacgtcatggtgctttccttctcgtcctccactcgagggcggccccctcccgctctcgcccgccccccagccctctacccctccccaaaacccacagccgc

SEQ ID NO: 445755 - DNA, 122 bp, Homo sapiens
ctctgccagcatgtcccagaagtgcatgtggatatagagggcagcagctgctgagatggccgtgggcattaggctatgctggagtggggacacctcaccccgactatgccagctcgcaccgg

SEQ ID NO: 445756 - DNA, 122 bp, Homo sapiens
gggttattcctgccgggtcttgctggcagccttgtcgggccgggctctggccgcggccgccggccccctctcggctgcgtggataacccggcctggagtttccgcctcaggacctggctcct

SEQ ID NO: 445757 - DNA, 122 bp, Homo sapiens
cgtgagaattcgagcgccgcaggggcaggctggcagtgctgggggacccggtgcactctccgcagctgctggctcgggtgctaagcccctcactgcctcgggccagcggtgccgacccgccg

SEQ ID NO: 445758 - DNA, 122 bp, Homo sapiens
accaggctctgggacatcagacacagcagagggtggggttaggcatggagctggaaatagcgagattagagaaagactccatactgaaagatgagattccccagcccattttactggctcag

SEQ ID NO: 445759 - DNA, 122 bp, Homo sapiens
agaacggacaaaacaggcaaaaatttaaataaaccatattagtttctacattatgctgagcgataagaacctcaaagcttcacaagcaagaatgtgctggaatactggaacttcttgcataa

SEQ ID NO: 445760 - DNA, 122 bp, Homo sapiens
cagtcttgggcctgttgcactacaagtgcatcccttaaccactagatggcctccctctcacggacagactttggactatcactaagacagtgaactgagcggtatcctaaggtgcttggcaa

SEQ ID NO: 445761 - DNA, 122 bp, Homo sapiens
aaatatcgaggcaggggcaggagaccgagggaggccacagcacaaggtacagaaatgagacgtaatgaggcctcataatttccctgtgacactttcgagtttttgcctcctcttcagagaaa

SEQ ID NO: 445762 - DNA, 122 bp, Homo sapiens
ttctggtgctgtgactcggatggaggttcgtctgcgtcattcactccagtttcccttccccgcagcgggtaccgtggcagtgccaggctgcctggttggctgccgctggtttgcccagggct

SEQ ID NO: 445763 - DNA, 122 bp, Homo sapiens
ttggaaagatgttctttttttctctatgagtaccccaaagtgtttttgaaggatgaaatgcgataggtggtaggacagaaatatttggttgacttgtccagtatgctaatggtgttggaaca

SEQ ID NO: 445764 - DNA, 122 bp, Homo sapiens
gagttatggagcacacttaaggactttccaaatgttggctgtttctaacttggcgctgagcgcctttggccgcctttccgatgatgccctcgggacgcgttggcaggaggaatccctgggcg

SEQ ID NO: 445765 - DNA, 122 bp, Homo sapiens
aaacattgtagatgtcagggcatttgggattccaggtttttgaattagggagggtcagcccgtatggcaaaaagccaggtgcagcagcctccagtctgcaggcctgaatattgggctgctaa

SEQ ID NO: 445766 - DNA, 122 bp, Homo sapiens
ggggcccaaccccagattcccagcgcccttcctcggggacacgctcttccgggaggggtgcgcctcggatcaccccccccaccacaggcccccaaaggatccccgggctagaggtgcctcgc

SEQ ID NO: 445767 - DNA, 122 bp, Homo sapiens
gtgcgcggtctggccgcgctcgggccctcgccaaatgagagcgcagcgcctctccgccttcggatccagagaaagagcttgttgctgcctctaaaaggttggagccttagtaagcggttcct

SEQ ID NO: 445768 - DNA, 122 bp, Homo sapiens
caggcttggacctgtcctctgctcctagcttgcacactcagccctaaactcagagcagcacgcataccacccctcacacacaccccaccatctgctgtctaaggcccctgggcttcctgcag

SEQ ID NO: 445769 - DNA, 122 bp, Homo sapiens
ccaatttgggtaggtacaaaagtttcacaatttagaacttttaaaaagtcgtttatttggcgtggatgggccaggactgcaggtataatttcttgccactagatgtctctgagttttaaagc

SEQ ID NO: 445770 - DNA, 122 bp, Homo sapiens
ctgttagcctacaactatctgaagtacagtcatgtgctactcaacaacagggatccattccgagaaatgtgtccttagatgatttctttgttgtgtgcacatcacagagtgcacttacacag

SEQ ID NO: 445771 - DNA, 122 bp, Homo sapiens
aggtgatccactcgcctcggcctcacaaagtgttgggattacaggtgtgagccaccggcccggcctgctctcggttttctttgtctggctagaaatgtgtctttttagatgaggctaaaaaa

SEQ ID NO: 445772 - DNA, 122 bp, Homo sapiens
acaatagctgtagaaaagccatagaggtatgtgagggacaccagcaggaggcagagccgccgagacaccaccaccatgtagagcagagggttacaaatggccacatagcggtcataggccat

SEQ ID NO: 445773 - DNA, 122 bp, Homo sapiens
ccagaaatcaggccaagggattcaaagcacatcagtggaagagaaggagaaaagaggtggcgaggtcagcaagtttggctccctgggtacgcaaggtaaggccactggggtcactaaagatc

SEQ ID NO: 445774 - DNA, 122 bp, Homo sapiens
aggaaagagagggaaactccattgtgtagatctttccccagccaagagaccgttagcatgcggtacagtaaggcagccactcattaactgtttgtttacctggcaaagagggcaggttggtg

SEQ ID NO: 445775 - DNA, 122 bp, Homo sapiens
atattaaggggaaacttcggtgggctgtttgaacgctactttaagacgtgtttgttttgacgctgtgcctctacccttggacagagtggcaaaaaaaaaaaaaaaaagtttcctccctctcc

SEQ ID NO: 445776 - DNA, 122 bp, Homo sapiens
cggaattctcagtggacatccaacctgacaaactcattacatactctcccctgtgggccacggcacctagtaccgaataaaatgagggatattaattctaacaatcagaataacaacaacaa

SEQ ID NO: 445777 - DNA, 122 bp, Homo sapiens
caaaccgggttgtgcccgtgactgacaggcaaggctccgccctactccccgcccatttagcgcctcctgactgctgaatggcgggctcgccttggtctccgtgctgattggctggcagctgt

SEQ ID NO: 445778 - DNA, 122 bp, Homo sapiens
gcagtgagagggccatggcgcttcttgcccaggaggccatagaggaggaatctgtacttgcggccggcatccagaggggtgacagtgacagagcgctcatggccctccacgggcaccacctg

SEQ ID NO: 445779 - DNA, 122 bp, Homo sapiens
gaggagaaaagccacctgagggttacaaaattatatattctggaacaattagaatgtgcacgggcgttgtggaagctgagataggagtgctgacctctgcctggcatggctgagccctccct

SEQ ID NO: 445780 - DNA, 122 bp, Homo sapiens
tacacacttctcaggccagaatttactttaaggtgacagggaattgcttcatgtgtatatcgtcacttcatttttagccctgggactcttcctatacagtggccacttgaaatggcaagagt

SEQ ID NO: 445781 - DNA, 122 bp, Homo sapiens
caaggtactaaggaagtcctcaactgcctcctagaattggaagaagatggccctattctccgtgtcatcagcctggacatttatggtgaaaaactaggaactcttatggaagggtccagttc

SEQ ID NO: 445782 - DNA, 122 bp, Homo sapiens
atctacctcaaacacaaatccctcaattgaccacagggggcgccccttctatgaatttggcgctgatagctgtgatctgcccagcacagtggggaaaacacaaaatttacagatcaggcatg

SEQ ID NO: 445783 - DNA, 122 bp, Homo sapiens
tgagacctgatgggcacacgtgggcagtggtttgatgatgtcttccatggcctcgggcttcgtcatggtgaagagtgggccatctggacccctgcattggaagcctttggtgatgtggcaca

SEQ ID NO: 445784 - DNA, 122 bp, Homo sapiens
gcccctgcacacacgcagtggggcagacaccggttggccctgccaggccctgcacactcacgggaccacgactgctcctcggatttccagggtcaaatggggtccagtcaaggaagggctgt

SEQ ID NO: 445785 - DNA, 122 bp, Homo sapiens
ggggtctctgggaggcttgctttattgttctgcagccggagcgagcggcagtggcgacggcggcggcggcggcggcggcggcggcgggcggggggcgggggtcctggggggaggggtgcgca

SEQ ID NO: 445786 - DNA, 122 bp, Homo sapiens
cacgcactcaggtacacacaaccctcacctgcagcctaggccttcaacacctgatgctcacggaactttctggagcttccagggagtgacaggagcttcccggggagctctgcatttcctgg

SEQ ID NO: 445787 - DNA, 122 bp, Homo sapiens
tgcgggccggggcgcgcacagacgctaggcggcccagcccgggcgccgctggcaccggctcgcggctcccggcaaaaacccgtccgactggctgggccactcccgcctgacgcccccccaga

SEQ ID NO: 445788 - DNA, 122 bp, Homo sapiens
ctatttaaaagatctacggcggagactccacatttctaagaagctcccggctcgtgccgacggggctgctccgcggaccacttagagaatcccgttcagggtggctcatttcgctaccagaa

SEQ ID NO: 445789 - DNA, 122 bp, Homo sapiens
acatggctctaacagcaaaagcacagagctgctctctcttggggtcctggaatgttctaacgacaaggcatcagccaggcttactcagagtggaagtggcaaccgaatgttgttacctctaa

SEQ ID NO: 445790 - DNA, 122 bp, Homo sapiens
gcccttctctctccagattcctggtgtttctgcggtaccagtgttactatgggtatccgccgctgacctacctggagtaccccatcctcatcgcgcaaggtaacagccccttccctgtccag

SEQ ID NO: 445791 - DNA, 122 bp, Homo sapiens
caaccagggccactggaggggagctcatcgtctcctcctcgctggatgagggcgagggcccgtcaagcacagctctgcagctgctgtacggcgtccacaaagcaaagaccctgctccgcgga

SEQ ID NO: 445792 - DNA, 122 bp, Homo sapiens
cgtcggctgccaggatgaagttcttgacgctgatcatctggtgtatgtagagctgcgtgtcgatgaaggccatgcccgtcagctcgctggcccgcaggctccacaggaaaatctgggggcga

SEQ ID NO: 445793 - DNA, 122 bp, Homo sapiens
gtggctgctccacccagtctggggccccaagccgggaggactcacagtcagagggctccccgccctccccaacctcccccagaaactggtccctaggatccagcaagggggctggggtgagg

SEQ ID NO: 445794 - DNA, 122 bp, Homo sapiens
gacttagttccaggtgctaaaacagtgttaccttggcaggcttcccatcaaatattgttgcgcaaaggatggatggatgaaaggaagagtgagccaataaacgagggaacgccgggaaaggc

SEQ ID NO: 445795 - DNA, 122 bp, Homo sapiens
gggggtcacgccgggcctcggatttgggggtcacgcccgacctctgggatttgggggtcacgcccggcctctgggatttgggggtcacgcccgacctctgggatttgggggtcacgcccgac

SEQ ID NO: 445796 - DNA, 122 bp, Homo sapiens
ccacccggatgctgccatcccctccggggagcggacatgtggctctgagggctcccgctccgtcctggacctggttaactacttcctgtcccccgagaagctgacagcagaaaaccgctact

SEQ ID NO: 445797 - DNA, 122 bp, Homo sapiens
gggtgggtggggctgctcaggccctgggcctccgggggccccttgcctgcgtccccatgccgccttttagaagcagacagggtgagctctctggccctgaaggtgagcagagatggaatagc

SEQ ID NO: 445798 - DNA, 122 bp, Homo sapiens
tagtgaatgtatcatatgcactttttttaaagttattccttagtaccaagatgtccaaaacgaaagcctgggaaagagctctgattttgacttcccatgctgctgagcctaccgaaagctct

SEQ ID NO: 445799 - DNA, 122 bp, Homo sapiens
cccagaagagggagccaggcaagactgctggggcaggggtcggctgaagcagcggggagccggaccccacccgccacccgccacccgccacccccggcgcctgccaaactggttgctgcctc

SEQ ID NO: 445800 - DNA, 122 bp, Homo sapiens
atcctggtccttgtcttcacctgatctgcttatgctcagaagcccaaagcacccaaattccgctgcctcagcataacctcctatcccgcatcccccacactgatcacaacacaccgcaccat

SEQ ID NO: 445801 - DNA, 122 bp, Homo sapiens
aaaataaaataaaaccttaggactgatgactctttcttatgaactgcattaaaaagcatccgccctggaaacctgtgcaatctgtactttttgagaattgccactttaattagggcatgagc

SEQ ID NO: 445802 - DNA, 122 bp, Homo sapiens
ttccagtaacgctgtaattacataacctcatattgcttttctttttaatttgcagtccatcgtcttggttacttcattcccagaacccaaggacttctcttcatggtagtcagggcatagtc

SEQ ID NO: 445803 - DNA, 122 bp, Homo sapiens
tcttatactatcgttttctttccttattattataacactcttgtgcaaactagtctagggcgttttttagggttacggtgataataacaaagtgctctaacaattactattcttaccagcca

SEQ ID NO: 445804 - DNA, 122 bp, Homo sapiens
ttgtccttagggaggaagactcgaccaggaaggggacctggttcgtttcggcttcaagagcgcctctccgctatttccgtcgctcagcagaccggctgaactctttggaggagagagtgata

SEQ ID NO: 445805 - DNA, 122 bp, Homo sapiens
tgggacccggcgcaccctccatagctgctggcctgggtgctaacaatgcctggggccagccggccgctctgagtgtgggcccaccgagcccacgcccatctggaactcgccctggcttgcaa

SEQ ID NO: 445806 - DNA, 122 bp, Homo sapiens
ggttttatgggagagaagaagataaattagatgtaatagacacactgtcaacaatcttgccggctggtggcttggcatgaccaaagggaggataagtaaaagcctcccggaccagggtttaa

SEQ ID NO: 445807 - DNA, 122 bp, Homo sapiens
tgttgaagttgtcgtggggcccgaagacgttggtggggatgacagcggtgaaggtgcagccgtactgctggaagtaggccctgcggaggcacagcgtctcctgccctcgtcctgggcccgcg

SEQ ID NO: 445808 - DNA, 122 bp, Homo sapiens
tcgaattggacttggtcacgaagagtttgttcgatgagttcgggagaattcggctacgtccgattgagctcgggagacttcggataagttcgagcttgttcgcctaagtccggttacgctcg

SEQ ID NO: 445809 - DNA, 122 bp, Homo sapiens
tactgggctgaggcgtctgtggagaggtggcaccggggctgcagagggcggctggggttccgtcgtgtcgggtgtcacttcaccttctgtttggccgctcgatgaggtctcgtgttgagata

SEQ ID NO: 445810 - DNA, 122 bp, Homo sapiens
gaggcactgctgagcagcaaggatgacgtcggcaagagcgtgagcagggcccccgctccccgggacacactgggtgaggggagacacgtacatgcatgtatgctttcacacatagaacatga

SEQ ID NO: 445811 - DNA, 122 bp, Homo sapiens
acctgccagtcacagcctagagcaagggcgtctacagagactgggagttggggcagtgggcgtggggggcgcttgggccccaggcaccggaccccactgcctgccaccctcgacgcccccac

SEQ ID NO: 445812 - DNA, 122 bp, Homo sapiens
ccatctctacaaagaatgtggcacaatgtaggaactcagtgaattttcgtgattaaaagacgagataatacaggtgcacaatctgcaaaacataaaatactccataaatggaagcagtaaat

SEQ ID NO: 445813 - DNA, 122 bp, Homo sapiens
tgccagatccaacaatttctccgcggcgacggtagcagccgcagggccaaagccggcttccgtgaggtacgtctacttccggttaacgaaccagggggctggcaatctcttccggttcgtct

SEQ ID NO: 445814 - DNA, 122 bp, Homo sapiens
aaaaatttaaaaaaaagaaaaaaaaaatttaaagaaaagaaatacctgacacagaaaaagcgttcaataaatatttcttgcatgaataaaagtactttcgctgggacatttttctccacacc

SEQ ID NO: 445815 - DNA, 122 bp, Homo sapiens
tggaagggcatgtggagtccacagcgccccctcgccctaggcggggtggagacagcgagacgacgcccatgatcagctggttacaaaactcgaggaataagaagtttaatatttattggtct

SEQ ID NO: 445816 - DNA, 122 bp, Homo sapiens
ctcaagagctctgaaaagagatcgagggcgcctctgccgatcttgaacatctctgctcgtcgctggggcttagaggtgggcagggggtgccaaaggggcgcaggcaagacccggccagaggg

SEQ ID NO: 445817 - DNA, 122 bp, Homo sapiens
tctcttttccacctctaagtccagccaagccagcctggttctaagcaagtcatagaaaatcgcgagcataaaggaagaggtttcaggttcttgcagctggctttggggctcaatttctgcca

SEQ ID NO: 445818 - DNA, 122 bp, Homo sapiens
gaggaggaaaaattgagacttactcccactgtttgccggaatgtgaccccaggctggcttcgagttgtcaaatgttgtatttctcattttatgtcagtgagtctggaagcaaaaaaggtaga

SEQ ID NO: 445819 - DNA, 122 bp, Homo sapiens
aatgggggtggggcaataaaggccgcacccaaaccatcccagattaagcaggggttcaaccgtggtggggttcagcggctgtaaacctcataaagctgcagacaccctcgtgtgcctgagtt

SEQ ID NO: 445820 - DNA, 122 bp, Homo sapiens
ggtctccgaaggtgagatgcaggctctggggcgtgcagcggcccttctccaagccactctcgggctgtgctgtccaaggctgtgcgggaggagggcaggtgggaaggttctgacgttgcaga

SEQ ID NO: 445821 - DNA, 122 bp, Homo sapiens
gctgctgtgccaccgccgccgcggctgccctatttctgccgccgggaccggagcccgtgacgtcaccctctgggccccgcctgcccaatcgccgccacctgtgcgcgccgcccgcccgccag

SEQ ID NO: 445822 - DNA, 122 bp, Homo sapiens
ccgaaggccctctattgatggccctgggatttttctgctcgtcagtccggagtcacttaccgggcaccactagaagaacccgggatgaaacattttctcccgtgtcttgactctctcctttc

SEQ ID NO: 445823 - DNA, 122 bp, Homo sapiens
ctggtagaccctgtcatactgcagtggtgcattcattaaaactttcatggctggtgtacacgatgggataccaatagaaaagaatccagccatggactgcagaaaaaaatgcagaggtaggg

SEQ ID NO: 445824 - DNA, 122 bp, Homo sapiens
tcacgtcacagaaatcttagcagaacctcatcatcgcccaagggaactgggagtggcgggcggggaggacgcgggttgtgtgacgatcaccgataattagttggtggttaacgcacaagtag

SEQ ID NO: 445825 - DNA, 122 bp, Homo sapiens
ccagctttccccagttaggacttgatgcaaacagtatgtgttgaagaatgttttgtatgacgtgttcggtagtcatttttcatcatgttcacttgtaatgaatttcagcattttccacattg

SEQ ID NO: 445826 - DNA, 122 bp, Homo sapiens
acacttgttgatcattgccaaccccaccagatgagacagaaaatttgaaggtgactggaacggagaagaatgtccttcctcagttatgagtaagtttcacaattgtcctctgtcaaggtgct

SEQ ID NO: 445827 - DNA, 122 bp, Homo sapiens
tttaatagaatctcttgtgcataacaaggcgagacatggagaacactttaaggaataacacgctgtgtgtttgctcattttcccaagtccctggagtgtaccacactgctttactcatgtcc

SEQ ID NO: 445828 - DNA, 122 bp, Homo sapiens
gaagggcggccacccacagggggcagcattgggccactcctctcccgcggattcatgcagcgaggggagcgactcaggatggccagtcctgatttttcaagagaggcaggaaatccagattt

SEQ ID NO: 445829 - DNA, 122 bp, Homo sapiens
ttgacactcaggggctcctggggtcccgatttatctgctaaaacatcctctagccaccaccgaataaagcaaccacttgccacccaaccacaagagcacagcctgggagctactccaaggga

SEQ ID NO: 445830 - DNA, 122 bp, Homo sapiens
cccgagccagaccgacaaggcgtacagtctgcaggcctgtacgagcagcaggccaattggcgctgggaaagtccaatcctgggcctctagctcctgagcgggacagggccgagagggcgctc

SEQ ID NO: 445831 - DNA, 122 bp, Homo sapiens
ggcaggccccgaaccggcacgcccccgtgagcccgccctcgaaatcactcttaaagggtccgctcctggctcgcgactccccagttccctagcccagaaaagcggattggagcccgggaagc

SEQ ID NO: 445832 - DNA, 122 bp, Homo sapiens
gattagagaagagttatgtgttgctggaaaagtcagtgttttcactagtttccctccctgcgaggcacagtgaaatgtcctttcactgatatcttatcaccacatttgcacgtgaaactgtc

SEQ ID NO: 445833 - DNA, 122 bp, Homo sapiens
agccgcggtccccggcctcgctggcaccagggatcggttcaacggaagacagtttttccacggatgggatgggggtggtggggggatggtttcgggatgattcaagtgtattccatttattg

SEQ ID NO: 445834 - DNA, 122 bp, Homo sapiens
agccactgtgcccggctggcagaggattttaattgttgacagaatttcgctacatacagtcggccctctgcgttagctggtttggaatctgcagattcaaccaaacatgggtcagagacatt

SEQ ID NO: 445835 - DNA, 122 bp, Homo sapiens
aaccagcgtgaggacccacaggcggccctggcagagcttggctagggcgtagcggggacccgccccacctgcgccgcgggatggtgcccagaggggacccctcccactggattcctctgggg

SEQ ID NO: 445836 - DNA, 122 bp, Homo sapiens
aaactcccaaagaattcaggaaggaagataacttaaaactacactgaagaacgttacctgcggtgcacgtcacagctgaagagccagagttaagctctaaattaagatcagttgcaccgctc

SEQ ID NO: 445837 - DNA, 122 bp, Homo sapiens
gcccaggaccgaggcctgtaaccccaaattctgatcgcaaacatttgattaagcttaagacgtctgatttcttctctcggggaaacaactcaagaccctcccccgagggccggaggtggtga

SEQ ID NO: 445838 - DNA, 122 bp, Homo sapiens
ccagggcctgaaagcttaaggggttgagcaactcctcccttctcaggcccagccccagggcgcaaggccgcttgcatcagcagcgtgcgtgagcagatgcgccagcaagatagcaaaagcag

SEQ ID NO: 445839 - DNA, 122 bp, Homo sapiens
aagatttcgagcagaatttatctaaatgtgtttcaaggaaacacaatcgctgaaccaaaacgtactgcagccgagccccctccgtccatcctctgcccctccccctggcttctttctcttgg

SEQ ID NO: 445840 - DNA, 122 bp, Homo sapiens
gagaagcttcctgcagtccctgggtgccactggctggctctgcggctttcttggagggcccgcggcctcagcccggctccctccctcagctctggtgcgtggccgcagatgacccgagcggc

SEQ ID NO: 445841 - DNA, 122 bp, Homo sapiens
tccacctactcttttcttgcattcagtcccatggcaatattcagttccatgataatattacgcagagccacaggcagtccttaagacaccacattgcaaactgagttgactagatgcaaatc

SEQ ID NO: 445842 - DNA, 122 bp, Homo sapiens
acgtggtgccgcgcggtcttctgggaatcgtagtcccctggttcgggcctgtctttacggcgcaggcgtattcacatggaggccgtgttgctgttaatgcgcatgtcccggaatgcggctgg

SEQ ID NO: 445843 - DNA, 122 bp, Homo sapiens
ggttgttttcaccttctggctgttgtgaataatattactgtgaacatgggtgtacagatacgtatttgtgtccttgctttcaattcttttgggtattggcccaaaagtagaatttctggatc

SEQ ID NO: 445844 - DNA, 122 bp, Homo sapiens
tgctcttgataaggtaggtgcgtgagggttgtgacttgcctgtagtatgtatggatggggcgtttgtctctaactatattccgtgtaacgcaggcttgtggtcgcttcataaacaacaacgc

SEQ ID NO: 445845 - DNA, 122 bp, Homo sapiens
agcggaggctttccggaatcccggctccaccacgaacttcaaggcgccagcgtcccaccgcgagtcctgacacgagggctgccttcaaccggcaagcccatctcccgctggttaccagggga

SEQ ID NO: 445846 - DNA, 122 bp, Homo sapiens
gggtgggggaagcgggttccaggcgccgggcctcactaggcgaggcgcagacggaagaggcgtctctggaggtaacttttcgaccttcctgggagtagctctgaagcgagggggcgtggcct

SEQ ID NO: 445847 - DNA, 122 bp, Homo sapiens
ttctgcaagtgggaataatactcccattaagttgttatgagattaagacttaattcaggccgggcgtggtggctcacacttgtaattccagcactttgggaggccaaagcaggtggatcact

SEQ ID NO: 445848 - DNA, 122 bp, Homo sapiens
ttgaggatgaaagccacaggctacagatggtggaaccagaatggggaggagacttgtcctcggcgatgtcctgaagcagctgccccagcgctggatgcctactgacctgggaagagcaaacc

SEQ ID NO: 445849 - DNA, 122 bp, Homo sapiens
tatgcgaaatggatccctgtggcaggcattactcagaatcaccaagattcctagaaagtacgatctagaatcttggtgattcctagaaacataaacatagcccttaaagttaggcaatgacc

SEQ ID NO: 445850 - DNA, 122 bp, Homo sapiens
ccggaagcaagagcctggaccacagagcagatcaccagcagcatatggctcacgtgtgggcgaccaacaccacttgaaaagcagaagttcataagacagaaacacatatgagcatccgcctg

SEQ ID NO: 445851 - DNA, 122 bp, Homo sapiens
tgtaacttgcccagagttggggacagggtctatacggggtggaacaccgagaacagatcccggccaaggatcctctctccagtgcatgcaccattccttctccttcgcctctccctcctcca

SEQ ID NO: 445852 - DNA, 122 bp, Homo sapiens
ggcaacagagcgaaattccgtctcacgaaaaaaaaaaaaaaaagttccaggaagaataaacgactggattcttcagaaatgccaaaacacgggagggcataggtcaggaaattaaattagct

SEQ ID NO: 445853 - DNA, 122 bp, Homo sapiens
cccacgcggtgggggaggcggctagcgtggtggacccgggccgcgtggccctgtggcagccgagccatggtttctaaactgagccagctgcagacggagctcctggcggccctgctcgagtc

SEQ ID NO: 445854 - DNA, 122 bp, Homo sapiens
gtcaggtgctagtgccagaatttgcatttcaacaagtacccagtgtgattctgctgcagacggtctttgaacatcactggtttaagggacagggatggggctggacaccaggaccctaaata

SEQ ID NO: 445855 - DNA, 122 bp, Homo sapiens
cgcaagtgatccacccgtctcagccttccaaagtgctgggattacaggtgtcagccaccacgcccggccctaaatatttttttaaaagttggatttttcatggtgcccaagggaagagacac

SEQ ID NO: 445856 - DNA, 122 bp, Homo sapiens
acaaggtaatggctccactgcattccttgctgccgctaatcctcaccacagaaagggaaacggaggtgcagacaggcccatagcagcaccaggcctcaaacctgggcggtgccttcagagtc

SEQ ID NO: 445857 - DNA, 122 bp, Homo sapiens
cccaggctggcatgcggtggtgctatctcagctatctgcaacttctgcctcccgggttcacgtgattctcctgcctcagcctcccgagtagctaggattataggagcacaccaccatacctg

SEQ ID NO: 445858 - DNA, 122 bp, Homo sapiens
tgaaggtctgctccgagtcggtcgggtccgaagcgctcctctctgccctcggggaggccccgaagccccagacctggcagcccttcctggagttgcacagacccacctggctcctcctcccc

SEQ ID NO: 445859 - DNA, 122 bp, Homo sapiens
gctccggaggttcacctcggagacaactgcagtgtactgtgtcagattacaaactgggggcgagacggagggagggaggagggggagagggagagaaggagggagggaggagggggagaggg

SEQ ID NO: 445860 - DNA, 122 bp, Homo sapiens
acatagcggagacatcacccctgactgagctctgagggttgcagagaggctcacgcacagcgtaggggccagaaagcagaccaagaagatagaaggagctccctgtttctcaaggctcccaa

SEQ ID NO: 445861 - DNA, 122 bp, Homo sapiens
ttcgcataactggcaaaacgcgtttccgccaacgatagcgtcacttccggcgtctcaagccggcggtgaggagaatagaaaacttgccctcacttaagatggccacatcctgcctttgtcct

SEQ ID NO: 445862 - DNA, 122 bp, Homo sapiens
gccgtgtctgcagtgtggccaggggcgggggctgaaaaggaggcggccggagaggcgaagcgagctgcgagccccgggcctgaactttcacctctcgaacccgggcccagcccattggctgc

SEQ ID NO: 445863 - DNA, 122 bp, Homo sapiens
aataaaaggaaagttctttaaagtgctacacaatcttgtattcaatgtcactcccatcatcgggcttagaaaaccagtcccttttcatgtgaatgtggtaaattgaatttaaatttgtatat

SEQ ID NO: 445864 - DNA, 122 bp, Homo sapiens
ctgacaggagccagggttggggcgggggctgggcagggggaaatcgcttaaccccgaagccgccactagtctttggagcccctgcattgacgggggccagctggagctggctgaggacaagg

SEQ ID NO: 445865 - DNA, 122 bp, Homo sapiens
gtggtagccgagggcggaggcgacactctcaggtgagctcctgtaggacctggctgggaccgcggagtctcgctcagcctcaactgtctctgtccgcggtcccgggtccccggtggcggcaa

SEQ ID NO: 445866 - DNA, 122 bp, Homo sapiens
tttgacagactttggtttatcctttggtctttcctgggcttgtggatttactggtgaccgcggggaaaagttctctctctttagctgtgatcagcctgtgggttccgtaccccgtgtgtgaa

SEQ ID NO: 445867 - DNA, 122 bp, Homo sapiens
agaaaatcaatgggtagtggagttgtttaaccaaatcaacctgtcccccgtcgcgggtgtcgttagccgctgggctgttgggcagccccaaagccagcgtctggtccctgccgctcctgggc

SEQ ID NO: 445868 - DNA, 122 bp, Homo sapiens
caggttgcacatattactgcctgttgtatatcgtatgttgagtatgatcaagaggcaatgcgtatagtgaaaataaaagatctgggctgtggatctagctctcctacttactcatgtctgta

SEQ ID NO: 445869 - DNA, 122 bp, Homo sapiens
gtggatccgcttccttctcggcctccctttcccatccctgattggctgcgaaggctatcgcgtcattcgatggctcctcccaactcccaacttccgcgacgcaggaagcgcccacaaaggga

SEQ ID NO: 445870 - DNA, 122 bp, Homo sapiens
ttttctcgccccgttcgcatccataatagacgcgaacagagtcgtgattgttccctgttgcgggacattctgcgcctgaatgagcgggggctgctgtgtcgacgcggatttgccatatggtt

SEQ ID NO: 445871 - DNA, 122 bp, Homo sapiens
ccaaaccagtgccttaggagcctagatctgagcaacgtggacactgggcttgcggagacccgagggagggagcgctgaagcggtgcgggctgccgggggtagaggggcggggaccgggaaag

SEQ ID NO: 445872 - DNA, 122 bp, Homo sapiens
tcgggagctgagggacccagaaaagcaccaaaactctttagaaggactgagcatcccttacgtccaaaccaatggggcaggagcaaggcttagggagggctggagaatccgggagacgtcga

SEQ ID NO: 445873 - DNA, 122 bp, Homo sapiens
agacagctgcctagcccctgcgggtgaggccagggcaagtgtggccaggctcacctccaccgtcctctgccggtccacgcccagggtctgcatgatacccagcgcctgctcatcgtagtcgc

SEQ ID NO: 445874 - DNA, 122 bp, Homo sapiens
cgctaggcaccgctgctataaatagggcggggcgccgcggctctcgaggggcgggatgggcggggagacgtctgcaccgcccccttaacccctctgtgccgggcgccaccgccccccgcgag

SEQ ID NO: 445875 - DNA, 122 bp, Homo sapiens
caggctggagtgcagtggcgtgatctcggctcactgcagccccaaccttttgggttcaagcgatcctcccacctcagccttgggagtagctgggattataggtggatactaccacacttggt

SEQ ID NO: 445876 - DNA, 122 bp, Homo sapiens
gccctgggacccaaatgtcataaaacactcatgcacttcccaggggctcagtgtaaatggcgcactcttggcacacctgattttaacacttgtcaagcagataaggccttgagaaaatttag

SEQ ID NO: 445877 - DNA, 122 bp, Homo sapiens
cctgtgaagctctccagcatcatcgaggtcccatcaggtggggaaagatgctgttccaggcgcacactagtctacaaggccagagctttctggaagggggcagtaagtacctcggctccctt

SEQ ID NO: 445878 - DNA, 122 bp, Homo sapiens
ggcgcgcggggctggaactactgctctgtgtactccttcccaccttcagagaggtcagttcgagaggtgtgaatatccggagaccggggagaaggaagccgcaaaattcgtcccagctgcct

SEQ ID NO: 445879 - DNA, 122 bp, Homo sapiens
ctcgatccagctctgtgattctaactctagcaaccctgttttttccattacaccatagggcgcgctctccccatgctcctgagagcaggacatagactatgccctgcgcaggcagccgtccg

SEQ ID NO: 445880 - DNA, 122 bp, Homo sapiens
gcgcagaaccgagaggttctgacgatccgcagctcccacgctccccttccggccccgcagcgctgtgaactccatttcccagaaggccttgtatcccgtgcatggccgtttccaggcaggaa

SEQ ID NO: 445881 - DNA, 122 bp, Homo sapiens
ttaccacgacatcgtgccacacacacacgctcgcggccgcccgggccacaaccacgggagcgcccacgagacccctccagcgctcgccgcacgcctcggccccgcccccggtaagaggcccc

SEQ ID NO: 445882 - DNA, 122 bp, Homo sapiens
ctctgcctccaggaatgaaatggccccaggagaggagtcccttccttagctgacaatccccgagccttcaccaccctgacagcttactccctttgggtcttcttcctcttgatttgtctcta

SEQ ID NO: 445883 - DNA, 122 bp, Homo sapiens
ctgggggcgggaagaccaaccagccgcttcctgcagctgccaccagctgcgcccggccaccgcggggcaccctctgccggtcaataggagagagaactacagctcagctgccagctgaccgc

SEQ ID NO: 445884 - DNA, 122 bp, Homo sapiens
ggatactcatcctggttctggtaaagaagtgagggtaccagctactgccttgtgtgtcttcgtaagtatgcttcagccccgaaccctaccacgcttgatatggtgacagagcctggcaatta

SEQ ID NO: 445885 - DNA, 122 bp, Homo sapiens
gaccaatatggtgaaccccctgtctccactaaaaatataaaaattagctgggctcggtggcgtgcgcctgtaatcccagctactcaggaggctgaagcaggagaatcccttgaacccgggag

SEQ ID NO: 445886 - DNA, 122 bp, Homo sapiens
cgagaccagcctggccaacatggcgaaaccccatctctattataaatacaaaaattagctcggcatggtggcgggtgctgtaatcccagctactcaggaggctgaggcaggagaatcacttg

SEQ ID NO: 445887 - DNA, 122 bp, Homo sapiens
ggaagagacctttttttcgtagttaaaatatttacaaaacctttgtgaggtcatagctagcgctttgtgctgaactggattgtggagccctgggctagcactgtgcagggcatgaaagacca

SEQ ID NO: 445888 - DNA, 122 bp, Homo sapiens
ctggttttcctttgcttgtctgcctgctagacgtggacatttttcatttacggttctgcacgttacctcggatgcctgcttggctttccttaaagggagattcatttctctgagagatgatg

SEQ ID NO: 445889 - DNA, 122 bp, Homo sapiens
aaaaacggctctttcctggcccacggggctccatgctgcatgcaggtcctgcacacaggccgggctctcatgagctctctggagacccactcttcacaatgacccctgtgcacggcgacctg

SEQ ID NO: 445890 - DNA, 122 bp, Homo sapiens
cccaccctggcttcccagggcctccgggtgtgagatcctcccccactgcagtgccccacccgctccccacagaagcccggagagtggctctgtcaccagaggtgtcatttcccagctgtctg

SEQ ID NO: 445891 - DNA, 122 bp, Homo sapiens
gcctgatcttgaacagaaacctgactgtaattgtccctggatccaggtcccagacaaagacgctggaaggaggtccctccagcccctggctcagggcccggtcagctgctggagccaggcag

SEQ ID NO: 445892 - DNA, 122 bp, Homo sapiens
ggaaggcggccaaggatccacctgcctcccctcagacgcgctgctgtttaccctgccctccggctcacagcactccgccgccagctgtcactcaagacacctgagacgcggagatcagggcc

SEQ ID NO: 445893 - DNA, 122 bp, Homo sapiens
tactttatatagtaataaatcggacctgattgggaactctccacaccagctgcatccggtcggccgattcacagaccttgcgccctgcccacgacttcaggaaaaaatggaaaagggggtac

SEQ ID NO: 445894 - DNA, 122 bp, Homo sapiens
aaatctcagcaaaggatgggatgggtacctgtcctcagcttgcatttcctaagatattcacgcagagccagcacctgggcggttaaggtggtagccctaacctcgtttctcctggttccagg

SEQ ID NO: 445895 - DNA, 122 bp, Homo sapiens
acatacccaagtcttgtaagtctcagtttcctcctttttaaagttagcctaaaactacctcgctcatctaatggtgtgagaattaggtaaacagccaggtagctcatcaaattgtaattatt

SEQ ID NO: 445896 - DNA, 122 bp, Homo sapiens
cctcctgcgccctggcccgcgaggcggcctcaccatcaccaccagggactcgctgtgaaccgatgggagtccccagccgcctccccagcaactgagttccaagggggccgccatcttgcgcg

SEQ ID NO: 445897 - DNA, 122 bp, Homo sapiens
gggcgccgccggggactccatcaaggccatcgcatccattgccgagaagtactttggccccggcttcatggggatgcaggagaagaagctgggctcgctcccctaccactcggcgttcccct

SEQ ID NO: 445898 - DNA, 122 bp, Homo sapiens
agcaatttgggggcaggtgtgagcacctgcatcatcaggaaagaaggggcacggtggggacgcaggtcagacctctcacaggtcttggctctgcccaggagacacgtgtccaactgagaggt

SEQ ID NO: 445899 - DNA, 122 bp, Homo sapiens
ggctcttctgaagcggaggatcccgggacgagaaatgctgcccggggggcttaaggtagccgacgatctccttgctacatcctgtgtccacgtggcagccgaggagggggtgtgggggccgc

SEQ ID NO: 445900 - DNA, 122 bp, Homo sapiens
tcggtttgcccatccgcaaaatggcgcctcgtggtaccgggtttcccgggaggagctcggcgagttctcagcgctctcgagggatccttccatttggcgttcgcaagattgtgagaaagtga

SEQ ID NO: 445901 - DNA, 122 bp, Homo sapiens
caggccagccccctcctgatttcgacccgggcctgcccccggagctcacatccccgcaaacggcagtcctacctgagctctgcccccagccacagggctgagggggcaggcgggaggaggcg

SEQ ID NO: 445902 - DNA, 122 bp, Homo sapiens
gaccactgtctttatagaggagttgtctcttatcctccagggaaccagaaataggcaggtcgaccaggcgtcggcccctccgcctccgcctggccctgtgctccccggggcccagcgccccg

SEQ ID NO: 445903 - DNA, 122 bp, Homo sapiens
agtaaatgtcattttataagatcataacttttgtatcagcattttaaaatctgataagaccgctatttggaaagtggtgtagttggggaccccctacacattgttaaatgagatgtgttaac

SEQ ID NO: 445904 - DNA, 122 bp, Homo sapiens
cggagataaagccgagcacatgtatcccatcaaagtaatgaaagccgcctgccgccaggacgccctgctgcctccttcctagccgccctgccgccccgcaggaaggctgattaacccttgcg

SEQ ID NO: 445905 - DNA, 122 bp, Homo sapiens
ctttctgtagctcttctgaagccatgggggctgggtcaggccgaaggcccgagctgcagccgtgcagaggaaggaacaggaaacgccgcgccaagccctcaaaccgagcgcagaggcctacc

SEQ ID NO: 445906 - DNA, 122 bp, Homo sapiens
gccgcggaggggaggcgggaggcgggctctttgcggattagcataaacttggggccgcgccgctcgccgccgccagcccctcgccccagctccgagcggacggccgaggagccgcctgcgaa

SEQ ID NO: 445907 - DNA, 122 bp, Homo sapiens
ctctgggctcctggagggcaaagctgggggtggtggggtcctgcagagcggggccgagcccgcccgcagcgcctggggcctggggagtgggtggtagggtaggactggtgtcacgaagacgc

SEQ ID NO: 445908 - DNA, 122 bp, Homo sapiens
cacagcctctaaaatccctgtcaaatgaaaattcagagaagacaatacactatatatcctcgtgcagaatgtttccattccatccctggaaaaatatgagttaatccgcgtttctatggctg

SEQ ID NO: 445909 - DNA, 122 bp, Homo sapiens
ttagttttgccgtcggtgggcggctggtgttaaccagctcaattagacactctggcttatcgcaaggacagagagctttctgtatcccggggttcttgccttggtgtaccaggagaattaga

SEQ ID NO: 445910 - DNA, 122 bp, Homo sapiens
catatctttccatacatccatttctgaagtattcaggaatgttttcataatcgaaagaaacgggtatccaaataaaaccaagttcttgacattggtctgttttgctgtgaatattggaaatg

SEQ ID NO: 445911 - DNA, 122 bp, Homo sapiens
cacaatcactgttgctcagtgcctgcctcttcactacatcccaaaaattcaccaagaaaacgaaggcattggtcagaaaccccactgcaaactccaggactgaaatgaacagaaatgtactc

SEQ ID NO: 445912 - DNA, 122 bp, Homo sapiens
gtgaaggtgcagaagaggggctgacgcctcctcgaggtacagattccccagcccaacctgcgtccctccctcttctccggccacgtcgccctcccggggtgctggccgtctgctccccacgg

SEQ ID NO: 445913 - DNA, 122 bp, Homo sapiens
tgctaattacaaaaacattggtaatttctgtctctttcatgtgtccaggcttctggtcagcggcacagtgtgaagtgaggtcagcttgcttgctgctctgtgagggacacaggtggtggggc

SEQ ID NO: 445914 - DNA, 122 bp, Homo sapiens
ggccgctgcccgtcctcccagcctctttgtatgccgcagacatggccagccagcaggattcgggcttctttgagatcagtatcaaatatttactgaaatcctggagtaatagtgagtaatag

SEQ ID NO: 445915 - DNA, 122 bp, Homo sapiens
acctctggatggaaggcgtggcaggagtctggtcgccggcggagcttctgggagcgcatccggtcacatttgacagaggcattatgtgcagaagccactgttaaggtcaatatctcaggacc

SEQ ID NO: 445916 - DNA, 122 bp, Homo sapiens
ttctccggggctggttcatcacctccgaatattcctgtgacaggagacgcttgcaaaacccgcctccagcctccagcagcaaataaatagaaggcttgcagcccagaaggagccagaagaag

SEQ ID NO: 445917 - DNA, 122 bp, Homo sapiens
ctgagcaaatctgacccaggtgccttctggatcaaggtggaacacatccttccagaatgccgggaactgagtgaatctgaccccggtgccttccggatcaaggtggaccacatccctccaga

SEQ ID NO: 445918 - DNA, 122 bp, Homo sapiens
gtagaagggcctccgacggttggccatcatccttgtcactcaaaagtccccgccttcggtcgaccccctccgcctgcccaagcgtggtcccgcccagtatgcgggtgttaattggctgccgg

SEQ ID NO: 445919 - DNA, 122 bp, Homo sapiens
gattctcccgagaactctgaaagccgagcagcccttctgacgcctcgatttcaggacttccgagttccagagccgtgagcgaatacatctgcatctttaagccactgcatatgtggtccttt

SEQ ID NO: 445920 - DNA, 122 bp, Homo sapiens
atgtctcaatgatagtgaccttctataatctgttccccaccgtatctctgatggttagctcggagcctggtgcataatagatgttcaataaacatatggccagtgactgaatgaagggccaa

SEQ ID NO: 445921 - DNA, 122 bp, Homo sapiens
ctccatggtcgggagagacaccaggcgaggcgaggcggcgggagagcgcgggagttcggccggcctcggacgccaccactgcgcaggcgcggcagcctgaggggctcgccgggaaatgtggt

SEQ ID NO: 445922 - DNA, 122 bp, Homo sapiens
ggggcagctgcgacagtacgacccaccggcggagagccaggtgccacgggcagggcgaggcggggggtgctgggcccttcatagagccccacagtcccccagaccctccttagaatcccaca

SEQ ID NO: 445923 - DNA, 122 bp, Homo sapiens
cacaaggctgagatgaatagggccggactgtgccaggcctcccggctgtaggaaaatgcacgtggatcgtgcgctaagtgcagcaggaggccacagacgaacgttcatcaggggagttacgt

SEQ ID NO: 445924 - DNA, 122 bp, Homo sapiens
cgcccggcctcagcaggtttttcaaaagtcatggcgtgtaattgtccgaacagtgaacttcggagatccaccggaggggcgaggccacagctcgaccgcgagcacctgagcatcctgcaccg

SEQ ID NO: 445925 - DNA, 122 bp, Homo sapiens
aattaacaggaaatgttcatgaacaaaattgctaaagcaattattgctggtttgcctggccgactaatggtagcaatcaatagctggctttgtggaatatatctccatgggctaaggagaag

SEQ ID NO: 445926 - DNA, 122 bp, Homo sapiens
gattattcaaggacataagcataggaggcagagatcaatgggggccacctaggactctaccgcacatttacctcctgagactcattaaaatgacaaaacaatagcaagccaaaatagaagca

SEQ ID NO: 445927 - DNA, 122 bp, Homo sapiens
cacgtgatggacacgtgtgacatgaccaacatgtgttacaggtgactgacgtgtgtaacacgtgtgacatatgacagatgtgacaactgacacgtaatggacacgtgactgacacgtgtaac

SEQ ID NO: 445928 - DNA, 122 bp, Homo sapiens
tttgtaaactatatctaaaacatacctcaatataaaaaaccagaaacaaaataacaaaaacggggtgagaacaaaaaatacagatgacaggttctgtagttatggtactgaactgagcttcc

SEQ ID NO: 445929 - DNA, 122 bp, Homo sapiens
gcagcgcagggagcgcgaccggctcggggagggggaggacgcggcgctcccgccctccctcggtccgcctgtccatctccaggtccctctgtccgccggccccctggctctgcccaccctgg

SEQ ID NO: 445930 - DNA, 122 bp, Homo sapiens
tacttgggaggctgaggcatgaaaatcccttgaacccaggaggcggagttggaagtgatccgagatcacaacactgcactccaacctgggcaatagagtgagactcggtctcaaaaaaaaaa

SEQ ID NO: 445931 - DNA, 122 bp, Homo sapiens
cttcctttagtccatcaaataagaaagtagccctggtgtgtgtgtgtgtgtgtgtgtgcacgcatgtgcatctgtgtgtttctgactgtctttgtacggtaaagaaggaggacatatgtggt

SEQ ID NO: 445932 - DNA, 122 bp, Homo sapiens
agctgggagagcctagtggctatgtgcctggtgtcagtcagatgagtttcaggctccagccgggtcttagctgagtgatctggggcccaatatgtcacctctctgtttttgtgtgtacagat

SEQ ID NO: 445933 - DNA, 122 bp, Homo sapiens
gctgccggtcgctcaagagcagcacggccccgccccgccccgcccacgcccttggggccacgcccactcccggaagcagtcctcaggtagcgcctccctttggcctggctcgagtcgcccgc

SEQ ID NO: 445934 - DNA, 122 bp, Homo sapiens
acggtcctgcccagcctgctgtcacgcccatggacgacggcgccagccggggggtgcacacgtgtgtcccacccatggatgatggcaccagctggggggtgcacacgtgtgtcacacccgtg

SEQ ID NO: 445935 - DNA, 122 bp, Homo sapiens
gggtggcggcgcagaacccaggaagggagcagaggcgagagccagcctccggcaggagggcgtagaccccggtgccagccagaacggctccagccttcccgcggccagagagccagcggcgg

SEQ ID NO: 445936 - DNA, 122 bp, Homo sapiens
gcggggcctgccgcagggggcggggcctgcaggtttggcccccgcagggagcgcagctggcgccgctgggagctggtggcgcggcgcaggtcccggccgagtgtggcgcagcagtggcggcg

SEQ ID NO: 445937 - DNA, 122 bp, Homo sapiens
agggaggaagcagggtcaggaactggggttggggcaggactccagggtctggagagaaggcggctgggatccatgactcatgcgtgactctcagacggtcctgcatgacctggcccctgccc

SEQ ID NO: 445938 - DNA, 122 bp, Homo sapiens
ggaggacgcgctggtcacgctgaacatggtgccgggccagtctgtgtacggcgagaggcgcgtcacggtgaccgagggcggcgtgaagcaggagtaccgcacgtggaacccgttccgctcta

SEQ ID NO: 445939 - DNA, 122 bp, Homo sapiens
ctttcctgtaaacggcgcgaggtgagggataaatatcaggaaaaatcctgatgggcagagcggctggtggcagggaaacttaaaagcaactatcccggtcagccctcctagtctccctagcc

SEQ ID NO: 445940 - DNA, 122 bp, Homo sapiens
cctgtcctagacacacacatacacatgcacacacacacgtgcatacacagggacacgcgccgagggccgattcacagatgtgcagaacagatacagctgtgacagttgtgaaaatactgggt

SEQ ID NO: 445941 - DNA, 122 bp, Homo sapiens
agacctggcgtgggggtgggcgggcgaggctggctcggagggtcctgtgctggagagccgcgcttttcccgggcccgggaaaggaggccagactcgcttgcaggaatgaggcactgtcggct

SEQ ID NO: 445942 - DNA, 122 bp, Homo sapiens
tgctgggacatggcggcaaggctcatttgctgccttctcacaaagtggaatgggagaattcgttgcacggtattaaccaattggttgcctagtagtctggtgaagtgtattaaggacattac

SEQ ID NO: 445943 - DNA, 122 bp, Homo sapiens
cataatcaacactgaaaaaaaaaaaaaaaaaaaatcttgctgaatgaagagatgagtggccggttgtttagctcatatttgagcttgccgtataataaatagagcaaatctacttgtccctc

SEQ ID NO: 445944 - DNA, 122 bp, Homo sapiens
gaggagagggcagcggggcagcgggacagggccagggccagacggcaatgggaggggcagcggagaggaggagacagaggcgccgacactcacacacacaggtggctcgtgccgcctgcacc

SEQ ID NO: 445945 - DNA, 122 bp, Homo sapiens
ccagcagacgttccagaatattcccaccccatggagctcacactctggtgggataaggggcgtggaaggaacgcataggtcagaaccagagtatgtcgcggtcttcagcctcagaccacgat

SEQ ID NO: 445946 - DNA, 122 bp, Homo sapiens
agggaatgatagttagatcctgtggcacatatctttttatgcaaaaatgttattattgctcgtgactctttgagaattggtttgaacttcaaaagaggttaaaacgttttcacttaagtata

SEQ ID NO: 445947 - DNA, 122 bp, Homo sapiens
agggagccgggggcaacctagaatccaccagtggggagagtaaggcgactcggagaaaggcgaggggctaatgcatccgttctaataactctgactttaactcggggctagatggggaaaca

SEQ ID NO: 445948 - DNA, 122 bp, Homo sapiens
ggtgcagcgtttgacaacaggagagccgtgtctttcaatgtggcaggccctggggaacgccgcctgccaggtaacctcccagtgacctcgcaaggtatcagaaaggttttacttcatctgac

SEQ ID NO: 445949 - DNA, 122 bp, Homo sapiens
agcctacacttctctgcatgaatacaactgcatgatacttactggggaagtaagacatctcgaatgagagccagaagattgctgtcagaatcaacactggccttctccttgccatccccaaa

SEQ ID NO: 445950 - DNA, 122 bp, Homo sapiens
gctgtgaagcttgttgccagtggcagccttgtcctgttgctgcactgtgcttgtgggctgcgccatgaatactgttctgtctcttaaaatctgggccttcttgctttacaggtaccgctgat

SEQ ID NO: 445951 - DNA, 122 bp, Homo sapiens
acaaacagcagccacacaccccagtgcacccccaagtggccctgccaggggcagagtacccgacagaagctgctgacacacctgggacgcctgtttgttcagggtcatccaccctcacacac

SEQ ID NO: 445952 - DNA, 122 bp, Homo sapiens
gaaagccagttttatctgggtcttacttagaaacagccttaccagaatgcagaagtggagcgagagaagaggagaaagaccgtctttaagccacatgtctgttgctgctcacaagggagacc

SEQ ID NO: 445953 - DNA, 122 bp, Homo sapiens
cccccccaggggagttttccaagaaagctttggtggggattctatgtttccctcccgccccgcaacaagaattctcaagagaaggcaatacatttgcacagacctgatttggggcgcagcca

SEQ ID NO: 445954 - DNA, 122 bp, Homo sapiens
ccgtagtttgcgcctggccacgacagcatgcaccctgggggatggtgaggctgtgggtgccgacagcggcaccagcagcgctgtctccctgaagaaccgagcggccaggtgagcaccgctgc

SEQ ID NO: 445955 - DNA, 122 bp, Homo sapiens
cccggcttcctggataatagaagttcccgaaggccgccgattccagaagatactgtctggcgtgaaattagtctcagtagaaacataagtcccgcgcgtcttgtgctgcgcgtgcgcaagct

SEQ ID NO: 445956 - DNA, 122 bp, Homo sapiens
gcaccggacaggaaagtgggagcgctgccggcgcaggcacgtgacgcagaggaggtggggcgctgggagaaagccagtgactttttttttttttaaaccaattccgacactttctcagcccc

SEQ ID NO: 445957 - DNA, 122 bp, Homo sapiens
cgaggaggctggggaagaaattgctgtttgatggtgggtaataaaggcagccgtggtgaccgctctcctgagcagccgccaccgccaccatgctccccgttctgctgacggagggaaacgct

SEQ ID NO: 445958 - DNA, 122 bp, Homo sapiens
tcgtcttggggggtgacttgagtcagggccagagtagcccctctgtcctggaggctgagccgctgctcgtactccccaggttcgctctggccctggccctggcgcacacggaagatgagcgt

SEQ ID NO: 445959 - DNA, 122 bp, Homo sapiens
cagagcaccccgtgggcctagtctaaacgagggcaccactggtccggagttgcacttgttcgctccctcctgggctctggcagcgctgcatccccggggttgcttcgggttcgggcccaata

SEQ ID NO: 445960 - DNA, 122 bp, Homo sapiens
attcaggccggcgtgtttcaaggttacttttcagtcacaaccgaggtgcccacagcatttcgtaactaaaacaaacagggcaggaggtggggagggaggggtgaggagagaagaatccagga

SEQ ID NO: 445961 - DNA, 122 bp, Homo sapiens
cctgtggctcccgctccttccgctcctcccgctcctccctcacacggaggctcctccctgcgcgggcactgcccagacaagcagcctacggccctcccgcggctgccccgcccccatctgca

SEQ ID NO: 445962 - DNA, 122 bp, Homo sapiens
cagcccctccagctcctccagcccatgcgtttcacttcagagatgtttcatgacataatccggctccggagtcccccggagtcccgggggctcacactccaccctcagggaggtcgctgatg

SEQ ID NO: 445963 - DNA, 122 bp, Homo sapiens
atcatgggggccggtctttcttgtgctattctcatgatagttaataagcctcaggagatccgatgggtttatcaggggtttcttcttttgcttcttcctcatcttctcttgcagccaccatg

SEQ ID NO: 445964 - DNA, 122 bp, Homo sapiens
ggcgcccggccggcccacgtgctccccacgggccctcgcgacgcggcccggacgtggccccggactgcctccaatccagaagaaactaagaggcggagtcccgctgagcccctgcattcaaa

SEQ ID NO: 445965 - DNA, 122 bp, Homo sapiens
ggacaagcagaaactcaagcggaccgagatcatcagccgctcctggttcccctctgcccccggatccgcctccagcagcaaggtcagcggcgtcctgaagaagctggcacagagccgcagaa

SEQ ID NO: 445966 - DNA, 122 bp, Homo sapiens
tcctcccttcaaaacaaattcccggctgttaggagatgcgggagaggattgagtccctcgcggatgttgtgactttaattttgaggtccctgtcgtaactccgaagtaacgacgcggggcgg

SEQ ID NO: 445967 - DNA, 122 bp, Homo sapiens
gtgggtttctcaaggggttcctgaaagccctgaaattgtagatgtcagtttaatgctcaccggtgtgaatgcatctggggaaattgtctattgctttcaagagattcttaacttcttaaggg

SEQ ID NO: 445968 - DNA, 122 bp, Homo sapiens
acgcaaatatttgtggccgaatctcggcaacccgctggaaaggattaaacgtgcggttgccgtgactaaacgcattcattcaccctacaagatttaggaaaatgtaacgttgcaagggaagc

SEQ ID NO: 445969 - DNA, 122 bp, Homo sapiens
tcccgcctttgccgcgcccagacatgtcttgtactaaacaaaatgcaacacggcaagcctcgcagcagtactttatatagtaataaatcggacctgattgggaactctccacaccagctgca

SEQ ID NO: 445970 - DNA, 122 bp, Homo sapiens
gctggttgaccccaggttgacccctctctgggcctcattggttccttctgaactatggggcgaagactgcagaaatgaaatgggaaagcctcagcgtctgaagatgagggcacagggtaaat

SEQ ID NO: 445971 - DNA, 122 bp, Homo sapiens
tcctccgcaggcttccccggcccatctccagagcgccctcctctcaccactttacataaacgaatgtacccaagatcccccatcagttttccatgcagctgccagagtgccaccaaagcaaa

SEQ ID NO: 445972 - DNA, 122 bp, Homo sapiens
gtaggtatagtttattgtacactaacccagcaagacttaattttaactcacattctgtgccggggtttggaatttactaacattatgtcaatgtgcttttcattaaagccaagagctgtaca

SEQ ID NO: 445973 - DNA, 122 bp, Homo sapiens
aaaggcgggtgtctgggtctcctctagagccacggtggggacgcagggaggtggtttccccgaaggaaaatccagatgctattaccagaagcagagggagacacgctagacaggctccatcc

SEQ ID NO: 445974 - DNA, 122 bp, Homo sapiens
gatacaacagactagttcagtcactcagcccagctcagaagcaccagacaggactgtaaacgcccacctgtgcccaggctccagtaccaggaaacagctgccacaaatctgaaacgttcctg

SEQ ID NO: 445975 - DNA, 122 bp, Homo sapiens
cggggctgccccggcggcttccggctccactgaggtgcagccccgcgttcacggggggttcgcttcccccgtcgactccgcactcgattcgactgggattgggattcgattgggcgcggccg

SEQ ID NO: 445976 - DNA, 122 bp, Homo sapiens
ccctggaatttcctggctggggaccggggagaaggtcttgtcctgagctcagataagagacgtgcaaggtatcataggaccagagatagacagatgtgtcttaagaacaatcagctaccttg

SEQ ID NO: 445977 - DNA, 122 bp, Homo sapiens
acagggaagcagcgtctcctcgggctggcggggggtggctctgggtgcgggcgggcagcccgtcactgcacgcgacggcagtagtagcccaggaccttgcacttctcgcagaggtgctgcgg

SEQ ID NO: 445978 - DNA, 122 bp, Homo sapiens
agcgcgaggcgcccagacagacgggttcagcctgcaagactgtgaggcgacttgtgaaaccgacccaagcattccaacaggaacaaaagtgtggtcctgtggccacgtccacagcaagttcc

SEQ ID NO: 445979 - DNA, 122 bp, Homo sapiens
cagctctgagttctgcagtcgcagtggagtgaagacctgggcactctttcctcttttatacgcccaagattagtctaatcgctgcctccctgccctgggcagccatgacctcaacccagggt

SEQ ID NO: 445980 - DNA, 122 bp, Homo sapiens
ttcgtcccctcctcacaccccaccccggacggccacaacgacggcgaccgcaaagcaccacgcggagatacccgtgtttctggaggccagctttactgtgctagaggaagagggtccccaca

SEQ ID NO: 445981 - DNA, 122 bp, Homo sapiens
taggtccggcacctgtcagaaaccaggcctgacattttcaagatgggcacaggcccgctccgggaaggccccaggcccgtccatgtgggcagcgtcggcgtcgggcttcttgcctgggaccc

SEQ ID NO: 445982 - DNA, 122 bp, Homo sapiens
cttcatcttgcataactctaaaaattaaaaaataaaggttactttcatcagattctcttacgatttattaatctagggaagtataagtttatggttttcttcactaaaataaacagttaagg

SEQ ID NO: 445983 - DNA, 122 bp, Homo sapiens
gagggaggtaccgcagcgacccgcctaggatgccggacggccctcggcaccaccgagacccgcctcatgagccccaggtcccgccatcaggaccccgaggtgacctcagccacaaacctaac

SEQ ID NO: 445984 - DNA, 122 bp, Homo sapiens
tcagcctatcccctcccaaacctgtttgttactaaagatccatcagtgtggaattttcaacgtcattcaattttttaagataacatactttccttcctgttagttatatacataaatgccct

SEQ ID NO: 445985 - DNA, 122 bp, Homo sapiens
tgatcttttccccttactgtagcccagaaggaatcttgtaagtcacagcattggctgagacgagacctccatactagaatccaaatcaaacattgaactgaaaatgacggttggggcttcat

SEQ ID NO: 445986 - DNA, 122 bp, Homo sapiens
ccctcccgccccacccagcccgattgcaaggtccaacgtggccctcagtaagaaggtggccgacagtctgcagcagagcctgcagcgggaatatggcctggccatgagctgaaagtacagcc

SEQ ID NO: 445987 - DNA, 122 bp, Homo sapiens
aattcgaattctcgggccccatcagaactactgaaaagagcctcctgtgagcacagggctcgcagtaagtgggggtgacggtggtcgcgccggcagcgccgccttgggcctgcgggaggcgc

SEQ ID NO: 445988 - DNA, 122 bp, Homo sapiens
atcctggagctgctggtgctggagcagtttctgatcatcctgcctaaggagctccaggcccgggtgcaggagcatcacccagagagcagggaggacgtggttgttgttctggaggatttgca

SEQ ID NO: 445989 - DNA, 122 bp, Homo sapiens
atactcctcctgctccgggccgtcatacacagatttgctcccacaggcctctgtggagggcggaggggtcagcgcagggcaggagcccaggccaccggccccgtctccacacagctgcgtcg

SEQ ID NO: 445990 - DNA, 122 bp, Homo sapiens
gccgagggcggccgggcatcccccgtgtccccgctgcccttctcagccgaccccggcgcccgcacgttggagagctgccctggggtcataggcttgtactgtggtccaccaaagccgcctta

SEQ ID NO: 445991 - DNA, 122 bp, Homo sapiens
ttcctctgtattttccatgcatgttttcaaaatgattattgtaagtgaacactaaattcacggtgtggcataccagggctgaaagagtgtggtatacaaagctctgaacacatctggcactg

SEQ ID NO: 445992 - DNA, 122 bp, Homo sapiens
ttccgtcttcagtttatttacaactggtgtgattgatggtaagtttaaccaatagaaaatcggaatgggagaggcctccttgaccaaactcggtatttccatagaagctgtctgaagttcct

SEQ ID NO: 445993 - DNA, 122 bp, Homo sapiens
caagctgacctgccccagggtgtccgaggctcccaaatgatcacagtttggagatggccacgtacactagatacatccacacaatgtgattaattccctgcagttgccaaaaagcatgaaat

SEQ ID NO: 445994 - DNA, 122 bp, Homo sapiens
tctgctccccgatcacgaattaaccctctagaaacacctcctgtcctaattgtgtcgctgcgaagctctctgagtgcattttcgggaatgggaagttgttctcttaaacatcaactgcaccc

SEQ ID NO: 445995 - DNA, 122 bp, Homo sapiens
gggcgccccctccctccccacgaggcggcccagacaggccggctacgccgcccgcgcgctcgctggctctccccggactgagcctaattgatccagacttcctcggaaaatgcccgaggaac

SEQ ID NO: 445996 - DNA, 122 bp, Homo sapiens
tctcagcctccagtctgacatgttccactatggccttgggaagagcaatgggcccggagtcgccgcatctaaccctgctgtaactggtcgcaagtcacagtttgctcatctataaagtgagc

SEQ ID NO: 445997 - DNA, 122 bp, Homo sapiens
tctttgccttccccgccccgtagagctccaccgcggatcgggcgggttcggggctggcctcgcctcctcagggaggggttatcggcccctaaggccgccccacagccacacacgctggaaac

SEQ ID NO: 445998 - DNA, 122 bp, Homo sapiens
gcggatgtgggacggcgtgcgcctgcgcaccagctggttttttctccttgggcggtttcgcgcacgcccccagggctgacaggtgagtggggctgtctgtccctcagtacttccaggggttt

SEQ ID NO: 445999 - DNA, 122 bp, Homo sapiens
acagccaacgtcgtaacagaaagctaacaagcagcacgggagttaggagccggaaaccagcgtctgagtctcagcaccgcagcccgggttctgccagctgctccggaaggttccagggcgtg

SEQ ID NO: 446000 - DNA, 122 bp, Homo sapiens
gaaaagttttgagattgagcagcttgggagtttgtggccactgggtatgtgtggctaccgcgggtatgcgagtgccagatattggctgagacgagccagcttagactaattggtacaaggaa

SEQ ID NO: 446001 - DNA, 122 bp, Homo sapiens
ttcccctggtcttcctccttcccctcttgcccttgtccggttcgcactgacagcggccggcgggagggttggctctcactcctggatgtgggctgaacaagcatcccggaagcctgcggtgg

SEQ ID NO: 446002 - DNA, 122 bp, Homo sapiens
gaggaggaggaaggggagttccgcctgcgggccgcatcgcacggcagcctaggggcgccgcgaccctcccggctgcgtccagcccctcgcgcctgtaccgcgctctcggccgccgggcccag

SEQ ID NO: 446003 - DNA, 122 bp, Homo sapiens
gtttgaagagctcctttgaaatcacctctccccatcttgggttctcaggtcatctcaaggcgtcggtcagcgcggcagagtcgggaacctgccatcctagagcaatacgccccgagtgacag

SEQ ID NO: 446004 - DNA, 122 bp, Homo sapiens
tgccccggagaagccaggccagagtccaggctcccgttagcagatgtgggaggagcgggccgtgctggggccgtagtgaagcgatctgtggtgctcggggagcgttgggaaggctgaggtgg

SEQ ID NO: 446005 - DNA, 122 bp, Homo sapiens
ggcttgtcattgatggagactgtctgcagctggccgtcagcatcatactcataggagtagcgagtggtattggcgtagggtcctaccttcagctccttcttcactactcgccccatgttatc

SEQ ID NO: 446006 - DNA, 122 bp, Homo sapiens
tggctgtcactgctgccggcctttgtaagggggcgctctgattggtcgataaggtgggggcgtcgagggtctttgagtcctaaggcttctaattggttagatgagataagctagtgaagcgc

SEQ ID NO: 446007 - DNA, 122 bp, Homo sapiens
gcgcacacacgaatgtggatccgctcgatgggaacctgaccccctttggtgcaactagggcgcgggcatcattaggacgctttttactgacagggcttcggtttgggaggaggagttacagg

SEQ ID NO: 446008 - DNA, 122 bp, Homo sapiens
cccaaaccagaagcaagccgggctcctgtggccctgtgccctgtcaggggaagaggaaggcgcctgctgtcacagtgaaaataatttagctcttttggtctattcagggcgaacctcattcc

SEQ ID NO: 446009 - DNA, 122 bp, Homo sapiens
tggggccacaggaaaggcagcctggagagcagccccctgccctgctctacagagggagcgcgggtcaccgctctaaaggtggagtgggcacccgccaggtctctccctctgtctcatgactg

SEQ ID NO: 446010 - DNA, 122 bp, Homo sapiens
agagccctgggctcctccccaggcagaactgccactgacacgtgtgtttctacggtttcacgctgcagttgcattcgggaggccgcaagcctggctatcatgggcgtctgcaagacctccca

SEQ ID NO: 446011 - DNA, 122 bp, Homo sapiens
gggcgctcgggccgggggccgccggcgccatgggcaaccgcgggatggaagagctgatcccgctggtcaacaaactgcaggacgccttcagctccatcggccagagctgccacctggacctg

SEQ ID NO: 446012 - DNA, 122 bp, Homo sapiens
ggcggtatgaaccgagaaatacccctgctctccgatgtttccttctctctcttctggcggcgtagactactttggctttcagctgcaggaggtggctgggaacctttttcctcctctggatc

SEQ ID NO: 446013 - DNA, 122 bp, Homo sapiens
ggtggcgcacacctgtaatcctagctagatcctagtagattgaggcaggaaaactgaacccgggaggtggaggttgcagtgagctgagattgtgccactgcacttcagcctgggcgacaaac

SEQ ID NO: 446014 - DNA, 122 bp, Homo sapiens
ccactgcctttcgcacacatacatactagagattacaaaatacttgggctgggagttgcgcggctggagtgagcccaagaccatcaggcatatcttaggacagcctaaccccgttttccccc

SEQ ID NO: 446015 - DNA, 122 bp, Homo sapiens
gttccaggctgtgctaagtgcttttatgggctccaggtctggttgctcttctctagaccccggtcctcttctgcctgtcactcttctatggcactgagacatctttgtcttattttaggatt

SEQ ID NO: 446016 - DNA, 122 bp, Homo sapiens
gttaccattttctttttctccataaaccaaacggatagatgataaacctttcaaagcagccgtgctggggcacacctccacagctttcttttccacccccctccccccccaatctagctatt

SEQ ID NO: 446017 - DNA, 122 bp, Homo sapiens
gagctgcaggccacttcagaacagggtcacgtgcccttcagacgtgatcaggcatgttcacgatcttggtgtgaacgggcttggtgtgaccatggacacacatgccctttaggaagatggct

SEQ ID NO: 446018 - DNA, 122 bp, Homo sapiens
cccggggcgggggcccggttaccttccgacagctccagctccagctcggccaggcgcgcccgcacctccaggggcagcgccatgccctccaggctgcggtccgccatgctccgcgggcgccg

SEQ ID NO: 446019 - DNA, 122 bp, Homo sapiens
tcatgtaagattctccttagtttacatttagtttccaatctattagtttccataagctaccgtagaaataattaaggtaaaatggtctttatattaaagtgattgtatctgatgaggggctt

SEQ ID NO: 446020 - DNA, 122 bp, Homo sapiens
tcttgggagatgacaaattacaaagataacagtcagagcagaagtgattcgcttcaaacacgcaactttgctgcaagttgacaggaagcctagcagtatctggtctaatctcagagaagagg

SEQ ID NO: 446021 - DNA, 122 bp, Homo sapiens
tccatgagcgtacgcagctgctccgggttttcgtggcagccggcgggaggcaggctgtagcggcggccgggggtggaggtgagggggagggtcggggggcgtgtctacactcagggtgcagg

SEQ ID NO: 446022 - DNA, 122 bp, Homo sapiens
aggggaaaaataaattaggctagattaaagctttggctatttcctgcttttatacacagacgcggctctcgcgacctcccctccggggccccgataaatacagtatactgcgatttaaatta

SEQ ID NO: 446023 - DNA, 122 bp, Homo sapiens
ttttatttgctattaagattaagtggggctgcacggccagacaggccctgctcctgaggccgggcaggctgcgcgcctgcgatcctgcgcctgtggtcctggggcagcccggaccagctcag

SEQ ID NO: 446024 - DNA, 122 bp, Homo sapiens
tattacttactgcagcatatccaaagcaaaatctggcagagtcaggcagcatgtcaatcacgggagtataggcttcaacttcctccagaattaatcaacaaaagggatagcttcgactgtgt

SEQ ID NO: 446025 - DNA, 122 bp, Homo sapiens
agtggagggtgatggagtcatcgctccgggctcccagctctgcagccggcgccctccccgcgccccgcctggagacccccaccccaccccgcaggtggaggttcccagagtgggggaggggt

SEQ ID NO: 446026 - DNA, 122 bp, Homo sapiens
agggaaccgaggtgaagagctgggtcctgcagctctggtgggagcctcctcagttcttttcggatgcactccacccccgcgaatccggtggaagccgtggtgcagagagccggctttgtggc

SEQ ID NO: 446027 - DNA, 122 bp, Homo sapiens
gcaccgtggagcaggaggtggtgatcgtcagggaaacccaggccgcgcaggagcctatggcgagggcggggccgccgggagggtcagcgatgcgggggcggtgggggagggagaatcacgca

SEQ ID NO: 446028 - DNA, 122 bp, Homo sapiens
attttctcaccagtgaagtctttcctggttggtgagcagttgttgtccatttcagagccacgttttaaaatgtcagtatgcaaatgttctttcctttccacaacttctacttttgttccgat

SEQ ID NO: 446029 - DNA, 122 bp, Homo sapiens
acctgcctccagcccccgccccctcctctctgcagcctagcctcagcaggcgcaggagcccggtgacaggctccccaccggctctgcaaggcacccgggagcaaatgaggagcgctggccgg

SEQ ID NO: 446030 - DNA, 122 bp, Homo sapiens
ctttttccacattcctcacaatcataaggtttccccccagtgtgagcccattcatgtgttcgaaagtaggggagatcactgaaggctttcttacagtatgtacatttatatggcttctgtcc

SEQ ID NO: 446031 - DNA, 122 bp, Homo sapiens
cctggggcagggagaggccatgtgagtgctgcgatggcaggatggcaccagtggtcagcacgcctcaggtggcatgtctgtgtgtgtggcagccttgtaggccctaaaagggagtagtatcc

SEQ ID NO: 446032 - DNA, 122 bp, Homo sapiens
ccctgattgacgttcagccaggccaatcatagcctgtgtctgaggcgcgcggagctggagcgcccagggcatgtccgccgatcccaaggaggcaatctgtcaggcgccgcccgggcggcagt

SEQ ID NO: 446033 - DNA, 122 bp, Homo sapiens
aaaggtatcgaacatgtaactagacactgcctggtggtggattaaaggtcctcgggtcttcgctcctccccgctccacgcgccgtgggcctaccagctgcatcctgattggcccgcggcgta

SEQ ID NO: 446034 - DNA, 122 bp, Homo sapiens
gaagcgcagcataagtgaaggtcacaggataggaaggtgttgcatgaggtgtgtgtgtgtcggcttaactgtgtcacttaatatctaacattgacgttctgtgtcatcaaatcctgccccag

SEQ ID NO: 446035 - DNA, 122 bp, Homo sapiens
gtgaggtcacctggatactacaggtgttttcacaagaggaaataacccacacgcagggcacggagcgcagactgtgcccctgccacagaccggccttctccccaaagtccctcgttaaccct

SEQ ID NO: 446036 - DNA, 122 bp, Homo sapiens
cacggggtcgggagcctcgctttacggcatagcgaggtgacggagcggctccgagggggacgaagacctgggcagggagcttttgcgacagtgggagaaagacacgcccaccgcaggcatct

SEQ ID NO: 446037 - DNA, 122 bp, Homo sapiens
ccctgtgctgggtaagtaccagtatctgcgaaggaggcacgaaccagatgaggcaaaggtcgtgtcccccgcaactccgctgaaatcctgcccaccgagaggaagcacaattatgagtgaat

SEQ ID NO: 446038 - DNA, 122 bp, Homo sapiens
caggggccatggaaggagccgggagcgaccggaccagggcgaatctgctgtctgtgccggcggaaggccagtaagtgccgtgcagtcgtgaaaaaggaagtggttaaagtggttacggcaaa

SEQ ID NO: 446039 - DNA, 122 bp, Homo sapiens
gagagcgcccccgggggcggggcacgcaagtgacggcggcgcgggtggtggagcgctgggcggccaggctccctggctggccggtttgggcgtctgggccgtgaaggtgggacctcctgttc

SEQ ID NO: 446040 - DNA, 122 bp, Homo sapiens
tatttattgaatgactctgtagaatgcagataaccacagcacttacaatctcgatgctgtcgtgaggattaaacctggtggagctactccctttagcagtgcctgagccactggttgaatat

SEQ ID NO: 446041 - DNA, 122 bp, Homo sapiens
taggcagatagtttaatctctctaaggctttgttttctcaaggtaaaactagagaactagcgacacctttcaggcaggctttcatgagtgttccctaggcttctgtaagaattaaatgagat

SEQ ID NO: 446042 - DNA, 122 bp, Homo sapiens
tagttttagtagagacggggtttttccatgttgactaggctggtctcgaactcctgacctcgtgatccaccagcctcggcccccgaaagtgccaagattgcagaagtgagccactgcgcccc

SEQ ID NO: 446043 - DNA, 122 bp, Homo sapiens
atattgactgtaaacactgaaaatcattaattctcaacagttgaaggtttctgacaggaacggcccttggaaattgtaaatgggcacattgtcaggtatgcccattgttgtcacattggaga

SEQ ID NO: 446044 - DNA, 122 bp, Homo sapiens
actgggtttcttgccggccggcgcgcgcgcctgcaaccccagcgctctgggaggcccaggcgggactccaggccagcttgggcaacgtagcaactccatgtttataatttttttttttttta

SEQ ID NO: 446045 - DNA, 122 bp, Homo sapiens
caggccctgctggaacaaggcgctgtgcacgcagccagggaccgccccgggcagctccagcgagccgttcccattgcagatgctccagttgccacgcaagctgtaactgagctccgcggcgg

SEQ ID NO: 446046 - DNA, 122 bp, Homo sapiens
aaagttaaagtttagtaggtacatttatccttaaagacagacctggctgtggcttcagaccgatttgcaggcagtttctcaggcagctgctttcttggccttccttgaacactgactgcttt

SEQ ID NO: 446047 - DNA, 122 bp, Homo sapiens
ccctcgtgtacattatgattaacagaaataagagaatacctgctcagctgcctgcttgatcgctgtctccagaatgtctatattctcgttcatgagattcaaggcatcctcctgagaaactg

SEQ ID NO: 446048 - DNA, 122 bp, Homo sapiens
gcgggggtgccccgcgcgcagtgtcgctgggtcccggtgtcccggaccgccgggtgcgggcgcgggaggaggaggctgcaactttcccctaggcaggccccaagctgttcccccgggtgccc

SEQ ID NO: 446049 - DNA, 122 bp, Homo sapiens
tccttatctgtggaccctgatgccgagtgcaagtatggcctgtacttcagggacggccggcgcaaggtggactacatcctggtgtaccatcacaagaggccctcgggcaaccggaccctggt

SEQ ID NO: 446050 - DNA, 122 bp, Homo sapiens
ctttctcacttgggatgaaccttaaagaatacgtatgattcctccaggcacagaaagcagcgtaaacaacgacacagaagtatttgctgagagtgatgctgtgtttatgagcaaatgaacac

SEQ ID NO: 446051 - DNA, 122 bp, Homo sapiens
caggctttggcaatagttaccaaagcctgtcatcatatctgcaccaccaccagtcccgaccggagggcctggctgccaggtagttttcagtctaactgacaggagaagagagagcccctccc

SEQ ID NO: 446052 - DNA, 122 bp, Homo sapiens
gtggacgcaggcccgggagggtgggacgcccctgcctccgtgggtcagctgctcccactgcgtggcccctgcccgggagctgattttccctggtgaatgtcttcagcttccttcttgggaaa

SEQ ID NO: 446053 - DNA, 122 bp, Homo sapiens
tcttggtcacagtcctcattgtctctcaccagggccactgcagaagtagcagacacaggacgcataatagtgaagagcaggaactcggcaggtggtctccctgcctttgaccctctataact

SEQ ID NO: 446054 - DNA, 122 bp, Homo sapiens
gtgcgggactcgagggctctgcagcagagctccgtgggggcgtcaacgtgaattccagcacggcaaggttctctagcaccccggcctcagccttctgtctatacagtggaattaggaagaaa

SEQ ID NO: 446055 - DNA, 122 bp, Homo sapiens
ctgtgtcacctaggccggagtgcagtagtggggtctagtctctctgcaacctccgtctcccgggttcaagtgattctctcctgcctcagcctcctgagtagcagggattataggtgcgcatg

SEQ ID NO: 446056 - DNA, 122 bp, Homo sapiens
ctgaggtctatattaggagggttatcatttacatcggtgacattgatggtaaccgttgctcgagcaggagtggagctgccgtcactagccagcactgtcactttgtgaatggctgtctcctc

SEQ ID NO: 446057 - DNA, 122 bp, Homo sapiens
accgcaattccgttcttcccggaagtgccctgctggtgctgggagtagggcgcaagatgtcggcggatgcagctccgaggaggtaggcagtgggagccggcgttcagtccggcccgtgccaa

SEQ ID NO: 446058 - DNA, 122 bp, Homo sapiens
gactcctcagatgaatactggtgtccctaaagacataaacagattagccaggtgtggtggcgcatgcctgtggtcccagctattcgggaggctgaggtgggaagattacttgagcccaagag

SEQ ID NO: 446059 - DNA, 122 bp, Homo sapiens
gcagtgaggagctggagtccaaagcttcccacctgtgtaacctttagggtgggaaggtgtcgtcaatatgtcttccaagtgacccccatgtttctaaggactcagcctgcctgttttttgaa

SEQ ID NO: 446060 - DNA, 122 bp, Homo sapiens
tggatatagacattaaataatctgggagtcagtgtatgctgtgatcaagcatgtgcggtccgcagccgatggcccaggatgcagtcctgatgtacacttctggctgggtgcgtgggagccac

SEQ ID NO: 446061 - DNA, 122 bp, Homo sapiens
gtaccccaaatgtctaagatatttcagggaggtcacagacaacaaccccccacacctcgtcggagtttatccaagtactaggatcaggttacagaggggaaactgaggcccagaagaggcta

SEQ ID NO: 446062 - DNA, 122 bp, Homo sapiens
tctgaaggtttattcagtcatcccaggacatctaaaggcaggcagatgccaaagtacacacggggcattgggtgtgagcctgatgagagcagagaccgggaggcctaatggaggggctggca

SEQ ID NO: 446063 - DNA, 122 bp, Homo sapiens
tcccagtccatgtgcccaggaatacctctccctcctgaccttacctgcaccttcatgagccgccccaggtaagagcggtagtaagacaggtaaatcttgctcagcgtctccacatattcatc

SEQ ID NO: 446064 - DNA, 122 bp, Homo sapiens
ggggactttgggttggggattcatggggggagcccatctggagcttgtcaggggagcgagcgcggggacctggactgggctgagcatggagtgaggaggacgagagcagagagacccccggg

SEQ ID NO: 446065 - DNA, 122 bp, Homo sapiens
tgtctcgttagggtcattctgaaaagaagcccagtgtgcagtcattagcccctggggtagcgttgctactaagtggttggggagaagtcagggaagaggaagaggtggcgttccccagcctc

SEQ ID NO: 446066 - DNA, 122 bp, Homo sapiens
acagaagaaagaacccagaaatagaccctccttatatagttgtgtcacattcaaccaaggcgtgaatcaattcaatgggaaatagaattgtcttttcagtaaatagccctgtaacaactgta

SEQ ID NO: 446067 - DNA, 122 bp, Homo sapiens
gtcggccccacggatcatgcggctggtggccgaatgcagccgctccagggcccgggcaggcgagctgtggctgccgcatgggacagtggccactcctgtgttcatgccagtgggcacgcagg

SEQ ID NO: 446068 - DNA, 122 bp, Homo sapiens
tcccaccttgtaggagagccgaggggtctggtagggagcggaggccgaggtctcggccaccgggagaatgacgagcccactggagaaggaccctgagcccaatggggcactgagccctgggc

SEQ ID NO: 446069 - DNA, 122 bp, Homo sapiens
aaacacaaacacacatctggaatgtgtatgtctgtgatctgtgcccaagtgtccggtatgcgtgtgtgtgtatcttgtgattttcagcgtgggcatttgcgtaagtgccatgtatgcgtgtt

SEQ ID NO: 446070 - DNA, 122 bp, Homo sapiens
ccaccgccacattttgaaaaaggctcctggcctggaggggcgggcccagaaagcggcccccgcagcagttacaggccggggcgaggaggggacggaacccgctctccgtgattgacggaaaa

SEQ ID NO: 446071 - DNA, 122 bp, Homo sapiens
ttcccaatctaatgtcgaggccatccttaagtaagcgtgttacacttgataatttcctttcgaactgaatctaacaagactatcttatttgtatctttttcacaataaagctttcccaaaga

SEQ ID NO: 446072 - DNA, 122 bp, Homo sapiens
accgggggacgtaagcgccaggacccgcagcggcggcggcgggggcaggagcgccaccaccgccatgccgcccccggtgcccaacggcaacctccaccagcacgacccccaggacctcaggc

SEQ ID NO: 446073 - DNA, 122 bp, Homo sapiens
tcctccgacaatgggaatttcactctgttctcgttaccgcctgtggatgaatgtgggtctcggagggcgcctctccctccggggagagggtgaccttgccacagtgggactccattccagcg

SEQ ID NO: 446074 - DNA, 122 bp, Homo sapiens
cagagggtcagaacatgagttaggagggccggtccactccgaatcggagggtgaactcttcggcattctttctgaacagctccggattctgtgtcagcaggtcagcgaggtccatccgcagg

SEQ ID NO: 446075 - DNA, 122 bp, Homo sapiens
ccacagggatctggtggcacgggccaaaagtggagcgaccctgcgcgcagcctttaggggcgcaggctttgagaacccgggttctattccgggctctgccatttaagttgcctcctttctca

SEQ ID NO: 446076 - DNA, 122 bp, Homo sapiens
gtctttgagctcctgctccttccagtcccggggtcttcaagctcctgctccttccagccccggggtcttcgctctcattgccaggatgaaagtgtgaaagacgtgactggggtgggcaccgt

SEQ ID NO: 446077 - DNA, 122 bp, Homo sapiens
ttcccgattcagaggcaggtggcaaatgcttttcccacagtgagggaagggctgtcaccgcgatggtgctctcagggaaccaaggttcacacattcagggaattcggggcactgagtcagca

SEQ ID NO: 446078 - DNA, 122 bp, Homo sapiens
aaagcattacagtttttttgtgggtctcatagtatgaggcttattatctcagtctactcccgagtagctaggactacagatgcataccaccacccccggctgatttttgtattttttgtaga

SEQ ID NO: 446079 - DNA, 122 bp, Homo sapiens
cggcccagggactatctgcagcctcctacccagggccagacattttcacactggagatcccggagggtgtggaatggaagggagctggttccgagtgctcagcacgctaagctgggaaccca

SEQ ID NO: 446080 - DNA, 122 bp, Homo sapiens
gagggctcaggaatacagggcccgcccaggactagggacagtaaatgatggctttgcagccggaggggagggaagggaaaggaggaaagacacagaaacgagcgttacggttagggtgactc

SEQ ID NO: 446081 - DNA, 122 bp, Homo sapiens
aggtttcggaaagttactgtggtgcccagcgcagtcagaggcctgtcagcatttcagctccgcgcggcgggccctgcggcctccttcagcacctgggacccccgggaccccgggcgtgtgag

SEQ ID NO: 446082 - DNA, 122 bp, Homo sapiens
ggatgcgctttagtgactggtgggtcacgagactcgcatgggccaatgactgatagagaccggtcagagggcgacccagtttcgtgcagatcaaaccgctgccagccaacgaaatccgttga

SEQ ID NO: 446083 - DNA, 122 bp, Homo sapiens
acttcagcgcagctagtggtttccgtttctgtacgcgggcgctctggtaggggcgcctcacgtccaaaggaggagtcttcttccaaagaagagcctttggtatttggcagagcctcgccaat

SEQ ID NO: 446084 - DNA, 122 bp, Homo sapiens
agtcttccgcttcggcacgtgggcttctcggttctaggtctccgcttccgtctggctgcgcggcctgggttacctgctcacgttcactcgcgggcctacagccccaagctttcccagctgga

SEQ ID NO: 446085 - DNA, 122 bp, Homo sapiens
gggcgtcctctcggtccacctcacaggccagcatgacacactcggaagttatggcatgcacgaacacatgttctcgggggtccacgatgtgcacgggaggatctgggtgggaagcagagatg

SEQ ID NO: 446086 - DNA, 122 bp, Homo sapiens
tttctttgtgaagattacaggcccaatttatcaacatcagaaacttacttagcatggttgcgtattctatatatattttttccaacgttaatgtgagtcatcatagcatatctccttaacca

SEQ ID NO: 446087 - DNA, 122 bp, Homo sapiens
cctactcccttatagtgcacagttattttttagatacagtgtatcactagcaagtggttgcggccaccaactctagttatccccagcacagagaataagagcaagatccgttcggtacagct

SEQ ID NO: 446088 - DNA, 122 bp, Homo sapiens
agcgattatcctgcctcagcctcccgagtagctgggattacaggtgtgcgccaccacgaccggctactttttgtattttgagtacagaggggtttcaccattttggccaggctggtctcgaa

SEQ ID NO: 446089 - DNA, 122 bp, Homo sapiens
gttgttacatcataacccagccaattctagttagcctgttttcttcctaacttctttaatcgttcttcataagtcacaatcgcagcccctcaccgttctgaccactgtcccctggattccac

SEQ ID NO: 446090 - DNA, 122 bp, Homo sapiens
gaaatcccatcctcgtgggcccagggagtggcccccagtcgcagaagtgcttgggggtttcgatcctgggtgcatgaccttgcagagctctaccagttggtgcccatgaaggcatcagaacc

SEQ ID NO: 446091 - DNA, 122 bp, Homo sapiens
cgtaagggccagaacttctcagcacaatgaaaggcctttagagatatttttgcaggggcacgctatgttctgattcactgaggcatataaaaggccctctgcggagaagtgtccatactgaa

SEQ ID NO: 446092 - DNA, 122 bp, Homo sapiens
tctcctgacccctggcctggtgacttcagagaaaagactccaaagtctaattcccaagctcgcaattccctccgattgtgcactctgtccggggttcaaaaggcgcttcgaggtgagaaatc

SEQ ID NO: 446093 - DNA, 122 bp, Homo sapiens
taccatctgggtctaaggccggtgggtgggctctgcccgcgcggggaggcggcgaggcggcgaggcgtggggagccatggagcgtcctccaggcccggacactcctcccaaagtcaatcgac

SEQ ID NO: 446094 - DNA, 122 bp, Homo sapiens
acctttcctgagggcccacacactcacacccccaggacagtaccttccagaactcagctgcgcagcctggaggtgaggacctcacccctagtcagtcacccgtccggtggagggaagggagg

SEQ ID NO: 446095 - DNA, 122 bp, Homo sapiens
cccagagccacatcatagtatctgctgccccaccaagagcaccccacacctgggaggaaccgagaaacatcagctagtgcagccagtttgaccgccttaggtgtcctcccaagcctccgtag

SEQ ID NO: 446096 - DNA, 122 bp, Homo sapiens
ctctgcggccccagtactgggaagctacccctcgccccctcaacctccttcgtagggttacggggagtctcccttgagacaatgggtatgggttttaggtcatagatcacagctgcttttgg

SEQ ID NO: 446097 - DNA, 122 bp, Homo sapiens
ggaggctgtgtccgttgtctgtactgtgtctgttgtctgtacggcgctgtggccgccaaacggcccagttctgatctcgggaggtcccctgggtgctgctgtgggcagatgctagccccggc

SEQ ID NO: 446098 - DNA, 122 bp, Homo sapiens
agggacgcctcctcgctgtgccacaggccatagccaaagtagatgatgaagcctgcgggccgacagcagagacgggcgtgaacagaccgccggttgcaccaccgcaggcagggctcagagcc

SEQ ID NO: 446099 - DNA, 122 bp, Homo sapiens
ttccccacatgatcaaaggagagggctgccctccgacggtccccacagagccacgcgccccggaggccaggcagcttgcctgctccaatttattgacttggcttatccgagatgctttctag

SEQ ID NO: 446100 - DNA, 122 bp, Homo sapiens
gtatcaagggcgcccttaaagctggaacattccagcaagcttcttgcgcttctctgcacccggcaggcccactttcctggcaccctcgactttatataaaagttgcactgcgtttcaaaaac

SEQ ID NO: 446101 - DNA, 122 bp, Homo sapiens
ttagtgtagtattccaccatagtaatgattatcctggcaattcataaaatgtacccaggccgctgtgtgaacgatgagcctccatttgctctgagagagcaaatctgagacgggtctttcta

SEQ ID NO: 446102 - DNA, 122 bp, Homo sapiens
agaaagattgtgttagacccctattgacccgtagctaatccccttcccaggcaggtctagcgaaggactgtttgtctagggctctgagcattttctgcaccttgaggttgcagcacacaagg

SEQ ID NO: 446103 - DNA, 122 bp, Homo sapiens
gcgcgagggacagagaagtcccttcccggtgtaacgggctcttcaacgcccacttgcaggcgcactactgcccttggatgactgaccaggccctgcagaccatgggctccctccccgacctc

SEQ ID NO: 446104 - DNA, 122 bp, Homo sapiens
ctgctggctgacgtccatggtgcagtcgtgatgtccacgagcctgtctgtgccctcgctgcggccgactctctctaggagcgtccccacaggatgcagaacctccctttgagctcggtgttc

SEQ ID NO: 446105 - DNA, 122 bp, Homo sapiens
ttgattatcaacatagtgaaggggagggtttcaaagagcaagaaggggttgttagtcacacggagagagaagaaaggagattagcagggtgactttcaccctgcaacagtcacgctggagta

SEQ ID NO: 446106 - DNA, 122 bp, Homo sapiens
ggtgagccctctgtcacgctggcataagggccgcttgagggctctttggtcaagcagtaacgccagtgtctgggaaggcacctgttactcagcagaccatgaaagggcgtctccctttcctt

SEQ ID NO: 446107 - DNA, 122 bp, Homo sapiens
cacgccaggctaatttttttgtatttttactacagacggggtttctccatgttggccaggcgggtctcgaattcccgacctcaggtgatcagcctgcgttgacctcccaaagtgctgggatt

SEQ ID NO: 446108 - DNA, 122 bp, Homo sapiens
acacctggctaccccgcacccccacctctgctcccgcggtctggcagaccctcagtcccccgcgcatctcttcagcggggcgatcccgagtcacgcaaccacagccccccaagctcatcttg

SEQ ID NO: 446109 - DNA, 122 bp, Homo sapiens
caggcatgagccacacacctggctgagagtgtgttaagatacttaaaatctcaggccaggcgcggtggctcacgcctaaaatcccagcattttgggaggtccaggccagaggatcccttgag

SEQ ID NO: 446110 - DNA, 122 bp, Homo sapiens
ctgggctggatacaaattttggtggccaccgatcagggttcaaattccagctctggttaccgtggctgccctgtatgatcacagtgcaatgttgagtgtagtagctcatgtgaatacagtgc

SEQ ID NO: 446111 - DNA, 122 bp, Homo sapiens
cgggcggggcggggaggggtggggcggggcccgggggcgctggaccgcggtgctgcgggacggattcccggcggctgcgcgggaggctgcgagcctgggctcccagggagttcgactggcag

SEQ ID NO: 446112 - DNA, 122 bp, Homo sapiens
ctggtggaaatacggggagaatctgcgtcctgctcactgtggacttggagagttctcccacgagtatggctttgcctcccatactccctgtgtcagggaaaggaggaggtcgtacctctgtc

SEQ ID NO: 446113 - DNA, 122 bp, Homo sapiens
cggtccagggagagggattttatttgcatttcctgagggtcccagtttcttggttctccgcgttctgttcaataaaaatgacacccggttgctgtgtgtatgtggtttttaggagaaaataa

SEQ ID NO: 446114 - DNA, 122 bp, Homo sapiens
ggaatttcttccatcatttccattccaagcgaggcatgtggagccgtcgccagatgaagacgctgtagccggagggtgtccgcggggcccagcactccccgctctggactagcagtggctcc

SEQ ID NO: 446115 - DNA, 122 bp, Homo sapiens
tgataaaatcctttgtaagttgaaaacaagtcaaaaatgcatttaatacacctaacctcccgaacatcatagcttagcctggtctaccttaaacatgctccgaaaacttacattaacctaca

SEQ ID NO: 446116 - DNA, 122 bp, Homo sapiens
ggcggttgcaagggcgtccagctccaccggcctccagacccgcgcgtgcagcctgggccccgcaccagcaagatccggttccgtccaagagattccgactcagactcagacacggttctgcc

SEQ ID NO: 446117 - DNA, 122 bp, Homo sapiens
gttatttaactgttagcacaggctctcttctccaaaagagagtaggaagggcatacgtttcggcccacacacatacgccgatctttgacttctaaatatcagggcacaacacacacaattat

SEQ ID NO: 446118 - DNA, 122 bp, Homo sapiens
ttcagagcgacactagttttccgaggccacccctggctccgcgatcgcgagcggacttggcggcttaacagttccactgactggaaggaaggaaggaaggaaggaaggaaggaaggaaggaa

SEQ ID NO: 446119 - DNA, 122 bp, Homo sapiens
ctgtcaaaggtcgacttcgtgacgtcaaagagcctgggccaatcagagcacaccggactgcgttttcccgaacgcccgcagcagggtcagaagggaggtggccggtctccgtcgtgacctct

SEQ ID NO: 446120 - DNA, 122 bp, Homo sapiens
atattctgttttccgttatacacaaattgctacattacttgaagagctcatagtttcgtgcgccaagtgcttaatgacatcacctgctttccatagtaacccagctgagttaaaaatataga

SEQ ID NO: 446121 - DNA, 122 bp, Homo sapiens
cttctcctcgcgagagacttagtgctcatgctcgctgcaggggtcggaggtcagggcgagcgtctcgcaggccgtaggaggaagatggcggtggagtcgcgcgttacccaggaggaaattaa

SEQ ID NO: 446122 - DNA, 122 bp, Homo sapiens
cactcctgtggatttgtattctgtgtgtcctccttaaaagctttcattgcccatacaaggcgagctaggttgtctgattgtccttgttttacctttgcaaatgcttcaattgtgcagctgga

SEQ ID NO: 446123 - DNA, 122 bp, Homo sapiens
tcctcttctgcggacagtccggcacctgtgatgctctgaccttgaacacatctccctggacgttcagggatttctcaacgcgacagaccaggacatagcactgcagcccaccaggtgcctgc

SEQ ID NO: 446124 - DNA, 122 bp, Homo sapiens
aaagcgattgctaagtagaacttcatttcccacaaagcgccgagccccagtggtggcagacggtaccctttgaactgggctcttgattggccggttgggagacgtacatttccaaattaccg

SEQ ID NO: 446125 - DNA, 122 bp, Homo sapiens
aacgcagctaacgttttggactgcagacttctttgcttccactgccactggaagccaacacgaatatctgttgccaaaacgcaaccatctacctaacctcggctcctaaaacctcatcgcca

SEQ ID NO: 446126 - DNA, 122 bp, Homo sapiens
ggttccagccacaaaaatcccccagccgggagcgacagggcgtcaaggatggtggggaaacggcttatgcaacgccgggccaggtgcgcccagaggagatgggaaccgctgtgccctcttcc

SEQ ID NO: 446127 - DNA, 122 bp, Homo sapiens
cgtcagggaattcgccggccgcgccaggcagggaacagtcagttccaacttttcccccagcggctcctgctgcatttctgaggccctttccccagagacctggcaggccgagcagggaaaca

SEQ ID NO: 446128 - DNA, 122 bp, Homo sapiens
gaagggtcctccagggcccagggggatggacagccaggcagacacaaggctcaaaggcgccgaccccgaagctgctctgcaggaaattcttccaatctgtacaccctaaattatatgcaggt

SEQ ID NO: 446129 - DNA, 122 bp, Homo sapiens
ggtgcaaggaagagcgtggtctagggaggacggacgggggtgaaggggacgaccaaaggtcgtcattataagcaaacaaccagggtctcagtgggattattattactattttttccccctct

SEQ ID NO: 446130 - DNA, 122 bp, Homo sapiens
ctcccctgcggccccgccggaggtagggggctggcagggctgtcctggcgtggtcttctccgtttccttcctagcgattcctctcgagcttcctctccccctggccgcccctcgtctctctt

SEQ ID NO: 446131 - DNA, 122 bp, Homo sapiens
ccattgcacagggacaggagaggcagtgttgcttagtagttagggtgactccacgacttacgggctatgtgattttggatgaatatcctaacttctccgtgcctctgtgtcttcatctgcat

SEQ ID NO: 446132 - DNA, 122 bp, Homo sapiens
cccacccgcttcactacaattcccaaaatgcactgcgggtcggacatagtgacgcacttccgccctctgggaggtttggggaggccttccagattcacgctactttcccggctaccccccgc

SEQ ID NO: 446133 - DNA, 122 bp, Homo sapiens
aaatgttaatggtagctttgataacatcaaattctaagggagaaaaaaacaatattaaaccgcccaagcagtgtgccctagcagaggaaaatgcaacatctcgcaagcgctgctgtaacgac

SEQ ID NO: 446134 - DNA, 122 bp, Homo sapiens
acgtcccgctttggagacactagtgaggatgtgtgggtccccagaacactgctgggaaggcgccgaggccgccggcaggaggaggcccaggaagcgccctgagccccccgcccagctccagg

SEQ ID NO: 446135 - DNA, 122 bp, Homo sapiens
tcgcgtggcaaagtgaaattactaccgggagtgcgtgcgagcgagcaagcgagcgatcggcgggcgggggcgcggagacagcgcgcgcatcgggcccagcctgctcccgggggcggcggggg

SEQ ID NO: 446136 - DNA, 122 bp, Homo sapiens
aatacctgaagcggccacagggtacaggacagggagccctccgacagaaaagagtcgcggcgctaaacaaagcctgatatcactccgcttccataagccggatccccataaactacgctcta

SEQ ID NO: 446137 - DNA, 122 bp, Homo sapiens
tgtgctattagttaacggggagccgaatcacgggggaacaaacaaacggagacagaacggcgggggatattaattgtgtgtgacaaccaggctccagcggccctctatcactgttacacact

SEQ ID NO: 446138 - DNA, 122 bp, Homo sapiens
gaggctggagctggtgggggccactaggaagcccacggcaatgcccttcatcccacttaccgcagctccagagccctgcgggaggactcagagtcagggacacagcagcgtccggcgagatg

SEQ ID NO: 446139 - DNA, 122 bp, Homo sapiens
attatttatcctcccatccataagcctgtgtttccagttcaaggatttaggtcagcaagacgcagacccaaaaaccattcatttaataacccaagaaagaaggcaagcagggtggcccaaat

SEQ ID NO: 446140 - DNA, 122 bp, Homo sapiens
cccaacggtgacggtgacgtgggcagctgccgcagttagttattctgcgtactcaaagcacggttacatcctgaaaattcttcagtcatgctaacagctatctgaggggacacgccaggtag

SEQ ID NO: 446141 - DNA, 122 bp, Homo sapiens
tagtctgtggagcatggaaaagttattagcatgtcaaaatcctgtccacgcacacatacacgcacatacacacaaatgtagtttggttacataataaatttatattcaaacttaatgaaaac

SEQ ID NO: 446142 - DNA, 122 bp, Homo sapiens
ccccgcgggacccctctaccgtcccaagccaggagggggccccctgagcggggtctttcgcgctgtccacccagccacccctccagccacttaggggcacccaggtttggcccagctccgga

SEQ ID NO: 446143 - DNA, 122 bp, Homo sapiens
agattaactgcctccaggactgacctgtacctaactcagaccagatggcacaaaagatgccgtgactgttacatcttcagggtgaaatgttaaatataccttctcaaaagaaaaagaccacc

SEQ ID NO: 446144 - DNA, 122 bp, Homo sapiens
gcggagtggagtttgccgggagaggggcattgccccatcccacctagaaaggtgtagacccgggacacactgtgtagagaggcacaaacttcacttgtgtggtgaagcgttgatcgtcctca

SEQ ID NO: 446145 - DNA, 122 bp, Homo sapiens
ccctgctgccgttgtctttacggaacctttggtgtcggggcttggaagtctccttggcgccggcttctgggcccgggcgaagctggtgcgtggcgccggggtggaggcggctaagtcccagg

SEQ ID NO: 446146 - DNA, 122 bp, Homo sapiens
tggctattgagtttgtgttgagtgtcagagacacctggtgcctttctcacctgatctccacgtggatggcctcctccctgaaaataaagcttcctaagatcaggggaagaggaaagggcttc

SEQ ID NO: 446147 - DNA, 122 bp, Homo sapiens
agaccaccataaaaattttctaggaaagttcaaaacttatttttaatacacacactcacacgcacacacacacatgcccatacacacaaacacacacattatggtggtctaccattgacatt

SEQ ID NO: 446148 - DNA, 122 bp, Homo sapiens
gacattggtgatgaattcttgtatggcactgccatctggtggcggattcttatatgacaccgccaataaattcctgagtgacactgccatctggtggtagattcttatatgacatcggtggt

SEQ ID NO: 446149 - DNA, 122 bp, Homo sapiens
gaggataggagaaatggctggttagagctgcagatctcacttaatcaagatcacacagcccgtttggggatgaggggacttgtctcttgcctcccaggtgagtggtttgtttttatgccata

SEQ ID NO: 446150 - DNA, 122 bp, Homo sapiens
tcacctgggtgtgggaggccaggcctgcacgacaggtgcaaaggcaggtcctcgcagggccgagcagcaagcaggatggaggaggaggcagagttccgtggacgccccggccacggccgacc

SEQ ID NO: 446151 - DNA, 122 bp, Homo sapiens
gcgtgcggggtcctgggcggcgggcgcgggcagtgctgctggcgctcatctggggctattcggcggtcgccgctctgcctctctgcgtcttcttccgagtcgtcccgcaacggctccccggc

SEQ ID NO: 446152 - DNA, 122 bp, Homo sapiens
gccccggccggcgctcctgacgcgcggaggagctggcgagaacctgcagatctcagggctcgcccgcggtccggcgctcggttcaggacgtccgggaaccccgcagcgcttaccctctgcag

SEQ ID NO: 446153 - DNA, 122 bp, Homo sapiens
catgcctcacggcctgactgaccgtaccagtgaacccagcgtacccctggccctggcagccggacggctgatgcatgcaaagcgggcatctccttgcccagccgcctgaccgccctggcgcg

SEQ ID NO: 446154 - DNA, 122 bp, Homo sapiens
ctctgtctctgtctctgtgtctctgtctcccgtctcttctctctcccgaccgccccgccgcgctcaccgcacgcgtcacactccatcaccgtgtttttcaggaacgtgatctccctgacctg

SEQ ID NO: 446155 - DNA, 122 bp, Homo sapiens
gtcaggaaaagggacctgccaacctgcttgttagccgagcagcgaggcactgtgagcacacgggatgatgggtgctgggtgctggagttgaccggctggcccggcagagctggttcccgcgg

SEQ ID NO: 446156 - DNA, 122 bp, Homo sapiens
tttgacctaaacggtgcttccatgtgtcttcagaagagccactgctaagttgaaaatgcacggtatggggacaagctccttcttatgtgtagagaaacaaattcagtgcggttatggagccc

SEQ ID NO: 446157 - DNA, 122 bp, Homo sapiens
ttacctgactcccacccttcccctgagccctccggcccctccatcctgtctcctgcttcccgcctctgcacagcacttagcgccgtgggtgtactgtggatttcacccacttgctttttctc

SEQ ID NO: 446158 - DNA, 122 bp, Homo sapiens
agcagtaagcccccgctctgggcagcagaactgtgcgtgacatgatcttcgtaacggcctcggcacgctccacacccctggagtctcccgaggcccccatgtgctgctgagtggccaagatg

SEQ ID NO: 446159 - DNA, 122 bp, Homo sapiens
ctggttagcgtgattgaaactaaatcgtatgaaaatcctcttctctagtcgcactagccacgtttcgagtgcttaatgtggctagtggcaccggtttggacagcacagctgtaaaatgttcc

SEQ ID NO: 446160 - DNA, 122 bp, Homo sapiens
gtgtgaataatgaaaggtgcttcatggctgggaggagccctgtccctggaggggtgaagccggacccggataagtcacagctgagccacagcaacttgagtaaccctcgagtttgtattccc

SEQ ID NO: 446161 - DNA, 122 bp, Homo sapiens
agggaagcccaggtgaggaattgggaatctgctgcccataaatgttctgttgtccctgtccgtcagccttccaacctgtggattaggagactggaactcaaaggtttcctgagcctcagaaa

SEQ ID NO: 446162 - DNA, 122 bp, Homo sapiens
tcactgggtgctgtgacatcagggcaattagcccaggacccacagccctggcgctccgcacgcacctcggtaacatcacagcaggtccaggccaatgataaccttataagaggccatgtcga

SEQ ID NO: 446163 - DNA, 122 bp, Homo sapiens
gttttgatgaagtcattgatcctcagtttccatttctgtaaaatggggctaacattctctcgctttcagggtttatgtgagggtccactgaagtgctttaggtgagagttccctataaactg

SEQ ID NO: 446164 - DNA, 122 bp, Homo sapiens
tgctatacacttcagggcacaaattagaggactggcaccagactacagcagttagactgccggagaatcgatacaggtcatttaagcatcaggactgcctatgtttcatttttgacactgga

SEQ ID NO: 446165 - DNA, 122 bp, Homo sapiens
gcttcagcccattcaattagaatgacttatgcagtgtcaatagccatatctaataccaggcgatttaaggatggtttttgtttacatgattaacactgaattctagacacttaaacttatct

SEQ ID NO: 446166 - DNA, 122 bp, Homo sapiens
tcacggagcaaaagggactgggggttagctgggtgtagacccggtggtgggttgtgatcccggtgtgggtgctggatcactttgcaggatcctcttggctcctctggcaggaatccctggag

SEQ ID NO: 446167 - DNA, 122 bp, Homo sapiens
actcccccgggagtgagggttgctgggcctgatgacgtggcttggcaacgtccctaccgccgctgcttcccgggaacctggcgccgccggaactgatcgcggcctagtcccgacgcgtgtgt

SEQ ID NO: 446168 - DNA, 122 bp, Homo sapiens
tgggcaggctaagccttctttttcctaatagccctgagccagctcagttggcagaggagccgggttcattctggagccctgaccttgatgttaagttcaggattgcaccaaagtcaacctca

SEQ ID NO: 446169 - DNA, 122 bp, Homo sapiens
ccgcccctcccgcggggctgcccctgtctctctgccggagacccggactcagtgagtgagcgcagcgcggccatagggcttcctgcagcggggtctcagcacgtcttctggctggactctgg

SEQ ID NO: 446170 - DNA, 122 bp, Homo sapiens
cggattgcatcccccgcactgccggcaagcctgtggttatcagtatccccagcttacagacgccgaagtggaaagtcaaggaggtgaagccaccagctccaggctggccactggggagcgtc

SEQ ID NO: 446171 - DNA, 122 bp, Homo sapiens
cccgccgggcgccagccgagagggcgttttccccgcccccggagactcgcccgcccggcccgccccgccccgagcgcggggagttcacctccgcccgtcaccacctccccttgtcgcctagg

SEQ ID NO: 446172 - DNA, 122 bp, Homo sapiens
gggcttttcctccgcccaggaaggaaatgcagaaatgccttcctatgcttttagggagagcgctgtagcagaagaatttgatctgatcaaaaaacctgtcttagcaaaaaacctgaagccgc

SEQ ID NO: 446173 - DNA, 122 bp, Homo sapiens
tttctaaagagaacagaaggactaacactctttccaggcagcagtgaaagaacaaggagacgcccttgctctagaggctctaaaaactaacagaggagagtcaaaactcagcctcaccgcta

SEQ ID NO: 446174 - DNA, 122 bp, Homo sapiens
gtcttcagggacctcaggggcagaaggggctggggagtgaggggccggctgtgcttctcacgcagggccctcattggcacctggccttgggcagtggcaagtatgtgggccatcatgtcaca

SEQ ID NO: 446175 - DNA, 122 bp, Homo sapiens
tcggctcccgcgtgggttgagacggcggcacggccaccagactcagctaaagggcggagtcgcgaggagaagccagtggcgaggggaggaggaggcctggatctccccgcgaaggctccagt

SEQ ID NO: 446176 - DNA, 122 bp, Homo sapiens
aaaaagtctggttcagaaccatgttcagactcaggttcttgaatctggtctcccatgggccgactgttctcccgcagtacagtggatgtgagttgtggtgctggcagggggccaggagtctg

SEQ ID NO: 446177 - DNA, 122 bp, Homo sapiens
ctggcggcggcaacttcggaatgctccgcagggcaatgtagggccccgggagggcgccttcggaggggcgtcgcaaccagtcccctgcctcactagctccaagacggggcctgcagggtgct

SEQ ID NO: 446178 - DNA, 122 bp, Homo sapiens
cgccgcgtttgaacccgaggaacggcgcgggcgggtctcagccgtgtttggaccaatcagcgtctccgctcctatgatagacatgggcgtctcagccaggccccgcccatgtccctaaaggc

SEQ ID NO: 446179 - DNA, 122 bp, Homo sapiens
atctggccctggttggcagagtcaagccgaggagcctcaccaggccctgacaccctgcagcgtggctgccagatggccctgcggggtggcattctggccaccgtgtccgaagcccgcgctgg

SEQ ID NO: 446180 - DNA, 122 bp, Homo sapiens
cgcgcagggccgggtcccccagggtcctgggctttctccttcccaacccaaccctgttcgcgcccggttctgagtccacctgcgcgtttccaactaggcccagcctcgatcctcttcttcct

SEQ ID NO: 446181 - DNA, 122 bp, Homo sapiens
agaaagaatgactgaatatttaatcataactacaacttttccttcttaaatactgaccagcgaactcacacgtgttcacgactttaaataaataattcacctttttaaagagaaatgtactt

SEQ ID NO: 446182 - DNA, 122 bp, Homo sapiens
tgggcaccccgtggcaggcctttgggctgccttgtgcacatgacccgcttccctggcctccgtcccagcccgacctctcctgccctccactctctgcccctcccctcctctgtccttcccac

SEQ ID NO: 446183 - DNA, 122 bp, Homo sapiens
ttcgcggctcaccccttcctgtacgggctgctgcagcgccccgtgcgcttggcactgggccgcctctctcgccgtgcactgcctggacctgtgcgggcctgcactccgcaagcctggcaccc

SEQ ID NO: 446184 - DNA, 122 bp, Homo sapiens
gggttgtcgcctctgccggcgcaaaccttacaaccttctccgtggggccggagttcagcgcgccgcaagatgctgggacacaaaggtggtaggcgaggatgcaatacaaatgatcagagcta

SEQ ID NO: 446185 - DNA, 122 bp, Homo sapiens
gaacagcaggatgaaggtaattctctcgttcagcttaaataaaagttctgggtatgcccacgttcaaattatttaaaagaggatcaatagcataagacaacacatgaataagggattctcac

SEQ ID NO: 446186 - DNA, 122 bp, Homo sapiens
acacacacacacacacacacacacaccatcttgtcatacaacactcccacgcaagaaaagcgaaactgctgtttgatgaatgtaaacacttggctgtttgcagcagtcgggagtcctgccag

SEQ ID NO: 446187 - DNA, 122 bp, Homo sapiens
ggggcctctccccttccacgagaaggtgttgctgggctccgtcagcggtgagctgccgggcgggagggggaggggcgcggggtggtcaggtcggccgaggacgccgtgtgtcagcacggctc

SEQ ID NO: 446188 - DNA, 122 bp, Homo sapiens
aggaagccttgagagaccagcaataagccaatttaaaacaagtttattcattaaccaagacgtggtgaatcaagcatgtccatctgatgtttctgaatgtagtgtttcgcaaagatcttttg

SEQ ID NO: 446189 - DNA, 122 bp, Homo sapiens
gggcccgcggcgcgctcgggacgtatcaacgctctgtgggtcgtgtgcgtgcgaggggggcgacgtaagggcgctccgcgagcccgtctctcctcgaatgaaaggaaacaacctccggcgac

SEQ ID NO: 446190 - DNA, 122 bp, Homo sapiens
cgctgattggcttcccctgacagtgggcggaacgcggccccggattggatatccattcgccgtccctcacccggcacctgcgtgcactctccggcgtcccaagtgagtggaggggggatccc

SEQ ID NO: 446191 - DNA, 122 bp, Homo sapiens
tgcagctgttttcaataaaaaagctgagtaattacagcagcctctcctggggctcacatgcggcccagcacaaagccaatggaacattaaggacactgaatgagctgccagaagcccttcag

SEQ ID NO: 446192 - DNA, 122 bp, Homo sapiens
ccgcgcaagctccctaagcccgcgactggcctgcacccggctccggaagtcgttcttccgcgcaggagccctgagcccgcacagccccgcccctcccggcgcccaagccccgccccgccggg

SEQ ID NO: 446193 - DNA, 122 bp, Homo sapiens
atcaagtgatctacctgcctcggcctcccaaaatgctgggattacaggcgtgagccaccgcgcctggcctgtcactgcttatcatcgtgagtaccaagttctagtccaactcctcgagacgg

SEQ ID NO: 446194 - DNA, 122 bp, Homo sapiens
ccgccccgccgcctctttgtctgcgcccaccgcggccccgggaggaccctggccccggcgcgcccgccgctccgccctcgaaccctcccgagccccggcttggggagcaaggtgcgagggaa

SEQ ID NO: 446195 - DNA, 122 bp, Homo sapiens
tccaaagtcagacaggagcagaaatgtcagtcctgtaattcttgacactcggagcttgcacgtgtgacacgtttgtatgcagacacctgcctgaacctgcacacatggctgctgacatgcat

SEQ ID NO: 446196 - DNA, 122 bp, Homo sapiens
ggttgcatcaagcattcagtccagttcattattcatcaaactgttagttagtggagctcacgttgggcatttcctctcagctcttaagaagagatagtaaaatgtgaagctttaatttttag

SEQ ID NO: 446197 - DNA, 122 bp, Homo sapiens
accaaccaccttttcagtccctttcctttttaactgtgactccctgactccgctcaaagtcgtgaagtgtaatgaaagtaatggcacatgtgtcttttctgcagagggatactatttatcga

SEQ ID NO: 446198 - DNA, 122 bp, Homo sapiens
tccagccctggcggctgcaggggatccctccgagcgccccctcaggcgtcttcctgcgaccggggagagggaaccctttacggggaaacagttttggggcccaccacccttggcgccgccgt

SEQ ID NO: 446199 - DNA, 122 bp, Homo sapiens
ggagctggaatatggggagtcagcgaggacggtggggccaggagcccttgggagggcctacggagggagcggccccaggcgctttctagagcgtgagcggtgggggagcaggcgcagggtgg

SEQ ID NO: 446200 - DNA, 122 bp, Homo sapiens
acgggcaggtgccaccgccccagggggctaatctgatccatctctgcgagggaaggtgctcgctcgtagctcccaggcgcggtctccagggcgctggggcacgtgtaggggtggggagaagc

SEQ ID NO: 446201 - DNA, 122 bp, Homo sapiens
aaactgccccgtttgtttcctctttctgttaggtgtcagacagctgacacctaacaaacacgcacgcctccaggacagccacatgccgagctgtgctgccccttgtgggtgttgggggcgct

SEQ ID NO: 446202 - DNA, 122 bp, Homo sapiens
aaaagagtcaagaagttcaagattttcgtcactcttatttttaaggcacatccaaagctccgtggagaaggggctggagggtgggaaaattatttttgtgcacattccatataagaaagaag

SEQ ID NO: 446203 - DNA, 122 bp, Homo sapiens
cgtgggcctcttggtgcttccgcagctttctcagggtggtgaaggtctgggcacagtccccgcatcggtgcctccgctctgtgcgggcacgtcccgctgggctctcggccgctggggtttcc

SEQ ID NO: 446204 - DNA, 122 bp, Homo sapiens
attatgaaaatacagattccagggccccaccctagacacagtgaatcagaagccctggggcggggctgaggaataggggcagtcagctgtgaggcggggctgagcaataggggcagttgtga

SEQ ID NO: 446205 - DNA, 122 bp, Homo sapiens
ctaaaaacacacaaaaaattacccaggcatcatggcgcacacttgtagtcccagctacttcggggctgaggaaggagaatcgcttgagtccaggaaggggaggttgcagtgagcggagatcg

SEQ ID NO: 446206 - DNA, 122 bp, Homo sapiens
gcgcccacccaccttggagattctccttcctcgagggttttacagcccgggaagctcaggcgccagagggttagaccagctcaaggtcgcgagcgcgagcgcggccggaggagaacccaggg

SEQ ID NO: 446207 - DNA, 122 bp, Homo sapiens
ttgggtcagaatgactggtttagctgggaccccattgcctctgaacctttaaacagacagcgctttgaatttcatttcagagatcaggtgacatccaaatccacttaatgtgtaactggtat

SEQ ID NO: 446208 - DNA, 122 bp, Homo sapiens
tccgggaggggcggggagatcgggttgctgggcgatcctggggtgctggaggcggcgcggcgcggccggggcggggaggggtgcggcccgcctcctccctgccccacccccagccccggcgc

SEQ ID NO: 446209 - DNA, 122 bp, Homo sapiens
agcagccgggagcccggacgtcaccccgcgagaccctggaggccgagcgccccgtatccccgtttcaagaactcaggatccaggaccgcagactccctccagggctccgatcccaagacccc

SEQ ID NO: 446210 - DNA, 122 bp, Homo sapiens
gcctctccggccccatcctgtttctctgccccacccccactgcactctggcaacaggtctcgagagacattgcaaccttgtgcattatagagacttgcaaatgctggcctctctaaccggag

SEQ ID NO: 446211 - DNA, 122 bp, Homo sapiens
tctggacccggctcgcgagggtgggggtgtgagggtttggggttcgggtttgctttttcccgagctattgcaacagatttgacagatttcctgcccaggaaattgctgcaaggtcaaacggg

SEQ ID NO: 446212 - DNA, 122 bp, Homo sapiens
acttccgctccagggaaagttgcggccatcatgctgcatgtgagacttgagccccagcgacgcttctgcgcctcctcagcctgggtgagggaccaaagatggtcaaggccctctgtcttgag

SEQ ID NO: 446213 - DNA, 122 bp, Homo sapiens
cccgtggcccctcagcaggagcgtcggctggtttgactgtggctgtcgttccgactccgacggtcccgtggcccctcagcaggagcgtcagctggtttgactgtggctgtcgttccgactcc

SEQ ID NO: 446214 - DNA, 122 bp, Homo sapiens
tcacagtcactgtccaccacccaacaccatccactaccacaccacactggtcacccggaacgcccaggggcaagtctgccctgcctcaagcctgctgctcctcctgccatcccttctcatcg

SEQ ID NO: 446215 - DNA, 122 bp, Homo sapiens
gagggaaagagacccagaaaggacacaacccgtcagagacctgggagcaggggcaatgaccgtttgactgtttgtggcttgggcctctgacatgacttatgtgtgtgtgtgtttttggggtg

SEQ ID NO: 446216 - DNA, 122 bp, Homo sapiens
tcttatctaaaaaaaacacttgtcttgacctgggctgccataacaaaatgccatagactacgtgccttaaacaacaaaattttattttcactcagttctggaggcttggtgtgcaagttcag

SEQ ID NO: 446217 - DNA, 122 bp, Homo sapiens
gacaaacaccagagtagcccacatgccctgcatcaaccagggagactggagggcaaagcacgctgggtcaccaccgagcaggacctggctaattaacagggacacatagcatggtaaaggtt

SEQ ID NO: 446218 - DNA, 122 bp, Homo sapiens
ctcaagcgatcctcctgcctcggcctcccgaagcactgggattataggtgtcagtcacagcgcctggccagaagagttttcgagggctggcttttcaggtcgttttctgggcctcaatgtct

SEQ ID NO: 446219 - DNA, 122 bp, Homo sapiens
gacaagggggttggtcctgagggcagcccaggagcatgtgccagcacaaggccacgcctccgtggacaccgcagcatgccagcacaaggccacgcctccgtggacaccgcagcatgccagca

SEQ ID NO: 446220 - DNA, 122 bp, Homo sapiens
aacgccagcgtggcccagctgcataccgctgggtacaggagagagttcctggaataccaccgccctccaggagctttgcatacctgcgggggcccgggggcattccacctcatcgtgcacct

SEQ ID NO: 446221 - DNA, 122 bp, Homo sapiens
aatgcgctcgaggcgggagggggtccaggccttcttctcctcgccatgctggggagtgggcgtgcttgcaccccctgcggccccgcgctcccgcagcctgcgctccagctgctggttgcgct

SEQ ID NO: 446222 - DNA, 122 bp, Homo sapiens
ccagtttctttcctcttagagactgaggtttctccctttcctctcacacctgcttctgtccggaccggccgcttctacccagcggaccctcggacggtcctcgcaagatccgggttacaccc

SEQ ID NO: 446223 - DNA, 122 bp, Homo sapiens
ggctgtaaactccacatagttctttttaacatgcagagcacttaaacttttatattgtgtcgggctttgagcttggagataaaacgcctgataattgccatgttccatgtggaataaatgag

SEQ ID NO: 446224 - DNA, 122 bp, Homo sapiens
cccaactatcccagacgccccagccccgggggacgcggtgcagagaaagaccgcagcacccgccagccagccagcagcgtcctccagccgcgaatccccgcaccccagccttccaacgggga

SEQ ID NO: 446225 - DNA, 122 bp, Homo sapiens
cgcttcagattccccgggccgcggaccgcaggctcccaggtagcacctgccccagcctggcgccccaacctccgcctccgggcctcccacgcagtgagtcacctggaaaggacgtaaacaga

SEQ ID NO: 446226 - DNA, 122 bp, Homo sapiens
actaggctcctcggcgcctccaagtttgggacagtagcgtgagggcttggcgtcgggcgtcggagcaggagaggtcactagttgtcttagtcggtgtgtgttgctgtaaaggaacacctgag

SEQ ID NO: 446227 - DNA, 122 bp, Homo sapiens
ataatcggaggcagcactggaaaaaggagcatctggatgcagtaaagacccatcccttcccgcactggagctgttggctcatccctggaaatcacaacaatcaagaatggagaatcgttctt

SEQ ID NO: 446228 - DNA, 122 bp, Homo sapiens
aggcggcggaatgggcagggtcgggtctcacaggttcccccctctggagttggggtttcccggcccacgttcactctctggatgtgataggtccttcccggccgggaagggctggaaggggc

SEQ ID NO: 446229 - DNA, 122 bp, Homo sapiens
tgtgtcacctcccacagtcctcagcctgtgccctcccattcctgccccttgatctccaggcgctgagccagaggattgtcgggaggaccctgggcaaagacgcctaccctgccatgctgcgc

SEQ ID NO: 446230 - DNA, 122 bp, Homo sapiens
cctacatgtaatcctccctcctctctcctggaccacagcgcccgctctgacagcagggggcgccctcgggccggcggagcctccgcttacccacaatcagggccttggtgcgcagcccgccc

SEQ ID NO: 446231 - DNA, 122 bp, Homo sapiens
gagcctaatattagcattcaaatgacctcaatacaaagtagaatacaataaatagcactacggaaaagttacaaagttcaaagaaggaacacagaacaggtgttaggacaatacactttcac

SEQ ID NO: 446232 - DNA, 122 bp, Homo sapiens
gaggctggggttaaaatagcgttcgctaccactgaggcgcttattatgccaaactctgggcgaacgtcttgcggttccagtgtcttatttattcgcataacctctctgtagggctctctgta

SEQ ID NO: 446233 - DNA, 122 bp, Homo sapiens
cgccgccgccatcatggtctctcttcaatgacgcgccatgcgctgcattctgggagcgggcgccgcggccggccaatcgccgccgcgaccccggagcctcacgcgctcccagggccgtcgca

SEQ ID NO: 446234 - DNA, 122 bp, Homo sapiens
ccggcctgagcgccttccgcgctgctcggcctcaaggcgtgagtcaccaagggcaagtcccgtgacttggtcctcagggtctccggcctcggcacattaatcttcagacccggctttttcga

SEQ ID NO: 446235 - DNA, 122 bp, Homo sapiens
tccttcagcctggcacagggaggaagtgaggtcgaccctgctgcagccgccggagaacggcgctgcgcgacttgttcttggaggcgacgtcccacctgttggacagactttggacccaaaga

SEQ ID NO: 446236 - DNA, 122 bp, Homo sapiens
gtaagcagtgaattcaatgacgacacagttcagcaagtcagcagttactcaggcaatttccgagccaccagcccccaaccctaataacaaagaaggcccagcctctcagcctgttttaaatt

SEQ ID NO: 446237 - DNA, 122 bp, Homo sapiens
ttacacagtcaggacagccaggacaacggcttggaagagtgagtggcggcggctgtaagacgccagctttgttggaacaaagcagcaggtgagagagccacagagatcaacgctccaggcac

SEQ ID NO: 446238 - DNA, 122 bp, Homo sapiens
atttctgataaaagattacttttcttcttggtaatggatgcatttctaccataccttcctcgaaggaactcaaagtacttcacaggcgtgaatggagctggggggtgggttggacatcagga

SEQ ID NO: 446239 - DNA, 122 bp, Homo sapiens
cacgcaagaaaagcgaaactgctgtttgatgaatgtaaacacttggctgtttgcagcagtcgggagtcctgccaggtttaagtgctaagatgggaggtgaaccccaggggtttccccctgcc

SEQ ID NO: 446240 - DNA, 122 bp, Homo sapiens
cgtctgggtttccccagtgccccaaattctctctttggtgactaagaatttaggatgactcgccattggatttcaccaagtagggtgttcatctttccaggcttatgaaaatttggaaacat

SEQ ID NO: 446241 - DNA, 122 bp, Homo sapiens
tcctcagcccttgtgcagtctaggggacggagcgctatggagcagggtggcgctgctcgtcggggaggcttggcctgctcataagctcacagcgggggagtggggagcgggaggagacttca

SEQ ID NO: 446242 - DNA, 122 bp, Homo sapiens
aaccagaaaggactaggaacacagacacattgaagggtggggggaatggaatttattgagcgaaaagaaaaaaaaaagtctcagcaaagtgagaggggatcctgctaacacaccccaacctc

SEQ ID NO: 446243 - DNA, 122 bp, Homo sapiens
tggccagcagccagcccaggtgaggcctggaacaggaaccaggtcacagagggaacgaggcggagggggcaggcgggcccaggggagggcaccaggcacggccagagtggctccaggaagga

SEQ ID NO: 446244 - DNA, 122 bp, Homo sapiens
aagtgtaaaacggaagctcaaccacgaatcttacctctcagcatgctgggagttgtagtccgccgctagaaagctggaaacaggaagtttggcgggggtaggaaatcaaggaaaccggaaca

SEQ ID NO: 446245 - DNA, 122 bp, Homo sapiens
ctggcccacggaggaaggggcccagtgtgtttgtgccggctcgaggctcacgcgggctgccggggtcacatggcccgggcatgtgcagcctgctccatttctaccacaacaactcgctcata

SEQ ID NO: 446246 - DNA, 122 bp, Homo sapiens
gcgggagggaggggctgctgtgggcgctgcagccggagagccacaggcagacaaacgcgccgcagagcccatgtttggaaggcaaaaaggaaaaacaatcatgtatgaatatacccctgttg

SEQ ID NO: 446247 - DNA, 122 bp, Homo sapiens
cacaaagtgctttggcatcctgataagagaatatgcaaacatcaggagggcaggtgaggccgatcttcttgggctctttgaaatcatagaatcgtagacttcagagttggaagtgaccccag

SEQ ID NO: 446248 - DNA, 122 bp, Homo sapiens
cagaccccaaacagccaggcccaaaggacaggtgaggcgaggcgagaacttgtgcctccccgtgttcctgctctttgtccctctgtcctacttagactaatatttgccttgggtactgcaaa

SEQ ID NO: 446249 - DNA, 122 bp, Homo sapiens
ttgggatgtaattggaggattggaccggtctccccgctccctcgaccaatggctgtcacgcggtccctttaagaaaccaggaatccgcccggagtcggagcccaaaacagatcctcttctct

SEQ ID NO: 446250 - DNA, 122 bp, Homo sapiens
gccgggctcacactgcagtctatcccagggccagttccatctgtgccagttttggaataccgggaccacagtatcagttcacccgacaactaccactccccaagccttcagcgtggaacctg

SEQ ID NO: 446251 - DNA, 122 bp, Homo sapiens
ggcagccggcgatggggaccagggcccgggacaggcgggtgatgtctttcctggaggcagcgatgcaggaagcccgcggggagccccggcttcgccgctcggggttcaggtgcacgggcaca

SEQ ID NO: 446252 - DNA, 122 bp, Homo sapiens
aaagttacagcgtctccacctgggcgtggagatctgggccaccccagccccgctgggcatcgcaggaatgggcttccagtggctcctcagtgtggccattacaccatcaaacgaaaaccacc

SEQ ID NO: 446253 - DNA, 122 bp, Homo sapiens
gtgttttcttcctccttttgtaactaggcaaaacagtcttaagcataaccagaaagctgtcgaaaaaaaaaaaacaaatcacagaagatatttgaaagtgtgctctaacgagttatttactt

SEQ ID NO: 446254 - DNA, 122 bp, Homo sapiens
tcccacgcccacggagccttgcttactgctagcacagcagtctgagatgcatctgcgaggcggcagcctggctgggggaggggtatccgccattgctgaggcttgagtaggtaaacaaagca

SEQ ID NO: 446255 - DNA, 122 bp, Homo sapiens
gaggcccgcagagcactaggctgggggtgcgcctgggcaggaggctgcacggcaaaggcacggggtgtgccatggagtttccccgggagccgcagccctgcccactctacagggcccccggg

SEQ ID NO: 446256 - DNA, 122 bp, Homo sapiens
gcgggcggggcgagtggagggcgtggcctgccgaggggcgaggcgagtggagggcggggccgcgctgcccgccccgccccggccccggccccggctccggcgctgctcccaccgccgcggca

SEQ ID NO: 446257 - DNA, 122 bp, Homo sapiens
ctacttggagcgccctggctgcggccaaggccaacagcgggcgccggaaggcgggatttccgccacacgcacgcactcccgcactcccacgggagactgcttggctcggagcgctcttgatc

SEQ ID NO: 446258 - DNA, 122 bp, Homo sapiens
gtgactccggcctgcccatgagcagaggctgggcccagtcgggcggcgcgtggggcggcacgtcctggggtggctcctcctccagccgcctgcaggaccgagacgtgacagagcatggtcag

SEQ ID NO: 446259 - DNA, 122 bp, Homo sapiens
gcgggagggcccaaagcagcctgtacatggcgcatgcgcggctgcagcggtgggcggggccggcctcgactgaagccccgccctggggtcctttcgccctgcccagctccagcaaagggcct

SEQ ID NO: 446260 - DNA, 122 bp, Homo sapiens
tgggcaacatggagatgtagttcacaaactgtgtgcccgaggcaggaggactcaatgctgcggggcatggcggccctgctgacctggatcttctcgtcccggtccgcagtgaggacgaagtg

SEQ ID NO: 446261 - DNA, 122 bp, Homo sapiens
cttgatccgcccgcctcggcctcccaaagtgctggtattacaggcgtgagccaccgcgcccggcctattgtcagactcttaatcaagcctgacttttgggtttagctctggctccagcagag

SEQ ID NO: 446262 - DNA, 122 bp, Homo sapiens
gttggctcatgagttccctggcacgagagacttgaatgtgttcgtaacatgagttacagacgagaactgggtcatagagttgctgatcaggaatgggcagcttcaggtggcagcatccagca

SEQ ID NO: 446263 - DNA, 122 bp, Homo sapiens
gcccgaaggcaggcgctctccaaggtccctctccccagaagagccacgatcccaggaagccggcttgtgcagaggaaagaaccgcacctcgttgtcagaacaaccccagctctgccacctac

SEQ ID NO: 446264 - DNA, 122 bp, Homo sapiens
ggacttctcctcctcgttgttgttggtcgatgaccctgtcttcatggtgtcctgcgcctccgactgccattcccctcgggtgatcagcctgcgcatctgggggcaaatgtttgggcgtgggg

SEQ ID NO: 446265 - DNA, 122 bp, Homo sapiens
acaatgaggcctgtctgacccccacttcccattatggcctgaactagttttcaggttaaccgtggaatgccctgggcttagggagggtccatcagtcgggtggggtcaggcggagattggaa

SEQ ID NO: 446266 - DNA, 122 bp, Homo sapiens
cctcacttcgcagtggtgacaggcaaccccgtcagggcagggagcttccaaaggccagtccgagtccatgccaggcgtccactaaatctgcctctccctctccagcgagcaggtgcagccct

SEQ ID NO: 446267 - DNA, 122 bp, Homo sapiens
aattattaaaggctttagcatgctatgtcttgcccagggtattcataaactctaatgtcacgtggagtcagcctgtcctctgagattcaagtgttcaaatgaaataattgactgcacctcaa

SEQ ID NO: 446268 - DNA, 122 bp, Homo sapiens
gaaggcatcccccccgatcagcagaggctcatctttgcaggcaagaagttggaagatggccgcactctttctgactacagcatccagaaagagtcgaccctgcacctggtcctgcgcctgag

SEQ ID NO: 446269 - DNA, 122 bp, Homo sapiens
acatcttaagcgccacaaattaacaaatcaaaaccaaatctctctctccctccgaagccacggctaaggaggctcactgcccagttagtggctttcaaactacccttacaagtgagacatct

SEQ ID NO: 446270 - DNA, 122 bp, Homo sapiens
aacacaatcctgaaggtgaatgcatgctctcttttctgacattaaaggtggtttcaatcacgtctggcaccgactgaaaaaatgtattctggaatgcctcaggatgaaggaaagaaaaacat

SEQ ID NO: 446271 - DNA, 122 bp, Homo sapiens
ggggcggcagcccaggggctcagagacgcggagacagcccgagacactgcgggccagagacggggccctggactgggagaggggcgcacagactattagacagcgctggagagagacgctcc

SEQ ID NO: 446272 - DNA, 122 bp, Homo sapiens
accactagttaaaaatactcccttaaggccggccacagcagccttactgctgcagtgaaacggagagccccacacaactcaaaaaaccagttctcagaaccacttgccctgttctgcttcca

SEQ ID NO: 446273 - DNA, 122 bp, Homo sapiens
attacatgaatttttattgtaccatttcttatggtggcaaataagcaaactgtgagtaaacgagggcagctgaataaatttacagtatacaatattagagaatattatgttgcaattgctca

SEQ ID NO: 446274 - DNA, 122 bp, Homo sapiens
caactttcatcaaccagtcatcaacattgaaaccgtaagcattgccctccgttcctgtttcgtcaatctgtttccctggtatgactctaatgtatgagacctccaaggttcaactgtttgtg

SEQ ID NO: 446275 - DNA, 122 bp, Homo sapiens
ggaccgggcggggactggggcccaccgcggggcgggtctttcgggcgggaaagattgcggcgcaggctccctttcccgcccgctgtcccgcctcgtctccctcgggcgggaacgcgagccag

SEQ ID NO: 446276 - DNA, 122 bp, Homo sapiens
tctgctagttaccgggttacttgtttccgtggctgaaagatacgggtttgtttttgttctcgccgatgttgagtctgatgtggcagccacatgggtttggccgtggatgcatcctccattgc

SEQ ID NO: 446277 - DNA, 122 bp, Homo sapiens
cagaggcagaagggtacaactcagctgtgctgttggaagggatccgtgggaggtggcattcgtcactgcacctgcggatcggaacaaggccgggcaccgcgccaaggactcactcctgctgt

SEQ ID NO: 446278 - DNA, 122 bp, Homo sapiens
gaggcgccagcgggaggcaacatcaatgcagttagctacacgggcctgaaaactggaggccgcgacaagcgtcgctgagtggaggcccagtaagtcccacccactaggccagcccgagcgcg

SEQ ID NO: 446279 - DNA, 122 bp, Homo sapiens
aggtctgttctgggaaccgggatccctctcgggccagtccaggccggccgcctctcccgccggccgccagccccacacagttggcgaagccctctaggccccttggctcctcctcgccctcc

SEQ ID NO: 446280 - DNA, 122 bp, Homo sapiens
ccatgacattgtgagagccagagagaacatccagaaatccctggctggaagctcaggccccggggcctccagtggccccagcggagaccacagcgagctcgttgtccggatcgccagtctgg

SEQ ID NO: 446281 - DNA, 122 bp, Homo sapiens
accctttcagttctggtactgggcagtgggctctctccactcgctgcctaggcccttcgacgctcccacccagaaatgatgacatggctagtgaggctgacagtcttgctgtaattgggaga

SEQ ID NO: 446282 - DNA, 122 bp, Homo sapiens
cggggcactcggccccccgtcggaacactcggccccccgtcggggcactcggcccaccatcggggccattacatgccacgagtcctttggtgtcagatccctagtgcggggccaggtgaccc

SEQ ID NO: 446283 - DNA, 122 bp, Homo sapiens
ccggctgcgtggcccgcgggtcctgccggccgagggtcgccggatcgccagcagctgcgacgcactaacagccgctcacagtccggaatcccacgctccctagcccgcggtgagcgggggaa

SEQ ID NO: 446284 - DNA, 122 bp, Homo sapiens
ggcagttcaccagcctcggcctcccaaagtgctaggattgcaggcgtgagccaccacgcccggcctagccttgtatttttaaatgtgaaaatggttcctgaatctggattttcatttaaaac

SEQ ID NO: 446285 - DNA, 122 bp, Homo sapiens
agtaaccgtggaacctaaacactgatgtgcttcgtccgggttttaaaaaggcgcccttaccgcggtttcggtgtttggcgtcttcacgccatccgggttctcggtgctctgctctgaaggat

SEQ ID NO: 446286 - DNA, 122 bp, Homo sapiens
gtgattaagagtatgagcattggagaaaaaacaggtacatggggccttctataggacacccggccagtattccttaagaccgttaagatcatagagaatgggaaagactgagaaactgtcaa

SEQ ID NO: 446287 - DNA, 122 bp, Homo sapiens
tccggtagtgaaggcctggtgaacggctgcgcgacagaggacacttccttttgcgggtggcggcgaacgcggagagcacgccatgaaggcctcgggcacggtaaggcgggcgcggcgcggca

SEQ ID NO: 446288 - DNA, 122 bp, Homo sapiens
cttgaaaccccccgtttcagggagagccgctggcgaaggacttgatgcgcagccgcagctcggaagcggggggctcccctgcgacacctccccgcttcaggggcgggcccagacccgcgggg

SEQ ID NO: 446289 - DNA, 122 bp, Homo sapiens
tttctcgcgcgccagctcacgcacgcgcgagtgcgcgctgcttccctccccttcccctcgcgggagccgagtgaccaatcccgaggctgcatacaaatgaccacgcagcacgggggcggggc

SEQ ID NO: 446290 - DNA, 122 bp, Homo sapiens
gggtggtgggagggatttgtcaccggaagtgaatggcctagcctaaagtcgggaccaacccgaggtgtgggtgggcagccaagacggcgcagtcactggcaaaaacccgaggcagcgggcag

SEQ ID NO: 446291 - DNA, 122 bp, Homo sapiens
gcatagtgggcaggggctgtaagtgctacagagacacttgacaggtgccaacttgggccacgggtgaggcgaggacatatttaggtctgtttaagcctaaaaaagctctaaaagaaaatgtt

SEQ ID NO: 446292 - DNA, 122 bp, Homo sapiens
gctctgagacctggggaggggcggggcgtgggaagaggcagtgctgggcgggctcccgggcgcaggcaggagctggacaggatatttggaaaccgagaaaggaggcactgggggtccggact

SEQ ID NO: 446293 - DNA, 122 bp, Homo sapiens
gcagcctccaaactccacgcacctgaggcagagacggcggtcgggcgcacgtggagggctcgggctggtggaggcggtccacgctcccacaacccaaccttcatcatcttcacactggagac

SEQ ID NO: 446294 - DNA, 122 bp, Homo sapiens
gccgcggccggcgcgagttggggcgaggcttggcggccggcggcggccccggctgcagcccgggctcccgccgccccccttgcagcccccgcccggcccacgcccagaggccgccccggagg

SEQ ID NO: 446295 - DNA, 122 bp, Homo sapiens
aggactgactcctcaaagaccaaaactggaattagcaatcccgctgtttacccggaggcccggtcaaatgtcttaaatctgggaggattcctcctgggaaattccagtaagggcgcggagca

SEQ ID NO: 446296 - DNA, 122 bp, Homo sapiens
gcttttgtgtagtgtttctccaaggcgaggtcaaattccatacacttttataaccgtagtcgatttttctttcgtgtgaatatggttttcgtgtcattagtttgcgatttgatttgcttacg

SEQ ID NO: 446297 - DNA, 122 bp, Homo sapiens
agtctttgaagagcgcattgactagttgctggattaacaaattttgtttttggaattattcgtagttgcttagcactgaagctttagaaaaatttaatcctttagtgaaaaggggctaacaa

SEQ ID NO: 446298 - DNA, 122 bp, Homo sapiens
aggaaattgggtaattattacactttatccctttccttcatccactgatccagggatttgcgctgcattgcagattttataacagggaaaataaaaagtgttggttctagaataagaatgaa

SEQ ID NO: 446299 - DNA, 122 bp, Homo sapiens
ggttactttattttatattattttattttgagagttgccataattaccggcgccaccccccgtgcaccctgaggtctggttggcgagccgctgctgggagttttctgcaaataccccccaaa

SEQ ID NO: 446300 - DNA, 122 bp, Homo sapiens
ctatcccggatattttaatagtaacaggaacaaagatgactcgaaccccatcaaatgaaacgatattttcattcaattgatcgcaaagtgtcttcaattaataacttggcacttatttaaaa

SEQ ID NO: 446301 - DNA, 122 bp, Homo sapiens
ctttggtggaggtcgggaggaggcgccggcctggacagttttcctagaaaatattctctgcgtgtacccgcgaccttgcctctcgtggaaagccgctgggagttggagcggctccctcctgc

SEQ ID NO: 446302 - DNA, 122 bp, Homo sapiens
cgccccgcccgaccagccccggcctccagcgaagtcttccgctccggcgtcaggatccagcgcacctccccagtacccagcgcacctccccagtacccggctcgcttccctgttctccggaa

SEQ ID NO: 446303 - DNA, 122 bp, Homo sapiens
cggcgctgaccccgcgtccccttctcccccagcgcccgggagctcttcgccgcccgctcgcggtcgcagaagctgccccagcgctcgcatggccccaaggactttctgcccgacggctcggc

SEQ ID NO: 446304 - DNA, 122 bp, Homo sapiens
gcggaccagctcccaccagggcgcaatactcagggatgtgcaggggtccacctagacctccgggcccttgagctagacaacctgagcctcagcttcctcccttataaaacgggaaccacaaa

SEQ ID NO: 446305 - DNA, 122 bp, Homo sapiens
tagagcactagatgttttctgacattttactcataatttatcttatttcatccttcttcccgtttgaaggatgcttcaattatccctactctataaatgataagaacccctcccccaaccat

SEQ ID NO: 446306 - DNA, 122 bp, Homo sapiens
cacggggatgactctgcttattcctgccaaccctgccctcagctgctcactggcccctgtcgtgagcgtgggcgtgcatgtgcacacacttgcacacacaggcacatgcacgcacacccggc

SEQ ID NO: 446307 - DNA, 122 bp, Homo sapiens
ccagtctgggcagcagagcgagactcttgtctcaaaacaaacaaaaacttgttcagccttcgtacctgctctgccctgtgtttgaagccgggttcctagcgtttccccagcagatggcgtct

SEQ ID NO: 446308 - DNA, 122 bp, Homo sapiens
ccggggcggcagggcctgcaggccgctccgagtgcagggcccgccgagcccacgcctacccggaactcacgctggcccgcaagtgccgcgcacagccccagttcctgtccctgcctctccct

SEQ ID NO: 446309 - DNA, 122 bp, Homo sapiens
tctcttggggccgggcagtgtggggtttggggagagagctggttccgcgagttctgacggcgtgttctggccgcacagacagactgtgatcctctcgtgagaggaggatagtgtacagtgtt

SEQ ID NO: 446310 - DNA, 122 bp, Homo sapiens
ggaagaagtgctggcattaaatttaccgttaacgccagggtcaatttactaaacagtcatcgacgtgtggttccacaagacctctgggtaaattccagaaactgactgggaggaagatagct

SEQ ID NO: 446311 - DNA, 122 bp, Homo sapiens
ggattaggcagggggtgggaggtggggctggggcagggggggtcttaggttggcctgagacggagatcagatactcaattcctcagctaaggcaggagcagccacctctcttggcctttgcc

SEQ ID NO: 446312 - DNA, 122 bp, Homo sapiens
tgtagcagtatcaccatgaatggcaataaatcagattcacccaagagcaaaattattccacggtggatgtctaaaaccatgatcgtaattacttaatggctgtcatttgaatttacaagcag

SEQ ID NO: 446313 - DNA, 122 bp, Homo sapiens
ctcccctggcctgccagagatgcaggaacaagactaagaatgcatctgtataccaggccccgtgctatctcatttcatatcctcaccaaccctttgcagaggttgctatggcaacccccatt

SEQ ID NO: 446314 - DNA, 122 bp, Homo sapiens
tcaggccgggctggctgagcgcgtgcgattctggggctgcccaggcgagcccaggagaaccggcgagcccagcggcgcctgcccgcagctgcacccccacctgccagcgcgtgccgcttccc

SEQ ID NO: 446315 - DNA, 122 bp, Homo sapiens
gcagggccggcggcgacagtggcggggagcaggctccggagccccgggtgcagatgtgggcgcccctccggatgaccccggctgagtccacaggtcccgtgtgccccacggctggggctctg

SEQ ID NO: 446316 - DNA, 122 bp, Homo sapiens
gttccgtcaccagctcagatttactcttctcaagggtgccagtgagagacagcagcctgtcgaaatgggagggttgactggaggattagaaatggatccttggactgacatgcactgcttgg

SEQ ID NO: 446317 - DNA, 122 bp, Homo sapiens
ggaaaccccccaggggacagtgcccctccctcctccaaccccagatccgcgcgaagggagcgcccccaggagggggaccatctacctcctcgcctggcagctccccaggtggccgcagtttg

SEQ ID NO: 446318 - DNA, 122 bp, Homo sapiens
ggtgctgcttttgaaataacagaaagtaacaaaaggcatcaccaatatgaccatcagccacgtcggaaagtctaggctccgggggccgggtgggccgcgctctagatcagggaaagtaaaca

SEQ ID NO: 446319 - DNA, 122 bp, Homo sapiens
ctatctgggctgaagtctcctagaaaacattttcccgtttctagtacggcacaaagccttcgcctacaagaatgtatgcaagtatgtttaaaaataaagaaggaaacagtgcagaaaatcag

SEQ ID NO: 446320 - DNA, 122 bp, Homo sapiens
aattaaaggcaagacaatgttcctagttggtttagggaatcagtaatttaccccagggtgcgggtggctcacgcctgttatctcagcactttgggagaccgaggcgggtggatcacttgagc

SEQ ID NO: 446321 - DNA, 122 bp, Homo sapiens
ctcggtagggattcttctcgttgaggccactgagggaggtggagagccgtgtctcgggcccggggccctcaccctctgaggccagctccgcaaaggcctggggctcacacccttcctgcgcc

SEQ ID NO: 446322 - DNA, 122 bp, Homo sapiens
cgcccgcgagtgcgccccggcccaggggcgagacccaagccaggcccctggggacagccacgtgcccgcgtgcccagtgcgctccctgtgttcaagttggagaaatgacacctggaaaaatg

SEQ ID NO: 446323 - DNA, 122 bp, Homo sapiens
gacacggagacaaagcacacagccggcttccaacaaggggggaccttggggtagggggcccgatttgggtctgagccaggtctagttctgagggtcccaccaaaaaagtcggggagtgccaa

SEQ ID NO: 446324 - DNA, 122 bp, Homo sapiens
aggcgcctgcgtcctctacgacaatgtggtctaccgatacctgtatgtcagcatcgccatcgcgctcaaatccttcgccttcatcctgtacaccaccacgtggcagtgcctgaggaaaaact

SEQ ID NO: 446325 - DNA, 122 bp, Homo sapiens
tagttgtcacaacaagggataagctatgttttctttttttctttttgtcatttccaggttcgtaagaagaactcgctgaaggactgcgtggcagtggctgggcccctcggggtcacacactt

SEQ ID NO: 446326 - DNA, 122 bp, Homo sapiens
agagttccgtcggccaaaaccacttgaaactcgctcagcggcgtcggggctccagccaggcgtcaccttccacagcgaacctgcgaaccacagcgtcccctgggggtctccgtccgcgtggc

SEQ ID NO: 446327 - DNA, 122 bp, Homo sapiens
tcaccacaaccctttgacataggcgttattattaaccacattctatactcagggcaatagcgccagaagtaagcactgtgttcatcaaggttgcacagatggtcatttgtggaagaggaatt

SEQ ID NO: 446328 - DNA, 122 bp, Homo sapiens
cctccctctctcccgcccggctgaggcgaggtggggcttttgggaaaattacataatccccgcccctgggccggaactgccctcgcctatcccaatcctcctacctaggattccgtcaagtt

SEQ ID NO: 446329 - DNA, 122 bp, Homo sapiens
agggagccccgcgagcaaggatgggtcccgaagtcccgggcttagcctacccgagggtggcggacgcctgcaccgcgcgggagcgcagggtcgagcgctgggtcacccaggcgcgccgaagc

SEQ ID NO: 446330 - DNA, 122 bp, Homo sapiens
acccttggagttcactcacctaaacctgaaactaataaagcttggttcttttctccgacacgcaaaggaagcgctaaggtaaatgcatcagacccacactgccgcggaacttttcggctctc

SEQ ID NO: 446331 - DNA, 122 bp, Homo sapiens
gaaaaagctgaggcccagagaggtgaagggacttgcacagggtcacacagccgaccaagacgctttccaccacgcccaatcgatcgcccagctcaaaataccggctggtgtgtaggtgggag

SEQ ID NO: 446332 - DNA, 122 bp, Homo sapiens
aagggagcagaagatcggggtgacggctgtggtgtggccgcagggctgaggtggggaggccgggaagagagagtttcttcaggagggatcactgtcttacctgcagcagcctcagttatgtt

SEQ ID NO: 446333 - DNA, 122 bp, Homo sapiens
gctggatcccctggggacggtcttggcccaaacgtgagtggtaaaattgtctccagctgccgtagatggacgcctctcccaaggtggggccctgaaacttcctacccactccccacttccac

SEQ ID NO: 446334 - DNA, 122 bp, Homo sapiens
cagcatttcctctcagctctgggttggaaaaagccgcagcagctgatgggcccgggaacccgaggccccgccccctaggtggtcctagcctttgcgcgtgcgcggcgtgtctgcgtgggcgc

SEQ ID NO: 446335 - DNA, 122 bp, Homo sapiens
caccggacccggagccgccatgcccaagtgccccaagtgcgacaaggaagtttacttcgccgagagggtgacctctctgggcaaggacttgcctcggccctgcctgaagtgcgagaatgtgg

SEQ ID NO: 446336 - DNA, 122 bp, Homo sapiens
tttaacagcaccaagtagatgcccctcagctattgcactaacacaggcggggctgttgcccgggactttgcgggactgtgtatgtgtgtgcacaggggtcacatatggaagtcatggagagg

SEQ ID NO: 446337 - DNA, 122 bp, Homo sapiens
tgcactgccggaggctgcaatcaagggcagatgccactcacttggagaccagggcaaaggcgtcagagcagacgggcgggcagggcaccaggcggatggcaaggcggcccagggcgctgggg

SEQ ID NO: 446338 - DNA, 122 bp, Homo sapiens
aagaggcgcccacacggatgcggggaccgcgcccggtgactcgggctggcctctgctctgcgcgctgtccggggccctgactctggaggagaaacggagccatcccccttttaaaatcagcc

SEQ ID NO: 446339 - DNA, 122 bp, Homo sapiens
cgcggggctggagccggcgagcgcgggttgaaagccagccaagctctgcagcgcccgacccgggcgtgtacgccgccgccagtccccgcagagaaatcgtcctcctaccccgcctccatcgc

SEQ ID NO: 446340 - DNA, 122 bp, Homo sapiens
gtaaatgagaaaagacgtgaggttccttttgttctttacctgtggcctccctgccctacacggggactctagggtggaatgtagcaaagcccatccaccagccatgtactaccccccaaccc

SEQ ID NO: 446341 - DNA, 122 bp, Homo sapiens
ggggacactgcgaagccggtcccagacatccagcctggcagtgtccagactgcgggggaccggggtccgagccgctgccgctcgatcccgcgcccccggggctgggatgacccctgggggag

SEQ ID NO: 446342 - DNA, 122 bp, Homo sapiens
gccccccacccctctcccccctggggggccccgtaccctcggcattgcctaacggacccccgtccccccgctccggccgtgaccccttggccatactgagcgagatcagtaagtcggtcaaa

SEQ ID NO: 446343 - DNA, 122 bp, Homo sapiens
ggagctgtggcaaacgtgccctcccagctttccacatgctggggtttcataaaccaggagcgcctcagcgaaactccacggggaggacacagggctgccaacttcgacagccgaataagggc

SEQ ID NO: 446344 - DNA, 122 bp, Homo sapiens
gagacgctcagcccgtggggagtcatgagagacgctcagcccgtggggagtcacgagagacgctcagcccgtggggagtcacgagacacgctcaccccgtgggaaactacgagacacgctca

SEQ ID NO: 446345 - DNA, 122 bp, Homo sapiens
cgcctccaggcacaaatgttgagggggttatacgttagactgttgggggctttttgtctacggaatatccatagaaaaaaattccaagaatgtttggagagcaacgcatgtgtagtggaata

SEQ ID NO: 446346 - DNA, 122 bp, Homo sapiens
tgtaatgatgatgaatccatcttgatacctgctggctgcacacctagtgactaattgtcccgtggcagttgactcatttctgaaggacagaacatgagagaaaaaagtgaggagggaggtag

SEQ ID NO: 446347 - DNA, 122 bp, Homo sapiens
atcacgacacatgactgtattcccaacccctggcacctgccaggctgttttctgcctctacgtttacttattctgagaattttatacacatggagtctgcaatgcgtgaccctttgtgcctg

SEQ ID NO: 446348 - DNA, 122 bp, Homo sapiens
cgcgtgagaccctgggcggtgcaggggagcgttgacgacagacgtgggccgtgacgtcgccgcgccctgacgtccagccgactggcggcgcggtcgcccgggagaccgggaaagccgtttca

SEQ ID NO: 446349 - DNA, 122 bp, Homo sapiens
caatacttgagttctgttgggtaagtatccacaggggaatctctccatgctcggtggctgcgatgcaggcaacagctgtaaagaaaatgctttgttatgtaaagggaagaacaggcaacctt

SEQ ID NO: 446350 - DNA, 122 bp, Homo sapiens
ggcagctcaaagctgctgagctctgccctgacggcatgcgcccccgcttctgtgagagcacgcttcctggcatgggggtcgaatcatgtcgataaaatgggctcggtttcatgaagtacccc

SEQ ID NO: 446351 - DNA, 122 bp, Homo sapiens
ggtgatatttcctggggcctggtgataaggatttggaaggttacagcacagagacgtgaacgtaaaaaggaaacagaggcagcaagcaaatgaggaaaccgatactctgttctgagaataaa

SEQ ID NO: 446352 - DNA, 122 bp, Homo sapiens
ggctccaggccctgttgctgaggccagtataggggtggggtggaggctggcctggtcagacgtgcaaacaggatttcccccaaacagggaggctctcttgacccttgaaaccatccccgttt

SEQ ID NO: 446353 - DNA, 122 bp, Homo sapiens
cagcgcaccgggaaacccggaaggaaagggaagggaaggggggcgcacggtgtttagagacgtctcccccggggataccctccagccgggcggatctgcgccccttctccccctccggctct

SEQ ID NO: 446354 - DNA, 122 bp, Homo sapiens
gatcttgttactctctttttattcttaatatctgttaatgaaacctcccaactagcaatccgagatgcactcttgactccttattcaaatacaaaatcctgctgtttttacctgaacatctc

SEQ ID NO: 446355 - DNA, 122 bp, Homo sapiens
caaggtctgtggctcctcccgaaacccaagttatgcatccccatccccatgccctcatcccgacctcttagaaaataaatacaagtttgaacaggcttcgctgcctctcgtgttggctacca

SEQ ID NO: 446356 - DNA, 122 bp, Homo sapiens
tttcagctaatttggagtgaggaggaagaaagttgcaatgaaaaaaacagggaacccaaacgctcttgctgatgaaagagcctcagtcattgactgcagcacatcaaagagcacaagatggg

SEQ ID NO: 446357 - DNA, 122 bp, Homo sapiens
actcatgcagttggtgttttgaaaaaacaaacaattgcctttcatggacccaaccctggacgtcccatgacatcaccgtcattgtcccctgctggccaaggctgtcgtaagtcggcccaggt

SEQ ID NO: 446358 - DNA, 122 bp, Homo sapiens
cccatagagctgtgtgccagtcagcaggaggctgggggcacccagcgcgtgggggcctcgcggctgcaggaacaaatacacacgccccacttcggccagttttcggtctgcccggctctcca

SEQ ID NO: 446359 - DNA, 122 bp, Homo sapiens
caaaaatcctacaagtggtgagattatagtcagattttaaaaaagaaagaaaaaaccaagcgtgtgatatgtttatgcacatatgtgtgggtgtatgagaaaagaatatatgaaacagttgt

SEQ ID NO: 446360 - DNA, 122 bp, Homo sapiens
tttgccgcgagttattggcaagttcccctgcagtttgggctgtctctgtggctggttctgcggcgtgcggccagccatggagcgctctgggcccagcgaaggtgggtttcatgaagcgagtc

SEQ ID NO: 446361 - DNA, 122 bp, Homo sapiens
ggctgttccccacgctgcacccccactctggcgcagcgaagtctgcagatctctgggccccggcgctgccgaagcctcccccacgcgccgcgctcactcgctgcacaacagcgccaccacga

SEQ ID NO: 446362 - DNA, 122 bp, Homo sapiens
atgggagtgagcagaattctgccctctccccaccattctcatagatgtggcagatgtggtcgcattcttggcatctgaagatagtggatacatcacagggacctcagtggaagtcactggta

SEQ ID NO: 446363 - DNA, 122 bp, Homo sapiens
gttaggttgaggctggggcggagctagacctcaagaagaagccaacaaagtcacacacagcgctccccacctgcgcttgcgcaggggaggaacacgcagtccggaaaaacgccggggattct

SEQ ID NO: 446364 - DNA, 122 bp, Homo sapiens
gcgtgatggagaccacgctggaaatgggaatcaaggcacgtttctaaccttgtactggaacgatacatagtctgcgatttctctccctccctgtctttcctctgcagctccccccggttaac

SEQ ID NO: 446365 - DNA, 122 bp, Homo sapiens
caggtctaaagacataacaaggaaacatggagccatccacacagggataaacaagttgaccgatgaatcagagttgactcctgaaaaaatcccatatatttatgaaaattcaactatgtatt

SEQ ID NO: 446366 - DNA, 122 bp, Homo sapiens
aaactccctctcccaagggtcgctcccgggtggaaggcactaactgagaagaagcccagccgcaggctcgcgaggaaagccgacccctcggccgcgcctcaccgatcagtgacgcatcgccc

SEQ ID NO: 446367 - DNA, 122 bp, Homo sapiens
gggaaggagcctctgataagacagttttcggatactagtgatttaccaaccaactctcagcgctttaggaaatttccaaggcaagcgctggtgtgcggacttctttctaatcttgatgcgcc

SEQ ID NO: 446368 - DNA, 122 bp, Homo sapiens
tccttgcctccatcctttcccatcctcctcattcccatcaatgcaacacaggcattataacggacactccgactttattgctccactgcacaaaattccaccatgccaaaaagagtaaacac

SEQ ID NO: 446369 - DNA, 122 bp, Homo sapiens
gtgctctgtttatagggtttgaacatctataaatggaaacactagctaaccagaaattatcgctagggctctctgatagtgtcctaggctctcacaacttggaatgtcctgcaatatctaac

SEQ ID NO: 446370 - DNA, 122 bp, Homo sapiens
caactacgagctgggcgggcccatgaccctgcagcgccgaggtgagtgagggctttgggccggcggtcccagggcagccccgcgggcccgtgcccagggcgcaggagcagccgggttggcct

SEQ ID NO: 446371 - DNA, 122 bp, Homo sapiens
tgcccagcataatgcctggcatttattaaatgtttgtcaaagtaacctaagctgaacatgcgctctcttctaggattcccatcagtttcacctcataatctaaattgttccatatagcttag

SEQ ID NO: 446372 - DNA, 122 bp, Homo sapiens
acagccacatgcaccacagtccctaatggtaatagtaaactgtgtgagtgtgtgtgtgtgcgtgtgcatgtgtacatgaattcagtggaccctaaggaaaattctatggaagagggacagtc

SEQ ID NO: 446373 - DNA, 122 bp, Homo sapiens
cagggccaggctgccaggcagcaggcacacagcacacagcacggtgagtcgcatagctgccgtccagagacaattgttcttggacctatggttgatttggtgttttctgctagtgactgcag

SEQ ID NO: 446374 - DNA, 122 bp, Homo sapiens
gcctgtgcagagaggagggtcacacgtcaaaggccacccaggcttgaggggacagccccacgccccggggagggaggaggacatggcggcttctcagaggaggtggctgccgtgcctcctgc

SEQ ID NO: 446375 - DNA, 122 bp, Homo sapiens
tgcaaacatgagtgttgagcaagctggccgtgccgtcacggagaggtggccgtggtgtcacggagaggtggccatgccgtcacggagaggtggccgtgccgtcacaggtggccgtggctcgt

SEQ ID NO: 446376 - DNA, 122 bp, Homo sapiens
acaccaacggggcacagtggctcacacccgccgggcacggtggttcacaccagccgggcacggtggctcacaccagccgggcacagtggctcacacccgccgggcacagtggttcacaccag

SEQ ID NO: 446377 - DNA, 122 bp, Homo sapiens
cgggagctggggttgcgagtggtgctcactggctggcgcgggttccaggtgagcgcggctcggcaagccccgcactcagcgcggttggccagcgcctgctgggcttgatgggggacgagctc

SEQ ID NO: 446378 - DNA, 122 bp, Homo sapiens
ttccagaaaacatgcaaacagggccaataaatgcatctttgtttttgtgtccattttaaccgggtgaaggaaaattccaacaaaaaacccagagtgttggagcaagaagatctcatgctgtg

SEQ ID NO: 446379 - DNA, 122 bp, Homo sapiens
gccccacccaatatggcgtccatcgcaatcaaaagctttattccgcccttctcaagatggcgcccacaccaatccttgttaccttccgccctcaagatgaccttagcagttagcgtcaacct

SEQ ID NO: 446380 - DNA, 122 bp, Homo sapiens
taatgaaccacagtgctacctgtgaagtgctattattgttgataaagagtgtgcaaatgacggtgtgagtgagtgtaagcgtgcatggcgctgcagtacacactaatcaaccatgaccatga

SEQ ID NO: 446381 - DNA, 122 bp, Homo sapiens
ccagttagagatgtgtgtgattctcccagtgtgcgtctttgattcgtgtgctaattatgtcgatcctttggggaacacagccaggaagctgggtcctccttgatgaatgctggcggagagcc

SEQ ID NO: 446382 - DNA, 122 bp, Homo sapiens
cactcgtaggtggaggagcgtgtacctaccgggggagtgctgcgcagtgcacctgacttccgcggcacacacccgtccccggacctaggtgtctcgtcgggcgcgatggcgggggcgaggct

SEQ ID NO: 446383 - DNA, 122 bp, Homo sapiens
cacggacccggatgcagataaaggcgcaggaaggaaccgcggcgtggctggcgggcgctgcgcatgcgcaccgcctttaggacgcctgaggtgagacgcgaggagttcggtccgagtgcggt

SEQ ID NO: 446384 - DNA, 122 bp, Homo sapiens
ttgagccactgcgcccggccggaatctgcatttctaactttcaggtaacagcagcacgcacgcagacggcaagcctatcctgtggcaggtgttcattacacccatttatgtcggaggttgca

SEQ ID NO: 446385 - DNA, 122 bp, Homo sapiens
tctatataaatgttagaatcagtttgttaatagccacaaaataactcgctgggattttgacgagacttcatcaaatctatcaataaaggagggaagaactgacatcctgacagtattgaatc

SEQ ID NO: 446386 - DNA, 122 bp, Homo sapiens
agccagatggcccctcggtggcgactaggtcaggggaggcccagggcgggagcctgccgccggctggagggaaccagggccacccccaggccccacccgcagcccccaacctagcgactctc

SEQ ID NO: 446387 - DNA, 122 bp, Homo sapiens
ggcttcccggcctccgaggccgcgagactccagctctctcccggtagcctggggtggaggcgggggagggctcgtcctgcgcccccacctcatcctggaatagagagatccgctgctcccac

SEQ ID NO: 446388 - DNA, 122 bp, Homo sapiens
agctgtccctcttcgtgggaaaatgaaccagaagacaatcctcgtgctcctcattctggccgtcatcaccatctttgccttggtttgtgtcctgctggtgggcaggggtggagatgggggtg

SEQ ID NO: 446389 - DNA, 122 bp, Homo sapiens
aaagcagcccggggattctgccacgtgacgtgcggtggacccagccgcagggactgggcacgctgcccgcccttcagcctttcagcccctcacccgcgtcagcccctcagccacctcagccc

SEQ ID NO: 446390 - DNA, 122 bp, Homo sapiens
tgagcagcctggactaagggttatagaataaggcagctagcatttcagggcagagggtaacggagaaagggtttgtgcacagggaacctcagaaatctacagagagtcctccttgaatattc

SEQ ID NO: 446391 - DNA, 122 bp, Homo sapiens
ccagacgtgggacaggacttaagttttctcagaagaagtgccaaggatctttaaagggcacgtttcatctccttcagcccctccctcccagacacagcaccaagaggaaacatccagcaggc

SEQ ID NO: 446392 - DNA, 122 bp, Homo sapiens
gagggctgcccgtgctgcctaaatgggttcagaatgaaggccgccctcccatcttcaacccggggtcggccacggagcctcccgccacctctaccccgtgtcgcaggcacccccgcgccccc

SEQ ID NO: 446393 - DNA, 122 bp, Homo sapiens
ggcaggaagcctggctccactaggacacacagattctctcctgagcagctgcgaactatgcgccccttctacccttaagagatgggatgggagtccaacaaacccagccattgctcagaccc

SEQ ID NO: 446394 - DNA, 122 bp, Homo sapiens
agctgaagctgaaaataggaaagctgggggcaaggaagagccttgaatcttgaggtgggacgttgactctaagatgtccttgagcagtggagcctccggagggaaaggagtggatgcaaacc

SEQ ID NO: 446395 - DNA, 122 bp, Homo sapiens
gatgctgtggggacagtgcgggggacgtgtggggtcttcggatgcgaacgcgagtccgtgcgatgcccaggtcaagtttgcagagagagtctgcggtgtctgtctccttggcctcctcttga

SEQ ID NO: 446396 - DNA, 122 bp, Homo sapiens
tggtggagggcagcaatgccccaagggaggagcaggtgcccaagcccccaggtggccctgcgggtacaggtacttgtttactctgtggcatcagtcctgcttcccagctcaaggccctggcc

SEQ ID NO: 446397 - DNA, 122 bp, Homo sapiens
tgaactcctggcctcaaaccatcctcccgccgcagcctcccaaagtgctggtattacaggcgtgagccactacacctgaccgaaattttcattttataaggagggacgcttcaggcctggag

SEQ ID NO: 446398 - DNA, 122 bp, Homo sapiens
tggatgcgattgaagattattattccaagtgaagtaactcaggaatggaaaaccaaacatcgtatgttctcactcttaagtgggagcaaaactatgaggatacaaaggcataagaatgacac

SEQ ID NO: 446399 - DNA, 122 bp, Homo sapiens
acatttacatcgctccagttggagtcctgtccaatcctgagggcgggtctaatgaggggccgtaccttccaagatttcactccgcccctcgacgccgcgcggcgctgcgcgtgcgcaaacgc

SEQ ID NO: 446400 - DNA, 122 bp, Homo sapiens
atgccgccgctgccggtctccctcccgggctcccgggcgcggcgcgagcgccgggcctcgcgtctgctccgaattccttctcgggcagcgaccgcaaacacgatcttattattgttctcgcg

SEQ ID NO: 446401 - DNA, 122 bp, Homo sapiens
ttacaataataaaagcatacaacgagacatagtccaaaagacactaacatgcatgatcatcggatttatcataaatgttcaactgcaaaacaagggagagagaggaagatggccttttcaat

SEQ ID NO: 446402 - DNA, 122 bp, Homo sapiens
agtagttcatgcagtggatgagtttcatacgatgcatttctgcagtcccctacagctgggcgtttaggtgattgacagctttttaaatattatgtcagcactgaagacattcatcttcccac

SEQ ID NO: 446403 - DNA, 122 bp, Homo sapiens
attcaacctacttgtcccttagtccctatagcacagcattcacggtgctctgaagttgcacggccattacaaataaggaaacaagaatgtcacgacaataggagctcacatgtctagaaggc

SEQ ID NO: 446404 - DNA, 122 bp, Homo sapiens
ctcaaacatgcacaaaaatgaatagatggtcccgtccttccgtctcgggattatcaaagtcgcttgcttttttgttgaacctcctattgaccatttcgaatttggctggtgtgacattcagg

SEQ ID NO: 446405 - DNA, 122 bp, Homo sapiens
gcgggggcggcgatggggcgggtcacgtgatggggtttaaatctcccgcagccggagccgcgggggcgccagtgccgcgcgtcgagcgggagcagaggaggcgagggaggagggccagagag

SEQ ID NO: 446406 - DNA, 122 bp, Homo sapiens
attacaatgtttacgataatctataaaaagagaagggacatagatagaaaagtggttccgcgtgcgaactctgaggtcagcagtgtgactctgagcctgtcaatgaattcctcagtgcttca

SEQ ID NO: 446407 - DNA, 122 bp, Homo sapiens
cctccatccagccgcacccctcaggggcaagcactatcccaacgtctaatcacataaagtcgtttccccaaactttcaactttaaataaatgccattttacaacttcccctttcatatccag

SEQ ID NO: 446408 - DNA, 122 bp, Homo sapiens
ccaaggacggggagcgtggccggggtattcggggtggggccgggtccacgggggcggggccgaggggttcagaagcgcttgtccttcaccaggccgttcctcagtggcttcctgggggtcag

SEQ ID NO: 446409 - DNA, 122 bp, Homo sapiens
tgtagctgaatgatgaacgagtgaagtcatgaatgaacctaatataagctcagagcgtggcggggcggggcggtggggatagctggaaaacaccttaaaataatctaatccacatctctctt

SEQ ID NO: 446410 - DNA, 122 bp, Homo sapiens
tgagtgaccagtggctggggccggtcacatgacacccctccagccgactgttccccgccccgactacagggtcccgtaaacgggccttgggagctcatccccgtacaggctaggaagcagtg

SEQ ID NO: 446411 - DNA, 122 bp, Homo sapiens
aaattcactttgcctttactttatgtatccgtcacctagagatcacgcagcaggcgcccacgatcagcttaatcgtcactcacttccatcggatcaactggaaatcaagtcagatgagagtg

SEQ ID NO: 446412 - DNA, 122 bp, Homo sapiens
ggcgaggatctgggagagaaggacagagcagacaggggtgaacatgatggcagaatgccacgctcttgatgttatgacctctaccctgatcctcaagtaatctgagaagatgggtgtgatgg

SEQ ID NO: 446413 - DNA, 122 bp, Homo sapiens
caggaaccgaacagaacttcatggaagaaaaggacctgtaaagagggcgtttctgtacaccgggctgtgttcttctatccagcaattgaaggaattgaatagaacttcatggaagaaaagga

SEQ ID NO: 446414 - DNA, 122 bp, Homo sapiens
tggggagggcactaaggtgagtgagaagggcacatgagaagggtcagaatatcaaaggtgcgtctctgcattacagccaagagcaggagagggtcagcatcagtgagaaagggaaagataca

SEQ ID NO: 446415 - DNA, 122 bp, Homo sapiens
ttatagaggaagtgacgcaggtcagggatgcccacttgggcaacgctgtagtagggtgtgcgcagtgcctctcgcagggccaggtgggctccgcgcttgcgaaggcgctcctggaagcggcg

SEQ ID NO: 446416 - DNA, 122 bp, Homo sapiens
atcttctctctcaaatgccactttcagcccctgtttaaattaatatggctcttgatctcacgttgctcagctgttgccttcttagtcagatggggaagaatattaattttagacaccaggct

SEQ ID NO: 446417 - DNA, 122 bp, Homo sapiens
gaacatgagcctcagggtgcaaactgtccttagcagacactcttcccgctagcaagggaccgcaccgtcacctgaggggcagccaagaggcgggcggtgcacctgtgccttccagaatagga

SEQ ID NO: 446418 - DNA, 122 bp, Homo sapiens
ctccccatcactcccttggccttcctcccagcttggaaaacacactttcccttaagccaccggaggttctctccaggaattactttgctcattctcactgcacaagacgagttttgttttta

SEQ ID NO: 446419 - DNA, 122 bp, Homo sapiens
tgccttgggtgctcccggctgcccggccttggtcctcccagcttgacttgcctgtgagctcgtgcccggtgtggtgtccgtgatgccttatctttgttctgaggtccctgtgtgtctctgga

SEQ ID NO: 446420 - DNA, 122 bp, Homo sapiens
gctgagccgccgcgccgggggaggggactggactgaccccgtcgcccgttcactgattgacgtatcgattcattccagcactctcgctccggcagccgccatccaccgccagtttggagagc

SEQ ID NO: 446421 - DNA, 122 bp, Homo sapiens
cctgctcaggagggacttcatccttgctttgctaaaccagctgaattccaggaataccagcgaggggattgggtcatgtcatacctgcctctcgagacaagcaagccgaaagctgaaggggg

SEQ ID NO: 446422 - DNA, 122 bp, Homo sapiens
gagatggagggtggtggtatgcctgagtgcgtgtcttctggggagggagccaggtggctgcgttctagagatgtctagaagcggagttggagcaggtgattcaggctggaggggagaagggt

SEQ ID NO: 446423 - DNA, 122 bp, Homo sapiens
cggtggaaggagacgggtggctgaagagtttccagcggagtcgcagaatgtgcttcacatcgaagtcttttcgcccagagcctgacatgctttacgcacagaaggcaaaaggctggcagctc

SEQ ID NO: 446424 - DNA, 122 bp, Homo sapiens
tactgatgaagaaactgaggccacagagctaaagtgacttttcccaaggtcgcccaggtacgatatagcagagccaggcttcgaccccagtgtcctggcttctagatctgctgtccatccct

SEQ ID NO: 446425 - DNA, 122 bp, Homo sapiens
tagcaggtgcaccgcacgtctgtagggggagccatccacaccgttgccatgtgcgaatggcgccccctcgtgttgtggatggtgtaggttgcaccgctgtgtgcacacgtgtgcatacatgc

SEQ ID NO: 446426 - DNA, 122 bp, Homo sapiens
gcttccggaagaggaaattagctggtgattctttccaatctgctttcccagtcacctttccggcatgttctgtaaaacaaaatgtaatttgactttgtttcattattttaactccataacac

SEQ ID NO: 446427 - DNA, 122 bp, Homo sapiens
cctgagctgagccttgaggtccgagttcatctccagctccagaagagcctgggagatggccggactcgaactcgtccggcttctcgccattgggcttcacgatcttggcgctcgaactgaac

SEQ ID NO: 446428 - DNA, 122 bp, Homo sapiens
aaggttcacatcataaacaaacaacttcacttacagtacattaagcagccaaaagttggccggctgcagtagctcatgcctgtgatcccaacactttgggaggcccaggcagggcagatcac

SEQ ID NO: 446429 - DNA, 122 bp, Homo sapiens
gagcggtggagccccgagttccatctgcagaggaaattggcggacagcagccacaggtgacgcgctggcttcaggccgagggccccatgcgttcgttgtccttccctggagcagggaaaggg

SEQ ID NO: 446430 - DNA, 122 bp, Homo sapiens
ctaggggcccagcctctgtggccctgtgacctgcaggtattgggagatccccagctaagacgccaggtcctcctggaagcctagaaatggtgagagtgctgggtccgacatcctgggagagg

SEQ ID NO: 446431 - DNA, 122 bp, Homo sapiens
ggagcttaattcacaattgtggatggggcggggggaaccgccaagtgcaagaacacggaacggttgcaagacgcagttcagcaagaacaactcttgctctaggcattgctccgtcgacccga

SEQ ID NO: 446432 - DNA, 122 bp, Homo sapiens
ccctgtggggcagggctccggacctgcagcccgccatgtctgagcctcccctcaacccaccgtgggctcctgcatgaccggagcctccccgacgagcaccgcccccttctccacggcgcccg

SEQ ID NO: 446433 - DNA, 122 bp, Homo sapiens
tcaatcagaggcagagcgacgcctctggctctggtctagtggtgcagcgtctctagccctcgccccgcccaccgtccccgcgaggcgtccactcgccgagccccgccctcacccagcaccca

SEQ ID NO: 446434 - DNA, 122 bp, Homo sapiens
gcgcgcatgcgtcctgcggagggtcactgactagtttgagggctgaaccccgggatggagcgccttgcagctgtaatggatggttctgttgcacactgaagtttacaatagtgtgtaggatg

SEQ ID NO: 446435 - DNA, 122 bp, Homo sapiens
gcatctgccctgatttgcttacagatacatttgtaaaggtcccaaggcacatgtctccctcgcttaggatgttagcactggaggtgaccccagatggtatagtttaatgccctcatttctaa

SEQ ID NO: 446436 - DNA, 122 bp, Homo sapiens
aaatataaactttatttctcaacataagctccatctagttcaagacacttttgtaaatgacgataccagccatttagttcatccctaaataaatgagggcccttggaatttaaccgtgtcaa

SEQ ID NO: 446437 - DNA, 122 bp, Homo sapiens
accccacactggggtttacacccctaaaagcaggtgtgtcccgtggcaactgagtgggtgcgtgaaaaggggggatcatcaattaccagctggagcaatccgaatcggttaaagtgaatcaa

SEQ ID NO: 446438 - DNA, 122 bp, Homo sapiens
ttctttacaataaagtaaagacagaagccccagattcaggaacagacaaaatactttaatcgctatcacattttttttaagtctagtcaattagaaaagtcaaatctttcctcacagccaag

SEQ ID NO: 446439 - DNA, 122 bp, Homo sapiens
ttttttaactgtttgtttcttcatttgtgtagccagaccttgtttcttttccccagctatcgtcaatttgctgattaggtaaattcctcactggtctttctacaggtttcaaaaaggaacaa

SEQ ID NO: 446440 - DNA, 122 bp, Homo sapiens
cctgcattctccaacccattctctcactttgtccctgttgaaccctacatctgaccatgccgaaccacctggccttttccgaggtaccctgaagactgctccccttgtacagaaggccctgc

SEQ ID NO: 446441 - DNA, 122 bp, Homo sapiens
tcagaccaagccaatgaggaatgggagactgcatcagagagcagtgacttcaccagtgagcgccgaggggacaaagaggcacccccaccagtactgctgacacccaaggctgtgggaactcc

SEQ ID NO: 446442 - DNA, 122 bp, Homo sapiens
ctgaaggagcggtagcagcctcagcctctttccctgtgcttcctttcctctttagtgcagcgaggaagttttcgcttctgtacatgtgtttgtgtgcgtgagtgtgggtgtgtgcggtgagg

SEQ ID NO: 446443 - DNA, 122 bp, Homo sapiens
cctccccagccgcagccgtgtggcttctgcgtggcgatggtacccgcgccggttaatgagcgccacagtcacgtgactgtgaaatagatccttgttaaatctctcccagcatccctctcatc

SEQ ID NO: 446444 - DNA, 122 bp, Homo sapiens
caatttctcctagtacacagcttaggacgggaagcacgagctatggaaagggttgaagatcgagttgatgccccagagtaggtggccaaagttacacatgtccagtcagggcagaaaaactg

SEQ ID NO: 446445 - DNA, 122 bp, Homo sapiens
tgaggaaccgagtgtgtccagggatgtggcagctgcagcgggcttggctttctgaggaaccgagtgtgtccacgttgggggaacgtcatccttgatacacacgtttttatttgcagaaagaa

SEQ ID NO: 446446 - DNA, 122 bp, Homo sapiens
ggaatggggggcgggtgtcttgccacttgtgtgacaggcttaacctttttgtatgaagttcgtttgccttatcggccttactgtttgatagtttactgtgtctgatttcttcccccgtactt

SEQ ID NO: 446447 - DNA, 122 bp, Homo sapiens
gaggaaaatgagaacctttccattctgtgcccttagactaaggaaaaatgacagtaaccacgcacactgtctgtgttgccatcacaagtcatttgaacctcacagagaccctgtgaggtggc

SEQ ID NO: 446448 - DNA, 122 bp, Homo sapiens
gagcaaataagaaacaatatttgcatagtctcaaagtctctctccatacagggaagacaccgtcttacccaagtacttcccacttcccaggataggggtagaggtgcggggacagaggctgt

SEQ ID NO: 446449 - DNA, 122 bp, Homo sapiens
gggagcacggctcagcaggtggctgggtcctgttgcttacagctgtgcccctgggaaagccgcctcccttctctgaccctatttccctgtctctaaggggatgtgagtggtgcacagatgag

SEQ ID NO: 446450 - DNA, 122 bp, Homo sapiens
acactcattctgacagctcttctaattccagctccaggcctaaggagcagcagaacttaccggggtttaaaaaaaacaaaaaaagtctgaatttttcactctctagatcaatctaagagcaa

SEQ ID NO: 446451 - DNA, 122 bp, Homo sapiens
ggtggtgcgcaggctgcgcgagttctaccggcctttcaacctcaagttctaccagatgaccgggcacgactttggctgggattgagcagacccgggctatgtaccttacccacgtggcttat

SEQ ID NO: 446452 - DNA, 122 bp, Homo sapiens
tcagcttactttcatgtgacttcagttgctcctcctgcaggaaatcatgatgccatttagcgttcaaaaaaaaaacaagtcaataacaaagcacagcatactttaaaaaatcccctgtgctg

SEQ ID NO: 446453 - DNA, 122 bp, Homo sapiens
atctgcctgcctcggcctcccaaagtgctgggattgcaggcatgagccactgtgcccatccgggatatgattgccttataatgttttgaggtgtgggctgtggcatttacatgcttagggct

SEQ ID NO: 446454 - DNA, 122 bp, Homo sapiens
cagtaggaataggggcagggccgttttctgaagcatgcagggtgctgagcccggctgtggcgtgggatctccaccttttgggaaggcaatacacagaaaagcatttgtgtggtcatgtatgg

SEQ ID NO: 446455 - DNA, 122 bp, Homo sapiens
ccctgggcccggaagctcgttctgactgacaagtctacggaacctcggagtcaaaagaaccgccataagctcgcgcgctggctcctcccctggcaccatagccccgccccacctgacacccg

SEQ ID NO: 446456 - DNA, 122 bp, Homo sapiens
tttttgctaaggacatcagtaaggtatgctaaattatgcaaaaatctaaaggatatttaacgtttgtgcataattttaaaaatgggccaggtgcagtggctcacgcctgtaatcccagcact

SEQ ID NO: 446457 - DNA, 122 bp, Homo sapiens
tccacagtacaaggtgagcctccctaatgtgaaaatacgaaatctgaagtgcccccaaatcggaaacgttctgagacctgacaggatgccacgggtgaacagttcgacccctgagctcatgt

SEQ ID NO: 446458 - DNA, 122 bp, Homo sapiens
aagagcagcgccttgccaaggctccacaacacgcccctcgccctctccgtgcaccgaggccgcccagcctgggacctggagatcaccaggccttgaaccttgggacctcaactcctctccct

SEQ ID NO: 446459 - DNA, 122 bp, Homo sapiens
cggccacggaaacttcttctctgttcgaaacttgaaactccaccttcaggagcgaatccacgcggaggtcaccagtgtggaagtgctttaagctgtgacgagggagttcctgcagctcaggg

SEQ ID NO: 446460 - DNA, 122 bp, Homo sapiens
gttgcactgaggaagggccacaatcgtggttcttggcaagcgaggcgtggacatggctggcgctggtgggaggcctcagccgtgtgggggccctgtgtgtcctgacgaggccacccacgcgg

SEQ ID NO: 446461 - DNA, 122 bp, Homo sapiens
ccgcctgcctcggcctgccaaagtgctgggattgcaaagtgtgagccaccacaatcagcgcgatttcagagattattaagggcaggggaaggaatcccttctaagagaagtttggaggaagt

SEQ ID NO: 446462 - DNA, 122 bp, Homo sapiens
tattctcttctccaagtagggcactagctggcaaccgtatatcttcaaagaatagttctgcggtatcctaagagaccatacaaaaaatgtagagaatggtctcatttaaatcttccaataac

SEQ ID NO: 446463 - DNA, 122 bp, Homo sapiens
tcgaactcctggcctccagcgatcacccaatttcagcctcccaaagtgctgggattaccgcgcccagcgtgaactgctttgaaccatattgtctacttgactttcagacagccagatggtgc

SEQ ID NO: 446464 - DNA, 122 bp, Homo sapiens
acacaaggcagccgctcaaaaataatatttggcaattcatctatggctcttgttcatacccggagcaatgctcaaatatttcatgtgctatgtttcctgaagcttttctcttaatgaaataa

SEQ ID NO: 446465 - DNA, 122 bp, Homo sapiens
aagactacaagtcccggcatgcaccgcgccgcccaagctgctgcgcaagtcccgcgagcccggccagctggcgggaagtttacacaacagtgggactctaagctccgtgaccccaggggaag

SEQ ID NO: 446466 - DNA, 122 bp, Homo sapiens
aatccaaaaatctgaaatctgaaatgctgtaaaacctgaagtttttgagtgttgacatgacgctcaaaggaaatgctcattaggtgttttggatttgagttgctgaaccagtaagtatagat

SEQ ID NO: 446467 - DNA, 122 bp, Homo sapiens
ttcgaatctccctctcttgtaggacatttttctccaagaccagccctcgataccctcagccgtcgcaaggcaacctccagccgccaggggccgcagtcgcgctcctcgcggccggaagagag

SEQ ID NO: 446468 - DNA, 122 bp, Homo sapiens
gagctttaccgctcgggacttgtcaattgacagtggccatagagtagaggaatactagagcgtctcaagcggccccgcccctagttctgttccggtttgccggccgcaattttttccggaag

SEQ ID NO: 446469 - DNA, 122 bp, Homo sapiens
gggttgtacctccactaataaacaccaacacccgcgcccagggtgggttcggccacggggcgattctctgagtgacacatcaggatcagcttcgtgtggtcctgaccttacggtaatgtcag

SEQ ID NO: 446470 - DNA, 122 bp, Homo sapiens
ttgcgtcacaccggcccctcccacgctgacagaggtcagcctgagccccttgcctcacaccggcccctcccacgctgacagaggtcagcaggagcccctagcctcacaccggcccctcccac

SEQ ID NO: 446471 - DNA, 122 bp, Homo sapiens
agcagagggagagggggaacgtccgctgaggagtggcgagaggccccggccgagtcgggtcgcgggcgggcgggcgaactgggagcagagcgggggcccagccagcgaggccgccgagccag

SEQ ID NO: 446472 - DNA, 122 bp, Homo sapiens
aggtcccccttgattctgcactgccctcacctctcttctcttcattttgcaaagggaggtcgtacatgtgcatttggagtttccttaagaatcccgacctgagggaaggggattggcagtgg

SEQ ID NO: 446473 - DNA, 122 bp, Homo sapiens
gtgcgtttccaggcgcctctgtccccagcgggaggagcggctgtggagggggcctgctggcggctcaccccaggcccggagggttcgggaactaaacctgcatctggtgtcaaaaccccttt

SEQ ID NO: 446474 - DNA, 122 bp, Homo sapiens
taaagtgctagtcttttctgtctatttaaggtgatgcctgatattgtcatgttacagaggcggatgccccaaaccttccgtgacccagcaactgctcccctgagaaaactttctgttgactt

SEQ ID NO: 446475 - DNA, 122 bp, Homo sapiens
ggtatttgccctctttattcgagcacgagagcagagagagagctgctgctctctggggaacgctctcagaatcccgttctaaccccgggaaaactcagcagacagaaatcgcccgccccaag

SEQ ID NO: 446476 - DNA, 122 bp, Homo sapiens
gatgagaattcctgcgctcggcctgatttcaaaatagcgggaagcctgacaaatgaggtgcgtcctccggcttcggtgatgtaagggataatgagcttcttcattccctcagctgctggtta

SEQ ID NO: 446477 - DNA, 122 bp, Homo sapiens
gcatggcaggaacccaggctagttttgatgttttagtgctagatgactcttctcagtaggcggtgagcccacctggttagacttacattgctgccacagaaatttaactcttaattcttcca

SEQ ID NO: 446478 - DNA, 122 bp, Homo sapiens
aattgaattatgatcttggggagggctaccatttgtatttaaaacgtcttccaacatgatcgtgatacccagtgagggttgagaaacgagtacctcagcttgatccttgggtgggttttgat

SEQ ID NO: 446479 - DNA, 122 bp, Homo sapiens
ccacgcggcagcggtccctattggccagtgtctgcggggtgctgtagccacctctaagggcgttttcctcagcaatcagagcctccagctccggcgtggctcctccggtcaccagggtccgt

SEQ ID NO: 446480 - DNA, 122 bp, Homo sapiens
ggacggaacccgttgccggctcccagggccacctcacaaagggccttcattccaagcctgcgtcagcacctgccctggggcagggccagcagtctcccccgaggcttgtttttgttcttatt

SEQ ID NO: 446481 - DNA, 122 bp, Homo sapiens
cgacctgtcccggaaaccccttaaagcctgcggtaaatgccccgggaaacagggagggcacgagccgaagcctccagctcttcaaagctcggattcaaagacccgggggctgggagaccccc

SEQ ID NO: 446482 - DNA, 122 bp, Homo sapiens
aacagctaaggatgaactggaaaccacaaactgagctctttttctatgacctagcctccccggttaaccttaggcaaagagtagtggtcagcgggcctgcctatgggtaaattctaaaagcc

SEQ ID NO: 446483 - DNA, 122 bp, Homo sapiens
aacccgaaaactgaggccctgggagccaggctgagagactcacaggtcccgccacagccccgccctctgtcggttctaaagggtaaagtctctctgccccgcccctacctcgcccaagcccg

SEQ ID NO: 446484 - DNA, 122 bp, Homo sapiens
ctagaaattttaaaattatccacatggctcacgtcatgctcctgttgggcgacaacggctcggagcctcatcctttgtcctggttcccaagcagaagggaggaagcagacactcccccgcca

SEQ ID NO: 446485 - DNA, 122 bp, Homo sapiens
ccaataggcacaccatccccacagccctagaaaaggcaaccaccacccgctccttcctcccgcaccatcccatctcaaggctctctgctgacccgggccgatttcatctggtctcttctccc

SEQ ID NO: 446486 - DNA, 122 bp, Homo sapiens
ctgggggtctctcatgagggaccttctgaagtattttgctgggtgtctgctagctgggcacggctactgtgtgtctgctgagcttccaccgctgacccacttctatttccttcctcctgaga

SEQ ID NO: 446487 - DNA, 122 bp, Homo sapiens
tagcttttgctccttaaaaaatcagtcaggaatatctttgcaggtctatttccgggttctcgattccgttccactgatctatgtgtctgccaataccacattgggttaccacggctacagag

SEQ ID NO: 446488 - DNA, 122 bp, Homo sapiens
ttgaggccgggaatgacagcaatgatggagtcggggaggcggcccaggccatgccaggaccggagccctgggggccaaagcacccattcctccctactcccgggggagcggggtggggcttt

SEQ ID NO: 446489 - DNA, 122 bp, Homo sapiens
aaaggggtgttgtccattcatttagaaatagtcagtgactcaggaatgctgtttcccaatcgccgtagcaactgtcttctcctcccatgttatgatgtgagtagcaggacatctactcttcc

SEQ ID NO: 446490 - DNA, 122 bp, Homo sapiens
ctgctgcctcaaaggcaggctgaagacaggaggaggtgcacagataggaacccagatgttcgggtaacgctcacatttcatttaaccctccaatgacaaaagacgggcaaacagacggggca

SEQ ID NO: 446491 - DNA, 122 bp, Homo sapiens
gcgggtttcgcccgttcccgccgccggcggaagccgagtcagcccgaggccgagccgagacgagccgaatgtccccgaggccgaatgctcccgaacgtcggttctccacctcttcccttccg

SEQ ID NO: 446492 - DNA, 122 bp, Homo sapiens
ctcaggcagtctgccctcctcggcctcccaaagtgctgggattacaggtgcgagccaccgcgcctggccctggaagtgagcatttttactgtagtcagcataggtgctgggcatgaggacca

SEQ ID NO: 446493 - DNA, 122 bp, Homo sapiens
cttggtcttcagcatctgcgcatactgctccaggcccaccaccaggcacttgtgcaacaccgtctgcacgtcattttcgtccacatgcgaggactggtatagcacgcgctgcgggcacgcgg

SEQ ID NO: 446494 - DNA, 122 bp, Homo sapiens
cttttgtggggcacgacgagaaagtccgcagccccaaacagtgagtttctgagggcgagtcgggccggggccggcctaggtgggagggagccgagcaccccgaggagccgccaccgctgtcg

SEQ ID NO: 446495 - DNA, 122 bp, Homo sapiens
ccgagcgtctcagggtgggcggggcgacacggtcccctttttactgtcccgggaactggtcgcctggggcaagtctggatacttagcagcacaggtcctgttctaggactgtagtccctctt

SEQ ID NO: 446496 - DNA, 122 bp, Homo sapiens
gtgcctgtggtcccaactactcatgagactcaggcacaagaatcccttcaacctaggagacggaggttgcagtgagccgagatcacaccactgcactcgagcctgggcaacacagtgagact

SEQ ID NO: 446497 - DNA, 122 bp, Homo sapiens
gcttaaaatctctaggcggtgtccctgaagtataaatccaaagccttcatgcctgtaatccgagtgctttaggaggccaaggcaggaggactgcttgagcccaggagtttgagaccagcctg

SEQ ID NO: 446498 - DNA, 122 bp, Homo sapiens
tgtgctgatgacagcaaaggagagaaaatgttcagtctaaacacacaaaagaaaggataacgaggcaaatacactccagccttgaagacagcagatctaatattttcattgattattgagca

SEQ ID NO: 446499 - DNA, 122 bp, Homo sapiens
attctggagaatgaggacatctttaggaccttaggtgaggtctgaaagccctggacactgcgggacgctaggcagccaggcacccttggaaccgaagccgcctggggaggcaggaagccgca

SEQ ID NO: 446500 - DNA, 122 bp, Homo sapiens
agtgatcctcccggcttggtctcccaaagtgctgaaattacaggcgtgagccaccatgcccggcctgaaagtcttttattaagcaaaaaaagccactacatgagtagtttctcaaaaagacc

SEQ ID NO: 446501 - DNA, 122 bp, Homo sapiens
acaggcggcacgcattccgcgcccgctctgcctacttgaggagggggtgtcactcctgcccgcaatggaatgttcagaacgcgggacctccttgggttaggatttctagaccccgggatcgt

SEQ ID NO: 446502 - DNA, 122 bp, Homo sapiens
gcccgatccgaaacgagactctggtagtcgggcaaattgtattcctcctccttggaattccgctcacagaggccttcccggcgtggccggcccagcagggacgcgccgccgcagcggaggag

SEQ ID NO: 446503 - DNA, 122 bp, Homo sapiens
gtattgtatacctggaatttgctaagacagtacatcttaagtactctcaccacacacacacgtacacatacacacaaagataactatgtgccatgacagttgggttaattggcttgataata

SEQ ID NO: 446504 - DNA, 122 bp, Homo sapiens
caacctggtgcctgcagaaggacacatgagacaatcccttctccagccctgccaggacaccgtcggccatggcacacctctcgttgttcatgggaggccatataaaacctcattgatagagt

SEQ ID NO: 446505 - DNA, 122 bp, Homo sapiens
tgtggacctagcaagggctggatggactcatggagcctcagggcgggttggggaagctggcgaggccgagccccgctttgggcttctgggcgccctgacctcgctcccggaaccctggggac

SEQ ID NO: 446506 - DNA, 122 bp, Homo sapiens
agctttttggaaagaatacccaaagctttcttggagatccagtatctgtttgtactttgacgacaggtgagaacaatgacaagggatccacactgtcaggaatctcattatgcaccactggc

SEQ ID NO: 446507 - DNA, 122 bp, Homo sapiens
agcaagggaacgacaggaagttgggggatgccactgaaggatgtactgggggaggaggcccgggagcctagtgcaaaaagagaactgagcctcagctatttctgctgggatgggggcaggtt

SEQ ID NO: 446508 - DNA, 122 bp, Homo sapiens
ctcttctgagatccattttgtgcctcatctgcttctctgccctggctgcaggcatttgtgcgcgtctgggctgcagctggccttgctgtttgctgtcagagagcccacgagcatgagggcca

SEQ ID NO: 446509 - DNA, 122 bp, Homo sapiens
caaaataaaggaatgaagaagccccaatgcatattttaatattttagttggcaatgcaaacgcaacagcattcctaaagagtggccatgtttcttgaaagagatagccaggctggagctcaa

SEQ ID NO: 446510 - DNA, 122 bp, Homo sapiens
ctggcttctcccaggccttctagaaagatagagctctggtccatcagtcactcaataggccggagcttatgcccctagaagcagatcccaggggtaccccccacctccctgagacaggaaac

SEQ ID NO: 446511 - DNA, 122 bp, Homo sapiens
cgtggagacctcttggagcgagtcagccaggcctcctcctatcccgacgtgaaggtagctcggactctacctgtggctcaggcataccaggacaacctgtacaggcagctgtcccgagactc

SEQ ID NO: 446512 - DNA, 122 bp, Homo sapiens
gtaagatcaaacgccatcgccgtgggttgttgatgtagtgccttgctatttggcacaggacgcactgcctgagatccatactgaacctctggagacggccgatactgaaatgcggctggcgg

SEQ ID NO: 446513 - DNA, 122 bp, Homo sapiens
ggggccggcgcactcctcccgccctgtctgcagttggaaaacttttccccaagtttggggcggcggagttccgggggagaaggggccgggggagccgcggagggaggcgccgggcccgcgcg

SEQ ID NO: 446514 - DNA, 122 bp, Homo sapiens
agcgtagcacatataggaggctcatgttacaggaaaacccttagagactttgcctacatgcgcttcctccggctatccacacatttaaaccaaaatgaatatcgtcaggtagagaactgaca

SEQ ID NO: 446515 - DNA, 122 bp, Homo sapiens
cgcctcgtcgatgccgtcgtctggctgcgcggggctgcggaagggcttgaagctgtcagccgagagcggcggcgacggcgtggacgggttggactggtcgctgggggcgctccagctccagt

SEQ ID NO: 446516 - DNA, 122 bp, Homo sapiens
tatgtttacattcctggccccagagtcttcattgctagtctctggcagaccttgggtagacgtccttttcagatgcctttgccaagacctccttatgcggggaggagggagaccttgatgat

SEQ ID NO: 446517 - DNA, 122 bp, Homo sapiens
ctacacttgcagaacctctgctctgagcttttccctactcaacctgacctgtcctgaaagcgtaagggtggcctggccgcgcgtgtgggaccgacccgaggagggacgagagacagcaaaga

SEQ ID NO: 446518 - DNA, 122 bp, Homo sapiens
tcccccctgccagccagtgcctccactcccaggtccctccactgtcacacagaccctgggcggcctctaagcccagaaattccaaggctaggccagaataattggggtgggtgggggcaggg

SEQ ID NO: 446519 - DNA, 122 bp, Homo sapiens
ctatccccggcgaggcttggactacgtttcccaggagaccctgcggtccagtatgtctcccgaggaggggcggaagcccgggagccgccctctgaggctgggcggggtgaaagaaagcttgc

SEQ ID NO: 446520 - DNA, 122 bp, Homo sapiens
ggcaccaccatactttccattgcttacttccgttaaaccccgagcgctgccatggcaagccggaaatagggatgaagcaatttagccagaagagggcggaagtggctactcagggcgccgcc

SEQ ID NO: 446521 - DNA, 122 bp, Homo sapiens
ggtaggaaatacttggtgtggtgcccagtatccaggacatgaggatgacgggaggagtctcgcctttcccctttcccttctcccctccaggcagaggggtcagcctcggccgctcctctcac

SEQ ID NO: 446522 - DNA, 122 bp, Homo sapiens
gagcttcaactagggtaaaaccaaaactatttttaaatttctcttaggctcttttttcatcgtacccacttggctccaccttggtgttcacaggtacctcccacttaatatttcaaaactta

SEQ ID NO: 446523 - DNA, 122 bp, Homo sapiens
cttcttacgcaatgtaacttcctgctgaagaaaggacattggaattgggttttctgtctgcgatgggaatgtttagtcagatatttagagagctttttcccacagatatttttatgggggtc

SEQ ID NO: 446524 - DNA, 122 bp, Homo sapiens
gctacgggtccggctctcacaagcacggcggtgctaaatgctttcctgaacacacagtctcgtgaatgactgtcaggttgcggttccctcttccgcgttcatggctgtgattggcacgcggt

SEQ ID NO: 446525 - DNA, 122 bp, Homo sapiens
ctcccctaggtagatggccccctcagggcaggcccggcggacacccctccctctggctggcggatgcagtgcctagcggccgcccttaaggacgaaaccaacatgagtgggggaggggagca

SEQ ID NO: 446526 - DNA, 122 bp, Homo sapiens
ccagccagtttctaccgcgcatctcccacggccgggctcgctcccagacgcgggcggatgcgcagtgaaaacgctgagcaaagctcctgctgtcctggggcccacactctagggacaaaggc

SEQ ID NO: 446527 - DNA, 122 bp, Homo sapiens
ctctagaaaatacttcaactattgtgggtaagagtttttttagtccagtttttaaaaatacgtaaactgagaagttattttgtctatttagatgatacttcaaattgacttttattcagtgt

SEQ ID NO: 446528 - DNA, 122 bp, Homo sapiens
aaagtaacctccctcacttcacagaaatcactgactccctttctgttgcttcagggcaaccgccagataaactccccaacttgcaatgtaaaaatctggaatggtggttgcttagtcttttc

SEQ ID NO: 446529 - DNA, 122 bp, Homo sapiens
ccctatgccgggggtgccgctcaggtaagtcaccgcagccttggcaagggggtgtgggagcggcggtccgcttcggcgcccgccatcggcagggatctccctcttggtgccaggtacctgcc

SEQ ID NO: 446530 - DNA, 122 bp, Homo sapiens
tggccccggggataacgacatggaggaattctacatctgaatgccctctgctcttgttctcgaaacacacaaactcagagacacagactcaggccccactgcccctctggccactgagcaca

SEQ ID NO: 446531 - DNA, 122 bp, Homo sapiens
agattccaagaagcctgagaggaaatctagtaggtcggggtcacagggatcaggagagcccgcgattcaaaggccccttccctagaggagggattgagaagggggcagagggaatcccagga

SEQ ID NO: 446532 - DNA, 122 bp, Homo sapiens
cacctcctccgggaagccctccggacacacccccgcgcgtcacggaggcagaacggcagccgccatcgcgctcccagccccgacgcgactcccatctgggacccccgccgggacccccgcgg

SEQ ID NO: 446533 - DNA, 122 bp, Homo sapiens
gggaccagaattattgcctgtttcctccccagggctggttcaggaacctgagccaacctgcgccagttgggctgtacccatgggaaggggcttaggggtgttagctgctgttaattctcatt

SEQ ID NO: 446534 - DNA, 122 bp, Homo sapiens
cctgagcccctgccaccggctgcgccagctcaagttcctcgggaacccgctgtcggcccgcgccctccggcgcctcttcaccgcactctgtgagctccccgagctgcgctgcattgagttcc

SEQ ID NO: 446535 - DNA, 122 bp, Homo sapiens
ctagtgaacggtctaaacttccgctagatgctttgggaattcgtaaagcgactgcgtgcgcggcagccaagccacagctttacagggttcgccttctgtgtgggaacgcagcttttcccgag

SEQ ID NO: 446536 - DNA, 122 bp, Homo sapiens
cactcccttggaactgagaggcagcctggctgagcttgctgtcctttggaaaagcaaaaccgaaatacccagattaatataggaggacaacttctgtagcccagatgctaacaaagatcaag

SEQ ID NO: 446537 - DNA, 122 bp, Homo sapiens
ccgctgaggctggaacggaagtgaagcacagactctaatggcttccggttgttactcaaccgttagggtcccttcccccttgcggcgcgcggtcccaaattgaccctgggtctcttgaaaaa

SEQ ID NO: 446538 - DNA, 122 bp, Homo sapiens
aaacaccaaaattgagttgctactactctaagatctgttctctgggataataacccctttcggccctctccaggcccagctctggttccccggctctgggctacctgctccatggctaccct

SEQ ID NO: 446539 - DNA, 122 bp, Homo sapiens
attgactgcccacctaccctgctgtcagctcagcacaggcagagctttgtttgcttcacacgtgtccccgatacccaggaccttgttcagcaagtgacatagtcacggttgtggctctctga

SEQ ID NO: 446540 - DNA, 122 bp, Homo sapiens
ccaggtcctctacggtgactgtgcgctggtctgcggccacaggcactgccctgggctgcccgtccgtgtccctgtactggaccacgaaggagtcaaaggggccctgggctaccgtccaggac

SEQ ID NO: 446541 - DNA, 122 bp, Homo sapiens
actcaggcactgcatcaccagtgggactttctgtggcatcttgctgatgctctgccctgccgtgtacctactgctctgagcctgtgtgatcattctacagctacagtggccgaatcaccact

SEQ ID NO: 446542 - DNA, 122 bp, Homo sapiens
gaaccaacctacctccccttccccaacatcagcgaaaatcagccgctggtttaaagctggcgttttgtttggatgtgctggcctatggggaggggagtcgtattctggtttgctttttccgt

SEQ ID NO: 446543 - DNA, 122 bp, Homo sapiens
agtctggaagcccacactcacccctttacccgggaaacgcggccggagccggcggcgggtcgggagtccgagatggtagatccccctccaggcgcctcgctgacattttgtcccggacggaa

SEQ ID NO: 446544 - DNA, 122 bp, Homo sapiens
tgcagatctcacccttgtaaagaacttcactggtcacaaacgcttgtggatcccctactacgccccaggaactgcaggagcgctcaggagagaaggaaaaggaaagagaatgcctgcctttg

SEQ ID NO: 446545 - DNA, 122 bp, Homo sapiens
caggtctcaggggcagattccaagtatgtagagtccccactcactcgccttacctctgtccgcagctcagacgccgtgtgaatcctaaatttagaccctgctataacatgtggctactgacc

SEQ ID NO: 446546 - DNA, 122 bp, Homo sapiens
ggaaccagtgatgcagtggggaaaatggtgggaaaggagtacagtattctaggatggacacgttgcttaccttgactagggtgtgagcaggggaaatagtgagaagtgaagggattctggat

SEQ ID NO: 446547 - DNA, 122 bp, Homo sapiens
tgagaagctgctgctgcagaaggggcatccgggcagcttcctggtgcacatgagtcagagcgatcctgggggcttcccgctgtcagcgctgacgcaagggtgggacgaggcgcagggctcag

SEQ ID NO: 446548 - DNA, 122 bp, Homo sapiens
acacagcaaacaggcccgcagatgccgcaggtccttcggcaccgtctccagggccatcttcgccgatgggaagaacaacagggagatagacgaccacagcctgtgcacccgcaggaagtaaa

SEQ ID NO: 446549 - DNA, 122 bp, Homo sapiens
agctggccctgccctgcgccccggctccccagctcccacacctgcccttggcagaccctccgaggccccaggaccaggggatcctcctcagtgcatcaggccccccagctcgaagcggggtc

SEQ ID NO: 446550 - DNA, 122 bp, Homo sapiens
tgcagacgggggctggaggaatctcggattcgggctgcaagagcgctgcgcaagcttcgccgagccgccctttcgcagacccagggaagcggggggagggagcgaaggagggagagagagtt

SEQ ID NO: 446551 - DNA, 122 bp, Homo sapiens
tagctgggattatagccactcgacaccatgcccggctaatttttgtattcttagtagagacggggttttaccatgttggccaggctgctcttgaactcctgacctcatgatctgcccgcctg

SEQ ID NO: 446552 - DNA, 122 bp, Homo sapiens
gggccgaggggcagctcctggcgcccttagtctccaccaagctctttggagctgccccgacgaattgatccctcatgttttaagataggagccccttaacatgagaatgcgcgagccctgga

SEQ ID NO: 446553 - DNA, 122 bp, Homo sapiens
ggggcccgcgggctgaggcagcggctgtggcggcgacgctgggcgtgaggtggcggcggccgcgccctggttgggtccccactgctctcgggggcgccatggacgaggccgtgggcgacctg

SEQ ID NO: 446554 - DNA, 122 bp, Homo sapiens
cagggcctctgggaaaaccctcttcccccaagacttcatgactctgaggaccctcctgaccgccatgacagggtcatttgcatctggtggctggattcccgagtacaaattccagctttctc

SEQ ID NO: 446555 - DNA, 122 bp, Homo sapiens
ctgaagacaaggggtaacactccaaaatatggactcattttccactccaccttcattggccgagcagctgccaagaacaaaggccgcatctcccgatacctggcaaacaaatgcagtattgc

SEQ ID NO: 446556 - DNA, 122 bp, Homo sapiens
acacgcaggtgaagactgccccctggtgggcgggagccctcgggaggcccgcaggcccagcgtcctgcgcccgtaatccctcaaaggggcttctctggaatcacccccaggccctggggcca

SEQ ID NO: 446557 - DNA, 122 bp, Homo sapiens
cccttcttcctctctcccgggatatgacctcaaatttcacccctgcgaaatttgagtacacgtgagtcagtcagtcggcctggacccataagagccccagctgagctaccagcagctgagct

SEQ ID NO: 446558 - DNA, 122 bp, Homo sapiens
cattttaaactaatttaacattaattaaggctaggcactgtgctcatgcctgtaatcccgcgcttttcaaggccaaggtgggaggattgcttgagcccaggagtttgaaaccagcctgtgaa

SEQ ID NO: 446559 - DNA, 122 bp, Homo sapiens
aagaatagccaatgcctgcttgatcacatggaatcttgccctccatttgtacaacataagcgttagccaaggacccacagagactccacacagacttctactccttcctcctatccctaccc

SEQ ID NO: 446560 - DNA, 122 bp, Homo sapiens
gcatgtctcaatagtgctggcaccctccagggaccttcctgcttccacagaaggtggggacggggaggcgagcatggagagagagaaagggaagtgggaagaaattggtcacggaggaagct

SEQ ID NO: 446561 - DNA, 122 bp, Homo sapiens
tgtgggcatctccacggcccctctgtgtggctctgctgaaagcttccattactatagttacgaaaaaaaggaatggaatgaacagaagaagggggtaagaaatagaggggaaggtggcttag

SEQ ID NO: 446562 - DNA, 122 bp, Homo sapiens
gcttcccaagcacccgaggttggttggtcccaaatctatcaaactcagtgccctctttagcgacatattttgtgacattccttccattacaccacagtgagttcacaggtaatataacctac

SEQ ID NO: 446563 - DNA, 122 bp, Homo sapiens
aaaggaaaaaagatgtgtttgtgtagcggggacgcagcttgacacccatttcctttggctcgcatcgcggtcgcagagcccaatcgcggggaaacgggccccccagaaaaacaggcaacgac

SEQ ID NO: 446564 - DNA, 122 bp, Homo sapiens
gtggggacccagccggcaacactccccagagcccacgtgctgcgttaagggcagagcccacgccaggcaggaaggcagagccacatctcaaggatgaaacggttgatcatccagaagatgca

SEQ ID NO: 446565 - DNA, 122 bp, Homo sapiens
tacaccctgggaccgggagagtcaccacctgcaggagtctgcaccctgtggcttgttgtgcgcttgggagggcactgcaaatgtcagcactcagagctccccctcttccccacccgcgttcc

SEQ ID NO: 446566 - DNA, 122 bp, Homo sapiens
atttggggcgaaagcttaggcaacaggggcacgttctcgcgaggtttaggaaatttcccacggccgtgttgtgtctgagccgagtagtggaaggcggtgggaaggaggtgtagcgtgagact

SEQ ID NO: 446567 - DNA, 122 bp, Homo sapiens
accaggaccaggaacagcgagaggcggcgcgtctccgagcccaggcagcctagaagccgacgcacagggtttccagagccgccctgaccgccgggcacccagaggctcccgagtttgtgcca

SEQ ID NO: 446568 - DNA, 122 bp, Homo sapiens
gggcacagcgtgggtgctgtcgaggagtggcgcccgggcggggcgggaggttataaatagcggccgccatcctgcttctcttcagacacacttaatttagccggcaggcacacggatgctta

SEQ ID NO: 446569 - DNA, 122 bp, Homo sapiens
tttcaatagacagtcatcaggctagtatcttatctcatcactacttgacgatgagttcgccgaattagactgttctataccagtacaacaaccaaaatactttctcatagattatgcataaa

SEQ ID NO: 446570 - DNA, 122 bp, Homo sapiens
ccgcgggcccggcgcagccaatgggcgcccggcccggagtggggtgacgcggcgtcagcgcgtaactcccgggagcccagccctgggtcacatgcgccgcgcccgctctacccgggaggtag

SEQ ID NO: 446571 - DNA, 122 bp, Homo sapiens
caatgccccgcctaccttggcctaccgcagccaaccagaaggtgtatctttacgaatccccgcccagaaatgcagaccggaagtctttccaccttttgtagccaaacccgagacctgacccc

SEQ ID NO: 446572 - DNA, 122 bp, Homo sapiens
agccaccagcgcgcacgcgcactagggtccgaggcgcgcatttgacccgagacgaaagcgcgtgggtacttgggagctgtcctggttggttttgcgtctaatcccgtcagttctcgcgattt

SEQ ID NO: 446573 - DNA, 122 bp, Homo sapiens
cacgacggtgcacggcctccaggtccctcgggctgcgagtgcaggtgattaataaactgccgtcaatctcgtctgctcggtggcgggtgatttgttttcagacaatactatagccctgggac

SEQ ID NO: 446574 - DNA, 122 bp, Homo sapiens
cagcaggcttcttccctggaggggccagccctgtcctacatacctcacgcacatcttgcccgtttctgttcataaagacctccagagagggagaagaaccacagctgactcagtccggggta

SEQ ID NO: 446575 - DNA, 122 bp, Homo sapiens
agtgagacggccctgacgcggagaatggagggcccgcagcggcgcagaagaggatggaaccgagacgaagaagttgggacaccaatgagggacagcaagcagaaaagaatggggttcccttg

SEQ ID NO: 446576 - DNA, 122 bp, Homo sapiens
ggcaccaccgcctctgtggtcagaacctgcatggccagagcccccacggccagggccggccgctgcttcctgtaggcaggggctcctctgccaggtccgccgactgcagcgtgcccagccca

SEQ ID NO: 446577 - DNA, 122 bp, Homo sapiens
ccatgtgatgtgtacaggagccaggccagtgtgaggcacatgtgacctgggtggcagaggcgccatgggcggcccgggtggcagaggcgccatgggcggcccgggtggcagaggcgccatgg

SEQ ID NO: 446578 - DNA, 122 bp, Homo sapiens
ggaacccgcgccggtggtggcgctggtgttggcagccttcgtgctgggcgccgcgctggccgccgggctgggtctcgtctgtgcgcactcaggtaccgacgacctccgccaagccgggcccc

SEQ ID NO: 446579 - DNA, 122 bp, Homo sapiens
cttggcccgtccctagggtggcaggggcctcttctgtgctggggcaaaggcagtggacttcggcaggtcacagtgggcactgctggagggctcagtccagcatggcgtccagctggtcagcc

SEQ ID NO: 446580 - DNA, 122 bp, Homo sapiens
tttacgctcaggctccgcctccccgccgggtcttgcctccaaatcccggccccgcctccacgcggccccgcctccacgcggccccgcctccacgctcggcctggccccaagctcttccttcc

SEQ ID NO: 446581 - DNA, 122 bp, Homo sapiens
gccaagtctccagttggcgcttgtccttaggccacactgccacccacaagagactcagggcgcaggggcaaacaagccactcctttggcaatctgtgtctatcttagcagcctgtggcttca

SEQ ID NO: 446582 - DNA, 122 bp, Homo sapiens
ggtgttcctgagccaacaacaccagctatgacacacacttgctgaatactgactactcctcgttctatggtgtctttcttgagtactgctttatatctcagcactgtggtaggcccatgggg

SEQ ID NO: 446583 - DNA, 122 bp, Homo sapiens
ggttttattactggataaggaacttagtacctggaagcatgaggtgcagcatgagtccaacggagagttaagggagatttgccttggaaatcaatgctgtttcttatggtggaaaccactgt

SEQ ID NO: 446584 - DNA, 122 bp, Homo sapiens
cttagctgtgccaccggctggatgagcccagggcagcgggcaggtcggtagtaggttccccggatgctgaggtaaggacagggctggggccggaactgccctccctggaaacaggtgcacac

SEQ ID NO: 446585 - DNA, 122 bp, Homo sapiens
ttgctatttcatttaccacagtagtttgagtcatttccacatcttgcgagtccttccgaacgagtctcctttccttggggctcgcaaccacccaatgatcgattcaggagaaaagaagcctg

SEQ ID NO: 446586 - DNA, 122 bp, Homo sapiens
cccacttcgcagatgaggacttcacagggcgcaggtcagtaaagggttttaagcaggaaacggcgcaggaaaggaggtgtctgcatggtctgaaggccgaaagaccgcgggcaggaccagcc

SEQ ID NO: 446587 - DNA, 122 bp, Homo sapiens
cctttgtaaactgaagaaacgcagttggactcaggtggattggctgcggtcccaaggccccgctgagttgcagaggcactgcctcccaaacgctcttctgcgttccgctgtggggagagggg

SEQ ID NO: 446588 - DNA, 122 bp, Homo sapiens
agcgaagccgggccagacgtgccaccggggcctcggcgctggcgaaggggcgcgtgcggccgcactggggccagccccgccctggtccccggccacatcctcgagaccaccggggtggaggg

SEQ ID NO: 446589 - DNA, 122 bp, Homo sapiens
ctcgcctcactcagctgaacctagataggtgcgagctcaccaagctccaggtcgatgggacgctgccagtgctggggaccctggatctatcccacaatcagctgcaaagcctgcccttgcta

SEQ ID NO: 446590 - DNA, 122 bp, Homo sapiens
caaagacaagagccccagttgcaatttctgaagcatttgcgacaacaaagtgttctttcccggcttctctcttctccctctctgccccctgccaccccccgccccggaagcccggagccccg

SEQ ID NO: 446591 - DNA, 122 bp, Homo sapiens
agtggttgtggccatgcataagaaacagcaggtggtgccagatgacagatggtgtgggagcgcgttccccggtaggagggggcgcgagcgagcaagcaggcaggcagctgccaggagctctt

SEQ ID NO: 446592 - DNA, 122 bp, Homo sapiens
ccctgccctgggttgaccttacaatgcccagaggattaaagcttaacttcctacctgtcacgtttctttttgcagctcttctggaaagcttctctctcttccttgattccccctctttcctt

SEQ ID NO: 446593 - DNA, 122 bp, Homo sapiens
agtacttcttgccgtagtccttgcgcacgacctcaggcagctcctcccacatcttcttggcgatggcctgaatgctctcagggctgtaaaggctggtggcagcgatgaagttgccgggctcc

SEQ ID NO: 446594 - DNA, 122 bp, Homo sapiens
tggagagaggggcagggaagaccagcgtcaaaggaagcgagctcccggggcgcgcggctccggggctctccccaagtcccagccctatccgcagccccacccagcagccggaggggtccggg

SEQ ID NO: 446595 - DNA, 122 bp, Homo sapiens
ttgtatatactagcatgactgagaaactgaatttttcatgttaattgatttaaatttagccgtatgtagctagtagctagtgtattagacagcacagtcttaggcttataaaacagtaaagc

SEQ ID NO: 446596 - DNA, 122 bp, Homo sapiens
ttccccccaagccaggacacctggaagcctggaaatggtgagtgtttggggacagctacccgagatccggcaggggctgattggaaacggccagaaccggctgtggcaggaccccaggctcc

SEQ ID NO: 446597 - DNA, 122 bp, Homo sapiens
gggcaggggctcgggtcgctccacaaggatgggcgcgaagggtcccaccagccagggcagcggcacggcctgcaccaccagctccagcagctcgtccacgcaggcgtgcgcgtgggccacgc

SEQ ID NO: 446598 - DNA, 122 bp, Homo sapiens
tgggggtggggtgggggggacaggcgtcccccccaccccaaccccacccctatccctgcccggctgtctaaacggacctaaatgctaacctgctgttgccttgactccagagacacgaaact

SEQ ID NO: 446599 - DNA, 122 bp, Homo sapiens
agcaagtcgcttaggaagccaagttcacagtttggatcttacagagtaataagaaaggatcgaaggctggggaaaggttacattttgaaaggcattatacacactgcccaggagtttgaact

SEQ ID NO: 446600 - DNA, 122 bp, Homo sapiens
tatagcttaggggtgggtggaagttagttgaaacaatattggctatgagttgataattgtcgaggcaggatgatggtacctggaggtttgttatactgttctcttaactttggaatacgttt

SEQ ID NO: 446601 - DNA, 122 bp, Homo sapiens
cccatcccttgtcagcctctgtctctgtgtggtgagaaggcgcactggctcgtgcctgcgcgaaactcgcgcacacagaaaagaccaatcaaggacgggtcattcccgccccccgcgcgcct

SEQ ID NO: 446602 - DNA, 122 bp, Homo sapiens
gtgatagcgattactatcaataatcttatagatcactctatgaagaggtatcattattatcgtcctttgttttgggaagctgaggaaacacacatacagagaagttcaacttgttcaaggtt

SEQ ID NO: 446603 - DNA, 122 bp, Homo sapiens
tctgcatggactctcccagacctgcccggccccatctgtgccgtctcagacagacagctccgtcctcatcaggttcaggtctggccccggcgcttgcgggtcagctgccttcaggccctgtc

SEQ ID NO: 446604 - DNA, 122 bp, Homo sapiens
actcactgagtcataacagttcattaggcgctattctaagtactacatgtgcatcaatatcggcatactcagccctcacgacagcactagtaggtgggtgctgcaagaaccctcacttttta

SEQ ID NO: 446605 - DNA, 122 bp, Homo sapiens
cagacgcccgcatgccggacctcaaaagcgcaaacgctaaaaaccggttgagttgacgcacggagagaaggggtgtgtgggtgggtgggtgtgtgttagtgtgcgtgcttgcttgtgtgtgg

SEQ ID NO: 446606 - DNA, 122 bp, Homo sapiens
ccatcccaaagtgctctgagtcggagaccgacgaggattacatcgtggtccccagggttccgctgagggaggatgaacccaaggacgagggcagtgtggggaacaaagccctggtgtctccc

SEQ ID NO: 446607 - DNA, 122 bp, Homo sapiens
ctcctggttggagcagttaataactgggtaagcggcatttccctaaatggctgttttcctcggcccacccgtctctcccccatcccattgctccccggtcctcagcaatgccccaactccct

SEQ ID NO: 446608 - DNA, 122 bp, Homo sapiens
tgtccaggaatgtcggtatgacggtctctcagaaagggggtccccagccaacaccgagcccggctggccctgggacgcaactcgggtaagccagggtcccctctgtgccctcgggtgggtgg

SEQ ID NO: 446609 - DNA, 122 bp, Homo sapiens
taagctcagatgcagagcatggagttgatgacgccccacagtcatgcacagcaccgcatccgtccacgacaccctcattattctagtcctgtacactctcccacaggcagccgtgcccacgt

SEQ ID NO: 446610 - DNA, 122 bp, Homo sapiens
aaccgtgggagtggtgcggcggctagagtccctggactcctcaacctagggagctactcgcgaggtaaggggcgcgccagactggctcctaaaacgcactcgctcgtccgcactcctcgcgc

SEQ ID NO: 446611 - DNA, 122 bp, Homo sapiens
tgggcggacccctcccgcaagcccatgatggccaggccaaggccgctgggaaaggcaggacgctcgcccatgcgctgccagctgggcttttctccttcgcccgccctgtgttccagggcgcg

SEQ ID NO: 446612 - DNA, 122 bp, Homo sapiens
tgagagaagtgagtgttactgccagtagctgcgctgggcccttcggtgttcacacctgcccgtccatgtcagcaccaggtggctgtccctggggagctctgcagctcagtggcaactctctg

SEQ ID NO: 446613 - DNA, 122 bp, Homo sapiens
ttacttgaatatttatttattaatctcactataaatagaattcttacaatgaccctaaaacgaggctatatttataatctctattttataggtgaggagtcttaggcacacaggtgttaaat

SEQ ID NO: 446614 - DNA, 122 bp, Homo sapiens
ccgccccgatggaaatctccgacgacgtgacggctgctgcggtggggagccggggaggctcgcgcgggcgcgggaaggaggcgggagcccggttgctgaggccccccgtccccacgccgcca

SEQ ID NO: 446615 - DNA, 122 bp, Homo sapiens
gcagagcccacaatccagtgccgcggagacacccggagccacgcagaggctctgcccccacgccctccacccgcggctcagagacacccggagccacgcagaggctctacccccacgccctc

SEQ ID NO: 446616 - DNA, 122 bp, Homo sapiens
agagcatgaggagacccagggcccagctggttttgtgtgtcacaaagggaaataatctaccggctgtgacagaaccaaggccagaacacagcagaggtcagtactggggagagtgggtcgtc

SEQ ID NO: 446617 - DNA, 122 bp, Homo sapiens
accactgtgaccacatatattccaaggaacaggaggaagagtggcagttgaagttctgggcgttgtgtcaagcctgccaggataaactcagcccctgaagaatggtttgaagtagccatgtc

SEQ ID NO: 446618 - DNA, 122 bp, Homo sapiens
gcgctccaggagcagttgtgcctccagccggctcaccttcaggaagcacctgtggcgggccgcgtcacccactcgggaccccggagaccaagtccgctcttctgcacgtaaaccctgcctcc

SEQ ID NO: 446619 - DNA, 122 bp, Homo sapiens
gctttggggacccttccacccgccccgaggggcttggagggcgtacgggaggtggagacccgccgctgccgcagctgctgaaggcgtgaggtcgccctggctctcggcgggcgctggctcct

SEQ ID NO: 446620 - DNA, 122 bp, Homo sapiens
ctaaggttacaaagcctcttatcctcaggccacctccagtacagcaaatccaagccctcccgtctaaacttggcgccctgagtaccaagggtcacctcggcctttcaggctgaagggaggga

SEQ ID NO: 446621 - DNA, 122 bp, Homo sapiens
cggagccaccaaccaaagttccaagactgctggctgcagattgcatgctcttggggcagacgccctaagaatgtgtccaccgagtccaatgtgtctttggagtcctgagccctgagatttcc

SEQ ID NO: 446622 - DNA, 122 bp, Homo sapiens
acaaccctgcggcaaggcaggagtggccttcctctccgccagggttaaggtgagtaccaccgcccttgggcccagcagcccgggtgagagcctccgccgcccactgcgacaggcctgaaagc

SEQ ID NO: 446623 - DNA, 122 bp, Homo sapiens
cgaaggtcggttttgaaatcctgcgcgatttctcgcaccaggcgctgaaatggcagtttgcggatgagcagctcagtcgacttctgataacggcggatctcacgcaaggccacggtgcctgg

SEQ ID NO: 446624 - DNA, 122 bp, Homo sapiens
accggtcttgttgagtcactgggaatgcgtgagataatttacactaaaacccctggcacacggttggcagtagttctccccgactctcctaggaatgtttttcctctgtgctgagctgttgt

SEQ ID NO: 446625 - DNA, 122 bp, Homo sapiens
cagccaagaggcggccttccactagagaaggcatcccgctctctaatcatgacgtccccccgggctctcagagggcaaaacttggaccgaatgctgttttggtctaacacacattttctggg

SEQ ID NO: 446626 - DNA, 122 bp, Homo sapiens
agcacacatgcctcatcaaaaggataatcaaaagaagaggtccgatccaagaaaaaccaacgtgatcctctctaatgaatggtccccacagtggcattcagctctagaagggcagggaactt

SEQ ID NO: 446627 - DNA, 122 bp, Homo sapiens
tcccttcgtttcttcgaattcctattcatgcgccgcacccttctcggacccccagcccctcgctaaggctctggggatgggggtcaagtctaggctcaatggacctcccctcctccacccgg

SEQ ID NO: 446628 - DNA, 122 bp, Homo sapiens
gcgctttggtctcaaaccctgcgatggtctcacctggccggaggggccatgcgggaggtgcggcttcggcttccacgcggcatcctaggtaagcgacggctaggcctccggacgtgggacaa

SEQ ID NO: 446629 - DNA, 122 bp, Homo sapiens
gtgcctacaaattctgcatcctgcaagggcccagaccagccactgggccacagtgaccctcgcttgatgccactatgccttccggacccccagaaaaggagcctcccaaccaagagatctct

SEQ ID NO: 446630 - DNA, 122 bp, Homo sapiens
atccttttaaagggctcgcgtcccgcggccctgaaccggcgcgctggagcagtaatgcgacgttctccgaggttcaaggctcacggcccagccctgtgatccagtttcctcagtcttcgcgg

SEQ ID NO: 446631 - DNA, 122 bp, Homo sapiens
gcccgagagtggttgggacgtttgagtggccttggagaaggcagctcgtccgtgcgctcccgagtgtgtgtgtgcgtgtggatgttcgccaggctgcccaccaaggttctgagaaagcttgc

SEQ ID NO: 446632 - DNA, 122 bp, Homo sapiens
tccaacattgcaatgactatgaattcaggcagatggaatttggagactacaggattagaccgaggggatctgaaagtgcccagccttgggaaaaacaaaactatttgctgtcatgagggttc

SEQ ID NO: 446633 - DNA, 122 bp, Homo sapiens
gccctctctgcatactccagcacacagaaactgctgcttcacttgtttgttgacttgaaccgaaccttgggtggcattaatgtgcctggcccaagactgaaaaattaagaaccaccagagct

SEQ ID NO: 446634 - DNA, 122 bp, Homo sapiens
aggggctctatgcacctccctggcggtagttcctccgacctcagccgggtcgggtcgtgccgccctctcccaggagagacaaacaggtgtcccacgtggcagccgcgccccgggcgcccctc

SEQ ID NO: 446635 - DNA, 122 bp, Homo sapiens
tgtcgaggcttggagcggcccgtcgggactcgagcgcgacactagaaagagggacacaagcgaaaagacaggtggcccccaacagcgcgcagcgaactccactgccgctgcctccgccccag

SEQ ID NO: 446636 - DNA, 122 bp, Homo sapiens
tcatctgagtaactcttaatgggccatccccttcctcccttgatgtcaagagaggaagcacgtgtgctactgtggttgaaccttggaagggtcgggcaagctgtcagtcctgtgccggctga

SEQ ID NO: 446637 - DNA, 122 bp, Homo sapiens
tccccagggccttcggctctcccacaccctcggcaggctgtgtgagccccgggatgaaggcgcagcctctgcaggacaccctctcaccgaggtcaggggcagtgaggacggatgcgggtccc

SEQ ID NO: 446638 - DNA, 122 bp, Homo sapiens
gtatctagctctaattccaaaaacaattccacaccctaggtttctgtgtccagcaggtgtcgcccttcgtgggacaacaaaccaccagccagcatcctctcttccttagggtggagtccatt

SEQ ID NO: 446639 - DNA, 122 bp, Homo sapiens
aggtcctaggccccagagcctgaaggcaccacgtgtcagcctttcccagactctcaggggcggggagagagacgaatacccacaggcccagtacttcgttggttggtggcttcctccagtcc

SEQ ID NO: 446640 - DNA, 122 bp, Homo sapiens
aagatggcactgtgtaagtgaccccatctccagagtccatgacaatactagtagtactaccggaggtgtacagggacagcatggccctgggtgccacatacatggcagggggtatccaaggt

SEQ ID NO: 446641 - DNA, 122 bp, Homo sapiens
ggcgccagcccggcccctcgcccgcggcccgcccgggctgtgacacatcagcaccgccctcgcggctggggccccgtattgtcctccgccgcctcccaccgcatgcccagcctcgcgtctac

SEQ ID NO: 446642 - DNA, 122 bp, Homo sapiens
gctcagtggctttcaccgtgaatgccccatggatcattgcaagtacaaatactgtagaagcgggactggattgagtcattaaaagaataatgggctttttcttacaaaccacaattgccaga

SEQ ID NO: 446643 - DNA, 122 bp, Homo sapiens
tttactgtgtaggcgctcattagtattaaactgaatgtgcctttaacttggcttggggtacgttgaattgaggatgagcgctcacacaatattaagaatttctttccaagaaatgtgctcgg

SEQ ID NO: 446644 - DNA, 122 bp, Homo sapiens
ggagtgcgagaacgggagttacaagcccgggtggctggttactctttcctctgccatctacgggttgcagcctaacctggtcccggaattcaggtagggagggccggggggcaggggggaag

SEQ ID NO: 446645 - DNA, 122 bp, Homo sapiens
tgaccggctccatggcagctccccatcttccctagaggctgcctgcgcatctggagcctgcgctccggctcagcgacctttcctctcaaatgcggaagcgtgcacttacagttcagaccgtt

SEQ ID NO: 446646 - DNA, 122 bp, Homo sapiens
tccgcgcgcctccgcccaaccctctgggactctccgagggcgcgagggaggcttccatcccggggatccctcaccccgacacacacacctctgtgacttgagtttgttccctttctccggtg

SEQ ID NO: 446647 - DNA, 122 bp, Homo sapiens
gggtcagctccccgcaggcgccccgacccccgcctccgcgcccatcccgcgcgtccccgccgccccaagagcgtcctaagacacccggggaaacgccttccctgtgatgccgcggacccagt

SEQ ID NO: 446648 - DNA, 122 bp, Homo sapiens
ggacccggccgggccagggggacaggcttgttagtgcagcactgaggcccggggacccctcgaggacgcccgcacctcctgccctcccgtgccctccctggtcgctcgaaggctctgcgccg

SEQ ID NO: 446649 - DNA, 122 bp, Homo sapiens
ttttttccagcattcagatggcttcttttgacctgttaactttctataggttgggagccacgtgtaccagtgtgtgttgatcttggcttgattcagtctgccttgtaacaggtgaggtttct

SEQ ID NO: 446650 - DNA, 122 bp, Homo sapiens
ccaatccaccaatcagaactcggaggatttagtccaggcgggcaagaggatgacagcaggcgacatctggggcccagctgaggagagagcccgaacccgacccttgccggcccccacccttc

SEQ ID NO: 446651 - DNA, 122 bp, Homo sapiens
cacttcattgacataaactcaggtgtggtaggaactacttgtccagacttccaggttgtacgtgcctgagtaatgagctgatccttcttatacctcagcatcagagaatccccggtgcagga

SEQ ID NO: 446652 - DNA, 122 bp, Homo sapiens
ccgtccccgtcaattggccgctagctctgttttgactgcctgtacaaagcgagtagacggcgggggatggggcgattagggaccggatttgggaaaggaggcagcagccccttcccctcccc

SEQ ID NO: 446653 - DNA, 122 bp, Homo sapiens
ccctcccatgtggatcgtcatatcgatggggttagtggggggtgatattactccccgaatcgtggaggctcccgcccccataccgtgtggatcctcgtttccagggggaagaggggggtgat

SEQ ID NO: 446654 - DNA, 122 bp, Homo sapiens
tccattctactgtgcatctagtcacgttggcatagacttccaggcaggaggaggagcaagcggtgggatcagctacatgtgggcttccaaaggtaatcccaggtgccacctctcctccatac

SEQ ID NO: 446655 - DNA, 122 bp, Homo sapiens
ctatcaccaaacagagcagatacagagcttgagttcttgaaagagttgcgtatcagtccacgacttaccacctgggaatcactggttctaatctaattcccttaaacatcacattttcttct

SEQ ID NO: 446656 - DNA, 122 bp, Homo sapiens
gcgcggctggagcggggcgaggcctaggtggggctgcagacgagaaccacgccttggaggcgtggctagggcgggtagaggctcggacaaccgctggaaggcggggctggggcggggcgaga

SEQ ID NO: 446657 - DNA, 122 bp, Homo sapiens
tgcggacgccttttgtacgttcttcctgatgtagcgctgcgaggggcgactttacctcggcgtttgacaggtacgcagcattcccgcacccgcctgcgcctcgcgagcagaaagacggcgga

SEQ ID NO: 446658 - DNA, 122 bp, Homo sapiens
acactagaaaagttactacagaattgacgtagcacagaggtctgatagtgcccaattccccgggctgcccatagaactcagcgtgctcccccacccccacctgtcagaagtccctcgcagct

SEQ ID NO: 446659 - DNA, 122 bp, Homo sapiens
caggcccctccaggacgaggttggaggaccaagcgcagaaggtaaggacgcagccctcggcgagtgcgggcggggcccaaatccctcgccggccggctaagcagaagcggcttttggctttc

SEQ ID NO: 446660 - DNA, 122 bp, Homo sapiens
acatgctcccgagctcctgtggatgggcacactgggacgcccaatacaaagacgagcaggcgccaaggatgcccagatgccggagaaaacccaacaccatggatgagggtgatgcccacaaa

SEQ ID NO: 446661 - DNA, 122 bp, Homo sapiens
gctgtgcgccagaaaccgggagcggaaagggtctgcgccccagcaggcgagtgagcagagcgcgcggcgggcgcggcggggcctcaccttctcccgggccaagcgcccacaggaggcgcccc

SEQ ID NO: 446662 - DNA, 122 bp, Homo sapiens
cgtgtgcgcggctccaagtgcgcctgcgtactgctcactccccagctccgcgccctgctccgttcctcccaaaactctgaatcgaagaactttccggaagtttctgagagcccagaccggcg

SEQ ID NO: 446663 - DNA, 122 bp, Homo sapiens
gtgtccttatctgaaggctgtggtttcaagcatcctccttactgaatttagattttgttccgattttgtggcctgcgtttcttcttactgccctgctctgtggccctgttcttcctgggttt

SEQ ID NO: 446664 - DNA, 122 bp, Homo sapiens
acgcccgcctcggcccccacgcccgcctcggcccccacgcctcctacccggccttgaagccgctctcctgagccccggcgccctcccgccgggcccgggcccctcatcccctttcacctcgg

SEQ ID NO: 446665 - DNA, 122 bp, Homo sapiens
agctcataccccatggctccaggggtagaagagagctaaaagttcagaaaaaggaatccacggtgtcaacaggccaagtttgaatttgggcaggagatcagcctgggtgggccccatgagtg

SEQ ID NO: 446666 - DNA, 122 bp, Homo sapiens
cttgtcgatgtacttggacaagtccaagatgctctcctttttcttcttctccttatcctgcggggaaagcagagcgcatgagacctggagcgcggcccgagctccacgccccccggctccag

SEQ ID NO: 446667 - DNA, 122 bp, Homo sapiens
ctttgcttctaaaaccctcctgattcactctgggctcgagagatcctgcaatagtgcagccgggcaccagtcatgtcctcagtctgtttcctgggcatatggaaaccctgccagggacaact

SEQ ID NO: 446668 - DNA, 122 bp, Homo sapiens
gcgcgggagcgtggctggggttcccgaggtgggagatatcgtcgggctgtgccaccggttcgtgcagaagttccagcgagggtgtccgtgtgttcctgagaagccaccgagggaggggttcc

SEQ ID NO: 446669 - DNA, 122 bp, Homo sapiens
aaaaacccttgttccgagcctacagggagactgatctgagggataactccagttctcccacgtgggctcagcctcgcggcagttaaactctttctctattgcaatgccatggtctcagtgaa

SEQ ID NO: 446670 - DNA, 122 bp, Homo sapiens
ataccatttccccatgttgagaggcagtgattatttccccagctgcatcaccaacctcctcgccagtccacttaagccactgcgcacattctcccagttgaccttcccagggcttattacac

SEQ ID NO: 446671 - DNA, 122 bp, Homo sapiens
gggtagggggagtggtgtcagttctaggccacaggaattcgtggtctggccccagaggtgcggtgtttttggccgggaagtcaggcagaagtctgcagcgtgcaactcgcagcggggcgtgt

SEQ ID NO: 446672 - DNA, 122 bp, Homo sapiens
aaataactactaagcacctaagccacagattgattccaggtctcaaagtccatggtctaccgctgtagaaaggcttattgaatatcctaaacaagcataaaatgcaagaggaacacagccag

SEQ ID NO: 446673 - DNA, 122 bp, Homo sapiens
gccgacccctccctcaggctcgacacgcccccttgcgtcaccgcgtccgtcggcgttctgcgtaatgtccgctgggatttgtagttctctgggaaatgctaggttggattccattcattcat

SEQ ID NO: 446674 - DNA, 122 bp, Homo sapiens
gaagggagggggctactggtatccagtgagtagaagccatggacactgcttggcatcctacgacacacaggactgcccccacaacaaagaattatcccaccccaagagtcaacagtaccaag

SEQ ID NO: 446675 - DNA, 122 bp, Homo sapiens
agttcgtctccaggtcccgcccctgtgggcggggcgaggcagcgtcgccgcgaggccacccggaagaccaagccgggtaggcgctgtctccgtcgcctccaacccccccggtccgaccaggg

SEQ ID NO: 446676 - DNA, 122 bp, Homo sapiens
tcttatatctactcactcatggtcgattgagtccatggtccactgactctcactcttggtcgattgtttccttgtgtgttttgttattcattatagcaagcatatctttagcaggacttgct

SEQ ID NO: 446677 - DNA, 122 bp, Homo sapiens
ctgcactgtaactgtgaaattcctcctcaagcttccctttatatatccatagaggtttggcgttcattcaggtgtaaagttgtgtagagcttcagagtgaaaacacagagaaggggtgggat

SEQ ID NO: 446678 - DNA, 122 bp, Homo sapiens
gctgggcgggatcttggggcggccgggctagtagggctggatcaggcggaagccggggcccggggctgggcttcgtgtcctgcgttccgggagcgccaacccctccaggttaggaatctgag

SEQ ID NO: 446679 - DNA, 122 bp, Homo sapiens
tatcagtgtcaacgttgccagaaagcctttcggtgccactcgagcctcagccgccatcagcgtgtacacaacaagcagcaatactgcctgtagccattgggtggcagcagagtcccagaata

SEQ ID NO: 446680 - DNA, 122 bp, Homo sapiens
ccacatagatccagcaccgattcattcccgctgcacatcctatatattactgttaggaagcggagcactgggctaatttcgtcacccaccagccacccacacacattctacaactgaacacg

SEQ ID NO: 446681 - DNA, 122 bp, Homo sapiens
ccgcccacttccctggctcaccttagcgtcgtcccccaggaaaggcctcagtgtggctggcgggtgccctctgcgggccgtggagggcagtgcaggcaccaggcctcgtggggagagcgtgg

SEQ ID NO: 446682 - DNA, 122 bp, Homo sapiens
agctcagggcagaaaggcacttgccggaatcaccctgccagggaactctgaaccccgctgcgccgccgctcctgatctctggggtttcaggcgcctcctctcttacaaccctctcctgggga

SEQ ID NO: 446683 - DNA, 122 bp, Homo sapiens
ttgtcaactcattaattttaagcagtcagtttgggggtactgcaggataatcaggagggccgtggggagtcaagaggtgacccgggatgccggtggtggggaaagaaaagaggagcctctgg

SEQ ID NO: 446684 - DNA, 122 bp, Homo sapiens
tccccacggcctctcccaaggcggaggatgctgccgccaaggaaactggctcaccacggacgctggtgagctatggagctatcagtgaggtgtggatttctcaggcctctggcgggagccgg

SEQ ID NO: 446685 - DNA, 122 bp, Homo sapiens
agagccccatcactacacatgtcttcacgcaggttatctctcaagactcaacccgcgctccgggaagagcctggcacacgaggaagccactgctgccccgcgcccactccagcgtgcggccc

SEQ ID NO: 446686 - DNA, 122 bp, Homo sapiens
gaccctgtgtaggtatagagttgagtcaagtggagtcactgcctctgtccctctggtcagcgtgatggccagaggcctgggggccccccactgggtggccgtgggactgctgacctgggcga

SEQ ID NO: 446687 - DNA, 122 bp, Homo sapiens
ccagagggatgcactttctcttatgtgaaaaaaaagaaggcgcttccctttagagcgttacggtttgggtaaagcaacgttgaagttgatgctgatcttggtaatatatttgcagagcatgc

SEQ ID NO: 446688 - DNA, 122 bp, Homo sapiens
cacacacgtcctcccgggaggtggcattgtcctgccttcggggagcaagggacagcaactcgcccaagggcagctggagggcagcagggctggggctggtgcccggtccctggggactgggg

SEQ ID NO: 446689 - DNA, 122 bp, Homo sapiens
tttcgtcttgaaaacctttgggatactgtacccttggtcttttagtcctggaattctttgcgggatcgtatgcacccgtttttcatcttggaatcttttgggagaccgtatgccccagtctt

SEQ ID NO: 446690 - DNA, 122 bp, Homo sapiens
tcggtagggtgtctgtggtattccttggtcaaagaagtactctaagcaacttcagtctcacgaattactatcaccctcgtgggcatacatgatggttaccctaaagaggaagtttcagaagg

SEQ ID NO: 446691 - DNA, 122 bp, Homo sapiens
ccaacctgtcccctggctctgggcctggtctttggtgcccaccctggcctcacatgccaacgtcttctgtggagtgtgcaggtgtccatgagcgttcctgtgttgggggaagcctgcctggg

SEQ ID NO: 446692 - DNA, 122 bp, Homo sapiens
ctaccaattcacattttttactttctatgtgaaattcatcatcaaatgaggatttgcactcgggacagttggaccctgggactcccccagccctgctcctccccccagccctgctcctcccc

SEQ ID NO: 446693 - DNA, 122 bp, Homo sapiens
aaagaaaaacgcggccgtaggtgagccgccgcggctcccgtactccgttcaaactggtcccgccgagccaatcggaaggttcaaccttcacacgtgccctggcacttgggaaacccgggctg

SEQ ID NO: 446694 - DNA, 122 bp, Homo sapiens
aacgcgtgcgtaagcaatatgccagttttatagctcagaacaccgaggctcagggagtcacgtaacttgttcatggtttcaccgaaaacccaattctgccacgttgcaaagacccgcttttt

SEQ ID NO: 446695 - DNA, 122 bp, Homo sapiens
ttctcttccttcccatgctatcctctggaggaaagtcacctgcacagcccatgcttaagccgtgggaatttatgcttctgccttgagggcagaatacctataagaattgtttgcaatctctc

SEQ ID NO: 446696 - DNA, 122 bp, Homo sapiens
tctgcccgccggacccagcgaagctaggggaacaaatcccaaaaacagttcgggcctttccggtgcgctcacccctacacacgcgcctgctcgccacccaggagcggcgtcccgttgccagg

SEQ ID NO: 446697 - DNA, 122 bp, Homo sapiens
gaggtgtggagggagaggggcaggcaggagctggggctgcgcacagcgcttgcgggccagcgcgagttcccggtgggcgtgggctcggcgggcccctcactcagagccgcgggacctgccag

SEQ ID NO: 446698 - DNA, 122 bp, Homo sapiens
agcatgacaaaggcaacggaaacctccgcctgggtcctgcaggcagtcccgggtgtgtgccgcgtggcaggcacctgagcgacactcattgatgtctgcctcgcagcgcaaaccagtgtatc

SEQ ID NO: 446699 - DNA, 122 bp, Homo sapiens
gggctgcgggcgcggcaccagcatgaattgcggcggtggaggccggggcgggccaggccgcgaccagagagaaaggcagcctgggagggccagcccggccaacccaccgggcctgctgatgg

SEQ ID NO: 446700 - DNA, 122 bp, Homo sapiens
tgtctcaagttgtctcaactgggcttccgtagaacggtttcttcgtaagagggccttcagcgacagccgagctcggaaaagaacgggaataagttgtctcttacatttcctcaaatactgtg

SEQ ID NO: 446701 - DNA, 122 bp, Homo sapiens
tgacagagtgagaccccatctcagaaaagacagcctccctgttgctgccccctgcactcccgagattctaattcagtaggtctgggtgatgactgttatttttatattttatttatttattt

SEQ ID NO: 446702 - DNA, 122 bp, Homo sapiens
acacctcggtgcagctgcagccgcccaccacagccccagggtgagcctctgctgccttcgcggcgctcttgccacctgccccggcccttcctggcggcctcagggtctccaggtccctggac

SEQ ID NO: 446703 - DNA, 122 bp, Homo sapiens
gccatgctggccttttgtcttttcatttcttgctcttggcaagctctttcctgattcatgcggaatttctgacagactaaatcctactcatcctttgagtcatttcctcagggacattttat

SEQ ID NO: 446704 - DNA, 122 bp, Homo sapiens
tagggagaaacatttttatggctatctctttatgatcctctcatttctgaacactgaactcgacctgcctcttaagtttctcttctctccaagtaactgtctttcccaaattaagagtcttt

SEQ ID NO: 446705 - DNA, 122 bp, Homo sapiens
caaaggatagatcctgtagctgcaagcttggcttctctggaccgaggagtcctggcgctccgctggggaggattgcctggagagagcagacccagcagcaggacaatgagagctctaaaggg

SEQ ID NO: 446706 - DNA, 122 bp, Homo sapiens
gagaccaagaacccaccaattccagacacactatgggctcacagcgtgtactcgcgcacacgcagtcaggtgtggatgtacacccgcgcacacccaggcacatgtacacccgcgcgctcaca

SEQ ID NO: 446707 - DNA, 122 bp, Homo sapiens
ctggggcgggccggctgggaattaaatgctaaataccccctaccggctggctccattacccgggacatccagccccaggccccccacccctctctgccagcctcaaaccacccagaccaaga

SEQ ID NO: 446708 - DNA, 122 bp, Homo sapiens
ttcaaaatttaagaccattagaaatgacagattctcttccaggagctcccacaaaagtcccgagtttcactgtggttggaaggcttaagccaagtgcttactcttgaaccaatcactgtggc

SEQ ID NO: 446709 - DNA, 122 bp, Homo sapiens
actttcatagagcaggtttgaaacactatttttgtggaatctggaagtggacattttgatcgctttgaggcctatggtgaaaaaagggaatatcttcgcataaaaactagagagaagtattc

SEQ ID NO: 446710 - DNA, 122 bp, Homo sapiens
gtctccgccattttgtgagtctataactcggagccgttgggtcggttcctgctattccggcgcctccactccgtcccccgcgggtctgctctgtgtgccatggacgggtgagtcgcacgtcg

SEQ ID NO: 446711 - DNA, 122 bp, Homo sapiens
gcagcagcccctactgaagtccaatagaggagacttgatctctagttcattctggaactccgcctgggattgtgcactgtccagggtcctgaaacatgaaccaaactgccagcgtgtcccat

SEQ ID NO: 446712 - DNA, 122 bp, Homo sapiens
cccacagtcagttctagtgacagatggtcacctggtggtctccctattctcctcagatgccgctgggttggcagcttctgtgtgctgttttgtttaagacccttttatcctgaacaagacat

SEQ ID NO: 446713 - DNA, 122 bp, Homo sapiens
acaactgccagaccttcaagtgagtgtggccgggcgctgtggcgggggagcggtggaggccggcctgcccagccgctgtgttgaacctgaaccctttccttgcagggaatccatagtcagtt

SEQ ID NO: 446714 - DNA, 122 bp, Homo sapiens
tcccgggcgcggaggatggaaacctggcggtaacctctgcaggtcgtgccactcggtgtgcgcaaggtctccagaggcatcttttcatttttagggggcactttccacgaattcatttgagc

SEQ ID NO: 446715 - DNA, 122 bp, Homo sapiens
aagtctgcttccgtttggtgggaatggttctgaaaaaaaccagaggtgtacactggttaacgagtctggcgttagaaagccttcaataaatattggcgtccctgttaaaaatctggcaggca

SEQ ID NO: 446716 - DNA, 122 bp, Homo sapiens
tggataatattgcttctgttcacgtctctcttctccagggctttttaaacctgtttgtaacgaaaaggctgatttccttcagactccatgtgtcgttgatttaacaggacaacttcttacag

SEQ ID NO: 446717 - DNA, 122 bp, Homo sapiens
cgtgcgccggcctgtgggcttggattggctgagccttgacgttgtcccagtcccggtgatcggaagttctccgtgggcactgggcggctgaaggctccggaactgcgcctgcgcttttcggt

SEQ ID NO: 446718 - DNA, 122 bp, Homo sapiens
taatgtcaagggtactgtgggctcctaggggaggtttgcgcgcacacacacgacactgggcggaaatgtcccttttgcggcagacaacaaagatctgacgatctaaacctgtcttgaaatca

SEQ ID NO: 446719 - DNA, 122 bp, Homo sapiens
gccccatttcatgtgccttagagtgtagtgaaggagacagaaaatgccaacaagtaaacacgcaaaaactaactgtcaatggttgctctaaaggaacacaaagtgccatgagcaaggaaata

SEQ ID NO: 446720 - DNA, 122 bp, Homo sapiens
aggggatgcccgaacgtccccctctgtcctagctggggtgtaggtgcagccccagggcatcgccgcgaagcccctgctcgagacctacggagatagtgggtcccgagccccacggggcggcc

SEQ ID NO: 446721 - DNA, 122 bp, Homo sapiens
tctactctgtctggcaaggggcagctccaatgcacagtggcccacactaggaggtcacttcgcactggggcagggttctggctcagatctcctgggatcataagacccaaggacttttaagc

SEQ ID NO: 446722 - DNA, 122 bp, Homo sapiens
gctcccggccagagtgacgggccacaccaacatcgtggagtacctcatccaggagcagcccggccaggagcaggtcacaggggtagaggctcagcctgggctgccccaagaaggctcctcca

SEQ ID NO: 446723 - DNA, 122 bp, Homo sapiens
aaggagatatgagtttggttgctatgaaccaggtagtggttgccacagacatgtcagtaccgtgacaaccattattaggacattgccatagcttttataaatggacaacctaagctgtgtta

SEQ ID NO: 446724 - DNA, 122 bp, Homo sapiens
tgcacgaaccgagacggaggtgcggaggccgtgtctggccctggagagtcctccctctgtcgtctgctctcagcaccaagtctggcatcgccagggcgccaggcacggccttcccagggaga

SEQ ID NO: 446725 - DNA, 122 bp, Homo sapiens
gttgtcgcagtggagcgcgcacgtgatggaagtggtaggccccgtccccgaccccagccccgctccaaagctgcctcgggcactttattcacattaacttttggtctttgggctttttatct

SEQ ID NO: 446726 - DNA, 122 bp, Homo sapiens
cctcgggggcggggttagcggacacggacacgggcagcaacgcctcgccctgctccaccgcggtcaccaccagcacctgctcccccaggaactctggacggtcttcagagggggcgccgcag

SEQ ID NO: 446727 - DNA, 122 bp, Homo sapiens
cttctctgcactatggatgagcagtgtggcctgctctcgttctgcccttccctggaaatgcgcgcaagaagggaggtggcaaaaatcatgtccaccgggggggctcaggtaagggctgggga

SEQ ID NO: 446728 - DNA, 122 bp, Homo sapiens
gcggacaccgtgaagcacagcgcgcagtacagggcgaccttggcgtagaactcggccgcgcggctcagctgcaccagcagcagcagcaacagcagcgccgcggccagacacggccacagctc

SEQ ID NO: 446729 - DNA, 122 bp, Homo sapiens
gtgacaaaatggacctggcctcctacctgctgcggcccgtgcagcgtgtggccaagtacgcgctgctactccaggacctgctcaaggaggccagctgtggcctggcccaggggcaggagctg

SEQ ID NO: 446730 - DNA, 122 bp, Homo sapiens
ccggccgcgccgcgtttccgagaaaggaagctgtcactgtgcgtcttctgcgcaggcgcccgagccctcatgggaggtgtagtccaagtttgtgggaaatgtagttctgagaaccgagcttg

SEQ ID NO: 446731 - DNA, 122 bp, Homo sapiens
tcacatagttgctatgaatttctcctcacaaggatgggcctgtttactcaccctgggcatcgttggtagagcgctagtgtaaacagcctgaggaacccggtgggccggggaagtgggcgcgc

SEQ ID NO: 446732 - DNA, 122 bp, Homo sapiens
cgtgtctggaatgccgtcgttttgccccgcggccccatcgtacatgcgcatccccgcagccgccaccgtctccactttccgcagcagcgtccctgacgctgcgcgacccgttgccaaggcga

SEQ ID NO: 446733 - DNA, 122 bp, Homo sapiens
ccacgctgcaagtggttgtggaggggctggcccgcgccccttccgcgcagtctccttccgcgtcacctctgtgaccgctgtgcccagtcgggccccacagaagcggcaagcgacgtcctcaa

SEQ ID NO: 446734 - DNA, 122 bp, Homo sapiens
cccggtatccttcagtacttttactcctggcaaaaccaagcagcacgccgcctgattttccggatcttcactgatctaacaaacaactctgccaagatgataaatgctgcggtgaggttatc

SEQ ID NO: 446735 - DNA, 122 bp, Homo sapiens
acccttccttgcggtttctgccacctccactgttctaagtggctgactgtgacaatgtctcgttcccactcccctctcattccccaggctggagaggacctactgggtttctatttaggatc

SEQ ID NO: 446736 - DNA, 122 bp, Homo sapiens
catatggcccagtgtcaagttgtgcttgtttacagcactactctgtgccagccacacaaacgtttacttatcttatgccacgggaagtttagagagctaagattatctggggaaatcaaaac

SEQ ID NO: 446737 - DNA, 122 bp, Homo sapiens
tatcccaactgcgcctgagaccttgtttcacctcctgatgtgctgggtgtggttaggcctcgagccgggagctatttgcctcccaggaggaagccagggcagggttccgcggggaatggcgg

SEQ ID NO: 446738 - DNA, 122 bp, Homo sapiens
ctcctctcaaagtggggataatcgcagccgtgcagcgttgttgaaagaatacataaaagccgggcacggtggctcacacctgtaatctcagcactttgggaggatcacttgagcccaggagt

SEQ ID NO: 446739 - DNA, 122 bp, Homo sapiens
catcctaactcaacgactggagactgaggtggccgctgccagaggcgcggccggaggaaacgtcatggaaataaacaagggcggccacaagcacatggggtccgggaagcggcgggcgccaa

SEQ ID NO: 446740 - DNA, 122 bp, Homo sapiens
tgtgtgatttactcctttaggatggcttagacccatgattgcatctgttcttgattatggcgccgcttttaaccacagagatgactcagcactggaaggttagctgtgctgcccaaggtcac

SEQ ID NO: 446741 - DNA, 122 bp, Homo sapiens
cggcggcggcggcgaactgcggtttgcgcgcacggggagcgacagcagaagttcgaaaatcgccgaggggggagccagcgccgcagcttcctgcccccggcccagccctctggccccggcgg

SEQ ID NO: 446742 - DNA, 122 bp, Homo sapiens
gttcgtagaagagcaggtaggcgtcgctggtgcgcacttggctggaggacatgggagtgacgctgcggagagagcggggagtcagcccggagcgggcaggaccgggagaccccccgccggct

SEQ ID NO: 446743 - DNA, 122 bp, Homo sapiens
gctgcggtcaggtgacccggtcgcctggccgcagtgagtcaggctgggagggcggggccgcgccggctgctgcggctggcacttggccctttaatccccttcgtgggcccctcaacctggag

SEQ ID NO: 446744 - DNA, 122 bp, Homo sapiens
acgcccggcgggggcggagggggacgcagaggggcccgcgccggcggcttaacccttggacgtctagacacaactttgatcagcagtttattgaatctcagtgtgtgtctcacccaggtgct

SEQ ID NO: 446745 - DNA, 122 bp, Homo sapiens
agggcttctcattccactccaattgagtggtatctggattatgaagtggaggcctatcgccgcagacaccacaacagcagccttaacttcttcaactggttctctgaccacaacttcgcagg

SEQ ID NO: 446746 - DNA, 122 bp, Homo sapiens
ctctgtgcatggggccctgcatcacccccactttacacctgggcaagcagaggtcaggcccggcctcaagcctttctagcaggtggtggaatctgcttccctcacgtgaggtccctgacagg

SEQ ID NO: 446747 - DNA, 122 bp, Homo sapiens
agagtagcgggtatgcccctctcagggctgaaactctgctctcttttgcattgagttacccgatctctttggctttgtaggcaccaggggttccattgtactgtgagagggaaggtgacctt

SEQ ID NO: 446748 - DNA, 122 bp, Homo sapiens
agtaattaggggaggctggagggtgctaggaagatcactagcctgaaaagttgttggaggcgtggagggagatctggttcttggtcttggctctgctatgtggctttgatcaccctgagctg

SEQ ID NO: 446749 - DNA, 122 bp, Homo sapiens
tctccctgcattcaggagcaaacagaggcttcacgtggtctggtgacttcactggggttgcgcagagagctggtggcagatccaaggttatgatcctggcctcagtgtctctttttgcccct

SEQ ID NO: 446750 - DNA, 122 bp, Homo sapiens
gcctaagccccgcttccttttaaaacaggattacgccgggtcgagggagcctggcgtggccgcgcagtggccgggtcccgcggattcccctccagctcccgcttggtagcgcccgctttgtc

SEQ ID NO: 446751 - DNA, 122 bp, Homo sapiens
gccttgaggagtcgtggtacggtccagggcagtcggggctgcggggcccgtgaagccagacgaggctacggacttagggtccctgcaaccaagaccgcgagcgactgtggactcgggacgga

SEQ ID NO: 446752 - DNA, 122 bp, Homo sapiens
atgataaattcttgccttaacaacagctattgattttaattattgagataccaatgatctcgtagggggatgccaattattacgaagtatctgtggaagacaatggtgctgtgtatgcatac

SEQ ID NO: 446753 - DNA, 122 bp, Homo sapiens
taaaaatgagcattgctaagttaaatttggtaaatttgccttatagaataccctcgagtacgtttccagtgagtgtaaaataggaattgggatacccaattcagttgtactagattttcttt

SEQ ID NO: 446754 - DNA, 122 bp, Homo sapiens
ttcccggttcgttggccctagtgaggtaatccatctatgacatcactcagctcagagttccgggaagtggggaccccagtggccaggaggggaggcaaaactgttgtttagggtgggtggtt

SEQ ID NO: 446755 - DNA, 122 bp, Homo sapiens
tccctgtgtcctggcggatttgcacgtaatctatccgaaagcccagtcccacccgccacccgactctggagctcccattcttcaggaccctgctgaagtatcgcttctcagccgccttctcc

SEQ ID NO: 446756 - DNA, 122 bp, Homo sapiens
acccgcctccagcccgaggccaccaaaagacacacctcccttcccccaacccgccacagccggctctacaggtaacaggcgtttcttctcgcgcagtttgaacaaaaacaatccagaaggaa

SEQ ID NO: 446757 - DNA, 122 bp, Homo sapiens
ttgctagacaatccaataaattaatctttgtttcaaattgctatttggcagtcattaacacgggataagagtaattggtcaactagatggcagagacagaattctggatgcagaaagggtat

SEQ ID NO: 446758 - DNA, 122 bp, Homo sapiens
ctgcttcccttttaaacattagttccaattcccaaccatctctttgtgaatgtatacaaccgaatgcctttaagagcacccaagtcatctcttgaatgctttactgcttagaaatttcttcc

SEQ ID NO: 446759 - DNA, 122 bp, Homo sapiens
ctttccttccttttatctactacgttcaccatatatgaaatgtctgatacttcacccactcgtggattccatttcactagttcaccctcctacttcaccactggtgagtgatgcagcctcga

SEQ ID NO: 446760 - DNA, 122 bp, Homo sapiens
caaaggactgtaagcctcagtcaccaaactcccagcctgatgagcaggaggactgggagccgtgagcacacatccacttcctgacctttctgcattctgggcagcagaaaccgtcaccagcg

SEQ ID NO: 446761 - DNA, 122 bp, Homo sapiens
gggcgccctcggctggcgcggagctgcgcaggaggctgacgcgctagcgtggctctaagacgcgtcacccacgctgcgggcaagccatggcgggaagcgagccgcgcagcggaacaaactcg

SEQ ID NO: 446762 - DNA, 122 bp, Homo sapiens
actcctggctggtgggcggggccagggcgcctgggggcggcgaattggcggatggggcctcgggggcggggcagcggctcctgtcagcgggtgaaatggcagcggcggagccggcggcggcc

SEQ ID NO: 446763 - DNA, 122 bp, Homo sapiens
gtgcacggtcttgccaattactgctacactcggcaggttctccaatcaaacacgccctgtcgggcaggcagtcgtcccagccaatcctgaaacacctccctccgggtacttctgtttcctct

SEQ ID NO: 446764 - DNA, 122 bp, Homo sapiens
gcggcaagctcagcttgtctctgtcgctcgagttcttcgagcaactgcttttccatgatgcgtttggcttcctccacccttcggagaacttctcgttcaatttcatccttccttttctccag

SEQ ID NO: 446765 - DNA, 122 bp, Homo sapiens
gggggggccagcgggggtggagttgcctggggggggccagcgggggtggagcaccctggacggccccgcggagccccctgcgggaggcgagggcggccctcgggctctggaaggggccgcgc

SEQ ID NO: 446766 - DNA, 122 bp, Homo sapiens
aaggaatgagtcccggggtgcccggcgctgttccttctcactgcccttgctgtctctgtgcggttagcttggccaatagcccggaaactacagccatgactccaccaggtcactggtgagtg

SEQ ID NO: 446767 - DNA, 122 bp, Homo sapiens
gtgccaggctcccaaaatattcagtgatcagattttaacctcaaatagcagtgccccaaccgcccctgaatcttgctatggaaagagcctttggtaagtgttttgaagcaggaagactccct

SEQ ID NO: 446768 - DNA, 122 bp, Homo sapiens
aaatggcacaccagattatatcccgcgcctggtgcagagggtcccacgcccacagggcctcgctcactgctagcacagcggtctgagatggaactgcaaggcggcagcaaggctgggggcag

SEQ ID NO: 446769 - DNA, 122 bp, Homo sapiens
cagtgactcaacaaagctcacccaggaaggtccgggagatgtactcggacacctggttcccggagcggctggtttcggacaggtgggtcaactcccggttcaggatccgcttgaactggggc

SEQ ID NO: 446770 - DNA, 122 bp, Homo sapiens
gaggaaggaggaggtcccatgccctttttaaacaagcagatctcttgtgaactaactgagcgagagctcggttatcaccaagggggtggtgctaaaccattcatgagggatccacccccctg

SEQ ID NO: 446771 - DNA, 122 bp, Homo sapiens
tttttatgccttatgatatttagttgataatatgacatttgaaaaaacagctatctcatccgattttcacaaactggcctcttacaggtgaagggcttcaccaattatcccagctagagatt

SEQ ID NO: 446772 - DNA, 122 bp, Homo sapiens
ggatataattgaatcatgggggcaggttcccccttcctgttctcgtgatataagttctcacgagatctgatgattttataacagggttcccccttagctcagctctcgttcttctccttcct

SEQ ID NO: 446773 - DNA, 122 bp, Homo sapiens
tgagactggtagacgggattaactgagaattcacaagggtgggtcagtagggggtgtgcccgccaggaggggtgggtctaaggtgatagagccttcattataaatctagagactccaggatt

SEQ ID NO: 446774 - DNA, 122 bp, Homo sapiens
cggagccttctgcttggttatatttgcgttcctcgggccggccccgcgtgctgagtggtgcgagcgggtatcacggccccgagggggctacgtcagacccattttcccggcgggaaaaccga

SEQ ID NO: 446775 - DNA, 122 bp, Homo sapiens
cctttgccactacctatacaaatttagtcccgactgaaacgtgccaaatatgaccattcacgaaaagaaagagtaattaacacttttaaaagaactacgaaggattttacatagtgtaattc

SEQ ID NO: 446776 - DNA, 122 bp, Homo sapiens
cctcagaccgccagccggagcctggttctctcggaagacaggaagtcagtgaggtacacccggcagaagaagagcctgccagacagccccctgcgcttcgacggcctcccggcggttctggg

SEQ ID NO: 446777 - DNA, 122 bp, Homo sapiens
caggcgcgcgtgccggggccggggtcgggggtccaggcttgcagggggcggggtccgggacggctggggcggagctggaccgttgagggccacggcggggcgtctccgggccgagcggggct

SEQ ID NO: 446778 - DNA, 122 bp, Homo sapiens
aaggggaggccgagaaccatctgcttctcgacggaaaccatgtgttattacaagacgctacgtcaggcgttttaacatgatacactccttgcaattatacttactaaacagaacaccactgc

SEQ ID NO: 446779 - DNA, 122 bp, Homo sapiens
gtgcacacttttgaaagcaaggaactggaaactttctcttttggcaacatttcccccagtcgccctggtgatttccacatgcaacactttccatactcattgagcacggagtttagagggtt

SEQ ID NO: 446780 - DNA, 122 bp, Homo sapiens
tctgcctccctaaagaaattctggaagcctctctacaggcaggaagccaggaaggaaaagcgcagtgctcagggtggcccctggttctgaagtcacaagagatacaagcttctctcttttgt

SEQ ID NO: 446781 - DNA, 122 bp, Homo sapiens
gaacaggctaagagtcaccacttaccaggccagccccggtcttgtacgcattaggtcgcccggcggggcaaggacactgtcacctctttgcaatcaggcagtctgaaacccagcgacttgcc

SEQ ID NO: 446782 - DNA, 122 bp, Homo sapiens
cgttgaagatgaggaaataagacccagtagttttaacttcagcttgacttcaaacccacacgacctacaattcccaaatcctaggagtttccatgactcaggtgacaaaagaagcatgtcct

SEQ ID NO: 446783 - DNA, 122 bp, Homo sapiens
tccccgagtcggcccagtgagggctgaactgctgctcccaggaaccgagcggggtgggctcggtccgacgcgcatcatggccgagtgcctaggcctgactctgagcgcaggcctagcgtgga

SEQ ID NO: 446784 - DNA, 122 bp, Homo sapiens
caagggctccagggccctgcaccctgcgctgtgtgggcagcgagtccggaaggagacgtccgtggtgcccatgggaggagaggccggtcaggcgcggatccctgccggacgccaggcggggg

SEQ ID NO: 446785 - DNA, 122 bp, Homo sapiens
ctgatgctttacatttttgtcgtcatccattggaacagctgcctatactttgccctatcccggtacctgggcttcgggcgtgacgcatgggtgtacccggaccccgcgcagcctggctttga

SEQ ID NO: 446786 - DNA, 122 bp, Homo sapiens
tcccccttccccagttttcacatcaaaagacattgttaaatgccattctcttccacatttcgagaactgctgattctctggggagagaaaggtgattgcttaagaggtgaagtcccttagag

SEQ ID NO: 446787 - DNA, 122 bp, Homo sapiens
actcttagtaagcagaagttgtcacaaacgacagaaagtgattagcaatcacttgctacacggcatgagatagtcttaaaactcccatttaccccctactgaaccaatatcttagcttattc

SEQ ID NO: 446788 - DNA, 122 bp, Homo sapiens
caaaacaccatcatgaatatgcgtaattatggagattcatggtaatttttcagggttatccgatgtgacgtttataggacagcagcatacatcaatttaaatgagtgtgacaaatatcttat

SEQ ID NO: 446789 - DNA, 122 bp, Homo sapiens
ggccctgccccgcgagccacggatgagaagtactcgacgtttgtgtgtgccaggcctaggcgtaagtgctggggacacggagggtggcccttgcctccgggatccctggtggggacacggtc

SEQ ID NO: 446790 - DNA, 122 bp, Homo sapiens
agcccgagggctccaagaactgcctgcagaggctcagggactgcgagctgtccgcgctgacgccgcgctccatgcggggcccagaggaccggggcgccctggaccacatggtcaggatgacc

SEQ ID NO: 446791 - DNA, 122 bp, Homo sapiens
taagggggccacagcgcagctttcttttcccctcacaggcagagctatcagtagccacgtcgggtagaacagaaggcattctgggaacgcggtgctctcacatcctgcaaagtacaggcctg

SEQ ID NO: 446792 - DNA, 122 bp, Homo sapiens
gtattgcagcaatctgactatttggaagactgttccttgaatttcccaattcaaaagcctcggtagagctgagggatgcttgatacgtcaacacagaccacaaaaggcagggcttttctaaa

SEQ ID NO: 446793 - DNA, 122 bp, Homo sapiens
gagcgtgggaagtcagtgccctgccctctctttctgggtcgggggctgaagtgtcacacccggtttcctgggaaaagtgcagtttgggactcagaaaggacacgttccagttttgaatcgtg

SEQ ID NO: 446794 - DNA, 122 bp, Homo sapiens
tccccacccagagatttcacaattgaggaaaagtacaccaaatatccaggaagtctggaccgaggcagaaggtgaagtaatgcactcacactataaacaagtaaacagaggaagactgaggt

SEQ ID NO: 446795 - DNA, 122 bp, Homo sapiens
agctgcgttcccaggaggttaaggtattcttagttgcagatgagttaggaggtccgcacacggtacagagcacaaagaccttgctgatgaaacagcatattgtaaagaagccagcccaagcc

SEQ ID NO: 446796 - DNA, 122 bp, Homo sapiens
cacagggtatgaggctggggttgagaccccctccaaggtgcaaaaagtacctagaacctgcggagcaactggactggcgacgaggaaagctggaatcccgcatggatgaacaggaagcgggg

SEQ ID NO: 446797 - DNA, 122 bp, Homo sapiens
tccctcatgtctcctttctacggctgagttcagcacacggcactgaaacacggacacacacgtgtcaacaactgcatccttcacatcatccactctaatttcaagaattatctaagtggggc

SEQ ID NO: 446798 - DNA, 122 bp, Homo sapiens
aagagatcctgagaacatgtgcccagggtggttggggcacagtggggttttatacattttcgggaggcataagacatcaatcaaatacatgtaagatacacattggttcctttggaaggaca

SEQ ID NO: 446799 - DNA, 122 bp, Homo sapiens
cagataataacatgagaagggagagacatttaatctccaagatgtagtagttttctcttccgtaaaatggagataatagtgcctaccactggtggatatgaggattcaatgagatacacgtg

SEQ ID NO: 446800 - DNA, 122 bp, Homo sapiens
gcaggaaaccaggagaaattgtgcaagcgaagagccattccaaagctgttctctgtcccacggttatgatcacaggggagggtaattgcatctacttctgatcatattaccttttgccattt

SEQ ID NO: 446801 - DNA, 122 bp, Homo sapiens
aattgaatctcctgccttaggctcccatagtgttgggattacagacgcgagccactgcgccgggccggtttttttccccctctcagcccccgcgctccgccccgggaactccgggagcgctc

SEQ ID NO: 446802 - DNA, 122 bp, Homo sapiens
tggcttggcaaggggacagcacctttgtcaccacattatgtccctgtaccctacatgctgcgcctatacccaggaccgatggtaactgaggcggaggggaaaggagggcctgagatggcaag

SEQ ID NO: 446803 - DNA, 122 bp, Homo sapiens
tctaccaggtgagtgagcatgggtgattgggtgggggagttgggaggggtgctagtgttccgtgtgtgtgcacgtttgtgcacatgcgttgtatgcacctatgtgtagagagagaaggtgaa

SEQ ID NO: 446804 - DNA, 122 bp, Homo sapiens
ttatggccctgatgtgattatattaattatcgtcgctattttgtgccggcttccgcccggcgagcctgtggattgagctctactgcacacaagccgccagggctcatcacagacagagcctt

SEQ ID NO: 446805 - DNA, 122 bp, Homo sapiens
cggggcctgtgttgcgaccctggccacaccctcaccgcctgcccgcaatgattggttttccgctgagagaaaatagccagtcaaaggaaggcgctggcagtctgcccgcccccccccccccc

SEQ ID NO: 446806 - DNA, 122 bp, Homo sapiens
tgtgtctcttttggttggtgccagttcagtcaggggagacaggttcctccgtttggttcacgtcagtgtgtcaagttcttagaattagaagtgaactgtgtggatgagcgtggccttgccaa

SEQ ID NO: 446807 - DNA, 122 bp, Homo sapiens
aatggggactcgggggaggggaaggacactgtctcccttcattagtagaagagggtgggtcgcgcaagttctggggcccgttgggagcattaagtacatgtgaagaagctggtggagggggt

SEQ ID NO: 446808 - DNA, 122 bp, Homo sapiens
ccaggagagcagggctgcgccggctctcgtcctccgcggcaaacgtcccaggcacaggctcgcccaagactccagctccccgccccagagccataaaccgcgctggaaataactaaaaaaaa

SEQ ID NO: 446809 - DNA, 122 bp, Homo sapiens
gatgggacttcttatcacacaatgaatggttctgcttccgaacaagatggactgagcatgcggtagacacgtgtcgcaccatcaaattacatttatatgtatgaaatacattgtcccaactt

SEQ ID NO: 446810 - DNA, 122 bp, Homo sapiens
tagctcccgtcgtttctgttgagaagtccgttgccatcctggcaatttctctctctcaagcgttctctctggaattgtttagaatgtttgttttaactctggtgttctgaaacttcattatt

SEQ ID NO: 446811 - DNA, 122 bp, Homo sapiens
gcgtaggaccctccaagccgggtgcaggatacaatctcctggtgcgccgttttttaagcccgtcggaaaagcacagtattagagtgggagtgacctgattttccaggtgccgtttgtcaccc

SEQ ID NO: 446812 - DNA, 122 bp, Homo sapiens
acctctacaccatgggtgcctgtttaccatgttggctactctggctggctgctggcaaaccgcatgtgcttaaagggaatttcagagagaaaccaggcacacccggctctcctggctaagag

SEQ ID NO: 446813 - DNA, 122 bp, Homo sapiens
caccggggtctgtgccggcgtcggcaggaggcgggaccagggcgtgggcggggtcaagtccgggaagccgcaggaggcggactcaggcgcagcacccagcagtgagcacggcgtcgtgcggt

SEQ ID NO: 446814 - DNA, 122 bp, Homo sapiens
agacgtgcgaggggcagtgctggttcatccttcacggggcagatgtgggtctagctgagccgcgtttgagtcttggcttcatcatgcagagctttctttggcttgtctgaacctcatcatgc

SEQ ID NO: 446815 - DNA, 122 bp, Homo sapiens
tattttccagaaatctctagcagacttctggtttctttcccattgtcaataactgaatcacgtaattacctttagatgtatggaattctgggaaggtggcatatggttcccttgaaaagaat

SEQ ID NO: 446816 - DNA, 122 bp, Homo sapiens
acccccgcaatatggggagtaggagcaacccccgtctcccccactggctattacaatccacgctggacacacagcgtgtttatgattttgtgagtaaatcatctccccctcagcaaattatg

SEQ ID NO: 446817 - DNA, 122 bp, Homo sapiens
agtcccagcgtttctacggagactggaataacggcactgcactgctgtatgcgagacctgcgcatgcgcgagtctcagtgagcgcgtaaacgctgtgcgtgccagagtgtgcgcatgcgtaa

SEQ ID NO: 446818 - DNA, 122 bp, Homo sapiens
ggctggggcacggcaacggctggtgcatgttgccggcggaggcatttaggtagtgcacgacggctgggcgccgggcctgtttggctgtgacgcccacccccggctttcatccgcctatgccc

SEQ ID NO: 446819 - DNA, 122 bp, Homo sapiens
tctggccccacggccaaggctgaaccccagcaacccccgggaactcggggtctagccaagcggggacaccacgacttgcacccaccgacccggtccgtcccacttggaaacactcacccgcg

SEQ ID NO: 446820 - DNA, 122 bp, Homo sapiens
gagtcaggaggaagagtccagcggtggaggggacccaaaactcccccaggtgcaggcggccgggaggtgggaacacggagctttggcaccctgggccagcagcccctgacctccccgcggtc

SEQ ID NO: 446821 - DNA, 122 bp, Homo sapiens
tggatataaccatctcttaagtgaaatgtatagggctggttaccctcaaaatcatcaagtcgaatcagctgatctagtagaggtaaaattaggcctgggtaatctaaacccagggataattt

SEQ ID NO: 446822 - DNA, 122 bp, Homo sapiens
ctcctgtcgctcaagccccaggggcgggacctggggcaccagccagtcagaggcgctgtgcggcaaactgtccaatcaggtgcgccgggaggaggggcaacttccaaagcccgaagcggtct

SEQ ID NO: 446823 - DNA, 122 bp, Homo sapiens
gggtccccaacgccgcgtcttaaccaggcccgaaccgaccaccgccaaccttccctgacacgcctttgccccacccgaccccgcccgcccccacgtgacgcccacgccccgcccactggcgc

SEQ ID NO: 446824 - DNA, 122 bp, Homo sapiens
tcaccactgttgtttcctggcccaggctcccaggaccttgtgggctgggcaggtaagaagcgccggcggccaccagctggggtccagtgggctcggccccgccctcctacgccctgcctgcg

SEQ ID NO: 446825 - DNA, 122 bp, Homo sapiens
tttaaacgaacgctggacaggatttgcgtgctcttcctcctcgggtggcatcggaagccgcgcagtgatggatctctctttatagagaggttcgttcttgctgtttgaattttgcagtcgtg

SEQ ID NO: 446826 - DNA, 122 bp, Homo sapiens
cccagcgccctgtgcccgttggctgctggagggacagacggggcgtgcggctgaccatcccgtgcccgcaggctgaggatgcagcgctggaaggcggcggccttggcctcagtgctctgcag

SEQ ID NO: 446827 - DNA, 122 bp, Homo sapiens
tttcatgttagcttagagtcatcgtatgtatttaggttttattatttataaaaaagaaatcgtgctgaatgttctttgtgggaactgcaatatattgctattgctacgatggtttactattt

SEQ ID NO: 446828 - DNA, 122 bp, Homo sapiens
attttccctgccagcctgggaatccttcaagggcaggagcacctgctgttgggccctgtgcggtgtgggacacagtgtgagagagtattggtgcctgtgagctggtggctgtgtccccaccc

SEQ ID NO: 446829 - DNA, 122 bp, Homo sapiens
gggacggcgccgggaggagacggacatttcattcgagctaaagtggagtcggtttaggagcgatcattggccgaagcgagacacaaacctccaatgcagccctggttggctcccgtctccaa

SEQ ID NO: 446830 - DNA, 122 bp, Homo sapiens
gcgccgcggcgccgggcggggagcggcggacggtctaggcggggctggaggcggtggctgcggttgcgggaccggtgagcgcgggcggccgggggggtgtctgagcggggcggcgcacgccc

SEQ ID NO: 446831 - DNA, 122 bp, Homo sapiens
gagaggcccagagaggttcaggactcgcccagtgtggcctgaaggtcagctcaaatgccccgcatggcgttcttgggattcgagtttctttttatcgtaacatttgcttttggtggttttct

SEQ ID NO: 446832 - DNA, 122 bp, Homo sapiens
ttcatgacatttgcaacagagaggagcctggcccctcctcttcctgtggaacctgggattcgaacggccaggcaggaagcactctagtagggactgtggcttagcaagagtccctgtttcct

SEQ ID NO: 446833 - DNA, 122 bp, Homo sapiens
agactcagtcctctttttgtatgaactttcaagacatcctgatactcactgctgcagatacgttttcctgtatttgattcttttttttttttttggacagagtctctctttgtcacccaggc

SEQ ID NO: 446834 - DNA, 122 bp, Homo sapiens
ccaggacccgcagatgctggcgaggaacaggggtgcggagcatgagtcggctttgcaccacgccctggggtctccagcactgaagcgttcagtaccatgcagagcagctgggagcgggtccc

SEQ ID NO: 446835 - DNA, 122 bp, Homo sapiens
tccgcaccgactctgtgactcaggcttctactaccaggctcatccgaggacggaggctgtcgttatacaacgcgcaagtgtggtctctgtcacagatgtggctgtcgcagagagtgctgcct

SEQ ID NO: 446836 - DNA, 122 bp, Homo sapiens
tctgctggcaacagttcctgttctctttttaacctaaaaacactcatcatgccattacctcgctgattaaatgtatctttatgagactaatagcttaaaagcctgtaagaaagatataattt

SEQ ID NO: 446837 - DNA, 122 bp, Homo sapiens
tctctcctccccaagagcaggggtgggcctgtctcgcgttcccctgcgggagtcaggaagcgtccttcctacctaccagtcctcccctctggtgtctggggacacttcctgggggcctttca

SEQ ID NO: 446838 - DNA, 122 bp, Homo sapiens
cgggggggcgcgcggtaggccctgcaacaaggccagggcctgggggggccggcaggagagcgaacccgaggcatcgtggtgccatggcggggccgcccccacgggcatgggcctgcagagcg

SEQ ID NO: 446839 - DNA, 122 bp, Homo sapiens
tcaatcctgcgctgtagtgtttcaatataatgctggaccgccatatagataaatcggtaccgtgcttctgtctggaccatccctgacctcgtagaccacaccatctggatggtttggggaac

SEQ ID NO: 446840 - DNA, 122 bp, Homo sapiens
actgttctgtcatcaataggacagatgtgcagacagacctgttatacagtctccaatactcgaggctggtcattatttatgccaccttagctttcaaattacttcatgcttcagtcatctat

SEQ ID NO: 446841 - DNA, 122 bp, Homo sapiens
ctctgtgtcccaccgcagggaatctgagtgctggcccatatcacagcccagtaatcttcccgtagtgccccgagcagccaggaacttaatatactcctatctcatgcgcaccgccagctttt

SEQ ID NO: 446842 - DNA, 122 bp, Homo sapiens
gcataaatttgggactaaagtgttctaacatttctcatgctgtatgttcattcgtctcttcgggcaattcagcacatgcgtttatcccattaatggctggagaaaaagttctgattaccttc

SEQ ID NO: 446843 - DNA, 122 bp, Homo sapiens
ggatactaaaagcaaatacttcatagaggttgttgagggaattcagtgaaataagccccacgaaacaattcgcacagtgccttcccagaggaagagtcaacaggcagcagcccacatcttca

SEQ ID NO: 446844 - DNA, 122 bp, Homo sapiens
gttttatcagcagccgggatgcaacagatgggtcatctcatcctcatgggaagggacgtacggcagaaagcacaacccagtgggccggccacacctccagccctgtgacgggcacccaccac

SEQ ID NO: 446845 - DNA, 122 bp, Homo sapiens
tgaccagaagcctcggcaccctgcccccgcggccacgtgtggacgcagaggcctcttgggcggtgaaaggctgctcctgaaggcgtttctggtttttccatttataaagcagagtgaggtta

SEQ ID NO: 446846 - DNA, 122 bp, Homo sapiens
accaaaaggggcatttaaacaacctaacgatcaacaccgaaaagctaaaggctccctaagcgaaaacgggcctttttctggaagcagggagggagggagggagagacagccctggctagatg

SEQ ID NO: 446847 - DNA, 122 bp, Homo sapiens
ggcggctgctagtcatgattttcctgaaccaaactgcatacagcgtatttggttatccgccgggacggtaaccctggcagccactccttgtgtgtccttcggaggagggctccttacattct

SEQ ID NO: 446848 - DNA, 122 bp, Homo sapiens
agtgtgaagtcatccacttgttgtcctggtttacagtttgagcatctgttgttatggtgtcgaacattttagtgagttctgagtggctcacccttcaggtacaagggttttcccatgaaatt

SEQ ID NO: 446849 - DNA, 122 bp, Homo sapiens
tcacccgttgcccggggagcataaaagctgaatgcgcacctcaaagagatgtggtgtttgcgcagggaggccccctttttctagagcgcatcaggggctcaggaaaaaccccattgttactg

SEQ ID NO: 446850 - DNA, 122 bp, Homo sapiens
aacctctgagcaggccaacaggagacagcagtggtaccttcagtggctgtggcaaggttgcggcaaagaactccatgacatgagtgcacacaggaggtcaccccttcaacagccaggttgag

SEQ ID NO: 446851 - DNA, 122 bp, Homo sapiens
tgagacattcccacccgtgagctgcctctgtccaccccacacctccctcccctgggtgcacgcagctgagttccacgttgaataaatttggcctcaatcatccactacccaccatgtcaccg

SEQ ID NO: 446852 - DNA, 122 bp, Homo sapiens
agtgctgggattacaggagtggaccactgcactcggcctataaccaaattactgtaagtacgcactgaccatatatgaagaatgtaatcctaaaactcctctgcctttgtgtgtgtaaatga

SEQ ID NO: 446853 - DNA, 122 bp, Homo sapiens
gcacgccctaccttcatctcctccttgtcctgagccagcctgcttatgtactcattctcccggtccacgtcttcagcactgacctctggctctggtatgatgtgacgtactttcctgcagga

SEQ ID NO: 446854 - DNA, 122 bp, Homo sapiens
gaaaggtacatacagtggtgtgtgttacaggagagaggaacactgaacttgggaaaccaccggtattataacaagctttaagcaagcctacattttgtcacaggaaggaaacattacttcat

SEQ ID NO: 446855 - DNA, 122 bp, Homo sapiens
ctctcagagcctaggtttctgcatttacaatatggagacttatataaaagtgatctgcctcgaaagattgcagtgaaaaaatttttttcctcttttatcctttatgtccccatattatcaat

SEQ ID NO: 446856 - DNA, 122 bp, Homo sapiens
tagccgcccagcatccagatccgacatccttttccctttcctcaggaagacttggatgcgcgccagcccagcccgggtctccaggttcagctgcggaagcttcccacatggtgcccgtcgct

SEQ ID NO: 446857 - DNA, 122 bp, Homo sapiens
tagtgggtgctccacaaaaatggtagaaaatagtgaatgaataaatgaatcccaggcaatcgtagggcttgaggtatcttgttacttctcagcaggaggagtttgtggatcttcattttaat

SEQ ID NO: 446858 - DNA, 122 bp, Homo sapiens
tctgacaggcagagagagatacagacaccggggactgacagccgcgggggcacgcggggccggctggccgtggcgggcgctcacctggcagcggcggcggtggcggcgcccgcgaccgggcc

SEQ ID NO: 446859 - DNA, 122 bp, Homo sapiens
tgttcccttatgacggagcccacggggtctgcccaggtcacagtcccctcccacaggccacgcttcaggaggatcatcgcaggtgggtggcctctattgaggtgtgagctgcaactttccat

SEQ ID NO: 446860 - DNA, 122 bp, Homo sapiens
gcgtccaggtacacagtggcgagtgtgattccgcagtcttgggctgtttggccaagcgcccgccggacatggtacgccgaagggtcatcggcgtggagtcctcgctttcagcgtccgcggct

SEQ ID NO: 446861 - DNA, 122 bp, Homo sapiens
ctaagtctaattaccttttcaaggccattcttccaaatagcatcatattgggtgcatcgacgttaaagaacagcagagacaggctctccaaagaaagagtttatttaggattatcagaggat

SEQ ID NO: 446862 - DNA, 122 bp, Homo sapiens
gacgggggtgctgtgcccaggcgggggtccgggggcgaccgagggggctcaggaagtccgcggccgcaggaattcggcgcctccaggccttataaggacatttgcgctccgggccaatcagc

SEQ ID NO: 446863 - DNA, 122 bp, Homo sapiens
gagacctgtgactgccatccaaatcatagcaatcttttttgaaagtttgtttgtttcacacgtattcttttagaccagtcagtaggagagagctgcttttgccttagttgctttgtaaggcc

SEQ ID NO: 446864 - DNA, 122 bp, Homo sapiens
gcatcacctttaatggacttcatgacataatttattcagagagggccgggcgcagtggctcgtgcctgtaatcccagcactttgggaggccaagcggcaggggggtggggtgcagatcactt

SEQ ID NO: 446865 - DNA, 122 bp, Homo sapiens
cgctcccgcgcttttatctctgtgaggccgcgcagaggcttctgggaaaacggaggagcgcggcagccgcccagccttcctataggggcccagtggtttctggccttctggcgcaggttcct

SEQ ID NO: 446866 - DNA, 122 bp, Homo sapiens
cgcgccggaagggcctcggggcggcccccggggcggtgctgggggcggagcgggccggggcgcggctgcattaagtgaagctcatagagactgtgtgctctagcgccttgcggcggagggag

SEQ ID NO: 446867 - DNA, 122 bp, Homo sapiens
tgaatgtgctttctctttactcttttagtggaatttgatcagtgtttaaggaactgtagccgattcccagcccacttcaaagcaaaagcccttcactgtgcctatttgcaaaattacctttg

SEQ ID NO: 446868 - DNA, 122 bp, Homo sapiens
tctcgttcactccctcgtttgtccactcagtcccagttcagccgtcagcccctcggggttcggcagatggcgggcaccctgtgtgcagggtactcatccctggggcttctgggtggggctag

SEQ ID NO: 446869 - DNA, 122 bp, Homo sapiens
gcagcagagtctgcccaactacggtccgccgggccacgacaaaatgctcagccccaacttcgacgcgcaccacactgccatgctgacccgcggtgagcaacacctgtcccgcggcctgggca

SEQ ID NO: 446870 - DNA, 122 bp, Homo sapiens
cgttgctatggcgactggggaggggcggtgtctgttctgaatcgctgtgtgtcacccgggcgctgcccaggaagggcagggctggggtgatgaccatggtaacacccgggggggagttcgtg

SEQ ID NO: 446871 - DNA, 122 bp, Homo sapiens
ctgctctccatcctgaggcggggcagtgccctgggctgcggcagctccgcggtccatggccgcacaccgcttcaggtctgggcagcctgagtccctaagcctggaaggctaaagtaccctcg

SEQ ID NO: 446872 - DNA, 122 bp, Homo sapiens
gttaaccgggccctgggagcctccattttcccttgcatatctgtgaggagcaagagatgacgtgatccaggagcctcccggctccacatcccacagacgccctttctgataaaggagccggg

SEQ ID NO: 446873 - DNA, 122 bp, Homo sapiens
cacggaggacgtcggggcagaggactcagaggacatcagggcagagagctcagaggacatcggggcagagagcacagaggacgtcggggcagagggcacggaggacgtcggggcagaggact

SEQ ID NO: 446874 - DNA, 122 bp, Homo sapiens
agatacctaaaggccagtgcccactgctagcagcctgcctagttcagtgatggagttagacgcataccctttctagtcttctgggaggagcacccccatgtccacagctgctgtcacacctc

SEQ ID NO: 446875 - DNA, 122 bp, Homo sapiens
aggaatgaaggaggtgagggtggcgcgccgcaggcctgggccactccctgagtagggcggcggcggcggcggcggcggcggcggcagcggcggcagcggctgcaggcctggccgattgtgag

SEQ ID NO: 446876 - DNA, 122 bp, Homo sapiens
ggttaaaagacaatgacttccacatttccctaccctggaattcttcaaaacaagcaaatgcggaatgaatgctcactgacagctgtgattgttttccacgtaactttgctgttggttagcgt

SEQ ID NO: 446877 - DNA, 122 bp, Homo sapiens
agaaaaatcgtgtgttctttctacccacaggaaaggagacagaatgaaagaaggaaagcccgggacaacagaaattctttcaatgttgaactgtccctgatggacacttgaaaaccggctcc

SEQ ID NO: 446878 - DNA, 122 bp, Homo sapiens
taagaaggggaaggcggcagctcgctcagaccctgtaccacggacaccctgcaccacctccggactcttcggagtccctaccagcaagaacgctctcacagaactggccacgggccttggac

SEQ ID NO: 446879 - DNA, 122 bp, Homo sapiens
gtcaggggcacggagaatggtgcccaggccaagggcagggcttgggccaagtgtgcgcagcgtggggtgtgtgtgctccagcggctcctgctgcggagggcggcatgaggcttgtttacctg

SEQ ID NO: 446880 - DNA, 122 bp, Homo sapiens
atgatcagccccatgcccgcctcggcctcccaaagtgctgggattacaggcatgagccaccgtgcccggcccttaacccagtagttgttactgacatttctgattgtcgtgctggggggaaa

SEQ ID NO: 446881 - DNA, 122 bp, Homo sapiens
gcctcagcagcttcactgctgtccttcaggaatgataccggggcagcagctctgggaagccggcagaccacctgctgccgtgtcccgtggggcctgcgtggctacacagtgcaatagtccag

SEQ ID NO: 446882 - DNA, 122 bp, Homo sapiens
caggacaggagctgtgtgtctctgcctcccttcgcgtggggcaaggggctgcgggaccagcggcctctcttctggcaggagggggggttccccggaggccctgcccccttcgtgacatgctc

SEQ ID NO: 446883 - DNA, 122 bp, Homo sapiens
ttccggagctcgggggcaaggctgcaccgggccaaggcgccacccccatcccagcccaggcggcggttcccagcagagacccagccccactaggtgagagcgatggtggccccttctgtgcc

SEQ ID NO: 446884 - DNA, 122 bp, Homo sapiens
ccttacatgagaaaaagatgaccccaggacatttgctggtttctgttggccagtttaggccggaaaagaatcatccattgcagatcagagcctttgctaaattgctgaataagaagatggtt

SEQ ID NO: 446885 - DNA, 122 bp, Homo sapiens
ccctttatggcgcaaaataaaagccgtcccgcttcttgccccggcccccgccgcccctcccggctcccctgacttccaagcccctgtgggaacctgggagggacgctcttctctcaataaaa

SEQ ID NO: 446886 - DNA, 122 bp, Homo sapiens
ccgacggggctgcgctgagcatgcgggtcggagggcgctcgggagctgtccaggggcactcgtgaccccacagtgcagggaggccccggcccccagtcgggctggagccgccaggcaggagc

SEQ ID NO: 446887 - DNA, 122 bp, Homo sapiens
cactgcttggctggggctgggaacctgcctgctggaaggggtggtcaccactcgtccactcggcacctcagctcagccctcaggtgctcacacaagctgtagtctctcggcaggacggtcct

SEQ ID NO: 446888 - DNA, 122 bp, Homo sapiens
gacagcaacgtcgaagaacatggtgtggttgaccatggctgatagtactgggactcctggcggcagtagcctctgcaaagccggtcatagaaatttgagagtttctgctagatgtatgtttt

SEQ ID NO: 446889 - DNA, 122 bp, Homo sapiens
caggagacacggaatgtgaaggcccagtcacagactgaccgagtggacctggggaccctgcgcggctactacaaccagagcgaggccggtgagtgaccccggccgggggcgcaggtcaggac

SEQ ID NO: 446890 - DNA, 122 bp, Homo sapiens
ccaggccccagcccagagtccatgattgaagtggaataagctccgtaggacattctgacacgcgtccagggctaagagtcatgactccatactgatgagtgtgggctccaaaactattctct

SEQ ID NO: 446891 - DNA, 122 bp, Homo sapiens
aagatagcatattaaaactagttcccctatttgcaataataataatgtttgaaatgataacgtctagccagtattttgaaagactggcacttagagggagagatgtattagttcatggaaag

SEQ ID NO: 446892 - DNA, 122 bp, Homo sapiens
catgtttgcgcctccagcgtgcgggtcccagcactcaggctccctccccctccacagtgccgtcccctgagctcggctatgtagctctccacgcttggaggtcagagggcgctcctgcggcc

SEQ ID NO: 446893 - DNA, 122 bp, Homo sapiens
ccaggcggaggcgacggggcaaatggcccaggcttgggaggccgctggcggtccaggtcccgcaggatgtggaggattttcgaggagggcccaggggctggagggtgcacaggcccatcttg

SEQ ID NO: 446894 - DNA, 122 bp, Homo sapiens
tcatctccgtgggccggtttggccctgaaacagtgtggggcctagagcgctgggtgggcgcgttctgcggcctgagcagggacgggtagtgaagcggttacgccccttcttcgcgtcttggc

SEQ ID NO: 446895 - DNA, 122 bp, Homo sapiens
tcttgtccagtactcctattgatggcaggcctcctaatcattgggttggtatacagataacgggatctaaactctttagagtagactggcatatttccaaaggactcatctaatgtagagca

SEQ ID NO: 446896 - DNA, 122 bp, Homo sapiens
caggagccagcctcccctctccgcactcgcgagcagccagcagcaccacgccttcaaggacgaaaaagttttactactctaagggaaaacgagtgaaatgtgttcctgaggaggagaggaga

SEQ ID NO: 446897 - DNA, 122 bp, Homo sapiens
caaagccaccatctccctgggatccccggtgagaaagtgggggccacttctcttcctcaccgtcctgcctggggttccagagctgataagagggacagatttcctagttctgagatgcgggg

SEQ ID NO: 446898 - DNA, 122 bp, Homo sapiens
attaggtatgcttgacctatgagtaggttaagggccttaaatatacgtcagtgatgactacggagtaagagctcagtttatttttggaatgtacctctctccatgaagtgctacataagaaa

SEQ ID NO: 446899 - DNA, 122 bp, Homo sapiens
tcctgagatccatctgggaacagtcccctgaaagtccatcaacctaacccatgtctcctacgtctcctagcaccatcttactggtctgaagcaggctttcttttttctttttttgagaggga

SEQ ID NO: 446900 - DNA, 122 bp, Homo sapiens
cttaagagctgtaacactcaccgcgaaggcctgcagcttcactcctgaagccagccagaccgtgaacccaccagaaggaagaaactccgaacacctccgaacacctccgaacacctccgaac

SEQ ID NO: 446901 - DNA, 122 bp, Homo sapiens
cgtctgctggcggccgcggagacgcagagtcttgagcagcgcggcaggtgagtagctgtgcgaattcggttctctagggagctccttcttcgcctgctggccttacctgggctccccgcttc

SEQ ID NO: 446902 - DNA, 122 bp, Homo sapiens
ctgggttcgttgtccctcccctgggctgggctgacagtacctggtggcatagggcagacacgcctgcagacattctctgggaaagggcagcagcagccaggtgtggcagtgacagggaggtg

SEQ ID NO: 446903 - DNA, 122 bp, Homo sapiens
aggccagctcaggggcaaccacaccgtggttggtcctggagggggccccaccccaacccccgctcagcctctgcccatgccagggccagcccggtcactcctggctcagagttaggaatccc

SEQ ID NO: 446904 - DNA, 122 bp, Homo sapiens
cacacccggaagggtttccctgacacactggctgaggtgccccagttccccgagactggacgggatcacttccggtggggaaagtcccacctcttcggggcgagccgggtggcgctggagcc

SEQ ID NO: 446905 - DNA, 122 bp, Homo sapiens
tcacgaagaccccaccccaggctcagttgaccgctaggaattccttggttctagtgctagcggcaaaaaaaattatagtgcaaatgttgctggaaaattatatgattggaagaatgatcaat

SEQ ID NO: 446906 - DNA, 122 bp, Homo sapiens
gtggcagcggagggcaagggccgccccctcccggactcagaccctcccagcgggcagcgccggtcccagcattgctgttgcctgcacgcccagaattcccctggaggaggaggaaggtgcgc

SEQ ID NO: 446907 - DNA, 122 bp, Homo sapiens
cctttgaggtgaaatggctctgggcgtgaaaggagcaggcgttggcaatggaaggaccaccgcgacctcaggctgaccgtagggagggatcttgagggccctccgagtccccggggcttgcg

SEQ ID NO: 446908 - DNA, 122 bp, Homo sapiens
cacctcattcggtcccgcctagaaagaccagaggaccagaaaaccagaagcctgtcagagcgactagaggctggctccagccaacagccgcgcgcctcagcgtccacgagggttacctgggt

SEQ ID NO: 446909 - DNA, 122 bp, Homo sapiens
tgacctgaggtggatcggagggtggggaggggctcctggggccggcctggccatcaggagcgcatcaggaaccgctgtgccgaatctcaggggcagtcctgacagttctctaaactcccacg

SEQ ID NO: 446910 - DNA, 122 bp, Homo sapiens
aacccaggaagtcaaatgtccttttctagcaggtcgcctggttagaggccgtggacgaagcggtccaggcacagccagctgcagggcgcggcctcggcggcgctgctcgtggccctggtcag

SEQ ID NO: 446911 - DNA, 122 bp, Homo sapiens
ttggtgcactgtaagcgcctgcgcagtgggagttggactgaaatagggtggggaagggcgcgtcttactttgtgcgccggtctttcttctgcgcctgcgcatgagttggactaaccgggctt

SEQ ID NO: 446912 - DNA, 122 bp, Homo sapiens
ttggatcggcggggacggcctgcagctcccgcgcgcggggaaagggtgagtgagagaccccggggctatgcagttcccccagggacttccacagccccccgaccctcgcggacctccagaat

SEQ ID NO: 446913 - DNA, 122 bp, Homo sapiens
cctcagagagctgctatgacatcataggtaccccatccagcttctgaccttcccaggtcccggccttcctccctgtgaagggcaacatcttccttccccagtcaaggggaggctggtccctg

SEQ ID NO: 446914 - DNA, 122 bp, Homo sapiens
ccctccaaccaaccttacaaaactccagcctccaaaactccgcccttcgcgattcttccccgcccctcggcgtccagacagatagacagacgacctgccccgccccctgcgccaccgactga

SEQ ID NO: 446915 - DNA, 122 bp, Homo sapiens
gtgggagtgaagtctggtgggagctgaggtttgcatacacagaacagggaagcagtgctgcgtgaagcggtctctctaccatgtgctcaggcagtgagtgctgtctggttgaagagtgagtg

SEQ ID NO: 446916 - DNA, 122 bp, Homo sapiens
aatgctctcaactaagttcccctgtgccttatccaacaaagctggcatcctgtagttatgcgattccaacaaaaaataacaatgaacccattttgagtgcttatcatgtttcacttcccatg

SEQ ID NO: 446917 - DNA, 122 bp, Homo sapiens
gcgcggagcaaggggcaaggtgggggcgtggggcggagctgcctcccataggctcactggcgggtcccgtcacgtggcaggggcggggcgtgagccgagaggacaggactggaaggtggcta

SEQ ID NO: 446918 - DNA, 122 bp, Homo sapiens
cgatggcactgatgaatggcaccaccctgccatagtgtaggaagagccgcaccagcgggacggccgcctcctgcttctcccggcaaacctcgcccaggatgtgggccgcagacgctgacacg

SEQ ID NO: 446919 - DNA, 122 bp, Homo sapiens
catctaagagccgagccctgtactgggccctgggtgtgtgggaagctccacatagagctgcgctgagtccggtccttcccggggccgccgctgggattggtcagtgctgcctcccacgcgat

SEQ ID NO: 446920 - DNA, 122 bp, Homo sapiens
aggccgaggaagcaggcgggcagcatggtgtcaggcatcctggtgcacacaggtggaccccgtatgcagcactgcttggtggctctgtgctgctgcctctgctggctgcctatttatgtccg

SEQ ID NO: 446921 - DNA, 122 bp, Homo sapiens
gctggcagcaccccatcatcagtgccaggctctgacgcctggagggctggcccaggccagcgtgtgctgtggggaggcaaagaaggatggcagcctctcctgtttccccaccacactcccca

SEQ ID NO: 446922 - DNA, 122 bp, Homo sapiens
tctcttgtggagttctcttacagccgttgtctttagtcatccctcccccacccggagctgcgacaatggcgttgcccaggaaacgttgcgcttccaggccgctgacatccagggaatgaagt

SEQ ID NO: 446923 - DNA, 122 bp, Homo sapiens
atccgcccacctcggcctcccaaaatgctgggattacaggtatgagccactgcacccggccggtttctttaacaatatattgcaaagaaaaaaaaaagagagggagagaaacctataaagaa

SEQ ID NO: 446924 - DNA, 122 bp, Homo sapiens
tcgcgcggggctcggcgcgcagcgccccggacggccacggcgcagccccatcccgcggggcgcaaaacacgcgacagcgcggagctcggccgtgcactgctgctccctttcccgcgccggga

SEQ ID NO: 446925 - DNA, 122 bp, Homo sapiens
ccttcctgggctctagccagagtgggtaactttgtaaaaggcaagtaaagactctgataacgaaacaaactctaggaggaagctcatatctgagctaaaagtgaaggatgggtggagagacg

SEQ ID NO: 446926 - DNA, 122 bp, Homo sapiens
ggggagtagggtggggacgggctactcactccttcaacaggatgacatcggccagcacaccgaacatctggtagagcccagaagcctcattcacgcgccgcacgatggagctggtcagctgt

SEQ ID NO: 446927 - DNA, 122 bp, Homo sapiens
atcctctcacctcagcctcccacaatgctgggattacaggtgtgagccaccacgcctggccgaaaactcggtgtccctctaagcccccaagcgtggggtcctttgttacagcagctgtggga

SEQ ID NO: 446928 - DNA, 122 bp, Homo sapiens
atttatttccccagtctatacttcctaccaggaaagaggtgaggtacttgtgctcctagccggggagaggacaggaagatttcttccattaactggcatcccacccagaaactgctgctcat

SEQ ID NO: 446929 - DNA, 122 bp, Homo sapiens
cttcaaccagcccagtcacagccagctacataatttgtggagcccagagcaaaatgaaaacgtaaggcctcttgttccaacacaggggaaaatgtgctattatctgtattaaaatataaagc

SEQ ID NO: 446930 - DNA, 122 bp, Homo sapiens
tgagcccgagcactaaccctcctgcggccctagcgaccctcaggcttcttccccaggaagcggggtcttggcctggaaccttccagagaggaggcgggagcaattttagccccaccctgctc

SEQ ID NO: 446931 - DNA, 122 bp, Homo sapiens
gccagaatccccctgcatgcgcagcccctggcgtcttacgtcccacaggccccaccccggcgccttccgtcccgcaggctccgcctttggcgctgggctctgacgtcaccacctgcgccgct

SEQ ID NO: 446932 - DNA, 122 bp, Homo sapiens
aggagcgcgagaggccctgctctgccagcttcggccaatcagaggccagggagcggtgggcgtgacgtggggcggtgcgcggggctgggcggcggctgaggcgcgtgctctcgcgtggtcgc

SEQ ID NO: 446933 - DNA, 122 bp, Homo sapiens
ttcttcacctggattactggcaacgccgcctgaacgactcctcctatcaacgttgctcaccggccattcctttgacactgaggactgtactacgcaccaagcactgggaattacagcaagag

SEQ ID NO: 446934 - DNA, 122 bp, Homo sapiens
cccaggccctccgaaaattgggacaccagggcagaaaggggtagggagagcagcggggcacgagacacagctaactgcaggtgtatccgtccccctccgggtaagagagaggggacgcccgg

SEQ ID NO: 446935 - DNA, 122 bp, Homo sapiens
gtcgctgctggacgcccatacatggaccaagtcgcgccgccccatcatccggcccaacaacggcttttgggaacagctcatcaattacgaattcaagctgtttaataacaacaccgtgcgca

SEQ ID NO: 446936 - DNA, 122 bp, Homo sapiens
tcggtcccgttttcccgtcgcacgtggtggccactgttggcttctgaatggtttgcaaggcggatatccacgccaaggcctttggatcggccgtgggtacatccgtctgagccgttcctttc

SEQ ID NO: 446937 - DNA, 122 bp, Homo sapiens
gcaaaggaggttgccgtatagggtcctacaagtaacctaggtggcagcatctcctcccagcgtcaggtctaagcacacaagttcttccttccatctacaaacgcaggaaaccacgactggag

SEQ ID NO: 446938 - DNA, 122 bp, Homo sapiens
ggtttcaccatgttgcccaggctggtctcaaactcctgggctcaagccatctgcctgcctcggcctcccaaagtcctgggactgtggtgtttgtttgtttgagacagggtcttgttctcgtc

SEQ ID NO: 446939 - DNA, 122 bp, Homo sapiens
tgctggtgtcggcctggtcagagggcaggtgaagctaatggctgccatgcagtgaattcacggggctaccttgttctacttctctctacctcctccctcctggcttctggtcccaggtgtct

SEQ ID NO: 446940 - DNA, 122 bp, Homo sapiens
agccaaatacttccaagttattccacagcctgagtttgcaaatgtgtctgattggactggcgcggaaagtcactaagatgccaatgcttgctggattctgcaatggcacacgggctcctgtg

SEQ ID NO: 446941 - DNA, 122 bp, Homo sapiens
caagtctcaaacacggtgcggggctgcgcggcaaggagaaacccaggagatgctcggggtcggggcccagggcagggaaaaccctcagctctggtcaaaagccaagtgagcgaaggaggcga

SEQ ID NO: 446942 - DNA, 122 bp, Homo sapiens
aggcttacacgcctggcattttaacttccactgtttgaaagtattacacctttcttttttcgcactccctcacagttctaaaaagctctgaactcatttcgttcttcttttcttcccttgtc

SEQ ID NO: 446943 - DNA, 122 bp, Homo sapiens
gctggggcagaggctgggtgcgagaggagcaggcgggacagcccgaggcacgaggtccgccgggcgcgggggttagcctccgggtagcagcggatcgccgcgcacgcccccttcgccgcagc

SEQ ID NO: 446944 - DNA, 122 bp, Homo sapiens
gcaggggggcgtcttggggggcctcttagcgctgacttgcagcatgaggcagaagccgagcgcggagagcgccagcagccccggccccgggccccccctggcccgcagccccgccatgctgc

SEQ ID NO: 446945 - DNA, 122 bp, Homo sapiens
tatgacaatgatagaagtgttacaatctctctcgagagaatacacctgcagtccatatctcgttcaccatataaaaaaaaaaaaacataaagaacagcctatgaaaagaatcaggtattttc

SEQ ID NO: 446946 - DNA, 122 bp, Homo sapiens
gggaccgcggacgccgcagcaagcagctccctgctcccgccacacccgccgagccagccgcgcggaacccactcccccaccgtgggcccgcctcccgccgccagcctgcccacgattggtcg

SEQ ID NO: 446947 - DNA, 122 bp, Homo sapiens
aaaccccgtgaaccttggagccagcacagactgtacttatgtctgggctgggggtgggggcggaagcggggcagctgagtcaggcccccccacattagcatttaaattggagtcgttgctgt

SEQ ID NO: 446948 - DNA, 122 bp, Homo sapiens
gctcaggcaacgccagggctctaagggccaatccagtctgcagggatgagcatccgggcccgtgctcagagggtcccggggcctcatgagatcctgagctggtggtccccagttgtgaaacc

SEQ ID NO: 446949 - DNA, 122 bp, Homo sapiens
cgagtatacgcatgcgtctattcctaggctgctggctctcagacccgcagtgaggtctgacgtcatttcctgccgtaagtatacagtgcctccgggtcgcggtcattttgagcccctgtctg

SEQ ID NO: 446950 - DNA, 122 bp, Homo sapiens
gattctaggccccacacagtgaaagaaatcccagactgttcttctacccgagtccccctgcggcttaggcggtacctgacacaaagcctgggccccagctgggctggggagagcggggaggg

SEQ ID NO: 446951 - DNA, 122 bp, Homo sapiens
acagagtgggatccttcagggcctgggtatgatgcctgcactaacctcactggacagtagcgtaggctagacaagattttagagatgtgttgtgaccagctgcactccaggaaaactgttta

SEQ ID NO: 446952 - DNA, 122 bp, Homo sapiens
gtttactgtcaataagttacaattaacacccccatatggtaattcagagttttcatagcgcggtcaaacgatctcatttaacgcctactacaaccctaaaaaattctaattactaccatcct

SEQ ID NO: 446953 - DNA, 122 bp, Homo sapiens
tgctgaccagttctagtgaggccttgtccacgttccaaggacccctccgtgtcagtgaaccgataaagggagtgatcgggctctgcatgcgggggtgctgcgtgtgggggtcccagtcgacc

SEQ ID NO: 446954 - DNA, 122 bp, Homo sapiens
caacgacgtcgtttccgtttccaccacctcttcctgttcccgtccttgaggacgccgtgccgggtcagtgttagcctccagccctggttgtggaaggcgacagaagtcatggcgatgtttga

SEQ ID NO: 446955 - DNA, 122 bp, Homo sapiens
tggctgacagctgcctccaaacacccagaggagcacatcagaatctggtttgccacccagcgcttaaagcatggcatcagctggtccccagaagaggtggaggaggcccggaagaagatgtt

SEQ ID NO: 446956 - DNA, 122 bp, Homo sapiens
ttttttctacaaatatgattatcccgtatttactgttctgtaacttgcttttccaaaccacggtatctcggatactttttactgtagcacatctagctctactttattctttgaagtgggca

SEQ ID NO: 446957 - DNA, 122 bp, Homo sapiens
ttccgagagagtcttcaaatgacgagctctctggccgcatcagcccttatataactcacccgcaccaacggcgaacacctcacccactcatcaggtgcgcgataaaccaatcaaatatcagc

SEQ ID NO: 446958 - DNA, 122 bp, Homo sapiens
cagccttcacctttaactatctgtagttatttagcaagtaggacttggtctgcagcacagcggtaattccactactctttaactaaagtaagaagtaacaatgacactcagaattattttta

SEQ ID NO: 446959 - DNA, 122 bp, Homo sapiens
tggtttggaggaagagtctcctttctgggcctctgctacagggagttcaggagttccgttcgccttgtcagctgtgacctctggcttggggccagcacctgccccagagggaccttgttctc

SEQ ID NO: 446960 - DNA, 122 bp, Homo sapiens
tgcccaaagtgccgagcgtgtctgtctgaagagcgggggctgtcgggtctgctgtgcccgcgttctggctggcacattcctgcccggaagcggggcggggtacttgcaggcagcggctgcca

SEQ ID NO: 446961 - DNA, 122 bp, Homo sapiens
gacctaaatctaaaaatgtattgaacacctgtatgatttcataaatattgccctgattgacgaggcaccccaaagaaaggcagaactggattcaacatggaaagaaagtatcccaagaagcc

SEQ ID NO: 446962 - DNA, 122 bp, Homo sapiens
ctaccaaaccaacagcagtcaaatcaggtaagagtcctacaatatggaacatgtacaaaccggtaaagaaaatacggaacatgtacaaaccggtaaagaaaacacgttaagactggtaggtt

SEQ ID NO: 446963 - DNA, 122 bp, Homo sapiens
ctccgcacacaggcggcggcgctggggccgctccaagtgcgttgagaagtgtaatccctccgctaagtacttggctctcagtctccaatcactagtgggagctggagagggcaagtgaaaaa

SEQ ID NO: 446964 - DNA, 122 bp, Homo sapiens
ttaccacctggcgagctatatcggtcgctgccatcgctcctgcgtccgccagggctgccacgggtgccgccgcaacgggagctactgcacaggaaacagaggagctcctccgacaaagagaa

SEQ ID NO: 446965 - DNA, 122 bp, Homo sapiens
taaacacaaactacgctgtgccaaagctcaagcagcccgaacccaggctcaggatgctagcgaaaagcctcccaggtaaacacaacgggcccacaaagaggaggagccgccccctcggggac

SEQ ID NO: 446966 - DNA, 122 bp, Homo sapiens
tggacaaatgctttaacaagtttgttttctgtttcctctttaaactaccaatccaatatgcgtttttttaatctggttggttagtaactaaaagtgattgtaacatatagtcattggtaacc

SEQ ID NO: 446967 - DNA, 122 bp, Homo sapiens
ttgaccccgtcatcaaactaagacacaacggctatgaccccagggtgatgaagcacacaacggatctggatgcatcaaaggtaggctccagcctccctctccttccccacgaagctggcact

SEQ ID NO: 446968 - DNA, 122 bp, Homo sapiens
gttgagacccaaattaggaggcaggcttaggaagatacgggaagagagtggtccaggcagcgggaacagccagtgtgaaggccctagggcagaaatcaactgagagtatagtcaaggaacag

SEQ ID NO: 446969 - DNA, 122 bp, Homo sapiens
actgcccgccgcgggccgccaggctctacctccagaaaaccctcccccttcagggcccggcgcaagatggtggcccaccagctaccacgccgccaagcctgtcccctcccccgcacccccgt

SEQ ID NO: 446970 - DNA, 122 bp, Homo sapiens
caggccccatttttccatctctgctgctgttattaggggagcccttagactctcttgcagcgccggaataggcgctcaagacgtgtgttaatattgcaacagcaaatataatgaatctgcag

SEQ ID NO: 446971 - DNA, 122 bp, Homo sapiens
attctgcggatgctcaactcctttgtataaaatggcatagtagctgggtgcggtggctcacgcctgtaatcctagcactttgggaggccaaggtgggcagatcacttgaggtcaggagtttg

SEQ ID NO: 446972 - DNA, 122 bp, Homo sapiens
gagttataaacgggtcggttacttgacgagatcttccggatgggcgagtcggggtccgggcgggacagccactgaactacgtagctcttcttggagggatctgagatgtttcctagagggag

SEQ ID NO: 446973 - DNA, 122 bp, Homo sapiens
agcccagcctgggcaacatggtgaaactccgtgtctatataaaatacaaaattagccggccgcgatggcttacgcctataatcccagcacttagggaggccaaggcatgcagatcacctgag

SEQ ID NO: 446974 - DNA, 122 bp, Homo sapiens
tgtccaaatgcccctttcacccacgttggtctagtagccatctgctgaccgtatacccggcgcagaagaacaacacctgacctccattaacagtgtctgccacacctcagcaagttcagata

SEQ ID NO: 446975 - DNA, 122 bp, Homo sapiens
gggcccagccgctggaggcgtgtgcatgcctgtgcgcgcttgtgcacgtgcatctgagttcgggtaaatataggactgcagttggtggatgaattgcgtttgtgcatgtgtgaaagtggggt

SEQ ID NO: 446976 - DNA, 122 bp, Homo sapiens
gttaagagtcctgggcggctcatgcaactgcacggagtggctgtgactccacgtaataaacgaggaggctctgtaaagcccccttttgtccgaatacgagggcttcggcgattcctttcaac

SEQ ID NO: 446977 - DNA, 122 bp, Homo sapiens
acagggtttcagaatctgtgtcagcccagcactcggggcctggcggtcatcgggtagacccgtgcactgcacctgaaacccactgacaccctgagtgacgggggtgtcccgtgaagagccag

SEQ ID NO: 446978 - DNA, 122 bp, Homo sapiens
gagccattagcagaacccagggaactgcaagccttgggataggggtcaccgaactacatgcgtggacttgggtagaggcacagagtctctgccaatcacaactggctgagagagggacagtg

SEQ ID NO: 446979 - DNA, 122 bp, Homo sapiens
atgtgtccgtttatcacaggctcagggtgacctggtctattcccagagggcattcacgtccgacgggagaacagcatggcccgctgtgcacatcagacccctggtgacgacactgtggtcca

SEQ ID NO: 446980 - DNA, 122 bp, Homo sapiens
aacacatttcctgtaatccactacctagggctttcttgtctcctcatcactttttgcattcgctagttacttttcatatagaataaaatataattacatatacaaatatcacatgaacatat

SEQ ID NO: 446981 - DNA, 122 bp, Homo sapiens
gaaaaaagcaagataaacagctgtgccttgcaggataataaaacaatggaagcaatcaatcgtgcagccaggggctgggatagagctaaggtggaatcagagtaccaatgactcggcatctc

SEQ ID NO: 446982 - DNA, 122 bp, Homo sapiens
aagccccgtgccctccaggagctggagctgccgttttgcatcatttttttctgtttccaccggttcttcctctctccttctctaaccacacaatgtgtaaatacccccggaccgtgcattgc

SEQ ID NO: 446983 - DNA, 122 bp, Homo sapiens
ccacgtgctatgatcctcctgagcccggtatcagaataatgaatctgaatacatgggccccggacctctaatgctttctaatctggtgcagagagtgtattttggctgtttaaatcaatcta

SEQ ID NO: 446984 - DNA, 122 bp, Homo sapiens
ggcgctgcggccgtggggggtgggctgcattcattccctctgggagctggggcttgcagtcgggcggggtgggttgcggcagcagggtggaggcctacgtattttcgtgggggtggggttgc

SEQ ID NO: 446985 - DNA, 122 bp, Homo sapiens
ccacgtggcagcatgtgttggtgcttcgtcccttcccgtggcgggacggcatccctcgtgcggacctacctctagtgtgtgcttaccagctaatggatgactgggttttcgaagcactgtct

SEQ ID NO: 446986 - DNA, 122 bp, Homo sapiens
ggattagaaatacttgggtccatccccagccactcaggatgtggacaataagcaagtggccggagggcaccctggtactgccatatgggtgggaagcactgccagctcccaccttgacctca

SEQ ID NO: 446987 - DNA, 122 bp, Homo sapiens
ggacaggctggcaaggggcccggaagccaaaagcacaagtggccttacacccgccctcagcgcacgtcctcagcctgtacgtgacatcagagcccacagggaggggtaaaaaaggagggttg

SEQ ID NO: 446988 - DNA, 122 bp, Homo sapiens
ataataataatccgagcctgaccagtcgccccacagcgtcaaggtgaaaccaggtgaccgcgactacagcgtttaataatgggtcctcaggcaaaaactccacggatgggaaccccgcgcct

SEQ ID NO: 446989 - DNA, 122 bp, Homo sapiens
cctggttttatacaagggtaccatgtctatctgaaatccaaggcgaggcagtgccacccacgatttgaaaaggcagttctttcaggtgacatctatttttaatttgtttatttattctttca

SEQ ID NO: 446990 - DNA, 122 bp, Homo sapiens
aagttcaggtcagaaagaaggcgcctgcaggcaggactatgtggctgggaggccgcagtgcgtccggcggccccgacacaggcccagcgggaaggacgtgctggcgccgcactctctgctct

SEQ ID NO: 446991 - DNA, 122 bp, Homo sapiens
agccctcacagagaagaggtctggaaagtcctggggaactcgcagggcacgggccgctgtcgcggttgggaggcgagggcgcagcgctggggttgtagattccaagacccctgagggtggct

SEQ ID NO: 446992 - DNA, 122 bp, Homo sapiens
gggtccgaattcgtaacaagcatccgggactccacatgacgcaggtctgagaatcgatcccgggttccagcccagccatcattttcagagaatacgggccctgtcccgagccgccagccatt

SEQ ID NO: 446993 - DNA, 122 bp, Homo sapiens
gccgccgcggctttctacccgccgcggcattttgcccccaccccgcctcggctttttgcccgccacggctttttgacccctcgccgctgcgaattttgccgccgcagctttttgccccccgc

SEQ ID NO: 446994 - DNA, 122 bp, Homo sapiens
caggaggaggcgctgcggctgcacgccctgtgccgcgtcctgcgcgaggtggacctgcttcgggctgtgatctcccagacgctgcagcgctcactggccaagtatgcggagctcgaccgtga

SEQ ID NO: 446995 - DNA, 122 bp, Homo sapiens
cctgcggcgcagagtgcgggccgggcgggagtgcggcgagagccggctggctgagcttagcgtccgaggaggcggcggcggcggcggcggcacggcggcggcggggctgtggggcggtgcgg

SEQ ID NO: 446996 - DNA, 122 bp, Homo sapiens
gggctggcgctggcacgaacgcgctctgcatgctaagtgctcgcgcccgttcccgccgcccggaggctcatttgtcacccgctgctgactcagcacttctgcagaaggcttttccctccgct

SEQ ID NO: 446997 - DNA, 122 bp, Homo sapiens
ccgggccgggccgtaccaggggtcgtgcggcgagtccggggaggcgaggccgggctggggcgcgtcagtctccatcgggagccgcgggcggcgcgggcagcggagcggcggcggcggcggcg

SEQ ID NO: 446998 - DNA, 122 bp, Homo sapiens
tttatagctgcccctccccgccccgcccctccccgccccgccccggccctcgggccaccccgcccgcctgagccccgcgcgccccgggccataccctccccaagcccagccgtccgggcccg

SEQ ID NO: 446999 - DNA, 122 bp, Homo sapiens
cgctgcagctctgatgtctaccgccctagactggctttggggtctctcacgtctgtatgccgggggctgtggtctccggccaggcgtcaagctccagcggactcgaggccttttgcacatgc

SEQ ID NO: 447000 - DNA, 122 bp, Homo sapiens
tatgtaatgatgactggggctgcagggggccctgcctctcccgctgccctgctctggaagcgcctgggtatctgagagttcagagcaggctggaggggcggagcttggagggacgctggcgg

SEQ ID NO: 447001 - DNA, 122 bp, Homo sapiens
gctaagggaatgtttccgtggactcccagcatcagacatgggatgtcttgattagttttccggatggctccaaggcctctggctttggagctgggtgtcccatcccaccctggctgggcgcc

SEQ ID NO: 447002 - DNA, 122 bp, Homo sapiens
atctgcccgcctcggtctcccaaagtgctgggattacaggtatgagccaccgcgcctggccgggatagcattttaactggatagctgactggctgattttatattcccacttaatggataga

SEQ ID NO: 447003 - DNA, 122 bp, Homo sapiens
tgggcgccatcttgcgcgtggcatcttgggaaatgtagtttacaggctcaataacaagcacggtccaagaagggaggggcgggggagcaaatcgatcttggcctcggaagaaaaagaacaaa

SEQ ID NO: 447004 - DNA, 122 bp, Homo sapiens
acaaatattattaaatatgttttactacaattttaaaaatagcttaaaaaaacccaccaccgccacaaaatatacagttactctctgtaagtccagtgaggattaaaatacaatggaaggtc

SEQ ID NO: 447005 - DNA, 122 bp, Homo sapiens
ctgcgtttctttgcctgtcctgggtgggactgcccctcgttgctgctatccggttgggggcgggaaggtgggtggctgggtgggcagatggcacctgccagccccagtgaccagatgggggc

SEQ ID NO: 447006 - DNA, 122 bp, Homo sapiens
gagagagaatgtgttctatgcctctcccctaacttccagtagttctctggcagtctttgccgtttcttgtcttctgctgcatcactgtcatgtctgccttcatcttcacatttcgttctcac

SEQ ID NO: 447007 - DNA, 122 bp, Homo sapiens
aggcaaggctccaggccaggctctccaaaaataaaactgaagagggacgccgcccggccccgcgctggcctcctagcaaaaggctcatagccacacccgagtctaagcccgcctcgtgcaga

SEQ ID NO: 447008 - DNA, 122 bp, Homo sapiens
tcaacagagcgagggcgcctcttttcttccttagcattaattaactcaagttcgttaggacgttgggtctgtcgcccacagttttctcttgtgtgtgctgaatcgggtcatagagggagact

SEQ ID NO: 447009 - DNA, 122 bp, Homo sapiens
gataactctggccccaggcacgtcattgtactgtgggatggagtttcagggtgaggtaggcggctgaacggcaccatgtaaaaaccagtttgtgcctccaaaccaaactggcactcagacat

SEQ ID NO: 447010 - DNA, 122 bp, Homo sapiens
cagcagctccaggccccgccgcagcagggcggcggacatggcggcgcttggctccgcccacgagcctcacactacttccgacctggcagtccctgtcgtctcggcggaaacccgagcccgaa

SEQ ID NO: 447011 - DNA, 122 bp, Homo sapiens
gcctggaggcggaggagggaaacccgaggggtgtgagccatgccccacggactcccatcccgccagtctgaaggccacccccgccccactcgcccacatccactccgggcacccatgggcac

SEQ ID NO: 447012 - DNA, 122 bp, Homo sapiens
gccgccggggcggcgccgggttgctgagcggcgtcacagatgctcccgcgggtccgctcccgcgggtccattcccaggactttgggttctcggacagaggccttaggacacggggcgggaag

SEQ ID NO: 447013 - DNA, 122 bp, Homo sapiens
ctctttaggaaaagcctggatctccgacatctccagagcgcctgaccaagcgtgagaaggcgggatgtagccggggtgtgtgtgtcggggggtggcaggatgctccccagaggcggagagcg

SEQ ID NO: 447014 - DNA, 122 bp, Homo sapiens
tgcccaggcttaatggggttgtgcagggcttcacttgctctcggaatttaccttccttctcgagccgtgccgcgaataaccttcacgacacagtgataacgatgttattaaatactcccccc

SEQ ID NO: 447015 - DNA, 122 bp, Homo sapiens
agagaacacacgtccttgcggaagtgacggcagttccgagtccagtgggggcggtgggagcgatgagggtctgagacggtgggagcggttgtgtgaagatggaggtaggaacctgatagcta

SEQ ID NO: 447016 - DNA, 122 bp, Homo sapiens
caggagacacctgtgccacctaacaaatgtttctagggaaacagcaaatgcgaatgcttccgagtaaccaatcggtgcgcacactcccccggccccaccacaagagggcggtgtgactagca

SEQ ID NO: 447017 - DNA, 122 bp, Homo sapiens
gcttccagcagggcgaagtccctatcctcatctctgccctcgggggtgtttttctcctttcggcccagggctacaggcaggagaaattcacacctggaatatctcgaggaggcgccttattt

SEQ ID NO: 447018 - DNA, 122 bp, Homo sapiens
ctgcctttatgagccgtaacactcaaccgcgaaagtctgtagcttcactcctgaagctagcgagaccacgaacccaccgggaagaagaaaaaactccagacgcaccgccttcagagctgtaa

SEQ ID NO: 447019 - DNA, 122 bp, Homo sapiens
aaagggcttgaaacccgttccccagccctccccttcctccgcgccctcaaaggagccaggcggggagcccgctcgacctcgacctccacctcgcactcgccctcgcccccgccacggaacgt

SEQ ID NO: 447020 - DNA, 122 bp, Homo sapiens
tcccagtctttcagattctaaactagccaggaagttagaatgagtaaacaaagagttttccgaagtctgtgttttggatggagtcgccctgttaataaactgatctgctaagtagtcaatca

SEQ ID NO: 447021 - DNA, 122 bp, Homo sapiens
cggcttgggtttcgcaggcggttggggatcctctgtacatcctttcaggaaccagcccctcgtggggagcgtgcacacggaaggggcggggaatgtgaaaaagtcacgttttcattggtggc

SEQ ID NO: 447022 - DNA, 122 bp, Homo sapiens
ggaagtcctcaccgtgaccgaaaccagccagggcctgagcttcgagtatgtctgggaggccgctaagcacgaccactttgacgagcgcagccggggccacctggacgaaggcttgtcctaca

SEQ ID NO: 447023 - DNA, 122 bp, Homo sapiens
gatgtctctgcttcacagcccacagtttgggtggctttggtaaatgtctaaattactttccgccacaggccaccatagtctcttttgaatagttaaaactacaaaagatgaatacataaata

SEQ ID NO: 447024 - DNA, 122 bp, Homo sapiens
gctttcaccttttcttacaagtgtcttagtttgacattgcccacacaaaaggtgcctgcacggaagcggagtcctaccaccgagtctcaggcctagaagggcccgggggtgggttctgtggg

SEQ ID NO: 447025 - DNA, 122 bp, Homo sapiens
ggccgcctcaggctccccaggcccccgaagcccggcgcgggcagacgcggaggcgcggcgcggcctctccccgggaggagagaacacaaagaaaagctctctccaatccggtcagagccgtg

SEQ ID NO: 447026 - DNA, 122 bp, Homo sapiens
tcctcttcaggctgcagggcattttgtatacccaccacctcccattgatgctggaaaatccggtcacagaattccgtgcagcccagcccctgagggtggggcgtcctgtctccgggacgccg

SEQ ID NO: 447027 - DNA, 122 bp, Homo sapiens
cccagagccaggagaaaagggagagtgaggctttttattgtgtatgaattcacgtggtatcgacaactccacacaatattaaaacactgcgagaaagtgggtgcggcacacctggaatttta

SEQ ID NO: 447028 - DNA, 122 bp, Homo sapiens
cccagccccgagccccggggctggctagggccgggcgccgggttacctccttcggcccggcgggccccacctgagcttttctcacccgctcaaagccgctaccaccccgcgcccccaacctc

SEQ ID NO: 447029 - DNA, 122 bp, Homo sapiens
ggccgcaacggtgacgactgtggcagagaaggcccggaggggctctgcgttctgtagtggcgctgcttgggcccttggcggattgtaagctgctggttttgcggctgggaagagcggcgaga

SEQ ID NO: 447030 - DNA, 122 bp, Homo sapiens
ggcttctcatctgagtcggtagcagagtacatagtgcaagaagcgtgggcaggctcccagcgcacccagagatcaaggagagtgatgggtgctgcccgcctctgaggggacggaggcagctg

SEQ ID NO: 447031 - DNA, 122 bp, Homo sapiens
ttagcagagagggactgaaagttcttgttttgaaaggatgcagtgggttatttcctgccacgctattttgtttctagcaaaaattttaataaacaggctttcagaagaagggactacatcct

SEQ ID NO: 447032 - DNA, 122 bp, Homo sapiens
gcctagattctcaaagatgacacagtactgatgaactgaaagactctgtcccttgtgctacgtcccaaggacagtatattatgcccttcattctcttttgtcttgaccatggcagacatgag

SEQ ID NO: 447033 - DNA, 122 bp, Homo sapiens
ttcaagactaaaacgatacaataacacatttggaagaaagcactgaattagactagaagacgatgaagaagaatccagtcaggaggaaattccccatggaagttcccgctaaggggcatcag

SEQ ID NO: 447034 - DNA, 122 bp, Homo sapiens
tggaaagaaagaactgtctctaccagggtcaagagcatgaacgcatcaatagaaagaactcggggaaacatcccatcaacaggactacacacttgtatatacattcttgagaacactgcaat

SEQ ID NO: 447035 - DNA, 122 bp, Homo sapiens
attcctataaaaatgatagtttataataattgacctcaatgcagagaggctgagcaggaccgagcagctggaatcctggacgtctgattgctttggatgtagctaggaggggtggttccctc

SEQ ID NO: 447036 - DNA, 122 bp, Homo sapiens
acacggagagcggcgggcagtgcagccaatgggaggcggcgctgcctagcggctggtaggcggtgcctgcgcgggtgttaggttagcgcgaggcgtgacctagttgacaggctctgaggtgc

SEQ ID NO: 447037 - DNA, 122 bp, Homo sapiens
tggccctcaggacaacatgaggcattgtccaggcccctgtgaaagccgccattgaggctgcggcccgaggcggggccagcccgcggtgggagcagctgtcaccagggtcacccccaggggca

SEQ ID NO: 447038 - DNA, 122 bp, Homo sapiens
agatacgaggttttcctttgtttcttcagttttttgctgacgttggggtcactggctaggcggcgggcggcctccgtaatctgggactgaatggcaaactctcgttccaggcgttccagctc

SEQ ID NO: 447039 - DNA, 122 bp, Homo sapiens
tgacaagcaggcgggctggacaaaggaacggcagggggaggggccagtgggcaagcaaaacgtgagtcaggagaaacttagagttggatgcattgtcccaagtgctgacccaaggctgcctc

SEQ ID NO: 447040 - DNA, 122 bp, Homo sapiens
gattattttaagaaggcatgaaaagcaaaggcattgcagcaaataatttcttcagtgcctcgaatgcgagggcaacaaagggatgcccctgattctctttcatacaggatcatgcactgttt

SEQ ID NO: 447041 - DNA, 122 bp, Homo sapiens
cgctgctccagcgtcccccagccgcgggcccccgacgcgctgcagccggcagcccaccgccgccttcttggcgcgaccccaacccagccccagtaagttgctaggtctccagccccgccgag

SEQ ID NO: 447042 - DNA, 122 bp, Homo sapiens
cttgtctttgttatgaaatagtcaaagggcttcaaaactgcaggcagttgccgcgcacggcgcccgtccttggaggccttttctctgagaatggagttttagattcagggatttatgacttg

SEQ ID NO: 447043 - DNA, 122 bp, Homo sapiens
cctgctccttcctctgtgtggcagaactcggccgctctgcctggctccctgtttccgcaccgagaggcctagacgaagcatgtggtttccaaggcaggctcagagccccagaaggccaggtg

SEQ ID NO: 447044 - DNA, 122 bp, Homo sapiens
gacacaaatcatgcaacagtgacatcaccagccccagagtctgtctctaagaatactgggcgcatttcctgtctcacaggtgaaagtattgcgctccccaactccagcagcctttctagcca

SEQ ID NO: 447045 - DNA, 122 bp, Homo sapiens
cagaaaatgcatgggccggccaggtgaggggcaatgcttgggcacccccaaatcacagggcgaggaccggtactgggcagtgccacggtgtgacagagtgacgtgcagtcagggacagcgtc

SEQ ID NO: 447046 - DNA, 122 bp, Homo sapiens
ctttcccacttcctctcaatgttttcttcatatatctggaaatatgatcagcgcccctgacgtagtggccttcaccaaagaggaagagtatgaagaagagccttacaatgagccggccctgc

SEQ ID NO: 447047 - DNA, 122 bp, Homo sapiens
aggagccgatgggaaggggtctgtaccgcgggcgtgagaggactccgcagtgacacgacccgtagcgaaggtgcaagaaatcccagaggcgtagagcccggcgttcgccaagagcctttgcc

SEQ ID NO: 447048 - DNA, 122 bp, Homo sapiens
ctggtacatttaagatttcacctgaaggggccaccctctagttcactgaacaatgctttccgcatggttattaaatcccaaggacgacaaaataataggctagtggatttcacttaggactt

SEQ ID NO: 447049 - DNA, 122 bp, Homo sapiens
accttccaaggtagatactactgatattccctggtcacaaaggaaatctctgaggtcccacgacattaattagtttgtccaggatcaatgtttataaatatcatagctggtatgtgaactca

SEQ ID NO: 447050 - DNA, 122 bp, Homo sapiens
caaaggagtcagggctgtgcattcaatcatggtcgcactggctggcccctgaaggccgtgcgggtcagcagctggcctggcctgccaaagacaagcttgtgcttcctacttctgggattccc

SEQ ID NO: 447051 - DNA, 122 bp, Homo sapiens
gggcctgcggggcgtggcggggcgggcagagggcggggcctgcttctcctcagcttcaggcggctgcgacgagccctcaggcgaacctctcggctttcccgcgcggcgccgcctcttgctgc

SEQ ID NO: 447052 - DNA, 122 bp, Homo sapiens
gaagtgcgccccgttccgatcagtggggtccagggggtcgggccccgtggggagtcccaccgactccccttccgagaggccgttgtaaagctttagcatcctgtgcgccttccgccgacact

SEQ ID NO: 447053 - DNA, 122 bp, Homo sapiens
gcaagacttggccaagtcaatgcgcatgcgcaaggagagagccgcttctccccatcacagcgattcccagggttgtcgtagaaaccactccctgaggcttcgcaaagcaggagccctccgta

SEQ ID NO: 447054 - DNA, 122 bp, Homo sapiens
ttgtcttccacctaccggatgggattatgcaagtgatatgacccagagcattctggaagccggcaggggcataaataatacattagatatgcagatgaactgcccagggtgtctctggtctt

SEQ ID NO: 447055 - DNA, 122 bp, Homo sapiens
ctgaagggagagagaatttggagggaggctgctgtcacttctggagagggctgtggaggtcgatggagtggcatgtcaaggggagatctgccagtgttcacgggcaccaagctgttgctctc

SEQ ID NO: 447056 - DNA, 122 bp, Homo sapiens
ggtccctcccacctcagcctgcacagagccgctctggtctgttccctccccgacttcctacggctcccccaccccacacatcgtcgcccgtgcggtctcagtcagggcctcggtgcccctca

SEQ ID NO: 447057 - DNA, 122 bp, Homo sapiens
actggctgccggaggcctgaagcagagcagtgggcacttgggtcccacaggtttcaggggcgagggtgatgggagagacacctggccacgtgtctgtctgtcactcaccttctctcccttgg

SEQ ID NO: 447058 - DNA, 122 bp, Homo sapiens
ctaccaggaggcggggcgagacagcttccgactccgcccccagaggaatctctctgaatgcggccatgctgggatgtcctattgtaaccttagggattcagttctggcctagggtgcaaaat

SEQ ID NO: 447059 - DNA, 122 bp, Homo sapiens
ctgcggtcccagctaccagggaggctgaggcggcaggatcgcgtgagctcggaggtccaccgcgctccagtctgggcgacagtgagaccccgtccccaaaacgaaggcgggcagagtctcct

SEQ ID NO: 447060 - DNA, 122 bp, Homo sapiens
gctcttcccctacgtggccaagaggacgcagcactggcggcttcaggaggtggctgtgagcgcggggctggggccaagagcagaggaccagagaggagtctccaagccaccaccggccccgt

SEQ ID NO: 447061 - DNA, 122 bp, Homo sapiens
ctcgtcccctctggggccctactgcggcggctcagcacgcctgcagaagctcggcctagccgcccacccgaaactcctggaccgcagcctccatggggcccagcaccaccggcaaccgcacg

SEQ ID NO: 447062 - DNA, 122 bp, Homo sapiens
atctcggctcactgccagctctgcccccggggttcgtgccattctcctgcctcagcctcccgaataactgggctgattcccccacaagattcaaaaacaaaagaaaactggctgactcaccg

SEQ ID NO: 447063 - DNA, 122 bp, Homo sapiens
cgtttactgtcccgcactgtgccagacgccttgggtgacactcagaggtgattcacccagcgccgtcccccgggggccgccactctcggagacaggctcagaaagagttaacccaaccgcca

SEQ ID NO: 447064 - DNA, 122 bp, Homo sapiens
tggttgctaaggagacagaaggctggtgtttccgatttgccactattacacagcggcccgcgagaagcatctcttggctcgaagcgcgctgtaggtgaaccgcccttgacttaaacgccaac

SEQ ID NO: 447065 - DNA, 122 bp, Homo sapiens
ctggtggtccgctgcattcagcgcctggctgagatgtgtcgctcactgcggggggcagcccgcctggtaggagagcctgtgctgggtgccaagatggagacagcggctaccttgctacggcg

SEQ ID NO: 447066 - DNA, 122 bp, Homo sapiens
tttctggagtcccctcttctgattcttgaactccggggctggcagcttgcaaaggggaagcggactccagcactgcacgggcaggtttagcaaaggtctctaatgggtattttctttttctt

SEQ ID NO: 447067 - DNA, 122 bp, Homo sapiens
gggcaggcgcaccacacccgaccccctgccgcgcaggggcacccacaccccgcccccgcacgcaggcacaaacccccacaacacgcacacccccgcgcgcaggcgcaccacacccctcgcgc

SEQ ID NO: 447068 - DNA, 122 bp, Homo sapiens
gccgggcctggcggggtgaggtagtaggttgtgtggtttcagggcagtgatgttgcccctcggaagataactatacaacctactgccttccctgaggagcccagtgacacgaccccatggga

SEQ ID NO: 447069 - DNA, 122 bp, Homo sapiens
gaaggtacctgtggaagcctctggctcagcaggtgagaagtgtgtttgtgttcctctccccgacgccctccctcagtacttgcttcccaagacattgctttcctttgttgggtcagaggtgg

SEQ ID NO: 447070 - DNA, 122 bp, Homo sapiens
caggggcatccagcactccgagtgggaggggaagcctctcggcgcctgagccggtcagcccgaggtctggatcaggccccagtgctttcagtagcaaggtacaggaaccgaaaatcctgtca

SEQ ID NO: 447071 - DNA, 122 bp, Homo sapiens
aggattgagtgagttctcgctatgagttcatgtgagatctagctgggtaaaggagactgccgcctcctccctcccttgctcttgctcttgctcttgccatgtcatgggcctgctcccccttc

SEQ ID NO: 447072 - DNA, 122 bp, Homo sapiens
aggagctgaagcactcaaaggctgatgtaagccctggcccggaaggagttaaggatcaaacggcgcccagggagtgagccaaacattccatgttatagaagtaaggagagtcacgtgggagg

SEQ ID NO: 447073 - DNA, 122 bp, Homo sapiens
aaagtgctggcatgacaggcgtgagccaccatgcctggcctctaatggctaacttctacccgagatttcttagggaagatagcagagacctctccatcagaatgctccttctttggagagcc

SEQ ID NO: 447074 - DNA, 122 bp, Homo sapiens
gtcttgccgttgtagacgcccaccatgctgcccaccatcttgggcaggatgatcatgtcccgcaggtgcgtcttcaccacttccggcttctccatgggcggtgcctccttcttggccttgcg

SEQ ID NO: 447075 - DNA, 122 bp, Homo sapiens
gcgctgagatcgtgcgtgcacaggccggggtgcggccggcgtgagtacgcctgcgcgtgccgccatttcctgcagccgcagactctgcctgcggtgctcgccgggaaatgagacgatcaaca

SEQ ID NO: 447076 - DNA, 122 bp, Homo sapiens
cccgcgaacatgacttctgccttcaagctggatttcctcccggacatgatggtcgagggccgcctgctcgttcctgacagaatgtgagtggcgccgcgtcccgaggccgggcgagcgggcgt

SEQ ID NO: 447077 - DNA, 122 bp, Homo sapiens
cccagccgctgccctgcacgcttagggcagcgaaacaggcaggggtgcgcaggcgaggggcgcaccagccaggcgctccagctctgcacacggccgcgcccctccgggtccggggctctggg

SEQ ID NO: 447078 - DNA, 122 bp, Homo sapiens
catacttgacctcctggaactcatcgtagtgcgccatcagcgaataccaggactccatggcgccgaggccgccggggtgcagccctgggccacctgggctacgggatgcgcgtggccgccgg

SEQ ID NO: 447079 - DNA, 122 bp, Homo sapiens
tcctagggatggctcctggttcacgcaggctcctcatagggtccctgccgctacacaccacgagcccaccgagactgctgcagcctcgctcatccagaacagaggcaccatggccaggaggc

SEQ ID NO: 447080 - DNA, 122 bp, Homo sapiens
tgggacaccctgcccgcctcctggagtccattcagcagcactccctggatgcggttttagcgcggagcgacagtgcccagattgttgcagatatcaggaaggacatcgaccaggtctttgta

SEQ ID NO: 447081 - DNA, 122 bp, Homo sapiens
atttctgattctgtgaaactttgataataggtccatggatgtagtggactaaatgatcaacgtgcattatgtctctttaagactcagattacctaggaatgcagtttttttcccagttgtgt

SEQ ID NO: 447082 - DNA, 122 bp, Homo sapiens
tctgttgccgaggctggtgtgcagtggcaggatctcggcttattgcaacttccacccaaccgggattcttttttttttttttaagaatcggagtctcactctgttgcccagcctagagtgca

SEQ ID NO: 447083 - DNA, 122 bp, Homo sapiens
atcgtggaggcatagggaaacactcaagattggtctccactttgttgtagaagaatgaaacggatttgaggggagaataatgtaaaattacagcaaatgttccctacccaggcagaagtttt

SEQ ID NO: 447084 - DNA, 122 bp, Homo sapiens
acagctatggctctgaattgccttggagggtttattaaaacccagattgcttccacctcccgcccccaacctccccaccccaaccaaccccaagagtttctgaatcagatgtgggatggggc

SEQ ID NO: 447085 - DNA, 122 bp, Homo sapiens
cttctatctctaaggccctagatgccatgattcaagtacagggtaggaggaaggcaagcccggctctcagtccagtggcttccaaatgcccattccagccactaagcagtaggtttgggttt

SEQ ID NO: 447086 - DNA, 122 bp, Homo sapiens
agttatcaccaatatcttctatgttcagagtcggaatgctgcagatttacctagcttgaacgaaatctgtcataaggaatctaaaaaataaattaattccaaagtactttagaaaagcgttc

SEQ ID NO: 447087 - DNA, 122 bp, Homo sapiens
cctcttatagtcatctcagcttgctgatcgattcggggacccgggaggagggctgcgtgacgtgggcgtgcttatagataaatccgggaaaaccgccccaaacaatcagcccccttcccccc

SEQ ID NO: 447088 - DNA, 122 bp, Homo sapiens
ttttactgtttcaagtcagaaaatgaaatgcctggtgtttctcaatgaaggacaacaagtcggcattctgaagtgtaattttctgcaatggttctgttttctgagacccattcttatcaatc

SEQ ID NO: 447089 - DNA, 122 bp, Homo sapiens
caccgcccatctgcgtcccggaaggagcgagcttgcggagcgtgaaccagtgagtgaaagcggcgccgcccgccggccgcaggtgcggcaaagccagtgtcatctgccggttctcttagggc

SEQ ID NO: 447090 - DNA, 122 bp, Homo sapiens
ggccgctgacggcttctcctggggcccggttgccatggcaacgccggccccgggggcaggcggcctccaatcacagctgctggatcagattagtgcgagctctaatgctcggcgctcagaca

SEQ ID NO: 447091 - DNA, 122 bp, Homo sapiens
ggaagataaatgtcccctaatccttttgtgtaaaagggggaatgttttttacccttagaccggataagcaagaccagctgagacctactggtataaagcatactgcctgctcacatggtgag

SEQ ID NO: 447092 - DNA, 122 bp, Homo sapiens
ctacctgggagggacagatgccctcccattcttgctacctgagggggaccggtgtctctacgtcatggttacctgtgcctttactccctgggtgttgggggaggaacggatgtccccacttg

SEQ ID NO: 447093 - DNA, 122 bp, Homo sapiens
ggagctttttgtgttttcctcttcctctcccaggtgtgaatgagcccagggaaggacacacggccactgctggagggatcctccattcctgtgtcatttgcatgggtcctgctgtgaaatga

SEQ ID NO: 447094 - DNA, 122 bp, Homo sapiens
atgatgaatcaaggcaaaaacaaggccactgcataattgtaactgaacatagacaaagcacgaacattgtccaaatcgcaacaatgaccaggtaccaccctattcttgccaatatgagtgac

SEQ ID NO: 447095 - DNA, 122 bp, Homo sapiens
tgtacagcgagggcacccccggcttcgagcaggcctaccctgaccccggtcccgaggcggcgcaggcccatggcggagacccacgcctgggctggtacccgccctacgccaacccgccgccc

SEQ ID NO: 447096 - DNA, 122 bp, Homo sapiens
attgtttgctgtgaaaattcagtaattttatttcatacttggtaacatgttagccatttgcgctgtcgatcactgttaattatgaggtcgggtttagctgaaggcattatgactccatggca

SEQ ID NO: 447097 - DNA, 122 bp, Homo sapiens
gttgggcctcggcaaagttgtgcctcggcacgatgctaattcggcagtgcccggatggagcgggccggggcggcggggggcggtgccgggaccctcagcccgccgcgccccgcccccgcccc

SEQ ID NO: 447098 - DNA, 122 bp, Homo sapiens
tttaacataaaaagaaactgaccttcaagcccaagaaggtgacctagcttttgcgacacacgcaggctgaaagatcatattgctgttttcctgagtttcaaacaataaaagcaccgttctgg

SEQ ID NO: 447099 - DNA, 122 bp, Homo sapiens
agatgccttcttcggtgacggcgctgggtcaggccaggtcctctggccccgggatggccccgagcgcctgctgctgctcccctgcggccctgcagaggaggctgcccatcctggcgtggctg

SEQ ID NO: 447100 - DNA, 122 bp, Homo sapiens
cgggcctcttggcctcgcactggcgccctcacccacacatcgtccctttatccgctcagacgctgcaaagggccttctgtctccgggggtaggaccgcagaccctctggtggcctgcccgcc

SEQ ID NO: 447101 - DNA, 122 bp, Homo sapiens
ggggcgcaagcactcagggcccagaggcaccagggtgcacagagatggtctggccatcctcgcatcctgggctcagagaccagaagggtggtgggtggcctggggagctgcagtgcgcagcc

SEQ ID NO: 447102 - DNA, 122 bp, Homo sapiens
ttaacggtgacgactggcagggccttgtttaacggtgatgactggcagggctttggttaacggtgatgactggcggggccttggttaacgttgatgactggcggggccttggttgacggtga

SEQ ID NO: 447103 - DNA, 122 bp, Homo sapiens
gcggccttctaggcccacgctcctgaaagccgctcctaggctcacactctgctgaagaagcgtcaaggactgagcgaggcgaagaggccacctatttacacggcccagtgtacaccccttcc

SEQ ID NO: 447104 - DNA, 122 bp, Homo sapiens
gttcgtcccagaacctgagaaacaggaagcaggcaagctggcgctcaggcttggtggccccgcccacttcggcccagctgtgcccctggcacctgcacagaggtgcacacaccacatggctg

SEQ ID NO: 447105 - DNA, 122 bp, Homo sapiens
agagcgcgctggtccaggcagggtctgcaccgccgcctccgcctccgccgccgccgccgccgctgtgcttactgcttcttagggcagaaagcgagggcgctgtgctcatgacccacccgcgc

SEQ ID NO: 447106 - DNA, 122 bp, Homo sapiens
gcgtcccgggggtcacgtggtgcagagcacgcagagtccttctgtcggttggtcctggagcggcgcagccggagtggggccgtgaggtgagctcgcggccaggcgaagccggccggccgggc

SEQ ID NO: 447107 - DNA, 122 bp, Homo sapiens
gcaaaccctggtcatcccctcagtctgtagcccttttgtgtgagtgcctggcaagggtgacgtggggctgtttctgcgggcacagctgcagcaattaccggagtggaggcagggcccaggca

SEQ ID NO: 447108 - DNA, 122 bp, Homo sapiens
gggcctcacaaggaactggagacagactggaaagctgcctttctatctgtctttagggcacgtggttctcatctctgtctctttctgcagcctgctcttttcctgcctgtctgcgtcctctt

SEQ ID NO: 447109 - DNA, 122 bp, Homo sapiens
gctatcaatctcatagctcattgaatgtggatttgttttagatgcactattggttctaaccgtctagatcaaggtgagccaggaaaaagctggctagttctgaggaatttctagttagaaag

SEQ ID NO: 447110 - DNA, 122 bp, Homo sapiens
ctccgaggccgggccgcggatactttaaagctcagagctgggagggcccaaaggaaggggcggcgtccacatggttacccttctgctgcgcgggtcaagtagcttcttctggagggcgcaag

SEQ ID NO: 447111 - DNA, 122 bp, Homo sapiens
tcacaccctcggtgaggggggaccttgtgcaatggaaggaaggagcacttcctccctcttcggagctgcagcgactgatttccttcaggcccaggagggcagatgccctttagcctcctgcc

SEQ ID NO: 447112 - DNA, 122 bp, Homo sapiens
cttctcagacttctcttactgccaatacctaacgctcccctaaggtcatacgcacgacttcgttaaaggtaccgttgtctccacattcaagagatgaggaaactgaagttttgagagactct

SEQ ID NO: 447113 - DNA, 122 bp, Homo sapiens
cacaccccgcggagcatctccgggccggacaggacccacgccctccacagcccggaaaggcgggttaactggtcagcatgcagagacccaccaagtggagaccccgctcccaggcacagacg

SEQ ID NO: 447114 - DNA, 122 bp, Homo sapiens
ataaagaggaaaaataacctgtgtggcgctctcagcataaagcgcccaggttcagggatgcgtgtgcgtcctgctgtctgctcattcgaagagcaaaggaagcagggatgatttagggcctc

SEQ ID NO: 447115 - DNA, 122 bp, Homo sapiens
ttagatttgatctgtcttctgtgggaaagacctgcttgtctcaagtgaagaacagcgctccggcaaaacctcgaggcagcgctggaaaaatcgcacgtgcagatcccgcaagaaatccagcc

SEQ ID NO: 447116 - DNA, 122 bp, Homo sapiens
tgagtaaggacgtgccgtgggtgtgggcatgcttgtgtggagatgcgcgccgagtgtgcgcgtgaacacacgtgcacatgtgagctggtgtccgtgtgcaacaggcagccacctgggggagc

SEQ ID NO: 447117 - DNA, 122 bp, Homo sapiens
cagcggcaagactgcctcatggcgcattctacaggcctccctgtcctctctgtgccgcgccggagaccctaacttcaacattgttagagtacggggctgggacagtggagtcagtgggcaga

SEQ ID NO: 447118 - DNA, 122 bp, Homo sapiens
aaagggacttgatttgggtaaagtgcttcaagcgctacttaggagaaagccgtacattctcgcgagtattattcataatgtttatggatacatgttggttcagccgctcagacgtgcacacg

SEQ ID NO: 447119 - DNA, 122 bp, Homo sapiens
gaaatttacaatcatggcgaaagggtcacaaaacacctccttcacaaagcagcaggaagacgtgccgagcgaaaggggaagagccctttataataccatcggatcttgtgagaactcactca

SEQ ID NO: 447120 - DNA, 122 bp, Homo sapiens
tttttgtctttgctgatgcgtgtacagtctatcttttttccatctcaagtctagccatctcgggggaagatgtcccagctctggactcagcactgatcctcatgaagagctgctcgacccca

SEQ ID NO: 447121 - DNA, 122 bp, Homo sapiens
ggccttttgaaatttaaactccttagaattatcctgctgagaagttgtgctaattgaccacgcatgtattgccttgtattaatgttctaatatgttttaaatgccatccttctgtgtttacc

SEQ ID NO: 447122 - DNA, 122 bp, Homo sapiens
aaggaaatacagatgaggtgggcggacagtatgcagatgacgggggcgggccgcgcctggcgggcggtgtgcagttgaggtggtccggcaggatgcagatgaagggggcgggccgcgagggc

SEQ ID NO: 447123 - DNA, 122 bp, Homo sapiens
ggcagctccgagcccggcctcccactcgggagaggctttggccggtcctcacctgggcgtcgtccctgccactcggcccatagtagcgtcaggtcgccgtcagccctcaggaagcgcagcag

SEQ ID NO: 447124 - DNA, 122 bp, Homo sapiens
cctcaatggatacaaacagcgagcgtctcaatggatacattctccgggccagccaatgagcgtgctgcggaaggggctgttgccgtggggacgggccggctggaacaggttgtgttgatgaa

SEQ ID NO: 447125 - DNA, 122 bp, Homo sapiens
cccctcctcacctggctgcccccggggccctccgccgggctcctgcgctgactgcgctgccgccgcagggagacactgtacaccgcgccgtcctcggtctcttcaccccagtcctgcagcgg

SEQ ID NO: 447126 - DNA, 122 bp, Homo sapiens
cgaggagggggaactgctgtcgccgccgccgccgccgcctcagcttcccacagccgctgccgctgccgccgctctgcctggtccagccaccggcccagtgctctgacttcgccggaccgggg

SEQ ID NO: 447127 - DNA, 122 bp, Homo sapiens
tgcgaacagtcaggctcctagctctgcctggctttggaggatgtcgggggccagtgcctgcgtgcactcccactctccggcctcctccccagccgccgcttccgctatcctcacggcccttg

SEQ ID NO: 447128 - DNA, 122 bp, Homo sapiens
agtaaagctcttactgaatggaacagggaagtgagaaactgcagccggcctggccaggcgcggtgccgcagaccctgtcacacagctgctcccagttacgcagcctctccctgtcacccgca

SEQ ID NO: 447129 - DNA, 122 bp, Homo sapiens
tcttgctgcatgccgtcaacggtctccgaaagcaacgttgtgcgtagagctggtggcatacggcccacgtgccttagatgggacatgctgcttctccaccctgggtttgcattgagcatcat

SEQ ID NO: 447130 - DNA, 122 bp, Homo sapiens
ggaggcttcctttttaaaaatcaaaaaagaacatttcacttccggcctgcaaacctgaaccgccagcgcagcctgcggaaagggggcctgtgggcgcgggtgaagtttttctccagcgccta

SEQ ID NO: 447131 - DNA, 122 bp, Homo sapiens
tgtgtcacgctgtatttttctgccacttgcttctctgggtgagttttgtccatggatgcacgcgtgggggctttggctcatcaagctgggattgtgtggcatccgtgtgtgtgtgaaatgcc

SEQ ID NO: 447132 - DNA, 122 bp, Homo sapiens
aaaaatatattatttgtattcccattttacagataccctcaggtatctggtggagacctccgtaacacacctccccggaggatgaggccccgagtgtgaagcatcgggatctcacggtaaac

SEQ ID NO: 447133 - DNA, 122 bp, Homo sapiens
ttgcagctcctgcccctcaggacttcccacagcattcatggggaatgaggtgggggggcccggtaccccaggtgcccactctcagctagaggaagagggagcagaggcacagcccagcctag

SEQ ID NO: 447134 - DNA, 122 bp, Homo sapiens
gaaaaaacggaaatgaaagattgaaaatgtgtgggctctccgtcctttcctttgctcctgcgcgctctctggggtggggggctcagcgagcttcaagaggtggccgagattcccccaccccg

SEQ ID NO: 447135 - DNA, 122 bp, Homo sapiens
aggaagcggagcctccagacagaacccggaacctgataccagcgaggctaagaccgagctcggctccccggctcctgagagaatgaaagtcaagaagcacgaatctgagacgctcaaaatta

SEQ ID NO: 447136 - DNA, 122 bp, Homo sapiens
gcctgtcagggacaagtacactccaccggctctcttctcgctttgcagccctagcttacgcgtgtcagccccaggtttgctccagctattcacaagcagaatataacacaagaaaaacaatt

SEQ ID NO: 447137 - DNA, 122 bp, Homo sapiens
tagaagtgacaggatagatttaaattagaaaggttctattaaatcaaccgaagtcaaagccgatttcactccaggaactgtatgcataaaaaggtgtaattatgaaaacttgatattctgct

SEQ ID NO: 447138 - DNA, 122 bp, Homo sapiens
ccgtgtaagtgttcctgaaaacctgccagtaggcacaccagtgttggcagtgactgccaccgaccaggatgaaggagtccacggggaagtaacttattcctttgtgaagattacagaaaaga

SEQ ID NO: 447139 - DNA, 122 bp, Homo sapiens
cgctccagacagaccactgacaaagctcttaactctctttgtcctggcccatccagtttccgggttaagggaaggggaccacgaagacaggggtggggcgtgctctaattctgcagaaactc

SEQ ID NO: 447140 - DNA, 122 bp, Homo sapiens
acaggattataaagagatatcaaagcacgattttagataacctaaacggcccagcctatacgaagttgattatatctcgatgtctgtaaaagattgctgttcttggagtcttgaggtcttgt

SEQ ID NO: 447141 - DNA, 122 bp, Homo sapiens
tccctgacatcctccaggctggcttggggatactctggggacacacagtgcccaggcttccggcctcccagccctggctccctgtggactcagctgcccccaacaagcctgcgagccactgg

SEQ ID NO: 447142 - DNA, 122 bp, Homo sapiens
ccggaaattttttccggggccgcgacctcggctcgagaaggtgctttagtctgaagatggcggcctcagcagcgagaggtgctgcggcgctgcgtagaagtatcaatcagccggttgctttt

SEQ ID NO: 447143 - DNA, 122 bp, Homo sapiens
tcaggtgattaattagccggcctcagcctcccaaagtgcgggattacaggtgtgagccaccgagcctgccctgtgggaggtattttatgtccttgcttttgctggcttctagacactgcccc

SEQ ID NO: 447144 - DNA, 122 bp, Homo sapiens
agacgcccaggagggactagtcgcgagagagggcaggaggccagctgggtacccggccgccgcccgtagccccagctcacagcccccgctcactcctgcaggtgcgggggcgggaaccgggt

SEQ ID NO: 447145 - DNA, 122 bp, Homo sapiens
gatggaatgaatgatggaatgattgaaggctgagggagtattacaaaattagtaggtcagcgcctcgtgtctaaagggctcacatgcagcatgaatgcaggaagcttctggacattcctttt

SEQ ID NO: 447146 - DNA, 122 bp, Homo sapiens
ctcaagcccgggttcaggctctcaggggagctggcagaaccaggagcgaccacactcactcgcggtcccgcagccccgccgacacccaggcgcgtgactccctgagccgtaccaccacccaa

SEQ ID NO: 447147 - DNA, 122 bp, Homo sapiens
cacacacaaccaggcctggggcggtggctcatgcagtaatcccaggattttgggatgccacgactggcggaccaccaaaggtcaggagttcgagaccagcctggccaacatggtgaaacctt

SEQ ID NO: 447148 - DNA, 122 bp, Homo sapiens
gcactcgccagagcactggggttgcagtagttgctcgatacatgccagctttgcccttctcgagtctgactgaggtcatgggggtaaagggagcctgtgagagcagtgagggcgcgtcccac

SEQ ID NO: 447149 - DNA, 122 bp, Homo sapiens
cacgctgcttccggttctgtaagtttaccaaagatctcgcgagacctatgtctctcggagcgagaggggcgcggagtttgagcgaggggagtaaactgggaaataaatttatggctagtgtc

SEQ ID NO: 447150 - DNA, 122 bp, Homo sapiens
caggaagcttagtcttttgcagtttttacattttggcaacaccaatcaagcacctctttccgtccttaccccaattccttggacactaaagagtctatattcaggcgactctttcaagtgta

SEQ ID NO: 447151 - DNA, 122 bp, Homo sapiens
ttgggatcgtagtcaggacggaggggtccgcgggatggggacagcgccgagaggcggcctcgagcacggaggggacgcgggggccggagggaaggacggttcccggcagcgagcagtctccg

SEQ ID NO: 447152 - DNA, 122 bp, Homo sapiens
ctagccttgttctagtcagtctacagaaacagaacagcaaccatttgctggtcccacttacgtctcaaatgaatcccagcaaatgatgtgtcattgaggataatacatgttgcagctacata

SEQ ID NO: 447153 - DNA, 122 bp, Homo sapiens
tgttcaggaggatgaggcacgagaatcgcttgaaccctgtaagtggaagctgcagtgagccgagatcatagggacatcatagagacctctacagaggtgatacgaggtctcaaaaaaaagta

SEQ ID NO: 447154 - DNA, 122 bp, Homo sapiens
tgcgcagcgagctgacccgggcttccctagcgaagcgcgtaggacccgcctcttcttgtgcgtgttgtcttgaatatcgccattctgctggcaacagttcctgttctctttttaacctaaaa

SEQ ID NO: 447155 - DNA, 122 bp, Homo sapiens
gcccagcttacggccactccacatcgcgacaaacgatcccacctcttttccggtccctcccgaaaaaagatccccaacataaaggttccgagatcactttcgccgtctgcagccgacttttt

SEQ ID NO: 447156 - DNA, 122 bp, Homo sapiens
ccggcggggctccaatcccttaataggcggttccgggccgctctggtcacgcccctgacccgcccctcaagacctggccttagcctaatctcagggtttgccccaccccgaatccgcccctc

SEQ ID NO: 447157 - DNA, 122 bp, Homo sapiens
gtcggccctgacttctcattttgcccattctccaagggtctgtttgcattggtccctccccgtttcatccacagccaggtccctgctgctccctccttcatccacagccagttctcatccag

SEQ ID NO: 447158 - DNA, 122 bp, Homo sapiens
tgaagcttttgcagctccttctaacccgatttcaccgtgttggaaatgttgggggtggggcgtaaagggggccatcccatccacagaaagagtcgcttgcagaaatgattttaaaactcccg

SEQ ID NO: 447159 - DNA, 122 bp, Homo sapiens
gtaaaatggaactagtaatacctactgtatcacttgattgttgagaagattaagtgaaatcggagtgaaatggattaatatatcattgtctgaaaattgttacactagaaggcaactcctta

SEQ ID NO: 447160 - DNA, 122 bp, Homo sapiens
tctcagtattcacacccttctgcaatcccctccctttgagcgtggcctggacctagtgcccgacatctaatgaactgagtacagcaaaagtgatgggaggttacttatcagatcaggttata

SEQ ID NO: 447161 - DNA, 122 bp, Homo sapiens
tcactcaatcccctcctcaggccctccacttgtctccatccgtcactgatcacatagacccgcagcactcagccaggcccctcaccccggctctgctctcaagccgggcttggctccccgcc

SEQ ID NO: 447162 - DNA, 122 bp, Homo sapiens
tagccacagatttacactccactgtctctaaaacatgaccgaaattttaatttttcatgccgttccaaataatactctgagaatttaacagtgaaagtaatacagaatatcaaattatgtta

SEQ ID NO: 447163 - DNA, 122 bp, Homo sapiens
ggaagaagacatccttgatgaaggagatgtttttactttggagaaggactgcctcagccgcgaaagaccaaggggtggcaccacagggagaagtctgcactgcgcttgtcaggacggccagt

SEQ ID NO: 447164 - DNA, 122 bp, Homo sapiens
catccctgtgcctcagttcccagaagcacagcaggcctctaggagcatccgtgggaacggcgcagtcctgacatcaccaactctcctgctcaggctcatcccatatacagaggtcaaagggt

SEQ ID NO: 447165 - DNA, 122 bp, Homo sapiens
tgatatgacacttcctaaggtccaggaacagtcccaagcacttgaaacatttaactctcacggcaatcctaagaggaaggtagtgttttgtccccattttccatataagggactgggcacag

SEQ ID NO: 447166 - DNA, 122 bp, Homo sapiens
ccgtcgtttcccagagtgacgtgtacgcagagcaatcatggagtccagcccagccgggggcggggctcaggcggctccctacgcttcctactccagctggccccgccccacgcccgcaactg

SEQ ID NO: 447167 - DNA, 122 bp, Homo sapiens
gcgccggcggcggccggaagtagccgaagccagcggcggaagtagccgaagcggctggagcgggcggcaaggcgaggcgaaagctgcacagggccctacgcggccgcctcagcatgtcggac

SEQ ID NO: 447168 - DNA, 122 bp, Homo sapiens
cagaagatctggaattcatactaagatcttatcccaaagcctgcgtgctctcaaacattgcgtctattatggagggcttgacaaatgcaaggcaaacgatttaatgaatgttgtctttaagg

SEQ ID NO: 447169 - DNA, 122 bp, Homo sapiens
acataagcacagccgctaacgtgtttaactgccaaacttactgtgcgtgcccaaggatgccgccaatccaacatcataaacccttccggcaaacagacactgcccgtgcctctgcgcggaag

SEQ ID NO: 447170 - DNA, 122 bp, Homo sapiens
ttataaatctattaggtactattattattcccattttacaaatgaaggaacagacacgcccgagagttcaaataactttgctcaagatggtaagtggcagaaccaggattcaacccttccag

SEQ ID NO: 447171 - DNA, 122 bp, Homo sapiens
atcaaaagttattagagaggatgaagcattagcttgaagcactacaggaggaatgcaccacggcagctctccgccaatttctctcagatttccacagagactgtttgaatgttttcaaaacc

SEQ ID NO: 447172 - DNA, 122 bp, Homo sapiens
gtcctcctagggtatgggggcctcggaatagcggtgcgctcggggtctggcggccagggccgggaagccgagcggaacgccccgaggcgggggagggtgacggcttcgcactgcgcctggga

SEQ ID NO: 447173 - DNA, 122 bp, Homo sapiens
cctgggaactcggcctcctgcgagggacaagcgtcagagcccagtgaaacccgagggtgccggtcccgccctcggggtaaggctgaaggggaggggaatcctgcacccactaaaatctggtt

SEQ ID NO: 447174 - DNA, 122 bp, Homo sapiens
ggagacgtattttagcttttgtggtctttgggactaaacagtagtaaataatgttttgctcgtctttccatcgtttggcttgagggagggagtggagtattataagactctggcaacactgt

SEQ ID NO: 447175 - DNA, 122 bp, Homo sapiens
gctactagtttccggctagggaaaactggtggtggtcggagactggtagtacatcatccacgcattcgctcattctaactgtccgcccgaccatacgtcaggctgtctatcggtccacccaa

SEQ ID NO: 447176 - DNA, 122 bp, Homo sapiens
acatcctgtcagtgctgggaaatgcgagtgcgtgcgcttgaccctgtgcggagacggagccgcttacttgacccctgtgcagagatggagctgcttagaagctgtcagcaccagggggtgcg

SEQ ID NO: 447177 - DNA, 122 bp, Homo sapiens
gtttggagtcagcggaggacgctggaacaactcttgccctgcgatgccgggtttttgcagcggctgagacccagcgcgtaccggttgccttccactcccggtgtcctgagttaagcgaccaa

SEQ ID NO: 447178 - DNA, 122 bp, Homo sapiens
gctgccccactcatatgtgcacccaggacactgggtcacccttgtcactctctcccccctcgggacccatggccatcatcagagcatccacaggtgctccctaaactcagacctccccatcc

SEQ ID NO: 447179 - DNA, 122 bp, Homo sapiens
caaactcttcggtatgcagaaaggcagtgaactcctcccgagtggctgtcagggcgccatcgaggtctgcagctttgaatcttctctcgtcacgcggcagcatctttttaaaggtgtaatga

SEQ ID NO: 447180 - DNA, 122 bp, Homo sapiens
ggatcatgtgcggaacagccacgcatggtccgtgaaatgggatcatgtgcagaacagccacgcatggtccttggtgtgtgacagatattgggtccctctgtggtcccaggcagacattgccc

SEQ ID NO: 447181 - DNA, 122 bp, Homo sapiens
tagcagggctcagggccccagcggatgcagcctgacactcgtggtccagcttcctgagcacgttcttcgagccacatattttgaggacctactgcgtgctggccagtgctcggaggcttacg

SEQ ID NO: 447182 - DNA, 122 bp, Homo sapiens
tacacagttcaaagggcatcaacagtcagagcctctttcttagctatcctgtagattggccgtgagttggtagtactccagagacagaatatgacttgtcgtcaagctaattagtggcagag

SEQ ID NO: 447183 - DNA, 122 bp, Homo sapiens
catcttcatctcaggttggtagggtgtcactggctccttgctttgtaaatttgggaaggtcgtggttccctgtttgatgttgtttcttacagatgtacatttatgtcttcatattgatttgt

SEQ ID NO: 447184 - DNA, 122 bp, Homo sapiens
gcgattggctcccggaggaggtggctggtgctgccgccgctgcagcatctcctagggagccgcgaccctgcgcccgccgccgctgccgctgtcaccagcccggccccaggggtgccctgggc

SEQ ID NO: 447185 - DNA, 122 bp, Homo sapiens
atatttgtttagttgcagaccatcattctttcttcataatctcttttacattccgtcctccgcccttcccactattctttttttttgttttttgttttgaggcagaatctcactctgtcacc

SEQ ID NO: 447186 - DNA, 122 bp, Homo sapiens
catccgtggtgttcgaagcaggacaaggctgcctttgggaggtagtgatcggcagggacacgggaagcctctggggagctggaaacgtcctgcaccttgatcgtggtcacacaggtgtgtag

SEQ ID NO: 447187 - DNA, 122 bp, Homo sapiens
cctctgccctgctaggagtccagccccaggcggaggagttttgccccaggtttctgagtgcgccctcagctaacaggctcccgcgaccctggaagcggaactttgttgcactccgcttccag

SEQ ID NO: 447188 - DNA, 122 bp, Homo sapiens
atccagagaaggcgggcgggcagcctggtggtcccctcacacacctgggagtggagtggacggaggaggtggccgcggggccgggaggagcaccggcggcgcgagcggagaagctgagcgcg

SEQ ID NO: 447189 - DNA, 122 bp, Homo sapiens
aatgtatttttagaatatcttcccatccacacattgaacctctcccatgaataatgtgtccgtgttctctttctctctccacatatacacaaatacagtctcctgagccaacccagtaaagt

SEQ ID NO: 447190 - DNA, 122 bp, Homo sapiens
tgtagcagtgcattgagagtcagggcctctggcacctccatggggctcagggtctgaagacgtgatccaaacctgacaacttggtggcaggttctgtgagcattcatgatgttgtgaaaagg

SEQ ID NO: 447191 - DNA, 122 bp, Homo sapiens
ttctagccccgcctcctagcaacaagactaacaaagtaccgccccctagcaacgtattatcggaggcggggctcggtttacctagactccaagtgtccagggcctttgagcaggcgcagagg

SEQ ID NO: 447192 - DNA, 122 bp, Homo sapiens
agattattttaaagcacagtgctgaggtcacacatgtactggcaacttctaatgcaagaccgactagggctagatctctttgaggctccctgaccacacgtccaacaactcctccctcagtt

SEQ ID NO: 447193 - DNA, 122 bp, Homo sapiens
ccctcctcgctgcgtgtgggcgggcggacagccgggagcctgagagtcaaccccagccagcgctctcctcagaagacatccgctcctgcctcggtgcgcgcacaatgcaggctgcggatcag

SEQ ID NO: 447194 - DNA, 122 bp, Homo sapiens
gggcccgtttgcttggtgcgtctggaactcctcgggcggcgggcgtctcgcaggaaaaaccgcggcccgtactgcgccgggagcagaagcgctggtggccctcgtaggtcccgtgggctgcc

SEQ ID NO: 447195 - DNA, 122 bp, Homo sapiens
ggagtcacttatgaggggaatggggagcagggcagcagaggcccctctgctgctgggaaccgggcgcactcccgccagtcgcaggagctggctccacccgccccttctgatccagtgtcccg

SEQ ID NO: 447196 - DNA, 122 bp, Homo sapiens
cagaaacgaaggacagtactggatcctacacacactatacgcaacagtaggtcagatcaccgaggcagctattaagtgactaaggggtgggtagtgcatacaatgtggaaatgctggccaaa

SEQ ID NO: 447197 - DNA, 122 bp, Homo sapiens
ggcactctgggactgggctctgggcggcttttttgcgagtggcgggccgactgtgtagtccgctccggcagcgcgctctgcccggcttcctcagtctcctcgccgggagcgtccgggagcag

SEQ ID NO: 447198 - DNA, 122 bp, Homo sapiens
attctcccccttttcttgcagggacccctgtggcaaaggattagggccccttagccctggcggggatcctaagaggcagtgaggggtgggggccggcccatgtacagccccagggttctcgc

SEQ ID NO: 447199 - DNA, 122 bp, Homo sapiens
cggggggaaagtgcaggttccggccgccccacgccgccgcgctccgagcggccgccgagccgccccggccccggccccggccccagccttagcccaagcccggctgggtcccgcgaggctgc

SEQ ID NO: 447200 - DNA, 122 bp, Homo sapiens
gccttcttgcagtagcttcccctggagaagaggaaaagcaaaccttcattgagacccaagcggtctctcctgtgctctgtgacaataataaagttccagcccttggctcctgtcctgtttct

SEQ ID NO: 447201 - DNA, 122 bp, Homo sapiens
cggtcactaaacatccgcgagcatcctgtcagagctctcagctcattggcgaaagtaaaacgccaaggaaaagcacctccctttttgggcgtggaaagatggcggtaaaagccacaatgcgc

SEQ ID NO: 447202 - DNA, 122 bp, Homo sapiens
aaaagccggaaaatatcccagcttttaaggcacactgacagccaaacagaacgctctttccgtttgcagtttttttagtgtcattttaagttgcagcttccggccaatcagcgagcttcatg

SEQ ID NO: 447203 - DNA, 122 bp, Homo sapiens
cgagagcccagcaaagcagacacacaggcggcgagacgtcaagaggagcaggcacatcaacggaaggagacacaagcgactggacggcgagaggacatcaagggggcacgtcgagggaaggg

SEQ ID NO: 447204 - DNA, 122 bp, Homo sapiens
aaagcctggagtaggccgggaagggtggttggaggaggacgcgcctgaggtggcctgcagcgggagagcccagggaagaaaccagaagaatgagtgggaaatgcctcccttaatctttatga

SEQ ID NO: 447205 - DNA, 122 bp, Homo sapiens
gtggaggagcaggggctggtatgcgctgggcagcgagagcctcatggcggaggaagacagcgatcaaaaggccgaacgcctcagagaagagcttgtggccactgtggagtccctgctggccc

SEQ ID NO: 447206 - DNA, 122 bp, Homo sapiens
acctggcttcgagttctgagagcagggaggagggtgcctgattgaaaaaaaggtaacttacggttcagtaaaatgggtgccacgtatctgagtgtgccctgtctcaggcctacaatatagac

SEQ ID NO: 447207 - DNA, 122 bp, Homo sapiens
tgggatagaaggtggacttagaacatagcaaacatacatcttgattgaatcagcccactgcgagcacggatcttgattgaatcagcctattggtgtagttttaggtctacatacatcttgat

SEQ ID NO: 447208 - DNA, 122 bp, Homo sapiens
atgcacttacaacccaaagccattaccgagataaggtttgttgccccatctgggccctcgcgtgcagagacttccccgcctcagtctcagtactcttccctgttcactcacccgctgccccc

SEQ ID NO: 447209 - DNA, 122 bp, Homo sapiens
ctgtgggagctggggctggcctgggctgcgtcgctgaactgggaggacacactgctcacccgtgaaggctccggtggaccctctgcccggttgaacaaggacttcgtggccatgtgctggcg

SEQ ID NO: 447210 - DNA, 122 bp, Homo sapiens
ataagaagagaggacacagagacacacagggagaagacagccttgggaagatggggtcagcgactggagtgaggctgcccaggaatgtctggagtcaccaggaactggaagaagcaaggaag

SEQ ID NO: 447211 - DNA, 122 bp, Homo sapiens
gaaagcttgttctcatctggcctctttgctatttttagaaaggtaggtgatctttaaattcgtattgcaaggaaatttgtcaaaatgtattcttctaagtggcataagctccctcctaggcc

SEQ ID NO: 447212 - DNA, 122 bp, Homo sapiens
gtcttctgacaatcttgagcaataggctgaaaattaattacaaggaacagcactcacttacgagtcattcaggggaaaacagtgctctaaaggcatcgcgctaattactgaaggaacttcag

SEQ ID NO: 447213 - DNA, 122 bp, Homo sapiens
cttgacccccacctccactcaaacccgctccatctattaacgttctcttctgcccagccacgcccccggcgttctccgtggttgcgcacctgacgtacatcgttcaaaacgtgcccagtgtt

SEQ ID NO: 447214 - DNA, 122 bp, Homo sapiens
tcagggagatgactggttccgtctaattggggcagcctcagttttacagagcgaagaggccgagaccctaacaagaatcaatgtagggcttttaagtgttaagaggggactccaccagcaga

SEQ ID NO: 447215 - DNA, 122 bp, Homo sapiens
ttacaggtgcgagccaccgcgccgggcccttttccgacatcttaaacgtaaagtaggagacgtgtcataatcatcgaatactgcagtggttttcattagctcctgtttgtcaaacttatgaa

SEQ ID NO: 447216 - DNA, 122 bp, Homo sapiens
aggagaacttccagtacagaaaacaaaacaaagacgctggggaaacttcaccaagagcctcggcagctccagagcgacgggaaacgaaaggtcagggggtcgatcggcaaaccctttctggt

SEQ ID NO: 447217 - DNA, 122 bp, Homo sapiens
catctcccccacccgacttgctggggcgcgggcgcccaagttcgctgttgctggagagggcgccaagtccccagagctggcgaagagttaggggtgctcccagctctgcctggggaccttct

SEQ ID NO: 447218 - DNA, 122 bp, Homo sapiens
tgtgtgcaatttatggtatagctgggaaacgtcaaagtcaagagttttgtaggaaagtcacgtcacttagccctgtctcctgtgccgggtgagacctgtgtgtgcacttggtgacaatggct

SEQ ID NO: 447219 - DNA, 122 bp, Homo sapiens
gccaggcgtggtggcacatgcctgtaatcccagctactcgggaggctgaggcaggagaatcgcttaaagccaggagtcagaggttgcagtgaccaagatcacgccattgtactccagcctgg

SEQ ID NO: 447220 - DNA, 122 bp, Homo sapiens
tcagccaggggctgcagccgctctcagcaaatgaaccccatggagctggtccggccactccgaagctgccagctcagccagcgctggccaacagtgccccctggtggctgctgccgcctctg

SEQ ID NO: 447221 - DNA, 122 bp, Homo sapiens
tgcctacatcttccccaagaagggcagtcccctgggcacgggttcccttcgaggaggggccggagtgactggaggcagaactgggatggggcaggagctgcctctgccccgacatcatccag

SEQ ID NO: 447222 - DNA, 122 bp, Homo sapiens
gtgactgaacagtcatcctgctttggtttcaggtgtgggatttggaccatgaggggctcccgtagaggatggcggtttgtgtttgattctgatttgggatttcagtacatattctccacttc

SEQ ID NO: 447223 - DNA, 122 bp, Homo sapiens
cttcaaacctccacacctgtaaacaaaaaccgaaaggccaacatttcttttcactttctccgcacttaagctacctcttcttatgtatgacagaacttcctcttggacacgaaagtagtatt

SEQ ID NO: 447224 - DNA, 122 bp, Homo sapiens
gctctcagctctggaaccgcctgataaacatttggactccgctcaaaccccgcgctgtcccggctcctcgtcatgcgcgagagtttgttgtttcttcgacttcccagctctccagcgctctc

SEQ ID NO: 447225 - DNA, 122 bp, Homo sapiens
ctgggattgtagagactgtgacccatgcagacagcaaaggcagggagatgcagcatgcagcgcagcatggcaccgatactggcagacactttagtagacttagggactttaactgcagagaa

SEQ ID NO: 447226 - DNA, 122 bp, Homo sapiens
gatcgggcagggtgatatggctgtaggcgctggcagtggcgcctggatgccgcaagagcccggcactgccacgcccgccggactccaggcatcatcgccaccccggggctgcggggcttgga

SEQ ID NO: 447227 - DNA, 122 bp, Homo sapiens
cgttttaagtctccaatcctgggacgaggcccatttcagggttttctgtcaccttctagccgcccgccaccccagaggggtgccagatgccccagtttttgagtgcatgcaggcaggcgaaa

SEQ ID NO: 447228 - DNA, 122 bp, Homo sapiens
aaaaatccaaagcagagcattatcttgcaactggctgaattacaaagcaagttgagctttcggtctggcaggaggtctacagttaaaatgaaggcatttaattgaaaaagaatgggatcctc

SEQ ID NO: 447229 - DNA, 122 bp, Homo sapiens
gctggcattgccttctcctaatgttcccggggtggcccggctggcattgccttctcctaacgttcccggggtggcccggctggcattgccttctcctaacgttcccggggtggcccggctgg

SEQ ID NO: 447230 - DNA, 122 bp, Homo sapiens
aggcattctgggctttgtagtccgggcctacttgtgacaaaggcgtgttcatcaggggagcgcagctaattagcatccgggctcagattggctggggcggggacgaaatcagagggggaccc

SEQ ID NO: 447231 - DNA, 122 bp, Homo sapiens
aagagcaaggtccttcagttatttcttattttttatccccagcacctagctgggttccctcgccctagccagtctttaataaatgcttcttggaatgaaagaatgagagcctgcccagaagg

SEQ ID NO: 447232 - DNA, 122 bp, Homo sapiens
ccgcggtcccccgccccccgccgccggggaaggacggagggggcggcctgggatcgggtgcgggactgggagttctccaaggtgctaaaataaacccagcgaaggatcaggtttcccgacca

SEQ ID NO: 447233 - DNA, 122 bp, Homo sapiens
attaataagaataacaacagctgccatacatacaggcagccctgaccacgtgcctggcatcggcagcacattattattatttgagacagggtctcactctgtcacccaggctggagtgcagt

SEQ ID NO: 447234 - DNA, 122 bp, Homo sapiens
ctagcatcgcagagtcaccaagaaagcgaggctggagctccactctctctgtgggtttgtcgtcacgcagtgcagctttctcacagagtggatcaaagactcaccacactttaaaaaaagga

SEQ ID NO: 447235 - DNA, 122 bp, Homo sapiens
gctgtggggcgccttccccaggatttgcttgacttgcttttcgctcgagtgggtggtgcgcgggtgcgggaggcggagggaggaggaggggtgaggggaggagggcctgtggggctgcggac

SEQ ID NO: 447236 - DNA, 122 bp, Homo sapiens
ccaagagcctggtcactacaaaggccatatccaggtttaaatatcagaattagaaagtcacgttggtaccctaaaaaggcatctgacttgcacaggaatatttgcttttgcaaatgaacttc

SEQ ID NO: 447237 - DNA, 122 bp, Homo sapiens
agtcctgaagtaggacatggcttccccaaagccccggtttgtgagggaatagtgatctgccgcctgtcctcccttcttcacccttctagaatgtcacctcatagaccctccccttcacactt

SEQ ID NO: 447238 - DNA, 122 bp, Homo sapiens
acagcagcggggcgggcggcgactgcggcggcggaagtgattgtgaagtcagctggagcccgcctccttgatgtggcgggggcggcagctgctctccacaaatcagggtgggcccgaaagca

SEQ ID NO: 447239 - DNA, 122 bp, Homo sapiens
gtctcggaccagtccgcccggtctgactcttgtggtcccgtgtgggtttcgtcgagtgtgcgctcggggccggggcgggaggggcagctcctcattccacctccaggaaatcgaactggagg

SEQ ID NO: 447240 - DNA, 122 bp, Homo sapiens
gcgacagcagcggaggctgccccggctgcagcggctgtggctgccgaggctgctggggcccgcgctgctgccgcggagacgacggtcgtagcttagaggagccgcaggtgccgctcgcggag

SEQ ID NO: 447241 - DNA, 122 bp, Homo sapiens
ctagagaccgctgtagggaggttgtgggaactgttcagaacggcttaatctgggaggacacgacttccactgagaatgcatgcgctgaacgacaattcgttttcacctcaaaaacctgtact

SEQ ID NO: 447242 - DNA, 122 bp, Homo sapiens
cggcgcataactcttgcgccccactcgggagtggggctgcggtggggaggctttggtccccgcacctccccctcccccagcgctgtccctcggcctgagccgaggcggcccgggggtggcgt

SEQ ID NO: 447243 - DNA, 122 bp, Homo sapiens
gcctataggggtgattatttttccttgtgatggctgtaagggaagcagaggaaaaggagacgtcaccctcttgggaatttttgaagcacagagtcattctttcaaagtacaagaaagttttc

SEQ ID NO: 447244 - DNA, 122 bp, Homo sapiens
atagcgatgatcccatctctacaaaaaataattaaaaatttagccaagtctggtggtgcacgcctgcagtcctagctactcagaaggctgaggcgggaggatcacttgaccctgggagacca

SEQ ID NO: 447245 - DNA, 122 bp, Homo sapiens
atgggagggaactcgagtagaagccagcgctgcggggctcttggtgtggggttctccgcgcggaacccggaagtggagttcgggtccccagagctcgcgagcgcgacggctggggttggtcg

SEQ ID NO: 447246 - DNA, 122 bp, Homo sapiens
ggcactgtgcagggccagggggtctgggagagcgtcagaagctgctagggcctgtcctcccggaactgggccactgtgggcctttcatctcccgcctccctttccgcgccactcctgcggct

SEQ ID NO: 447247 - DNA, 122 bp, Homo sapiens
aaagaagttaagtgcctcttcaccaagaatgctgcatcggagcacccagaccacaaacgacggcgtgtgtcagagcatgtgccatgacaaatacaccaagatcttcaatgacttcaaagacc

SEQ ID NO: 447248 - DNA, 122 bp, Homo sapiens
gcctacacttgcatgactcacatcactcagtgcaccatagtgcagattgtggttgtaaaacggtcagttaggtctttcaagatacacttctccagttgtgccccaaaaggatattaacaatc

SEQ ID NO: 447249 - DNA, 122 bp, Homo sapiens
atgccagttctgtgactaatccaaatcaaactaaaaaattctataactgaaaaatgagtgcgcttttaacattttccactaaaagccacaaggaaatctggtgtactgcctctgctgactaa

SEQ ID NO: 447250 - DNA, 122 bp, Homo sapiens
aagcagtgggcgggaacccatccttggctaggtttacagtgctgttgaaggggctgatggcggctactgtttgtttttaccgtctctcgctctctctctctgataattccctccaagttgga

SEQ ID NO: 447251 - DNA, 122 bp, Homo sapiens
caaggctcaacggagagggagcccgggaccgagttgtggtgggagtttgctcctaacacccgcgaaatcctacctcaattcctcagatggcctgagggagaaaccggagggcccgggaatgg

SEQ ID NO: 447252 - DNA, 122 bp, Homo sapiens
aaccaacttcccgctgaggtgccagaagcagcgaggagcttcagcttcctcagggcagcacgagggtcgtgttaacttggtgttcttcattggtgagtaaaaagctcctgtccacggccctg

SEQ ID NO: 447253 - DNA, 122 bp, Homo sapiens
agcacatggaggctctgagtgggtcagccctccggatcgggaagggattaccgttcttcacgggatttagccctggcgtcttgcctagggcgtgcacctgcccccgggtgttctcccagact

SEQ ID NO: 447254 - DNA, 122 bp, Homo sapiens
tggcgaccgcgttggctgggtggcctccattgtcgggctgctgctctcagcggcggggctcgccagcgcttcagtgggcggggacgcggcaggtgagacggggcgggtacggccagctcgct

SEQ ID NO: 447255 - DNA, 122 bp, Homo sapiens
agttcccgagtcacgccagtgctcgcccctttggcctttgcctaaaatcctgcgatgcctcgctgacaaagcacccagtgccagagcctgcggcccagcgaagctgctccctggaaacacac

SEQ ID NO: 447256 - DNA, 122 bp, Homo sapiens
aactacttcaggaagggagtatccacgggtaacaaagaagcccaccaatcaatttgctgccggatcagaaagcctgcctagttcccttccaggctggtcctcttgtgacctcaactctcacc

SEQ ID NO: 447257 - DNA, 122 bp, Homo sapiens
ggcggcggcgggagcagcgaagggggcggcagggatcctccaggctgccggctgggaaggcgtgggcgacccggtgtgtggcgcgcccagagccccgcgtttcagccctagggaaggtaagg

SEQ ID NO: 447258 - DNA, 122 bp, Homo sapiens
gtgactgctgctcccaggacagagcgtttctggttcaatttctcccgaaaccaatgccctcgtcgtcggccggagcagggttggaagaccatgccagcgcctaactgctccccgaaagacgt

SEQ ID NO: 447259 - DNA, 122 bp, Homo sapiens
ggataagggtgccttcctcccacgtggttgggattgcccggggccatgtgtggacatcagcgcagcctggggatacaccagctctcactcgggtattgctgtccctggggagacggaaggag

SEQ ID NO: 447260 - DNA, 122 bp, Homo sapiens
atagctgtgggaagaggttgcctgatttctggggctcctggtagggtctctcttctggagcgtggaagactggggcatcctcgcgtagagagtttcactctgtctttgcgaggtctcagcgc

SEQ ID NO: 447261 - DNA, 122 bp, Homo sapiens
gtcgaccgtcagtgcggccactgcaaagcgatgtaaatgtcccagagtggggcagctggtcggtaagacgatgtcacagacgcctgggaagaggaatgcactggataaaacgctgcgtcact

SEQ ID NO: 447262 - DNA, 122 bp, Homo sapiens
gcccggtgcagaggggccgcgccctctccggtcacggacagtggaataaagccaaccatccgctggcgaattttgtagactcaaagaccacctgtgaggaaagtcaggtcgcccgaggcccc

SEQ ID NO: 447263 - DNA, 122 bp, Homo sapiens
gagctgcagcatcttgaatctgtccttataactcaggccatgctcagcttttggcggcctcgcaaaaccttttccccgcaccagtattcccggcttccatttggccccagctgtctcccttc

SEQ ID NO: 447264 - DNA, 122 bp, Homo sapiens
ctcccgtactgtcattggcctggcgccagccgctggtgcacaggcagggcctggggatcgcgagtttctgcccagcctctcgtcaggctgagggtccagggcgggaaggagagcggatctcg

SEQ ID NO: 447265 - DNA, 122 bp, Homo sapiens
gctgaaactctacccccaaatgtgatggcattaaggaagttgggactacgggacataattcgacttagatgaggtcatgagagtagggcccatatgaattggatcagtgtctttataagagt

SEQ ID NO: 447266 - DNA, 122 bp, Homo sapiens
atgctgaaaaaacccaacagggttgagtctgaatgctgctcccatcactgctgggtgacacgggggccccacggggcacaggtgccggcccaggctgcacacttcacacacacaagctggag

SEQ ID NO: 447267 - DNA, 122 bp, Homo sapiens
aaacagtatgcaagatgtggtacctgcactaccctgcccttgaaactgtttggcttcttacgttctgaccacctccaaacccacaatatttgaaaacacagctttccctgatgtctggcatt

SEQ ID NO: 447268 - DNA, 122 bp, Homo sapiens
taagtgctgcctggagctttgggtgtggcagcagcaaagacctctacccttgtggatgttcgtttcggggtggaaagacagatagcaaagttggtcgtaaactgtagagtgtgctgggagga

SEQ ID NO: 447269 - DNA, 122 bp, Homo sapiens
ttgggtaatgcgcacaagaaaatcaagaggattggtcggctgcagagaggcggcccgtaacgcgacgcgaaagaagtggggcatagcggcccggggaattcttgctagcttccgattggacg

SEQ ID NO: 447270 - DNA, 122 bp, Homo sapiens
tcctgggttctttcactactgcctggagcacaggcagacggaactcacagaagagctggacggtccggctctggcccgactgcgtaattgtaccgactgacattctgtgtttaataatcaag

SEQ ID NO: 447271 - DNA, 122 bp, Homo sapiens
acagtgaaagtgttcaggacattgccaaacctctcccagagtcaggcgtgtaaaccagcccgagcggcggcggcagctgcaggaccgccgtgacgaccagagtagcgacccgcggggagcgg

SEQ ID NO: 447272 - DNA, 122 bp, Homo sapiens
cagaaagacaattactgcgcgttctcacttatctgtggaatctaagaaaagttgatcacccggaagcagagtagaatggtggttattggaggctgcaggtgcggggcatgggagagacactg

SEQ ID NO: 447273 - DNA, 122 bp, Homo sapiens
gaaggggtcggcggaggcaaaaggagtcctcttaaagagaacgcggctgcgaccattgcgcgtgcgcgcaggccggcgccccctggaggtgcgaagggccttcgggcgctgacagggagagc

SEQ ID NO: 447274 - DNA, 122 bp, Homo sapiens
gaccgtgttgtctgtcttacaaaagaccctgtgatatgagtttgtttcgacagtcataatcgcaaacataacgatgaaacgttaaagttgtctgctttcagacacgaatatagaaaaagatt

SEQ ID NO: 447275 - DNA, 122 bp, Homo sapiens
ccgctctgctgcctgttctgttgtgtgcactggaatattgatttttcagtgtgtgtgcgccggctctgtaaaaatcaatatttcagtagctcgagcacagcgcagggcagtgtaatggagcc

SEQ ID NO: 447276 - DNA, 122 bp, Homo sapiens
ctgcgttgacaaggagggggctcagggacagaaatctcagcgggaagacaacccctcctccgaagggaggcccatcagggcttcagagaaggggcagagaatcgcataagaggagcgtgtgg

SEQ ID NO: 447277 - DNA, 122 bp, Homo sapiens
ggaccctccagccgctttccccacaaatgagatctttgcaatgagcaaacgaaagtggcgcggatttcggggcgcccagcaggagcgagcgcagccgccagccgcaagtccgcagccgtgtc

SEQ ID NO: 447278 - DNA, 122 bp, Homo sapiens
ctagaagaacagcaggggctgcaaaactgtgccagggagaacaacaacaacaaaaataggcggtggtaggatggatctctgggattccagataggaaagcagcaccttttttttttttttgg

SEQ ID NO: 447279 - DNA, 122 bp, Homo sapiens
aaatataggtgagagacaagattgtctcatatccggggaaatcataacctatgactaggacgggaagaggaagcactgcctttacttcagtgggaatctcggcctcagcctgcaagccaagt

SEQ ID NO: 447280 - DNA, 122 bp, Homo sapiens
tatttatctactgttgattgacatttagattgcttcatttggggtttttatgagtaatgccgctacgaatatagtgtacagatgtacatatttctattgagtatatggttatctaatccgat

SEQ ID NO: 447281 - DNA, 122 bp, Homo sapiens
acacactcacggtggttctgtgggctggctgcatcccaactgacaccccagttcccagcacggtgcttggcacagtgtgtaacagaaggtttgaggggtggagaaccttgaagaacacctct

SEQ ID NO: 447282 - DNA, 122 bp, Homo sapiens
ctggtgatgagaataactaattgagggatcctcccgaaactctaccacacaacagttactcgctcccctccaatccatttaactgactttcttttccacctactaacattattgaagtttgt

SEQ ID NO: 447283 - DNA, 122 bp, Homo sapiens
gcgggcttgtagcgagccttgacctctgggcagagttgggtcaggtccaggaggtgcctgcgcgcccgcttggccctccttgtccttctggcccagcacatcctcgcctggcatttcgaggc

SEQ ID NO: 447284 - DNA, 122 bp, Homo sapiens
ccataaggattggggggggtcatgctgggtacctaccagtggctggatgtcttctgaggtcgtccagatcagtgcttatcttattgtgcataagattcacctggggaacttagtcaagtgca

SEQ ID NO: 447285 - DNA, 122 bp, Homo sapiens
ggaggaaggggaggcctgactgcacactgcagaggccagggcagggcagagagactcccacgcatgctactccagggatggggcctggagggaggctcccgtgcgtgctagtccagggcctg

SEQ ID NO: 447286 - DNA, 122 bp, Homo sapiens
acagcggcgaaccggactaatccctgagcactattccaggagaggcgagggcttgggccgcgcgcaggcgcagaccggatggaagccggggccactggcagcctgtaactggttcccctggg

SEQ ID NO: 447287 - DNA, 122 bp, Homo sapiens
agatctcccggatggcatccaggggctgtgtctcaaagatccagcgagttgcactgacgtcgggccgggccccctcctccagggaaatcccccggatcacccgcacctggctggggtcctgg

SEQ ID NO: 447288 - DNA, 122 bp, Homo sapiens
acctgccatgcacctgatgcttgtgagccccagatacgggaagagctgtcagctcctgcccgccccagcagccctggcattctggagccagaatgcgaccttagacctaaagagagtttttg

SEQ ID NO: 447289 - DNA, 122 bp, Homo sapiens
aggccgttgtcctgggttggggagcagtcgtctggatctagcctagcaaagaggctgtttcggatggggaggggatgaaaacccctgcggctccgacgcagatgcccacattgcccaggcct

SEQ ID NO: 447290 - DNA, 122 bp, Homo sapiens
ttggatttgtgacaatatcagtgtaaacgatttccatttagactgtgaattccgagtctccgtaggtgctccattttttcccaccttcgccccttctccgagcatttctagcaacactcggg

SEQ ID NO: 447291 - DNA, 122 bp, Homo sapiens
ccgccccaaattcccacctcctccagaagccccgcccactcccgagccccgagagctccgcgcacctgggcgccatccgccctggctccgctgcacgagctccacgcccgtaccccggcgtc

SEQ ID NO: 447292 - DNA, 122 bp, Homo sapiens
caccttagaccacaggaaatgtctggttaacacacgaagagatggaaacgctcgcagccacgccgcaaacggttagtcacgccccacagcctgcactcctcccagcgcgttttccacttaag

SEQ ID NO: 447293 - DNA, 122 bp, Homo sapiens
accatcgccctcgcctgcaggccgctggagtaacatgtacaagctaccctacaactggatcggcacaggccacgtggtgtaccagggcgccttctactacaaccgcgccttcaccaagaaca

SEQ ID NO: 447294 - DNA, 122 bp, Homo sapiens
gtcgacccttctgacttccatcccgtttccctgtgctggaagacgcacgccaggtggggtcgcaggttgtttctggtgccggcttaaccggcgcagcaccgaaacccgtagctgcgtgcggg

SEQ ID NO: 447295 - DNA, 122 bp, Homo sapiens
caggaaatgaacctagaaacagaaaatgaaaaggttgattgaaataaaacttgatcaacgcgactgtattttgaaacattccaggaaggttacttcttgtcaaacttgcctggcagtgtttg

SEQ ID NO: 447296 - DNA, 122 bp, Homo sapiens
ggtcctgagaggcctcttgctggtgagagggctgtagcttctagcttctacccctgttcacgtttaataaatataaatgtaaataaataggtgtataatacacatacttttctaaacctctg

SEQ ID NO: 447297 - DNA, 122 bp, Homo sapiens
ctcctgctccaggcattgtgggaggggctagcacaggatccggtcgtgctgccagcaatgcgcaggcacggggaacacctgtgggcaaattcacctctccacgtgccaactaccgccggccg

SEQ ID NO: 447298 - DNA, 122 bp, Homo sapiens
ccgcctcctgaagctccagagggccggggcccgacagtaccgggagaccgcgggctgggacggaactcctccaggaccagggcaccttcagattctcgagcggagatctgatcctcctcgcc

SEQ ID NO: 447299 - DNA, 122 bp, Homo sapiens
aagccttgtttggggcaaggccgactcctgcttaatgagtgccgctctgataatcggatgcgaacgtgaaccttgacctcgtgtcaaaggagaggacgcaataagctggatgaaagatacag

SEQ ID NO: 447300 - DNA, 122 bp, Homo sapiens
ccaaagtgctgtgattacaggcatgagccactgcatctggcttaccacatcactcttgagcgtggcataaacgcctcctgttcaccattgccccatagaataggattctagcttggcacatg

SEQ ID NO: 447301 - DNA, 122 bp, Homo sapiens
tgcagcatggacaggcctcaccaacgccacattcggtggaagaggccgggcacacaacgccgcgtggtgatggactccctttatatgaaatgtccagaataggcaaatccatagggacaaaa

SEQ ID NO: 447302 - DNA, 122 bp, Homo sapiens
ttttctgcttgcaaaagtggtgggctcagcaaggatacatttctgtggcaggattgaagacggttgtttaggtgaggcaaggcgcaaatgaccttagacctttcacccttattagatccctc

SEQ ID NO: 447303 - DNA, 122 bp, Homo sapiens
ccggcctcagtaatgtctgcgacaataaacctcaggcactatgtaaactgcggggcactgcgcaaatgcaccccgctccgacggggggggctccggtgctgacaggccgccgctcggcctcc

SEQ ID NO: 447304 - DNA, 122 bp, Homo sapiens
tgaggggcttagcacccgggccagcagctgcggagggggcgccgggtaccccagcactgccggcctgcctgccccacgctcgaattctcgcagcgcctcagccgcctccccgccgggcaggg

SEQ ID NO: 447305 - DNA, 122 bp, Homo sapiens
acgaccggggggctgaggccaggtatgctttacggcactgccgggcaatgaagcagcccgcgctaggagctggggacgaccacgatgagaacagaaggacacggggtcgggagcctcgcttt

SEQ ID NO: 447306 - DNA, 122 bp, Homo sapiens
taatgaatgagtgaagcaggctagtgtagacaaacgcaggagtaatagcaaatttggagacgtgtcctacttaaagatggaaaccactatgcactacttgggtcagtttcagcttactggcc

SEQ ID NO: 447307 - DNA, 122 bp, Homo sapiens
gcctgatgacttcagattcctccctgtaacagcactctaatgtcaccaataattgattctcgttggcactcttgctaaaacttatttgtcatcctggccaatttagaagcaaggagaatttc

SEQ ID NO: 447308 - DNA, 122 bp, Homo sapiens
cccctcccgagctcagccattcggagcctggggtgggcggggcttgaggcctgagtggagcgtaaaccctgattggctgtacggaaggcggcgacgtggccgaaggatgcccgtttgtgtct

SEQ ID NO: 447309 - DNA, 122 bp, Homo sapiens
aatgacctctttcatcttgaacacaaattcagtgtgtatcagtctgacacgtttcatacacgtgtacatgtttacccatgtttatggatgcttttttgctttatcatatatgtatccttcta

SEQ ID NO: 447310 - DNA, 122 bp, Homo sapiens
cccgcctccctgtggcccccacaccagccccgcctcctccccagtccccaccccgcccggcgccgcttcccggcctcagtcccaccagagccgcgcctccagcccccagtgctgggctagct

SEQ ID NO: 447311 - DNA, 122 bp, Homo sapiens
agatggaagcaggctcgcgtcccctacccttcctccaacccctaacctaagaaaagaaaccgatctcgccggtctcccccaatcctagccgcgagaccgcccagccccgcagcccgagcccc

SEQ ID NO: 447312 - DNA, 122 bp, Homo sapiens
ttacggtctctcgtccccggaggcagtgtctcctggaaagttcctggggcaccaagtttgcgcgcggctcctcgcgctcagggtgcgcgcagccagccctggcgcgggcggaaaggcgagcg

SEQ ID NO: 447313 - DNA, 122 bp, Homo sapiens
cgtttgggtgggtgtagtgtatttgtgtgcatgtgtgtgcatgttcatgtttacatggttcgtgtatgtgcctgcattcacatgtacgtctgtgtgcgtgtgtacttgcttttgtgtgtggc

SEQ ID NO: 447314 - DNA, 122 bp, Homo sapiens
acttaggcctggaccctagtgattggctgataggaggagccagcaagtgtggctgagctccggggtgtgtggacgccgctttgttgcctgaggtgggtggcggtggaagttaagggagtcag

SEQ ID NO: 447315 - DNA, 122 bp, Homo sapiens
ggacaaatgatgttcatcaaaatggcagccgtttactcaagaattaggcagaacccacggcgggatggacacttggacgtgctctcgggacgggctggctaggaaagctacagctgcagatg

SEQ ID NO: 447316 - DNA, 122 bp, Homo sapiens
gagaagagtcgagtgaagcctggcccgtgagtgcctcaacaactgagatgaacgtcgactcgcttgcaggcaagttgtcagtaagtatttattaaatacccaccgtgagccttgtactttgc

SEQ ID NO: 447317 - DNA, 122 bp, Homo sapiens
gagatatcttaatgaataacatcttctacagtcttccattgtttagaccttggagagacacgcattagtgactgttaaggtacctgagttattaggtgcctgtagactatgcccagtgatat

SEQ ID NO: 447318 - DNA, 122 bp, Homo sapiens
gctgcaggtttcccaggtgaacaaggtaaaggccttccacctcccactgccccccaagcccgctgcttctctcgaccagtttgagcaccactttgcagaatagcagagggttacactgaggc

SEQ ID NO: 447319 - DNA, 122 bp, Homo sapiens
aagggacaagaaagaattgggagtctagaggagctgtgccacctcaagcaggtcatttcccgagtctgaggtgctggggctcggtcccccaggttctgtgtcctcctctgccaaacaggcat

SEQ ID NO: 447320 - DNA, 122 bp, Homo sapiens
cgggggcctgaactcgtcctacccctgcttgtcccgccggtttcaacccacttcacagaccgacagattgagtcccaccactgacagggactccggcttaatccatagcttgtgccacccac

SEQ ID NO: 447321 - DNA, 122 bp, Homo sapiens
ggctctggccccgacggtgtttaaagggcggagggctgggccgggctggtcgcacccgggcgctgctggcggccaagctggatgggtcgccagtgagtttcggtgcggcaccgctggcccag

SEQ ID NO: 447322 - DNA, 122 bp, Homo sapiens
tgggagtggtaattggggtcctgatctcatggttgacgtggccctcacgtgagctggagccgacgcgtgcagacgtccttctaatcctagtcttcgtttggtccggttgcactcttcctata

SEQ ID NO: 447323 - DNA, 122 bp, Homo sapiens
cattctccccctgcaagaacaaaggcaaaatgaacagtgaggaaaacctggaaacaggaccgagtgtttgctatcacttgattcctttgaaggagcaatgctttctcataatataggtttta

SEQ ID NO: 447324 - DNA, 122 bp, Homo sapiens
gttctgtttggggtccatgagtggagccagacatggggttctgggagagggttttggtcacggtaagtccttaaaccaccaatatcagaatcccttggtagggatggggtcttgctaacctc

SEQ ID NO: 447325 - DNA, 122 bp, Homo sapiens
atccaggggcaggaggtgttcaaggtcactgaacaatccatcccttcatccttactctgccgggtggagggttcccaagctcccacaggctatgtagaggccttcctgaagctatcccaaga

SEQ ID NO: 447326 - DNA, 122 bp, Homo sapiens
aacatgtcaaagttaaaaccagctcccagccaggcttcctggaacggctgagcgagacctcgggtgggatgtttgtggggctcatggccttcctgctctccttctacctaattttcaccaat

SEQ ID NO: 447327 - DNA, 122 bp, Homo sapiens
agcatactctctatttcacatttttattttccacaaagcaatatatactgaaaaccactccgtatcagttcataggtatcattcttttcctttttttaacttggatagtattccatagtgta

SEQ ID NO: 447328 - DNA, 122 bp, Homo sapiens
gcgtccgggtcagggagctccagggaggtagcaaatcaagaaagctggtgtaataggtcccgcccacaacgcgaggtgggccaataggaaggcggaaggatctgggacccgcctcataacga

SEQ ID NO: 447329 - DNA, 122 bp, Homo sapiens
gagcctcggtaggtggtcgctctcagaccccactgtccaccggggcgcagacccctgactcggggacttgggatgttcctcttggtgtcatattccaactcagattgagccctacattgtgc

SEQ ID NO: 447330 - DNA, 122 bp, Homo sapiens
gggcgcccgctggggctccgggcggcacggggcgcgggtgggccggctggtgagcgccatcgtgcttgccttcggcttgctctgggccccctaccacgcagtcaaccttctgcaggcggtcg

SEQ ID NO: 447331 - DNA, 122 bp, Homo sapiens
ccgcgtcccgccaagaccgtgagcaaactcgcagagttggcgcggcagccggccgggagacgccgagcagggcctggccgcccgcagcccgggaggaacggcgcccccagggtccggtggcc

SEQ ID NO: 447332 - DNA, 122 bp, Homo sapiens
tgctcatcatttcacgcatgtgcacatgcactgtctctcacacacgcacgctttcgcacacgtggagacaggcgagtactttctagtcagcatgacagcagcggctccatcctgtcaagcta

SEQ ID NO: 447333 - DNA, 122 bp, Homo sapiens
cagcgtcacgagagccgggcagaaatgaaatcaactgtggcaaggccttggctgctttcacggaggagtttttctgcgccagtgtctttttccttccctttaaaataaaattaaaaatagca

SEQ ID NO: 447334 - DNA, 122 bp, Homo sapiens
atactgacatttttccagtctactgtgtaaaatgtggctagaggctaggaccagtgggggcgggggagatatacatattcgtgcataggaaattttatcttaggaatccacttagtcagccc

SEQ ID NO: 447335 - DNA, 122 bp, Homo sapiens
agtaattgaggaaatgatgaaatccagccattctgacactgttccttatctaggatctctcgctttctccccaaagctgcttattagggaagtttttacagtgatagaacatggcgaaagag

SEQ ID NO: 447336 - DNA, 122 bp, Homo sapiens
actgtggcgcgggtgaggcggtcgggcaggggcggggctctggaaaggcatgttcaggggcggggactggagggaaggcgcgtcgaggggggcgaggaccggagggagggcgcctccggggg

SEQ ID NO: 447337 - DNA, 122 bp, Homo sapiens
cgattttcagcaagtgctatatctggaggttctaagagagatgctggaatggcttcccgtcggaacactgaactctttcgagcagtttttacggaggcgtttgctacgtgttctcagggcgg

SEQ ID NO: 447338 - DNA, 122 bp, Homo sapiens
cacctcttccttcgtcttctgaacgtggcctatggcccaggacagcctggcaggtggcctcgctgcccccagttcccctctctgcccccacactcgtcttagttgcttcacactggtcactg

SEQ ID NO: 447339 - DNA, 122 bp, Homo sapiens
tgtgttgatggatctgatccagaacatgagaggtgattcctgggttacttggatgctggacgtatttgggtctggtgacggtgcttatgattctaaatcaaaaccattctccctgcttcatt

SEQ ID NO: 447340 - DNA, 122 bp, Homo sapiens
cctgaatccttctgggggaggcaatcccccttcagaagtccctagcccaggttcgaaggtcggtagggactgagaggttggcagcggatggggagtggctaaaccagaaaaagggggcttcc

SEQ ID NO: 447341 - DNA, 122 bp, Homo sapiens
acggtggtggacaccggggtgccctgtggctgtggcaggatgcggctgggtgagggcgaccgccttccggggcccacgggcggctccagcatgtgcccatgcacagggccaggtgcacggct

SEQ ID NO: 447342 - DNA, 122 bp, Homo sapiens
gtcaacagcatggcaggctccctgtccttaccacctggtggatgagagctgtgcagcattcggctttcttttctaaatatccaccaccccctttgcccacaggcatttctaggtataagggg

SEQ ID NO: 447343 - DNA, 122 bp, Homo sapiens
tctcgtaccttgcttgacacggggctccctggagccggcagcggcagcggcagcggtggccggcctggacactggcttcttgctttgggcctccccggcaattccagcctcggcagatttgg

SEQ ID NO: 447344 - DNA, 122 bp, Homo sapiens
ggaatccagatgggcgggggcaagcaggacggggcggggctacgcgggatctgggcggggcggggccggtgaggggtcgggggtgctcctgctattcagccggtgcgcgcggcggcgggagg

SEQ ID NO: 447345 - DNA, 122 bp, Homo sapiens
tcagggagatgatggtgatgtttcctgttgctgttaatgtgtaagttaccacaagaaccacgaagagagatattcgaatctccaggagagctgggaaggcaattagggtgatttcagtcaca

SEQ ID NO: 447346 - DNA, 122 bp, Homo sapiens
gaatctgactgtgagtgaccatgggcctggggtgtgaaggccccctaaatggggaaccctcgggtcccgggctgctgaccgtgcccatcctgtctccagcccactcccccaccgcccccggt

SEQ ID NO: 447347 - DNA, 122 bp, Homo sapiens
cactgctccttgagaacagggacgttatttttattgttattttcccctcgtattcagaaccgtggctggaacttggcaggcatgaaatagacatttatgaatgaatgaacgttaacgaagaa

SEQ ID NO: 447348 - DNA, 122 bp, Homo sapiens
gctctgcccgcgccctggccacagtggggacagcctggcttggcggggacgcaccagtcccgccgccgacgcggagttcctaccccgccgtgcgaggcagtggctccggcccttccagctcg

SEQ ID NO: 447349 - DNA, 122 bp, Homo sapiens
tagcagagtgcaggtgtactgggtagacatgtatgattgcgctgtagccctgttatggcccggggagaaactatgaaaggaaccagtgaaatcttttgttttgggcactgctaaattgatga

SEQ ID NO: 447350 - DNA, 122 bp, Homo sapiens
tggccagggaactttccagagaggaaacactgtcctccagcgttccgagacctggggggccgcgtgtgactgcagcagaacttggcccttcctgcctgacaccgcgccacagtgaacagcag

SEQ ID NO: 447351 - DNA, 122 bp, Homo sapiens
ataggcaccaaacctgctatttcatttctgggcagaactcactggtctggacccaatgagcgatactgcattcaaattgcacgtaacgtctgggttagacataacattcccaggtggggctg

SEQ ID NO: 447352 - DNA, 122 bp, Homo sapiens
accgccccctcccgctctcttctatccccaaccatttccgccacacctccaacccacttccggccccaaacatggcctttccaggagccccgcccacttcctgcacatgcccgcctaagttc

SEQ ID NO: 447353 - DNA, 122 bp, Homo sapiens
gggctgatggggaggtgcccaggccgccggcggatgctcccggaagatgctctaagctgccgctccaggtatcccctgggctgaggctacctggagacgcccacggcagtgacacaccaagc

SEQ ID NO: 447354 - DNA, 122 bp, Homo sapiens
tacatccgggtcaagaattccattgactgaggtcacactggatgttagtgggcagagagacgtgactgcagccctcgcctgcctgtgtgtagcttgtttcacttcggtagaacattagctga

SEQ ID NO: 447355 - DNA, 122 bp, Homo sapiens
ccggcgttcacggcggacgttcttgttctgtggagaataacggctgcacctggagattgacgcagagtgggcggcggtggtggtaagtttgaaccagatattttcagtaatacaaaataagg

SEQ ID NO: 447356 - DNA, 122 bp, Homo sapiens
gcatccatctctttcctccttgatttgtaagattatttttctacttttagtattcagtgacgcaggctactcatgtagaggatgcattaggcatcagagatattcttcattccaaggtgttc

SEQ ID NO: 447357 - DNA, 122 bp, Homo sapiens
ctgccggggcctggggccgcagtccccgcgccgctggccgcccgcagcttctggcgcccccgaaaatgaccatctgtcattcaattaaggtttcagggcagctgatgggggagccagggtca

SEQ ID NO: 447358 - DNA, 122 bp, Homo sapiens
cgttctctgcgggagacctgaggttttccaagggggacatgccagctacactggccttggcgccctgagctaagcaccaggactcacagcctagcacgaaggcaggtagcaccttcacccgc

SEQ ID NO: 447359 - DNA, 122 bp, Homo sapiens
gttgccctgtcgaggttgcaggtccttctggggcggggcggcgggggggatccttccgcacggagacacttgtccaggtcagctctgcaggtagagctggccttctgcctgtctgagcccta

SEQ ID NO: 447360 - DNA, 122 bp, Homo sapiens
tatgcagccgttaatgtatttctgcattttcccatatttccagtgaacatacagtactttcgcaattcggagtacaaacgaaaaagggcgagagaaggtcgcattttgcctgccggagctag

SEQ ID NO: 447361 - DNA, 122 bp, Homo sapiens
tggcggggagacccgcagtcccactgtgcggcacccacatgctgctcactgtggccggagcgtcggactttaaggagctgtgagacagctatattttatgtggaaatttccagacttttaaa

SEQ ID NO: 447362 - DNA, 122 bp, Homo sapiens
ccacagctgtccacgggcaggcacttgttactttctggctgagcagggcagtgtggccgacggctgaaaggggaagctgcggctgcttttgtgcaggggtggtggtgatgagggtgatgtgg

SEQ ID NO: 447363 - DNA, 122 bp, Homo sapiens
ccgtgatcgacgtgaatgtattttctgtctctctctgactttgtccctgctgcctgtttccgtctgtctctttctctgaatccttgactgtctctctggttctctgtgagtcttgccatcgc

SEQ ID NO: 447364 - DNA, 122 bp, Homo sapiens
ccagcgctttttcagtggctatggccgcctcctcgaagtagacctcaaaaatgggtgagtcgggcctgggcgcccgcgcccagcgtcccaggcctggtggcggcgggaactctccaaggaaa

SEQ ID NO: 447365 - DNA, 122 bp, Homo sapiens
ggctccctggcttttggcaaactgccgaaagcatcttgctaatgcttgcaactgctacctcgttaacttttatagccaagctctagaggatgtgagcgtgtaaggacagaaactgggaggtg

SEQ ID NO: 447366 - DNA, 122 bp, Homo sapiens
aaaataaataaataagaactaatgaacgaatcctgcttgcatggatttcaggcaatgacacgaattagcaatttacactgtttctttttggttgtttgtttttaggacttgcccctagcagt

SEQ ID NO: 447367 - DNA, 122 bp, Homo sapiens
cagcttcggtaccgacgccctaccattaccggtgggagcccagagagtgaggccaggggccggcactgggcagggaggcaggatccagaggacactgcttcactcagaccaacagggagcca

SEQ ID NO: 447368 - DNA, 122 bp, Homo sapiens
gccgcccggtggccgaacgccctcattgcacccagcggccgggcctggggcgggtccgagcgggacccaggcccagtctacgcctcccacagtgctgggcacctccccgtcccacgcccggg

SEQ ID NO: 447369 - DNA, 122 bp, Homo sapiens
tggagactcagtcatagccaatgcaagtcacacatggagggaagatgaaggagcaacaggcgtgagcctttctgaaatgtttggggtccaaaaatttctgtcccattgcaaaaacaccagta

SEQ ID NO: 447370 - DNA, 122 bp, Homo sapiens
cccgcgcgggctgcgagcagggtgttccccttgccgcgggcaaacaagtttgtgcagacgcggttgggagcgcggcggggctgcacctgctccggctgcagggcgggcttgccgggggcacc

SEQ ID NO: 447371 - DNA, 122 bp, Homo sapiens
agataccaaatgcatcttcttttttatcagtgtcattgttataatctcaataggacttgccgaaacgttgctaaatgctcttttgaatcattgcacactcttctggctgaagatcgagcttc

SEQ ID NO: 447372 - DNA, 122 bp, Homo sapiens
ccacccacaattgccctagagaaggaaggggagagacagagagcctttacttatgtaccacggagcttcagagttaagccaggtgcccctgcctatctctacgtggagaacaattgaacatg

SEQ ID NO: 447373 - DNA, 122 bp, Homo sapiens
aagccctttgcccagagaggaaactgacaagagggagttgccagggctctcaagggctctcgtctcaggaaataactcttggacagaaatggattgctgctttattatttttttggagaaag

SEQ ID NO: 447374 - DNA, 122 bp, Homo sapiens
cacagcttgtggcaaacgggcctccccaactggtggacgtggggcctctgggaaggggaccgtcctggccgccgtggcagcccagcacgacagtccccggagctccagaatagctggctgag

SEQ ID NO: 447375 - DNA, 122 bp, Homo sapiens
tgtgtccgcggtaggggagctccagtcgtcacaccgcaggctggaggttacgcttcgagtcgcttaccgaatttgtgtgcattcacgtggacacggcctgtggggccttttgcccctgtagg

SEQ ID NO: 447376 - DNA, 122 bp, Homo sapiens
tccgtgaggcagactggctcctctcaaactcccacgacggcctgtcctcagtgatatttccgggctgcccccacactcgacatggaagaacgtgaatgacttgccagggccatgggcagagg

SEQ ID NO: 447377 - DNA, 122 bp, Homo sapiens
gcgaccacatgaagaccgcagctgcgcgggctgtagtttcttaccctctgtcagcacgcacggctctccaacagatgggcgatttcaagttgctctgcatcttaaatgaccccttgataaaa

SEQ ID NO: 447378 - DNA, 122 bp, Homo sapiens
gtcagagcaacacctagggggtctcaagcacctctgcgcagtacgcagacacatggaaaccgacaacttcacagtcccctcagctccaagagtcccgactgaggagactggtggcttgtgag

SEQ ID NO: 447379 - DNA, 122 bp, Homo sapiens
aacacgcaaacagccagaggagactgtgaggaggccccccacagactcatcacctcaaagcggagccccaggaatgaacagtcagctctaggacgtgctaaatgccccaggagaggcacgaa

SEQ ID NO: 447380 - DNA, 122 bp, Homo sapiens
agtcggctaaccaactgatcttgagattgaaaaattatcctggattatttgaatgggccccgtgtatttgtaagcgtctttttaagtaaaaaaaagagcgaggcaagaaagagggagtcaga

SEQ ID NO: 447381 - DNA, 122 bp, Homo sapiens
agcaatgcgcaggcacggggaacacctgtgggcaaattcacctctccacgtgccaactaccgccggccggacgtgatgatccctgagcgtggagcacacccgagccatcgaacatcctaacc

SEQ ID NO: 447382 - DNA, 122 bp, Homo sapiens
tctctccttttttttaatatttttgtttttgccgcctttacgctccgaggcccatcctgccggagtactacacagacagggtcatttcagttgacggttctgggtcaccagagcagaggaag

SEQ ID NO: 447383 - DNA, 122 bp, Homo sapiens
gggatttctgttctctctgctaatcttcatataacatgcctcattgccctctgagggccccgagaggatcctcgcagcatttgtagggtggaatttgttcttgaagctctgtttctggttgc

SEQ ID NO: 447384 - DNA, 122 bp, Homo sapiens
gttcagagaaagacgatcaagacaccgagaagacatggcattgcctcgggtgaaaggcagcggaagagactgggttccatgagaagagaatatcattgtcctcagatgctgggacacctctt

SEQ ID NO: 447385 - DNA, 122 bp, Homo sapiens
cccgccccctctcccctccccgcgcgcccgagcgcgcctccgcccttgcccgccccctgacgctgcctcagctcctcagtgcacagtgctgcctcgtctgaggggacaggaggatcaccctc

SEQ ID NO: 447386 - DNA, 122 bp, Homo sapiens
ccgcatgtttcattgtacaggtgttttggtgtcggactctccatctgcctttgacctgatcgcctttccctctcccttaagttctcacgattcctctctccctggctttggtccatcctaca

SEQ ID NO: 447387 - DNA, 122 bp, Homo sapiens
gtggcggcgtcgagtccgagcggggaagcccctttgcgggaactctggggcggggcggggcggggaggtgggtagggagggtcccgccagcagaggcatcttatttttaacctcttctcggc

SEQ ID NO: 447388 - DNA, 122 bp, Homo sapiens
cgctgagggtagttgtggggctcccttgggatgacttagggtattacgtgattttgagcacggtctcttgtctcgtgcagctgcctgatggcaggtcctgtgttctgatcgtctgagttcag

SEQ ID NO: 447389 - DNA, 122 bp, Homo sapiens
ctgcttttttttttttttttttaggagagatggggttttctatgttatccaagctggtctcgaactcctgggctcaagagcaatcctaccaccgtagccttccgagtagctgggactacagg

SEQ ID NO: 447390 - DNA, 122 bp, Homo sapiens
cttgagacatagggatgggacaggggcaatgacagcctctaacatggccacttctcagcacgtccaagaagtctaactatcaaaaagggcagacttcctgcaactgcactttatctgtggtc

SEQ ID NO: 447391 - DNA, 122 bp, Homo sapiens
ctctctactaggcttgtcgaaacaatattttcccctgagattgtaagcttatgaatcatgcgaaaggattaaatcttactcatcttatgtttcctgacagcacatggcatacaggaggtgtt

SEQ ID NO: 447392 - DNA, 122 bp, Homo sapiens
ccgtccgctcgcactcacggagacacaggagccaccatcttgggcggtggacgctctggccgcggtctccttgggctccacggagcgacagcagccactagcggcaacgggggcgaagaggc

SEQ ID NO: 447393 - DNA, 122 bp, Homo sapiens
agtggtgaagtgaaaaagttcccttatcccgttcatagggcatgcgatgggggtgtggctcgcttcttccatgcccagctgctcaaacctctaggcggaccatgcagacaggcaggctatgg

SEQ ID NO: 447394 - DNA, 122 bp, Homo sapiens
ggaagataagtatagattgttttctcatgggagcctgagaagcatcttcagggagggagtcggggagtaggcccaaagaattgacttatttggcaatttcagcaaggacccggagctgtttc

SEQ ID NO: 447395 - DNA, 122 bp, Homo sapiens
catcacatgtcagactcctgggtctgcatgggatataaatgaagaagcgtctgtcgggtccggtcccctttgagctcacagactagataattgccctagttctccatgttgctttgctggtg

SEQ ID NO: 447396 - DNA, 122 bp, Homo sapiens
gctgaggcttctccctgttagcagggctggcagttgggatgaagagctggacacagagtgcgggagagtgagaacaacttggaaactaacagcacttccgcctttacctctcacttcagaga

SEQ ID NO: 447397 - DNA, 122 bp, Homo sapiens
agcggcctggtgggaagtgtgagtgttcctccccgtctgcctgacagctataaaggcggccgccggcgcagagccgccactgggctgcgcccctcccgggaaccccctctcttggatgctct

SEQ ID NO: 447398 - DNA, 122 bp, Homo sapiens
gaggttcagctggctgatacaatgtttggccttaccaaggttacagatgacacactcaagcgtttcagtgtgcgatatctgcgacctgctcgcagtcttgtcttcccttggttctcccctgg

SEQ ID NO: 447399 - DNA, 122 bp, Homo sapiens
ctgcagggctgaggcactgagcggcaagccaggcgagggccagcaccaccttccacctgccgtggcacgggtgcacaggacgttccaaggccaaccacaatgacttctccttcccctctggc

SEQ ID NO: 447400 - DNA, 122 bp, Homo sapiens
ccccctgaagcaatcttgtgatctctcggaattctgtgttatcagaactacccccgcccccgccccacagacaataacgccctccctcccccctctcttaaaaccacatccttccactctct

SEQ ID NO: 447401 - DNA, 122 bp, Homo sapiens
aaagccacagcgtatcccactccctgcaggtcgcagaaagagtggagaactggtgccactcggacaccttagctcaccgagagaaatggagacggcctccaggacatcttaggaccctggtt

SEQ ID NO: 447402 - DNA, 122 bp, Homo sapiens
ggggggaccgagcccgggcccgggctgaggggtgggggagaggccgccctgcgctgctcgcgcccccacacccgctaccggcaacgactactgtgaggtgacagagaggggacagggagggc

SEQ ID NO: 447403 - DNA, 122 bp, Homo sapiens
ctcctggccccgagcgcgtcgtcgcgccccgggagcagaccctcgcccagcagttaccgccgtcccgactttccgttccagttgcagctcctgccgggcaacatgtcaagagccgccgccgc

SEQ ID NO: 447404 - DNA, 122 bp, Homo sapiens
ggttggcaatggacaccaaagtcgtcttctaaagaccaagtacgctctaaccacggaaatcgtctctaaccactgactcctccagaaaaggaagaaagaagcctctctacactaagctgaaa

SEQ ID NO: 447405 - DNA, 122 bp, Homo sapiens
ttttggaaaaggcaacatttgaacaggaaatcagggatgtaagttctcactttgggccaccgcatcaggcttttcagcttgagggtgcagccctcactggggacccatcctcttctgcccag

SEQ ID NO: 447406 - DNA, 122 bp, Homo sapiens
tcgggagctggggagagtccaaatttggtgttctgaaggagctcacaggggtctctggcacgtaatgatcaccttgaaagtcatcgatttcaaaaagaacattccactgtggaagagcagcc

SEQ ID NO: 447407 - DNA, 122 bp, Homo sapiens
cggtaactagcagttctgttttgttccttttcgagttccaaggacaactgagcgacagcacgccgattttctgagatcatggcgtggtacttggcttccagatcctgttgaaaagcagcagt

SEQ ID NO: 447408 - DNA, 122 bp, Homo sapiens
ttctttcaaggccagatagtaaacctttgccagccacgtgtgctgtggtgaaggcggaggcggctgcagaagacagggtgacagacggccatggctatgatccagtggtgctttatcaggca

SEQ ID NO: 447409 - DNA, 122 bp, Homo sapiens
tgtgggaggaaagcgtcctgatgagcttgctctcaggaacagaggctgccttgtgttcagcgtcttccctgtcttccttgtccttccctggaaggtggctgcccctgcactgtaagggtgtg

SEQ ID NO: 447410 - DNA, 122 bp, Homo sapiens
cctggaaagagttcccacgtggggatgccgagcgtgctggcctggccaattctgaatgcccggtcaccctctggagtcctctggggacagaagccaggcccctcggggaccccagcctggcc

SEQ ID NO: 447411 - DNA, 122 bp, Homo sapiens
atttccccgcggggccttcatgcaacgccaaagccaaggtttccgcacgcacaggctcctcgggaatctgaccccagatgggaaagcgtggccaggcagacagtcacagagtcttggccaaa

SEQ ID NO: 447412 - DNA, 122 bp, Homo sapiens
ggtcacctacttccccttcgactggcagaattgcactatggtgttcagctcctacagctacgacagctcggaggtcagcctgcagacaggcctgggtcctgacgggcaagggcatcaggaaa

SEQ ID NO: 447413 - DNA, 122 bp, Homo sapiens
cgcgaatcccggaagtcagactgtttttttcagttccctggaggctttttgatactgattcgcgtacacctgttgtttgaaagctctcagcgggacaatgctgacccaggtgagacctgggg

SEQ ID NO: 447414 - DNA, 122 bp, Homo sapiens
aaaagttccaaagtttgttttttaaaaacattattcgaggtttctctttaatgcattttgcgtgtttgctgacttgagcatttttgattagttcgtgcatggagatttgtttgagatgagaa

SEQ ID NO: 447415 - DNA, 122 bp, Homo sapiens
ttcttttttattttatattttttataattttttgttttcaatttttgttggtacgtagtacgtgtatacaaacttctgggaatgtaaatgagcacatttctgaagggcattttggtaatact

SEQ ID NO: 447416 - DNA, 122 bp, Homo sapiens
ccacgctgttgtcatgtggtcagctatggagtcattctcatactgtcactcttcctaatacggatctgtttcggccacagactctttcatatctctgccccaaacctctcatccaccaaatc

SEQ ID NO: 447417 - DNA, 122 bp, Homo sapiens
aggacaggaaggggagaggtgacctgagcatccacgcagctgtggcattcggggacgggccgaggactgggtttcttgccatcctcagcgctgggggtgactccaagcccccgggtgggggt

SEQ ID NO: 447418 - DNA, 122 bp, Homo sapiens
tttctagagaagatatttgaaaaggatgatctgaagatgatcagtttctctactgagagacgagaaggaagagcttgctccttatcattctggcttgttcacctgattccttcctcctaacc

SEQ ID NO: 447419 - DNA, 122 bp, Homo sapiens
ctcacttctgggcacgagggtagagtggatggggctccactttccccatgctccttgctccgacccctgttcttgtccatttggccgtggccagcccctgcctggtgttagcagcatcgtag

SEQ ID NO: 447420 - DNA, 122 bp, Homo sapiens
cgtgtggccttcgcccgaaagcggtaggggagtcgctctgaaaccgccaaggatcgcgagcgacagatttgtgttggccagggttttaagatgacgcaatagctgagtgtggttgaaatgta

SEQ ID NO: 447421 - DNA, 122 bp, Homo sapiens
ccacaggacaaccctaggggaggagtgcacgacactaggggcttcggaggcacgaggatgcgacatgaacaagcccactcgccgtcagagtcccagcgccctctctccagtgaccaggcccc

SEQ ID NO: 447422 - DNA, 122 bp, Homo sapiens
acaccctggaagccgggtcatacttcactactagcaccagaaggggcttccgcctctccacgatcaccccggaaccgggaatggagaatatgggctcccaagccggtcgccggcctgaccgc

SEQ ID NO: 447423 - DNA, 122 bp, Homo sapiens
cctgctagaaaatgcatgtgtcaatcaggactgacagagctcttctttgccagtctagctcgggcctccgccaattcaggtggagtagagctcagagaaaaacacacaaagaagcctccagg

SEQ ID NO: 447424 - DNA, 122 bp, Homo sapiens
actgctacacggcgaactggaacccactcggggactctgccttttaccggtgagctgccccgccctcccgcccacggcctggcttaccctgctcgcccgccggctggagtctcccggcggcg

SEQ ID NO: 447425 - DNA, 122 bp, Homo sapiens
ctttctgccttagcctggttagtattgtggtcccactgaacgtaccattcaggagaatcacgtttaaaagtggcacaagacaaagacatgaatctgaataccttcagacatagtctacagct

SEQ ID NO: 447426 - DNA, 122 bp, Homo sapiens
cacacagcgtgtccgcaaggttcatccgtgtggtggcgtgtgtcaggcttcattccttttcgcggctgaatcagattccatcgtgtggatggaacacattcacgtttcgtttatctgctcat

SEQ ID NO: 447427 - DNA, 122 bp, Homo sapiens
ttgttaatatccaggggcaagtggatgccattaccgcaaatagtgcagaggatgtacacccgtctatgacatagttggtaatctccagaggcggagaagatattactcacaataacgtaaac

SEQ ID NO: 447428 - DNA, 122 bp, Homo sapiens
ggcccggtgcccatgaggtcttgtttttcagactggacgggggtgggggagggggagctgcggcccccccacctgctagtgtgtccagcctcctgagtggggcagcgagcgtcctggctggg

SEQ ID NO: 447429 - DNA, 122 bp, Homo sapiens
cgttgcacaatgttgcctgtttttctacattgtcgctgtttctcagaaagtgccctcaggcgatgacactcaagagccctcctcactgcaggctacaggtgtctccctggagaactgcggag

SEQ ID NO: 447430 - DNA, 122 bp, Homo sapiens
ctcacctcagcggccgtcctcatatggtacaacttgttgctaggagacctgaagccccagcgtggggacggtggctgcagagagccaatcccagcaaggaaccttgcagcttctggccagtt

SEQ ID NO: 447431 - DNA, 122 bp, Homo sapiens
gcgagggtttcagggcgtggctggagtagggggcgcgcggcgagtgtgcacgggtgtgcgcgcgcgagagggcgagtgtgagcgcggcgagtgtgagcgcggtgagtgtgcggccgcgtcgc

SEQ ID NO: 447432 - DNA, 122 bp, Homo sapiens
ttccgcacgggggctccaccagggcagggatagtggtgagggtggctcgtgggtccccctcgcggggagcagggtctggcactcaccagggcgcaggactaggacttgtcgaatgaatccat

SEQ ID NO: 447433 - DNA, 122 bp, Homo sapiens
cagggcttcttctgtccagaccctgccccgggcgctgggggcatggtccaccacaggcaccgcagctcatctaccagggtcagtgccctcggtcacactgtgtggctgtctgcttacctccc

SEQ ID NO: 447434 - DNA, 122 bp, Homo sapiens
gagaagagctgggcagagcgagccatttccgcaccagctggagccaggcagagggctccgcggcctctcccgaccctgtgccaccaactgtaggaggcctccaagtgcaggatgcgcaggca

SEQ ID NO: 447435 - DNA, 122 bp, Homo sapiens
aaggatgtgtcttagactgatacccccccatgccaaaatgcatccagtctccatagcaaccgtagctccaagagtgcctcagaaacagcgggcagaagcagagaggaatccgtgtgtatggt

SEQ ID NO: 447436 - DNA, 122 bp, Homo sapiens
tctccgctgaagtccacacagtttaaattaaagttcccggatttttgtgggcgcctgccccgcccctcgtccccctgctgtgtccatatatcgaggcgatagggttaagggaaggcggacgc

SEQ ID NO: 447437 - DNA, 122 bp, Homo sapiens
gcgcgcatgcgcactctcctggcccagcacagtgcttgggggccggcggctcccagctcccgggccgccctgctgcacaaaggcctgctttgttctctcggctctgttttaaatatctgacg

SEQ ID NO: 447438 - DNA, 122 bp, Homo sapiens
ttgtgccctcacatggcagaaagcaaagggcaaaaaagggatgaactccttctgtcaaaccgtttcataagagcactcagtcccattcatgtaggtagagcccttatggccccgcctcttaa

SEQ ID NO: 447439 - DNA, 122 bp, Homo sapiens
tagtggggcggggacagggtctccctctgttacccaggctggagtgcagtggtgcgatcacggctcactgcagcgtcgaccaatggggctcaagcaatcctcccacctcagcctcctgagta

SEQ ID NO: 447440 - DNA, 122 bp, Homo sapiens
ggtgtgggttctcttgtgattgcctgagtcggggttactagacttgctgactttgtggatcgatgattttcatgagtcccgggaagctctcagccactttttcttctgctgttggttctgcg

SEQ ID NO: 447441 - DNA, 122 bp, Homo sapiens
ctttggtaaatattgaattaccgtttgatggaaagctaaatcctgctggattcgtggatccgcaaatccataactctcctcttcttttcccctcccttcgtggtcctagagggaaggcaatt

SEQ ID NO: 447442 - DNA, 122 bp, Homo sapiens
atcagtcctgtaaacctacgttcatctgcattcttgggtctattttaaagtacaaacttgcgctaacaatttccatgtgttgaaaatggacaaggtagatcattgaatggtgatcaagactt

SEQ ID NO: 447443 - DNA, 122 bp, Homo sapiens
acagttggggctttttcctgcacagagattggccacttcctgcacatcaggagatccccgcggcctgcgggacccgccccgccctcctgcccaggcgcccgctaggtggtgcctggctgggc

SEQ ID NO: 447444 - DNA, 122 bp, Homo sapiens
gaccatggcagccgggagcatcaccacgctgcccgccttgcccgaggatggcggcagcggcgccttcccgcccggccacttcaaggaccccaagcggctgtactgcaaaaacgggggcttct

SEQ ID NO: 447445 - DNA, 122 bp, Homo sapiens
tcagggagcccagaggagggggtctctggccatggcccggccgccgccgccagccttccccgagcacaggtgcctacaccgccaccttctcacgcgcagccccaaccgttgcagcggacact

SEQ ID NO: 447446 - DNA, 122 bp, Homo sapiens
cagcgctgacccagatccgagaagctgcagcgctgacccagatcactggcgggatccatccgccatccttcccctcacatgggctcctctaggcccgctcccgcatccctttctgtcccctc

SEQ ID NO: 447447 - DNA, 122 bp, Homo sapiens
agattggccagtgaggaaggggcatgtgtggggagatggaagtgctttacttctcactgccgaggcaagttaagcagaggtgggacatctgaactactgagtcctcagtctcaacttcatgt

SEQ ID NO: 447448 - DNA, 122 bp, Homo sapiens
aagccgcccgaatccatctccctctctgtgcgtgtgccttttcaactaactttgggaactcgtatagacccagcgtcgctccccgcgccgcctcgcctccactttggtttcccgcgtcctgc

SEQ ID NO: 447449 - DNA, 122 bp, Homo sapiens
ctgtaaagatgtagtttcaaataagaaatttatgaaaaaagtacaagagtcaagatttgacgtcatttttgcagatgctatttttccctgtagtgagctgctggctgagctatttaacatac

SEQ ID NO: 447450 - DNA, 122 bp, Homo sapiens
aaaggcccaattaggaaaatttcacaaaggctaccatcagcatgtacaagtttgaatttacgtattcctggccaaataaccaaggtgaagaaaggtaaggggaagaaaaaaaaagaaaaaaa

SEQ ID NO: 447451 - DNA, 122 bp, Homo sapiens
actgccatgaggaaggtcgattcaccactacagacagggagcctgaggcctgggtggtgccgacaagtcggcagtcacgccaggtcaggaagcgccgaagccgcgggaaaccctggactcca

SEQ ID NO: 447452 - DNA, 122 bp, Homo sapiens
gtgggagatgagagggggagatatttggagtaaagctgtaggactttccagcatgcctcccgtgattaattgcaggctattcctgatgctccttatggttaattagtcagttcccttcatac

SEQ ID NO: 447453 - DNA, 122 bp, Homo sapiens
ttctgttcacaggaagactgcaaggtgccgagtcacactgttcactggtttattgagattcggggagatccttccccaagagacaccacagtgtgaaagggacaccacctcccaccccatag

SEQ ID NO: 447454 - DNA, 122 bp, Homo sapiens
gtccttctgaggcccatgggttcccgggctgcctccggggctgctcctgtgaatggcattcgagtgcccttccagcgcggccactgaagcagccacaacccccggtgctcggggcggctctc

SEQ ID NO: 447455 - DNA, 122 bp, Homo sapiens
gcgacggggtcgacggacgctcgcaccagtaagctcttctctatctccagccgcttgctgcgaggaagaaacagactgcagtagatattctgtctttctgtgagaacagcttcaaattcttt

SEQ ID NO: 447456 - DNA, 122 bp, Homo sapiens
ccaaagaactccgcagagccaaatcagaacgtgacaatcagcacacagtttctgtccgcccgtcaataagttcatcatctgtggtttctgcgagctccagaggccttcggagtgcaccagcg

SEQ ID NO: 447457 - DNA, 122 bp, Homo sapiens
ggaagaggacagcccgcagtctggagtgagcagcgaagcagagaaaaggagacgccctttcggacaagggactggttggtttgttcttgtgcagagaacccactcgctcactctcaaacggt

SEQ ID NO: 447458 - DNA, 122 bp, Homo sapiens
tcagcctgccccataggttcctgggtgtgagcttcggccgcacacaaaaggtctatttggcgactctggccacgctcttaggacaaaggacatggattgacaagtggcgggcacggacggag

SEQ ID NO: 447459 - DNA, 122 bp, Homo sapiens
gtgggggcgcgctggtctcgctggagctccgggagctagagtggcagcaccttaggtgggcgtttggtctgcaggttctttaggaggccggtgtccgcaggttgagcgtggatacagctcct

SEQ ID NO: 447460 - DNA, 122 bp, Homo sapiens
atctctccaaccctgtttttccctgtcccggctagttccctcccttgactccatcaacatcggcacctgccagacgcccaccacccaccatgtaaggagtgaaaaggccccaggactaaatg

SEQ ID NO: 447461 - DNA, 122 bp, Homo sapiens
gtatgataatctctctaacatggttaggactatgatcatggactgtgaggtcatatatcacgattaaggtgggttttggagtcacaggtacctgggttgaaatccctactccacaactttgc

SEQ ID NO: 447462 - DNA, 122 bp, Homo sapiens
cccaaagaatgtcagccaagtccaaggggaacccctcctcgtcctgtccagccgagggaccgccggcagcctccaaaaccaaggtgaaggaacagatcaagatcatcgtggaggatttggaa

SEQ ID NO: 447463 - DNA, 122 bp, Homo sapiens
gaggtccacttggacaggcagcctgtgcctgaattttcctgagggcttcagagcctgtctcgcctcgcctcacatgcctggctcaccttagaacggtcaccttgacggctaaagggacacct

SEQ ID NO: 447464 - DNA, 122 bp, Homo sapiens
cagccttgccagtctcccaggagcctggggtcagatgagagggtggatgtgaaactcaggcgtctgcttccctttgagggtgcttccaacatttcagatgggtttgtttgggtgcttccaac

SEQ ID NO: 447465 - DNA, 122 bp, Homo sapiens
tttattatctataaatgtttaatcaaactgtggcattttaaagtcttgtttcaaattcctcgccttcagttggccggtattcttacagctttttcttgagtgcaaggcagcactgcaactgc

SEQ ID NO: 447466 - DNA, 122 bp, Homo sapiens
ctgcactttcgcacccgtgatgagcaaactagcgcgcggaggaaccaatcggggagcttgcgaacgcgcaccagtcggagaggttttagaaacggtggccccgcgccggagagcccaaggcg

SEQ ID NO: 447467 - DNA, 122 bp, Homo sapiens
gacactgccacagccagcaaatctcactcagccagccctcgagggcaccagtgtgtgagccgaccccgggcctggccagagaagagggtcgcggtgtccgtgcagggattcaccgagagtcc

SEQ ID NO: 447468 - DNA, 122 bp, Homo sapiens
tatgaggaggcaaagtggaggtggcttgggttgagcagggagcctagggatcaaggagcacgcatttcagcaccatggacagcggggcacatggctgcctggaggctctcgcaaaataccca

SEQ ID NO: 447469 - DNA, 122 bp, Homo sapiens
gaaatgttcttttaatgagctggtatgacacttgataaaattcattaaatcagacttcctcgcccttccttttgttgtttgtgcttcagagctcagcactgggaacctgccctcaagtcctc

SEQ ID NO: 447470 - DNA, 122 bp, Homo sapiens
ttggcatttgcctttttcatgaaataattgctggaaggctccttggattaggtaacccagcgttccttcctgtccccttggggctgggggcgggggagagaaccagcatttagcatctgtca

SEQ ID NO: 447471 - DNA, 122 bp, Homo sapiens
ccatccaccaggtgctgccttgctgtgcccctctcttaggggcgtgtttattcagacaggcgccctcccgtttctttgcggtagacaaagccgcccaaccgccccgcgggtggcaaagtgtg

SEQ ID NO: 447472 - DNA, 122 bp, Homo sapiens
cgcccccataagcgcctagagagccacgccgcgccccgctcacccctgcaggcccgcagccgctcccaagggctggcagtgtcgctcacaggtgcactttgttcatgctgtctgcctccaca

SEQ ID NO: 447473 - DNA, 122 bp, Homo sapiens
caccccagagcagcaaagccctgggtagctactaatcccagaatgggtgggtagagtaaacgtgagccccacccacagatgaagctgctgaggcctgcgtggtccactggccctgctgtttt

SEQ ID NO: 447474 - DNA, 122 bp, Homo sapiens
aacccatctttacaaataaacaaattagccgggcatggtggtggacacctttatgtagtccgagctactcgggtggctgaggtgggaggatcgcttgagccagacaggcagaggttgcagtg

SEQ ID NO: 447475 - DNA, 122 bp, Homo sapiens
gaggcgggggtgagttgggggtctcccggcgaagcgcgggtgacgtggtgctgaggaaagcggcctgaggaggagggtggcccttgggaagaagaactacttgtgtttttgcagcctgggaa

SEQ ID NO: 447476 - DNA, 122 bp, Homo sapiens
cgggcctccggaggtgcaggtccctgtcctccttgtcctgcttcgtcgcagagcagaacgcgtgtgctttaagggcagagacatctgaagatgctttgccttgccctcttgaggacacgtgg

SEQ ID NO: 447477 - DNA, 122 bp, Homo sapiens
gcgcaccgggcactggcttcctttcccggagctctgggctttcctctgggcccacctcttcgtcctctgaaccaatcaggaccggcctggcagtgtcatggctgcccacaggtctgcaggca

SEQ ID NO: 447478 - DNA, 122 bp, Homo sapiens
cagcgcagagactctcactgcacgccggagggcgcccttcctcgctcgcgcccgcgcgaccgcgcgccccagtcccgccccgccccgctaaccgccccagacacagcgctcgccgagggtcg

SEQ ID NO: 447479 - DNA, 122 bp, Homo sapiens
tgatattataattttcataatgcgcttttatgtcgcgccagactcctccggtgaggagcccgcagagctgctgaaaggggctttgagaggcccgggcgcgcggctgctgcgagctgcgcgcc

SEQ ID NO: 447480 - DNA, 122 bp, Homo sapiens
cgcaggttgaggtgatgtgagagaggaagcagaagcgaaggttacgcgaggaaagcccctcgttaaacttgggattttcacggggactcagtccagaggaagttgagaaaaccaacttaaat

SEQ ID NO: 447481 - DNA, 122 bp, Homo sapiens
tagctaaaatcctttgggggagacagcgtggagaatttgcaatgcaagacagatgttcaccggaactctcctgctgttgagcagggcatccgtgggtggccctgtctcatcggaaacgccct

SEQ ID NO: 447482 - DNA, 122 bp, Homo sapiens
cgtcttatttacgcgtctagggcttcttccggggcggggcctttgcgtcatgacgtcgcccgctcttggaatttctaagcttaacaattggggtcctggtataatgcacctggatgcttcct

SEQ ID NO: 447483 - DNA, 122 bp, Homo sapiens
ggaaggcgggggatgggcaggcaacgttagaactgagctccacagacacttatcccacctcgggaggtggagaaaggagaacagcatgtgcatttatggacagtgtgaactgtgataagcaa

SEQ ID NO: 447484 - DNA, 122 bp, Homo sapiens
caatgagccatgaacgcctgggcttcttccctagttttcccgcagtagactctgggggcgcggttgcaaaacctagctgcccacaggggcgggcccagggtggtacattttgcaccttgaag

SEQ ID NO: 447485 - DNA, 122 bp, Homo sapiens
ggcctcctgggccaggctcgggtcgacaggtgaagctaggccagctgcccaggcagtccccggagagggccctgcctcaaggagcaagcacggaaggggaaggccagcctgtagagcttgca

SEQ ID NO: 447486 - DNA, 122 bp, Homo sapiens
tctcccggcagctgtggtggggccatcagattccagcctacctggttgtagaggaccatgcgcaggtgggtaggaagaagcacccggagggccgagtgtggcacagagcacctagcccagga

SEQ ID NO: 447487 - DNA, 122 bp, Homo sapiens
cactccagtgtaatgactcagtgagttaatgataatagctgataaaatgggtactgcgggcgggtcccgtgctgtgctctgtgcgcgtgctgtcccacttcaccttcacaacttcatggtgg

SEQ ID NO: 447488 - DNA, 122 bp, Homo sapiens
ctcccagatggtttggggtttgcattgtcctgggatggtcccctgcacccgacctgaagacgctactcagcattcagaatagaaagctctatctgtaatggctctgtagggggaaaaatgat

SEQ ID NO: 447489 - DNA, 122 bp, Homo sapiens
aaccccaggtcttgaagaaatactgtcccagctgagccccgcgtttacaagatgaagaggcgccccagatgcgctgaaagaaaggccaaagctcgtgcctccttccactgcctgcggtagaa

SEQ ID NO: 447490 - DNA, 122 bp, Homo sapiens
tttttatctataaaaacaaagcttgttacagaacaaacacgttcacagtaaaagaccactcgctgaggcacgaactgaagaaatgctactgtacttacaaaccgcttctagccacatcacat

SEQ ID NO: 447491 - DNA, 122 bp, Homo sapiens
atttaggggccttgcaggaatttcctgttatgtgatctgggtcatgcaaatagccacaaccgagctgaagctgcctcttcaccccctctttctgaggggaaacacaggctcttgactcacta

SEQ ID NO: 447492 - DNA, 122 bp, Homo sapiens
tcaagagctatttacacctacaacagcccaccagcgcctgaccacgccggagccaatcagcggcccccaagcttgtctgattctgtctgctccaatcaggaggcgcggtccttccagcctct

SEQ ID NO: 447493 - DNA, 122 bp, Homo sapiens
tcccgaagcccgcgtcctggtcccgccagcccacctcctgtatccctgccacggcccctgcgtcccgggtccgggtccgggtcctcagctctgtggccgctcccactagctgattttgacag

SEQ ID NO: 447494 - DNA, 122 bp, Homo sapiens
acctcagtggcaggcaggcaggcggcaggcagagcgcgctctccgggcagtctgaaggaccgcgggaatgtggaggggtttagagacaggcaacaggaaaccactcagagctctgggctggg

SEQ ID NO: 447495 - DNA, 122 bp, Homo sapiens
acagcaactcagagagtgacagctcagttgtaggaaaccaaaacaaaaccggatacttagcggaagtcctgtggtgttgtttggagcaaggccacaagccctctctgggaaggaagtgctga

SEQ ID NO: 447496 - DNA, 122 bp, Homo sapiens
gctctggaagcactgctgagagctcacctgccacaccttcacctggggcatggggataggcgagaaatcccttgcctctccttctgggtctccccagaactctgttccttacctgggcaacc

SEQ ID NO: 447497 - DNA, 122 bp, Homo sapiens
tgttcagccaataagagtaagccacgcccagccaagggacctataaaaggcaggtccagccgataaacccacactctgcatttggacgtgtaagatagtagagaagggtctctacaatttaa

SEQ ID NO: 447498 - DNA, 122 bp, Homo sapiens
ggctacagcagaatagggacccagcgcactcgcagaacgaggggggaggcgaggcgagaacgagcgggagtttttttcccgactacgattggctggtgtaattgtcatcacttgaaaaggca

SEQ ID NO: 447499 - DNA, 122 bp, Homo sapiens
tagcagagacccaggcttcttggtagaggcccagagccctgtactgccaccactgccggacgatgctcaggacctcggggctggcactgctggctctggtcagtgctgtgggcccaagccag

SEQ ID NO: 447500 - DNA, 122 bp, Homo sapiens
cactgggcggtagctccgggaggggcggaactgcggtgggaggggcggggcctcactgggcgatcgtagtggacgagaacctagactggaaccggtccgaagaaaaaaaggcagccctcatt

SEQ ID NO: 447501 - DNA, 122 bp, Homo sapiens
cccgcccctccctacctaattaaggaccctaatcagcttggggagattaagggctctggccggctgtacccacgcccccgccctggcctgggctggcaaggaagacctgtgggcgggcgtca

SEQ ID NO: 447502 - DNA, 122 bp, Homo sapiens
gaggctcagggtgttgcaacacctaaaagagcctctaggcctgagcctggatgcaccctccgccctctggccccgtagtgtgtgtctgagacagagtgagacaccagcaacatatgcttgga

SEQ ID NO: 447503 - DNA, 122 bp, Homo sapiens
ccaacacacatgcacacacacacacagggatgtcaagggaggccaagtgggaaacctgggcgtctatctctacccttctaaagtggtgtcataggaagcaaaaatagaagttaaataatacc

SEQ ID NO: 447504 - DNA, 122 bp, Homo sapiens
ccgtgctaattgctgccctgtctctccagactactccagtggttttggcggcaagtatggcgtgcaggccgaccgagtagacaagagcgcggtgggcttcgactaccagggcaagacggaga

SEQ ID NO: 447505 - DNA, 122 bp, Homo sapiens
tgacctttattacggggtgggtgcaatcacatgcgctgtgggaggaggggcaggtggcctcggcctgatcagggagcactagaatggggacaacattttctattgttcagaaactaaaagga

SEQ ID NO: 447506 - DNA, 122 bp, Homo sapiens
tatcaactgagatgacttcgaaaataaaccagaccctgacctaggactttagccgcactccgtcccccctagcgcagcagctgacatatcagctagtgttggcagtaacaggatttgcagac

SEQ ID NO: 447507 - DNA, 122 bp, Homo sapiens
ctgcggactcccctgcggatctggcttatataagaccgcggctttgatgtcaacctctcccgggagccaatggcaggggggcggggataaggaaaagggggagtggctatcccaggttttac

SEQ ID NO: 447508 - DNA, 122 bp, Homo sapiens
tcctggccccccaaagagttggagagaaaaggtttggcttttggagggacgaggagagcacggcctggggtgggagctgccctgctttcgtggccttcacactgtggacctctgacctctgg

SEQ ID NO: 447509 - DNA, 122 bp, Homo sapiens
gtacataataaaaacaggctttttagaataacacgccctccaaaagaacttctgatggttcgctctcacctacagaacaaagcccagctttcaaggtatttgaacattcagcccctaaccca

SEQ ID NO: 447510 - DNA, 122 bp, Homo sapiens
ccatgaattatgaatgaagccaactgtattactggttactatttttaccagaccactgtacgcgactttagatccctcaacttcccatttagagcacttatcacggcttgaaatattagagc

SEQ ID NO: 447511 - DNA, 122 bp, Homo sapiens
tgactttttcctttcaaattggcaaagaggaaacacaacagacacagcgggtgttctgaacgtgtccagggtgccctcagcctgctggaacggaaacaagacggccctttgtacctcagcat

SEQ ID NO: 447512 - DNA, 122 bp, Homo sapiens
tagctcattagaatgagccccacaagtgtggcagaaagtggacgtgtgctgctcatgctccgctagcctgggaagaggccagtgtcagggcagcttcccatggcaagcccttgaagcattgc

SEQ ID NO: 447513 - DNA, 122 bp, Homo sapiens
ccccgctcggccaccgtctgcggcgctaagaaaagcgcgggaggtgcccgtagggcgggtcgcgtgacgcgccggtgtcgtgatgcgcctgaagccatccgcgccatcttggttgaggacga

SEQ ID NO: 447514 - DNA, 122 bp, Homo sapiens
tggggcactgctgagccctgactagcgcggccgggttgatctccaacacggcaatcttcccgccaaagagggaggccagcaagcacagcacctgcagggacgcggtttcaacatcgttagcg

SEQ ID NO: 447515 - DNA, 122 bp, Homo sapiens
aaaggccgagactcgctaagcagggccattcctgccaaagttgcacagatttgaggctggcgcacaggcctcagagagagtggtgaaggctgtctgaaggcaggggtgggcaggatgccaaa

SEQ ID NO: 447516 - DNA, 122 bp, Homo sapiens
tcgctggggcacccatttaccctgcagtaagaattctgccgtgactcgaggcagagcctccgcagacccccctgcctgcccctcgagccacgcaggtggtgggagctctggatcctctgttt

SEQ ID NO: 447517 - DNA, 122 bp, Homo sapiens
tgactgacctgattctaattgcagacattgagctgatgttattcttggcgcaggacagagcgattactcagtagtttctgttaaagtgatcctttgttaaacttctgctcccaacccactcc

SEQ ID NO: 447518 - DNA, 122 bp, Homo sapiens
ctccattgcatgtgaatgggaaaacataacacacagctgtcaaaatccactcaagcaggccgggcgcagtggctcacgcctgtaatcccagcactttaggaggccgaggtgggtggttcacc

SEQ ID NO: 447519 - DNA, 122 bp, Homo sapiens
gtgccttgagtgccccgtgaagacttctctttaatgacctccaggtgtgttcctgccccacgcactcgggctgaacaaacgatccgcttcagaaaccccgcttctctgggcttctggcattt

SEQ ID NO: 447520 - DNA, 122 bp, Homo sapiens
caaagggtttcatctacatgcaaaaccaacaccgtaggaactactttccgcatgcggagccgggtacagagggaaggggcgcgtccgggaactacttgccgcatgcggagcggggtacagag

SEQ ID NO: 447521 - DNA, 122 bp, Homo sapiens
tcccttacccagctatgattcagttgtctctgccctccctcttaccctgcctctgtgtttcggtgagagtctctgtatatgtactgctttctgttttgttgcattgtggggcagaggcctct

SEQ ID NO: 447522 - DNA, 122 bp, Homo sapiens
tatactatttattaatataaatgcatatgaccttatacacaaggttaaatgcaaataccccgtgggtgggccgggctcagttcagggaggaagccctgactgaaaagcctgcagtttaggtt

SEQ ID NO: 447523 - DNA, 122 bp, Homo sapiens
gcacatctgtgaaacgagcacagcaacagtgcccaatacaattgctacagcagcgtctatcggtgcagatgtcaacggcagagctgtgcaggtgagtcttcctgtctctccttggtgtgcct

SEQ ID NO: 447524 - DNA, 122 bp, Homo sapiens
ctgcaggacgttgaccaggaccatggcattggtcacatggctgtggagctcccgctgcttcgctgcgaaggacaggttgatgagggtccaggcgacgatcccggggcgcccattgaagaaca

SEQ ID NO: 447525 - DNA, 122 bp, Homo sapiens
taaggaagggagggaggggcacagccaggaggtcccaagactgggaaatgaatgcagcagcggtagggaggggagcggccgctgcaatcagaggggggctgggtgacaccgagaagcctgct

SEQ ID NO: 447526 - DNA, 122 bp, Homo sapiens
ctggattactggcacatgatacagtccggctctagtgtaaccaccattgtttacaatacccgaggcaatttgaaactccacgatttcaacaatggcatcaactgactaaaaagttttgagta

SEQ ID NO: 447527 - DNA, 122 bp, Homo sapiens
tttgggtttctaattccatactctttgtgctgtctctctttttccagcatgtgctgctcacgcatttggtaacatcatagtaaacatattacagtatatagcatcctacattaaacataatg

SEQ ID NO: 447528 - DNA, 122 bp, Homo sapiens
cacttaaggctgctttcctgaaccaccgcaggtcccttttcccacagccgctcgagtccccgtcagcagcttgcttgccctctcaggacttgtttgcagggtgctaaaatggcactggggct

SEQ ID NO: 447529 - DNA, 122 bp, Homo sapiens
cccatagatttagaaagaggctgacacatcgggtaactagtttaaggtcatctgatcatgcgggtaagcgacatttttcagaaaccaaggccctccctctcatctcactagtgggaagggtg

SEQ ID NO: 447530 - DNA, 122 bp, Homo sapiens
catccaatattcctgtgtaccgcttcgtgcagcgacccggagacctcgtgtggattaatgcggggactgtgcactgggtgcaggccaccggctggtgcaacaacattgcctggaacgtgggg

SEQ ID NO: 447531 - DNA, 122 bp, Homo sapiens
gtccttggcagtgtttctcagtcctctcaagaattagtcatttcatcatccctcactagacgcagcaagaagggataaagaggaaactggaaatttgttctgaagtacatctccaatatttt

SEQ ID NO: 447532 - DNA, 122 bp, Homo sapiens
tccattttaaatattctgtttctgtcatgtctacccctgaggcatgacctagtccagcctcgatttcagcaaactcaagatagaaaatgattgcttaaaatcacagccctgaacaaaactgg

SEQ ID NO: 447533 - DNA, 122 bp, Homo sapiens
tcctaggagaaatggcccagagacgctaactgtgcatctgctgagaaacgtcactcactgcgttaccccacaattctccacagagatccacagggggtcccccagtccccacaattatccac

SEQ ID NO: 447534 - DNA, 122 bp, Homo sapiens
actgcctgagaactggaaaagccgtctctgctcagccgaggggttctgccatctccggggcggggacctcaccttggaaagacccctcccactccgcccctcttggaatgcggctgagcggt

SEQ ID NO: 447535 - DNA, 122 bp, Homo sapiens
aaattcccatcaaaataaaatgtgaaggttcttgccttcagtaagaaaaaatgaggggaacgtcggtgtttatgagtatttcacatttcaaatgtggctcttttgttgcaccatgaatgata

SEQ ID NO: 447536 - DNA, 122 bp, Homo sapiens
cagcctcattgtggagccgctactgtcagttctgtgccatgggtcagagcaaatctcgcgcgtctgtatttctgcatcgttacgagactttagaaaaaattctgcggtaaatttaaaaaata

SEQ ID NO: 447537 - DNA, 122 bp, Homo sapiens
ggaagttatggaggtagggcgggtgtagggcccggttcgatcccgagctaggcagggagtcggcgccaggctgggtggtgctcggctacgcggagtgggcgagcgagcacgcgcctgcggtg

SEQ ID NO: 447538 - DNA, 122 bp, Homo sapiens
ctcttttcaaaaaaaaaattatttgatggttttccacttgcagaagtaacatatacttatcgtagcaagtgaaacaagatgtataaaaggggaaaattcgtcatctccctccccagggctct

SEQ ID NO: 447539 - DNA, 122 bp, Homo sapiens
aaaaaaaacaaaaccaaccaactaaccaaacaaacaaaaaaacgggagtgagagaggttacgtgactatagattctacagacattaaaaaaaggttaagaaatattatgaataggctgagtg

SEQ ID NO: 447540 - DNA, 122 bp, Homo sapiens
tggtctgcttcctggtgcagaccaggtctccccagagggaccctcctgagctgagctgcccggggcacctgtccctggatgtgaactgccttggttgtaccttggtggggggacctttcctg

SEQ ID NO: 447541 - DNA, 122 bp, Homo sapiens
ccacgcagatgggcatctggtcctcctcgcagtacagcttcaggggctcgcggtgcttctcgcacacgcccatctcgccgccgggccccgacggccgctcggtgcgcagctgctttaccagt

SEQ ID NO: 447542 - DNA, 122 bp, Homo sapiens
ttggtctgtttcatccctctgccgcagctgggccctggtcctgatgctgaggacccgaagcgggcacacctgcgccgggcaagaatgaacccagccaatgaggagcccgcatgcggggggcg

SEQ ID NO: 447543 - DNA, 122 bp, Homo sapiens
ttcttaactctgtgcctgcctgacattgctagtcaggccacaagtagagttgctgggtgtcggcctgtgaaaagtagcccggcccgacaaagcatcagaatgcttcttattcttgggcactc

SEQ ID NO: 447544 - DNA, 122 bp, Homo sapiens
ggagaggggcggggacttcgcgactgcaggcggagggagggcgggtgtcgctggcgcaggcggtgacagggagacaccgccgccactgagtattcctatgcaagtttcttcatcttcctgtg

SEQ ID NO: 447545 - DNA, 122 bp, Homo sapiens
ctgggcaacaagagcgagaatctgtctcaaaaaaaaaaaaaaaggaaaaagaaaataatgcgtattcacttggcacaactaggaaaaaggcaactttgaccaaaaaaaatatatatatatat

SEQ ID NO: 447546 - DNA, 122 bp, Homo sapiens
tgtggaacgggaggagccctcagctccgggtcacgctgggtggagggcacggtgaggtcacgctgggtcatggtgagctggtgaggcaggcagcctggtgggcacccgccttgaaaatgacc

SEQ ID NO: 447547 - DNA, 122 bp, Homo sapiens
ggaaatagagtgcaagcagtcagggtctaagggatctgccatgttctatgggatctggggcgcattctgtgcactgctgaagtagagacattctcccctgccttgcagggttgctggagggg

SEQ ID NO: 447548 - DNA, 122 bp, Homo sapiens
gtccacgccggctgactcctgcgggggcgacggctggtttccaggcgagggcgcggcgcccgaggacctccaccccggagagctgccctccctgcggtcgccccggctccccggctccagag

SEQ ID NO: 447549 - DNA, 122 bp, Homo sapiens
ttcgccagcgcccgtgtaaactagcagctccctctttccgtctccttgcttgcgttccttcgacgtgtcacctcacagacgccccttcactgtgtcacctcacagacacccctttgctgtgt

SEQ ID NO: 447550 - DNA, 122 bp, Homo sapiens
gtgaatgaccccagccagtcctggaatggtgacacttgtcaaataaagtcttgacaggcgcggtggctcctacctgtaaccccagcactttgggaggctgaggcgggcggatcactcgaggt

SEQ ID NO: 447551 - DNA, 122 bp, Homo sapiens
ggacacagttctcattcccactaggtgtcgggtttctagagaagccaatcggtgccgccgcggtcccggttctaaagtccccacgcacccaccgggactcagattctccccagacgccgagg

SEQ ID NO: 447552 - DNA, 122 bp, Homo sapiens
ttgcctcacctaaaagaaatccagaggtaggcagttcacgttggcttcatgaaattgttacggatccaggttctttttagtttactaatccagtatccttagagtgtgaccctagtcctcat

SEQ ID NO: 447553 - DNA, 122 bp, Homo sapiens
gcggcccccggggtacagcagcagctggagctggagcgggagcggctgcggcgggaaatccgcaaggagctgaagctgaaggagggtgctgagaacctgcggcgggccaccactgacctggg

SEQ ID NO: 447554 - DNA, 122 bp, Homo sapiens
gcaaaccccgcccactggccccatgcccaacgtaagcctcgcccaccataccccgctcagcgcaatcccctcccactgggccacgcccaacgtgttcagagggcttgtccgccacaagccct

SEQ ID NO: 447555 - DNA, 122 bp, Homo sapiens
cttctacgccctgcgctaccaccacatcatgacggcgaggcgctcaggggccatcatcgccggcatctgggctttctgcacgggctgcggcattgtcttcatcctgtactcagaatccacct

SEQ ID NO: 447556 - DNA, 122 bp, Homo sapiens
cacagcacaacgcagagggagctctaccaaggtgggctgtcattctggcccagtgcccagcgggcaggaggaccacagccagtgagcagggggaccggctcccaggggccggcaggaccaac

SEQ ID NO: 447557 - DNA, 122 bp, Homo sapiens
cgtcggggagggggcagggggaggagagaaaagcaatagggcaggagaataagccgcaaacgtgaaaactagaaaccaggagccaggtggaagcaatccgaaatcgtgtgtagctctgggta

SEQ ID NO: 447558 - DNA, 122 bp, Homo sapiens
gacagccctgggtggaggccctgctgacattgaagagtgcctgccctcctcccctcaatgcggtagacactttccaaaacttacgtcatcctcactctcactccagtgggataatgggaggc

SEQ ID NO: 447559 - DNA, 122 bp, Homo sapiens
tccgtgagtgccaccgcaccttccggttcccgccggaagtttttcaaacgccagaaggtccgcctcgcttcttccggaccaagttagccacagacctccaaggcgcggcgctaccgaacggg

SEQ ID NO: 447560 - DNA, 122 bp, Homo sapiens
gggagggagggaccctactattttcaggccccgaatcctccactctctggccctgcatggcgttcctggagcccgcaagtagtcacatttgctcattaccccgtcctggaagggaggaccca

SEQ ID NO: 447561 - DNA, 122 bp, Homo sapiens
tggggagtccacctcctcactaaccccagagggcttgtgtgacccatagattgggcttcccggctctaacgccctccacaccttcccatctccctggaatacaaatcgcccccttttccagc

SEQ ID NO: 447562 - DNA, 122 bp, Homo sapiens
cgtgattgctctgggagctttgcttagacacttgaaactacaggagaaagaaggatctagcgaaatatggctacagagagccctgctacgcgtcgggtccaggtggcagaacatcctaggtg

SEQ ID NO: 447563 - DNA, 122 bp, Homo sapiens
tacacaacaatatgcaaataaggtctgctctgtttcctccaggatcaggaacaagtttcccgcaggagaatgtggactttcctattcaagaccatgactgcactggagaggaggtggggcaa

SEQ ID NO: 447564 - DNA, 122 bp, Homo sapiens
caaatgacccatccagttccaaatgacccatccagttccaaatgacccagcggctgagcccgctgaacctgctgagccctcaagggccagctgctgtccctggtgctgaaaccccttgtctc

SEQ ID NO: 447565 - DNA, 122 bp, Homo sapiens
agctgtgcgacggagccagaggaggcgtaaccagggcgatactggagcgcagaatgggggcgtggcctcaaagatcaaagcccattggtcaatgagaaatatgaagcggaagggggcgtggc

SEQ ID NO: 447566 - DNA, 122 bp, Homo sapiens
cacgccctctcactgcgccctcggtccgccccagatcatccgccagctggagaacaacatcgagaagacaatgatcaagatcatcaccagccagaacatccacctgctgtatttggacctgc

SEQ ID NO: 447567 - DNA, 122 bp, Homo sapiens
agcaggtctcagcctcattttacccagcccctattcaagatggagtcgctctggtttgaacgcctctgacggaaaccttccaaatgtcagagacaaggcaaagtagcttgggtcaccaggtg

SEQ ID NO: 447568 - DNA, 122 bp, Homo sapiens
tttccccagtggggctattaataattgtaatgtgatgtaatcttaaatgggcatgtgttgcgtgctcaggccctgttctgagtgctttatgagaaagcattcctcatgagtctggatgatgg

SEQ ID NO: 447569 - DNA, 122 bp, Homo sapiens
acagagaacttcccatgtttcaggaactatgctaggtcctgcagccacacataagtaagacgtgattctcacctgaaaggaactacagacaaacataagactgacatatttaatggtaagtg

SEQ ID NO: 447570 - DNA, 122 bp, Homo sapiens
gccagggtggggcccctccttcagaatcaagcaaaagctgtggccctcagggggctgcaccgagcacctaggacattgatcactgcatccaaaggtccaaagttttattgttttgaatacat

SEQ ID NO: 447571 - DNA, 122 bp, Homo sapiens
attttgaagtgatttggatctctcttgtatattttccctataaatccctagcctggtaggcgtgtatattttctgctgcaatatttaatgcttagttccttgcctacatctaagaaatatta

SEQ ID NO: 447572 - DNA, 122 bp, Homo sapiens
ctctccggccccagcttcctgcaggctctgccccctgaaactgacaacccagctgtgaagcggcaaacatgatcatccctctcttgtgtgtgggaggggtgaagattcaatgaaatatcaca

SEQ ID NO: 447573 - DNA, 122 bp, Homo sapiens
gcctggaaatcttcttttaagaattgtctattcgtgtctttagcccacttttttttctctcgcactgatttgagttctttgtagattttagatattagtccttttttggatgtatagattgt

SEQ ID NO: 447574 - DNA, 122 bp, Homo sapiens
aggtctgtgttcgcctgctggttagaccgatttaagttttagagtcccaggagttctgggcgagctgcagcctaggggcctggaaggccaggaagacttgaaggatctgtgttggtaggcct

SEQ ID NO: 447575 - DNA, 122 bp, Homo sapiens
agagctgcggaggaaaactcttgcagtccttgcaggaggctggagcccaggagaactgaacggcctttggtggaagactgagctccaaactggactggggccagggataccagtcagggctt

SEQ ID NO: 447576 - DNA, 122 bp, Homo sapiens
accccgcggccgaggggactgaaggccggctgggccaggggaactcgggtccacagaccccgcagtcgccgcggggacgcccgggtcccgccacagccggttctggccggttccaaccagtc

SEQ ID NO: 447577 - DNA, 122 bp, Homo sapiens
cctcgcgcctcgagcgctgggctcagccgcagctcacacttgaacgaagatcagcctcggcgaagcgcctaggcgccgaggcctgggtaaaaacaactgcggccaagccccgccccgccgcc

SEQ ID NO: 447578 - DNA, 122 bp, Homo sapiens
atcaccaccgaaaattactgacgagtcaatcacctcagatctctcaagcagtccagcctacgcaacagtactccacctctgcgcctgtgcggggagggtaaggcggggccagcaacttcctc

SEQ ID NO: 447579 - DNA, 122 bp, Homo sapiens
ccaagctgcgagggaggtggtcactggtgggaggtccgggcgcggggtctgtcgtcttgccgcccccaccaggctccccgcgcaggccgcgcagcagagggaggcggcggcggcgtcccgcc

SEQ ID NO: 447580 - DNA, 122 bp, Homo sapiens
gggagctgcagcacagtcgggggtgtaggttatgggggtgagtacggtgccccggaggcgcggctgatgtgtcttcctttctctatgaccgggtgtgcaacggacctctggtctgaccctag

SEQ ID NO: 447581 - DNA, 122 bp, Homo sapiens
ggtctggggactgcctcggaactagggggccgcgtggagtgggatgtctaggccagggcccgccaaggaggagcggccggctcccgcctccgggcctgggcaggcagcgctaggggccggtc

SEQ ID NO: 447582 - DNA, 122 bp, Homo sapiens
ggcacacagggctttctttgatcgcaggcaagtctgagcctgctgggtcctgaggacaggcgcacagggtgcaaacctgggcaaaacagcatctgattatactgataagtaccctttacgag

SEQ ID NO: 447583 - DNA, 122 bp, Homo sapiens
tccaacctcttagtcactttggagagcctcgttcagtgagtcagcacgggacctggagctcggggacccctcacagccaggccagtgcacacttggaatctgcagtttgtcttaggcccctg

SEQ ID NO: 447584 - DNA, 122 bp, Homo sapiens
ccatgcccctcacctgacccactggcctccagggaggcttctggcttagccagacaaaggcgggagttgaggaagggggctgaaatctgaggtcccccggacccttctgagggccctcctcc

SEQ ID NO: 447585 - DNA, 122 bp, Homo sapiens
aattaagaaagtggttccatgaaaacacatcctttgttttatgagcagaatcagagattccggggagaaacaggacccagggagatgagagctttcagagataccggagagcttggctggtc

SEQ ID NO: 447586 - DNA, 122 bp, Homo sapiens
gcctctgcacgctgagcctccagctgctgcctccactgggctgcggcggcgttggcctctcgcagggcgcctgccagcttgttgttgctgtcctgcagtgcgaaaaactcggcctcccactg

SEQ ID NO: 447587 - DNA, 122 bp, Homo sapiens
acatgttgcacaaattctatcttattgatcaatttatcctacttttgggcccatttaagacgttccatcatagaagctcaatttttagaagttgtcttctactttcacctactagcactttt

SEQ ID NO: 447588 - DNA, 122 bp, Homo sapiens
ctgccctggggtccgtgggcaagttgcccagggtgggggtgcctagccaggtgcagtccccgccccgcctagtcctcggcgtcacgcaatgctcacctcgcctcttccccactaacatccca

SEQ ID NO: 447589 - DNA, 122 bp, Homo sapiens
agcctgggaaggccccaggggtccaacaccaaaattaaaggtttattatacacaagaggacgttctgtccctcagagtggctggccaccctccccactctggccaaggtcctgcacagaggt

SEQ ID NO: 447590 - DNA, 122 bp, Homo sapiens
aaataccagctagggaagctgcggttggcgagcaggcttaggagtggagtcagctgggggcgagccttcagaaacgccactatcagaggttgcaggctccttttaattagggatccgggtga

SEQ ID NO: 447591 - DNA, 122 bp, Homo sapiens
tttgaggataaaaagctgggccctgtgcagttttccaagacaacctctgggcgccgctgtcgaccaaaaggaagtgaaggcttctcaattctgcaggagcgtcaggcagggtgccttcctgc

SEQ ID NO: 447592 - DNA, 122 bp, Homo sapiens
tcagtcaatgttccaagaagcgggtcagggcggagggtatccatctggactctggaagggcgtgggtttgacatcggtaggtgtgacaggaaagtccagcctgtcagagttgggctctacag

SEQ ID NO: 447593 - DNA, 122 bp, Homo sapiens
tacgagggtcccgccctcatgaccttccgcgtacgagggtcccgccctcatgaacttccgcgtacgagggttcccgccctcatggccttccgcgtaccagggtcccgccctcatggccttcc

SEQ ID NO: 447594 - DNA, 122 bp, Homo sapiens
actcctgacctcaaacccacctcagcctctcaaagtgctggaattacaggcgtgagccaccgtgcctggccggaagatgctttttgatgagcccaagggcagacctctgaaactgctcacat

SEQ ID NO: 447595 - DNA, 122 bp, Homo sapiens
gtaataactgcatgaagatctgccttaggagtttttgccgttcagaaggatgaatcagcccgttagccttgtccctgagtaataatttaatacacttattagggtttcaggagaggtccggg

SEQ ID NO: 447596 - DNA, 122 bp, Homo sapiens
gtccgcccccaccgggcagggtgcgctgccgtcctcccagtcccccccccgggcagggcgcgctgccgtcctcctagtccgcccccccgggcagggtgcgctgccgtcctcccagtcccccc

SEQ ID NO: 447597 - DNA, 122 bp, Homo sapiens
gatttgaactttggggggctccagggccgaggggtcaagaagcaggacccccaagtcgaacgggatctctacctgtccctggaggacttattctttggctgcaccaaaaaaattaagatctc

SEQ ID NO: 447598 - DNA, 122 bp, Homo sapiens
ctgaagcaacagcaattagctatcttgcttctcgcagcacatacaggagacagctgagtgcgctaaaccacgcactgactggtgagcgctttgcaccaattagtagcaggtgctacagccca

SEQ ID NO: 447599 - DNA, 122 bp, Homo sapiens
cgccaagggcaaaaagccgcggtgacggggcaaaatgccgcggtggcgggggcaaaaagccgcggcgggaaaaaaccgcagcggcgggggcaaaaagctgccgcagcggtgacgaaaagcca

SEQ ID NO: 447600 - DNA, 122 bp, Homo sapiens
agtggtggtttgcgaaagctcaaacctacctctttggggttattgaagaagaggagggagcgtagagggaatccctgggaagatccaggatttctcggcgcgcttgtcccgattgggaactg

SEQ ID NO: 447601 - DNA, 122 bp, Homo sapiens
gaaatgcatcaagacatgctcaaaaactatatttttcataggattgttacaatggccgggcgcggtggctcacgcctgtaatcccagcactttgggaggctgaggtgggcggatcacgaggt

SEQ ID NO: 447602 - DNA, 122 bp, Homo sapiens
gcacgtgcggccggaagggaagtaacgtcagcctgagaactgagtagctgtactgtgtggcgccttattctaggcacttgttgggcagaatgtcacacctgccgatgaaactcctgcgtaag

SEQ ID NO: 447603 - DNA, 122 bp, Homo sapiens
ctgctggattaatggtagcagggaactgcctcctctccccaccagcaccatggctggcatcgctcaggtgggcagggtagagtaaacaggaggcatagctgcagcttctgtggcagagcttg

SEQ ID NO: 447604 - DNA, 122 bp, Homo sapiens
gctgctgtcatgctaccactttaacttcctgggtcggtttgggtaacctgaaggggcttgcgtgtgtttcctgatggcatgacttgtatttcctaaaggtgtccgcctctagacacccagca

SEQ ID NO: 447605 - DNA, 122 bp, Homo sapiens
tcggttcttcaaaatgggattataattcatttattcttctggccctaaaggaacttttaacgattgaaactgagtcttttcagttggagccagggaatgaatctgggtatgtccaaatgaga

SEQ ID NO: 447606 - DNA, 122 bp, Homo sapiens
gctctcggccaatgagcggcgtccacatgccgcggcggcggcgaaaggggaggcagcggccgataaatgctattagagcagccgccgcggagccgtccccgacgccacctccttttccttcg

SEQ ID NO: 447607 - DNA, 122 bp, Homo sapiens
ggcctgcggtcggcagcggggcctctggggagagctcctgatttcactttcatgctctgccgccactgagaggagttaggaaaataccacgggctgcgtgatttaatcgccctgctatttgt

SEQ ID NO: 447608 - DNA, 122 bp, Homo sapiens
agctgcagtcgcagacaattgttcccctgaatgctctgctccagctgccctctcagagctcgtacctctgccaccaggtggctcaggtcactgctcaaagggatttggtgacaggcatccag

SEQ ID NO: 447609 - DNA, 122 bp, Homo sapiens
gagctccctgaccccttctttcaaaacagatctctttgtctttgtcttcatttctgcattcgtcccccctttgttcaatcccctagcaaccaacagcgacaagtggtggccgggacaggaac

SEQ ID NO: 447610 - DNA, 122 bp, Homo sapiens
aaagcattttggtgtggagcctgtcccctccagtcatccttaagggcttcctggaggaagcgaatttcagggagagcttaaataccctttgggtcaagagttatcttccatccttcatcatt

SEQ ID NO: 447611 - DNA, 122 bp, Homo sapiens
gcgcacagccaagtcgctgtggacctagcaagggctggatggactcatggagcctcagggcgggttggggaagctggcgaggccgagccccgctttgggcttctgggcgccctgacctcgct

SEQ ID NO: 447612 - DNA, 122 bp, Homo sapiens
ttaggcagtatcgcgttgatttcagtccacggaacctctggtgaccgggtagtgtgactccgtcattggtagccccccgcccacacagccgggactcgcggcctttgaggacgtgggcaggg

SEQ ID NO: 447613 - DNA, 122 bp, Homo sapiens
tgtgcagctctcgccggagccgagcccagccgagcgtccgccgctgcccgtgcgcctctgcgcctccgcgccatggccggcctcaactccctggaggcggtgaaacgcaagatccaggccct

SEQ ID NO: 447614 - DNA, 122 bp, Homo sapiens
cagcaggttggggtgcccctggggctgggagatgctgccctgggcccctcagggggcggccgtggtaggatggaccgggccgagcgtgcagaccctgggcaggtccctacatcggaaccagc

SEQ ID NO: 447615 - DNA, 122 bp, Homo sapiens
ccaggcttctttttgtagaatcgtttccatctgctggaatccagcatcgcccccaccccccgccccatttctagggggatgcccccactgctgacctctcctgctgtagatctatttctggg

SEQ ID NO: 447616 - DNA, 122 bp, Homo sapiens
ttgttgaagattagatgtagctcagcggctggagataacttttctacttccagccaaagccgcacctcccctcgctccaggatgtcaatgttccagccggagatcagtttgatcactgggag

SEQ ID NO: 447617 - DNA, 122 bp, Homo sapiens
ggtgctgttggtgctgagggatgactgctgcccaaaggcagtagagagaggaggggccttcgatgctaaaggccagggggcctcttgtttctagttccgcagccccgcagcccacggctaca

SEQ ID NO: 447618 - DNA, 122 bp, Homo sapiens
aacgccaccaggaagaaaacgggtttggcggcgcggagaaagcgccggaaaacacagcagcgctccgtgacgtcacttccgcctccagcctcaaacctggaggagcgctcgggaactgcaac

SEQ ID NO: 447619 - DNA, 122 bp, Homo sapiens
atgtcagcgccagccttccggggcgctggcctgggctcaagtcaggcaatgaccaggggccggtgagctttcatttcacctcccccaaatctcctttccccaaactctagacacccccaaaa

SEQ ID NO: 447620 - DNA, 122 bp, Homo sapiens
gccgtggcggccgaactgtcgctcaacagacgggcggggccgagcgtgaggcggagtctgcgcactgctgctttgcaaatgaaggtgggcggggtggagcgagcgtgagagacgtgcccccg

SEQ ID NO: 447621 - DNA, 122 bp, Homo sapiens
ggcaggcaatgctggcagagggccttgcccctgagagggaggccctcctggccctcactccgggggacccctgtccttggccccagcctgccaagcgagagcggcccctcttcttgcggtgg

SEQ ID NO: 447622 - DNA, 122 bp, Homo sapiens
gcccgtgtcccagcccccgagcgcccgggatcgcctgggagacgcatccgccgcccactgcgcatctctggcccgtcagctcggaaaccctccgagcctcacagggccgccgccccggcccc

SEQ ID NO: 447623 - DNA, 122 bp, Homo sapiens
ctcacctcctagagaccaggctgccatcatgctctggaagcttgtggagaatgtcaagtacgaagatatctatgaggtgagtcgacacccccagatgcaccttagagctttgcagatagaga

SEQ ID NO: 447624 - DNA, 122 bp, Homo sapiens
taaagagaattgaaagtaaggcttactaatagttcccttcccagttatccagctaggagacgggattggcaaggagaactgaaaaacacaaaaaatgcccctcctctcgcactcccttcccc

SEQ ID NO: 447625 - DNA, 122 bp, Homo sapiens
cagcgcggacggcggtgcggacagggagctgtattgacctgcgttctgcgtttcagagcccggaccgccctgggacccctgtggccctcaagttcccaagtgacctcgtccggggaggggac

SEQ ID NO: 447626 - DNA, 122 bp, Homo sapiens
cgaggacagccctttccgggttccatgagcctcaggggaagcaggaggcgcctgcagacacggagctgaccccggaacctgcctagctgcggggccgcctctccgctcaagcacccactcag

SEQ ID NO: 447627 - DNA, 122 bp, Homo sapiens
gtgcttacccccaacttgcctttttctgatgcctgtaacaacgatcacattctcctcaagcgagaaggggctgaagaggctgacagaggtcgagggtgtggactagtggatcctcccactgg

SEQ ID NO: 447628 - DNA, 122 bp, Homo sapiens
agatcttcaaaccagaagcaccgcgggccctccccaacgggcttctgcttacctccactacgtgatgcagtatggcccccgggaggccgcccccagattctagaggggcttaccccagacac

SEQ ID NO: 447629 - DNA, 122 bp, Homo sapiens
taaggtccaggagagggaaagggggaaaaaaaagcaaacctactttgctttggaaaaaaccgtctagaagataaattgggagacaggaaggagggaaggaaggaatctgccacaaaccagaa

SEQ ID NO: 447630 - DNA, 122 bp, Homo sapiens
cttccttgcctggcagggatgcttgccaacagaggtatcctacccttctcgggattcccccggtctgcactttgggtggcctggattcctgctccaagctgtagacttgcttcttatgggat

SEQ ID NO: 447631 - DNA, 122 bp, Homo sapiens
cggaggacgccgccctcacagcaggcggggacaccgcaggccggacgggaacgatgccgccgtgtttggtgtgagagcttcacagtggagtgtggcccccacggccttgtgcccccgcgatg

SEQ ID NO: 447632 - DNA, 122 bp, Homo sapiens
ccactccagccaatcagccacgtcgaacttggtccagaaccccagaggtttagcgccaaacggcttgtccgggggcagcgagagcaggcgggtcggtgagagggagcgcgaggcccctgaca

SEQ ID NO: 447633 - DNA, 122 bp, Homo sapiens
ctgtctctggatttcttttctatcacctagatgcttcatccagccagaagatagccttcacgttccccatctgtcttcagagaaaaagagctgggacaccaagaacaagctgttagatcact

SEQ ID NO: 447634 - DNA, 122 bp, Homo sapiens
gtcttgtatttgttgtgcttctgggaaatattttcatttgcaaaaacggctgcttctgcacgtggctatggttgcgtgcttctgcacatgtgaaaagttttacatcacacttggaggagaaa

SEQ ID NO: 447635 - DNA, 122 bp, Homo sapiens
ggacacacagccagaaagtggcagagctgggatttgaacccagatgggcctggctccaaacgccatgcttgcctctcaggcaagccaacctggactggttggctttgacatgcctcacttat

SEQ ID NO: 447636 - DNA, 122 bp, Homo sapiens
aggcgccgggtggactccaaaatggcgacctttagcggggccaaacatcgcgagaagttgcgggtggttgcagttatcgcgacgcttcggtgcggcttctgccttagtaccttagcaagcgc

SEQ ID NO: 447637 - DNA, 122 bp, Homo sapiens
gtgtggatgcggcgaaacgctgaggcgcggccttcgctgtgtggtggggactcacaagaccgacgtcaagatggttagtggctctgaatagtaagggagtactttgagtaggtcctgaggct

SEQ ID NO: 447638 - DNA, 122 bp, Homo sapiens
gcctccacagcccccggaaggcaggtggaagtgggcatggagggtcctacgcatccccagcgggggtctgagggcccactgttgctcagctgggggatttggggacggtgggagggcataca

SEQ ID NO: 447639 - DNA, 122 bp, Homo sapiens
gtatatgaaaggtgtgttgagctcaaatggtcagcccggggtcatggggtcctggggtggcggggagccgagaagagggagatccacgaaggaggctttcaccccttggcagcgggcggctg

SEQ ID NO: 447640 - DNA, 122 bp, Homo sapiens
cctctgctggaggtcttcccaggagcctctagtcacagggtgcaagatgtgatagattgacgcaaacatggtcccaattctgcatccctccctgtgtctgtgcccttgcaatatggctgcat

SEQ ID NO: 447641 - DNA, 122 bp, Homo sapiens
cccaggggcgcgcccggcctccgccgctgcatgtctgcgcggacctgcccggaacggcggcgcgacggcgctcaggtccccccggggtcccgctccagcccccgctcccagcccccgtcctc

SEQ ID NO: 447642 - DNA, 122 bp, Homo sapiens
tggctgcactgctgccccggatcccgcggggctgaggctgctggagccccggagcttccccgacgcggcccacctgctgccccatccctgctctcgcgtactcccgcgcccccgccgacccc

SEQ ID NO: 447643 - DNA, 122 bp, Homo sapiens
gggaaaccatcacttggaggtgtcggggatcgaaccgaggcctcatacatgcaaagcatgcgctctaccactgagctacacccccttactataacacccatttgtaataattttcaggaggt

SEQ ID NO: 447644 - DNA, 122 bp, Homo sapiens
tgccaaccagatttgtaactaggctcctaccaagcttagctttcaaaaatatgcatactacgcataaacatactatttctccagtgttaccctctagcaaaacgtccctttgtgcttcagag

SEQ ID NO: 447645 - DNA, 122 bp, Homo sapiens
cgccgccgattccgcagatggccactgggtggcgcccgcggcgtgcgggccgggccttggcgctgactggggcggtgcgtccagcctgcagcttcccggacccccagcccgcagcggggctg

SEQ ID NO: 447646 - DNA, 122 bp, Homo sapiens
taaggacatggtcagttggaattttcttagttggggcccagtcagtggggacctggtcagcgagggcctagtcagtgggacttggtcagtagggacctgggcactggagtcctgggtagtgg

SEQ ID NO: 447647 - DNA, 122 bp, Homo sapiens
ggccgagaaggcacagcaagcacacgtggttggccacagcactggacacacgtgtccatgcgtgagcgtggtggggtgccagcctcaacgtcatccccagtacctggccttggagaggctga

SEQ ID NO: 447648 - DNA, 122 bp, Homo sapiens
acaagggcagcagcagccaacagggcgagtttgggcggcaccaccgtgagtctggaagcccgtggagggtgcctgcagccctccctgctgctgccaggcgtctcagcactgatgtcccccag

SEQ ID NO: 447649 - DNA, 122 bp, Homo sapiens
ggtggcatcaggagtgcctgtgcgtgcagaggaggcgtggagtggcttgtcactttacgtcgggctgttagggaaggttttccagagaaggcagcctttgtacaaagtggctctggacaata

SEQ ID NO: 447650 - DNA, 122 bp, Homo sapiens
tcttcaggagaagcgcccgcaatttcaacgtgcccatgtgcaaagctgcagacgtcacggcggtggaggtgggggcttccccccagaagacatccacgttcctaacatttatgtaggtcgcg

SEQ ID NO: 447651 - DNA, 122 bp, Homo sapiens
ggagtaggtgcgggtgaagatggcggcagccgaggccgcgaactgcatcatggaggtgagcgcttggagcgccgccgtgggcgggaggcggctttgggtcggtgtttcacgcctctgtggtg

SEQ ID NO: 447652 - DNA, 122 bp, Homo sapiens
ggaagtggttcaaaggcctatggtctctactcctgccacccacccttctctcccccagcccgcgcctatggcctcatgaggagttccctgttatcatttgaagaggaagagaagactaggtc

SEQ ID NO: 447653 - DNA, 122 bp, Homo sapiens
aacatctttgttgattccatctgagcttagttactctactacgtatagtgtatgatgttacgggtctagaataactagattagggtaaaaaataagtataggaaaaaaaaaattagtggctg

SEQ ID NO: 447654 - DNA, 122 bp, Homo sapiens
atcgcgcgatgcgtcgccgacgcttccacgacttccgcagctccggcagtcgcccgggcccggcagccccgcccctggccgaacacccctaaacccggggacacctcctccggcgtccgcgc

SEQ ID NO: 447655 - DNA, 122 bp, Homo sapiens
ctgagccttccagctgtcaagtttgaaaagaagccaccgtgcctccagggcctcctgcaccgcagagaggggctctctgctctgggaggctgctcagcgcctctcccacggcctgcactctc

SEQ ID NO: 447656 - DNA, 122 bp, Homo sapiens
caacaccaaagtcctggagatcccactcctgccggagaacagcatgcgagccgtgtaagccgcgggggacctccggcctctggcagggggcggtaggagggggcgtgcctccctcccagtcc

SEQ ID NO: 447657 - DNA, 122 bp, Homo sapiens
ggcggggaaggctaaatgcggccggccggtgagtggcgggagcagctgcagccccgcccgcgccctcccgggtcccttagtctgggcagctgcccagctcgggccggtctgaccggtttggg

SEQ ID NO: 447658 - DNA, 122 bp, Homo sapiens
agaggagttccggtgagctctgtgcacatgtgcgcggaggtaaagaggcttgggaggcctcgcctgagagagtgagccaaggacatggagagacagtgtattacaaaaggtgccttgtacct

SEQ ID NO: 447659 - DNA, 122 bp, Homo sapiens
cacgtcaacctcccacaaacagcatggcttcgtggcgtgagcacccggttcggacctgaacgcctgggtccgagtcccacctccccctcctgcctggtctgcagccctgcgcaagtcctctt

SEQ ID NO: 447660 - DNA, 122 bp, Homo sapiens
gaagatatttcatctgaatcaggcagtttcaaacatcagaatgccagattcttcttctcccgctttctctagtcactgagcttgccacctcccatcttggaatggtgaaagcaaatgttttc

SEQ ID NO: 447661 - DNA, 122 bp, Homo sapiens
tcaccaggaaaggtgagcgcattcacactgcaccccagacgctctgcacttccaggccttcgccctagagaaattcttgcctgtgtgcacaaggagaaacgtacaaggatgttcattacaga

SEQ ID NO: 447662 - DNA, 122 bp, Homo sapiens
cccgcttcccagccgtgggtgtctgtgtctgctcacggcttcctccttcagcctggaccacgggctggaagtgaacgtaatctccagagccagctgtttgctgtagcctttacctctgaaag

SEQ ID NO: 447663 - DNA, 122 bp, Homo sapiens
agaactctagctgctgcgtatcgcgctatttacccggcttgtggggagtttcaagttgggcggctactttttggcttctatttaggagctttcttttagaatcggagaattttaggaagtta

SEQ ID NO: 447664 - DNA, 122 bp, Homo sapiens
gtacatttagaagtattttgcctccaatattcaaccacagtaaaagactcagtgagaacgcgtggtggcgctgcaggttaagatgacggaaaatacaactgcctacgcagctccaggatcca

SEQ ID NO: 447665 - DNA, 122 bp, Homo sapiens
aagtgtccatctagactttgggtgccgtagaatgactcagagtctgaatcaacatgaaatcgagaaaacgtcctttgcaagggtttcagggaacacctgaaatcctgaagaactgtttgtat

SEQ ID NO: 447666 - DNA, 122 bp, Homo sapiens
ggaagccggcaatgagtttctgctcaagtccatgccagccagagaaagccaccctgaccacgtccagaagtcagtgtgttgtgaatcccagcaactgagcaggctccagcagggatggatga

SEQ ID NO: 447667 - DNA, 122 bp, Homo sapiens
ctttgcagggcaaaaaaaaaaaaatacttcctgaactaacatatgtttcacaagtgtgggcgcagccgggacaatttcgagacaacttcgagacaatttcgaatggacaaattgcggagaag

SEQ ID NO: 447668 - DNA, 122 bp, Homo sapiens
gagttcctctttagaaccgaaccactttcctctcgcctcccacgtcctcactaagttactcggggaccccaaggaaccaagaacgaaaagtaggaaggtccagaagcgttaacacaactgtg

SEQ ID NO: 447669 - DNA, 122 bp, Homo sapiens
aatgcagcgatgtggcactgatgtgctagttgaagccatactgtgtgccataactaaggccgcaaattccttcagaggtcctggaagccacagtgtctggggttatgctggttgggtgggtt

SEQ ID NO: 447670 - DNA, 122 bp, Homo sapiens
aacagcctgggcaacatagggagaccttgtctttacaaaaaatgttaaactttagctgggcgtggcagtgtgcacctgtagtaccagctacttgggaggctgaggtgggaagatcacttgaa

SEQ ID NO: 447671 - DNA, 122 bp, Homo sapiens
ggttgcaatgagccgagattgcaccattgcactccaccctgggtgacaagagcgagactccgtctcaaagaaaagaaaagagtccaagcgtggtggcgtacgcctgtaatcacagcactttg

SEQ ID NO: 447672 - DNA, 122 bp, Homo sapiens
gtcaggaacacaaatgacccgtagaagatgattaattttgttatagtgctttcaccgcaacgcatcaaataaccattgaaacgatgatgaatgctggttgtgtagccgtgaggtgaatgatt

SEQ ID NO: 447673 - DNA, 122 bp, Homo sapiens
agcaggcagagggccagcttctgagataggagagagcgagcaaaattcagctctgcgaagcgaggggcccagtctgttgttagatctagatcttcctttgcaatgcaggattggggcacttg

SEQ ID NO: 447674 - DNA, 122 bp, Homo sapiens
gccaacaccccggagaaaacactgagctactccaaccacagtggcgcgccaagtaggaggcggtacctgaggaccacgcctgcgcgcggggttacgcaagcgcgcagcctttgcgcacgcgc

SEQ ID NO: 447675 - DNA, 122 bp, Homo sapiens
atatactggaggttgttttggtgataaccaaagcctagtaagattctctgctcaggggttcgccccaaaagaaaaacacctggtccacaaagcttaacacctatataaataaagtaactgta

SEQ ID NO: 447676 - DNA, 122 bp, Homo sapiens
accctgggaaactggggtgccctctttgcacagagtccagatcatggacagggctgtaagcgggatccatgcctccatctgtttgatcccgttcaagttggaaacagtacagtccctatgtt

SEQ ID NO: 447677 - DNA, 122 bp, Homo sapiens
cagcgccgccacagctcccgcctcagcgcccctcagccagcgcccggccgccgccgacgccgccaccaccgcctcaaccgccctcccggcgatagaagccgagcggcaacgacgaagtgatt

SEQ ID NO: 447678 - DNA, 122 bp, Homo sapiens
ccgccagtggcagagcctgatcgaggagtcggctcgccggcccaagcccctcgtcgaccccgcctgcatcacctccatccagcccggggcccccaaggtatgtggcacccaccaccacctcc

SEQ ID NO: 447679 - DNA, 122 bp, Homo sapiens
ggacggcgtctcggtgggggcgcccggagactctggggtgttgggtggggccttggttgccgaattccgtgccggtgcctcccccagtcaagccccctgtgcatgctgccagccgccgccct

SEQ ID NO: 447680 - DNA, 122 bp, Homo sapiens
tctccttgttggccagactgagaaccttcagcagcaagagctgctgttgctgtgggtcagcgatggaagtgatccggacgcggaccgagagcatggtggtggcgcgggagaagtttttgaaa

SEQ ID NO: 447681 - DNA, 122 bp, Homo sapiens
cattctgacctcccactagtgatgtgccggtgggaaacacacaggaaggaaaggcgcgcgcgaggcctgcccccggaacgaacgacgcctgcgtggacaccctcctgtgagtgccggaggcg

SEQ ID NO: 447682 - DNA, 122 bp, Homo sapiens
atccgcccgcctcggcctcccaaagtgctgggattacaggcatgaggcaccacacctggccgccagccagctttttatatattagaaaaatgagtcctttatatgagatgcattttttccat

SEQ ID NO: 447683 - DNA, 122 bp, Homo sapiens
ccatcagatcagcggtggcactagattttcatagaagcacgaaccctattgtaaactgtgcgtgcgggggttctagattgcacactccttatgataatctagcacctgatgatctgccactg

SEQ ID NO: 447684 - DNA, 122 bp, Homo sapiens
gttaatatcgaagtcgccaattccaggtcttcaggccaagtgctccggtctgaccaaccgcggaccctaaagcctagcccataggctgcatgaggcaggggcggggtaaagcttggccaatg

SEQ ID NO: 447685 - DNA, 122 bp, Homo sapiens
taattttttaataagcatgtttttacaaatgctgtttcctgagaactgtcgcaccacatgcgacatgccatgcatgcgactggaacatgccagatatttgtgggtggtcccttcgtgtcacc

SEQ ID NO: 447686 - DNA, 122 bp, Homo sapiens
ttgacattaatgccaatgtattcctcctcaagcttctccaagtttcctagagtgttgagtcgctaggagtgggcagcttcagttgtagggtggaggaggctggcaggttcacaccaatcccg

SEQ ID NO: 447687 - DNA, 122 bp, Homo sapiens
aggggctatcaggccggggcagcgacgcggggattgtggctggctgcggttggggtgtagcgggtgcagcattcttctgggcagagatggcctcttccagggccaagaagatctcattgcct

SEQ ID NO: 447688 - DNA, 122 bp, Homo sapiens
agtattgagctgggccctgattactgtcgactccatgttactggggctgctggaggtttacggagtagaccctcagaggtgcagaagtcttgggcatgcaaagagtcatgcacaagtatgaa

SEQ ID NO: 447689 - DNA, 122 bp, Homo sapiens
gaatgtgtcccccaaagtccatgtgttgaaagtataatccccagtgcaacagtgtaaagacgtgccctctaagaggtcactaggtcataacggccctgctgtcatgaagcactgaccttatt

SEQ ID NO: 447690 - DNA, 122 bp, Homo sapiens
atgccgtggacgtgaaggcgacgaggcatgggtgacgggttccctggtgtcgggaagccacgccccgtggctgtgccgcgcccttgcagccaagcttcccagccttgggggtgcaggtctgc

SEQ ID NO: 447691 - DNA, 122 bp, Homo sapiens
agtctccctctagctaatatctgacaggaacggtccaaggattctgactgcaattgtgcacgtgtgttcagaatcccaaatgaaaggggaaaataatttgtgtttcaaatgcattttggttt

SEQ ID NO: 447692 - DNA, 122 bp, Homo sapiens
tgctgaactccttccctccccaaaaatggagctgacacacagaaattgacacacaaacaccgtaaaacactcacagacactgagacagactactcacctactgagagagagacatccccaca

SEQ ID NO: 447693 - DNA, 122 bp, Homo sapiens
gtgcagggtgaccctgagggtgtgcccagtggcgtgggtgtgtctgtgattgtggccaggcggggcaccctcggaggggagggttcggaagtggaatgcgaccccccagcctctttccccta

SEQ ID NO: 447694 - DNA, 122 bp, Homo sapiens
ttgtcaatgccacagtatctgcaaacaaacctatgggtgcacgccacttccctctcatcccggtggaatcttcccaggttctatgggttattacagttcaagaactggtacgtggcagcctc

SEQ ID NO: 447695 - DNA, 122 bp, Homo sapiens
aggctcggtgggtggtcactggaaaggctgaggctcggttagactaagcctctgtcctctcgggaggacagagggaatgaaagttcagttgatcaccaatgccaataatggaagcaaggcct

SEQ ID NO: 447696 - DNA, 122 bp, Homo sapiens
agatcatagagatcaccatcccccataccccagcccaaggagagcctgttcccagagtggcggctctggagagcagctgccctgcacttaccgggagagtctctgccctcagccagtaggga

SEQ ID NO: 447697 - DNA, 122 bp, Homo sapiens
tcttagaattaaataaacccaacagcgcacacaccctgcgcggttgcagactcccagccacgtggcccccggcccctgcccacccaccccccaggtcagcgtcgcaagagcgagagaaggag

SEQ ID NO: 447698 - DNA, 122 bp, Homo sapiens
agtgggcggcccagcgcttgagccccaggggaatgactgagagacattagccagggccaacggccagaccccacccagaggccatgtcactgcctaaagggttaggacccctgagccccagc

SEQ ID NO: 447699 - DNA, 122 bp, Homo sapiens
ggtaccagcactactgactcgtgtgagggtccagtctactcttcccttaggggtgggggtcgggagggggctgggctggagggctccaaagcttttcacccctgacttccctcccgtgtgcc

SEQ ID NO: 447700 - DNA, 122 bp, Homo sapiens
ctgtggggagaaactggtggtgtggcccttccacaaggaactgaaaccaacatctcgtttcgtctaggcctccgacagttgtaatgtgattaatgttgaacatgacatggaaccacttgccc

SEQ ID NO: 447701 - DNA, 122 bp, Homo sapiens
tctttcaggggtagatttatctttggtctctgcttacccttttgccaggctttctgggatcgccactgtgaacgtgtagtttagtggtcggcctgggatttgggcagttcctactcagattc

SEQ ID NO: 447702 - DNA, 122 bp, Homo sapiens
ctcaggatgaaggaagagcgcagacgcggatcgcgaatgggaaactttccgcgtctggggcgcagagggagatccgaggcagccgggagccctctcttctccgcagaggagagcacacgagg

SEQ ID NO: 447703 - DNA, 122 bp, Homo sapiens
ttctggaggctggcaagtccgagatcaaggcaccagcttctggcaagggctttcctgaggcgccatcacatggtggacggcaggagggcagatacagagagccaactaacagaagccccttt

SEQ ID NO: 447704 - DNA, 122 bp, Homo sapiens
cacctgtaatcccagcactttaggaggccaaggcaggagaattacttaagcccaggaattcgagaccagcctgcacaacaaagtgagaccacgtctctagggaaagaaaaagagatgacacg

SEQ ID NO: 447705 - DNA, 122 bp, Homo sapiens
cctcaggtgtagcccgctctagaaaggccgcctcgggagtaccacccactcctgacggggcggggagttctctccgaccccacccgttccaaggacgcagccctgtgattggccatgacgcg

SEQ ID NO: 447706 - DNA, 122 bp, Homo sapiens
gggtgacggacgcacctggaaaatcgggtcactcccacccgaatattgcgcttttcagaccggcttaaaaaacggcgcaccacgagactatatgccgcacctgtctcggagggtcctacgcc

SEQ ID NO: 447707 - DNA, 122 bp, Homo sapiens
ggtaattagaactgacagggaattgtatgattaatgacgtgggacatgagagatttggaacgagataaaaaggcttaccttgaggacagccttattaggagcagaggcaaacacaggttttg

SEQ ID NO: 447708 - DNA, 122 bp, Homo sapiens
gtgctgggattacaggcgttagccactgcgcccggccccagccaggcagttttaatcgagcgctcacaaccactgagacgcagtgaagcacccaccataaaatcccaggaggccgaccgccg

SEQ ID NO: 447709 - DNA, 122 bp, Homo sapiens
ccttggtcgagggctctgaggctgctcatgggatggtactggcaagagggagccttaccgcgtgcagcccctgcctgtcctgggccgccttgctccgggccaactcgtacggccccgcaggc

SEQ ID NO: 447710 - DNA, 122 bp, Homo sapiens
aaaagagaatgagaccaataccacactcttttctgggagatccagtttgctttttagagccgagacatagtttagagctatgcttcccagcaaacagtgcaaagagagaagtgtttagttgc

SEQ ID NO: 447711 - DNA, 122 bp, Homo sapiens
gaagtgaggagcgtctctgcctggccgcccatcgtctgggatgtgaggagcccctctgcccggccgcccagtctgggaagtcacaagcgcctcttcccggccgtcatctcgtctaggaagtg

SEQ ID NO: 447712 - DNA, 122 bp, Homo sapiens
tggctgctccgggagcccctcctgttggtggcaacaataaagagtgagagaccgccagggcgagatgaagcttaggcgacagggatcaaggtcgaaaaggctgcagcttgtctcgtggggaa

SEQ ID NO: 447713 - DNA, 122 bp, Homo sapiens
ccttaggccacccaccccaggacgagggggctcggacgagacacagtctgtcccccaaagcgcggggggtccccctggcacctccaagcccatcccattgacgaagtaaccgcccgctggag

SEQ ID NO: 447714 - DNA, 122 bp, Homo sapiens
acccattagaattcaggagtagggttaataattgtctttggttgtataattgtatgctgacggtataattttgaatgggacagctacctggggcatgcaggggatgataaattgcttgtgaa

SEQ ID NO: 447715 - DNA, 122 bp, Homo sapiens
ggagctggtgctgataacagcggaatcccccgtctacctctctccttggtcctggaacagcgctactgatcaccaagtagccacaaaatataataaaccctcagcacttgctcagtagtttt

SEQ ID NO: 447716 - DNA, 122 bp, Homo sapiens
gtggttgaagggcatcaaacagtctccttttctaatgacactcccttttatagattggcccggatcctcgttcgcctgccggcactcaggctgatgagctccaacataacagaagaactttt

SEQ ID NO: 447717 - DNA, 122 bp, Homo sapiens
tccccatgggaagaggcctggctatttaacaaggaaatgtgtgggtggtagaaactgctccgatgctggcagcggcataaatccagcagaaaggaacaggaacctcagaggcttcctaacag

SEQ ID NO: 447718 - DNA, 122 bp, Homo sapiens
ggaacggcggggcggggttgtagttcgcttgctcctgtcacatcatttctctcacctgtccgctttgggatacgaagagaggcttctgcgtcaagcctatatttcgtgttaaggatctaggg

SEQ ID NO: 447719 - DNA, 122 bp, Homo sapiens
gtgggggcacccatccaggggcgaatgcacgtaggtggtgcccaggcccctccccctgcccggggcctgtccatctccctaggggccaccaaggcctgaaacccagagacacgacacctgat

SEQ ID NO: 447720 - DNA, 122 bp, Homo sapiens
gctggagaggacgcgaggagccatgaggcgccagcctgcgaaggtggcggcgctgctgctcgggctgctcttggagtgcacagaagccaaaaagcattgctggtatttcgaaggactctatc

SEQ ID NO: 447721 - DNA, 122 bp, Homo sapiens
ctgagagcgcatgcgctaagtcctgccgcgagaagggcaggctgggtggtcggcggcttccgcctgtgagagccgggggagagccgggtggactaggcttctcctgggcgggctatggggag

SEQ ID NO: 447722 - DNA, 122 bp, Homo sapiens
ccgttcctatcttccaattgaattccagtatccactattcaacgtggcgagaatgatccacggatgtcccacatgagcaaaatttcaccttctcttgccgaccaagaactgatgaatgaaac

SEQ ID NO: 447723 - DNA, 122 bp, Homo sapiens
gctccccaggaaggcggcgccgtagcgccactctccctcccaggcgaattctggagaccgcggccccaggcgtctcacccattttctccgctggggacccgctgggctccccatccacgcct

SEQ ID NO: 447724 - DNA, 122 bp, Homo sapiens
aaagaagaagaaatgcctggaaatgcactgcttcaatatgctcaaggtagttagttaacacgtggccaactgaaacatactatcactttgaaggcagtggctttcacttcattggaagtgca

SEQ ID NO: 447725 - DNA, 122 bp, Homo sapiens
ttctgcttttgctgactgctatcagggttacatcaaaaacagtattgctggccaccgcgccggcgagcgccgccagggaggcagcggctggaggagcggacgggccccgcagggcccgaggg

SEQ ID NO: 447726 - DNA, 122 bp, Homo sapiens
gttttgccgccccggcgacgtcagcgcgtccggcgttgcttggctaccccgccgttcccccgtcccgctgctgctcacctccccgggtgaaactctgacgcagtcaccgcgggtctcggcag

SEQ ID NO: 447727 - DNA, 122 bp, Homo sapiens
atctgcaaggatctatctagtgtgtgtgcctgggagtgtgtgtgtgtgtgtgtgaatgtgcgcgagtgtaagccctgctgtcggtcccgccggtggctgccctctgcctcccccgcacactc

SEQ ID NO: 447728 - DNA, 122 bp, Homo sapiens
taaccgacctccaaggtgagggtgcagccaggccccagattctcaggccggaacttccaccgctccagggctccctgcactgagggaggccactttgccgggctgcctgcccaatgtccctc

SEQ ID NO: 447729 - DNA, 122 bp, Homo sapiens
tgcgggataactggaggagttatcttacagttgagactttctgcaacctgcagattttgccgtgcccagggcacaagtttttcagggctcctgggcacccccgcgaccgtcatctcacttcc

SEQ ID NO: 447730 - DNA, 122 bp, Homo sapiens
tgggatatttgaattgcagggctggaaaaggggagtttagtcttttgctggtcagactgacgcccattatgtcaatggcaaaatggggaccagaggggcaaccccacagtgcctgggtaatg

SEQ ID NO: 447731 - DNA, 122 bp, Homo sapiens
cctcacacatactacgggatccagggctgtgtattgcaaagtcacattcactgtttagctcggaggcctctctggactttctacgtctgggaataagctaggctaaagctatcatgccccag

SEQ ID NO: 447732 - DNA, 122 bp, Homo sapiens
gtggcagcccgcactcccaagcggcctgtgtgccaggggagggctggtaggaggcgttcccgcagctgccatccaggcttggcaatccatggatctggataacgtcactcaggagctgcagc

SEQ ID NO: 447733 - DNA, 122 bp, Homo sapiens
cacagcccagccatgggccttcccttggggctaccgccccggctcacacctgctggccagcgtatttactccttgctggctgcaccctctcagcagtggctgtgtagaccataaccctggga

SEQ ID NO: 447734 - DNA, 122 bp, Homo sapiens
gccgcctgcggagccggggcggtcaccaggaggacctcggctccgcccccgagaggggtccgcctcttggccccgcccctaggagggggctccgcctcttggccccgcccccagaagggctc

SEQ ID NO: 447735 - DNA, 122 bp, Homo sapiens
gggtgagcgatgaattcacaggtctaaggctgtgactatccccaaatattgttaacaccacgctcacaggatccccaaaatatccgcccctctgtaccatggagtgggaatacacaaacacc

SEQ ID NO: 447736 - DNA, 122 bp, Homo sapiens
tctccttcagcataaaagctgatccacaaacaagaggagcaccagacctcctcttggcttcgagatggcttcggtaagtttcccagggctttgcattactgactctacagcagttgggcagc

SEQ ID NO: 447737 - DNA, 122 bp, Homo sapiens
attgtttatccaggcacagagtgggtcgcattcctgtcctcacctttgtccttgcgcagccggtggttgatatccgctgtatccatccccgagagggacctggtacctctacccaggtttct

SEQ ID NO: 447738 - DNA, 122 bp, Homo sapiens
cgggcgggggcgggggcgggggcggtgccggcctccggggactggagggggatggggtcccgcatggctaaataactccttggcgcctcctgctctgctgtgccgccagggcctcccctagc

SEQ ID NO: 447739 - DNA, 122 bp, Homo sapiens
gatcgggtccacccatcaccgtctggcccgctgggagtcctgctttggggagtgtgatgacgctggagcgtgagtgctgccccttcctggccagcgctccaccgtccggccgccctggctga

SEQ ID NO: 447740 - DNA, 122 bp, Homo sapiens
ggccattgcgtagccacctcatccagatggcacgaagcctccgggctcgggtttctgactcgtctcccaggagccggtttctgtttaccgctgaaaggcacgcctgctgccaaatttgaggt

SEQ ID NO: 447741 - DNA, 122 bp, Homo sapiens
ggaagacctagggctgtctgggtggtccgggaaggcttcctggagaaggtggccataaaacgggaggaacccggagtttctacatcaccctcccctgcaagaggcaatcaaattcacctgtg

SEQ ID NO: 447742 - DNA, 122 bp, Homo sapiens
ggcagcggcggtgcagaggcggcggctgcagacggagcgcggtgttgggggccgagtccccgcgtcccctcctacccaccctcgcgccagcaggaccctctgcgttccggtcttccgctggg

SEQ ID NO: 447743 - DNA, 122 bp, Homo sapiens
cttctaaacatagaaatgaagaaagtttcccatcccaattacataacctatctgaaaactcgtaggcaaacccaatctcagtccttccataatcttactgtgtgtcctttgtacaactcatt

SEQ ID NO: 447744 - DNA, 122 bp, Homo sapiens
agcctgggagaggcttaatttatgttttatggagattagcttgcttctgagagggggttccgccatcaactcgatttctgcacacactcagagctcaggagattgcctgctctctgaaaaac

SEQ ID NO: 447745 - DNA, 122 bp, Homo sapiens
acttcgcttcttccagttcgccatctccccacagagaatgaaccaccagttgcaacttctcggtactcaaccatcaccaagcacagtgtcttgctcaaagtaagtacttggtaaatatttgt

SEQ ID NO: 447746 - DNA, 122 bp, Homo sapiens
aaattgccccaaaagaagtttccaagagggtttacgcttggacagggcatagaacctggccgtgagattgcactttgggtatgatggggtcagtcaccgagcaggcctggggagcagagaac

SEQ ID NO: 447747 - DNA, 122 bp, Homo sapiens
aaacatacatcggcaaagtcttaatcagatgaaagccaaaacccctacacctgtgtaaggcgccacattatctggctgcccctgtgtaggtattttgctgttccctctacttgcaaccctct

SEQ ID NO: 447748 - DNA, 122 bp, Homo sapiens
ttgctatttacgcatctttcccagggctttcagtggcagctgacaggctggttcatactgcgtttcctctggtcgtgaagataaagctacggatgacccacggaggaagacatggggctttg

SEQ ID NO: 447749 - DNA, 122 bp, Homo sapiens
agcctgaccaaagtggagaaaccccttagtctctactgaaaaaatacaaaattagcggggcgtggtggcgcatgcctgtaatcccaggctgaggcaggagaatcccaggaggcggagtttgc

SEQ ID NO: 447750 - DNA, 122 bp, Homo sapiens
tgggccagccaaagggggcgggttcagagggaggagccagctgcctcccgctgcaagccccgagctttgaatcaagcgcggtagtttcagctgtagccaatcctagaacaaaatctttttgc

SEQ ID NO: 447751 - DNA, 122 bp, Homo sapiens
accatcacggcacactccatgcgtgcccgtccagatggcacctgagcctccctgtgcctgcgctgcggcgttaacatctcgcttgtgttttaacctgtgttgctttggtttaaaacttgttt

SEQ ID NO: 447752 - DNA, 122 bp, Homo sapiens
gggttgaatgttctataaatgtcaattagatccagttgattgatggtagtaacatcaatacgtggcttccaaggtttccctagggatcatctccacccccgtcagcccaaagggagaaagat

SEQ ID NO: 447753 - DNA, 122 bp, Homo sapiens
acctttgtgcagctgtttacaaaaggctcagaaccatgaaatccactgaggggcgggtaacgtggattttgcaaaaccgtcatgttctcaaaaggagaccaacagctgaactcacagactgg

SEQ ID NO: 447754 - DNA, 122 bp, Homo sapiens
agtggaatcatgcagatgcctgggctcacctgccctgagaagcaggaagtcaagggaagacgcaaggtatatacagagatgctctgcctcaaacactgtttacttgaggaataaggggaaat

SEQ ID NO: 447755 - DNA, 122 bp, Homo sapiens
ggatagttcctagagtctaggcaagaaaagcagcactgcaggtacagagcctcctcttcccgcaaaatggcggcagctctgccgtcttccagaaccttccccaatctgcgcatgcgccaaga

SEQ ID NO: 447756 - DNA, 122 bp, Homo sapiens
ctctgcttctctgccagaaatggtgttgaaggagtgtcctttccacaccgccacagggggcgccggctcctttccaaaacccggggaggcaccgtagggctgcagcagggaataggggaatg

SEQ ID NO: 447757 - DNA, 122 bp, Homo sapiens
ccatctccctcccaggcaggccctaacttgctggcctccttcaggagggcgatggcaatacgaatccgctgccgcaggaagatgagcatcagcagcaggatggcttcaagcaccgccaacac

SEQ ID NO: 447758 - DNA, 122 bp, Homo sapiens
ttgcacaaaatgagggaagcatgtgctgtgaatctgcaagaaaccccttgccaactgctccgtgtcctttatctgcattttacaataaggcctcctttttcttaaaggcacctgggctgttt

SEQ ID NO: 447759 - DNA, 122 bp, Homo sapiens
ctctggcctccagctggaaacctcctctggtgctctgcaaacccaagttgggatctctcacgttagcccagactggagccagagtgtcaggtggggagaccccctacccccatccacctggg

SEQ ID NO: 447760 - DNA, 122 bp, Homo sapiens
gtggcagcggaacagagacgtgcacggtgagaggcctgggggccggctgtccagggctcccgatggcttttctcccagccagcaggatcagaggagccaaggtccgacttgggcctggctgg

SEQ ID NO: 447761 - DNA, 122 bp, Homo sapiens
aagacacagattcacccaggcagactctcacggtcttgatcaaagacaatggggagccttcgctctccaccactgctaccctcactgtgtcagtaaccgaggactctcctgaagcccgagcc

SEQ ID NO: 447762 - DNA, 122 bp, Homo sapiens
cgtcacttccccttgccggctccggcagcgggttggtcggctgagcggcagaaaggcagacggggactgggaaaggcactgtcggtgacatcacggatagggcgacttctatgtagatgagc

SEQ ID NO: 447763 - DNA, 122 bp, Homo sapiens
cctttaaccacactgagtctcattttaaagtgttgctttcctgaactaccttcgaacctgcggtgactgtcgtagtcctcagagcagggcacctcgatgaatctccctgccacgacctcgcc

SEQ ID NO: 447764 - DNA, 122 bp, Homo sapiens
catccttagcaaactaatgcaggaacagaaaaccaaataccacatgttctcacttataagcgggagctgaaggatgagaactcacgaactcaaggcaataacagacactggggtctacttga

SEQ ID NO: 447765 - DNA, 122 bp, Homo sapiens
attggggcgtggcgaaacagattgcatttcctagaaggcccccagcgatgtggattgaagcgcaagagtgaggagttggataatcatagcagcgcaatgcagattgtcgatgaattgtccat

SEQ ID NO: 447766 - DNA, 122 bp, Homo sapiens
ccggcacctcgggaggctgaggctggtggatcactcgcggttaggagccggagaccagcccggccaacacagcgaaaccccgtctccaccaaaaaaaatacgaaaaccagtcaggcgtggcg

SEQ ID NO: 447767 - DNA, 122 bp, Homo sapiens
gcagcggcgtcaaagtggtcaccttctgtggccacacgtccaaaaccaatcaggtcaactcgggcggtgtgctgctgaggttgcaggtgggcgaggaggtgtggctggctgtcaatgactac

SEQ ID NO: 447768 - DNA, 122 bp, Homo sapiens
tgtgggcacactgcgcaaagctgcgggatccgtccatgtttccactgcccatcactccgacgttggggacttatgttaccgactgtgcactccacctcggggagatgccttttacctgcttc

SEQ ID NO: 447769 - DNA, 122 bp, Homo sapiens
ttttcccctcaataccagaacttaaaattccttaggctgggcaccgtggcttgcacacttcgggaggctgaggtggaaggattgaggtcaggagttcaagaccagcctagccaacatagacc

SEQ ID NO: 447770 - DNA, 122 bp, Homo sapiens
gactgtgtctcgtgcggaagcgtggctgagaaggggctcgacaggctcttcgtcactgtgcggagccttcgaaggacttggatgtgcttgagaccccttcccctaattgctgtgtagggcag

SEQ ID NO: 447771 - DNA, 122 bp, Homo sapiens
caactggtgtcagtaattatgctggtatgcgggacctgaaagaatatctccaagggaaaacgtttcataatgttcaagttgttatctatggagttaaggggaattgtaatcttgtgacaggg

SEQ ID NO: 447772 - DNA, 122 bp, Homo sapiens
ggactgtctccttgacccaaaggaaaatgctaattcaaagctggcttcccctgcctggctcggacttaaacgaggacaaaacaagagctgacagaggccccacactgccatcaccacaaatg

SEQ ID NO: 447773 - DNA, 122 bp, Homo sapiens
aaagaagcagagatctgggagttttccttgattcatcccccctaagcaattaccaagtctcgttggtgtctacctctctacatttgctctactgcttaaacaaatggcccctctcacattat

SEQ ID NO: 447774 - DNA, 122 bp, Homo sapiens
tctctggctgtagttgtgcaggtggactacaaagcccgagatgcatcgcggcccctcctccgaggcccctcagcttccgcagatcgcctcagagtggtcccagcgagaagagggctgggtct

SEQ ID NO: 447775 - DNA, 122 bp, Homo sapiens
agatttgtgggctcggcctgaatccttgggaccaatttcagtgcaagtgacatgatgttccgccccctttaccagccattcccctcgccttggtttacccatctgtagagtgggtggatcta

SEQ ID NO: 447776 - DNA, 122 bp, Homo sapiens
attgaagggtaaacctcagcaatggggaacttcggagggccctcaggcatccactctacccgggggccgccagccgcacgcagcctcggattcgccctgcacatctgccgcccagcaggtac

SEQ ID NO: 447777 - DNA, 122 bp, Homo sapiens
cgggccgccgtctggatgggaagttacggcgaagtccacccagcgtttctcaggtgagggcgccgcgccaggctggacgggcggtgaatccgggaccggcgggcgcacacctgggtcgaggc

SEQ ID NO: 447778 - DNA, 122 bp, Homo sapiens
ggccggagcgcctccctgtaatcccgaaggaattgaaaactaacaaagaaaaggaaatcacgggctaggtcgcgagtatctcgttgtcaccctgaatttgctactgcgtattgaatcacagc

SEQ ID NO: 447779 - DNA, 122 bp, Homo sapiens
gcactgctcgggactggcgcgccgccttcaggccacttccgggagcgccgagattccgctcgcggcatcgggacccagcttatgaccacttccgggacacagccagtcggggaggggacggg

SEQ ID NO: 447780 - DNA, 122 bp, Homo sapiens
taacgtccctaggctgcagatagctcatatgtaaaaatctttgaataaccgtctcacaggcgttcatgagggttaaataatcatgaagctcatttgtaaaaatctttgaataaccatctcac

SEQ ID NO: 447781 - DNA, 122 bp, Homo sapiens
tccgtagaaggctttgaagacgaaaagtgctgtagaggtgctaagcagcagccaacggaccgggcccgctgccagggggtcagggctgggccgaggcggccgcggtctcaggctctggccaa

SEQ ID NO: 447782 - DNA, 122 bp, Homo sapiens
cagcaacaaggccagaagaagcaagctgggaggcagaggtggatgtgttggggctgagaccggctccaggctaacccaggcagagtctgattcagcgatcgctggcgactcctcaggactgt

SEQ ID NO: 447783 - DNA, 122 bp, Homo sapiens
gagaagctctgtcgctgcagctcagggattccataggcctttggggaacatggggacaggcgtcttcccagtccctgttgcccagggcagcaccagccactgcagggggcagctgggcacag

SEQ ID NO: 447784 - DNA, 122 bp, Homo sapiens
cagatccgaccctggcacccgcagctccctgtcttcactgtgccattgctcgttaagctgcgctggttgcctgaccccccaggtgtcccccctggggactgggcacacagtctaggtacttg

SEQ ID NO: 447785 - DNA, 122 bp, Homo sapiens
cacatgaccctacagtgctcgtgaccctgcgctgctcatggcccatgaccctacactgttcgtgaccctgcgctgctcatggtccgtgaccctacactgcttgtgaccctgcgctgctcatg

SEQ ID NO: 447786 - DNA, 122 bp, Homo sapiens
ctttcaagttttataagtccaaagtgctttcaggggctcggtctcacgagaggcaggggacgagaactggggactcattgcattcgaagagagaattttacggtccctgagaggtcagtgag

SEQ ID NO: 447787 - DNA, 122 bp, Homo sapiens
agtcccagagaggggaagtgactggcccaaggtcacacagagccaggacaagagaactgacggggcattcagccctggagagctatcctaactcctggtctactgctggccccagtaggaga

SEQ ID NO: 447788 - DNA, 122 bp, Homo sapiens
cgcgcaggcgcttccggactcgtcacggctccctgagccgacctggcagtccaccccctgcgcatgcgcagtgtgcaggcctgctagattaccacccgggccatccaggcctgcgcggactt

SEQ ID NO: 447789 - DNA, 122 bp, Homo sapiens
cggggccccggcggttcagacccggaggcggctcctcccggaggcagatcctcccggcgtcggccttcggtcctccccgccaaagccctcttgggacaagccggggattccccgccgccgcc

SEQ ID NO: 447790 - DNA, 122 bp, Homo sapiens
tttggtagtgggtaccgcagggataatgactacagaggaggcagggaccgctctgaagaccgatacaacagacgggatgatcggtcgtggagctccagagatgattacacttgggatgatta

SEQ ID NO: 447791 - DNA, 122 bp, Homo sapiens
gaatttgggactgatcatgccacgttccctggaatgggactagaaaggaatcctgggcttcgtgcggaccaaggccccactcaggttgtcatggaaaatgaggctgagagcccctctctgca

SEQ ID NO: 447792 - DNA, 122 bp, Homo sapiens
actacttgccacttcccacttattaagttcaatcaatatgaggaactgaatgatgctctccggaatgtcaatatgatcaaggccctttggacttcattgtaacagagaacaggagatattcc

SEQ ID NO: 447793 - DNA, 122 bp, Homo sapiens
tttacagggtgaagtacctgtcaggtccttctactacatgtaatcctcaaatctctctgacgctcttcctctacagtgcaaatcactctccttcagcagacattgctctctctgtaacataa

SEQ ID NO: 447794 - DNA, 122 bp, Homo sapiens
ggggttcactcaagacctaggctacagccaggtcaagtgcctgctttattcaacaggaagcgctcaagtgggactcaccccccacctttcacagtgtaaagtgaatagggagcaaggcagga

SEQ ID NO: 447795 - DNA, 122 bp, Homo sapiens
tctaccaattcagcgcactccatttccgctcagaaaccaaaacttagtggagagccccagcggccgtggttcgcagaagactctcccataagatgcaccgccatccgtgtagcttggcctaa

SEQ ID NO: 447796 - DNA, 122 bp, Homo sapiens
gcagaaggagggcatgacctggggacctggggacaagcagcaagtcctcagcaggccactcggacctcatcttccgtgtgatctgggggtggcggcaggactctgggggtgggcaggtgtgg

SEQ ID NO: 447797 - DNA, 122 bp, Homo sapiens
ggcgagtcgcagcaagtaaagcgcagcgctgcccatgcccaggcagattaagccgatcatcgggatgatctgcggggaagagggagagcacttttggggtcagccctctccccgcagttccc

SEQ ID NO: 447798 - DNA, 122 bp, Homo sapiens
atccagcgcccacgttcagttgggatattctgacccactcagggctgctccataaagcagcgcgtgtccggatgcaagagcaccgagaactcgaaacctctctgtcaagctgcccattcggg

SEQ ID NO: 447799 - DNA, 122 bp, Homo sapiens
cagagggtaaaactccacagggagaaggaattccctggctgaactttgtaacaatttgaacgaggtgagaaacctcctagtcagaacttgggggagggtacaaatctggcttgcagacttca

SEQ ID NO: 447800 - DNA, 122 bp, Homo sapiens
ttaataaagttatgatagctagcagtgcggtcccgggcgcctccccgtggggtttgccttcgcggcggactcgctcctctggtctacagcctttggaccggtagggagagggtggggccaaa

SEQ ID NO: 447801 - DNA, 122 bp, Homo sapiens
tatcaaaatcacctaggacaataaataatcctactgggctacaactgacagtgccaggcccggggccacatgcttcacatacatgagatcatgtcagatagccccgtagctgcaagcaaagg

SEQ ID NO: 447802 - DNA, 122 bp, Homo sapiens
aggggccctgaaaaacaggatgtgggccaagctggctaaggccgactggaatcaacatagcgctggatttgacctaggtttcacgtaggacctcattatgtgctcattaacatactaaaccc

SEQ ID NO: 447803 - DNA, 122 bp, Homo sapiens
gaaagagggacctggaggctggctgatcaggactgctgtaatctccgaatacggagctggcggcttcgacggccaaaagaatagaaaagagcaaaatgactcatgataaggtccacttgttt

SEQ ID NO: 447804 - DNA, 122 bp, Homo sapiens
caacttatttctttcccgcctcacagaaagcctttacgaaatcctcacaccatctccggacgcaaagctttcgcattcagcttgaggagctaaaccatttcaagccaaggtaggaaacgcca

SEQ ID NO: 447805 - DNA, 122 bp, Homo sapiens
ggatttttggcacacaaagattctaactcaagcccaagttcatcagtgacattgttttctcgtattctcagctaaatcactcctgccctgcagacatcacatcggcactcagatcatctgca

SEQ ID NO: 447806 - DNA, 122 bp, Homo sapiens
ctgcaaactgtcattattatgaggagagggctgaatctgggagtaaacgccttaaagatgcggcaaggggaagaaggagttcaaactattgaaaaacctgtccaccagccaactcgcgctgg

SEQ ID NO: 447807 - DNA, 122 bp, Homo sapiens
cagccctacttttggcattccttgggagcctcagttgttgttcaaggccaaagttatctccgtgctgcaaggtcaccctcttcctcccccagcccctgagatcagatcttatttgctctgca

SEQ ID NO: 447808 - DNA, 122 bp, Homo sapiens
ctattcgatgtgacttcttttcttaacgtgtaagcaagttgccccaaccatggagggggtcgcggtggtgacggcgggcagcgtaagcgctgccaaagccgagggagctgcagccttgccgc

SEQ ID NO: 447809 - DNA, 122 bp, Homo sapiens
tgctcgcctcctctcagtgtcgactgctctaatttttccaggcccagagccacacccccacgggcatcttacactgtgagtagctgtggtttttttcaagatcgaaagttgccacactttgg

SEQ ID NO: 447810 - DNA, 122 bp, Homo sapiens
cccagaagccgaggtccgagcagccgccgctgctttgggtggggggctgacagggctgcgcgcgtcgcgctcttggctggggctgcgcgggcccggggcgctgcgggcggctcagcggcagc

SEQ ID NO: 447811 - DNA, 122 bp, Homo sapiens
gcagccgtaggagctatgagaccgaggcagaagcctggcgcctgactcctatcccagcttcggcctcttagttgctttcccttcaggcctcggtgctctcgagaggcctgtgcacgcttcat

SEQ ID NO: 447812 - DNA, 122 bp, Homo sapiens
ttatacctcttggacactccttccgaaggattgggtctcaagggcagtggggtgtgactacggtagacagggctgattaattttcatccaaaactctttggcggattcccctgctctccgct

SEQ ID NO: 447813 - DNA, 122 bp, Homo sapiens
ccagagtcccttgaactcgggaacctttcaagtcctgagtcaggcggcggtcctccgggacgccagtgcctctcagaaggctcagttttggccagccaagggcttaccgtttaaactgggtc

SEQ ID NO: 447814 - DNA, 122 bp, Homo sapiens
ctgccagacgccagtgttctccggtccctccagctgggggccctcaggtggagagagctgcgatccatccaggccaagaccacagctctgtgatccttccggtggagtgtcggagaagagag

SEQ ID NO: 447815 - DNA, 122 bp, Homo sapiens
tcccctccctctgcgggacgtcctcgctgccgaggtcagaggtgcggagaacatgagacccgaggtgcgttccagcatgttcctgcagccctccactcccgcggttgcgtaactcagatccc

SEQ ID NO: 447816 - DNA, 122 bp, Homo sapiens
tctctttttgactcactctttgtgacgtaggtctttctcaccagtcaataaaatataatccgaaagcaacctccgggctggctttagctcagcggttacttcgacagttctttaattgaaac

SEQ ID NO: 447817 - DNA, 122 bp, Homo sapiens
aggtggaggttgcagtgagccgagatggtgccactgcactccagcctaggcatgagccaccgcgtccggccttatgattctatttatatgaaatgtccagagatggagttttgtcatgtttg

SEQ ID NO: 447818 - DNA, 122 bp, Homo sapiens
ctttaactttcttctttcccggggtgaaaactttgctcggagctggcggcagctcgcggacgttattggccggcgccccgcccggcggccccgccccccgcccccgcgctcccctccgcccc

SEQ ID NO: 447819 - DNA, 122 bp, Homo sapiens
cacctgcccagggctctgcaggaatgtttgcaatccccagggctcctactccagcgtgggcgccacataactaattcatcggggctgaagggtcttaaaaataactggaggatttttagact

SEQ ID NO: 447820 - DNA, 122 bp, Homo sapiens
ctaatgtaggtggagatgcacctctctagatggacagctggcaatttgctggggcgtggacgtcacgttgagtccattgagacgcaggcctgcagggaagagaagtcgggtcagggcgttct

SEQ ID NO: 447821 - DNA, 122 bp, Homo sapiens
tgttgtaaaaggaggaagaatgtgtgtgtaagtgtacagctgttttccagaacaccaaatcgaagctcagagatattgcacaactcaccagcacagcgaggaagctactgaattgggactca

SEQ ID NO: 447822 - DNA, 122 bp, Homo sapiens
ggaaagggaatgaaaaatgaagcaacaaatgacaccacccaggctggcagccctcgttcccggccagaccccgctcctcaggcccggctctggcgccgggtggcgtccagcccctgcacgcg

SEQ ID NO: 447823 - DNA, 122 bp, Homo sapiens
ccgccttcgttgcctgagtgacagctagtagggaagtcgcgtctctaagcaacctgcattcgtccggggtcaggaatctgttcccctgccacggatatttgcgtctaagcagaatttgttaa

SEQ ID NO: 447824 - DNA, 122 bp, Homo sapiens
aaagcacatctggccttggagtttgaagaatttgtggacctgtgtcattgttaagtgatccgtgctgctttgtgatatgaaatgctttcagcactccgcagatatgtgctacttggtccacg

SEQ ID NO: 447825 - DNA, 122 bp, Homo sapiens
ccagtcctggcttgtggtttgtcaactgaaaaagccaaacaatgtaaaataaagtttattcgtagccaaataggagagaccttggcaagggaaacacaaccccaagaagcctatagtgagtg

SEQ ID NO: 447826 - DNA, 122 bp, Homo sapiens
ccgacaggagcagggagttggggtgggtagctccgcaggtgcacgctgcggcccttagggcgacagcctcggaaaaggcgcatctccggctgtgggtttctcgggggcggggcgcaggggcg

SEQ ID NO: 447827 - DNA, 122 bp, Homo sapiens
aaagcgctggaataccaggagaaaatagtctttcaaaaggtagggcaccatcaacaccttcgcgacaggattaagagtttctagattcccaaaggtccaggctgataggtgagaggagcaac

SEQ ID NO: 447828 - DNA, 122 bp, Homo sapiens
tttggaggatgcatggtgccctcttcagaaacctccttgagccaaacgttggtgagaaagcgtatttcaaagacaatctctaagcctgagtgtgggtggtatttgtatttttggagggattc

SEQ ID NO: 447829 - DNA, 122 bp, Homo sapiens
gcgtgcgtgtctgtctttgcatcccctctcccatctctgtctctgtcccactttttgagacgtagtagatataagatgctgaatcctgaccagtttaaactagctatgaaaccttgagctat

SEQ ID NO: 447830 - DNA, 122 bp, Homo sapiens
aggagaagatgggttgaagctggacacagggaacagtcccaaacccattcctgccacccacggcttcctgccactgctcttccggagaatgccacaggcaaagctggaaagtgaccaaaaaa

SEQ ID NO: 447831 - DNA, 122 bp, Homo sapiens
aatatttgaagggtcctagcgtttgctttcttgttggaggcccagaaagcactgacttaacgtgtgtgaaagattgtagacagagacgggataaagagccccgcgctggaaaaagagcaggc

SEQ ID NO: 447832 - DNA, 122 bp, Homo sapiens
gcacggtgggccgagcacagaactaccagaagcgcttccagaacctgaactggtgaggcccggctgctcccgcccacccccaccccggcgcagaacagggccacgtcaggtttcgggcaggt

SEQ ID NO: 447833 - DNA, 122 bp, Homo sapiens
aacagacttgggaaagtactgctccaagctcaagctgctctcactaatgatcctgtttctcgtcttcatgttaggtgttttcttaataatggccacaaggtggcatgcataatacctaattc

SEQ ID NO: 447834 - DNA, 122 bp, Homo sapiens
gcccccaatcccccagccctgcgcccggactgaagcggcggcccccacctccagcatcctcgagcgatggtttctcccacaactaccccggtcaggtccagcacttgggagctgactgtgct

SEQ ID NO: 447835 - DNA, 122 bp, Homo sapiens
tcttactgccacaaagagtccgatctgtcagtcttatgatctctgttttaatgttaatgccggtcagttgtgtccaaactccagcaggaagagggcctaataaggcaagtccaccctgcctt

SEQ ID NO: 447836 - DNA, 122 bp, Homo sapiens
gatctcaatcgccaggtggacgccttcaatgcgtggagaaatgcaccgagctgaaaccagcgcgcagcctggcctggaacaacgtggttacactgctcacgacccaggtagtgcagcccaag

SEQ ID NO: 447837 - DNA, 122 bp, Homo sapiens
ttggtttaattcctttgccattgtaatagtccacaacttggtttgggacttcagccagcacgctctttgccagggcagctggagatgcctgcagggaagaagaaatcatcatgacgttggct

SEQ ID NO: 447838 - DNA, 122 bp, Homo sapiens
cttttacatatattggatcgtttagtccttagaacaacaccatgaagtgagatttatctccgcttttcagattttacattttgcagtttacagataaggaaactgaggctcacgtcaccagt

SEQ ID NO: 447839 - DNA, 122 bp, Homo sapiens
gtgatggggaggagtctgggaagcagggacccggggggcgcgggggtcctcacctcactacgcggccgccgtccgctcgcgggtgcccgccgctcgtccgaggttctgggtcccgccgcgcc

SEQ ID NO: 447840 - DNA, 122 bp, Homo sapiens
acgcttgcaacacagtgactaaagacacagatgtgcgtgcctggcgtgacctctggcctacgactgtgttcagtgatgatgatgaaccaggtggtggtttagaagaattcagcttgtcaagt

SEQ ID NO: 447841 - DNA, 122 bp, Homo sapiens
tgaaggtgccatggagtcctcttaaagagggacgagggccagactgaagcagcacaaggccggggacacccatgccaagcagtgggagcacgcaggacagacacagcaggggtctggggcac

SEQ ID NO: 447842 - DNA, 122 bp, Homo sapiens
ctctcttgttaccgtggtgatgtttggagagcttacctaaatactctttgagatagcagccgaactctccacatccttttagcaccaactagtcatgccacttcttttccttcctcccccac

SEQ ID NO: 447843 - DNA, 122 bp, Homo sapiens
tgagccgcccccagagcccgaggagatcgtaagggtcctggggaggacaccgcgagggggcggagggggagcccgggaggcttcggattgctgggacggcccgtgactgctgcgtccacatc

SEQ ID NO: 447844 - DNA, 122 bp, Homo sapiens
agatttagatcttctgactgttgaagctagaaaacaacaaagcatttttagtctggtcagcgtaattttttagggaatatttactgcattgcgtcatattaagttttatggtaaatatggca

SEQ ID NO: 447845 - DNA, 122 bp, Homo sapiens
tagaaaatggacgtgcccccaggaggagccaccgcttacattgtaatcactcaagtccatcgccagaaaacacaagaaggattgtcttgccagaggttagtgaccagggacttaaaggaaag

SEQ ID NO: 447846 - DNA, 122 bp, Homo sapiens
gcctcggattgggcctcacgtagtgggctggacagaggatggagcctcttggcgtaagcgcggttgggcggggcattcctggattggcccactccggcgtcgcagaacgcttggcgtatcgt

SEQ ID NO: 447847 - DNA, 122 bp, Homo sapiens
gaactggggagaaaatgtacggaggacttttcgcccctgcggtcagctggaccaggtggccggcagcgagacggaacaagtagaccaggctgagggtgaaggcgcaggcgatcagcagcatg

SEQ ID NO: 447848 - DNA, 122 bp, Homo sapiens
ggtaaccgtgtatgtgcgtgcgagtgtgtctgtgtgcgtacaaggtccggagaagcgaaacggtcgcaggttcctacagaccccgaccctgttcccttggccacctggtccccggtagctgc

SEQ ID NO: 447849 - DNA, 122 bp, Homo sapiens
atgccaggtccacagtagaagcccatacatgcttactgcaggaattaatgaaggactaaacgaagtagcaagtgagtgaataagaagatgaggagcgacccttggtgggcggcgcgggaaga

SEQ ID NO: 447850 - DNA, 122 bp, Homo sapiens
cggctgtccccactcagtcctggtggggtcgcacgtaacggtcctgagctatgcataagccgtttgaccacgcatggagaattttaccacccagagacacgcgagtggccctgtgcaagttt

SEQ ID NO: 447851 - DNA, 122 bp, Homo sapiens
gagtgcagtggcacgatcttggcttactgcaacctctgtctcccggtttcaagcgattctcgtgcctcagcctcccaagtagctgatattacaggcacacgccaccttgcccagctaatttt

SEQ ID NO: 447852 - DNA, 122 bp, Homo sapiens
caatcaaacgcctaggccttagctcgagaaccaattgcaacggtagggcggggcttgttgcgcccggccgtgccccgaggcctccgcgcgagggcgtccaaggccaagcgaggactgaggcg

SEQ ID NO: 447853 - DNA, 122 bp, Homo sapiens
ctgccttcgcaaattttagctcacgtccatgcagtgccggctctgtgccaggcacaggcccgagggccacatcttcgctaagtcaccagctcagtgcgaggcatgggcctaagagccgcgtc

SEQ ID NO: 447854 - DNA, 122 bp, Homo sapiens
aagagcgtatggtgccggccagcaggagcgagggctgcggacaggatggaggcagccaggcgccagccaggagggcttcctggtccagccacacctgccccggtgacagccacaggttggtg

SEQ ID NO: 447855 - DNA, 122 bp, Homo sapiens
ggtatctttagagttgggcaaatccccactaggttgatttgtcctggaataagtcagcggcgtcattggttggttctgttctttcacacacaaacgtcctggaataagtcagcagcatcatt

SEQ ID NO: 447856 - DNA, 122 bp, Homo sapiens
aatgctgctcaaaacacatgcctagaacaaaatttaaagtgcctaccgatccacaaccatcgttatataagaaacacatgtataaaggctaaagctatctaaaattgaagattttcaaaatc

SEQ ID NO: 447857 - DNA, 122 bp, Homo sapiens
tctgtggggccccagtgactcaaaccccttgtgaaatgctggctgcttggtatgaactgacgcctcaacaatgttagcagcagctagctctggggtttctgggcagtcctattggctgaaag

SEQ ID NO: 447858 - DNA, 122 bp, Homo sapiens
aacagctgcagagagtgtggattctgagaagctgcagggccctggaaagcaggagacccacgtgcaggtgcgcttagggggttccatcctttctgaggttgcccttctggagcctggggcca

SEQ ID NO: 447859 - DNA, 122 bp, Homo sapiens
atgaaagacaggccataaatgttaggaaataaacagctctgcactggaccacagctggcccgcatgctggggaggaggcgcacaggcttctcccaccccttccctgcacctctgataaaccc

SEQ ID NO: 447860 - DNA, 122 bp, Homo sapiens
ggggcaccgaccaatactgggggccctcgggggctgaagcgcattttgcattttggagaccggccgcccctgtgaatgactgatattgcatatgagaagagaaggcagggcgggtagagcta

SEQ ID NO: 447861 - DNA, 122 bp, Homo sapiens
cctcgccctgcttcggctcatgctcggtccgctgcgcccactttccgatactccccagtgcgatacctcagttggaaatgcagaaatccccggtcttctgcgttggtcacgctgggagctgt

SEQ ID NO: 447862 - DNA, 122 bp, Homo sapiens
cctgccacaggaaccagcacatgacccagactggccaatgggatgacaccttggcccaggcggtgattggttcagggatggatatgtaattcacacccaaccaatcagagtctttcccggga

SEQ ID NO: 447863 - DNA, 122 bp, Homo sapiens
ccatcaggttggggcggtggacaccgaggcaggaaccaagtgccgcggagacagaggtcgcgctcctggaggttgggcacctgtaggagccctagcaccaccacgagccgccttggaccacg

SEQ ID NO: 447864 - DNA, 122 bp, Homo sapiens
cccgccttttcagcaccacggtcagcggccttttcgcaggcgcgcgccccagccccgccccgggttgggctggcatccagcctcccggcccttctgcgtgtccctcggcccaccggcatccc

SEQ ID NO: 447865 - DNA, 122 bp, Homo sapiens
taggactttcctctgagaataataccttctctttcatgtctgcaatatctcccttttcatcgctgccatcctgtcagcctataaacctacgcagctattcttcacctaaagaaaagtctcaa

SEQ ID NO: 447866 - DNA, 122 bp, Homo sapiens
agtgaatcccagcacagccctgctgtagctggctctcaggcgcaagcgcagagctgcgaccgctgctgatacgttgctcagtctcagtgtggtctctgttttgcaactggtcgtccgcgtca

SEQ ID NO: 447867 - DNA, 122 bp, Homo sapiens
caacttcctcatcaccaacgatgaggcatacgctgaggagtttggcaacgagacgtggggcgtaacaaaggtgaggcctggtcctggtcctgatgtcgggggcgggcagggctggcaggggg

SEQ ID NO: 447868 - DNA, 122 bp, Homo sapiens
accatggctttctcgcttttcatctttttggatggctgcttgtcgcaatattgtcttcttcgctttagacaagtatgtctccaggataccttctggtctcaaagttctatacctttaagaag

SEQ ID NO: 447869 - DNA, 122 bp, Homo sapiens
gatgtgaggcattaaaggatccgacggaaatagaattgaaggcattctaaaatggctaaccgtacagtgaaggatgcgcacagcatccatggcaccaaccctcaatatctggtggagaagat

SEQ ID NO: 447870 - DNA, 122 bp, Homo sapiens
tggagagatggggggtcagcagacccgcaggacagagtgggcgggccaagggccgggtcgcgggaggccggaggctcgagtgctcaccgtagatgtacatgatggccacacacatgatgcag

SEQ ID NO: 447871 - DNA, 122 bp, Homo sapiens
aatcatcacattattaaaacaaattttcgagcattgacaaatcccttcggggttgtcctccgagtgggcaattcgtaaccagcttggggcgtgctaagattgtaaacgttcctatggagagc

SEQ ID NO: 447872 - DNA, 122 bp, Homo sapiens
gggagagtgaaatgtgtgaaaggcatgcctgtgggtcagtagtgcaaggagcataggtcacgcatctcaaatggcaggctttctgatgaggctttctgatgagtgggttctgcagtctcttt

SEQ ID NO: 447873 - DNA, 122 bp, Homo sapiens
tggatgacttctaagcatctttcagtctccctgatcttgccaagcagagaagggcttcctcgtaatgccaccaaagcacaactttcacatgcttgctttatggccttaactaactgatgtca

SEQ ID NO: 447874 - DNA, 122 bp, Homo sapiens
attaactctgggaggtacgcagcctagataatagcatgtctgttttagaggtggtacaaccgaggcttggagaggcagatgccttggccaggatcatagctgccagtgcgtgtcagaatcag

SEQ ID NO: 447875 - DNA, 122 bp, Homo sapiens
cactgaaatgcatttgtaaccccaaaatcaatacagcggtttcacagtcattctccgacacgggcagaggggtgaagatactgagtcgccagatgcacgcgttccccgccgaggtggagcgt

SEQ ID NO: 447876 - DNA, 122 bp, Homo sapiens
ctccagctcccaacactgccacaatgggggaccaagttttaacatgagctttggtggaaacgaactatatccaaaccacagcaaatattatgcagctatataaaggaatgaagtactgatac

SEQ ID NO: 447877 - DNA, 122 bp, Homo sapiens
ctttttcccggagcccaaggattgctgtgtccacagaggagccagcacactgtgacatgccggcatcgtgatctggaattccctgtggtacacgtgggttctggagctgtaggttttaatta

SEQ ID NO: 447878 - DNA, 122 bp, Homo sapiens
gtcacttttgtcccctatgggttacaaaaggagtaatgggccccacacatactcgagatgcggggttccatttggcagcgtgccgctgtccagtggatgagctctgtgccgagcttgtccac

SEQ ID NO: 447879 - DNA, 122 bp, Homo sapiens
attttcttttaggagacccctagagatgcttcatagaaccttagatttctgtaaccaacacgtttgaaaactatgtgctctcatgacctcccagggctcttcgcaatattttcgttcgatga

SEQ ID NO: 447880 - DNA, 122 bp, Homo sapiens
tgaagtatgcggagcaccctcagcagcagccgtggatctgaacagcctcccagacacagacgccatgggtgtgaagtgtgtcaggaacaagcgaagtcacccacaatggagaggaacaccct

SEQ ID NO: 447881 - DNA, 122 bp, Homo sapiens
cccacagaggcaagcccactagagctgagattcactccgagttcctgagcgcctgagccgcgggcactgcgtctctgcagcttccagccaacacctgcgcccgtgaccagacgaacgcctag

SEQ ID NO: 447882 - DNA, 122 bp, Homo sapiens
cgggttcacatttttagcctagagagcaaggagtgttgttccttccatgtgttgttagatcgactgtctgctggtaggttggtggccagcagagacctactctgcccgacctggcctcagtg

SEQ ID NO: 447883 - DNA, 122 bp, Homo sapiens
cagcccgggcggaggcgctgcctccagacccagcctgtgtgcagaggggctggcggagctcggacgccgggctcgctggcctttgccgatggacctcgggtgtgtccaggccgggcgagggc

SEQ ID NO: 447884 - DNA, 122 bp, Homo sapiens
catcacccagtcacccgtacttaatatgaaagtgggagcttattaaatacaacgggtgtacgttaaatggcaacatttgttaaaataaagctaaaaattgggaatttattattggagttgta

SEQ ID NO: 447885 - DNA, 122 bp, Homo sapiens
ctctaaattgctggcccaggcggcggcaccccagtggtcgggaggtaaccaggctaaagccgccggcgaggggaaggacgggattcgcggcggagtttcagggaggcgcgtctgcaggctag

SEQ ID NO: 447886 - DNA, 122 bp, Homo sapiens
atgtgtgaactgaaaactgctcaaggctttctgtcatcaaatgcacttgtttccatgaagcgtttgaaaatgtattgtggctagaccccttcccccccctttactttctaaagcacccttgg

SEQ ID NO: 447887 - DNA, 122 bp, Homo sapiens
agccaccgtgcctggcctaggttttcttttgcttgtgtaccaatgtttttggctggttggcgtcttgtttgtgctgaaatagcaagccagttttcctcactttggagctgcattgtctatca

SEQ ID NO: 447888 - DNA, 122 bp, Homo sapiens
agacctaaacagagtggggcttgagcaaggcagaacagcagtgccaaggccctggggcagcgccagcaggtgctctgggaggccaagggctggatcagagggtgggtgggtagaggggtaaa

SEQ ID NO: 447889 - DNA, 122 bp, Homo sapiens
taaaaaagaaaaaggcctctcgtgccttttttccagtccttcttgactggtcagccaactcgacagctcagctcctaagtgagcccccatcctgtgcctaaggctgaccaggcatgaggaag

SEQ ID NO: 447890 - DNA, 122 bp, Homo sapiens
gacttaccctcaaagagaacctgcacgcctggggtcccaggatggctggcttgcccctcccgtccgaagatgacctcgtccttctctttcagtcccggtgggtcttcggactgccgccgccg

SEQ ID NO: 447891 - DNA, 122 bp, Homo sapiens
ggtaggggcggggtcggttgagtttcgcgcttctgagtgtgacacgtcctagtgggcatgcgcgttagtcggggtggtgggaacaggaaaggtgaacctggaaatgctgagtcggggtatct

SEQ ID NO: 447892 - DNA, 122 bp, Homo sapiens
ccactcccagcccgtcagggcctgcgcgccatgggcagcgcccaccctcgcccctggctgcggctccgaccccagccccagccgcggccagcgctctgggtgctcctgttcttcctactgct

SEQ ID NO: 447893 - DNA, 122 bp, Homo sapiens
ggacagccttcagctgcaccccggacgggcggtcctactgctgtgagcatgacttaggggcggcatcggtcagaagcaccaagactgagaagccccccccagagccagggaagccgaagggg

SEQ ID NO: 447894 - DNA, 122 bp, Homo sapiens
tatggttttccttcccctaaaatcttgccctcatcttaggttggatgtgcagtttggtcacgttggcagtatgagtgaagtggaaatacggagggaaaagttcacacctacagatgtaaacc

SEQ ID NO: 447895 - DNA, 122 bp, Homo sapiens
tcctcagcctgcaagaaaggggagtcctacctctgtcctggtcgcgttctctcctcaacacgcaccaagaactagaacatcctggtttccagaacaagctgcgggcatccccagttcgaaac

SEQ ID NO: 447896 - DNA, 122 bp, Homo sapiens
gcatggccctgagtcctcattcaggaaactggtggcagtggggagctcatgttacagacacgctctccagattgccagatccggctagtttcaaaacatgcccaggttctcattgctgcatg

SEQ ID NO: 447897 - DNA, 122 bp, Homo sapiens
gaaggaacaaactccggacacgctgcctttaagaactgtaatactcgctgcgagggtccgcggcttggttcttgatgttagtgagaccaagaagctaccgattccggacccaccaacacttg

SEQ ID NO: 447898 - DNA, 122 bp, Homo sapiens
acccgggtctagagcaggaaaagcaaaaggctcacggagtcgcgctgatgtgaaccccagcgcaggcacttccgggcctaagcgtttctgcaggaaccccaaggccacagctgtgtggttta

SEQ ID NO: 447899 - DNA, 122 bp, Homo sapiens
gcctgcgcgtcagggacttctttgcggcttaggaggatgttggattgtttttcctgggcacgtctagacaggtcacatgaggacactcgctggaaaatagttacttcgctcacgcagcagcc

SEQ ID NO: 447900 - DNA, 122 bp, Homo sapiens
taggcttgcacccctttgcaggacttggggagtcagcctccttcagccccaagaggctggcgtgctagccctgaggcattgtgggttcggggtgaggaatgctggcctcccacggcaggcca

SEQ ID NO: 447901 - DNA, 122 bp, Homo sapiens
aggcggcagcccctgagcgcccagagctcttgaaaggccacccaggagaggtgtgagacccggcggcagcatccgtccaggtgggacccgctgagcgccgtggccagtcccccattcccatc

SEQ ID NO: 447902 - DNA, 122 bp, Homo sapiens
attaaatcattccagcatcaaatctaatttacttcttatttagcatactcaaaagtaccccgtattagttaatactgtaacaaaccatttaaaataggacataaacttgagtgtaagactca

SEQ ID NO: 447903 - DNA, 122 bp, Homo sapiens
aactctgtgagggttgtcagggacactgagaggtgggtgtgtgcatgccacatttagcctcgctgtttacagccagttcagtaagtttgtgtgtttcaccgtgtgtgtgtgtacagagctgt

SEQ ID NO: 447904 - DNA, 122 bp, Homo sapiens
gaaaagcaggagcctatgagcatctggaattctctaatgggataaggagtcccaggagagcgatatggtcaaataccaaacccaggatttatctatttaaccacatcactaatggactgccc

SEQ ID NO: 447905 - DNA, 122 bp, Homo sapiens
tctctctggccctggatgttttactctagggcatctccctctgaggcagttaacccttcccgatgggtctggaggtgtctggggagagagagcccctgcctggcagcagcccgggaaagact

SEQ ID NO: 447906 - DNA, 122 bp, Homo sapiens
aaatagcatttctggtcctgtaaagccgaggacacatttctagacacagtgacctgcgcccggtctatactggtgggaagcactcctgggagattcactgcttcccactcatgggctgggcc

SEQ ID NO: 447907 - DNA, 122 bp, Homo sapiens
tccttgttggggaggctcgggcggcacagcagcccatggggcggggaggctcaggcatggcgggctgcaggtcccgagccctgccccacggggaggcagctgaggcccggcaagaaatcgag

SEQ ID NO: 447908 - DNA, 122 bp, Homo sapiens
tgggcgagctgggcagtgggtgactggcaggaaatggtcagcttggaggaacggtgccctcgaggtggtcagtaacgggagggctgaagagaacagcggccagttactaagagcacacggtg

SEQ ID NO: 447909 - DNA, 122 bp, Homo sapiens
ccgggtgggggaggggcgcggggggagtgtcggcctgagaggccctcgcagccgcagctgcgctcgcgagctgagagccgccgcgtctggcgcccgcgggtcagctgagcggcgctcgggct

SEQ ID NO: 447910 - DNA, 122 bp, Homo sapiens
gcacacggaatagccatgtacattgaagcaccaaactaggcagctggataatgggagagtcggctggttgtgagcatgctcgcgccgggaacagatccaccctctgttattcctctgaataa

SEQ ID NO: 447911 - DNA, 122 bp, Homo sapiens
cccctgctaagctactcttctcatatcccagttcacaggcacagagatgttgatctctcacgctgggccccagccaccaccctgtcctctgtgccatcattaccttatacccagcatttttt

SEQ ID NO: 447912 - DNA, 122 bp, Homo sapiens
tgtgttcctgcgcgtgtgccgggctcgcggggcaggaaaaagcgcctaatccaggctctgcgtcactcccgcaattggttagaaatggagtttcctggtgtttaatcccgggagggcacttc

SEQ ID NO: 447913 - DNA, 122 bp, Homo sapiens
gtccaaagccagcccggttaaggctgagaatctgggcaaacaaggagccaaagttggacccgcgtgggatggtgggtgggcagggtagggagcgtgggagaaggtgctgaaggcttttctgg

SEQ ID NO: 447914 - DNA, 122 bp, Homo sapiens
ggctgccctaaagtctagctcatgagaaccccaggcaagtgcggacctacaaagtttgtccgctccggggcactgtagtggcttttaccctggccgggcgggcggggctcagccgggctggg

SEQ ID NO: 447915 - DNA, 122 bp, Homo sapiens
aggctcttgacccagagctggctgaggatacagcgcacacatccatggttgcatctgcagcgtttgggtgcaaccacaggcagcttcaaagggaaaaggaaggggaaaaaaccttctctccg

SEQ ID NO: 447916 - DNA, 122 bp, Homo sapiens
gggaagccggcaaatgcgcttcctcaggcagaccgcggcggggtgggggcggggggggggcggaagttgaaatactgggacagaaacacctgcccgtcccaagggacggaaaactggatgcc

SEQ ID NO: 447917 - DNA, 122 bp, Homo sapiens
cgacccgttctaaggagactgtgacagcaggaaaggtcatgacacacccaggtctggacacgctgtccctgaggccagtgcccggagcgccccccgcggagccgctctccaccaataagagc

SEQ ID NO: 447918 - DNA, 122 bp, Homo sapiens
cgagtgaagatcaggtgacagctgagtgtatgggatgtgcaggtacgcagcaagcaggagcgcggcccacagccccacctggacccaccactccctcatcctgcggaggcgatctttgcgca

SEQ ID NO: 447919 - DNA, 122 bp, Homo sapiens
gtttgaaactaacttccacctggaggttaccctaacagaaagaaatctgggtaatgaccacggggccagccctttcacttctctccttcctctgacctctgacagtcccatcccacctagat

SEQ ID NO: 447920 - DNA, 122 bp, Homo sapiens
ggccaatcgaacatgttgatggagggggaagcaaggcgcctgcgcagcttaattcgctaccgcctgggaaggtggccaaaaggctttttttaaagcaagtgcttcaagaggaaacttctttt

SEQ ID NO: 447921 - DNA, 122 bp, Homo sapiens
ccaggctctgacttattgttccatggtgggcctggccgcctgcattccccatccctaccccgaggtaattctcacgtggtttggagaagaaccccagggctggatgagccctcctctacctc

SEQ ID NO: 447922 - DNA, 122 bp, Homo sapiens
gtgagctgtccctgcctctctgcagagggaggcttggttcctggggagagggggcagtggcggtgtgtgtcccgcagcaccccaacacgttactgctgctcctccagggaccttccaggtca

SEQ ID NO: 447923 - DNA, 122 bp, Homo sapiens
tatcacaatgccaaggagaccagagacctttctaagtcattccctgtaactctgagagggcggaggaagcagggaaatagcagaagattcccaattaaattctagttccctctcccagatat

SEQ ID NO: 447924 - DNA, 122 bp, Homo sapiens
ggtcttcagcgtgaataaaaggcggcgtgagcactaaacgccgggggcaaagaacactcccggcccagagtttgacccctcctagcgagttcttcccggccagctgcccaactttttggcct

SEQ ID NO: 447925 - DNA, 122 bp, Homo sapiens
atgagggtggagcccttaggaatgggattagtgcccttacaaaagaggcctgagggcactcgctcgccctttcctccatgtgaagactgcacagtaaggagccatctgtgaagcagagagcc

SEQ ID NO: 447926 - DNA, 122 bp, Homo sapiens
accagcttctcctgcgcggggacagggcctgtggagcggcctggaggaatctctcccagccgcgaagcccgggaaggctgcgaggccccagcgcggagcggcccctcccacctccccgaggg

SEQ ID NO: 447927 - DNA, 122 bp, Homo sapiens
tcaccattgaggcaagaccctgaggggcactctgcccaccgcaccgtgaactttgagtggcgaggtttctcggtggtgctggcgggagcagtgcttttcccagcctctgtgagctccgctgc

SEQ ID NO: 447928 - DNA, 122 bp, Homo sapiens
ggcaggccaccccttggattgtgacacccactcctctcacctatgacctcatccccagagcggccagtgggaaccctgagggatctgtgagatcactcattccattcacagactcttgttgg

SEQ ID NO: 447929 - DNA, 122 bp, Homo sapiens
tgggatcgggctgtctaccgcaaacgcctgatcacaaggtccgaagtgggggctcatcctcgccccatttcccgtaaatatcagccacagaccacctttgaggactttgtatgcacttttac

SEQ ID NO: 447930 - DNA, 122 bp, Homo sapiens
caatggccctcattattttattttatagactttgaatcaccagtaacaacttgcaatgctcgcttataacagactgagtcaactaaataaggaaaataaaaatccagtctcaagaggtgtga

SEQ ID NO: 447931 - DNA, 122 bp, Homo sapiens
agttcctgccctcaggagcttactctctaaaggggagctaagaacctaaacaacttttttcgtaatgcagtattataaagtataaataatgtgctgttggaatctggaagagacaagagaac

SEQ ID NO: 447932 - DNA, 122 bp, Homo sapiens
gaagttgaaaggtctctgatctttttccaccctttctctcctgaactaaggctcagaaaccgaaattccccttacccctttctctctgaagcaggtcataaagcctagacaggttactctct

SEQ ID NO: 447933 - DNA, 122 bp, Homo sapiens
tggagacctgaaattctccatttcactgtaaactgggccagttgtccagagaaagacacacgttgccatgagcctaacttcttgagcgccatgtgaatatgtgtatagcaggaaagccagag

SEQ ID NO: 447934 - DNA, 122 bp, Homo sapiens
ccagaaaatggcaacttacatctgaggaaggtgattccagaacaatgccgaatcctagaacgcggctctcctccggggaggtgtgctcggctgcctggagagcagatagctcagaggccacc

SEQ ID NO: 447935 - DNA, 122 bp, Homo sapiens
cagagtcttcccatcatagcgtgaagaggcggctggtcagggtcgcctgtgtgttagctgcgcctgtgagggtctgctctgctgttgtgcgcatgtctgtcctcgatctgcgagtcgggctg

SEQ ID NO: 447936 - DNA, 122 bp, Homo sapiens
attcttcaatttgtataatgcctaggttttaggaatacaaaaatataaggtactatagcacgtcttcaacgtgctcacaaagagctggcagcagggactcatgactcccaagactttgaaag

SEQ ID NO: 447937 - DNA, 122 bp, Homo sapiens
gctatgcggcggtcggtctgcagcagggcagaagccccttcccgtctgggtgtgtgggagcgcagacccctccggcgtggccgggaaccaagccggggctcggatgaaacgaaacgaaaaat

SEQ ID NO: 447938 - DNA, 122 bp, Homo sapiens
gcgcccgccgggccagtgtgcccctgagtttgtgatccccaaaagcaaaacactgaactccgcgacgatttccacgcaccgccgtcagcttccggactccggcaccagcagcactggcctgc

SEQ ID NO: 447939 - DNA, 122 bp, Homo sapiens
agaaacctgggtccagagtcccacttttttgggaattggaggctttgggctcaacacttgcggtaactggcccagcttcctccagggaggaccttggccatctgactctagcgggagggctt

SEQ ID NO: 447940 - DNA, 122 bp, Homo sapiens
aaccttcagatcttaatctgtacagggaggtggagggtgaaagaatgatctttcaggaagcgttcaagtagggctgctgcttggattgaattttaaagaatgcataggttatatgcaggatc

SEQ ID NO: 447941 - DNA, 122 bp, Homo sapiens
gaaaagtcagacaggccgaggggtggcgtccgtgaatcagaaagaggtctgagggtcgagcgtgggttcagcatgcgccccaccaccagccttgcaggggtagaggtctagggtggggccgg

SEQ ID NO: 447942 - DNA, 122 bp, Homo sapiens
atacccgcaagcaagccttaccggcatggtgatctggatgggttgccgttctccactcttcgttggggtcacaccttctgtgtcatatgtacccgtataaacaactctgtccccatcaggct

SEQ ID NO: 447943 - DNA, 122 bp, Homo sapiens
tctgcagcacctgcggggctgggggagctgtcggtcgctgccacgtcgtggttctgtttacgtgatccacgtagaagatcctgccgtggctgtcaatgcgtgcctcccagtctaaatggcag

SEQ ID NO: 447944 - DNA, 122 bp, Homo sapiens
cagtttcctcatgaatgtaatagatatgagaacactatgattttgcagtcctggtttctacgtggatctaatggtgtaatggatatgaatgtacattgcaagctgttaagtcatttctgcta

SEQ ID NO: 447945 - DNA, 122 bp, Homo sapiens
cgccggtagtagtagcacaggcagtgggaaagctcctccttgtagcttactggtgttggccgccgggtcggagcctgcgaacactgaccggccggctgtggccacgcgtctgcgcatgcgcg

SEQ ID NO: 447946 - DNA, 122 bp, Homo sapiens
ggaacccctcggcagaaacgagattttgggtacggcttgttcttacaataccggtaacagcgagctggacggcgccccatggcgacacagtaacgtcggcggtgcctcgaagtcaaaatgcg

SEQ ID NO: 447947 - DNA, 122 bp, Homo sapiens
gatggcatcaagactttagcttctggtgcgctgtgtcccagctctgatttcagttgcagccgtgatggacagttgcatggaagctgagactctcactgacagtgaaaccctcaaatgaacac

SEQ ID NO: 447948 - DNA, 122 bp, Homo sapiens
gccaatgagttccatgggcaacaagaaagaacaaaggaattgcaggccagtgtgcaaaaacgagaactaaaaagcggtcaaggctgggatttaccaggaagaatggggcagaaggtcctgta

SEQ ID NO: 447949 - DNA, 122 bp, Homo sapiens
aatgaaaccattagtccatgtgatgacagctttagtgcatcctgtgaaggatctggaatgcgcgatatttaggtgtttccagggtgttgggtgggggtggggatgccgtccgctgtccggag

SEQ ID NO: 447950 - DNA, 122 bp, Homo sapiens
cctgggaaatcgaaatggaagacaagacttctcgatttcaggagggacactttcggcccgcgtggtggctcaagtctgtaatcccagaactttgggaggctgaggcggacggatcgcttaaa

SEQ ID NO: 447951 - DNA, 122 bp, Homo sapiens
ggatgtggaaaaactaaagcacccatgcactgctggttagaatgcaaaatggtgcagctgcgtgagagtctcatggttcctcaatgagttaccacggaattcccatgagccagcaattccac

SEQ ID NO: 447952 - DNA, 122 bp, Homo sapiens
ggccgacatggtgcagccaatttcagctacggcaaccgccacacccagagcccccaaaaacggcaacctggaaaccagactccaaacattggcaatttgtccctcccgctttccgtattctg

SEQ ID NO: 447953 - DNA, 122 bp, Homo sapiens
accactccacttgggagacaaagggctatttcgctgttacttcaaagagcattaaagcctcggtcagacccacggggaggagagaggatcttgaagccgtggactccagactaggaaggcac

SEQ ID NO: 447954 - DNA, 122 bp, Homo sapiens
atagtaggtacttagcaaataattgttgaatgaatgtacgaatgccctccagaaaggtggcgccaatttatactcccacctgcagtaagagaaaagagccttgtcttggtcagtccacatca

SEQ ID NO: 447955 - DNA, 122 bp, Homo sapiens
gcctcaagtaatcttcccacctcggcctcccaaagtgctgggattacaggagtgagccgccgtgctggcctcagtttatgaagaaattatttaatagttttgtggtatcagttgcttctgtt

SEQ ID NO: 447956 - DNA, 122 bp, Homo sapiens
gcaagcagctggaagcccacggcggaatgggccggtgctcggagagctgttcggatggcacgggagctgattgtcttgacgttaagttcctcggtgaggagagaacagaagttaatggcacc

SEQ ID NO: 447957 - DNA, 122 bp, Homo sapiens
gggcaggtggcttcgagttctcgccagggacactgcaggtgtactcggacagcctgctgacgctgcctgccattgtgggcattggcggaggcgggggtctcctgctgctggtcatcgtggct

SEQ ID NO: 447958 - DNA, 122 bp, Homo sapiens
gcggctctgaggagtggctgtgagcactgcacgcaggactgagaaagcccgggataagcccggagtgcagggaaacccgcagccccctgggcagatgtggagaagaatctggacaagctgac

SEQ ID NO: 447959 - DNA, 122 bp, Homo sapiens
atcctcatcttcttgttagaattccggaatagaaacacacacgatacggaggctgggccccgctttggctagatcccccagaatggggatgcaggatgtcgtgtctcccacagcctcatttt

SEQ ID NO: 447960 - DNA, 122 bp, Homo sapiens
ctgcactaggcattcctggccccaggtccccagcaggtgtgcacatgctgcatacactcacgcatgggggtttcagggcaggtgcgcccttggctccgtgggaggccaggtgaggaacgtcc

SEQ ID NO: 447961 - DNA, 122 bp, Homo sapiens
tggttctgtttgtgcaaactccatggtagttacgttggtcaaccaaaaagactgctttttcgttatcttgtttggtcactttcccaccagatagatggattcctgatcttagccttagttac

SEQ ID NO: 447962 - DNA, 122 bp, Homo sapiens
acgctcggagagaacctagtctcccgctgcggcgcgctcgcttgctctccggggacgctgcgagccagccagcaggaaagtccttctaaagtcgggatctttcctctgaccaataggagcgc

SEQ ID NO: 447963 - DNA, 122 bp, Homo sapiens
caggtaatccacccgcctcagcctcccgaagtgctgggattacaaaggcttgagtcactgcgcccggtcgatatttcttaccctggatcttctgggtcactagtctgtttcaccagtgacta

SEQ ID NO: 447964 - DNA, 122 bp, Homo sapiens
aatccggacaggagggaacgttcaaagatagaggagagagaatcatgattaagtttagctcgatgggtcaattggctttatacaggaagatggccaccttttccattgcatcagaaagtaag

SEQ ID NO: 447965 - DNA, 122 bp, Homo sapiens
gcagaggagggaccttccaggtaaatcagatggccactgccttgtacccgcattggagaacgaaggaccccaggggaaactcttcctgcctttgggtctcaaacgcccatgtagtcccccct

SEQ ID NO: 447966 - DNA, 122 bp, Homo sapiens
gaaattaagcaaaacgccagcgctgcagccgccgcagtgggggcagcgagaggccgggcccggctctggggtgcaggtccttccacactggggtcagttttagggagtcaagatagacgtga

SEQ ID NO: 447967 - DNA, 122 bp, Homo sapiens
tggtgaagatgaggagaaggccacagccaactgcgggcaaaagaacagccaaactcacaccgcgtcttgttttttatttacctatgcagttcccaggccgaaaattgcacaaccgcatcgca

SEQ ID NO: 447968 - DNA, 122 bp, Homo sapiens
gccgggacacgaagagggaggcgagcaggggctaggaactggagccggtttgtgctcgcgcgcctgcaggccctttgcctcgggcacccccgctccagcccagcgggggcggcgccgagagg

SEQ ID NO: 447969 - DNA, 122 bp, Homo sapiens
cattgccccgcccttggatgggctcctgctttccagcgtctcaccgtcccactgtcctaccgtcccagtgtcccagcgcttctattaaaccagctgctctcgccagcttgcctcgtgccgcc

SEQ ID NO: 447970 - DNA, 122 bp, Homo sapiens
cgagtgagaggtcggacagactgtggagccgacagactgaaggacagcggcaccgccagacggccagaaagttccgccatgagctggggcacggagctgtgggtgagtcggggagaggggcg

SEQ ID NO: 447971 - DNA, 122 bp, Homo sapiens
caaacattgtccattccgggccgaagtctcggccttcacttcacttccgccttcccagcccgtgaacacgaatgcgcctgcgcgcacctctctcagcggaagtaatagtgacaaagctgggt

SEQ ID NO: 447972 - DNA, 122 bp, Homo sapiens
gagcatggatccgggctgggggcagcgggacgtgggctgggcggccttgctgatcctcttcgccgcctcgctgctcacggtgttcgcctggctgctgcaatatgcccggggcttgtggctgg

SEQ ID NO: 447973 - DNA, 122 bp, Homo sapiens
aaggcaacacccatgagggaaaaatgtgcacagcaaccctaccgaggagggcaagaggcacgggtggcccagtcacccggcccaggcgatgactcaaatggcttattaatgggctctttgca

SEQ ID NO: 447974 - DNA, 122 bp, Homo sapiens
acagattaggaaagaccacgaaatcctacgtcacctctaaagtcacagcttgaagccttgcgaaaggaactggccctagaccccaccccggcctataaatcaccagggcgcagcctcagtgc

SEQ ID NO: 447975 - DNA, 122 bp, Homo sapiens
gtcctggcgctcgctcctggggctcggcgggctggacgccgagtgcggccggcccctcttcgccacctactcgggcctctggaggaagtgctacttcctgggcatcgaccgggacatcgaca

SEQ ID NO: 447976 - DNA, 122 bp, Homo sapiens
gtgtttatcacaatctcctggaggacttgtattaaaatacagcttgctgggctccactttcggagttttaattcatagacatgcagtaagacatgagaatttgcatttatttaacaagttct

SEQ ID NO: 447977 - DNA, 122 bp, Homo sapiens
tacacctacctcaacgagggatttctcagcttgtggcgcgggaactcggccaccatggtgcgcgtggtgccctacgccgccatccagttcagcgcacacgaggagtacaagcgcatcctggg

SEQ ID NO: 447978 - DNA, 122 bp, Homo sapiens
cgcaggaggaggatgaggtggggggcgcggggcagcgcgggcggaccggacaggaggacgcggactcccgggagggctccccgagagccggcctccctcccgccctggggtcccggggcccc

SEQ ID NO: 447979 - DNA, 122 bp, Homo sapiens
ccacctcagcatccctagctgttcaaatttattgtccaactcttttgaatcgtttatcaacgcaaatctgtcaatgcccacttatttttatttatttttttgaggcggagtctcgctctgtt

SEQ ID NO: 447980 - DNA, 122 bp, Homo sapiens
tactttgattccagagcctgtaacacgagcaggtatatggtggcgcttatgccttcccctcgcacagcactttacaactacaggggtgttgctgccagagtaatattgtattcttaaggctc

SEQ ID NO: 447981 - DNA, 122 bp, Homo sapiens
tgcccagtccccgcgctcgagagagcgcctgcctggctctgaactctggccaggaaggggcgcgaggggaaggccccgggggaaggcgtgtccccgcgccccgccccgccccgcctcggaaa

SEQ ID NO: 447982 - DNA, 122 bp, Homo sapiens
ttccgctgtgccccgccctgagagcagagtttcggacgctgggaagcgtgctgtgcgaagcgctctcggggtctttcctcagcctcgaaaactgggctctggaatgcctttgtacatatgtg

SEQ ID NO: 447983 - DNA, 122 bp, Homo sapiens
cgggggtggagctggctgggtccagtgtgtcggttccacagacccctgcccaggacacagcgggggccccttccagcgaccgggctccctaggccacagggtggggacgcgcccctgccatg

SEQ ID NO: 447984 - DNA, 122 bp, Homo sapiens
cagctccaaacgtccaggcttggttccggccccggctgtcctccgagagtctctccccggcgggcaggcgctctgggctcctgcccaggactgtttggcgtggacttcaaagagcagaacag

SEQ ID NO: 447985 - DNA, 122 bp, Homo sapiens
tcctcctacttccgcaaacaaacgggcctcgggccacgtgatggcctgaccaccgctctccgccaatcactggtggccctgtcccaggcctcctctaggctccgcccccgcgcccgaggacg

SEQ ID NO: 447986 - DNA, 122 bp, Homo sapiens
cacgcgctcacgcacgcgtgcacacaccagcctcctggtcgctgccccactccgtcccgacgcccctgcgaccccgaaggcactcattgactgacacacctacactcattcacagacgcaca

SEQ ID NO: 447987 - DNA, 122 bp, Homo sapiens
actggggatgtgcaggatggagcggatgtggtaaggcatatccaagaggaagtcagtcaccggctccaccagccgcccactctgcagcaacaggttgggcaggccccccaaatcaggagggg

SEQ ID NO: 447988 - DNA, 122 bp, Homo sapiens
ccaccgcaagccccccactcaccctccatatttgatctgacagcagtgctctatcctggccggtagccttccctgcaaccagctcgcacaactctgaccaactaccctcgtggccttcaggt

SEQ ID NO: 447989 - DNA, 122 bp, Homo sapiens
acaacctctgaggttacctgaatgccccagcaaagggcacgactacttccggagccgcaccggaaccccttggcggattatgtgggttcctgcgggaacgatttaagaataggactacttcc

SEQ ID NO: 447990 - DNA, 122 bp, Homo sapiens
ctaccagtcaacccctaaaaatagcccatgatgtcaccccaaggccttcccattggctcgcgtcgctctcaggggggcgggcccgcccgtcaccatggagactccaccctagaagattcttc

SEQ ID NO: 447991 - DNA, 122 bp, Homo sapiens
agggccatggcagagggtgaggatatgcagaccttcacttccatcatggacgcactggtccgcatcagtgtgagttaaggtggggtcgagggaaggggagggggcgtatagggttctggggc

SEQ ID NO: 447992 - DNA, 122 bp, Homo sapiens
aagtgattcttgtgcctcagcctcccaagtagctgggattacaggcgctcaccatcacaccgggcaaatttttgcattttttaaagtagggacaggtttttgccatgttggccaggctggtc

SEQ ID NO: 447993 - DNA, 122 bp, Homo sapiens
aagtctctgagcctcagactcttcatctgagaaatgagataatagcattatctggcactccggatgactgtgaggattaaataggctcttctgtgtaaagggcctgtcctggcatgggccca

SEQ ID NO: 447994 - DNA, 122 bp, Homo sapiens
aggtcgtccctctctcctgagacacgacgaggtgaggacttactttcatgagtttggtcacgtgatgcatcagatttgtgcacaggtgagttttttttttcccccagtaaacctgccaatta

SEQ ID NO: 447995 - DNA, 122 bp, Homo sapiens
cgctactgccaatcgcaaggctttcgtatcccggaagtggctgatctgttggatttgacgcggaggcggttcctcttactacggtggccggggtgctcaaagtacctgtagctgcggcgctg

SEQ ID NO: 447996 - DNA, 122 bp, Homo sapiens
actttgtttacccgataaggaaggtcagcattcaaagtcaagaagcgccatttatcttcccgtgcgctctacaaatagttccgtgagaaagatggccgggaactcgatcctgctggctgctg

SEQ ID NO: 447997 - DNA, 122 bp, Homo sapiens
aattgacggtcgcaccgtctacctagcccaaacggggtcacagcaggacaaggaagtagccgatctcccagatgcggtctcttcgctccgctccacccgcaccagcagcggcccacccacct

SEQ ID NO: 447998 - DNA, 122 bp, Homo sapiens
attggctctgaaacctcagtggtaaggcgtcttccagagcagcggcgccccctggtggcacgcggtaggatgggcggcaaagaagcactcggcgtgggcggggcgggtgggggtcgcaaggc

SEQ ID NO: 447999 - DNA, 122 bp, Homo sapiens
aggtccctgccccgccccgcccgcccggagtcagcccccagctccccagcctcccagccccgcgtcccctccagccccgcaggctcgcccggcccactaactgcccgagcggcacaccgcct

SEQ ID NO: 448000 - DNA, 122 bp, Homo sapiens
ggaggggagggggaggttgggagggagccgccgccgcgcgcgtgcggccggcgccgccgccgttgccgctccgctcactccagcctgtttgggggcactttgtttgtgtcccacaatgctct

SEQ ID NO: 448001 - DNA, 122 bp, Homo sapiens
caacgccacaggtgagggctggagagcacgtggtgtatgggggctcccgtcctgtcctcacggtgatgcccacgctgaggtgctgtcagcactgggaggcggcccagacacggagcccagac

SEQ ID NO: 448002 - DNA, 122 bp, Homo sapiens
aagcacatcactaaggcacatcactcatctatataagcgcgctgcacctttggcacagcgcgacttccctgaccctccccctgcagaccactgaacctcgccggagagctcaattaagaaga

SEQ ID NO: 448003 - DNA, 122 bp, Homo sapiens
tgggcaaactcccaaatgcccactaactagctcttttgtctctgtagctattatgtttctcgtggcaagtggacactccaggctccgataagctggataactttgcatcagttttgaggaaa

SEQ ID NO: 448004 - DNA, 122 bp, Homo sapiens
gttgataagatgtgtacaggaatttctgctggtggattcattgtaggaaaaggtagaatgcgtactacatactgtaaggaaaacggatgtgctgcggtcaagaataggtcgaagcagacatc

SEQ ID NO: 448005 - DNA, 122 bp, Homo sapiens
catctgaactcaggtaaggaagggttctctcaacagggagaggttccagccaggagaccccgaagcgtctcccactcaggaagacatgtgcttctctgatatgagaaggaatgaccaccgcc

SEQ ID NO: 448006 - DNA, 122 bp, Homo sapiens
ataaagattcgggacattactgagggctgggtaggggcactagttgacctctaggttctacgtcctgttcttccactgacaattaccatttccagtaataggtgtaacccaaagttcttttt

SEQ ID NO: 448007 - DNA, 122 bp, Homo sapiens
gaactatactcctgccaatggcaacaacgcagttcctgttccactcgctgaatgaggtcacgggtcgttcactcattgtagtctttgtgacgctattgttggtgatagaatgataaagttga

SEQ ID NO: 448008 - DNA, 122 bp, Homo sapiens
gccacctgtaacagctgtagcactcactgtgaaggtctgtaatttcactcctgaggccagcgagaccacaaacccacgtgaaggaatgaacaattccagccacgctgcgtttaagagctgta

SEQ ID NO: 448009 - DNA, 122 bp, Homo sapiens
actttcgagaaccagggcttgcactgaggaatgtcaaatataatgttagaagtaacctttcgccattctgttggcctgctccgcccctgtgccccaaagtggtcggtgtctctcatagagtt

SEQ ID NO: 448010 - DNA, 122 bp, Homo sapiens
gaatcggcaccaagacagcgaggagcatccacccagggccagacactcatgttcgcggctcgcacttgctgacttgcatctctcagttgcattcccggtgtgtaggcctctcacaactggag

SEQ ID NO: 448011 - DNA, 122 bp, Homo sapiens
aagactataacagaaggccatgaaatcaagcgtggagcctttctaagcctgggtgctgtgcgactgcaatttgtactcccatgaagctggccctagtcaagtacgcagtgaggtcgatgagg

SEQ ID NO: 448012 - DNA, 122 bp, Homo sapiens
gtacgacctggacgtgtccccagggagcaggtggagggcagttcccacagggacgcactgcgggtacgacctggacttgtccccatggagcaggtggagggcaggtcccacagggacgcact

SEQ ID NO: 448013 - DNA, 122 bp, Homo sapiens
agaggaagacgatagttgggtcccggcggctgctgatgggggagcttctgggaggggctgcggtcccagccggggaaagggcgagtcgcggcggcgaatgcctggggggtggggcgaggggg

SEQ ID NO: 448014 - DNA, 122 bp, Homo sapiens
tacaaagtgattctgcatctgccaagggtcatgctgatgcctgatggagccagtggagggcgcgctggagcaggagccagcagccacatcagctcagcaagccctcagaggcttctggaagt

SEQ ID NO: 448015 - DNA, 122 bp, Homo sapiens
ttggggctgccatgacaccagtaggtcggctcagcagctctgggaccgtttcccaggccacggcggtgttgggggcagggagcgcagccagtcaggagcacaaggcgcaggcgcaaggcaac

SEQ ID NO: 448016 - DNA, 122 bp, Homo sapiens
gggcaaagtttcagttttacaagatgagaagtgtctggaggtggacggtggaggcggtggcgcagtgatgacggtgtgctgggcactatctaccactctgtacgcagaaaaaggcttaaggt

SEQ ID NO: 448017 - DNA, 122 bp, Homo sapiens
cctgcagcatcaacctcctggacctaagcagtcctcccacctcagcctctggagtagctgcgcctggggacaaaggttcctggcctcagcgcactctcagattcacagggagacagaactga

SEQ ID NO: 448018 - DNA, 122 bp, Homo sapiens
cagtccctgcacttaaatgccatgtactcaagttattgataagtaataagtactgataaccgtcctttattggccatctactgtatttgagaggctgaacaccccaattccagcgcttatgg

SEQ ID NO: 448019 - DNA, 122 bp, Homo sapiens
tcctcatccggggcccgagccagccatgcggactcgcccaaatcccgcccccgcaccgcgcgcgcgcactccaagggaaggctcttcctgattctgacctcccgccctctgctagccccagc

SEQ ID NO: 448020 - DNA, 122 bp, Homo sapiens
cctttctctggctggtgcaggtgctgactctgcaggcctgtggacgcagggtgacgttcgcgctcttgcccgagctcaacgcccgggagaaaacagcgctgccggagcccctcgcgcgcgca

SEQ ID NO: 448021 - DNA, 122 bp, Homo sapiens
ccagcgccaccgccgcagcaggtgggggcccagtgggcgggggcggggcccggctctgggcggagccgaggcggcggcggcgcaggctggggccggggccggggcgggagccggagcccgag

SEQ ID NO: 448022 - DNA, 122 bp, Homo sapiens
tttcatacccctcaggtggacaattctgaggcaagatcttcattgctcatcagaggattccggcgaggtcagatccagttttccatagtggcgaccagcttgatagtaccactctattgact

SEQ ID NO: 448023 - DNA, 122 bp, Homo sapiens
agcactttgggaggccgagctgggcggatcgcttgaacccaggagttcgagaccagactgcgcaacacagtaaaaccctgtctctacgaaaaatacaaaaattagccaggtgtggtgcacgc

SEQ ID NO: 448024 - DNA, 122 bp, Homo sapiens
cctccaaggaagtttccaaatggagtctgtagctctctcccaggaggcttatttgagagccggagtggttgcaggtggatgccacatgatttcctgcttcttggtttctggccctgataggg

SEQ ID NO: 448025 - DNA, 122 bp, Homo sapiens
tcaccatgtcacccacaccagcagcgggaagtctgttcagccgtcccttgatccccttcacggagatgatatacaggtttttggctcctacaaaagaatgtaaataaaaataaaaaatgttg

SEQ ID NO: 448026 - DNA, 122 bp, Homo sapiens
ctgtgttttttcccacactggaaacacagagtagccctgtttctgcacacgttagtgcaccgctgctacgtgtggccgcccagctgtctgcaggctgtgccgaccactgcctctgtctccag

SEQ ID NO: 448027 - DNA, 122 bp, Homo sapiens
ttcagaggaactgaattcaacagtcacatcttttcactacacatttactaagcctcttttcgaagccacgccaggttagataccatcccaattactaaggcatagtttatgctaatagagga

SEQ ID NO: 448028 - DNA, 122 bp, Homo sapiens
gatgacaggagtgtggagagagaggagagaagaaggttgggtcagacagaggtctgtcaccgaacaaaatccccagggtgcccagccacctgcctgcttcctcaagggcagtttgggatggc

SEQ ID NO: 448029 - DNA, 122 bp, Homo sapiens
ggggttgttgtgggggtcagtcccccggggactggagggagacgcggcacgcggcctctgcgaccctatgaactctgaccccagctcccacactgtcgcctatcaccggcccactctccgtg

SEQ ID NO: 448030 - DNA, 122 bp, Homo sapiens
tgtcacctgtccctggagagctgcagaaccataagccttacaaagatgattagcagcccacgagaccacagacagctcttccaaccagcaaacagagttggcactcttgcacaatcccctgg

SEQ ID NO: 448031 - DNA, 122 bp, Homo sapiens
ggctccatcctttcctgctacttttcccaattgctatgtagcctggtggggggcggggggcggggggcagggccctctttttctagacctggctgcctcccccccccagcccagtctttatc

SEQ ID NO: 448032 - DNA, 122 bp, Homo sapiens
ctgtggagaggtagggctgggtgatttttttgctcctgggagccttggaaacccagacagcgttactgacctggttggcggaggtcaccgcgggcgccaggcgtgcgcgggagctggagctt

SEQ ID NO: 448033 - DNA, 122 bp, Homo sapiens
taaatacttgatttcccatctctgttatccttccatcagccctgactaaactcatcattgcgtcaaattactgggtttaattttagattttttctctgctttctttccatattttttctggg

SEQ ID NO: 448034 - DNA, 122 bp, Homo sapiens
gaagcctttttcctaaggtttctcatgtgtagagcaaagcctttttatttttagctgttacggtcatagacgggttgcacagcagtgaatgggtttggacctgaaatgcaggagcttgatgt

SEQ ID NO: 448035 - DNA, 122 bp, Homo sapiens
tatttctggcctctatggaaatactttctctatcaatctctaatcttatagttaataaaacgttgaagctgaaaagagtgagtatctcttttcaatgtgacaacctcagggatgggcagcac

SEQ ID NO: 448036 - DNA, 122 bp, Homo sapiens
actgatcttttccaaggctgtacagacatggcggcggcttttcggaaggcggctaagtcccggcagcgggaacacagagagcgaagccaggtaggaccatacaggccccacaagtgctggcc

SEQ ID NO: 448037 - DNA, 122 bp, Homo sapiens
ccgggcacctcatcccgtgtgtgggttttttccccagtacaaacccattgtggggacaggcgcttttgaagaaaaaattcagattcccgggctgaagtggctcctcacagccttgaacctga

SEQ ID NO: 448038 - DNA, 122 bp, Homo sapiens
tttccaactgaggtactggcttcatctcactggggctcgtcagacagtgggtgcagctcacggagtgtgagccgaagcagggtggggcatcgcctcacctgtgaagtgtgaggggtcgggga

SEQ ID NO: 448039 - DNA, 122 bp, Homo sapiens
tgagaaatgaggctggaaggaaaatttgagggcatcatgaggggccttgaatgccaggagcgagatatcctgaaagaggagatttgtgagtcctggggacttatacatggggccaattgagg

SEQ ID NO: 448040 - DNA, 122 bp, Homo sapiens
catggttcctgcctgcatcccgtttttcgctcctctctgcttccccgagcccagccctcccgtgcatgagacagacgctcccgccacgtgctcgactttgatattggtgacgtgtcctctcc

SEQ ID NO: 448041 - DNA, 122 bp, Homo sapiens
tgtgtgtcctttccaagctgtgcacacatgaggattcttctttagtctcatggctgtggccggtatttgcaaagcttgtcaccgtgtggactgtgagggtaattgggagcccagctcaaagt

SEQ ID NO: 448042 - DNA, 122 bp, Homo sapiens
tgtggcggccgagccatgactcagtgagtgactcaaagcacgttcagtactcacccctcccgcgggcacgtgcccaggcttgcaggcacatggcccccctctcccgggagccttcacctacc

SEQ ID NO: 448043 - DNA, 122 bp, Homo sapiens
tgccagttagaagaagacaagagctcctagccctaagacgccttgtatggggccgccttgcgagggtggaacccgcccttgtagcccggggagaacaggctctttgaggcctctgcttcctc

SEQ ID NO: 448044 - DNA, 122 bp, Homo sapiens
ctcatgtgtagaccacgtgtcccgggtggtgggccatgtggcttaacccagcatggatgtcgtcacactccggccaggccaggtgtcccaatccccagggtgtgcagaagtggagtcagggc

SEQ ID NO: 448045 - DNA, 122 bp, Homo sapiens
cctggagggtggggacgggggtgcgccctgtgacggattttaggcttgaaaagtcgggggcgggggaatgtaaccaggactctcccatccaaggcatgcagactggggaatgtttcggtgta

SEQ ID NO: 448046 - DNA, 122 bp, Homo sapiens
caattagcgagactgcaaacactctgtattaaccggggcctggagaaacaagaacgccggcgagtcaagtgagcacacagcggcacagctcctttaaagacacgctgggaatctgtccctac

SEQ ID NO: 448047 - DNA, 122 bp, Homo sapiens
aaaaaaaattctttgtgggtgatgcaggttcaggaaccgctgcacaccgagcgcttcccgcgccgcctagaggtgatgggaacagctcctgaggaaggtggctcagcctcggcctgcagctc

SEQ ID NO: 448048 - DNA, 122 bp, Homo sapiens
atagctccaggatgtacttgtatgcacccatcttggcttatctgatggctgccgccagaccggagtctaattctttacttattcttctagaccacattgaaatgtcctctcacatcagaagg

SEQ ID NO: 448049 - DNA, 122 bp, Homo sapiens
gggggagtccgcagtcccatgtggaagtgagtttattaagagagtaaagtggcgaaaggacggctgctccacagacagagcagggcattcccgaaactaagaggagaaaggcgcccacctgg

SEQ ID NO: 448050 - DNA, 122 bp, Homo sapiens
ccccgccaccgcgccccagcaaaccggctccccgggcccgcctcgccaagctgcgttccgcgcctcacgcagaaagggaattttctctgcattactatctgcattaccttgaagttcacttt

SEQ ID NO: 448051 - DNA, 122 bp, Homo sapiens
gccaagttgacacataaaaagaaccatcacaagttcaccccttgccaaactgcagacatacgaaatcggtattcccttcactatacaataggttatttactacattatctgttgtcaaaggg

SEQ ID NO: 448052 - DNA, 122 bp, Homo sapiens
aaacaattgttttactgtacatgtgaataacaagaaatggtacggggaatgtgaataacacgaaatggtatggggaatgtgtgactagtgaagcatattttaacttttttattactggagga

SEQ ID NO: 448053 - DNA, 122 bp, Homo sapiens
tgctggaaggggaagtgggaggaaattttactatcctggtgttgactctttttgaagaaacgacactcaggaaaagtttgaggcctgaaagcctgcaatgaaacatcaaatattacagaata

SEQ ID NO: 448054 - DNA, 122 bp, Homo sapiens
gccagtccggtggtccgaggggcggccgcgcgggggcgggccggaaggcgctcgccaagccgtggctgcggctcattggtccgggcggacatcgctcactcacatatccaatgggaggcggc

SEQ ID NO: 448055 - DNA, 122 bp, Homo sapiens
gtagcaagccgagatcacgccactgcactccagcctgggcaacattgagcactgagtgagcgagactccatctgcaatcccggcacctcggaaggccgaggcaggcagatcactcgcggtca

SEQ ID NO: 448056 - DNA, 122 bp, Homo sapiens
agaaaagcattacagagcacaactccttccaggctggaaacgctgccagaaagcagctctcgcttcacctctgccgggggactccgccctctcccccagcgctccaagcggagaccgcaggt

SEQ ID NO: 448057 - DNA, 122 bp, Homo sapiens
tggagtcgtcacacgccatccagcagcgctaaggtggacatgggattcctccctgcgatgcgtgtctttcccacgcagagaagcccagtctcttctctggatctgggcctttgaacaactgg

SEQ ID NO: 448058 - DNA, 122 bp, Homo sapiens
tctcaaacaggcctgggcccagcccaaatgtgcatcttcctggcctcccagggctgggagcgcagggactccgggaggctctcagccagctgttcgattgatgtcgctgagggggccctctg

SEQ ID NO: 448059 - DNA, 122 bp, Homo sapiens
gcccgcggcactgggacggctgacagatttatggagacttcacagcatctggctggggtccgcgagggcagggcggagtccggtcgatccgatgctggggtctaaagcttccccagccacac

SEQ ID NO: 448060 - DNA, 122 bp, Homo sapiens
ttccggtctttttcttgcacagacagtgctgcaatgagtaatctctagtgcatgtcatttcgtacatgtgaaggcatatcagcaagggggattgatgggtcaaaagatgaaaacaggtgtaa

SEQ ID NO: 448061 - DNA, 122 bp, Homo sapiens
agaaaaacgcatcccagcccttcaggtgcactgtcaacaggagtggctagaaataggctccgctctctctcagctgctgcttagacaactctcttacattctggacataaaacacactggat

SEQ ID NO: 448062 - DNA, 122 bp, Homo sapiens
ccaccctcaaggattagcaagcttcaaccctcgcaggacatccactgtgtcagggccaaacggtgctgcatcctgctctaatagtgagtgaaggaggggaccgcagacaagaagaaatgaac

SEQ ID NO: 448063 - DNA, 122 bp, Homo sapiens
cccttcggttttcctcagaaagggcctcctgcctccctcggcaccctcgcctacccccctcgcagcacctgtcgcctccgcccctcactcggaccccgcgcatctggcgcagcccctcccgc

SEQ ID NO: 448064 - DNA, 122 bp, Homo sapiens
acacacatacacgggcacaagggctctttcttcttagggcaatcgagccagacccttcttcggaacacaaagttttcccccacgtcactagtggctgtgattcaagacttggtgctttcaag

SEQ ID NO: 448065 - DNA, 122 bp, Homo sapiens
ctccccgcatccctccgccgcccccggggccgctcccgcacgccgccgccgcccgtcccgcgctccgcggccccaggtctccagccggcgggcactcacatcatctctgccatcaccgccgc

SEQ ID NO: 448066 - DNA, 122 bp, Homo sapiens
agcaggcaagagtaggtcagtgggatcatggactgaaacaagacattgtgtgagctggtccgtcactcagaagcagggtcctgaaggaagctggaatggcatgagttaggtggggggaatag

SEQ ID NO: 448067 - DNA, 122 bp, Homo sapiens
ggtctttccagatgatgaggagcggaaaggaaggagtgcgcgatgcgcaggcgctctggccgaaaaggccttctgggatttgtagttctttgaacaggagtaccgtttgtattctgaccaga

SEQ ID NO: 448068 - DNA, 122 bp, Homo sapiens
aagttggaatatatcttcactcttgatgtaaatctagaagttgctagttgggatggggtgcgcttcctctgagccactggagtcttgagaggcccagagagtaaggtgggggcgggggctgg

SEQ ID NO: 448069 - DNA, 122 bp, Homo sapiens
cagccactcgactttgcggagggggctgaaagcctcagtagcggacccggccgggaaaggcggagccgacagctgtcgcggggcggggcttccagggccgggaggtggaaggcggagagcgg

SEQ ID NO: 448070 - DNA, 122 bp, Homo sapiens
cagtcccctccccagagccaggacggcagccttccctctgaaggccggttagggcagcagcgccaggacgtccggcgggaatccagcgtcttgccccgcttcggacgaaaacacagaggctg

SEQ ID NO: 448071 - DNA, 122 bp, Homo sapiens
ggatttataatttttgttatgattggggacttttcagctattgtttcttcaaaaattggccggacacagtggttcacaacttcaggaggccaagtcgggaggtgttgagtgaggcctgaaat

SEQ ID NO: 448072 - DNA, 122 bp, Homo sapiens
tggttgccgagcttggttggggccccggttcatacactccggggcaagatgctacggccccgggcgggtggccgagtcggcggcaaggcgagggacccggccggctccgctcggcgccgccc

SEQ ID NO: 448073 - DNA, 122 bp, Homo sapiens
gagctgcccccaggcggctctgccatgtggcgctcccgccggacgcaggcgcggggctgccgctgctcccgggcctccatgtcgtcagtcaggtgggtgccccacattcccgtgggtgtgca

SEQ ID NO: 448074 - DNA, 122 bp, Homo sapiens
gcgcctcccttcagtccacggtactacccgggcctcccctcgtccctcttctagtggtaccgcccaggccttaatcacccccattccgtgcggtggtatctcccaggctctacattctcggg

SEQ ID NO: 448075 - DNA, 122 bp, Homo sapiens
ccgggtgctgctgggtggatgccctcacgtgcccaggtggtggtggagggaccgccctcacgtgcctgggtgctggtgtggatgccctcacgtgcccgggtgctggtggagggaccaccctc

SEQ ID NO: 448076 - DNA, 122 bp, Homo sapiens
cggagccccggaggcacccgctctgagcggccgcgcagcccggctgcatggagcccagcgcggtgctccggctggccaagccagacacggcgcaggaaaccgccacccaccaaggcaagggc

SEQ ID NO: 448077 - DNA, 122 bp, Homo sapiens
tgagaggccccaaacagcccttgggcctggtttgggaggattaagctggagctcccaacccgccctgcccccagggggcgaccccggtccggcgcgagaggaggcagagggcgcgccaggcc

SEQ ID NO: 448078 - DNA, 122 bp, Homo sapiens
tccgagccagagctcttcctgttgtgcaaactcagccccgtctgtaccttcctgcttggccggtgatcgcagtccttcttcgccagcaagtgtgggcttccaaagacaaggctgggcctggc

SEQ ID NO: 448079 - DNA, 122 bp, Homo sapiens
tccatgatgtgttgtggcacgaaagtgtttttcgctgcatttttcatctgtgatctcacacggcccacgacgggtacgcccaacgcagcaggtattcgacggtacacaaacagggcagacac

SEQ ID NO: 448080 - DNA, 122 bp, Homo sapiens
actatgttgtggtcgaaaggtgtcacatggttggaaatgaggaccctgacactgtgatcccggagtccggagtcctcctgccgggccacgagccctagcaccgcacacatggtccgcactac

SEQ ID NO: 448081 - DNA, 122 bp, Homo sapiens
ttccaggtctgtcagtggccagcaaagagccaatatgctaaactctcccctcccggacaccggcttcagccagagctcgcacccgcctgcgccgctccacccacccacacttccggcttccg

SEQ ID NO: 448082 - DNA, 122 bp, Homo sapiens
gtgaaactaccaaacattgtagagatattgggctctagaaagtgcttccactgttgctcccgattaaggggtttagataaagatgtgccttattttacatggacatattgcataatgaaaaa

SEQ ID NO: 448083 - DNA, 122 bp, Homo sapiens
ccggctaatttttttgtttttagtacagatgggtttccaccatgttggctaggctggtctcgaactcctgacctcaagtgatctgcccacctcagcctcccaaagtgctgggattataggca

SEQ ID NO: 448084 - DNA, 122 bp, Homo sapiens
ggagatcagatgatcagtagactccatctcagggtggcccctgtggtccctaagccagttcgtatgggcagtttaatatataactaatgagtagacattgaatagatgagtaaattatcttt

SEQ ID NO: 448085 - DNA, 122 bp, Homo sapiens
gacgtcacttccgcctccagcctcaaacctggaggagcgctcgggaactgcaacctcagccgagctgaacaacctcaggcagagagattctggtttactccccagtggctacggagacgcct

SEQ ID NO: 448086 - DNA, 122 bp, Homo sapiens
gaccacacgtggcattgttttctccgggccacacgtggcatttgttttctctggaccacacgtggcatttgttttctccggaccacacgtggtgtttttttctttatttttagaaacagggt

SEQ ID NO: 448087 - DNA, 122 bp, Homo sapiens
agaggcaacctgccgaggcagctgggggtggggggcgaggcctacccaccgttcacagggcgctgttgaggccagagaggatttgagagttaccacggtttagggctcctgattggagaaca

SEQ ID NO: 448088 - DNA, 122 bp, Homo sapiens
agcaattctcctgcctcagcctctcaagtagctgggattacaggtgtgtgccaccaggcccggctaatttttgtgtttttagtacataaggggtttctccatgttggccggggggggtctcg

SEQ ID NO: 448089 - DNA, 122 bp, Homo sapiens
agtgaatttctcaaggcgtcaccaagccctcgccgggcagccgtgctggaagcaaagcggcggcaggatggggctgggcttaggagctttctgttttatataccccaatacctgggtttccc

SEQ ID NO: 448090 - DNA, 122 bp, Homo sapiens
agaggcaggggagagcttgagagacaggacttggcatggagagctttagacagcaaaagtcgtgcctcaaggaaaagattttaagagtattctgtgaaggatctgatcattccaagacgaca

SEQ ID NO: 448091 - DNA, 122 bp, Homo sapiens
agggagtcagctactggccatagatctgttccacaaggctgtcctgtctgcagactctgccgggcagtgtggtgagagagctggcgaggcatggtgaccttgggatgggtgccccggagcag

SEQ ID NO: 448092 - DNA, 122 bp, Homo sapiens
aagcatgaaaattcttgcctgaatgcagcttatattctagtggagagggcagatattaagcgaaggagtgaaatgtttagtatttcacggggtaataaatggtatttcaaaaaaaaaaaaca

SEQ ID NO: 448093 - DNA, 122 bp, Homo sapiens
aggtctaagtttgaaggaggaagcataaatataagaggcttgaaagaggtaaagataccccggagttccaagagaatgttggagaagggagcctgagtggagacttgtctctttctataaac

SEQ ID NO: 448094 - DNA, 122 bp, Homo sapiens
ccaaagccctgagttttgtctcccccaaccccccagccagctgtgagcctcttggagaaccgaatcacttgggttctatttgcactgccaattgcttatggcaccaagggatcaatttatga

SEQ ID NO: 448095 - DNA, 122 bp, Homo sapiens
ctccggacctggcaggcggcggctgcagggcaggtccaggggccacatggctgagggggacgcagggagcgaccagaggcaggtgaggccccggcggggtgctgtctctccaggctcggctc

SEQ ID NO: 448096 - DNA, 122 bp, Homo sapiens
gagaccccccaaacccaagaggaggaagatctccagataacagagactactccactaatgcgcagtgtttattaaaggaacatgcacagatgtatctgtatataggtattgatatagccaca

SEQ ID NO: 448097 - DNA, 122 bp, Homo sapiens
gggccctcttttgcctcacccatttgggctccagttgtccccaggatccctcccccgacccgggggcccccttggtgcctgctgtctcagcagctgctgccttttcatctctctgcacattc

SEQ ID NO: 448098 - DNA, 122 bp, Homo sapiens
cagggcggaggcagccattggcagcacggaagccaggatggtgtgcccgtaagatgcccacgcacagcgcaggcaggggcccgatttgagccgttttttgctgacttctcttccagtgtctc

SEQ ID NO: 448099 - DNA, 122 bp, Homo sapiens
gaggtggggaagggaaagcctgcttccaaggtaggcagggtgtgccgagtttctgcaccacgctgacgagaccttgagaatggacggtcacaggaagccaagttacaatgtcatccccctgc

SEQ ID NO: 448100 - DNA, 122 bp, Homo sapiens
ctgaaatggggtgggctggatttgaaccctgggccatagtttgccaaacctgctctaacccggagacatggtctgcatctcccacacacaagggagaaattctgcttatgcttcacattatt

SEQ ID NO: 448101 - DNA, 122 bp, Homo sapiens
tccaccgccccccgcagcctgagatccgaacacactcggtgccgaaccgaacctaagaaacgccggcctttcaagtgccctacaccccggaggaggacagcgggcgcttagaaggcaggcac

SEQ ID NO: 448102 - DNA, 122 bp, Homo sapiens
tgctcccgcagtggggacgctccttatcgtgaagaactacactggggatcggctcaacttcggcctggcccgggagcaggcccgggctgaaggcatcccggtggagatggtggtgattgggg

SEQ ID NO: 448103 - DNA, 122 bp, Homo sapiens
cgggatggggaggggaacatagaaggcggccacctggctgatattagaggaaaacagctgcgaacagcacgggcctgagccgcaaaatgctgttttggtaaaaatcctaccacatccatggc

SEQ ID NO: 448104 - DNA, 122 bp, Homo sapiens
aggagaacagagtcaaagtacatacatacacacacacacacacacacacacacatattagcgattgatacaaaataaaggtcataaggtaattgaatgggaaaagagaactttcaacaagtg

SEQ ID NO: 448105 - DNA, 122 bp, Homo sapiens
gagctgagagagactgagaaagggggaagagaggcacagacacagataggagaagggcaccggctggagccacttgcaggactgagggtttttgcaacaaaaccctagcagcctgaagaact

SEQ ID NO: 448106 - DNA, 122 bp, Homo sapiens
cgagagtgcaaatagcttcactcacacttaacagcaccattggaaaaataactaccaagccgggtccctgagagtccctaaacgtgccttccgatttggaactggcgttgtttggcgggttg

SEQ ID NO: 448107 - DNA, 122 bp, Homo sapiens
cggagcttcggggccgggggtggagccgggaccggctctgccgcttccggccctgggaggcgcccgggccgccgcgcccctgccccgccctccacagccacccctggagccggagggtccca

SEQ ID NO: 448108 - DNA, 122 bp, Homo sapiens
tccattcgtttcctgtggggggcagtaccagcctctctagcaaagccacatctgccctgacgccagtcccactctgcttaactgctctggcatgcttgaaggcctagcttagcgtagcaggc

SEQ ID NO: 448109 - DNA, 122 bp, Homo sapiens
tgccccgcaacccctccctcaacattctgcccactgggataatcagggtatgtatggacacgatgaaaccccttgcatgtgtgtgctagtgggaggtgataattgaggcacccataaaacct

SEQ ID NO: 448110 - DNA, 122 bp, Homo sapiens
aacaacaaaaacccaacactcattcaaacacagttttaagaattaaaaacgttggctggacgctgtggctcacgcctgtaatcccagcactttgggaggccgaggcgggcggatcacctgag

SEQ ID NO: 448111 - DNA, 122 bp, Homo sapiens
ggtcagaagcagcgtggttctcgtggcagggcggcacttggcccaagactcgtgctctggcgggaggctcaagtcaggcgtcccagcagcttcggtgcaacgcctcctgcccggctgcgtgg

SEQ ID NO: 448112 - DNA, 122 bp, Homo sapiens
gacggagaggggcggaaggcttagggacagcgcggtgccttctgggatgcagaggggcgccgcactccatggtgcgcgataggattgcgttgtcaaggtaacggttgctaagcgtcgtcaga

SEQ ID NO: 448113 - DNA, 122 bp, Homo sapiens
taactggggccctgacctcagagtgtgtgcccctgcagagctgatgttcctggagaccagcgctctcacaggcgagaacgtggaggaggcgttcctcaagtgtgcccgcactatcctcaaca

SEQ ID NO: 448114 - DNA, 122 bp, Homo sapiens
aggtgggggagccgagtacgagccggcagaggtggggccggctgagggcggaagcggcggcgacgcgattacgaaacccgtccggctcggagcccggcgcactgctcccctctggactgcgg

SEQ ID NO: 448115 - DNA, 122 bp, Homo sapiens
agaactactttcagcaaatcttcaggcaacgccgaaggtggtgagaagcaggaggcagagcgagaaggcaggaatggaggggccccctagaggcaccagcttaagaggaaggttcacgagct

SEQ ID NO: 448116 - DNA, 122 bp, Homo sapiens
ttggctcacggcaacctgtgcctcccaggttcaagtgactctcaagtgactaccagcgcccgccaccatgcccaactaatttttgcatttttaatagagatggggtttcaccatattggtca

SEQ ID NO: 448117 - DNA, 122 bp, Homo sapiens
gcccggcattcatccccaccaccaccaccaccaaaagcagttcttagtgaaaattgtaggcgagcctgttaagcgttgtagaagaggaagccttccaggagaggtgccatgcggtgcccttt

SEQ ID NO: 448118 - DNA, 122 bp, Homo sapiens
tcaagaagccagccggaaggattaaaagagagtcgtccaagtcccggccggccccgggggcgggtccctgtctagccccgcatgctccgcgccaatgggcggtattgttgatcacgagtctc

SEQ ID NO: 448119 - DNA, 122 bp, Homo sapiens
gcagccacgtctccactgcctaacactcacccaaacttaatcgcagggaataaatattttcggaagactattctacaatcattttcttttgggacatgatattttttcattcaattaaacta

SEQ ID NO: 448120 - DNA, 122 bp, Homo sapiens
ctctacttctcacagtcttgcaaagtaggtgatattattcccattttatagttgagaaaacggaattagtgactgtacctataacaccagtaaatgcagagccaagattctgacccaggtct

SEQ ID NO: 448121 - DNA, 122 bp, Homo sapiens
gaatgttgtaaaacttttaatttacccatcatatttaacatttccaagactattttcctgcgcctcatctgccctcagagagaatgatccccacagtgatgaggggtcagcactctgaaagc

SEQ ID NO: 448122 - DNA, 122 bp, Homo sapiens
aaagtcccttattctctctcttttagagacacgggtttcactatattgccaggctggtctcgaacacttggactcaaggaatcctctggccttggcctccaaagtgctgggatcacaagctg

SEQ ID NO: 448123 - DNA, 122 bp, Homo sapiens
tctgcaaagtcctccatgatgggcgcccccctgctgcacctctgaccgcatttcccaccccgggatccccgtggtccagcacattacaaacactcctgcctcagggactgcagtggctgttc

SEQ ID NO: 448124 - DNA, 122 bp, Homo sapiens
ctaaagtcgcagaacttgaatttaaccacaagaaaactccaacaaacccaaatctagggccgttcttcaaaataactgacctatactctttaaaagtgtcaaggtcctaaaagacaaagaaa

SEQ ID NO: 448125 - DNA, 122 bp, Homo sapiens
gaggactaagaagcccgaggtgaggctcccaggaaatgtgttttaatgggcttcactacacgccacgcgaggctgcagagggaagttaaatatccctgcgatgcgtttctgatggggcctcc

SEQ ID NO: 448126 - DNA, 122 bp, Homo sapiens
tggcataacacagggtggtttcacacatggctcatggtgaggcctgtcttccaccctcgtcgaatatcattacatcactcttttccagttacaggaaatccagtgagtgctggccatagtat

SEQ ID NO: 448127 - DNA, 122 bp, Homo sapiens
agcgtcggagttcgggagaccagggtccagcatgggtttcagcacagcagacggcgggggcggcccaggcgcccgggtaagagggggcacggggactgcggcgggtgggggcgcgagcggac

SEQ ID NO: 448128 - DNA, 122 bp, Homo sapiens
caaaaggggtgaccgaagatacacccagatagccctgcctgtaccacagaaaagtgggcacggccccccagcaccatcagagaaatctgacagagtaaaccaggacacacccctgcaagaga

SEQ ID NO: 448129 - DNA, 122 bp, Homo sapiens
tgcccccggggacctgatgcccaagagggcaggccctctgaccaagtcgaggaggcacaccggctgattcccagcgcccacgtccgcaggagcagcttttgtgctcatttccattgcatttc

SEQ ID NO: 448130 - DNA, 122 bp, Homo sapiens
aagataagggtcccaacagatgaacagctgttactgcaggtgagtgttctacatcaggcacgggattttcaactcataatggagtgacgttgaaccacatacaatattatgaggattttccc

SEQ ID NO: 448131 - DNA, 122 bp, Homo sapiens
ccctcgcgtggagtgcccgctggctgtgggcggagcagcgacccgggggtgcggtgagcacgtggacctccgcctcggccggctcctcctgttaagcgatctctgctttgttagccgcctgc

SEQ ID NO: 448132 - DNA, 122 bp, Homo sapiens
ttgcgaaggccgagatctgggcctgccaggggcctgcccgagtcctctatcgcgggtccacgtggccaccaatgacccgcggcgcccccgcgtgtccccgcagccactccgcggaagcagcg

SEQ ID NO: 448133 - DNA, 122 bp, Homo sapiens
gcatcctgcctgacacgtttgcttgcacttacccatggcttcttccagtcccttcatttccgcttgagatttcagttcactgtgacccattgacatgaacttgggaagaggctgcactgggc

SEQ ID NO: 448134 - DNA, 122 bp, Homo sapiens
tgtcttgaatcccagggtagtgcctattcactgggtggtctcagaagacttcccccaaagcgcggctgacaagggtgacagcgcctggaccgcgggaactgtccgcggagctggtgctgaat

SEQ ID NO: 448135 - DNA, 122 bp, Homo sapiens
gctgtcagtccagcttctgacgcaattctggaggtcggcgggaatgcctagattgccccgcgctccccaagcttccattcactgtggctgtgtcgaagctgcaccctctggctcccagtgaa

SEQ ID NO: 448136 - DNA, 122 bp, Homo sapiens
agggcggggaacgacgtgcgcgcctccgagtgcccagcgggctcgagccggcacaggtcgcggccccgcgcacgcgcgcgcactcacagctcatccactattgctcaggagcccgtccacgc

SEQ ID NO: 448137 - DNA, 122 bp, Homo sapiens
ggcgcgccacacaacagcacgcacacgcgtccgccgggggcgtcgggctcggcgctgacgcgctccttctacgtgatcctgggcttctgcggcctgaccgcgctctacttcctgatccgggc

SEQ ID NO: 448138 - DNA, 122 bp, Homo sapiens
ttgcccgccgcgatcgccgggccagttgcacctgaaatgcgcccctcctggggcctagcccgcgccgtttccgtcagaataaaagtaatgcgaatgaaggggaaaaaattccgaggagaggg

SEQ ID NO: 448139 - DNA, 122 bp, Homo sapiens
ttcctgacatctgattggaacacattttcccatggtagctttattatggttaggcactggcgggacaccgtgggttagcctagtgcttttgtaggttaacacaacaatgtcaatagtataat

SEQ ID NO: 448140 - DNA, 122 bp, Homo sapiens
caaccctggcctccatcactgctgaggacacagggtccccccgtccctggctgtggcccccggcctgcatcactgctgaggacacaggtgttccctgtccctggccatggcccccgaccttc

SEQ ID NO: 448141 - DNA, 122 bp, Homo sapiens
ggccgccctgacctgcccggccccttgcttggggccgggcgcgtagtgggccgcgccaggcgtagcacctttggagagcgagcggtcacctcctcgaagttggtccgagctaccctgcctgc

SEQ ID NO: 448142 - DNA, 122 bp, Homo sapiens
cgccctttcagctacctccaactgctgaggaaccggttgcctaaaaggagccggcaaaagcgcctacgtggagtccagaggagcggaagtagtcagatttgactgagagccgtaaagcgcgg

SEQ ID NO: 448143 - DNA, 122 bp, Homo sapiens
cttgattggtttctgaatgtggaacttctctaatcaggggcctcttatattactgccccccggcgccacaacaacccagaataaacctgctctttttcctactgcaaggggaagctgtctcc

SEQ ID NO: 448144 - DNA, 122 bp, Homo sapiens
gccaaattgaacataacaataatgggaaaacagattttgctcaatcagacccagctcagtcggaacctaggtttattgtggatctgatataattctagcacaaaacaaggaaacctagcatt

SEQ ID NO: 448145 - DNA, 122 bp, Homo sapiens
gggtctggcactggaaccccattaacatatatatgtctagtataattcaatcattcgaaacgtcaagagtggagtttcactggtgtttaagtgaaatgcataatgatcttatgtctgttgtt

SEQ ID NO: 448146 - DNA, 122 bp, Homo sapiens
aaagcgtgtggatgctgttggtgtagccgtcgcagttgcagttgtcgtagtgcaggccgccgttgcccgaggcccagatgaagagcgtgcccagcccgccgcggccctgggaaaccaggagg

SEQ ID NO: 448147 - DNA, 122 bp, Homo sapiens
ctcacgcccctcggggctgcggaagtgctctacagactggagctgcacgaaggcgaccagcggactaccgttcctaggaggcagcgcggcggtgcgcctacggctcccggcagcccccgcgc

SEQ ID NO: 448148 - DNA, 122 bp, Homo sapiens
agggggaacaccaggcagcgtgacagtgggctcggagggcagggacagaggcggcggcggcgccacccagcggccgggcgcgcgcggggctgagctgcgtccggcccggcgctcactgcttg

SEQ ID NO: 448149 - DNA, 122 bp, Homo sapiens
ccctcaaagaggccctggagtcagatagcctggggttgagtctcagctccaccatgtacccgctgtgtgaccttggacaagtcactcaacatctctgggcgtcttcgccttcatctgtaaag

SEQ ID NO: 448150 - DNA, 122 bp, Homo sapiens
gtgaagagccagagctcatcttctgtcttctgcatttcagacctatgagcagaggaaaatcgtggagttcacctgccacacagccttcttcgtcagtatcgtggtggtgcagtgggccgact

SEQ ID NO: 448151 - DNA, 122 bp, Homo sapiens
ctaacaggagccacagcccagaagctgagaagccttccggccgatctgtggccctgaggtcgcccttggagggcgagtgagaaccccccaggcgttccggaggtggcccccagcccgaaccc

SEQ ID NO: 448152 - DNA, 122 bp, Homo sapiens
cctgccagcgagcggaatgccgtgacccctgaccttgccttcccctcaccttaccagctccgcaaccacctgacacgccgcccccgcgcccagggctccatattccgggagccagcgccacg

SEQ ID NO: 448153 - DNA, 122 bp, Homo sapiens
aagtgtggctgtggcctggtcacaggggaatcacttcttctttctgattcctgcacttcccgcccccacctcaccggccgacctgcccccaactggccctcctctcccccagcctctggcct

SEQ ID NO: 448154 - DNA, 122 bp, Homo sapiens
cccgccgccgccacagccggcgcctcctttccgattcactcaaacaaacaagatggctgccgttacgccgcggctcttcctgccgcccaaatcctcggttcaaatcggcaggatgtttacgg

SEQ ID NO: 448155 - DNA, 122 bp, Homo sapiens
ccaaacttctctctgactaacaggacaaggttcctgtctagcttcctgttcagggatgttcggtcattcttttcatcagcttctacagcaaagggggtcagaggaggtaagaagactgtgat

SEQ ID NO: 448156 - DNA, 122 bp, Homo sapiens
cattaagcagagtactgctctgagatttagcacctcagtcttttaggtccctaaagactccggattggttccagaggtggactgtcaaataggaggactttctgcagtaatggaaatggtct

SEQ ID NO: 448157 - DNA, 122 bp, Homo sapiens
gcgcgggcagcgtctctgcggagcagcacacgggctgacccgggcgcccagcggctggctcggccctaacgcgtggtctggcctcgcgctctttgccttggctgagtcttctgcccgcaatg

SEQ ID NO: 448158 - DNA, 122 bp, Homo sapiens
cggcggcagctcggtctgacgccggccagggcccggggccgggggatggtgcgggatgcacgcgcgcgagcctcctcggctcccgggaggattccgttccgggggcgggggagcgtccctcg

SEQ ID NO: 448159 - DNA, 122 bp, Homo sapiens
ctggcaggagggtaagaatgtgcactttgaaaagcacccatacgtcttggttcactcatccgggagctggctcacccgggccatagctgacaccacgatacttgacaatgaaatcactgtgc

SEQ ID NO: 448160 - DNA, 122 bp, Homo sapiens
gactgtgtagctattaatatttaattcctcccgccccgggaggtcaggccgcagggagcccggcgctgcccacccgactttccacgcgccaggcctgccggccgcaggggaggctccggctc

SEQ ID NO: 448161 - DNA, 122 bp, Homo sapiens
tctcctccatgccccatgagcactgcgggcaaggcgtgtgcctcctcaggtgaaaggacgcgcgcggctgaggggccgaagggggcacagccattcccagcagccccaccccctcggagccg

SEQ ID NO: 448162 - DNA, 122 bp, Homo sapiens
aaacacatgctctgaagggaaccacgtaggaggcactcaataaatcgcagctgtcattgtcgttgtattgtccttgttattaacctgcctggaagtcagcagttgttcttcattgacttaac

SEQ ID NO: 448163 - DNA, 122 bp, Homo sapiens
ggagggcccacaagagcaaacggtttagaggccgcgggctcacgagggatcttgttcaaacgaaaagaacgagcacaggggctcggggccagcctggaggccggcacagaggcgagtcggcc

SEQ ID NO: 448164 - DNA, 122 bp, Homo sapiens
gagccgaggccggagccggctgcctctgctggcgcggaggtgcggaggcagaagcgtgggcgggagcctgggctgtgcgtgtccctcttgggctggcgcgggttcctggtgggcgcgggctc

SEQ ID NO: 448165 - DNA, 122 bp, Homo sapiens
gtagctggcattacagcatgcaccaccactcctggctaattcttgtacttttagtagagacggggtttcaccatcttgaccaggctggtctcaaactcctgacctcaggtgatccgccccca

SEQ ID NO: 448166 - DNA, 122 bp, Homo sapiens
attctcctggaacccagctgtcatgctgtgagaaaactacaggttatcctgctggagagacggcacatggagaaccaagacgccattgccacaacccgcaccaaggccccaggcatacgaat

SEQ ID NO: 448167 - DNA, 122 bp, Homo sapiens
cagcagctggacttctggccagagcagaggctgtagcaggcagggcgggagcacatggggcggcagaggagggaaacacaggaggccgtgcggcagcagctgggctggcaggaggaggcaga

SEQ ID NO: 448168 - DNA, 122 bp, Homo sapiens
tcctcacactcatgaacatacacaggtctacccccatcacaatagcgagatatgggagatcgcggaacaaaacccaggatttcgaagagttgtcgtctataaggtccgcggagcccagccag

SEQ ID NO: 448169 - DNA, 122 bp, Homo sapiens
tgaatcggtgcaagcgccctggagaagagacttggcaatatttagtaaagtcaaacagcacgaaccctactactctgcaaagctgctgcaggaactggcggaacgaggtcacgaaggaaacc

SEQ ID NO: 448170 - DNA, 122 bp, Homo sapiens
agcagaggagggagtgagcgctcagcacagcacgcctgcagtgcccttaaggggagtcagcgtggagaaccgtgcggctggagacgccacagtgcgcacatcctcatctcccccaggagcat

SEQ ID NO: 448171 - DNA, 122 bp, Homo sapiens
gcccttgacagcggtggcacagagcctctccatggctgcagccacctgctagagagagcccgtgcctcccgctgctcgcccttccccagtccccgccactcgcccttccccagtccccgccg

SEQ ID NO: 448172 - DNA, 122 bp, Homo sapiens
cggccccaacgccctctccctggcgcgcaggtttagaaacagggcggcctctccggccgccgcctcggcggctcgggtccccatatatagtcatatccaccgtcaactgggaggccggcggc

SEQ ID NO: 448173 - DNA, 122 bp, Homo sapiens
gcggggtcacgacaccctcccggccaggaggaccctggcaggcctgggggaggggctccacggcagccccaggttcccgctgagcagcccgccctcaactggcccatgggggtgggagaggc

SEQ ID NO: 448174 - DNA, 122 bp, Homo sapiens
caacctggggtctggcatgaccattccaagtaccccggcagcgttaactcagccgtcctccggctgtccccgtatgtcaactaccagttccgtgtcattgccatcaacgaggttgggagcag

SEQ ID NO: 448175 - DNA, 122 bp, Homo sapiens
gcggcgcaagggaacgcccggggcggggtcgcctgggggcggggcctggggtggggcctgcggaccgagggggcggagccggccgccccggggtcctcagtccgctccgggagagttagggc

SEQ ID NO: 448176 - DNA, 122 bp, Homo sapiens
gggtgtttaccaggaggctgtaaagcgtggcacggaccagaggctgcacagcagcatcttcgtaaccatagcaaccagcaaccagcctcttcctcccaggcagggcgtcccaagacagaccg

SEQ ID NO: 448177 - DNA, 122 bp, Homo sapiens
tagtggtcgccacgttagggtccgtgggggcctcctgaggcagcctggtgccaacccgcacgcccaggctggggctcatcctggccctgcccacctcggggtcggaactacggtgggcctgg

SEQ ID NO: 448178 - DNA, 122 bp, Homo sapiens
cctcctgctgttccttctgtataattcctcttctttaggatttctggttaggaacacggacgggtgtctcagtgccctgctttatgaaactcagcaaagcgtctggaatggatcaagttatt

SEQ ID NO: 448179 - DNA, 122 bp, Homo sapiens
gcttcgatgggcgtggcagagcgcaaagccgcatgggcggggtttgggagtgtgggccagcgggcctattcctccaggaagccttcccagacttccatgtttcctctgagctcccattcatc

SEQ ID NO: 448180 - DNA, 122 bp, Homo sapiens
ccacaggctcccatcctggcctagctgggttctggaggctgtttggaagtcatcatttgccgaacttgccccttcaccccagaaaactgttaatgcctcttggcttctattgtcctatcgaa

SEQ ID NO: 448181 - DNA, 122 bp, Homo sapiens
tccaatgtggactctatatggcaaataaataaattaattaatttaaaaaaatcagactaacgaataaactgggaaagggcagctgcagatggtccaggagagagaatcctgtaggttatgga

SEQ ID NO: 448182 - DNA, 122 bp, Homo sapiens
tcagcgttcagcaagtctgtcatcgacatcctgcaactgtttgagcgggcagagcaagtgcgaaaagattaaaaagtgcttttctcatcatttctgctcatatgaccagcgctgcagtgctg

SEQ ID NO: 448183 - DNA, 122 bp, Homo sapiens
aaagccaaacaggcaacaaggccggcattcctcagctcaagaacacaaccactctgcatacgaccgaccggtgagggtcaaacagtgcagtctacttctgggttcctcttccagccagtctc

SEQ ID NO: 448184 - DNA, 122 bp, Homo sapiens
taaacaccacttctgtctagtttatagtttctcaagaaattagatactgacagccagatgcggtggctcacacctgtaatcccagcactttgggaggccagggagggcggatcacaaggtca

SEQ ID NO: 448185 - DNA, 122 bp, Homo sapiens
cttgggagcgtctgtggacacctgtggtgtgggccgaggagctgggagctcatctgaacacgccagcactcgcgcatccacgctgctggcggatgcctgggtttctccactgtggggccacg

SEQ ID NO: 448186 - DNA, 122 bp, Homo sapiens
gaacgggatgggtgcccttggagtccgggggaacgggatgggtgccctagtaacggagtccgggggaacgggatgggtgcccttgtaacggagtccgggggaacgggatgggtgcccttaca

SEQ ID NO: 448187 - DNA, 122 bp, Homo sapiens
aaaattttttttttttaattagcagtcatggttctgaggtttggttccatgtgccctttccgtgtactgccttccgaggtcctgattctcacagtcccttattggttccaatggcccaggac

SEQ ID NO: 448188 - DNA, 122 bp, Homo sapiens
gaaagacttctaggaaaggaagggcgtgtgaaggggccagctttgtttggaatgctctggcgagtcagcattatgtggtgaatggaggggctggaatacaaggccttttgggttttcttagg

SEQ ID NO: 448189 - DNA, 122 bp, Homo sapiens
tctctgtatggagaaaggatggaaaatccacagccatcaggaggggcaggacacggcgctcggtaacgcttgggagagacctgggccctacgtagctgactagcatctcacctgtagcccct

SEQ ID NO: 448190 - DNA, 122 bp, Homo sapiens
cgaggctgcagtgagctgtgatcgtgcgagtgcaccccagcctgtgcaacagagtaagtccgtgtctcaaaaaaaagaaaagaaaagaaatgttgtagaataccaatttggactctcattag

SEQ ID NO: 448191 - DNA, 122 bp, Homo sapiens
gccctctgtccttgcgataaggtagagggtccaattgagctaacacaagctgcctatagacggcaaactaagagagcacccagtaacacacgcctgctggggcttcaggagcacacacgtcc

SEQ ID NO: 448192 - DNA, 122 bp, Homo sapiens
gtcagtcccatgcgtgcacacctggctgagcagcactgcatttggtgagcacctggctcacgccactacccaaaatcacagatacatacacacattcacgcacacggcaacctcaggagcgt

SEQ ID NO: 448193 - DNA, 122 bp, Homo sapiens
gggcgggctcgctccactcgactccggattggtcgagcttagagagccgagtgacgtcagcgggggagaacgcctgatttgtgtggtgggcgcgggcggtggggggaagcgcagtgcgcagg

SEQ ID NO: 448194 - DNA, 122 bp, Homo sapiens
cgctcgcggaggaggaaggcggggccgtgaaataaggcccgacgggccccggggcgcgtgcgcggaccgacactgtcagctcctaacgccgcaggttcctcctggtccccgaggcccccggt

SEQ ID NO: 448195 - DNA, 122 bp, Homo sapiens
cctgcccatcctccgttgacacctttttctctctctttccttggcctctcctccaaaggtcgcagtgctgttctcttaactgagggcagccccgccggggtgttgaggccgaggtggggtgt

SEQ ID NO: 448196 - DNA, 122 bp, Homo sapiens
tggcctttcctgctgacactccacgagctgacccagcagaattctctgtgtaggaagcatcggactttgtccattgaatatgtagcggctgccagagatcacacatcaatgcaaattccaga

SEQ ID NO: 448197 - DNA, 122 bp, Homo sapiens
cataaaggtaaggaagggcaagattcaaaattgagatttttggccgggcgcagtggctcacgcctgtaatcccaagattttgggaggccgaggtgggtggatcacgaggtcaggagttcgag

SEQ ID NO: 448198 - DNA, 122 bp, Homo sapiens
aagggaccgcgggatcaacggagaaaaaccgaccgaagacaacggcccggaggaggccgacgccatcttggcagccccctccccctcaagggcctggctctctttcaatccggctcttcctc

SEQ ID NO: 448199 - DNA, 122 bp, Homo sapiens
atgtaaaccatgcgaataaaatggttttctatttctcatttccgtgtgagccgaggctgccgtgcgtttctaacaccgaggttgtgttctgctcctccccggggcccgggcagcatggcggg

SEQ ID NO: 448200 - DNA, 122 bp, Homo sapiens
tttcccatgtcagattcttcgtgctgcgctccctttaaggtttggtgtaaatgacagaaacgattcctcattcactgggtgaggattatcctggagggtggacattcctggacaacagcaga

SEQ ID NO: 448201 - DNA, 122 bp, Homo sapiens
cgacgccgcgcgccgggaggctgagagttcggcgccgggagggtcccggggacagaagagcgcctcgcccggttgccaaggcaaccccacgcggctggagaagccggcgctcgcagcccggc

SEQ ID NO: 448202 - DNA, 122 bp, Homo sapiens
gctgaggctttaagtcagaaaaccactgggattccgcctgtttcaaggttatttggcagacggcagaaggaggaaggctttaaacacaggtggtcttgatccaaagcccatgctctttaccc

SEQ ID NO: 448203 - DNA, 122 bp, Homo sapiens
aaggggtgacggatggcacctggaaaatcgggtcactcccacccaaatactgcgcttttccgacgggcttaaaaaacggcgcaccagagattatatcccgcacctggctcggagggtcctac

SEQ ID NO: 448204 - DNA, 122 bp, Homo sapiens
actacgtccgagacagcgattttggggagcacacagggaggggacttcatctgggaggaacgcattattaggctgctgtgacaggtgtgtgggcgtggaccatctctgtacctttgtatatg

SEQ ID NO: 448205 - DNA, 122 bp, Homo sapiens
gtgaatattgatgtgggggcgtggcgccttggccagctgggctagccagccaggggttcccggtttcacagagaggaaagtgacagaagacgtgcggagggagacgcagagacagaggagag

SEQ ID NO: 448206 - DNA, 122 bp, Homo sapiens
ttttaaatcacacttttcccttgcatgaataatagttgtgtccgtgtcttcacatctctacgacctaaacagttccctacaatctaaacggctgtttcattcatacctcctagtaactcata

SEQ ID NO: 448207 - DNA, 122 bp, Homo sapiens
ttgtcactgctcagctttagcttccacatctgttaaatgggcttaatcctactaagatttcgaggctgaagaaagccatatatagtgtgtggtatgggggctcattaagtcctagttctttt

SEQ ID NO: 448208 - DNA, 122 bp, Homo sapiens
cctggagatccacacgagggcgcgctcacgttccagaagccgcgtttgaccaagaggccgcggtaccttgtctgtccaacactggattctaataggcgacctcaaccccttagaaacaggcg

SEQ ID NO: 448209 - DNA, 122 bp, Homo sapiens
tgcctacaatttggatttattttgatggtgtggaaaatattatatgactattattttaggcgctactggataaaaaaaccaggaaattaatttcagtatgttggagagacaaggagatggga

SEQ ID NO: 448210 - DNA, 122 bp, Homo sapiens
gccccaaggcttcggagggactattcgtatgaaagagtgggtcctacctcttgccggggtcggggccgaggcgagtattttgccagagggaggggttttcgggggacctatgggggacgagg

SEQ ID NO: 448211 - DNA, 122 bp, Homo sapiens
tccttccccttgggaggctgccattccacgtggctctggtgagtcagaatccggcggtcacgctgatattccatttgctcccttgacaggagaaaaatgtttcagaatgacttaatcctttt

SEQ ID NO: 448212 - DNA, 122 bp, Homo sapiens
cgccgctgcaaggtgttccccagggtaccatttaaaaagccggcggggcggcagtcggcgcgggaatccccctcgccggcttcttattggccggcgccgcggtgtcgtcagagcccgggtgg

SEQ ID NO: 448213 - DNA, 122 bp, Homo sapiens
cctcctgcggtgggtgctaacttgttgtgcatgagagctgccaccatccttcccaaacatcgggcgcttggaaaagtcaagcacagttgagccctgattttcatttaatagtcaaaaccaag

SEQ ID NO: 448214 - DNA, 122 bp, Homo sapiens
gtgatagcccagtgggggtggccctagcaacaggaaattaacacagaattcattggagggcgataatgattgttcataaccattgggttgataagttaatatcattaattactcaacaaatt

SEQ ID NO: 448215 - DNA, 122 bp, Homo sapiens
cggagctgtctcgagctgagccccctaccgggccggatcccgaggtgagtcccccacctgcggtcagcccctgcgggcagccaggtcccgaggtgagtccccccacccggggctggtccaga

SEQ ID NO: 448216 - DNA, 122 bp, Homo sapiens
tggctttttaagaatgcagtcttatttttttaggccatcctcagagaaaacttaactcatcgccatgggcaggtgagttgtattcctctagacttttttcaacattctgtatctttcttgag

SEQ ID NO: 448217 - DNA, 122 bp, Homo sapiens
gcaggggcgggacaagccagccgcacacccctactcccaaagggtgaggcggaaaagaggcgaggctctgcccccaggggcgggaccaggcctcagcctgctctcggattggtcggcctttc

SEQ ID NO: 448218 - DNA, 122 bp, Homo sapiens
ccttttgtaaggaacaagaactttttaaagtcccgaggataccatttagcaaattattgtcgcagtttctttagtgataccccagggcccagaaagatgtaatgagcctttgaaagtgccca

SEQ ID NO: 448219 - DNA, 122 bp, Homo sapiens
gagaggtagacggcctcctgcgccatggaggagggcgcagattacccagcacagaggatgcggccgctcaggcagggcgacagagacaactgacatcccagtggaagatgacagccaccctg

SEQ ID NO: 448220 - DNA, 122 bp, Homo sapiens
cgctggctgcttccacgcagaaacagctgagcccagtgattgtgccagagccctatggcccgagaggggaaaggttggccgtctggcccccgatagatagacaggtgcccaggccactgttc

SEQ ID NO: 448221 - DNA, 122 bp, Homo sapiens
cggctgcagtcggctgtgccgggagggtaggatggcgtctggccgatgcggtgatagcaccgaaagcagacggccgccaggcgctccccctaccccccgaagtttctccccagcggcggggg

SEQ ID NO: 448222 - DNA, 122 bp, Homo sapiens
tgtcagcctctaactaccctatcttcagctcaggaaccagctgtggggttaagcaaacctcgtggagatagaggaacagactgagatctgggatatgtggggaccaggctccaccaagtagg

SEQ ID NO: 448223 - DNA, 122 bp, Homo sapiens
caggcttagccccctaaccccaccccaccctagccacacaaaaagtcgcgggatcacccacgcatgacctcgctcgtgcccacgaccacagacggaatctcgctgttgctcctgcacgctcc

SEQ ID NO: 448224 - DNA, 122 bp, Homo sapiens
acgcggcgggctggggctgcaaggctgggctggtgacccgcccctgggtgcatgttaatacggtggggaggaggagtcccgcgcttcctccgcccaaccaccggagccggcgggcgggcggc

SEQ ID NO: 448225 - DNA, 122 bp, Homo sapiens
cacagacacccgctcacagcctggcagacatgatgcctaggccctcccagggccagacaccgggcaagccaggaggagactggaaattccgctagcgcctgggctccacaaacacggcctgg

SEQ ID NO: 448226 - DNA, 122 bp, Homo sapiens
cacgtgacatctgtctgcatgtgtttatggatccatccatatatagtaaagcccaaagcccgcctgggagtgtgagcctggaaacccaggatggcggctctggggaaagaatcgagctctgg

SEQ ID NO: 448227 - DNA, 122 bp, Homo sapiens
tggtatgggcagtattatgagtaaacatttctgttaaattgacgttcttagttatggatacgtaatttatttgtaaataaattatgccagagtgggcacagtttaagctctaatccctactc

SEQ ID NO: 448228 - DNA, 122 bp, Homo sapiens
aaaaaaaaaaaaaaaaaaagaacaacaaaaaaaagaactggatgcgtctgatctgacgcacgcctgtttgtttacgactgcggggtgtgcctttgtctgagtagagatagtgtgtggctttt

SEQ ID NO: 448229 - DNA, 122 bp, Homo sapiens
cctggtgtgctagagtactcgaagagaatctactggtcttgattcactggtgggggcagtcggtgcccccgttagtgcccagatcagaaacatacataccctgcctagggatttagaaagtg

SEQ ID NO: 448230 - DNA, 122 bp, Homo sapiens
accttgcaagctgggagtggtggttcctgcctctaatcccagcaccctgggaggctgagacgggaggatctcttgaggaaatgctgtggtcgtttcctcaacttcaggagttccagaccagt

SEQ ID NO: 448231 - DNA, 122 bp, Homo sapiens
gatggtactggagccttgcaagtttcgctggttcctcctgttgcccagggaatctgcccccgacatttgctgctgtagatatttgtttgcctgatagatgctttttttcttccctgagcatt

SEQ ID NO: 448232 - DNA, 122 bp, Homo sapiens
ctcacactcagctgggggagctgaactgctcagatccccgggaatgcagggcccattccccggaggccaaggccagtgtcccacccacacccagtccaggcctatgcttccccgggtctgcc

SEQ ID NO: 448233 - DNA, 122 bp, Homo sapiens
gctctggccgtggcagcggcttccaggctcacccagtctcacaggaggccaaggaggctgcggaacagcccaggggcagcaggagctgttctcccagcccggccctcatgccgtctcagtga

SEQ ID NO: 448234 - DNA, 122 bp, Homo sapiens
gggttaacgcacgctcccggcccctcctccgccactaccgctctccggaggagttgtcctcgagcatgcctaacaatggactaaaatgacaaaaatgagctaaatgagaaaaatgacaaaac

SEQ ID NO: 448235 - DNA, 122 bp, Homo sapiens
gccagccccgtgctttcctgagtcacgttgcccagctgagttgccacaggaggcctgggccgcgagggaggagcccggcctccttcattctcttcgcctgctctcagggctctctggcaggg

SEQ ID NO: 448236 - DNA, 122 bp, Homo sapiens
ggagccaacttcggtggagaaacgggccgcaacactcagaaatggatcaaaaatgcctttcggaagtgctgcagcgttggtttccctgctgctgctgctgctgctgctgctgctgctgctgc

SEQ ID NO: 448237 - DNA, 122 bp, Homo sapiens
ggtcctgagatgcaactgcttggactgtgccggggatagataggctgcccacgagctgggcggcttcctgaggagcagagtccgcacccgggcattcccgcagcccctgtcaccgaggcttc

SEQ ID NO: 448238 - DNA, 122 bp, Homo sapiens
aagcagcatcgaagccaccggcgccagcctcatacctgcgcttcccgctcccctcctcggcgcctagtgataacctcacccgccggcgcccaatcccgtcgagcgtcaggcgtgaggcggcg

SEQ ID NO: 448239 - DNA, 122 bp, Homo sapiens
ctctggatctccggcgtctgaggagataagcgcggtgtgggtcagaccccgaggggtcctcgcatctccgtctggaactcccctcaacgctctcaccattttgccccgcgaaggctaatccg

SEQ ID NO: 448240 - DNA, 122 bp, Homo sapiens
gtttagaattgaaacccagtaagttttaaattcaattttagtgcttcaacctgttgtgtgcgtgtgcgcccacatgcccaatctggggcatctataggactgggtcagatctatcaggatgg

SEQ ID NO: 448241 - DNA, 122 bp, Homo sapiens
cagcttggtacccgccctagaggccttcgggctcgagggggtgtttcgaatcaagcagcacgaaggcctggccactttctaccgaaagtctaagttcagccttcttagccagcatgacattt

SEQ ID NO: 448242 - DNA, 122 bp, Homo sapiens
tggggtaaatggggtaatatctggtattggccaggatgtgggtccaggatccatcagacacgattggtggacttgtcaccgctgcagccacttaggaaaccgttcggcctcacctgacgaag

SEQ ID NO: 448243 - DNA, 122 bp, Homo sapiens
gacgaggtacatgaaaaggtaacatcttccttgtgatcccacacatgcttcattgagaagcgggcctaagagctccaagctccaggatcatggtctcccttctggatagcccagtgctccag

SEQ ID NO: 448244 - DNA, 122 bp, Homo sapiens
acagccatctcagtcagcagtgtgtcctttgctctctgaaagtgaaagctctatgagatccgaatgagcagcatccggcctcagagctaatctgtcagattttgcgtctgagtcagaactta

SEQ ID NO: 448245 - DNA, 122 bp, Homo sapiens
tctctgcgcctccctccagggcccggctgctgatagcccatgcgggacagcgcccgtggccgggactgagtcggcacacccagacccgggtgcacaggctgccccagagtgacaacgtgaat

SEQ ID NO: 448246 - DNA, 122 bp, Homo sapiens
ctccgctgagccggctcctttcttgcctgcaaagggactcaggcggcggcggtggcagcccgcgtcgcccagctggggccctagtgacttatttttgtgtgtgatcctttcttttcttcagg

SEQ ID NO: 448247 - DNA, 122 bp, Homo sapiens
ctggaacatgggaggttcagggtggtcctaggagaggggtcagggaagccagggtagtggcgggacactgaatgggatgagcagatcaccaggcagtacagtagaatttccatattttacca

SEQ ID NO: 448248 - DNA, 122 bp, Homo sapiens
aacgatctacaccctctggatgctgctgccgccatccccgcccgccctcagcaacctgtgcggaagcggagttgtccagacttgccggggcaaacttcttaacatcgcacgctggtgtgaca

SEQ ID NO: 448249 - DNA, 122 bp, Homo sapiens
tgcggctgtcagcacagggagctgcaaccgcccgcccctccgtctgcgtgaggggcccctcgtggcatcttccgagtgctatggaacaccttgctcccgctccacccgccccgccctccagt

SEQ ID NO: 448250 - DNA, 122 bp, Homo sapiens
ggcggttgctaagggactgagagaggcgttgccgggggtggggccgggccaatctgggcccgcaggtggcagcgggtggggcctggggaccgcagccagggctctcgaagcgtctaccctgc

SEQ ID NO: 448251 - DNA, 122 bp, Homo sapiens
tccttgccaatcgcgaggtggattacgcccgttctcttcagaggcttactggtttcgagccgaagcagtcgagactgctcacctttccagtgcctctggcctacgtctccccattcggagtg

SEQ ID NO: 448252 - DNA, 122 bp, Homo sapiens
agagcaggtttgaaacactctttccgaagtatctggatgtggacacttggagcgctttgacgcttacggtgaaaaggaaataacttcccatgaaaactagacagaagcattctcacaaactg

SEQ ID NO: 448253 - DNA, 122 bp, Homo sapiens
tattttgtttggcaaattataaggtattgtcttgtgatctcctttccatccttgaggcttcgtaattaagctctgcgctggtgaaacaccatctcttggttgtgctttgggcaaggtctgcc

SEQ ID NO: 448254 - DNA, 122 bp, Homo sapiens
ccgggcagaggcgggtgaaaaccaatgctcgtccagccgggaacagaacaggatgtacctcgagacttgcttcccggctggccaggaaggccctgcccagtctgaccagagcagtaaacacc

SEQ ID NO: 448255 - DNA, 122 bp, Homo sapiens
gatgtgctgattcctcagggccctttaatggaatggattcctcttgccttccctgctgtgcggcaggggctgatcctgaattaactcaagatctgttttttgtttgttttgttcttcaggtg

SEQ ID NO: 448256 - DNA, 122 bp, Homo sapiens
actcagatgtgttcttggctcctactctaaagggaagccttttgtttacttactttctttcgctcaatcctggttttgccttttttccttaggctttgttatttggttctctactgcacaga

SEQ ID NO: 448257 - DNA, 122 bp, Homo sapiens
aatagcatgggaaagacctgcccccatgattcaattacttcccagcaggtccctctcacacgtaggaactgtagaattaaaattcaagatgagatttggtgggaacacagccaaaccatatc

SEQ ID NO: 448258 - DNA, 122 bp, Homo sapiens
agcgacatcctttgcacttgaagctctgacccctaccagaaaatcccagtgctgagcgcacgttccaggggttcttttctcaacttcgaaagttctgcgggctgggaaactcccactctctc

SEQ ID NO: 448259 - DNA, 122 bp, Homo sapiens
gtatgaccgagagaagggttcggtttttccttctctcaggcaggatgggagactctgcctcgcatgtctctaaaacaggagaaagaccagcttcccaggggggcctccatcggaacagaagt

SEQ ID NO: 448260 - DNA, 122 bp, Homo sapiens
gaacgacgacgaaccctgggctcggaactcgcccaggccccgcccctcacagccccgccccgtcctcggccccgcccccggcctgtcgcctcaacaaagtccccgccgcgcggccgctggcc

SEQ ID NO: 448261 - DNA, 122 bp, Homo sapiens
ctggcccgggccctgcaggggcggggttggcagggacggcgctggcgggtggcggagacccggggggcgcagggatcggcttcccccgaggcctcggcccccgcccccgccccgcggattgg

SEQ ID NO: 448262 - DNA, 122 bp, Homo sapiens
aatatccttcgatgctcctggccctccttgatgacgtaatcatcgcgaggcgaaagatctcgttttccctgacagctgacttcctctggcgcaattcatccagaggcgctggagggttctcg

SEQ ID NO: 448263 - DNA, 122 bp, Homo sapiens
taaaggtttttcatgcgggcataactgggtgtgtgcaaggtaacaacccgggaacacacacgcacaccctcccgttaagcgctccatctttaaggagtgtttactgcgcgcagtcagcaacc

SEQ ID NO: 448264 - DNA, 122 bp, Homo sapiens
gactcgctgcgctcagtcctctgcacacccagaccacctcttggtgttagccaagtgctgcggctcagagcacaggctcagaaatcagactgcccacgtttgaaagctggtttcaacatgct

SEQ ID NO: 448265 - DNA, 122 bp, Homo sapiens
gtcagcccgcaggcctcccggctcctgggctcagcggggcaggcttcagcgttaacctggcgctgtgcaccccagaacccgcgttggtccagcaggcgtgggcctccccccagggctgggtg

SEQ ID NO: 448266 - DNA, 122 bp, Homo sapiens
acaaccacgacagcaaaaccaaagcagcggatcaatacctgtctcagaagaaaaccatcacgcagattgtgaaggataaaaagaagcagacacagctcacgctgcagtggtgagactcgccc

SEQ ID NO: 448267 - DNA, 122 bp, Homo sapiens
cagggtcttggctggcggccccattagccacggcccaggaccccagggtgggagagtgaacggaaaggtactcgtgcctggagcggttgcaacatcctctgtaatgaggaagatacagctca

SEQ ID NO: 448268 - DNA, 122 bp, Homo sapiens
aaccacacaagttaattggtaggtttttcttttgcacttttcattaagatacattgggaacgagcaggtagacaaagccagagcctggaggcttgcaagagattggaaatgtgtgacatcaa

SEQ ID NO: 448269 - DNA, 122 bp, Homo sapiens
gtgatgtgtgtgtgtgtgtgtgtatgagtgtgttggtgtatatgtgtaagtgtgtgtaaacgtatatatgtgtgactgtgtgcatgtgtatttaagcctgtgtacgtgtctgtgtttctgtg

SEQ ID NO: 448270 - DNA, 122 bp, Homo sapiens
ctgggcagatataaaaccgccccgacttatagcccctcatttcaagtttttgtctaactccggagtgagtgtggatggactgacacgtggactcggccaaattcccaccactaggccgggaa

SEQ ID NO: 448271 - DNA, 122 bp, Homo sapiens
tagttataatggtataataacaatagctaatatttattaggcactctgtgtcatgaagtacgcaaagtgtttacatgaattaagccatttaaactcttaatgactcagtgaggcaggttctg

SEQ ID NO: 448272 - DNA, 122 bp, Homo sapiens
tgctcattacaaagcgtggcaggctgccttctctccagagggtttctggtgccctatccacggaggcggcagtgggattcagccgtcacctgtgcttgcggtggtaactccatctcagactc

SEQ ID NO: 448273 - DNA, 122 bp, Homo sapiens
aatatggaattgtcaaagctatacagttttgcagattggctttacttacatttctgcaaacgtttttcccaaaataaaaatataccaagtaagtctatttacaaactaggaagctgtttcag

SEQ ID NO: 448274 - DNA, 122 bp, Homo sapiens
tcaccgcagttagccgtcacacagctcccaaagggatgggagggaggttttcttctcatccggctccagctggactctgggaatgtcagacatccacatctcccacccaggttagaggtgag

SEQ ID NO: 448275 - DNA, 122 bp, Homo sapiens
ttctagctgctgggcaagtcacttaatcccgcagtttggattatcaacttcttaaaatggcggcagccagagcagcgtcaccctctctgggctgtgtgaggatgagatgagataatggcctg

SEQ ID NO: 448276 - DNA, 122 bp, Homo sapiens
tttcctcctccatgactcacctccgggtgatgaagccatggaaccaggcaggggctgccccgtgctgcaggagccagtgggcctgggtcttctggaaccaagcccgggtctcggcctgcagg

SEQ ID NO: 448277 - DNA, 122 bp, Homo sapiens
aacatcaaaaggctaccagcttttaattttgtagtattaagccattacccagctgagtggcgatgaggataaagtcatttaatttctctagacccagttctcatgagctggcaggacaagga

SEQ ID NO: 448278 - DNA, 122 bp, Homo sapiens
gtgttggggtgtccgcgcctcgttgctgcgggactgtgtggtgttggggtgtcggcgcctcgttactgggggactgtgtggtgttgggtgtccgcgcctcgttactgggggactgtgtggtg

SEQ ID NO: 448279 - DNA, 122 bp, Homo sapiens
tcaggccaaggcggagcaagaggcatttgccagcagctgttgaatgtcaagaggcctcgccgctctgtggttcttgtcacctaagagagaggtgtctgcctgagcagctcacaacaggcagg

SEQ ID NO: 448280 - DNA, 122 bp, Homo sapiens
tttggaaaagtaaaatgaaccaaaccctctgaaagcataataaattagcaaaacagtattcgctgcggggtcttgcagattttattgcttgatacaacagcaggacccttgcctgtgcctgt

SEQ ID NO: 448281 - DNA, 122 bp, Homo sapiens
cagttctgcacataatcatgattgtagcagtcaggaaagaggtagaagccccagaggtgccggggccgcactgccttgacataacgcagtgtctccagcatgaactgctgtgctgcgaactc

SEQ ID NO: 448282 - DNA, 122 bp, Homo sapiens
ttgctttgcagatgccactgccgccaggagccctgtaacatcagccatcgtcaaccccaccgtgttcttcaacatcaccgttgacggcaagcctttagacctgcgtctccttcaagctgttt

SEQ ID NO: 448283 - DNA, 122 bp, Homo sapiens
ggggttgatctgtgcatgccactcctgggtcagacggtgaggtcggcgtctgcgaggacgcggcggtggagtagaagggcagccggagacaggcccggcgccccttccgaggctagacggcc

SEQ ID NO: 448284 - DNA, 122 bp, Homo sapiens
cgcctcacccggagcgaagaaatttctagtgtgggacccgctccgccctccttctaggggcggagcctggagcgacggggtctgagccatcagagggtggaggggccgcagccttccgaggg

SEQ ID NO: 448285 - DNA, 122 bp, Homo sapiens
ctggacacgtcctccctctgcaggccgccctgcggcccgaccccaagacccagaccttgccgtgcaaggccaagctgaccgacaagcctctgcagggcaccaagtccaaccccttcccggcc

SEQ ID NO: 448286 - DNA, 122 bp, Homo sapiens
cactgaagttgtgtcttctggacatcccataaattatccgagcaagtcactgaaccctcccgggcacatagcatatgtgtttaaatcccccaaacagtgccggactcattcagaactcaata

SEQ ID NO: 448287 - DNA, 122 bp, Homo sapiens
atgctccagcttgggctggaactgcaaacgtggacttggatcctgaactgggcagagcaccgtgccactccgagcctcagtttccacgcctcccacgtggggatgatgagacacatgcggat

SEQ ID NO: 448288 - DNA, 122 bp, Homo sapiens
ccctaaatccaggagaccatcaactatggaaaggagatctagggaacaccgtcttgaacccgccaggggttttgagtctcggacccaggagatccaaccctgaccaccctcccaggatgcag

SEQ ID NO: 448289 - DNA, 122 bp, Homo sapiens
gtgggcagaccgaggacttcagccagctttcacatgggagagcgtcctggcacggggcgtcgttgatgtgggccatgagtttgcaccttttcagatggtgggaagccactcacaagtgacag

SEQ ID NO: 448290 - DNA, 122 bp, Homo sapiens
cccctctttctgttgcagaaactgaacaggttaagttagtgcctgtggccagatttaatccggccagatttatttatttatcaaataaataaaatgtaaaaactccctaattgggagttctg

SEQ ID NO: 448291 - DNA, 122 bp, Homo sapiens
taactttaagggatttaagacttaactggggaaggaactgcagctgtggtagaaatggcacgggaactagaattagaagtggagcctggtattttagaaggccaaggcaggaggaccagttg

SEQ ID NO: 448292 - DNA, 122 bp, Homo sapiens
ggttaaggatatcggtggggtgggctggagcggtgtcgggttaggtctgagagaaggcctcgcacaaaacactgtacaaacccgaaaggaagtctgagagacgaaccgccttcctccctgaa

SEQ ID NO: 448293 - DNA, 122 bp, Homo sapiens
agcggcctcgccccgcagcacccccactaccgccccgcagcgcccccctcctccccgcagcgcccccgcccgcgccgccgcagacccccctagccaggcttccagcccccttccacccccgc

SEQ ID NO: 448294 - DNA, 122 bp, Homo sapiens
ctgccgggaggcactggcctcagaggaccccagcctcctcatccttaccccttttgtccccgggctgtctcaacgtcactctgcaagcttggtgtttgtccccatgccccgggggacttctt

SEQ ID NO: 448295 - DNA, 122 bp, Homo sapiens
ctggttcacgaggacgtggagccccgagagctcctggaccatgtttcccagctcctcgcacgagcgttcgcacacctcgggcctcctctccgagctggggcccacgtactcggtggtgacat

SEQ ID NO: 448296 - DNA, 122 bp, Homo sapiens
ccctttccgagtcaaagaaaggggtgacggacgcacctggaaaatcgggccactcccacccgaatattgcgcttttcagaccggcttagaaaatggcgcaccacgagactatatcccacacc

SEQ ID NO: 448297 - DNA, 122 bp, Homo sapiens
aatatctaaaatataccaaagcctatgcaaactgcagagtggtttcaaagaaaatacccacgaggattagaggctgaggtctcagggagaaaggaaattcagggctggctgcagggcttgtt

SEQ ID NO: 448298 - DNA, 122 bp, Homo sapiens
ggcagcagcggctgtggtggttccgggtgtctttgtccccccggtgtcgctgccctggcccgcaggtgggttggggggccccctgccgcccctctgccccttcgcccctccgcccctccgct

SEQ ID NO: 448299 - DNA, 122 bp, Homo sapiens
ggaagggccccgccgcggcgaacacgggcgcggaaccgccgagagagggttcctcgcactcgaggtgcagcaggtcaaaggttaagagccctaaacaccacacctggggtcaggaggctgca

SEQ ID NO: 448300 - DNA, 122 bp, Homo sapiens
tgtctccacatcaagtaaacagtccgtggcattggcctctgacaaatgacaacagactcacggggcagcagttgaggagctgtgcttacatgatacttaccatcctgagaagcatggatgta

SEQ ID NO: 448301 - DNA, 122 bp, Homo sapiens
aaggggcgggcggagacgtcatcagagggggcgggcctggggaagctaggagcccggcagcgccttcccgtcaaccctaggggcgtcctggtttccggtttgggtgtggccgcatggcgtgc

SEQ ID NO: 448302 - DNA, 122 bp, Homo sapiens
agagcccaggcaggttatatcagcacgcgcctctctcagaactcaccacgggaaacagcacggtctgcctgccgcagtcagcacctatctcacttacagcctcctccgcctgcctcttgtag

SEQ ID NO: 448303 - DNA, 122 bp, Homo sapiens
ttccgtgccaccctctggtgacatgcagggaagcccgtgtgagtttcttggtctcaagctcgggtattcccagcagctcttccttttcgcacgcttgtttggcgccctctcaccttcgggcg

SEQ ID NO: 448304 - DNA, 122 bp, Homo sapiens
aaagccacccgcacttgagcccatcccacggcgtcccggagctttaggaagtccccatcccggactttcaaccctgccagggactgagggaaatcccagagcctgggctccgggacgaaggt

SEQ ID NO: 448305 - DNA, 122 bp, Homo sapiens
actgacatcctttctgtgcccagctctgtgctggatgatgctgggacatagcagacactgcgtgagcttcagaccctactctcactgggccccagttcagtgggaagacagaccagtgacca

SEQ ID NO: 448306 - DNA, 122 bp, Homo sapiens
gaaaaacaatcagggctgtccaacaaaggattcgactcgccttctctggaagcattcaggcggatatgggggttggccgcctgttgaggaggctttagagagaattcctgcattgaggggag

SEQ ID NO: 448307 - DNA, 122 bp, Homo sapiens
ctttccttcttgcacagttttctgtgtagctcatgtgggagtcaagtttttaagtcagcccgtgaggcaaacattgtatgtaataaaaattaacccttaaaaattcctaggaaggtgcaacg

SEQ ID NO: 448308 - DNA, 122 bp, Homo sapiens
tgctctgggctccctgagttgctagaacgccgtggatgacgcagggaaggaggctggccccgctatcagggagattatgtcctagtggggtccccacaggcaattaactgataagcaaacga

SEQ ID NO: 448309 - DNA, 122 bp, Homo sapiens
gccagttctcccgccccggggtcgctggacaccccctcctgtcgccaggtcgggcgcccacggtcggacccgcaccccccaaccctggccctctgagaccgccaggccccggcccacgctcc

SEQ ID NO: 448310 - DNA, 122 bp, Homo sapiens
ctgggcgacctgagggcggggccgggagcaggccccgggctgtggggagggtgcgcttcccgcgggcgcgcggagtgaggacggtgacagccacgcgcgcgcgtacgcgcccgatgcagcgc

SEQ ID NO: 448311 - DNA, 122 bp, Homo sapiens
aatccagcccagctcgccgaggcatccaggtctccattctattttggtctccaggctcttcgtgaaagccaggtttgaaagtcttgtttgcttctcctttagtggtttggcgtggagggcgg

SEQ ID NO: 448312 - DNA, 122 bp, Homo sapiens
aggcacagggggcgagggaacattcaccacggggataaagaggcagggatttgggataaacgtggcaagattaattgggaatgggcgaacacgcagaaactgaagaaagccaagttcactta

SEQ ID NO: 448313 - DNA, 122 bp, Homo sapiens
caccaaaaaacgtgatgccgatggctcccttttgtcacgggtttcaaaggctcaccctaacgttcacgtgcattttcccagcggaggaaagatggttgttcttcatcagagtctggggccca

SEQ ID NO: 448314 - DNA, 122 bp, Homo sapiens
gcagattgtcttctaggtcaaaagtctgagctccatgcattaattaagctattacacaaccgtatctattttatgtccatctctggtttgcaaggcctctaaaacatttagaatctcatcag

SEQ ID NO: 448315 - DNA, 122 bp, Homo sapiens
ctacatctgaaaggaaaatagattaacctttttaaagtttattactgaatttttaggcctcgtgttttggacatgtgagtacaagccagtggtacagtgccagtcatttactgcgggcacct

SEQ ID NO: 448316 - DNA, 122 bp, Homo sapiens
gtggcgggagaagcgtttccggtggcggcggaggctgcactgagcgggacctgcgagcagcgcgggcggcagcccgggggaagcggtgagtcgcgggcggcaggcccagccaggtgggtggg

SEQ ID NO: 448317 - DNA, 122 bp, Homo sapiens
taacccctaccgccacggtaaggccgcccgcgcctcgcccccgtgggggcggcttggagccgtttcctgtgggtaactggaacatagcctaggtcggggtacccaaacctggttgcagctcg

SEQ ID NO: 448318 - DNA, 122 bp, Homo sapiens
aaaggaaagccagaaaggacctctttgtcatgggtagctagaatgttctctgctccagagcgtcctgtgagagaagagaagagaaaattaacatctactgtatgttagaaaacaggcttggt

SEQ ID NO: 448319 - DNA, 122 bp, Homo sapiens
ccggggtctgtgcgctgccttccgggactggtagttctctctgggctcctcgcagctcggcgcgtcgagagcgaactccatctcccaggaggcattgcagcgagttgctctgcgccccgcct

SEQ ID NO: 448320 - DNA, 122 bp, Homo sapiens
agggaagccggctacgaattagcctaagttattaaagatggcgacggagcgcagtcgctccgcgatggactcgccggtcccggcctctatgttcgcccccgagcccagctccccgggggcgg

SEQ ID NO: 448321 - DNA, 122 bp, Homo sapiens
ctgggattacaggcgtgagccactacatctgctccccagagtttattcttgaaagatcatcgtgaattagcaaggggaagcgcattccaagccaaggaagtttgtggaaggtagagatgtag

SEQ ID NO: 448322 - DNA, 122 bp, Homo sapiens
ggccaaaccaggcgacgctgtggcccagagagaaccagaagagagggtgcgtggggtgcacggcaagccattgagtctgtggccacacctaggcggagagagacgagctcgggtgagggtgg

SEQ ID NO: 448323 - DNA, 122 bp, Homo sapiens
agcacgctcggtcaccgtcacacagtgacacgggcacgcctacagacagaactccagaggcggcaggcggggaaacaatctcacacgtttgtaggggcactcccagatgcctgtctcacgct

SEQ ID NO: 448324 - DNA, 122 bp, Homo sapiens
cagcacaagcgcgggcctgggacggagtagccccccggagcccgtgcccttttctaaacgcgtctgtatgcagtcaataaaacaatcgatttgaactgggctcggtgactttttgtcagggg

SEQ ID NO: 448325 - DNA, 122 bp, Homo sapiens
gggcccgcgaggggagccgctagctgtgcttgtcagtgtgaccagcgctcagcaggtgtccggcgggagggcgggcaaatacaactcagtgcccacgtgcgaatgaatgaacaaactagttc

SEQ ID NO: 448326 - DNA, 122 bp, Homo sapiens
tttgtctcaatgttaatggctgctgactgatcaggtgatgtttgctgaaggctgggtggccgtagcaatttcttaagacaaaaatgaagtttgctgcattgatcgactcttcctttaatgaa

SEQ ID NO: 448327 - DNA, 122 bp, Homo sapiens
ctcccagccggtggggctggtggtcactcccacagaaacaggaattggccactgtgtagtcgagaacaggccttcattgtcctatgacttcatccctctgctatggtcctgcctccactttc

SEQ ID NO: 448328 - DNA, 122 bp, Homo sapiens
aaggagtagatcttggtggtctgagaagggagtgcagcagaggtttaaagcagtgactgacggaatagcaaaggaaactgtacaggtgaggggtgaagaggagcaaccttggtgaccatggc

SEQ ID NO: 448329 - DNA, 122 bp, Homo sapiens
gctgatacgcacgctgtggtaaaaaagtgaattctttaccacagtagcagctgccccgagcgaagtctcgcgatatttcggccgcagggatccagaggcgcgtagtgagtggcggaggactg

SEQ ID NO: 448330 - DNA, 122 bp, Homo sapiens
gggcctggatccccggcgccccctatcgcccacctcctgctttgccgtggcggcgctaaacgcacccccaaagctgccccataggaacttgggagggtcgcagggttcggaaagtgccaaat

SEQ ID NO: 448331 - DNA, 122 bp, Homo sapiens
aaccccaccacccccatccctgcgaggtggtccggccgtaaccccctccccccatccccacgcggtggtctggccctaaccctgtcaccgcatccctaggggggtggtccggccctaaaccc

SEQ ID NO: 448332 - DNA, 122 bp, Homo sapiens
ctccctcattctctcattcattccacaaacactgcctgagctggcaccgtgcttaagcaccgaacattccatggcaagtgaacgggccatagatcctgcccacttacactctaagtggggaa

SEQ ID NO: 448333 - DNA, 122 bp, Homo sapiens
cttcgtgtcctccatccccgtggactacatcttccttatcgtggagaagggcattgactccgaggtctacaagacggcacgcgccctgcgcatcgtgcgcttcaccaagatcctcagcctcc

SEQ ID NO: 448334 - DNA, 122 bp, Homo sapiens
gagcacactgagggtcagagagcacctacagttttgcctgggttagcctggagccccaggcgggggtggggtagtgagccacacctccaaatgccatgtgaggctccagtagccacaaactg

SEQ ID NO: 448335 - DNA, 122 bp, Homo sapiens
gggtagaagagcgaatattcagaggcgggaagtggtgagttatattgttacattccctttcgatggaactaaatgcggttatctgcggtcctaacctctctcgcatcggagtgcaatgtttc

SEQ ID NO: 448336 - DNA, 122 bp, Homo sapiens
ttacaggcacctaggcagattcgaggatccaagtccctgccacatgcgtttgggtgagaccgacctcactgcctcagtttcctcctatacactgatgctatcaacaaaaatacccacttcag

SEQ ID NO: 448337 - DNA, 122 bp, Homo sapiens
gatctcggtgacggcgcagagcagcaccgaatccacccaggacgcctaccaggacagccgcgcacagaggatgtccccgtggccccaggacagccgcggcctctacaactccacggacagcc

SEQ ID NO: 448338 - DNA, 122 bp, Homo sapiens
ggctcaccgcgcgtcagggcccgcagctgctcctgcagagtgatggaggcgttgtaggtccggaacaccttggccgtcagcccgtccatcagctcctggaggtgcttgttcaggctggtcgt

SEQ ID NO: 448339 - DNA, 122 bp, Homo sapiens
atcaacacgtgtgacatgtgacagaggcaagaccagggcatgattgacatgtgactgacacgtgaccaacataagtgattcacacatgattgacgtgaccgaggtttgtgacacgtgactca

SEQ ID NO: 448340 - DNA, 122 bp, Homo sapiens
ggcctttccatcagcctgcaagggtggggacaggaagggagagaggtgcatttgacgagtcgggcttgttggctgatggcactgcagagtttggacatcccaggataccaggagtccagagg

SEQ ID NO: 448341 - DNA, 122 bp, Homo sapiens
aaatgaaaatgctgtgggatagggctcctgttgcctttcagaggaagtctgacactacagcgttggcacagtgccgtgaacagtggaactgtgcccaagggactctgattatccaagcatct

SEQ ID NO: 448342 - DNA, 122 bp, Homo sapiens
aagaagcagcgtctgcaaagtgaagtctggggaaggtggttgtggggtgcctcagcagcccgccaccggagcccggagagaggcggtgatgtccgctttggagccaacctcggctctggaca

SEQ ID NO: 448343 - DNA, 122 bp, Homo sapiens
ttcctaatgaacatccttctacaagtgctaacactaacaacacacttagaaatctcagctcgttcgtaagcagccaagcctgcaggctcattaaaatattaaagcctaagaacaaagaatcg

SEQ ID NO: 448344 - DNA, 122 bp, Homo sapiens
tgaacccaagcagaaataatgactttgacttacaatactgagaggtcatagccaaccatgcgaatagagcatgctcctttctggcctcccacccacagggcgagtccaagggaagtatggac

SEQ ID NO: 448345 - DNA, 122 bp, Homo sapiens
cacagattctttagagacgaatttaatccagagtgtggagcctttattaaggaaataatccggtgcaacgttctgggacacgctcctggactgggtgggcttctgcacactcacccagcgca

SEQ ID NO: 448346 - DNA, 122 bp, Homo sapiens
gcatctgttcttccaaactttatttctgtgtacacaaaaatattagttgagtatttattacgtgccaagaactcttcaaaagtattccagttgcaggcattaataagataggcagatttcct

SEQ ID NO: 448347 - DNA, 122 bp, Homo sapiens
ctccgggttggctgcgccagtccagagttaaactttcagccaatgaaaaagggcgcgaggcgtgacgcacggaaacgtcatgggaattcccccctccggggggccgagaaggggctttcccg

SEQ ID NO: 448348 - DNA, 122 bp, Homo sapiens
aagggcggtggctccctacaaggtcacagagcaagctggtgtcagagcctggacctacagcgctgttggtggaggtcctgcctccaggtaggggaagggctccctctcacctctacacgcag

SEQ ID NO: 448349 - DNA, 122 bp, Homo sapiens
gaaaaccctacggaggttcactcaaaaagttaaaaacagaactaccagcccagtgttatccgtccttcgttaagttcaaagtcacggtgccacttcctttcccatctaaaggggactgctcg

SEQ ID NO: 448350 - DNA, 122 bp, Homo sapiens
acaagaattaggatttgtaaaaagttagtgattctctctccctgccggtttacatcacaacgtaggtgttgatctagggagggagtcaatgagatagagcattgcagagcttgctagagagg

SEQ ID NO: 448351 - DNA, 122 bp, Homo sapiens
attttcccctcatccaaattcctaggcccccgaatgcagcctggaaccccaattaagaatcgctgccagcatctggctccgttatggacacaaaatctatggctgttagggccagggagcca

SEQ ID NO: 448352 - DNA, 122 bp, Homo sapiens
caagcagacagcctcctgataaatgacagaatcaagtcctactcagggctggagggaccccgagaacgcggaggtggcgcccggaacttgcggataagttgggggtccgagtgacgaggtgt

SEQ ID NO: 448353 - DNA, 122 bp, Homo sapiens
gggatgactataatttgggctggacttacctggatggttcttctggtctgggcagggcctcgctgatttcacctgggcctggctggtgggtcagccgcggtggcctggtttataatggtctc

SEQ ID NO: 448354 - DNA, 122 bp, Homo sapiens
cacgcgctgccctggcaaccgtcaccagggaaacaagcgacgtcacttgcgcgttttcaacgctactctacgggggccgagggggcgccaagagttctgaaagtgacagaggcgctgatggc

SEQ ID NO: 448355 - DNA, 122 bp, Homo sapiens
caggccacagaccccagtcgggcggcctggctcactcccagctctgcctggggctggccacggccttgatctgtgccttgatctccaggtttgtggccctgagcctcccgtggcaccatccc

SEQ ID NO: 448356 - DNA, 122 bp, Homo sapiens
taggtgccatctggctgaagctcggcggtgctcatgaagaggctgtgagccaggcagcggcggacactctccacgtctcctcgggatgatgcgattggcattgacatctgtttcgggagaaa

SEQ ID NO: 448357 - DNA, 122 bp, Homo sapiens
cgggcggctggcccccgagtgcgggaagggccggcagggaggcggagcggaagccgagtgcgagggacgagcggagtaaaatctccacaagctgggaacaaacctcgtcccaactcccaccc

SEQ ID NO: 448358 - DNA, 122 bp, Homo sapiens
gcgacgcaaggcaggtattgcaccctggggcaaggcaaggtggacaaccagcggatgcggcgcggccgcggcctgggcctgggccctccgcgtcgcccactgccccactgggccccttctcc

SEQ ID NO: 448359 - DNA, 122 bp, Homo sapiens
actcctcaagaggctccaaccttttcttgagagcctactatgtgccaggcccattacctacgtgattctcgaacctacagcctcagcctggcatcgctggttgagagaagaggaaacaggcc

SEQ ID NO: 448360 - DNA, 122 bp, Homo sapiens
tgttcaggtgaggggctgctgtcgttcagtgaatgtaggacgggaggccagcctccccaccggcccttttgctgaagcaggcatacacggcgcccccaaagaggatggaaagtcctttaatc

SEQ ID NO: 448361 - DNA, 122 bp, Homo sapiens
attgacagcccaccttgaatcactgtgctgggccctggatgtagcagtgttttaatatttcgactcttgtgggggggggctttacaatctagctgggcagaagaggaaacatgcaaataaat

SEQ ID NO: 448362 - DNA, 122 bp, Homo sapiens
ggagtatgaaggaagttttaactcacagagacaccctcaaaggacgaagagttcattgcccggtagatttggtcggtaatggtctggttgttgtagttgaagtcctccaggcgcacaccaga

SEQ ID NO: 448363 - DNA, 122 bp, Homo sapiens
ggagcatcagggccgtcactgagtctccaccttgccgggggggctgtcccccgaccctcccgcacagcagtctcacctgaagggcattcaggccactgatctgggagtaaggcaacgaggcc

SEQ ID NO: 448364 - DNA, 122 bp, Homo sapiens
tagatttccgcacgaggaacgtctgcaagtggatagggctcaggcagctcaggaccttggcgtcccatccctctccctcccacccctggctggccagtccctggagtgtggggcaagactca

SEQ ID NO: 448365 - DNA, 122 bp, Homo sapiens
ggtgacggggcccgactgaggggagcacttctccacaggcccgtgaaggtggagcggacccggaagcggtccgagggcttctcgatggacaggaaggtagagaagaagaaaggtgaggcctg

SEQ ID NO: 448366 - DNA, 122 bp, Homo sapiens
cttcgtgctttctcaggaagacccctcctgtccccacagcaacagaccttgtctctgttccgttcagtacccccaacaaggcgatactccttcagcagagcaacagggaagtcagagccccc

SEQ ID NO: 448367 - DNA, 122 bp, Homo sapiens
catccagagtgagtgccatcacaggggagcaatgggcctccttgcagggcaccagggaagcgggacgatgtcagaaccaggagccagtcagctcccactgcaccttcttctcgctcgcacat

SEQ ID NO: 448368 - DNA, 122 bp, Homo sapiens
aagtaagagaatgatttcgttcctgttttaggatgttcgctttggcagatgattagaatacgtgctgacttgatagccacaactgtcctgataagaaagtacgccggcctggctgggcatgg

SEQ ID NO: 448369 - DNA, 122 bp, Homo sapiens
gtacctgttttacagatggaagaatgaagcatcaacttaataaactcttggcgtagatagcgatagtagtagaccttaatcatgtgttgtggtttgtgatgtactagtgtgtactctttcta

SEQ ID NO: 448370 - DNA, 122 bp, Homo sapiens
cctaacctagcgaccatcacagctcagcccagcctaccggaaacatgctcagaacacctacgccagcctacagctgggcacacacatctaacgcaaagcctgttttataatacaatgttgac

SEQ ID NO: 448371 - DNA, 122 bp, Homo sapiens
gagccttccgccgcagctccgggctgagccagcatcgccgcacgcacagcggcgagaagccgtaccgctgccccgactgcgggaagtccttcagccacggtgccaccctggctcagcaccgt

SEQ ID NO: 448372 - DNA, 122 bp, Homo sapiens
ccagaagggactgtagctgctagaggcctttgctagctgctacaggtaggtccacactgtcgcaggctgctctgtctcttagccccaacgtctgttcatggctgtggttttaaaagagtccc

SEQ ID NO: 448373 - DNA, 122 bp, Homo sapiens
tcttaccagcaacataagtgatgcagtttattcacattcttgccagtactggtgttatcacgattttttagcttagtcattaccatggcatgtggtgatataacattgtgggtttttttttt

SEQ ID NO: 448374 - DNA, 122 bp, Homo sapiens
gttcgagttgcggctgctcagcatgttcggcctgaaacagagacccacccccagcagggacgccgtggtgcccccctacatgctagacctgtatcgcaggcactcaggtcagccgggctcac

SEQ ID NO: 448375 - DNA, 122 bp, Homo sapiens
ctgttgggtgctctgtgaaactaataaggcagtgtgaaatactgtacttatttcagagaccggctgtgaggcttaagtagaggtgcagcattcataagtgtaatagagaataaccttcatgg

SEQ ID NO: 448376 - DNA, 122 bp, Homo sapiens
ctggcacgggtgagcatctgtgactctgggaatacccgtgccaggcaggccacgttatcccgaaccaacttaactgcctatcaacaggaagctcgtacatcaccgcggcccgtctctccctg

SEQ ID NO: 448377 - DNA, 122 bp, Homo sapiens
cggagccacttccctgaaagccagtgaacctatttaccattgtcatagtaacacacaattcgggcccacgtagacttaatcccgagaggcaattgttcccttgcttgggcggctacgctccc

SEQ ID NO: 448378 - DNA, 122 bp, Homo sapiens
tttccagaaggctcccctaccacgtctcgtccccacccgcacccccttgcctaccactcgcggggcgattccaggagtacctggcaacaccacagactgcgcggcccaggccaagccaagcg

SEQ ID NO: 448379 - DNA, 122 bp, Homo sapiens
gggtgtcatggcagacagcgaaggggccatcgagcttggtcagcatgccacagagtcggtcgccctcatagtgttgggcctggcctggggtgcaggcgggacagttgttctggcagccatcc

SEQ ID NO: 448380 - DNA, 122 bp, Homo sapiens
ttggttctctaagcttccgtcagtttacaatccttgcaccaggcccgtcttgctctcgcgcgagtttttgtcgctgctgggcggccaggtcctggcaggtgcatgaaactcttaaaaactct

SEQ ID NO: 448381 - DNA, 122 bp, Homo sapiens
tgaccaaggagagactcaggagacctggtctctgatgactgcccacctactttgtggccccgtggttttggaagagttactttcttgaggcagcctttcctcatgtttaagtagggataata

SEQ ID NO: 448382 - DNA, 122 bp, Homo sapiens
caggtgacctttgtaggactcaccgtatcttacctcgtgcatgtgctacccagtctttggcgaaggacctgtagtgaatgctcatgcccatatgtaaagtctctccttttcatagttccttc

SEQ ID NO: 448383 - DNA, 122 bp, Homo sapiens
ttgagaccctgagacgctgcaggcaggctgtgaccacaggggccactctatacacaaacacgcacacacacgccttgcaagtgccgggcagccaagtctgaagaacatggcatcaggagacc

SEQ ID NO: 448384 - DNA, 122 bp, Homo sapiens
agatacttcttcagttcgtgtttctgggagagcgcgcgcctgatggtggtacggtcgttccgcacggtatgcctgagcgcctccacctgctcctctcaaggctcggctttccactcaagctc

SEQ ID NO: 448385 - DNA, 122 bp, Homo sapiens
ccttatcccgcgtggtgtttattggagtggggtgtccaccttatcccactctgtgtttatcggagtggggtgtccaccttatcccgtgctgtgtttatcggagtgggggtgtccaccttatc

SEQ ID NO: 448386 - DNA, 122 bp, Homo sapiens
actctgaggttccgccctgctctctgacacaattaagggataaaatctctgaaggagtgacgggaagacgatccctcgaatactgatgagtggttccctttgacaccggcagcagccttggg

SEQ ID NO: 448387 - DNA, 122 bp, Homo sapiens
tgcctttcggtttcataaataaaaccctgtcctgactacctccaggattggatggaaactcggatgagtaaatatggtagaacgactttgcaaactagcaccctattcacacgtaaggggtt

SEQ ID NO: 448388 - DNA, 122 bp, Homo sapiens
acctgtgcgctcccacagatatgctcgcaatgcaggtgtaaggtccccctcacacctgcgcgcttccgcggtctccctccccgcatccccattaagggactggggtcccgttacaggtgcgc

SEQ ID NO: 448389 - DNA, 122 bp, Homo sapiens
aggcttcgtctggacaagctcaacaggccaggactgccgcgcagacacgtcccgcaaacgcggctgtaactccaggaaccgccctctggcgaccaaacggtcccttcgaagcagggtccagc

SEQ ID NO: 448390 - DNA, 122 bp, Homo sapiens
tctgtcctcacccccgggcgccccagcgccggaacgctgctgcctctgtgtagctgctcccggaaggagtttcatcaaacttttaaggggctttggttttgggttgtgttgataaaatacca

SEQ ID NO: 448391 - DNA, 122 bp, Homo sapiens
aaaaaaaagtatggatgttaaaccattggaaatggcactgtaaatgacaccggaaaagatcgcctccaggcactgtgtggaactttgcaaactcgggtcctcacccgaggaccgcacggccg

SEQ ID NO: 448392 - DNA, 122 bp, Homo sapiens
gttcgggaagatcatctcgcactgaggccatttgacctggtgataccaggttgttagtaacgcttgatgtttggggagttcggcatatttgactctccctgcggctcctcctcctagcccac

SEQ ID NO: 448393 - DNA, 122 bp, Homo sapiens
ctacaggaagcctcgctgggaggccactggacagtggctgggggatcatggagatggtgacgagttcatagatccagagacaggagataagaaatatacataccatgcttctggaggtgacg

SEQ ID NO: 448394 - DNA, 122 bp, Homo sapiens
ccaatatctggcgctttccaccattccttggcaaacagaacaaccagagagcataaaagtcgagtctaagccagggactctcgcgaatcccttctaaggcataccctatttaaactttgtat

SEQ ID NO: 448395 - DNA, 122 bp, Homo sapiens
gttatcctggccttgactcattactgttccggagacctaaacgcaccctgagccaccagacgtgggtgttaacacctgaggtcaaccccctgacgcttccggctgctctggaggaagctggt

SEQ ID NO: 448396 - DNA, 122 bp, Homo sapiens
tttcctggcacactcaggttatcacagattttctattcgccctccccttgctgtagtcagcgtgacctcagagaatgactaggaggttgaggaatgcagcacaggaatggactctccctccc

SEQ ID NO: 448397 - DNA, 122 bp, Homo sapiens
ggtcgcttacagaacccagggcggggttgggctgggcgcccgcgcgcgttttcaagcctgcggcccggagttcactgcgaggactgagatcacccgttaccccgccctggtctacaagtgtt

SEQ ID NO: 448398 - DNA, 122 bp, Homo sapiens
ctctggcagaatgaatatcaacctaggtcaattctccataacaagaacccataaatttgccggccgggcgcggtggctcacgaggtcaggagatcaagaccatcctagctaacacggtgaaa

SEQ ID NO: 448399 - DNA, 122 bp, Homo sapiens
gcaggaatctgtccagctttcctcttctgtttactccttctttttgctgggatcctgaaccgaaactgcgaagttccttggccatcagctaaggaggtttgagtaggaagacaggggtctgg

SEQ ID NO: 448400 - DNA, 122 bp, Homo sapiens
tccccagctttgagcagtggcgccttgctggggctgcccagggtggcttggacctcaggccgctgagtgagagggcttaaggactggcagtggggagttgctaaaaatgtgtgggtcttcat

SEQ ID NO: 448401 - DNA, 122 bp, Homo sapiens
ctgctttgctgcctcttccggatggcccattttgtttacgagctggaggagctgcctgcccggtggagggccagcctcgagtcactcttagagcccctggcacgccactgggggtcgctgtg

SEQ ID NO: 448402 - DNA, 122 bp, Homo sapiens
agggacctgcgcgtcgcatccagcgccccctccctctcccgtcccggcgccggcggtgtgcggcaggcaggagcccccacaatcatctgacgagcccacagtgcgcccggcggctgcctggg

SEQ ID NO: 448403 - DNA, 122 bp, Homo sapiens
ccccgaagtccgggcttcaggacccgggccggcagcaccggctgcgagggttgccgaaggcgcacggatctgggcgctgaaaaagccaggatttggcaatggctttgctgtgtggccttggg

SEQ ID NO: 448404 - DNA, 122 bp, Homo sapiens
gcaggggactgatgtctcccgggagagggcaggttgggggcaggctcccctgctggaccccgacttgggaggaagtaagagcacccttccggggccactccagccctgcatgcggtgagggg

SEQ ID NO: 448405 - DNA, 122 bp, Homo sapiens
cactctggcgccctcttctggccgctctcgcgcacctccgccacgccgggcccaggcctgcgcagctgtcacatgtcctggcccaggaggtcgctatcccttgcccatggacaggcccgctc

SEQ ID NO: 448406 - DNA, 122 bp, Homo sapiens
gcccagacgcccagcgctctgagcgcgcggcccaggctgcaccagtctgctccgccgcgccggcccctttgtctaggggcgagcctgttgttgtggctgctgctgttcaggatgtcccgggt

SEQ ID NO: 448407 - DNA, 122 bp, Homo sapiens
ggtggctccaaagcatctccgcagcgatggagaactggggttcgtgggcagagtggtgagcgacggagaactggggttcgtgggcagagtggtgagcgacggagaactggggttcgtgggca

SEQ ID NO: 448408 - DNA, 122 bp, Homo sapiens
ggggctgggagggagctaataaacattgaatgtgcagcagctgccttggcggccggagtccgcccgagcgacaccggagcagtgcgcccgggaggcggcgaggggaggcggttcgccttgtc

SEQ ID NO: 448409 - DNA, 122 bp, Homo sapiens
atctgcccccgcctcgccggcccgcagaccctgcatgaaggaagcagctgcccctcccgccgctgcccctcctgccacagccccacccggaaagtgcaggcaacagctccgacttttgtttt

SEQ ID NO: 448410 - DNA, 122 bp, Homo sapiens
ggaatggggtgtaactgtggctcagagtttgacaaagttcttgggctgctcgcggggacgcggaggaggggggtggtaagtggaagaggtgagggaggtagctggaggatggacgaagactg

SEQ ID NO: 448411 - DNA, 122 bp, Homo sapiens
tgaagtcaaagcttgagggcccctggtcacggtccagggtccgggttgtgcacacatcaccgctgtgggcatcaatgcggaatgggggagatccggaggacccaagtccagcacccaaggaa

SEQ ID NO: 448412 - DNA, 122 bp, Homo sapiens
agcagcagaaacgcatttcacgtattaaatatcacactgaagtagcacttaagataccaacgagaaggttaaataaataagagagaaagaacacccttggcagaaagcacagcacggctacc

SEQ ID NO: 448413 - DNA, 122 bp, Homo sapiens
cgtggtcggaggccgattcgacacagacaaggtgggtggtggctttcgtccaagggccagcggcccagtgcctcccctgggacctcatttcctcatggaccttccattcccgtctgcacctc

SEQ ID NO: 448414 - DNA, 122 bp, Homo sapiens
aatccgaggacaagccagaggacaaagtagcttgttggtgcagtccagaaagctcccttccggaggcaaagaagaaggtggggaatggtagaaggtgggtcaagagagcaaacagaagacat

SEQ ID NO: 448415 - DNA, 122 bp, Homo sapiens
gggaagagctgctaagggtcgtattgcttcactggtttgctgagaaacttctggagcctgcgctggacaggactacagtctggatattgttctctacaaggttgtggggcttggcaggcaag

SEQ ID NO: 448416 - DNA, 122 bp, Homo sapiens
gcgcgcctctgccaatggcagctcacctgagggagctccccagccaatcatcgcgcagctcgtccctcgggcttgtaccctttagtgaaagaattcagctccttgcgagaaagttacctgtg

SEQ ID NO: 448417 - DNA, 122 bp, Homo sapiens
tgaacacagaatatcctgtgggctgttctcctggagtgtttggtttggcctggtccccagcggtgcctacaggaggtctggctctggagtcccaggtctggggtaagggacaagagtgaacg

SEQ ID NO: 448418 - DNA, 122 bp, Homo sapiens
tgggcatcaccaaactgctgctcgggatggtggaggggccacacgggtgtggaggcttcacgtccctctgccggtcacttacaggctttctctatggaagcccattcccttcagtcctggga

SEQ ID NO: 448419 - DNA, 122 bp, Homo sapiens
gtaaagaaggtaacaggcatgttgacaacacaggtcctgggggtcaggcctggccagcgccgaggcccctgctgcagcaggattgaccggcaactggcatcaaagctgggagtgcagaggca

SEQ ID NO: 448420 - DNA, 122 bp, Homo sapiens
tgtccctgcccgccctgcccagcgccgccgcctctcacagcccgcgtgcttgcctttgctcgctcacacggcccagggggcactgagtgctactcagtggggcactcttggcattttgggag

SEQ ID NO: 448421 - DNA, 122 bp, Homo sapiens
aaggctttgtgatgaagtcactggttgtctgtattcaccatgggctaaatgtaaattcggcgcaattactctgacaagtcttttttttccttctttttttttttttagatgcgatgtcactg

SEQ ID NO: 448422 - DNA, 122 bp, Homo sapiens
cccggctgccagcccaagcctccgctggtagacgccccgcggacgccatgacaaagaggtcgcagagggtcaaatacagcctctggattgaagcagtggatataggagcgaagaggccagaa

SEQ ID NO: 448423 - DNA, 122 bp, Homo sapiens
aaagagctcagaagaagccataagagagcaagacatggacaggaaaccaagtggccccagcgccccgcaggagagctcagactccagggctggggtggcgcagagcggggcgtgtggagcgc

SEQ ID NO: 448424 - DNA, 122 bp, Homo sapiens
gatacataatttcctattttacagatggaaacactgacgttagaattcatacagcttggccgggcgtggtggctcacgcctgtaatcccagcactttgggaggccaaggcgggcggatcacg

SEQ ID NO: 448425 - DNA, 122 bp, Homo sapiens
tatatttcatctaagtcctgcttctatgcattctacactattatcccatgctagtccacacgtggaatttctttcttgtgttagtatttatttcagtctgcaggttctttccatctctgctg

SEQ ID NO: 448426 - DNA, 122 bp, Homo sapiens
agcagtaccagcccaccggcgctgtgctcaatttctcgccgggccttagctgcctttccgcggggcaggggtccgtaactgcagccctccatgcctgagccccccaccccctccgtgggctc

SEQ ID NO: 448427 - DNA, 122 bp, Homo sapiens
gaaacggaaaaagtcaacatatctacaaatgggtgccacttaaatttgagtggctcatgtcgaaatggagacagtcaggtgctgtggaaagcatagcaagcgactgtggctgtaacagaatg

SEQ ID NO: 448428 - DNA, 122 bp, Homo sapiens
atcccaaatcctataattctaccaccaagcctgcgggtcctatttctgcggtggaaagggcgaatcccaaggcgaccctccactccacgcgcctgcaggcagttggaacaagccccctccaa

SEQ ID NO: 448429 - DNA, 122 bp, Homo sapiens
tcggatcccaaggaagaacttgacctttccctgacatcctccagtgcccatggcttctggcgtccacggatggcggggaggggaggggggcgcattcagcgactgcagagactgggggctgt

SEQ ID NO: 448430 - DNA, 122 bp, Homo sapiens
gggatgtgaggagcctctctgcctggctgtccagtctggaaagtgaggagcgtctctgcccggccgacatcccatctaggaagtgaggagcgtctctgccaggccgcccatcgtctgagatg

SEQ ID NO: 448431 - DNA, 122 bp, Homo sapiens
gccaggctgagcgagacccggtgtaaggtacgacagtggcaagtgcgggtgtgacggtcccggaacccaggggtctcggcccacccaccgtgggaaggaggtccactagggccccaggaggg

SEQ ID NO: 448432 - DNA, 122 bp, Homo sapiens
gccctaaagccaggggccgttaagattttataatctaaagcagcacttggagtatcaccccgaggcttcagcttcaagtcagataaaaacaacgccggctgaaggcttcagttgatgccaaa

SEQ ID NO: 448433 - DNA, 122 bp, Homo sapiens
ctctggtgctgtctaacttccccagcacacctctggtgacagaacaggatggctgcggcccgagtggggccggggcttccaacgtctttgtccagatgaggacagaggtggggcctgtgaag

SEQ ID NO: 448434 - DNA, 122 bp, Homo sapiens
tttgatagtggaattggaggttgccaagttttcagatttaatgggaggtggagggttgctcgtgtccttgaccttgaaggacctgcgcacactcatactttttcatggacttgtaaaactgt

SEQ ID NO: 448435 - DNA, 122 bp, Homo sapiens
gggaagatccccgcaacgcgctctccaggtggccgggggaccccgaggcccagggcggcccgacccgggtcccatgtcctcgtgcatgtccccccgccaggcccgccttacctcgcagcgca

SEQ ID NO: 448436 - DNA, 122 bp, Homo sapiens
gctgcgggtcctgcgagaagagcgcgatttcctccggggctgcccagttatctctggagtcgcagaactgctctcgggagaacgcgttctctaccccaaccccgtgctcctcaacccaccca

SEQ ID NO: 448437 - DNA, 122 bp, Homo sapiens
tgcgctcggcgggctggcatcgggcccggggaaagcggagcaggtaagggccctggggcccgcgcgccctggccaggccggcagaagctcactgaccccggcagcggttacggggcttgagg

SEQ ID NO: 448438 - DNA, 122 bp, Homo sapiens
agcgccgactgcagaaatgaggccaactccgcggagtaagccgatccgtaacgtggactgcggtttggtctgtaccgcgtttgggatctcggacttgcgtcccctttccgagcatgcgcagt

SEQ ID NO: 448439 - DNA, 122 bp, Homo sapiens
acgcgcccggccggtctcctgagtgatgtcgccggcgatcagatcagctcgtgtgagcaccgagtgtggcacacgactggcctcaggaccccttaagtacccggcgcaacaatgggcgcccc

SEQ ID NO: 448440 - DNA, 122 bp, Homo sapiens
agggcgcgctctccccatgctcctgagagcaggacatagactatgccctgcgcaggcagccgtccgcctcctgcagggaatgcttgctcctgggtgcacgcacggataccgcgatggtccga

SEQ ID NO: 448441 - DNA, 122 bp, Homo sapiens
cccgagggacccactgcagagcccgggatggcaaagaattctctgactcaggctctgacccggactcggaggggcaaagtgagcaggaaagggatctgcaaagctcacctcctcttggccaa

SEQ ID NO: 448442 - DNA, 122 bp, Homo sapiens
gtggcgggcgaagtggtaaacgggcgcggggacgggttttggtgccgctacggggctcggcggcagcggggttgcagtagagcccgtctccctccgctcagccccggctgagggcggcaagt

SEQ ID NO: 448443 - DNA, 122 bp, Homo sapiens
ggacctgcaccatccagacaacacacatacagcccaccgcagggcctggcgacctcactccggacctgcaccatccgtacactgcacatccagctcaccgcagggcctggcgacctcacgcc

SEQ ID NO: 448444 - DNA, 122 bp, Homo sapiens
attaggtgctataagcatcaattaatagttgctggcctctaggtaggtcttctatagacccgaaattgacatattaggaatagccactaatgattggctgcactatttctaaaatataaccc

SEQ ID NO: 448445 - DNA, 122 bp, Homo sapiens
tccatagcgccctacagcgccgggcacgcgcctctatagcgccctacagcgccgggcacacgcctccatagcgccctacagcaccgggcatgcacagtcagcactcatgacctggcttccaa

SEQ ID NO: 448446 - DNA, 122 bp, Homo sapiens
gagtaaatccagcccagcaggtctttcatgcttgttttgaggatccagaataggagttctcggtctcttcgttcataatagggagctactttcattccccttaacccttgtgatcaccacag

SEQ ID NO: 448447 - DNA, 122 bp, Homo sapiens
tgggggcccgttgggcatcgagtgcacggcgtgccgggccgtccctccctttttggcccccgctgctcttcccatcgtcatcaactcagcctccacgtgatggggaggtcactccctcccat

SEQ ID NO: 448448 - DNA, 122 bp, Homo sapiens
acagatgtgtgaaacacaagtattgagagccttaagctcctcctttttggatgcaattcccggtacagtcttgaggatcagggtgtaagacacagcaatgagaataaagtctaccataaggc

SEQ ID NO: 448449 - DNA, 122 bp, Homo sapiens
gttttccagaactgcgagcgggtcagaggcatcggcgtcgatgccccacgacggctgcaacgaggcttctgcagatctgagttcacggaaaggaccatgaggagacactccctcaccccgag

SEQ ID NO: 448450 - DNA, 122 bp, Homo sapiens
accagcagctgggtctgaagacctgggacaggggcgaggaggggagaacattgtgagattcggagacacagggagaaaagaattaatggccttcaaaataggggttccctctggggagtatg

SEQ ID NO: 448451 - DNA, 122 bp, Homo sapiens
aaacacccttcaatactgcacaggataagctgaaaaggcacagtctgtgttcactgcaatcgcatttgatataatcatctgtcattcatgcatatcgtgcataaggtaatcatatatatacc

SEQ ID NO: 448452 - DNA, 122 bp, Homo sapiens
tgaactcctgaactcaggtgatctgcccaccttggccccccaaagtgctgggattacaagcgtgagccaacacacccaggcacacaggagttttaaacccaggagaattgtgctgtcatgtt

SEQ ID NO: 448453 - DNA, 122 bp, Homo sapiens
cgcggacggcgttggtttgaagaccttcagcgttgccctggcggagcagagacaggccctcggggtggaggtgaggagagctgaggccgcgcgggctccagtcccggagagcggtgggccgc

SEQ ID NO: 448454 - DNA, 122 bp, Homo sapiens
gaaggacactgcatcccagatcgaggccggtcagtgtggcctcgccaggccgtgggcacccgcagggcaataagctggccagggactcaatttctggagctgtaaaatggggggaagctgat

SEQ ID NO: 448455 - DNA, 122 bp, Homo sapiens
tccggggacgctcgggcggcagcagcttggccatgagggcagttcgagtagtctaactcgcggctgtcaccgccactgcagcggagccggccggccgggcgctgcgggacgggcgggcggct

SEQ ID NO: 448456 - DNA, 122 bp, Homo sapiens
gatggtaaattatccatttcaaaccgggtttactctcaaatgtgctctggggaagcggaacgacacttaagcacatgcaggggcgctaaggctgacgagaaaagagcagctttgtgagaagg

SEQ ID NO: 448457 - DNA, 122 bp, Homo sapiens
cttgatggaatcagccagtttgcagtgatctaagacgatgtcccaaatccggatgatttccgtgtagatccgccctgatttctccattgcacacgtgttctgctccgtggcaatgatcttct

SEQ ID NO: 448458 - DNA, 122 bp, Homo sapiens
gaaaccgagcaaaggaatttccctgaaattacacaggaatcaaatacaggctaggcctggcggctcattcctgtaataccagcactttgagaggctgaggcaggaggattgcttgaggccag

SEQ ID NO: 448459 - DNA, 122 bp, Homo sapiens
ggaacctccacccccagaaacccagcacagcagcactgccagactgtgaagggccccacgcgcgtccggggccctctccgtgagaatcagaggtcacacaagccacagctgtaaacgctcat

SEQ ID NO: 448460 - DNA, 122 bp, Homo sapiens
cccctgtaggttcttcgtatggtgcgctccgctggatcacgtgagccagttccaaaatggcggcaggggtggccgggtggggggttgaggcagaggagttcgaagatgctcctgatgtggag

SEQ ID NO: 448461 - DNA, 122 bp, Homo sapiens
ccttccggtccgccccgcgtctcttcccgcccccggccgcgcccacaaggaacgggaggacgcgcagggtccatgtgcactttattcactcgtgtcgtcgcctctcgggtccatgcgtcggg

SEQ ID NO: 448462 - DNA, 122 bp, Homo sapiens
tccagcagcggaccaggcgcccgggccagggtgacatgcgcgccctgcctacacgcagctcggatcctctgctgtttctggagaggcctccacaggtgcgttttcctcagcgattagcgtac

SEQ ID NO: 448463 - DNA, 122 bp, Homo sapiens
atgagaattgtccgcctctctctgcatctgcagacaccatgtggctggcctgttggtggccggggagattacataaagggttggaaagctcacagtctttgtgaaggataaacatcttccct

SEQ ID NO: 448464 - DNA, 122 bp, Homo sapiens
ggcgcatgtacccatggggtgcagcgatgaacccctgtcttgagaagccgcatgtacccacgggggtgcagagatgaacctctgggaaggcgcatgtacccacagggtgcagagatgaaccc

SEQ ID NO: 448465 - DNA, 122 bp, Homo sapiens
ctcctaataccttaaatccaccaccagtttctccaaaccccgacacttctgcgagactcccgcagcggggcagaagggtctgccttgcagcatgcttaaccatcttgagcccctagaccctc

SEQ ID NO: 448466 - DNA, 122 bp, Homo sapiens
agtggaattacagatgggcaaacgacataacagtactctgtctccaacattgaacagagacgcattttagttaagagactgtggtagcagctgccctccttaaaaatggacccccaaaattt

SEQ ID NO: 448467 - DNA, 122 bp, Homo sapiens
gccgcagataccaatgtgaactaactccatcagatgcgctgagaacccatgacacactaccgctcatgggtccagaggacagggctgtgttcaggagtgcccatctgaggagttcaaaaaag

SEQ ID NO: 448468 - DNA, 122 bp, Homo sapiens
cctgcaagggcggcgcgctccttgccgctgtccagcagctgtttctactgccaggtgctgcgtcccgcgatcgttataacacatgcgtacaaatgagcacaacgcgccataaaagtgttatt

SEQ ID NO: 448469 - DNA, 122 bp, Homo sapiens
gtagtgagccgagatcatgccactgcactccagcctgggcaacattgagcactaagtgagcgagactccatctgcaatcccggcacctcgggaggccggggctggcagatcactcgaggtca

SEQ ID NO: 448470 - DNA, 122 bp, Homo sapiens
ccccttgcacaagaaccaggcccagccagggaaaggaaacgcaggccattccctcagagccgaagttaagggagaaataataatacaggcacaggaggaccagcagcagccagagaggagaa

SEQ ID NO: 448471 - DNA, 122 bp, Homo sapiens
aaggcagtgacccactccctgtgatccagggactccactgactcatgtagccaggctttccggggccaagcagacatggtgactcacatcctagggaatcagagccttggctgaactgtggc

SEQ ID NO: 448472 - DNA, 122 bp, Homo sapiens
cgttctaaaaatgaaagcaaagaagataaaagagcaagaaagcaagctataaaagaagagcgcaaggtaaaatatatttttcaaatgtgagatttacaaagagctggtggaggggaaattag

SEQ ID NO: 448473 - DNA, 122 bp, Homo sapiens
ttggtcagtgtttgtagtgcaactgaatggggacctccagccgccagtggccccctcgggcgctggctcctcttccctctttttaagtcacagtagtctgggggcaggcgagagcgggcaga

SEQ ID NO: 448474 - DNA, 122 bp, Homo sapiens
tagtattgggactcgctggcgtagggatgctgcgctcaagggtgcgacgccaactgggctcgcgcaggcgcgcgccgtcgagcgggagcgggacacctgggctcctccttggcccctccccg

SEQ ID NO: 448475 - DNA, 122 bp, Homo sapiens
ggccttgggagaaattagcccaaataagagaaaaatgaaagtctctggtaaagaggtttccgtgaaaaaaaattggagctgctatattacgttttgaaactgaccttgtggaaattgcttgg

SEQ ID NO: 448476 - DNA, 122 bp, Homo sapiens
actctttaaagccataagaaacactaaactctaaaaccacataatgtacttgggtatcaacgtagcttgaacatggtcacataaaactagaacattagctttcagataaactccaggtaaat

SEQ ID NO: 448477 - DNA, 122 bp, Homo sapiens
atagcacatcgcagcagaggaagttacagtgatgacacctgtgtgctgccctgcttgggtcggcccgtctccacagcaccaaggacagactcctgcacggagaagttggaggaggaagatgg

SEQ ID NO: 448478 - DNA, 122 bp, Homo sapiens
ccatctgcctcgtgtctgtctgcgactaaaataatactggggtgagactcgccgcaggcacgggcccagccgcaaggttccccagaagagggaggggctgggggtgctggaaaccttgtggg

SEQ ID NO: 448479 - DNA, 122 bp, Homo sapiens
tgtacctggcctacattctgtactttgtgctgaaggagttctgcatcatctgcatcgtcacgtacgtgctgaacttccttcttctcattatcaactacaaacgactagtttacttgaacgag

SEQ ID NO: 448480 - DNA, 122 bp, Homo sapiens
gccaggcgcgcagcggggcgagttctcgtgtccgtgtgagcgcgggcgtgtgtatgcgtgcgcgtgcacgagcgtgagtgtgcgtgagcgtgagtttgagtgtgcatgcgggtgtgaatgtg

SEQ ID NO: 448481 - DNA, 122 bp, Homo sapiens
aggaataaaacagtcacgagcctcccacgacctcagcatcaccactgcctccaaaatgcacggtgacagctgtgcgcggtggctcaggcctgtaatccaagcactttgggaggccgaggcgg

SEQ ID NO: 448482 - DNA, 122 bp, Homo sapiens
gagaaaacggtcaggaggcagggttagaactcttcaaggaagggccccagcaggccctgacgatgagagctcctgcctgacctctccagtcacacccagcaatgaactccccagtaggaccc

SEQ ID NO: 448483 - DNA, 122 bp, Homo sapiens
ccctccagggtccggcggggcccgcgcggtgggaggagtcgggcactggccggcgactaacgggtccgactgctgaccaagctaggagagacccggaccacggagacagagaccccggcatc

SEQ ID NO: 448484 - DNA, 122 bp, Homo sapiens
gcgcaggtcacgatccctccccatcccccacggacagcccaggtcccgggtctgagtctccggtctgagatccaccccgaggctgcgggacctgcccagaccctcgaccagggaagaaactc

SEQ ID NO: 448485 - DNA, 122 bp, Homo sapiens
aacctgtcagaggaaaacaggagcttgtgggacctggacccagccaccaagagcccaccccgaagaccctgtggatcctgctccctgagagggacccgacacccaacctatcttctccagat

SEQ ID NO: 448486 - DNA, 122 bp, Homo sapiens
tggaagaaccacagctctgccatcagactcaagtctctcccacggcaaaggctccagccccgaccagagaccacagacatccagccagcatccttcaggcccacccggggagtgggaagttc

SEQ ID NO: 448487 - DNA, 122 bp, Homo sapiens
gcggagcatggatgagacctgtcctccctcgcgccgcctaaccccggggtgaaaaacaggcgccccttcacgcagtgccacaggcagggactcagagtaggtcttggccctaaaagtgcgcc

SEQ ID NO: 448488 - DNA, 122 bp, Homo sapiens
gtcccaggagcgtggccgggctgcctcagcaggggcacagctagggagcgtggacagagccgcgagcgccttccagacaagccaggccacacacaagacaggctcttggcaaaggggccaga

SEQ ID NO: 448489 - DNA, 122 bp, Homo sapiens
gtctggaccaccttcaagctgtgcacttgggaggttgagcagacagaatgcacgtgggcacgtggccagagagaaacctgccccatcaggccaggggagcacatgtgagcacctctgccagc

SEQ ID NO: 448490 - DNA, 122 bp, Homo sapiens
cctgccttacctgagccgtggggcggaggagcggcagaggccaggcaggctggcgggtctcgcccttagggtcacgggtaccggccccgcccgcctcgccccgccccgccccgccccggtcc

SEQ ID NO: 448491 - DNA, 122 bp, Homo sapiens
ggtttccataattcctggatcaagaggggcttctcactgtccccaaacacccgaaagcaccgggcctgccaccgctgcccagcatcgccggcttggcccaccacgtcacacagcacgtactg

SEQ ID NO: 448492 - DNA, 122 bp, Homo sapiens
tttgagaccagcctgatcaacatggagaaaccctgtctttactaaaaacataaaattagccgggcatggtggcacatgcctgtaataccagctactcaggaggctgaggcaggagaatcact

SEQ ID NO: 448493 - DNA, 122 bp, Homo sapiens
agattttctgtatattattgaatctttgtgcagacaacaatcttggtgcaaattaaaccccggggataagtagaagggacactaacatcgctcacctgaatgatgcaaagcaccggtgacat

SEQ ID NO: 448494 - DNA, 122 bp, Homo sapiens
agtttagaattggatggtgagtcagaagctgagagcccaagaggtctaatcgggtctgtgcgtggcctggagtccaggaccgagaggaatggactctggaaggctggttcctggtggtgata

SEQ ID NO: 448495 - DNA, 122 bp, Homo sapiens
atttttgtatttttaggagagacggggcttcaccacgttggtcaggctgatctggaactccggacctcgtgatccgcccgcctcggccttcgaaagtgctgggattacaggtgtgagccacg

SEQ ID NO: 448496 - DNA, 122 bp, Homo sapiens
ctgtggggtcaacccttctggaaactgtgaagatctcactctgccccccccccccatcttcgggaccaggatttgcacagaagcacatgcacctacccatacaccccctcttctgagcacag

SEQ ID NO: 448497 - DNA, 122 bp, Homo sapiens
agtgatctacccacctcagcctcccaaaatgctgggattacaggcgtgagccactgcgcccggccagaagtggctttgattaggatgtggcagtggagaaatagtgagatggctggattctt

SEQ ID NO: 448498 - DNA, 122 bp, Homo sapiens
gccggcgccaagaggcggtagccgtggaaggctcgaaagcgccagggacggtacagatcccggctccctgtctggccccggcctcccgcctctcgctctccccctctccctcctagctgccc

SEQ ID NO: 448499 - DNA, 122 bp, Homo sapiens
tttagaggtcacagaagctcactgcagtggccttgttcattggtgaaggccactgctaggcgagtggccctgagcaagcagtgtcttggaatcctgcactcttgaggacgtttttgtgataa

SEQ ID NO: 448500 - DNA, 122 bp, Homo sapiens
cttcctggacactcaggatgtggactcagttctcacccccatttggtgtcgggtttctagcgaagccaatcggcgtcgctggggtccctgttccagaagtccccgcgaacccattgggactc

SEQ ID NO: 448501 - DNA, 122 bp, Homo sapiens
ctggacgactgtggctgggatggcctcccggcagtaatcttgcgcaaacaccctgccacgcgcaaggacgccagctcagacacgcagcgccccgcgcatacaaaggaatgttccctctttaa

SEQ ID NO: 448502 - DNA, 122 bp, Homo sapiens
gggccaagcgcagtcgtgacgtggcgttcagagagcggaagttgtcagatttcaccgggccgtaaagcgcgctggctgtgtcatcttccggttagcgacaacggctctgaccgtctggcagg

SEQ ID NO: 448503 - DNA, 122 bp, Homo sapiens
tttcctcatcaaattgtcaaagaattaatcttgggaccccatgcatatgctttgtacaagcggaaaatttccaacttatctgataggaaagtgaattggggttggcacatggtaactcagat

SEQ ID NO: 448504 - DNA, 122 bp, Homo sapiens
caccacttagagggcgtgagcagcgtgggagggtccgacttggcgatctttagcaggacccgcatggggttgagctcgtggtgtggcggctcgatctgggccatctcaatcagcgtgatgcc

SEQ ID NO: 448505 - DNA, 122 bp, Homo sapiens
gagcggcctcgcgaccaggtactggcgggaacgcgcctagccccgcgtgccgccggggcccgggcttgttttgccccagtccgaagtttctgctgggttgccaggcatgagtgggagagggt

SEQ ID NO: 448506 - DNA, 122 bp, Homo sapiens
atagagcgaggagctgtctttgctcagcggctttgaggagagtagcagcattgtgaagaccgcgttcttcgcatacattcctccatgcatccattctacacatttttactaagcacctccta

SEQ ID NO: 448507 - DNA, 122 bp, Homo sapiens
ctgcgtgtccctacaaagtcagcctgttacttccactggagaaacaaaactcttgagaatcgctgagctgtaaaaatgttagaaagccggtgtcccaggcgccctgagaaagccgggagagg

SEQ ID NO: 448508 - DNA, 122 bp, Homo sapiens
gctggggtcacctttctgggttcctgacttctagtggatttgagcttcttattcattcctcgttattttgctggttatttggtgctgttaagatcattttactatcttatctagctttttaa

SEQ ID NO: 448509 - DNA, 122 bp, Homo sapiens
cccgggcctcggactcacccgtgtgccgcttgcagtgcttgagcatgttgaccttctgcgcgaacctgcggtggcactccttgcactcgtactccttgatgcccttgtgcagcttcatgtgg

SEQ ID NO: 448510 - DNA, 122 bp, Homo sapiens
agaaactcacaaagagttggcagatcacggatggagggcagcatctcccaacagcctgggcggccgctgagacccagagaacccaaggactcccctgggctcatccagcagcctctgcttcc

SEQ ID NO: 448511 - DNA, 122 bp, Homo sapiens
gagagcccaacgtcctcatctgtttcatagacaagttcaccccaccagtggtcaatgtcacgtggcttcgaaatggaaaacctgtcaccacaggagtgtcagagacagtcttcctgcccagg

SEQ ID NO: 448512 - DNA, 122 bp, Homo sapiens
cagcccccacttcccccaccccggcagtctgcaggtctgcggggctaagtgtcgcggcggcgcacctcgcgtcaagaatccggaggaggagactgcaaggataggcccaggtcggtgcgagg

SEQ ID NO: 448513 - DNA, 122 bp, Homo sapiens
cctccctctcgctcctacgcaaataagaactcgacgattcccttccagccgttttgatttcgggcacctccgaaagataattgggaagggtttccagaaggtgggaaatgtcacctgattca

SEQ ID NO: 448514 - DNA, 122 bp, Homo sapiens
ggcgcgaatgcagcgcgccggtcttgctgtcgtggtcccagtaagagcaatgcatcatggcgagctcgggctgccgggcacaagcgaactgcaggcccggcgcactggtgggcgcgggcgcc

SEQ ID NO: 448515 - DNA, 122 bp, Homo sapiens
ctccctgcgctccgagaagcggcccttaaagggcctgaggaagtcgtagctgtaggtggccgcgtgagatgaatgccagaaagataagaaaggggagggggcccccagcttctgggtggttg

SEQ ID NO: 448516 - DNA, 122 bp, Homo sapiens
ataccagctgtgaggcttatcaccactgttcttcctggcatggccctgtaagctcatcttcggctgaagagaagctaggtatagctactacagtttggtcctattattgcggtcagacagtt

SEQ ID NO: 448517 - DNA, 122 bp, Homo sapiens
aggccgcccctcccacccccacccccacccccacccccccaagtccccggccgcccgttccggctaacacctgtaggggcttccgcactgccccagtcgtccaaatccttctcccctccttt

SEQ ID NO: 448518 - DNA, 122 bp, Homo sapiens
tgccttcacaactccccaagaagcggtgctgtctgctccttcggccttgccctcctctgccgccacatctgaatgggcacaaatctcccaccatcacccagcctgtgggagtctgaacagga

SEQ ID NO: 448519 - DNA, 122 bp, Homo sapiens
taaatgtctgagagagaaactttaactacagcctactgtttatcctttctcctggcagctcgaagattacctgagaggttttcatctgcataacaagacagcctttgcttggcatgccttcc

SEQ ID NO: 448520 - DNA, 122 bp, Homo sapiens
ctttgtgatttgaagacatgaaaagggagtgcatcttcaggggtacccttttgggcccaccgggccattggccagccagcagaatgttatgggaggcctctatattccacggtcagagattg

SEQ ID NO: 448521 - DNA, 122 bp, Homo sapiens
ctgtgtcacccggacaggccgtgggggcgggcaggggggcggggccgggcctgaccacagcggccgagttcagtcctgctctccgcacgccaccttaggcccgcagccgtgccgggtgctct

SEQ ID NO: 448522 - DNA, 122 bp, Homo sapiens
ggaatttttctgccagagcaggagaaaccctctgggcacccaggctggcatgtgcaaaggcgtagaggcaagctccccctgacacacggctggaggggaagctctaagtgctgcgcacaggc

SEQ ID NO: 448523 - DNA, 122 bp, Homo sapiens
ttgtttctcattttagggggacagttttcagtctttaacctctcagtgtgatgatagttgcgtagaatagcagtggtgaagaaggcagggcaagcacctttgtctttttccttatcttaggg

SEQ ID NO: 448524 - DNA, 122 bp, Homo sapiens
tcacatctaggaagtgaggagcgtctctgcccggccgcccatcgtctgagatgtgggaagcgcctcagccccgccgccccatctgggatgtgagaagcgcctctgcccggccgcgaccccgt

SEQ ID NO: 448525 - DNA, 122 bp, Homo sapiens
gttatggactttcttggggcctcaactctccccaagagcgtgatcctcactacgggggagcggcgctttatccggcggggcgggtggacactcctacagacccactttgacccattttctca

SEQ ID NO: 448526 - DNA, 122 bp, Homo sapiens
ttccgcctcggtgtcagtgggtcgcgggcctacggggcgggggcggggcggcagtgagctcggccggcaaccgagggacccgcgtccaggtgagtggcccccgccgccgccacgcgaaggcc

SEQ ID NO: 448527 - DNA, 122 bp, Homo sapiens
gctgcgcgtagagcaccatgggaatggtagtccacgcctggggcccaccagccgacgacgcgctggctgaactatgcacccacaatgccctgcgcgcgccccagccccgcgtcgggaacaag

SEQ ID NO: 448528 - DNA, 122 bp, Homo sapiens
tggggcatcatttgagctcattacgtggacaccgctgcctctgaagctggttctgccacacgcctgacaggccgatcacagcctgaccttgaccaggcagcatccagggcgtcgctgtctca

SEQ ID NO: 448529 - DNA, 122 bp, Homo sapiens
ttcccaaagtgaatacacaaatttgtactcccatcagcatcgtttaagagactctgtgagcggatccacattttcttcagtacttagttttgtagtctgacaatcaaagtattagctcaatg

SEQ ID NO: 448530 - DNA, 122 bp, Homo sapiens
gtgatcctcccacctcagtctcccaaagagctgggattacaggcataagccaccttgccccgccagtttttagcctgtcagctctttgagggacacttgttatggtcatacccacagctttg

SEQ ID NO: 448531 - DNA, 122 bp, Homo sapiens
cccatttttgcgaacacttccaaggccttgagaggggccctaacgaggtgttcccatggtcgtgtacctcggtaaaatttgcaaaaataagacaattttacattatttttctttaaaagggc

SEQ ID NO: 448532 - DNA, 122 bp, Homo sapiens
gcagccctcccatgcttctactaatatggactttcttcaccaccaggaaggactttgtttcgaaaacagctggggcttttcccagaggaaccttggcgctgtcagcatctgcaccaggccaa

SEQ ID NO: 448533 - DNA, 122 bp, Homo sapiens
ctcagcttcaggacaagaccccaggtcattcccaactgaggctccgaggtgcaggagctccgtcctgtctgtaaaactccctcagttttcggctctgggtttggtgggggttgttcctccca

SEQ ID NO: 448534 - DNA, 122 bp, Homo sapiens
ggacaggaagcccctgcctgggggtaggaggatggggacaaaaccactaggatctgtatccgagaagcagtctctgttcgggatatttacttggaaattttattcaaatggaagctggcgcc

SEQ ID NO: 448535 - DNA, 122 bp, Homo sapiens
tgggaaatccacatctagtccgtggatttggggttgcttccaccatttggttgtgtgagtcggctgctatgagcctgagtgtactcatctctctcctagactctgttttcaatccttttggg

SEQ ID NO: 448536 - DNA, 122 bp, Homo sapiens
gggcacccagtatttttccctcatggcagcatttcccactgtttgcagttttctgttttgcgttaattattggattgttttccgatttccactcgagagtacctctctgagggccgagaatc

SEQ ID NO: 448537 - DNA, 122 bp, Homo sapiens
ccccaacatcgtccgcttctatgattcgtggaagtcggtgctgaggggccaggtttgcatcgtgctggtcaccgaactcatgacctcgggcacgctcaagacgtgagctctgcgcatgagtg

SEQ ID NO: 448538 - DNA, 122 bp, Homo sapiens
tgactagcatctcacctgtagcccctccaagggcctctggttgcaactggaagctgaggccgaaaccccttcccactgtccagttacaatcaggcagtcacgtcgcttttaattaacacaga

SEQ ID NO: 448539 - DNA, 122 bp, Homo sapiens
tgagcccggcggggaagcttcgcgtagcagtttctgggaaacaggtaggatcaggccgctcggacaggactgagggtgtaaggacgattcaccctggcattggggtggtgtcccgaggagct

SEQ ID NO: 448540 - DNA, 122 bp, Homo sapiens
ccacactttataaatctatcattccaataacaatttaaaaaatacctaccccaggccgggcgcggtggctcatgcctgtaatcccagcactttgggaggctgaggtttacgaatcacgaggt

SEQ ID NO: 448541 - DNA, 122 bp, Homo sapiens
aggcctctgggctgggctctggagcctcaggaagtcccttcaggtgtctgatgtccagtccgctccctcttgtttcttggttccccctgtgttcctgctgctgttcttgaaggatgcgtgtg

SEQ ID NO: 448542 - DNA, 122 bp, Homo sapiens
aatgcagacagagggggcctgggagacacgagccccggtggtgggatgcagttagctgaacgccaggctgagcagggtccgaaaattaggggaataaaagtcccgggagaggacaaggtggc

SEQ ID NO: 448543 - DNA, 122 bp, Homo sapiens
gctcggagcacaaggcctgcacgctgagggcgagtgcgtggtggagcaggagcttcggggcggtgtttctcacccagccatgtctcccctgcccagaaccgggcatcaaggggagtgaactg

SEQ ID NO: 448544 - DNA, 122 bp, Homo sapiens
tggccggtgctgctgttgctggacctagtggagacatggctctcaccaaactgcccacttcgttgcttgctgagactctcgggccaggcggcggttttccccctctgccccctcccccttac

SEQ ID NO: 448545 - DNA, 122 bp, Homo sapiens
ccctggcgagaacagcccaggatgagtgaatgtttgccgaacaggatcgcaccgagcgggcgccttcgagccagcgccggggcgggggcagagcccggggcccgttccggcagctcccagcg

SEQ ID NO: 448546 - DNA, 122 bp, Homo sapiens
gagctggggccaagggaggctgtccacgtgggctgagggtcctcagtggcgggacagcggcgtgggtcagtcgcctcccctcctgccgggtcctcagtggcgggacagcggcgtgggtcagt

SEQ ID NO: 448547 - DNA, 122 bp, Homo sapiens
gttcaaagaagattcacgtcggggccaataacagtattctgtgttgagttcagggcttgtcgaactgacacaggaccaagcgccaggatgaggacagccgagggtgactgtacccaggccat

SEQ ID NO: 448548 - DNA, 122 bp, Homo sapiens
caagggcctaggaaactaggtccagataagttaagtcaatctctgtccttaggccacctgcgccccaccctcagcacctgtttttgcctgtgtgacctcagacaagtgactgcacctctctg

SEQ ID NO: 448549 - DNA, 122 bp, Homo sapiens
gccggggattagcgggagcgtaggtgagggacaggtggagctgctctgcgcggggcagcccggctcgccaggaggcgctgtggagtgggcacgactggcgatcgctgagcgcatacaaccgc

SEQ ID NO: 448550 - DNA, 122 bp, Homo sapiens
ttttcaattcaaggactttgaggagattccgcccagataagctggaggggagcgaatgcacgtccatccagcaggggcagggcaccgggaaagaccgcaaagaagaaagtgtccggtttaag

SEQ ID NO: 448551 - DNA, 122 bp, Homo sapiens
ggatgaggaggtggggatgctgctttctggggacagagtagcaaacaaacccaaatacagcgcacggggcgctgcggaggggtcgaaggttccagcgcagaggctgtagctggtcttcccgt

SEQ ID NO: 448552 - DNA, 122 bp, Homo sapiens
ctggggacctgtcctccccactaaaagcgcgcgctgcccgaggagctgcccgggagagaacgctccaccccgggcgtcggtgccgctcctcgtctcgccgccccaaacactcaagtggcaga

SEQ ID NO: 448553 - DNA, 122 bp, Homo sapiens
atccagcacgccctgctccggcgggcgcctccgatcctgaagcgcgcacctgggaactcacgcaccgcccagccgcgaggggcttggcctggctgaaagccacattattctcgaaaacaacc

SEQ ID NO: 448554 - DNA, 122 bp, Homo sapiens
gcagaaatagttaatctatctttcttttaaaattaacgccttctggaaacagtggctcaacggggaaatgaactcttcactaaaatctcacatttcttacgcttccacttggaataagatcc

SEQ ID NO: 448555 - DNA, 122 bp, Homo sapiens
gggatgagcaggttctgaggccaagcctgctccaaccacagtgctgccaggaggaggagccggctgcctctctcatgctgtgctaccacagagccattctctaagcaggggagtgcagctga

SEQ ID NO: 448556 - DNA, 122 bp, Homo sapiens
tggccatcaggcccctcccccgcctgctgggccctcccccgcccgctgggtgctgcttcccggctgcagcacccacctcaggtgtcatgcggctgatggtaggcacatcatagccggcctgc

SEQ ID NO: 448557 - DNA, 122 bp, Homo sapiens
cccagccagagccggcactgctcactggggctcctcgggtggtgggcagatgacgcccagcgaatctgactgagccggggcctctgcagaggggtgtgttggatatggtcggcacacgggca

SEQ ID NO: 448558 - DNA, 122 bp, Homo sapiens
gtcaggatgggaaaaactaaatcgacagagtaccagcaacctcgactacgctgaagacctcgagggccccttccatacctgaatgtagtcagcgaaaagctgtacccgcgctccgccatctt

SEQ ID NO: 448559 - DNA, 122 bp, Homo sapiens
agcccggccgggaggagggaccgggtctgcggagcggggactcggggcctcggcggggcgcgcacacgcaggcggggcggcccggggtgcggggcctctgcgcggctgaccaggctcccaga

SEQ ID NO: 448560 - DNA, 122 bp, Homo sapiens
cgtagagaggccgactgaggggcgccgtgtaccgagactgtagagaggccgattgaggggcgccgtgtaccgagactgtagagaggctgagggggggggcgccgtgtgccgagactgtaaag

SEQ ID NO: 448561 - DNA, 122 bp, Homo sapiens
gaataaaagggatgggagtgaggttgctgggggcaactgaattcacactggcacaatgaccggttcagtcctaagtcaatctagttaggtactttaatattttaagtctttccttgggatgg

SEQ ID NO: 448562 - DNA, 122 bp, Homo sapiens
cagtgaggccaaccccggccagagcgggcggccgtgacgggccgtgccccgcgctgtccccggagtggatgcgcgacgtgatcaatccgcggcatttattaattccacagtctagacagagg

SEQ ID NO: 448563 - DNA, 122 bp, Homo sapiens
tccagctgggggcggaagagagctgcgggggcccggcggacctgggccaggtgagcgcggcggagggggctgctggcaggtaccacctgccccggccttcctggctttcacagccctgctcg

SEQ ID NO: 448564 - DNA, 122 bp, Homo sapiens
tgaatgggggcttcagttcttcctgcccgaagggtccttgagaagcctgtttgtttttcccggcgcttgtctccacccatccccttctctcattggccagacctggtgggcgggggagtttc

SEQ ID NO: 448565 - DNA, 122 bp, Homo sapiens
cgcagcagacaatgatgaatcatacctaaacaagtttgctgccttttcatttctgtgggtcgtaatcagactcattgttttgtagccagtgagacatttgcagcagcatgtttgggtctgtg

SEQ ID NO: 448566 - DNA, 122 bp, Homo sapiens
atcagggcagggactgggtaaaaggtttcaaagactcctgcactattgggaaggacgctacgggcgagtctatgttgcatgcaggcgactccatgttaagacgaagtgaactccctgaacct

SEQ ID NO: 448567 - DNA, 122 bp, Homo sapiens
ttatttaatactagagtcttgggaaattccattcatttgaggcagactgtttatggcaggcgatagaactttatgtaagaatgtatgtaatttccctggaagattcagtgcacgctccggtc

SEQ ID NO: 448568 - DNA, 122 bp, Homo sapiens
ctcttaaaaactcaaacaaaaacaggtggcaaagtctccagaagccatcagcaattctttcgaaaaaatcaagtggtaattgatagtggctgatggaggacataggctccaaaaatatcagc

SEQ ID NO: 448569 - DNA, 122 bp, Homo sapiens
cattaggcgggtcattttaatccttgaaaactgagtttacttcctacctaagcttccatccgcttaataccaaggtgatcaagtctgtgtgctaaatacaggaaaagccttaataggagacc

SEQ ID NO: 448570 - DNA, 122 bp, Homo sapiens
accttttgatgtgctgttgcatttggtttgctagtattttattaaagatcattgcatctacgttttcttacagatattggcctgtagttttgtgttgttggtggcagatccttgtctggttt

SEQ ID NO: 448571 - DNA, 122 bp, Homo sapiens
gtttggttctgaagctttggttgttagtgataattgattcatttatattcattagttatgcgtttgtcaaagcatgattcctgacagcttagttatgataaattaaatgcaatgctcacata

SEQ ID NO: 448572 - DNA, 122 bp, Homo sapiens
gggtactcttggtggtccccaccccaggatcttcgtcatcatcttcctggtcatcctgtccgtcttttgcatctgtggcctggctaagtgcttctgtcgcaactgcagagagccggagccag

SEQ ID NO: 448573 - DNA, 122 bp, Homo sapiens
tggtttttgtctttcttgctttatataaaaaggagattgggtaagaacagtttgagtgtgcgtatctggggtcataggtttcttatctccagtctacgaagaacaactggcaatatgttata

SEQ ID NO: 448574 - DNA, 122 bp, Homo sapiens
gagggcgcggtgcgggggggtcctggggggctccctcggaatgagggatgggtctcccgacggcgcccccagccagggccagaagcgtgggcgcgccgcgttcccggtgcttccgtgcaaca

SEQ ID NO: 448575 - DNA, 122 bp, Homo sapiens
cccggcccgaccccggccggccctgcccgcccggccccggggagggatgcggcggcgcggcgcccaggatgccccgcagccccgggacgcgcctcaaacccgccaagtacatcccggtggcc

SEQ ID NO: 448576 - DNA, 122 bp, Homo sapiens
tcagggcctgagaaggtggggttttaaacgttatccaatcagcgacgctaggctgggaaccgtccaatcaggcacgcagctggagcggacaggacggcttccgggatgtggcggggcctttg

SEQ ID NO: 448577 - DNA, 122 bp, Homo sapiens
gatgggagagtggggcagccccaccttgcagcccagagaactgagcctgtttgctccctccgcagagtttataagggagtgtcccttgatagctgatggctgcccttgagcaattcaaaagg

SEQ ID NO: 448578 - DNA, 122 bp, Homo sapiens
gctgattttgagggctgaggagactttcaatgggtgaaaagtgggtggagagttccagaacggaattatacatgtgagtctgcatgtatatacatgcatgaatgcatgcataattaaaaatt

SEQ ID NO: 448579 - DNA, 122 bp, Homo sapiens
gcgccttaaagccacgcctccgcatcggatcctagtaagggagcggggttatcattttagcgtagcgttgcgcgtgcgcagagaggccgccgtagtttgcgttttcacctggtcgcccggcg

SEQ ID NO: 448580 - DNA, 122 bp, Homo sapiens
aggaagatgatctgggctccagagaagataatcatatttagtaagtatttatagataaagcgacccctctgggttcatcttagcaagtatcattaggaagtagttgaaaatcaattaggatc

SEQ ID NO: 448581 - DNA, 122 bp, Homo sapiens
cgggctgaccgcgggggcggggccaggttctcacaccatgcaggtgatgtatggctgcgacgtggggcccgacgggcgcttcctccgcgggtatgaacagcacgcctacgacggcaaggatt

SEQ ID NO: 448582 - DNA, 122 bp, Homo sapiens
acagtggctgcgggactttccagcacctagcctgggcattcccacagcccagagggagctcgtcccagacaaccaagaggaaaagaagggaaacaagaaagagatggagacccatcattgtg

SEQ ID NO: 448583 - DNA, 122 bp, Homo sapiens
aaatatttcctctcatattgggttaagtatatgaatcaatctcctataaataatttgagtcgttggcaatcttaaagttgttggcctttggaatgtaaggtgttgtttcaaagacagctaag

SEQ ID NO: 448584 - DNA, 122 bp, Homo sapiens
gaaacttcagtttgcccacagcctgccgctttcaaggttcttgtttgctacgcgtgtgctcgatccacccatccctcttagctgatgtttgctgctgctgttgctgcagaatgggaactttg

SEQ ID NO: 448585 - DNA, 122 bp, Homo sapiens
agtgactgtcatgccagctctgttttacagtaatttggctgtgtgttgccactcaaagaacgtgcaatttgaactttgactaggagggacagtctcagtaattgccacaattaggtgatgcg

SEQ ID NO: 448586 - DNA, 122 bp, Homo sapiens
ttccatcaggagcactccagaatacactcatggtctatacatgctgactccatagaaaaccgcagcctccaaatgcttatggtatgcacttatttgctttttaaacttgaggcaagaacttg

SEQ ID NO: 448587 - DNA, 122 bp, Homo sapiens
tctatgggacttcactgagtaaggagaggttgtggtttattattagagatggggtcttgccgcattgcccaggctgtaccctaactcccgggctcaagcagtagctgggaatacaggcatgc

SEQ ID NO: 448588 - DNA, 122 bp, Homo sapiens
aggaaaactctagcggcagccgagacgctgctcacccggcgctcggcgccatcttggccccgccccctcgtgggagcaggtcctggcagagcctaagagcaagtcactgccccttccccgta

SEQ ID NO: 448589 - DNA, 122 bp, Homo sapiens
cagggctgcggccgagaaagaagccttaatagagctttctcaacctgcagccctcatctccgccggcgagtagggccaggtgttgggaggtgagtagctctccggcagctctgcaacttcat

SEQ ID NO: 448590 - DNA, 122 bp, Homo sapiens
gagcctccttttccgcgtctgtgaagtggggtcagtaatacctgccttgttgggtccttgcgaggttaaaggagccacagtggcagagacccgcctggcactcagaacccactgctaagaag

SEQ ID NO: 448591 - DNA, 122 bp, Homo sapiens
cagggggacaaccccaagagctgagaggcgggcgcacctcaagaagcaaaactcgaatttcgcaaggagtgaaaaatacgaaggacgcacaacggacctggcctcggggcaaagtgggactg

SEQ ID NO: 448592 - DNA, 122 bp, Homo sapiens
gtgctgctccttcccaggcagtggctgcaaggcctctttcctttcctctgtgcagtgcagcgaggctgcccattgtcccatgttgttcgtagccaggcgtgtcttgccaagtactgtgggaa

SEQ ID NO: 448593 - DNA, 122 bp, Homo sapiens
agccgccgtaggactggttccggcgggctggtgaggaatggagccggtaggctgctgcggcgagtgccgcggctcctccgtagacccgcggagcaccttcgtgttgagtaacctggcggagg

SEQ ID NO: 448594 - DNA, 122 bp, Homo sapiens
gagacactggctcacagggcggactcctcatggatggctgggcccctggtgatggcggagcgtgccgagcattcgtggggcctgggctgaaacgtgcatggtgcctcccggcctcaccaggg

SEQ ID NO: 448595 - DNA, 122 bp, Homo sapiens
cccggacaatattggggtagtccacccacacggtgttcgcgttcccccgcgtccggaacgcggggtccacagtcaccagcacctgggagcccttcaccagctccacttccgactctggaccc

SEQ ID NO: 448596 - DNA, 122 bp, Homo sapiens
gctgacaagcgggcggcggggggggggcgccttcctcctctgagaggaggccccgccccacgctatccgggctgtcagccctgatcaaccctgacagagttcccggatgtgctttgccggat

SEQ ID NO: 448597 - DNA, 122 bp, Homo sapiens
tttttggtactcaacaaattggagtcttctcctgtcagatgattctattccttttcatatcggccagacatactgagctcgaagagaagccaagaacctagacaactcattttgaagagctg

SEQ ID NO: 448598 - DNA, 122 bp, Homo sapiens
acacctgaaaaacaagacacagtgtttaactatcaacgaaagaactggacggctccccgccgcagtcccactccccgagtttgtggctggcatttgggccacgccgggctgggcggtcacag

SEQ ID NO: 448599 - DNA, 122 bp, Homo sapiens
agcctctgtttgaatcccggccatgccctgtgatcttaggaaaattctacagttcctctacgccccatatttcctcatccgtaaaacgggaataagaaccggtacccatctcagagatttgt

SEQ ID NO: 448600 - DNA, 122 bp, Homo sapiens
attgggtaaatacagctgttccaattgggagaaattggccaaaacaaacgggttacagggcgcatgcaagtctgaaatccagcaggacagtcaaattttaaaactccaaaatgatgtccttt

SEQ ID NO: 448601 - DNA, 122 bp, Homo sapiens
cagaagctcccagaaccctcggatgaagtgagcagcattcccaggaggcgggacgttggacgctatttttattttaacatctcatattgccccaggttctctgagtcaacaccctcaaaggg

SEQ ID NO: 448602 - DNA, 122 bp, Homo sapiens
gtgctgtgcggcccagggctcatctccctagtgcagttttaaagcgtgtggggcaggtgtcggcgtgaggctgcagtgggctcctccgagctgatgggtggcccagggtgctgtgctctgca

SEQ ID NO: 448603 - DNA, 122 bp, Homo sapiens
ctggaaaaagaaccattagtgctcactccaggccacagactccgaccggaactgacagcgcggcctccaggattgaagccatccctggcttgaaggtggggcttcactgggacccgtccctt

SEQ ID NO: 448604 - DNA, 122 bp, Homo sapiens
ggcggggatttaaatgttatccaatcagagacgctaggcagggaaccgtccaatcaggcacgcaggtgaagcggacagggcggcttccgggtttggcggggcctttgtccctcgctgtggcc

SEQ ID NO: 448605 - DNA, 122 bp, Homo sapiens
ggcgatgcccctaggccccaggcagtccctaggaaggcccctgccctgtaagggctgatgcggccgctacaccgcctcctgcaggaaggaagacccaggtttattttggtcctcggcctgtt

SEQ ID NO: 448606 - DNA, 122 bp, Homo sapiens
actagctacccagccagccttaaagggccctgcgtaagtgttccggccccctggagttcccgcagagactccgcgtcatcgggcgctggggctccgctaggtctcctgggggcatatgagtg

SEQ ID NO: 448607 - DNA, 122 bp, Homo sapiens
aaataaataaagcaaagaaataaaatacgtggctgctgttgtcagcactgccagactgggcgcgaagtgttttatctctgatctaagaggaaggacgtgctctgctgaagtgagaagggagg

SEQ ID NO: 448608 - DNA, 122 bp, Homo sapiens
ttcctgccactcctgcccagtccttccgtgggggccactcgaggaaccaccagagatggccgtgggtccttcactggaccctatccaaaccccagaaatgccagctttatgatgaaaactca

SEQ ID NO: 448609 - DNA, 122 bp, Homo sapiens
accatatgaaatgcattctcccaggatcccagacatattcttgggaatcattgtattttccgacttactggactagtttagaggcctttgggtttcactgcacttttcttcatttccttctt

SEQ ID NO: 448610 - DNA, 122 bp, Homo sapiens
gcctgctttactttgaaggtctcggaccccaagccagtgctttggagctgctcaggctgccggggtggtctggggagggcagccaccccccgtctcagggacccgcttcttggatctgctgc

SEQ ID NO: 448611 - DNA, 122 bp, Homo sapiens
tgagtccagtccaaggctgaatgagctatgatcacaccagtgcactctagcctgggtaatcgagcaagaccctgttctaaatatcgatcaatctaaatatttaggggtagaacccaggtctc

SEQ ID NO: 448612 - DNA, 122 bp, Homo sapiens
aggtttccagtcctctagagggagaaaatggtcaggggcggggcactgatgaggcctttccggggagcccttccaggacccatagtgagtccctcggggaagctcacagtgtccttgttccc

SEQ ID NO: 448613 - DNA, 122 bp, Homo sapiens
cctccccaccatcagatccgttgggacattagcctggtgttgagtttacggaaaaaggatcgaagcttgcaaatcttgcattttttcttgcgacgaccccgggagaagcttcgagccctccc

SEQ ID NO: 448614 - DNA, 122 bp, Homo sapiens
tcagcaagtgacaaacaaaagcagcaaaaagtacacccaaggcatttaaaaaacaaattgcgtgcttgcatactcggcatcccctctccctcgcctctctctgcttctttggtgggctcacg

SEQ ID NO: 448615 - DNA, 122 bp, Homo sapiens
gtacgggtcccgctatggcacaggcagatggtacgagacggaatttgagggctcgggtcccgctatcgcacaggcagatggtacgggatggaatttgagagtacgggtcccgctatggcaca

SEQ ID NO: 448616 - DNA, 122 bp, Homo sapiens
gaaaggaggagttgaaaactgtttttctaattatttgaaaataatacaaatggctgctgccgttgctaaggcaccggagaaaaacagagtccctgaaaatccacaggtactgtgtgactctt

SEQ ID NO: 448617 - DNA, 122 bp, Homo sapiens
cgggaagcccaagatggccgggccaggaacccgggaggctgctgaagtctcaattcccctcgccctaggcctgcccaagggaagtcaggagccgcgccacgcccccttacatcaccgataga

SEQ ID NO: 448618 - DNA, 122 bp, Homo sapiens
gctgccctcccagcgagaggccgcaggaccaaccaggttcaaagtgattctggaaaacctcgcccccgaagaagctgcagaacgacatggcgccaccggaaccgcagcgcgcttgccgctgc

SEQ ID NO: 448619 - DNA, 122 bp, Homo sapiens
ccctcccggcgctgtacggcgaccccgccccagcagcctgagggggcgggaacagatgtccgagtgcgacagtattggtcggcttccccaggaagcagccaatcggaataggcaagcttccg

SEQ ID NO: 448620 - DNA, 122 bp, Homo sapiens
ggacaagctgtggaaagaaaggcccttgcttcagcattaaatcccagcagcgaacactctcgagcagcacagatggcaaacaaagggagcatggacggggaggtgcacagacgcactggcgg

SEQ ID NO: 448621 - DNA, 122 bp, Homo sapiens
ggctccagctccattgtccctcccccatcattcagtagtctccgcgaaagcccttagagccggtgttgctccacaggaagccaagaagcacacaggaaaaggagcttagctgctggtaagtt

SEQ ID NO: 448622 - DNA, 122 bp, Homo sapiens
tggcccatttcaggccataatggccacgttatttcggcccagtgaacacgaacaaaatcgcgtgctttagaatcattcgactctgagtccaggaaaagcagggggtgtggtggcagtggggg

SEQ ID NO: 448623 - DNA, 122 bp, Homo sapiens
agccactgttgtcagagttcacacagtaaacacatcgttcctccaccaccatcggccgggcgtggttgatgttccaggtgaaggtggtcatggtctgattctgtgggtccacaacagagtcc

SEQ ID NO: 448624 - DNA, 122 bp, Homo sapiens
gagagtgatggaggagcgggggtgcagaccaccccttggactctggatacctctggaacacggaacagagtggccgtaccagaacctactcccatctggcttgataatgggacctgcttcta

SEQ ID NO: 448625 - DNA, 122 bp, Homo sapiens
cagagtggttgagtgtcaggggtcgacaaaggacaccatgatgtagcgtgtgccccaggtcgttggcagcccctcgtggtagtgggtgaggcggccggggtgcaggagtgcccagcccttcc

SEQ ID NO: 448626 - DNA, 122 bp, Homo sapiens
gttcgagaccagcctggtgaaaccccatctgtactaaatataccaaaaaaattagctgggcgtggtggcaggcacctgtcatcccagctactcaggaggctgagacaggagaattgcttgaa

SEQ ID NO: 448627 - DNA, 122 bp, Homo sapiens
ggtgtactcctgaggatgacacgtgggacccaggcagtccttgctgctcttacagatgcgcgcttttggggtcatcaggcggttgcaaaggtgggagcagccgtgctccccagaatgctgac

SEQ ID NO: 448628 - DNA, 122 bp, Homo sapiens
atgtgggaaagcctttaagcagtcctcaactcttactaagcattaaatattggccgggtgcggtggcttatgcaaaatggctcccagcattttgggaggctgaggtgggtggatcacaaggt

SEQ ID NO: 448629 - DNA, 122 bp, Homo sapiens
aaacaaaatcaccacgaacttattgtggcttaaagaacacagatttatcctcttacagttcgggaggtcagaagtccaagttgaattttatgtggttaaaaccagagtctcagcaagattgc

SEQ ID NO: 448630 - DNA, 122 bp, Homo sapiens
tatttgatttatctcccacctcatgtcctgagtcaattccttagtcttagatgagggagacgacttgggagtcatccttgtttttgatgagctatataaccctatggccagcagagggaagt

SEQ ID NO: 448631 - DNA, 122 bp, Homo sapiens
tggcatacatgggctggcgcggaggctcagagtgggcaaggcaggggtcgggctgcagggcgagcagggccacgcagcggtggtggcagagttgaggacagagcccgggtaggcgaggcatg

SEQ ID NO: 448632 - DNA, 122 bp, Homo sapiens
cgggcaaaaggggcagcggctttccaggtttggggtaggcgggagtatgggcttagaagccggaagtgggttgacgtagcccggaaggggaatacttccaagttgtagtgttgttgttttca

SEQ ID NO: 448633 - DNA, 122 bp, Homo sapiens
gcaaccagctccgtttcaggtcctttcctgagactgattcggctggaagggagtaggtcccgccaaatgaagaagctgtgggaagacaggaggacaagaacaggctccacgaagagatttca

SEQ ID NO: 448634 - DNA, 122 bp, Homo sapiens
tcttctctaagggtgggaggagtgggatggatgagcagaaacctgaagtctgcacaccctcgctctgctccctggctctctgttcttaaggcccagcttcccgtgctggacatcacctgggg

SEQ ID NO: 448635 - DNA, 122 bp, Homo sapiens
ttctttgtcacgcgtttgttcgggacgctgctaattaattgatgatccacaccaaaatcacgtggggaacttcaaaaatatccctggctgaatctcaccctagaaatctgacgggggagatg

SEQ ID NO: 448636 - DNA, 122 bp, Homo sapiens
tctcttaattctaacaatcttctcgcacctagctgtagccaacttagttcccacattcagcgaagttaagttgtttccaatcatttggcccctcccagcctgggggcctctgacctctggcc

SEQ ID NO: 448637 - DNA, 122 bp, Homo sapiens
caaactggagtgcaatggcgcaatctcggcgcactgcaacctttgcctgctgggttcaagcgattctcctatctcagtctcctgagtagctgggattataggcgcccgccaccaagcccggc

SEQ ID NO: 448638 - DNA, 122 bp, Homo sapiens
gaccgcccggaaatgtccttgtgtaaacccatggctctggacaagcaagtgagccccaggcggcaggaccttttctggggactgtgtgccggccccgcccgcctggggcgcggcgccgaggc

SEQ ID NO: 448639 - DNA, 122 bp, Homo sapiens
gtcagccgcactgcatgtgtgtgcgtggtggggctggggaagggctggcgcgtgttgacacgatggtgcgggcaccggggagcaccacccccacatgatcccctgtatgttgcagagagatg

SEQ ID NO: 448640 - DNA, 122 bp, Homo sapiens
aatcaggcgcactgaccggaggagggtgcaaggttcaaagagcccgccgagtcttctccacgcccctgcactgggctccgggttctgtcactgagagacgccctggaacgtctgtggcagct

SEQ ID NO: 448641 - DNA, 122 bp, Homo sapiens
gagccgaccatccttatccttgtactggaccacgaaggagtcgaattcgccctcagggaccgtccacgagaggcccacggagtcaggggtcgcatctgtcacagtcagctcccccaggcggg

SEQ ID NO: 448642 - DNA, 122 bp, Homo sapiens
accccgcgcccctctccgcacactacctagacccagagccgctttctccacacttggaaccgcacaagtatgcagctaactacttccgcttccgcttgcgtcccctgcgtccctggctcgag

SEQ ID NO: 448643 - DNA, 122 bp, Homo sapiens
tatacatgtcccaaggctgtccatccaccagagccagaatggacttcctgcaataccactcgcttaaatctagaaatttaaaacagactgattatctaacaaaatccagagtgaaaagttac

SEQ ID NO: 448644 - DNA, 122 bp, Homo sapiens
tctgtaggcgcacgatgcgtcgtgctgggagccaggcctatcggcggggtccagaagctgcggagaggccgtgtcggtcaagggacttccgccccactggctgtcatgatcagattccgatc

SEQ ID NO: 448645 - DNA, 122 bp, Homo sapiens
gccggatcgggaacggagggaccgtcccggccgcgcagtcaggctgtcagtcagcaccggcggctccgcccccatccgcgccagatcccgccccaactcgtgcccgcccggaccgggggcgc

SEQ ID NO: 448646 - DNA, 122 bp, Homo sapiens
tgatcctgttcatgctttgtctttctacttccaccttcagtgcctttttctgttcttttccggtgctctcttttctctcttttctcctctcccccatgcctcttgtggtatcatgctacctc

SEQ ID NO: 448647 - DNA, 122 bp, Homo sapiens
ctcttccttttggtgtcttggacagggcagttcagagtgataggaccaagacaccctatccgggctctggtcggggatgaagtggaattgccatgtcgcatatctcctgggaagaacgctac

SEQ ID NO: 448648 - DNA, 122 bp, Homo sapiens
actaaacctttgaaactaactcgtattttacctttctagcacatcgcagttcagaccaggcgcattccaggcagccagtagcaacacagggccaatagctgctacattgaagtgcagctctg

SEQ ID NO: 448649 - DNA, 122 bp, Homo sapiens
ccataagtaaatcaaatattctttcaagcccagttatcaaaattgtgtcctttgataccacgtcttccatcaaactgcagtaatccagttcaacacattctaaacctctgctatctcctaat

SEQ ID NO: 448650 - DNA, 122 bp, Homo sapiens
cgcctcgtacttccgagaccttacaggcagagctggagctccctcgcctctcgcactggccgcggaagtgaggtcactaggggcaggctcctcttggccaccaccatcgtgtgcttgcgttt

SEQ ID NO: 448651 - DNA, 122 bp, Homo sapiens
gcagctaactcctagcagaggaccggggtcgcggccgccgggggcgcagcgcggttagggcggccccgccacggcccaggcactcccgctgggccctgccgggcctcacccttccccgcgca

SEQ ID NO: 448652 - DNA, 122 bp, Homo sapiens
catgtcctggtatttatagaaagaagacacgtggtgtccagaacttagtaccttaaactacggaagttaattaagaaaacgctatgatttcatagcattgttacataacaaaagaccctacc

SEQ ID NO: 448653 - DNA, 122 bp, Homo sapiens
gagtccgttgttcatgggcttccccaacatgacgtaattcatatttctactgtcttgctgcgacatgctgtctgcataatttctgtcattcatgttttctgagagcacaacaccgtgtcctt

SEQ ID NO: 448654 - DNA, 122 bp, Homo sapiens
ccgggtgggtaggaaccgtagactcgctcatctcgcctgggtttgtccgcatgttgtaatcgtgcaaataaacgctcactccgaattagcggtgtatttcttgaagtttaatattgtgtttg

SEQ ID NO: 448655 - DNA, 122 bp, Homo sapiens
atgcgcgacctgggcaagtccatcatgtccaccatgattatggtccaagactgcggctggcgggaaacccacggacgactgaaactgtgcgccccgcgggtgtctatggggcagatttctcg

SEQ ID NO: 448656 - DNA, 122 bp, Homo sapiens
ctctgaattgctttaagcacttgccactcagcctctgataagcagcttaagttacatcttcgcgatgtccctaattctatgagtggtggatctgcccaaactcccaacagcttttaggaggg

SEQ ID NO: 448657 - DNA, 122 bp, Homo sapiens
ccgcgtgccagagcatcactggatggtgatgtaggaccctgaactgggacagtcctcagccggtctctgccgcttttcctccttccagcggagatccttccggactcgcaaaacatgcaagc

SEQ ID NO: 448658 - DNA, 122 bp, Homo sapiens
acacggaggcccagccccactaatagatattctgattctgttggtctggaatgggaaccgcgcgcctgtaacgttgaaaagcccctcctagactggatccagggttgagaaccaccggctgt

SEQ ID NO: 448659 - DNA, 122 bp, Homo sapiens
agcagctgttctttgaaattgccagtcctgattcagttgactaatagcaatcgatagatacggaaggctaagtactgctttgcggttgtgcagccaaatgagtgaactgtacctactgtttc

SEQ ID NO: 448660 - DNA, 122 bp, Homo sapiens
tggtgaacccgcttcgttcttgcccgcgtggatggtccgtggactccgggaaaaccttctcgtggctcaaagtccaccccctccctagcgtttcatcatgcagccaaggctcaggagctgaa

SEQ ID NO: 448661 - DNA, 122 bp, Homo sapiens
ttaatagcttgttgctgcataagtgctggtttagtatggtgggaatatggggagaggagacgctgagcagctggggttaggacgtgccatgaagacctttgatcacaaagctaaagggtttt

SEQ ID NO: 448662 - DNA, 122 bp, Homo sapiens
aacgcgggtaagaccccggggctggagcggactccccatgtgagcgcccacttcctccaccgctggggaatttaagggctactcctaggggtcagataggacgcctagaaatctaaagccct

SEQ ID NO: 448663 - DNA, 122 bp, Homo sapiens
accaccctgtttcatagaagatatctcaggtaatgtgcaaacacgggtttttaaacggagcgcatttttctcatttgttaatatcaccacctaaatcatctcttgcctaaaacaaggagtag

SEQ ID NO: 448664 - DNA, 122 bp, Homo sapiens
cccaaccccacacgggccaaggagagagtgaagaggaagcattgccctcagaggccttcacggactggccagagaagaaaccccagcagctaaggatacttaatccagccccgactaggaac

SEQ ID NO: 448665 - DNA, 122 bp, Homo sapiens
cacgtcgttcgtgctcaagggggacgcgacgcacaaccaggcgatggtgcactggacgggcgagaacagcagcgtaagtgacctccacgcgctcgccgcggcccctacccgggacaccgcgg

SEQ ID NO: 448666 - DNA, 122 bp, Homo sapiens
caattatcttccagggggcgatccaagaccccgtctccgtctgatacctacctagagcggcgagtcaggtggggtaagaagccgactggagtgactatttgcacgaacaattctctccccct

SEQ ID NO: 448667 - DNA, 122 bp, Homo sapiens
gcagaggcctggaggttggacctggggcgcagggagtctgaagactcacgctgtagttggcgcacaccgggttgaaggcgttggaaccgcacacaaagagcgtggactcgtcccgaaggagc

SEQ ID NO: 448668 - DNA, 122 bp, Homo sapiens
gggaaagagagggagcaccgtggccacagggaggacgagcagagacagcgacacagcccacggtgctgaccccacccgacagggaaccccagccacgggactgggtcctcaccagcctacag

SEQ ID NO: 448669 - DNA, 122 bp, Homo sapiens
gtctcctggaagaaaccgaggtcctggcgcagcagggaggagaaaagctgctcccggatccgcaagttgattcgagacatggtgtaggtgaagcagcctcctcggcagcctgcagacagtga

SEQ ID NO: 448670 - DNA, 122 bp, Homo sapiens
ttggccctgctctcctctgtgccttggtgacagcaagtagtggacgtggggctgaccatgcggggaagcggcctgcacgccggacccctttgggaggtgctggggctgggcaggagctggcg

SEQ ID NO: 448671 - DNA, 122 bp, Homo sapiens
acctgttcatctccacttgcaaacaaggaactggagtcaccaagaggttaagttgtgcagcgagtcagagcatagtgataggcatcaaaagggagtttcacgtctgacttaatattggtatc

SEQ ID NO: 448672 - DNA, 122 bp, Homo sapiens
gaactccaatcggattctgaatctatactgagagagagtctgctggatttgttgaaagagcggataccgggtttgagagacagcaatcagagatgagccaggatttcgacttcagtaactga

SEQ ID NO: 448673 - DNA, 122 bp, Homo sapiens
ccaccccccaccacccccccggagtacttaagggagttggcggcgctgctgcattcattgcgccgcggcacggcctagcgagtggttcttctgcgctactgctgcgcgaatcggcgacccca

SEQ ID NO: 448674 - DNA, 122 bp, Homo sapiens
ccgcgcggctaacgagccgctctccgcttattaggtggtaactcgttaataatggataatcggccccctccgcccgggcgcccctgcgccagccctcctcccccggctgcgctcggctccgg

SEQ ID NO: 448675 - DNA, 122 bp, Homo sapiens
aactttggcttttattatgcgaaatgaggagctattacagcgttttgagcatgcatattgcgtttttaaaggatcattttaaaggatcattctggctgtgctgagaatataacagagaagga

SEQ ID NO: 448676 - DNA, 122 bp, Homo sapiens
ggaggtgtggtaccgtgtgctacagatcgtcaccaaccgtgatgacgtccagggctatgccgccaagaccgtctttgaggtcagcatccctgaccctgaccctatgaccccacgacaggacc

SEQ ID NO: 448677 - DNA, 122 bp, Homo sapiens
ggccctgcagcctccacctcgccgctgggggaccaacaggttgcttacagctttgcaccccggcatcagcacaggggtccctgccccaccctccggcagctcagggagtgttttcctgtgag

SEQ ID NO: 448678 - DNA, 122 bp, Homo sapiens
acaatccagaccgacacaatgggagtgttgtgggcacagaggtgacccgggctcatcatccgttctcctctcccactctttctcccacactggccgactcatccacatcccagagcttcaag

SEQ ID NO: 448679 - DNA, 122 bp, Homo sapiens
atttactgagcacctactgtgggcagggcagtgttctgggcaccagggctataaccaagacgaacttccggccctggagggcaggtgctcacactggtgggagacatgaagctcacagggat

SEQ ID NO: 448680 - DNA, 122 bp, Homo sapiens
cgccagccgtcccggaaatgccagcgctttatatagagccccaggaaagcttcgcgttcccggctctatttttctctgctaccaacacccccactttgcagataaggaaactgaggacagaa

SEQ ID NO: 448681 - DNA, 122 bp, Homo sapiens
gcaacgccactcgccctgtccctctagcgtggcctctgtttgggggtctggggtggaggtcgtcccggcccgggtggttccggacgccggctttccgcacctggctcggtgacggcctcggc

SEQ ID NO: 448682 - DNA, 122 bp, Homo sapiens
agctgtgtttccttatcagctgagtagtcgtccatgaggaagcaagctccgaagttctcacgtcattgctaaaaccaacattcagatggacttaaattcaagagacagtaaaaccaaaaaca

SEQ ID NO: 448683 - DNA, 122 bp, Homo sapiens
gacttccaaatccacatctacttaacaccttttcttctgaattcctagttctgtattaatcggaccattttcacttggatatctaaaaccttatagtcatcatctgtctcagttcacctttc

SEQ ID NO: 448684 - DNA, 122 bp, Homo sapiens
agtgatcaagcaagtaattacgaccagtggtgagtaatatggcagggaaatgcagagaagcggggacacagagcaaacagaatacccatgggtgggaggttgacatagtgcctcctttgtgc

SEQ ID NO: 448685 - DNA, 122 bp, Homo sapiens
cccagagctgggacttggttaacaaaggaaacagaaacgggaacgctgccctcgagctcccggggagtggaggcccagcatatttttatgaagcatggacaatgagtagccattcaaaaggc

SEQ ID NO: 448686 - DNA, 122 bp, Homo sapiens
ggccgagaaggaactctgaagactccgtagattgctctagaccgcctcagacactctcggcgcagcgtggagaggatttgtgcaaacatttcctctgtggaccaagaggaatgcaagaggag

SEQ ID NO: 448687 - DNA, 122 bp, Homo sapiens
tccgctcctgctggcctcagccaatcagcacgcacgccgggacgcgcaaggggaacgttccgggacgttctcgctacgtactctttatcaatcgtcttccggcgcagccccgtccctgtttt

SEQ ID NO: 448688 - DNA, 122 bp, Homo sapiens
cactacctcataaggttgctgtgaggaataagtgtgttaattttgtaaacacttagaaggcggcatgaaagtgaagcagtgggaaaatgtagctgttgtggtactcatgtccctttcccctc

SEQ ID NO: 448689 - DNA, 122 bp, Homo sapiens
tgtgcgaggcttggcaagtttttgggggggctgtccaaggtctagtccagccccctctgccgaggaggacgtgctctgaaactcaaccaatttccccactgcttttgttactgatgaactga

SEQ ID NO: 448690 - DNA, 122 bp, Homo sapiens
cccgtggcactggaaaagtagttcaaacaaagtaacgctggcttttacgatgcagataaacggataagcggcgtaggactcaagtaggagggctccgtgcacaccaggcgcagcccagcggg

SEQ ID NO: 448691 - DNA, 122 bp, Homo sapiens
gtcactgaaacctggcctgaggtttgaagaagatggagaagagttatatttattgagaaccggctctgtgccaggcactagatgttcctccacttacgatggggttacctcccgttgaaact

SEQ ID NO: 448692 - DNA, 122 bp, Homo sapiens
cgtctccagaggtaggacgcagcttttctctctgaatccgcaaagcggcagcttggtcaccgcggagaggatagaccgggaggagctctgcgctcagatcccgctgtgtctggtaaaaatta

SEQ ID NO: 448693 - DNA, 122 bp, Homo sapiens
gttgacaaatattaccaatacagctcagttgttgtttatttgagaagtcaatgctgagttcgaagtgaatgaagaaatagcttctatgaagagcctgtgtagaagaactataggcaagatta

SEQ ID NO: 448694 - DNA, 122 bp, Homo sapiens
tattaccgcaaccaccgctgccacgcagcccgcaagaaatgtgccaccgttctgagcggccgacaaacccgcagtgcgctacgggaaggtcacctgacagttggggagaacggcagcccgca

SEQ ID NO: 448695 - DNA, 122 bp, Homo sapiens
cttcccctcgtcgccttcctcccactgtgcgagcttcggaaccctaaggccggttcactgcgcattgtccccgacaagttagcagcgctccccgaggggtgtgaggcaccaggtagggtgca

SEQ ID NO: 448696 - DNA, 122 bp, Homo sapiens
tcctttgctcaggactcctcctgactcctccaccggaatcccgctgggaaaccggctttccgccccagtgcatgctgggaactctgcccagctggggtggtttctttctccagtccacacaa

SEQ ID NO: 448697 - DNA, 122 bp, Homo sapiens
cgagctgcctggttagtgagcacctcctcttctctgggaacctctagaactgggaggacacgcccccgaaagggtgtccctgagccaacgtgggaccgcgagtgccagcccgttagcgtcgg

SEQ ID NO: 448698 - DNA, 122 bp, Homo sapiens
aagagaggcccaagagaaatgattcatttcatcagaaatgtttggagaaacagatgagttcgctgatgggagtggacttcacacactttgttctcagagtcatgagtttgaacctgagatca

SEQ ID NO: 448699 - DNA, 122 bp, Homo sapiens
agccccgcggggggagggcagaggggcctgtccagggtgagcgccaaactgcccgggggacggacactgtgggcgctggacagttatggatccctcagtgttaaaacccaagtgatcaccgc

SEQ ID NO: 448700 - DNA, 122 bp, Homo sapiens
cgcccccgcactcagctctcgcccccgccctcgccctgccctcagccctcgctctgccctcgggactgcttgggctcctgacccctgagatagggccctaacagaccatgcgggcacgtgag

SEQ ID NO: 448701 - DNA, 122 bp, Homo sapiens
attgtgcctcaggcaggctcctgcccttccaagccaagggcttggctgcagacccgacagcggctcccagaggtgaggctggggattgcagcatcctgccagctgcagttccctccctgctg

SEQ ID NO: 448702 - DNA, 122 bp, Homo sapiens
gagcttgctttttccctcagcaagctgcgtctgggagccctggaaggctccagaagcctccgggtctgaggaggcttctaaaagggcctcacatgccccgggagccacgtggatacagaacg

SEQ ID NO: 448703 - DNA, 122 bp, Homo sapiens
tctgcagaccccggagatcccctagaaattccgcagaggcctccactctccgcttgggcacgagtctgcatttatggagcgccatctgcatgcagcagccccgaaaaagaaggcgatgccca

SEQ ID NO: 448704 - DNA, 122 bp, Homo sapiens
tacttcagtttgctatgaaaatttcagaaacctatttctgaagatataattacctaaaatcgcatcatccaagaagcctgttcagactggaatgcagagctgcaaaacattccaagcagtcg

SEQ ID NO: 448705 - DNA, 122 bp, Homo sapiens
cgaagcagggcgaggcattgccacacccgggaagcgcaagaaatcagggaattccctttccgagtcaaaaaaagggatgacagacagcacctggaaaatcccgttactcccaccctaatatg

SEQ ID NO: 448706 - DNA, 122 bp, Homo sapiens
caggtcccgagccctgccctgcggggaggtggctgaggcccggcgagaattcgagtgtggcgctggtgggctggcattgctgggggacccggggcaccctcctcagcagctggcccaggtgc

SEQ ID NO: 448707 - DNA, 122 bp, Homo sapiens
atcttcccaaatctggtgcccataccttctatggcaggggcttttagcaccattctttaacgttagacacataaccacagcctaatcacttgaaccatttaatccttaccagcctctagcat

SEQ ID NO: 448708 - DNA, 122 bp, Homo sapiens
tcctgttcaaaaacctaagactggcctaagactacatttccattcaagaccgaacaccatcgtcaaatccgtggggaatatgtgtctctagacgcactaccctccgtcctacgtgccgaact

SEQ ID NO: 448709 - DNA, 122 bp, Homo sapiens
gcagagacagccaataacaaatgccttccctaccgaaactccctgatgaattgagcctggcggagaatgtattattgaacattaccatagatcagcacattgcatttatcttgtgattacag

SEQ ID NO: 448710 - DNA, 122 bp, Homo sapiens
actgggtgctgtggctcacacctggaatcccagcactttgggaggccagggcaggcagatcgcttgagctcacaagttccggaccagcctcggcaacaaggcgaaaccccgtctccacagaa

SEQ ID NO: 448711 - DNA, 122 bp, Homo sapiens
tctgcttctctctacaagcttgtttgaagccaagttaaagcaatggatagaagacggcagcgcgggtgtcagacctgccaatttccaactgcacaccaaatccccgaacatatgcttgaggc

SEQ ID NO: 448712 - DNA, 122 bp, Homo sapiens
cgatcaataataacactggcccaacacacagctataagaagcgaggcaagtacacattaacgcggtagcctgaagcccaagcgaagtctcagcgcaatgagccgcgcagaggctcagaggcg

SEQ ID NO: 448713 - DNA, 122 bp, Homo sapiens
ttctctgcagaaaatgcacatagtcacaaacatgaactttttgatacaatgtcaaagattcgacacacacccatgaagcacatacatggatcccaaagtatgaatcctactatggaaaagtg

SEQ ID NO: 448714 - DNA, 122 bp, Homo sapiens
gacaagtggacttctaagaagtctggcttggctgcttccctacctgtttgtggtgtctttcgggggaccccttggcaaggcagctgcggctgagacggaggtagccccccagaaccaagatc

SEQ ID NO: 448715 - DNA, 122 bp, Homo sapiens
cactgtttcccgtctgttcctggcctgacgcatcccctgggatgtcggcttttgggggcccggatttgtgtgttaggtttgctgttgcatctctgtggctcagacagccctggcacagttgc

SEQ ID NO: 448716 - DNA, 122 bp, Homo sapiens
cccgcagcggctgggttagccagccgccacgtgggttggcgcttcggctcccagccgagacgggtgtgacttcctgggctcagagactgcagtacagccgcacaggcggccggcgcagccga

SEQ ID NO: 448717 - DNA, 122 bp, Homo sapiens
gcatagaaaacattggggcacaactaaagctcataaatgcacacgttttcataacctgaccgaggtccatgctgctgtagcgcatacccccaagaacagagggccgcgtgttcttatggccc

SEQ ID NO: 448718 - DNA, 122 bp, Homo sapiens
agaacgcacagggatagttaggaatcgcggtaacacatacatcgcaggatcagaacacgacgagaaagcctctccctggcagaggcttttgttttgtttctgtctgtcacccagtctggagt

SEQ ID NO: 448719 - DNA, 122 bp, Homo sapiens
gctcccagcgcgccgccatcttgtgaagccatctagcctcgtgattggacacatccctctcgcgcgacctgtggctgatcttgaagaaagaagaaaccctcgcgacacctggggtttgctgc

SEQ ID NO: 448720 - DNA, 122 bp, Homo sapiens
gtcggtcacggcctcacaggtgtgtggtgagcattgtatgaatggcatgcgtagagtcctcggcaccaagcctgcaccagaagccaggtttcaaagaagggtgactgtggtgtgggtccctg

SEQ ID NO: 448721 - DNA, 122 bp, Homo sapiens
cggaggcgtggcagggggcgtggcgttgcgggcctgcggatgtgggacggcgtgcgcctgcgcaccagctggttttttctccttgggcggtttcgcgcacgcccccagggctgacaggtgag

SEQ ID NO: 448722 - DNA, 122 bp, Homo sapiens
acccgaccacccgccacgcgatcacgtcggggctcctggtccagcgtccgccggctcccgcggctccggccccaagtccgagccccaggccagccaagcccgcccctccgccgccgcccgct

SEQ ID NO: 448723 - DNA, 122 bp, Homo sapiens
cgcctaccaccgcacgctgggcgtggcgctcgactgcgacgccggcggcttgtccttctacggcctggcgggtggcgccagcctcttctaccgcttcctggcagccttcctcgagccgctct

SEQ ID NO: 448724 - DNA, 122 bp, Homo sapiens
cggaggctagtgacgcaggagtgtacacacaggtcagggttagtctgcaccacaccagcacgccagaccccgatgtatcaaatccgaggtcaggcagtggtcctgaagctgagcaaatgtat

SEQ ID NO: 448725 - DNA, 122 bp, Homo sapiens
tcctgctgtctcctcctagacaaacatccgcacatcacctctgccaagtcttctgtcctgcgaaacctcagccgcccacccctgccatcagagggacctcactgtcccaggactgggggggg

SEQ ID NO: 448726 - DNA, 122 bp, Homo sapiens
tctatagacacccagtactttacacaccactctcttttccattgcaagttataatggccacgctaagcagaatcccatcatgatgagaaggatctggctcaaagcacagacaggagtgcttc

SEQ ID NO: 448727 - DNA, 122 bp, Homo sapiens
gaggtcgtgaaggtagccgcgcggaggggcgtggcttcgggcagacaggtcatggggaggcggagttaagggaatttttcagcaagggggcgaggccacttcggaagctgagagagggggcg

SEQ ID NO: 448728 - DNA, 122 bp, Homo sapiens
cgccacgggctcttcccgccagtgtagccacattcctgcccctttccagttagcccttcgcgttcggcttagtctgcggtcctcttgcattgcgactccgagtttaacttccaacacacact

SEQ ID NO: 448729 - DNA, 122 bp, Homo sapiens
ttgcggagttttctcataagtaataataaatatttgggggaagcagctgggcaaggagcgcgaattctaagagcagactgcaggagtgcttaatccctgctttgccacgtactggctgtgtg

SEQ ID NO: 448730 - DNA, 122 bp, Homo sapiens
acaagggacaactcttggggggactcacccagaggggtcttgaatggtgctgaaggcccccgacagccctcctgcaatagccactgtagctctgcctgcacctgggccttcgctctgctgtc

SEQ ID NO: 448731 - DNA, 122 bp, Homo sapiens
gaagcccgcccaggaccctaggagatgcttcttcacttgggggggctacaacagagccctcgcgagcatcctgcagcttcggaccaccggcggcaaacaaagcccgagcaccgctcagccgg

SEQ ID NO: 448732 - DNA, 122 bp, Homo sapiens
gaataatgccatgggagtggattttatcatggtgttcaggaagggctgaataaacaaaggcggctgctttttatagccaccaccctaagaaccttgcaaaatgaaatatttactaagtaaaa

SEQ ID NO: 448733 - DNA, 122 bp, Homo sapiens
ccgcggattcgactaggctgccaggcgcagcgacaccgggtcgcggtgcgagcggcgccccggctctcgccgagaggctcctgacagaaaaacgtgcgtggttgtccccacccctgggaggg

SEQ ID NO: 448734 - DNA, 122 bp, Homo sapiens
agtctcctgcaccctcttccacagagcctttatccttgcctatctgcttctctgtctccccgttccccaacttgaatggccctcaagagcaagggccaaattcattttgctcctctcacctc

SEQ ID NO: 448735 - DNA, 122 bp, Homo sapiens
cgggcacaccccggagcgtcggcgactgcggacaggttagagtgggggcaggggcgggcgcgggagcagcccagggccagagagggagcccgagccaggccatctccaaccatgtccgacga

SEQ ID NO: 448736 - DNA, 122 bp, Homo sapiens
agaagtacaatctgcatttcacttttttttttctgaagtaatctctgagaacattttgtccgttccgcatgtaatttttttccttgcatttttaatctctgccatgccaagaacacgtgagg

SEQ ID NO: 448737 - DNA, 122 bp, Homo sapiens
ggccccattggcacagaacgatcacagcgtacagaccgaggcacagagcctggccccattcggccatcccatcgacctggtcccccagtccagtttggcactagtgacaaggtctgtgtggg

SEQ ID NO: 448738 - DNA, 122 bp, Homo sapiens
ccactcaagtcaccaaatgactgcagtcttatgagcgacctattggggagatggcaggaccgtcaggctgcataatgaattgttttaagccacaaagttacagggtggttgttaaatagcaa

SEQ ID NO: 448739 - DNA, 122 bp, Homo sapiens
agccaaggaccaggaagcaagccaaaaatagtctctaagaaaactaaacagaagtcttatcgtctgacgtaaactgcatttgacttaggagattcactcaatgccttcaatcaatttcaact

SEQ ID NO: 448740 - DNA, 122 bp, Homo sapiens
atttccgatagggcagggcagccctggagctgcaggagcacagaggaggtacccatctagcggtgaagtcttcttgggagggcggggcctaagctgagtcctgctggaattgctggtgagtc

SEQ ID NO: 448741 - DNA, 122 bp, Homo sapiens
gatggagggggtggtgggaatgggggctttcataaggtaggttccagcttcccaggaacccggtttgtccgtgtctggcagtgaatctgtgggtgcagatgcccatcagcacccatcaagga

SEQ ID NO: 448742 - DNA, 122 bp, Homo sapiens
gctcctgaaatggggctgcctcagccagagagatagcaagttatcttatccattgccgagcggttgagaaccctcactacttgccaagcgcgccgtactatgtatgtcatcttgaattctta

SEQ ID NO: 448743 - DNA, 122 bp, Homo sapiens
atgtgccacagcggcattcaggaaaattcggcgatgcgtgccaccgttgggtgcgcgccccgtccctctagtgccaggtgggggactgggaagccgcctctgccatctgccaaggacccacg

SEQ ID NO: 448744 - DNA, 122 bp, Homo sapiens
ggctgctcatcaggaattggtctggaacttgcagtgcaactggcccatgaccccaagaagcgctaccagggtaagaagtgcagggtggcactaggaggcagccgggtggaaacggcttcccc

SEQ ID NO: 448745 - DNA, 122 bp, Homo sapiens
acaagggaatcgatcagcgagcagccgactaacttgccagggaccgggtcaccatctccgcgctgtagtcatttataaccaccctgaagttggataatgcgccgcgggagacagtcctgcgc

SEQ ID NO: 448746 - DNA, 122 bp, Homo sapiens
tgtggtcctggtggaaggcggcgcggttgcaaagcacagccatgatgaggatcacgccgacggcggccgccagcacggccaggtagggcagctggagcgggggccgcgccgcgtggaaggcc

SEQ ID NO: 448747 - DNA, 122 bp, Homo sapiens
ttaagcaatttatagaaaatgattgaaaatgaaatatcctcttacaaatgagaaactgcacgggatgacggtcaacaaccatgaaaggttattgcctctccacaaactttattctgtaattt

SEQ ID NO: 448748 - DNA, 122 bp, Homo sapiens
gtccctggcccaaggccaggggccacaagttagttggaagccggcgttcggtatcagaagcgctgatggtcatatccaatctcaatatctgggtcaatccacaccctcttagaactgtggcc

SEQ ID NO: 448749 - DNA, 122 bp, Homo sapiens
cctccgcccggatggcaggcgggcggggccccagtccaggccttgagacccagaagggagcgaaggtttttgctgcgccaacgcagtgaccgaaggctccgctcacgcccgggtaagaggca

SEQ ID NO: 448750 - DNA, 122 bp, Homo sapiens
cctgccgcttctggaacaccacggcccccaccacggcgcagacaacgatgcccaggagagcgcacagcagcagcaggaacacccgccaccccgtcaggggcccgctgcggaagttccccgtg

SEQ ID NO: 448751 - DNA, 122 bp, Homo sapiens
gcttgcgacttctggtaggcaccggaatcccctgggatgcttgttttaaaagtcctgggccgggcacggtggctcacgcctgtaatcccagcactttgggaggctaaggcgggtggatcacg

SEQ ID NO: 448752 - DNA, 122 bp, Homo sapiens
gatgcagggtcagggtgtgtgaggcgcagggcccccgatgcagggtcagtgtgtgtggggcgcaggatcccctcgtggccagggcactttggtgcactgtcccacaaggcacccctgtctca

SEQ ID NO: 448753 - DNA, 122 bp, Homo sapiens
agacactgggccatgtctggggacatctgtggttgtgaccggttgggggagctcctggcacggagtggggtggggcaggggtgctgctcagcaccctgcagtgcccaggacagccccacccc

SEQ ID NO: 448754 - DNA, 122 bp, Homo sapiens
aggcggccagtctggtccaggatcctggtggagctgcggcgaggccgcctcgtcagcacccgcgtcctctgagcacgtccagtgtccccagcctggcgatcaggtagcgaacagcgcaactc

SEQ ID NO: 448755 - DNA, 122 bp, Homo sapiens
ccaccaggccaggggccccgcgggggtcccgccggccgagaggtcgcccccggagcactgcgatttgcatacagtttgcatttggcccacaccctgggccacgtgctccagcatctgagcag

SEQ ID NO: 448756 - DNA, 122 bp, Homo sapiens
gactgggcggggccgagccagctgagaccaggagacaactgagccctgaccctagcctggcgccaacctctagtgttccagaggcttccgctagaccacaattctcaggggcttgccccggc

SEQ ID NO: 448757 - DNA, 122 bp, Homo sapiens
gtagaaccttgatttagccatctactaacactcaggatgaaagaattaaatttcactctacggggaattaatcagccactatctccagttgattagattgcaacttgatggtgcagtagtgg

SEQ ID NO: 448758 - DNA, 122 bp, Homo sapiens
gagggcttcctggaggcggtgcctcagaccagggtggtgctgtgggcccggtgggaggggcggtctcacctacccctccccagcactgcctccctgagagctgccctgagagcagggcgtcc

SEQ ID NO: 448759 - DNA, 122 bp, Homo sapiens
cggggggctcctttcggccgctcgggctggggtccggcccagagaggaggcttctgcgggcgcctttggccgcgacttctcacttccgcgcggttctggtgaggttttagctaccgttcggt

SEQ ID NO: 448760 - DNA, 122 bp, Homo sapiens
ggcttcccgagaaggcggcctcgggccggccaggggtagaggatccagggacaagtgtcccgaggaggatgtggggggcgcgcgcgcgaagtggcctgggagcaggggcccacacgcgtccc

SEQ ID NO: 448761 - DNA, 122 bp, Homo sapiens
gcaatgggcacccgcgacgacgagtacgactacctctttaaaggtgaggccatgggctctcgcactctacacagtcctcgttcggggacccgggccactcccggtggaccctcgtgccggcc

SEQ ID NO: 448762 - DNA, 122 bp, Homo sapiens
tggggatttgtgaatgaacgagcctgtgtgtgtgcgcggggactgggtgtgtggaaggggcggtggcccagagaaaacccagctcctccagcactcactctggatcaggaccccttccatct

SEQ ID NO: 448763 - DNA, 122 bp, Homo sapiens
gatccaaactggcctcctggtagacatcatctttttcaaaaaggcagcggtactgcccgtcgtccgaaggtctggcactgagtatctgcagggtcagtctgccctcgtcaatggcgtcactc

SEQ ID NO: 448764 - DNA, 122 bp, Homo sapiens
taaacaagtggaatcaagattctgaaggatttcttcaacgaattgtaatgagagatgaaacgtggctttacaaatataatcctgaagacaaaacacaatcaaaacaatggctaccaagaggt

SEQ ID NO: 448765 - DNA, 122 bp, Homo sapiens
tagatattaggagcactctatactggacacaggaaggaaaaactaaaggctagctttgcacgatgctgccccccagtggtaagattttggaaatgcatttttatattaagtagaagaatcag

SEQ ID NO: 448766 - DNA, 122 bp, Homo sapiens
aaaggaattgtttaaatcaactataattaagctgatggttgcatttcaggctttgaattccgatcaagtttcaaattggttattattttggaggttgtgctttcatgttcctaggtatttct

SEQ ID NO: 448767 - DNA, 122 bp, Homo sapiens
gtttccccagatgttgagcccagaggaagacttgcactgggcccaatggccccaggtcagcgtccatcagccaggtgtccagcccctggtgcactgaagatcgggcccttcctggtgccctg

SEQ ID NO: 448768 - DNA, 122 bp, Homo sapiens
tgtctgacagaattaaggccgatttgagttatataattatgaatttaaaatgagactattcggcatggttgtataatttctgtatacagttagctgcacaaattcaggtgtggagaattatc

SEQ ID NO: 448769 - DNA, 122 bp, Homo sapiens
gccggtacccgagggggcttacgggaacttttttgaggaacactgctatgtcatcctccacgtgagtcgcttggggaagtctgcctgagaggggtggcatggcccggcactggggagactga

SEQ ID NO: 448770 - DNA, 122 bp, Homo sapiens
tgcccaccttgttgtcagtgtccttccggcccacagccgactgcagggcatgcaggagcgcgtccaccagcccttcacactcccggagtcgccgccgggcctcagcaccatcggagctcaca

SEQ ID NO: 448771 - DNA, 122 bp, Homo sapiens
ctggtttcctgtcatgtctgtgggtcgcatttcaaccagaccagccggaaggctccagaccgaagtcaggaggcctgttctggtcctgtgtgactctgagcaggtggctgaccatatctggg

SEQ ID NO: 448772 - DNA, 122 bp, Homo sapiens
cttctttccttggagggagagaacacaaacagctactctacaccagcattgtgtttgccacgaggacagacatacaagctgatggactggcgcctgccctccggggctgatattcagtcagg

SEQ ID NO: 448773 - DNA, 122 bp, Homo sapiens
gtgtgctgagcaccatgctataagtgaggtaaataaatatgctgagcaccatcgcacttacgcgatggtgctcagcacacagtgtagggaggcaagaggattcagggagaagcctctgagga

SEQ ID NO: 448774 - DNA, 122 bp, Homo sapiens
acccaagcagatgatgggagagccctgcctctgaccactgtgctgagcacctgaaagagtcgtgagcaggaggagtgaaggggagaggaggagagaagtggggagatgggtcacccccacaa

SEQ ID NO: 448775 - DNA, 122 bp, Homo sapiens
aggcctcagcagggcacactgtataacatagcctacagtgactgatttttgagcccgtcccgtcaaagcttgccctatggcctgccctgaccaccacctaaccaatggttagtcagcaaaga

SEQ ID NO: 448776 - DNA, 122 bp, Homo sapiens
cccaaccagttccagtgctccattaccaaacggtgcatcccccgggtctgggtctgcgaccgggacaatgactgtgtggatggcagtgatgagcccgccaactgcagtgagttgcctggcct

SEQ ID NO: 448777 - DNA, 122 bp, Homo sapiens
ctacatgaggcttttctatctgtaaagtcaagcaatggctgggaggcacacacaaccccccgcccccccgcaggcttctccttcattggcccgggcaaggtccctgcttcctctcaggccgt

SEQ ID NO: 448778 - DNA, 122 bp, Homo sapiens
accaggcctccagcacagctggccatacgccctcacagtgtcatcggcctggaatttaatcgtgatagtgtggacctatcagatttgagagatgttataaaaaattttatttgtttcttcat

SEQ ID NO: 448779 - DNA, 122 bp, Homo sapiens
ccagaagcacttcctggataaaatattaaacatgcaaatctgagacagagccttaacgagcgacagactgcacgaccacagcctggcaaacgagacgcacgacgtccgggggtgggggggtg

SEQ ID NO: 448780 - DNA, 122 bp, Homo sapiens
agtacagagatcctgcccatccaccgacaatccccctcctcatcttccttcccccaggtgcgagtgattcaaggaaatccgactggagggaacacacgctgcgatgcaccctctcctcttcc

SEQ ID NO: 448781 - DNA, 122 bp, Homo sapiens
gtgcggacggaaaggggcggagccgcgggctctggttggtgtgggctcgggggcggggcgcgcggggccgggccggaggcggggctagcgccgggcgctggagctgcgggcgcacggagagg

SEQ ID NO: 448782 - DNA, 122 bp, Homo sapiens
aagggagggtggtaacgcccgggagagggctcgaactaaaagctggctggctgcggagcccgacaggacagagtcagaggaaggggagacagagggcagccccacaccatcccactccgcat

SEQ ID NO: 448783 - DNA, 122 bp, Homo sapiens
tgacctgggttttctccgatacgcgcgatgtgcccgctgagggcaatatagcacccccctcgcacctcacccttaggcgtgccaggcactcttctaaatccgagcttctattaacccatttc

SEQ ID NO: 448784 - DNA, 122 bp, Homo sapiens
ctccccgccccctccttcctcccgctcggggccgccgccgatcggttctcgccgtcgccgcggggcttgttgttgactttgaggaaaactcctgacgtcaggggctggctctcggcgactgg

SEQ ID NO: 448785 - DNA, 122 bp, Homo sapiens
gaacagaagccatgagatctggactcacagctgcccccagagcccaggcaatggcactgacgcttcccattaaagctccacctaagaaccccctttgaaagttactgattattcatttattc

SEQ ID NO: 448786 - DNA, 122 bp, Homo sapiens
ctcaactcacaaagcagtttctttctactggtcgaattctcaaggcagaaaagctacatacgtctctcgtttcttcactaattgttctctagaaaagggaaagtgaagaagggaaagagaaa

SEQ ID NO: 448787 - DNA, 122 bp, Homo sapiens
actccgcacctccgagggcgtgaaaaccacgggagccgccccaccccgcgcgcccagccccgccccagcccagacaccgccccccgccagtcttccctgcggcgcccagggaggacgcgctc

SEQ ID NO: 448788 - DNA, 122 bp, Homo sapiens
cctttacccggttctttttcagtttaggccaaaatgcccacagggtggtggcgacgggggcggggcttggtgggcgggactgactaaggggcggggccagggtctcacaccctgcagtggat

SEQ ID NO: 448789 - DNA, 122 bp, Homo sapiens
atgcctgcattgctgagaacaaacccacctgagcaccccagacaccttcctcaacccaggcgggtggacagggtccccctgtggtccagccagtaaaaaccatggtccccccacttctgtgt

SEQ ID NO: 448790 - DNA, 122 bp, Homo sapiens
cgggtccccttcggccctggagccggggtcacacgctccccaccgcgtgcggtcacgagacgcccccaagggagtatcctggtacccggaagccgcgactcctggccctgagcccgggctta

SEQ ID NO: 448791 - DNA, 122 bp, Homo sapiens
tctaagtggcgtcttcctgtaatacagcatccacaactgatcgtccgttcctgtgccaaacgcaggtcctccgcacatactaggtgtcaccctcaactctgtgcacgtgacgcccggtgccc

SEQ ID NO: 448792 - DNA, 122 bp, Homo sapiens
gggaggagctgggggcgtcgccctggctgcctgggggcgcggggcctgaccttctgcctacgctcctctgtcctgttacctggggtggctacgccagcatcatctggccaaaaatacctcct

SEQ ID NO: 448793 - DNA, 122 bp, Homo sapiens
tcgtctccgttcccagtgtttctgccctagagtagacctctgttacctctcacttccaaccgctgtcataatttcctcccttgagtaagaagaaaacgagctccttgaagactggcacccat

SEQ ID NO: 448794 - DNA, 122 bp, Homo sapiens
gctctgaggtgcctgcagcccgcctggccggtccctgccgcgcactcccaacgccgtgcccggccccgcgcccttcaccaacccgcctgacagactctggctccacctcgtccgcccggtcg

SEQ ID NO: 448795 - DNA, 122 bp, Homo sapiens
tgctatgggcagctcgtcttcaccgtcaaggaggtacgggccggggggtgggcggcctcacggctctgagggtccagcccccagcatgcatctgcggctcctgctccctggaggagccatgg

SEQ ID NO: 448796 - DNA, 122 bp, Homo sapiens
tgaactcctgacctcaagcaatccacccgccttggcctcccaaagtgctaggattacaggcgtaagccaccgcacctggccagggtttgcagttttaaatggggtgctcagggaagagttta

SEQ ID NO: 448797 - DNA, 122 bp, Homo sapiens
cagcacagcagcttgctggttccatcctgcagcccctgctcacaatgtgccgattgtctgcgtcccttgtctgcagccttggccaggggaaactcagaacagaacccctcccctcctgaccc

SEQ ID NO: 448798 - DNA, 122 bp, Homo sapiens
tgacttcggttcccattcccagagatgtgagttagatccgggaccacggggctgcacctgcgtcctgcccgcccccaccctaccccttcacctcaggacctgacctagactccagagagaac

SEQ ID NO: 448799 - DNA, 122 bp, Homo sapiens
cgcggcggcggggaccatgccgaagaaagtctcctgagcccggcaacttcggcccctccccgcccccacccggctgccctccgcgcggccctccccatgtgcagccggccagccgggctctc

SEQ ID NO: 448800 - DNA, 122 bp, Homo sapiens
cttcagactttttgcccctggaggttacccaggatccttccgtgggcgaaaatctcagagcggcgccagccccaagttcagcctcagcccaagtcttaacttcagctccagcctcagtccta

SEQ ID NO: 448801 - DNA, 122 bp, Homo sapiens
tcttagagtcccagggctagaactggggagccctgtgggctcattaggggtgctagatctcgattatggaggatgggtctactccagattagagggttagtttagagagagctagagttggc

SEQ ID NO: 448802 - DNA, 122 bp, Homo sapiens
gggagaaagccccaggcggggcggcgagggcggaaggcgggcggtggagcctggcggtgccgtgtccctccctgcaggagctcaaggagtcttgcatccggaaccaggactgcgagactggc

SEQ ID NO: 448803 - DNA, 122 bp, Homo sapiens
ggaaggcgcttgatctgcacccagcagcagaggctgaggctggatgtctgatgctgtttccgtgcctggggagctctgagactgatgggcaagactccaaactatcccttctccctaccttg

SEQ ID NO: 448804 - DNA, 122 bp, Homo sapiens
caggagcaagcgtgcctgacatggcatctgcaggtcccaggctttctaaacatccctcagcgtctctcttggaaactacctggttcataggtaagagagttctgttcttttctgtgtggagg

SEQ ID NO: 448805 - DNA, 122 bp, Homo sapiens
aacctcgagatttttattgaccttcacttcagagaggctcctggccatagaggaggttaccggagccctggaactagtgctaaacgggcttgcggaggcacagcttgataggggaggtaagc

SEQ ID NO: 448806 - DNA, 122 bp, Homo sapiens
gccttctgggaacatgaccccaaaaaccaaaatttccacgggcggccaatgggcgcagggcgcggtgtatgcccgctcctcctcctgttttcttcgaattcgttcttcgaggtcagccctac

SEQ ID NO: 448807 - DNA, 122 bp, Homo sapiens
gccttacagcctggaattgctgcagagactgggagccaaaccctcatcctaatgtcccaacgcactttggggagggagagcttcccgcggatccgcctgggtttgggaggaccggggtccac

SEQ ID NO: 448808 - DNA, 122 bp, Homo sapiens
tttgaaagcatatccattccgtagagcagaggaattggccgctggcagggtttcctagagcgaggcaggtatagttacataggatgctggagtgtgacccttgtctgactaggcttctattt

SEQ ID NO: 448809 - DNA, 122 bp, Homo sapiens
gaactcaggcagctgctctgcctcaggaggggtccccagagagatcgggggctgactccccgtgcagtgggctctccaggcagggcctcctggcctctgagctctccagcgaagaggcctga

SEQ ID NO: 448810 - DNA, 122 bp, Homo sapiens
ctccaattatgtccaaagatgcaaactcttccgttaaagaccacaaccacgtgcccacttcggcagcacatacgctaaaagtggaacaatacagagaagattctcatggccgctgtgcaaga

SEQ ID NO: 448811 - DNA, 122 bp, Homo sapiens
atagctgcactctggaagcgtagatctgttttcaagtcctgagcaatttcttgcaccagacgctgaaagcgaagtttgcgaatcagaagttcagtggccttctgataacgtctgatttcacg

SEQ ID NO: 448812 - DNA, 122 bp, Homo sapiens
tgctcacccaggcctccatcacagtcaccatgatgatgagcagtgcttctttaggcatcacgtcaccaaaacaatatttcatcatgcagtgctatttttaaaaagtgaggatggcattttcc

SEQ ID NO: 448813 - DNA, 122 bp, Homo sapiens
agaagggaggttccgagaattacttaatcctgaacgcccttcagtgccagagccaatggacgtccagactgtagagcttttaaaaccccgtatgcctgggccccgaaccccacttcagggct

SEQ ID NO: 448814 - DNA, 122 bp, Homo sapiens
ctgctcattaaagcaaaaaaaaaaaaaaaaaaaaaaaagcaaccccacaaggttcagtcccggagcatcctctagggtctgtgccacctgacagaagtacagggctccatcctgccccaccc

SEQ ID NO: 448815 - DNA, 122 bp, Homo sapiens
tcaaaataatttcagacatacataaatattccaagatgaatgtaaagtatacccttcacccgtatttcccaaatagtaacattttatcacagtaactttatctcgctttttcttgtattatt

SEQ ID NO: 448816 - DNA, 122 bp, Homo sapiens
ccccctgctcaggctggccaaggagggcgcctctcctcccactcggcggctgggcccggccgtggtgtgtgatgggccgtcttgcccagccctggcccctggcccctggcccctggcgttct

SEQ ID NO: 448817 - DNA, 122 bp, Homo sapiens
tgactccaagaatgaagcagcggaccctcgcagttgagcgttacagctcttaaggcggcacgtctggagttgttcgttcctcccggtgggttcgtggtctcgctggcttcaggagtgaagct

SEQ ID NO: 448818 - DNA, 122 bp, Homo sapiens
aagcagaatacctttctgtcagtgtacgtttcattcatacatcgtttgggtcagggtctccggccagatacccgcagctaatgccctcaagtgtgaggtgcaacacctcaaggctgggcacc

SEQ ID NO: 448819 - DNA, 122 bp, Homo sapiens
gagccaagatcatgccgctgtactccagcctgggcaacagaacgagactctgtcaccccccgccccctggaaaaaatgcgttttttgacttaatgatattttcaattgtgatgggttaattg

SEQ ID NO: 448820 - DNA, 122 bp, Homo sapiens
ccttgataagagctgttgcattagagtgttcaggaagataatttgtaatgaaatgtatttcgaatacagatgctctttgatttacgatggggttacatcccgataaacctatcataatcaag

SEQ ID NO: 448821 - DNA, 122 bp, Homo sapiens
gccttgcctctactggccgcctccctcatagaccccgcctccccttgcctttcattggctcgcactgcagacctcacacccattttatgttttaaaaccaggaggccacgcccctcagcggc

SEQ ID NO: 448822 - DNA, 122 bp, Homo sapiens
ccctggatagtgatcaaacgctgacctcaaattagcaaggtaaccctctcaacatggtgacgcatatgtgtcacaactaacagttaaagaccttccgaaaatggcagctcccttgtctcccc

SEQ ID NO: 448823 - DNA, 122 bp, Homo sapiens
ttcttgaaaaactcacattacctgaaaatgcacatgtcaaagcactgtcctcacaagaagcgatggtaaaggacttcattgtccatccatggagcaaacagccctgaactaccaacacccag

SEQ ID NO: 448824 - DNA, 122 bp, Homo sapiens
gcgcagtgttcctctgggtcccggggtcagaagccggacagtggcgggggctggacagtccgagcgcagagcctcccgggcgaagtctgcgcgcagcactcccggctgcgctgtcggggacc

SEQ ID NO: 448825 - DNA, 122 bp, Homo sapiens
agcacaattcctggtatttagtaaggcctgaaaaatctgggccaggcatggtggttcatgcgtgtaatcccagcactttgggaggccaaggaggtaggactgcgtgagcccatgaattcaag

SEQ ID NO: 448826 - DNA, 122 bp, Homo sapiens
actggcgccccgctcgctccgcgcccggcgcagacaacttcccgcggctcggccccgccgcgtcccgggctcgcgcctccagggattccgcggccccccagcctccaaccccggcggcgcgc

SEQ ID NO: 448827 - DNA, 122 bp, Homo sapiens
catcagcaaacttacaaacttaaggggtgaattctgaagatagctgattttttttttaaccgtgttcaccaattctgagatatcatgtggtttgcatctttctagtgcaccaaatatgggag

SEQ ID NO: 448828 - DNA, 122 bp, Homo sapiens
tgttggattgaattgtgacctcaaaaattcatatgttgaagctctaacccctagtactttcgaatgtgatcttatttggcaataggatcagtgcagatgtaattaattaaaatgcagtcata

SEQ ID NO: 448829 - DNA, 122 bp, Homo sapiens
aaggcacacattacatattcaagacagaagacaatgatgtgcagaaataacacagactttcgaatctaagaggactgggtttgaatcctggtttccctactgaagagctgggttagtctagg

SEQ ID NO: 448830 - DNA, 122 bp, Homo sapiens
tgtttatttcagggacagacacaaggggaagcagcagccagagcacacccgggccgctcacgggaagccttgctgaagagagaggatccgcagaagctgggaaattcctcccgcagcctagg

SEQ ID NO: 448831 - DNA, 122 bp, Homo sapiens
gtggggctctcagccggctctcggggactcgggaagagtttcctccaggcgccagaaatgcgtgtgggtaggaggcgacccaggtcagggaaccgtgtcccgctcgcactcccggtgagggc

SEQ ID NO: 448832 - DNA, 122 bp, Homo sapiens
gcttaatggcccctgcatgccacagatgcatggtggacacatggctgtggcccccacacccggcgcccggggttgccgtggcacctgaagatgccctctgtctggtcaccgttgagcgccag

SEQ ID NO: 448833 - DNA, 122 bp, Homo sapiens
tatgtggttgtttcggtaaaacacacatttatgaaattcatcacttttactaagaacatgcgctatgttgtgcaaccatcaccactttctaattccagaatcactgcatcaccccaaaagag

SEQ ID NO: 448834 - DNA, 122 bp, Homo sapiens
aaaataccctaagtaaaccatgcaaagtctcctaaaccctcttttaataagattctgcctcggagctcacaagaaagttctggaacttctatccttattcctcatgtggtctcctaaccctt

SEQ ID NO: 448835 - DNA, 122 bp, Homo sapiens
caaccctcccacagccggggccaagcccgggccccaggacaccgtggagcggcccttctacgaactctgggcatcagacaaccccctggactggccattgtttggccaggatgagtttttcc

SEQ ID NO: 448836 - DNA, 122 bp, Homo sapiens
agggtcagcctcctgcccgggacgcttctcactctgatattagtttattggtttcttgtgcgttcggcccccggagcatcaggcctcacgttctgcacaagcgttcccggtggacgggctgg

SEQ ID NO: 448837 - DNA, 122 bp, Homo sapiens
gccggcaacgtccaggaaagggccacaggagaaatgacacccgtgcaatgcggagtgtcccggctccgcttccccgcagggactcgaggtgcgctccttttcctggccacggtttagggagg

SEQ ID NO: 448838 - DNA, 122 bp, Homo sapiens
ggacacttcgtttttggttttctgtcgggacagcatccttctcgaccaggcccgaggccgcgctgaactgcctcgctagggctccgcgccgggcgccggccgtctccgccgccacctccgcc

SEQ ID NO: 448839 - DNA, 122 bp, Homo sapiens
caaggaaaacacaggtgggaaaacagtttcttaatgaggaatatttgtaagctctgttggcgctcagcaggttgaagattgacaatgaaccacctaagggtgcagatttagcctcagggtgc

SEQ ID NO: 448840 - DNA, 122 bp, Homo sapiens
gagactgggctgcgccgcccggcggcgcctttggcggggaggcttccaggagtgcgcggtcggagttggagcttttggaatctcagctcccaccctgccatcccagacgaagggaagcaatg

SEQ ID NO: 448841 - DNA, 122 bp, Homo sapiens
ctcaaagtgttcatcagggtctccctaagattccggatgcagaaaagggaaggaccactgcgaggctctgagtgccagcaggtgaacaggctttccggccaggctgaggcctctgcagcagc

SEQ ID NO: 448842 - DNA, 122 bp, Homo sapiens
tgcctggagagcagcagctcagggcacttctatagtcacattcatacccacttttaaatacgtgcaaattaagggcaggttattcagaaatttctagaagaagggtggtaactgggtcattg

SEQ ID NO: 448843 - DNA, 122 bp, Homo sapiens
tgaagaggctggtgccaagagctgccaactagaacctggtaggtctgtaatctaagtgctcgcaagaatggggcagtggctcattgtggtttgaggctggcagggggtcaggcaggaatgaa

SEQ ID NO: 448844 - DNA, 122 bp, Homo sapiens
caggggtcagagcgtggggggcttccactaacttcaggttaagaggatgaaacagatccgcggagaagggtcccacgatccctggagactaaaagcaagccacgaacagccgggacgcgcgg

SEQ ID NO: 448845 - DNA, 122 bp, Homo sapiens
gctggagaacgcggcctgtgggcagggggtggggttggggtgctcctacttccgtttccccggcctacaggcgctgccctttgaccctggaagggctttggagagagggccctgctggggcc

SEQ ID NO: 448846 - DNA, 122 bp, Homo sapiens
ctagggcaacactggacctcccatagtaacagaggcttttatcttcctttctcagtgcttcggtggctagtgtctcctagacttctgaggagcacttggttcaaccaaagtgtattttcaaa

SEQ ID NO: 448847 - DNA, 122 bp, Homo sapiens
tctggacagcgccccaagcaggcagctgatcgcacgccccttcctctcaatctccgccagcgctgctactgcccctctagtaccccctgctgcagagaaagaatattacaccgggatccatg

SEQ ID NO: 448848 - DNA, 122 bp, Homo sapiens
gtgaggcaaactcacccacaaagtactcagcgaggaaacaacagggcttctgacggcagccgctgtcgccgcagcctgcctttcccttgcacagtattttctgctggtaaagagcctcagcc

SEQ ID NO: 448849 - DNA, 122 bp, Homo sapiens
accgtttttgaatgaacggcagtgcaaagcgtggtcggggttagcagcaacgtggctgggcgcctttaactcggcgtgacctccgggtcccaggcccgcgtcccgggcccagcgcccaggcc

SEQ ID NO: 448850 - DNA, 122 bp, Homo sapiens
gaccttgaaaacaattgagttcactggggtccagtatctggaccttttatgccatatattcgtatatccactttcctattttgaaatacaaagcagcaccaaattcatacaaatcttttctt

SEQ ID NO: 448851 - DNA, 122 bp, Homo sapiens
ctcctcataactcctgagaaaccctggacatgccagggtgtactatggagtggttgcatccggaagagggggaggaagtcccaaacactaagtaatccaggtttgggttggaaaacaaggtt

SEQ ID NO: 448852 - DNA, 122 bp, Homo sapiens
ccactcagcccaaccctggaagtcctatgcgggcggtgccatcccggcaagactgaggggcgggaataggccaaaaagcccacaacaggattcgcatctggcgccgccaggctcatatggcg

SEQ ID NO: 448853 - DNA, 122 bp, Homo sapiens
tagcagagcttgtcccgtcgccgtcccgaggctgtttgcccttgggaaggaggggcggcccgtccctggccctgcaggcgtccgcgcagccagatggtcacccacacgtttcctcaggcgtg

SEQ ID NO: 448854 - DNA, 122 bp, Homo sapiens
tggctggctctcctttactggaatgcaagtttcagttagagcaggacatgtgtttcagcacggtacacaggggcaggcacagtgcaggggctcgatgtggctcctccgtgcacacttgttga

SEQ ID NO: 448855 - DNA, 122 bp, Homo sapiens
cgcccgtcaggggggcaccgcggagcaaggtaagatccagcccccggcggatgggccctgcgcatctccacgacgttatttggcgtttttgcaacagatctgccagcgctcttcgctccctc

SEQ ID NO: 448856 - DNA, 122 bp, Homo sapiens
gcacagttcgttaagcccagggacatgctcaatgaacctttgcagcaagaggcagtgaggcgctggacgcgggcgccggtgacagcgcgggcggccggggaggggcgaggggccgccccggg

SEQ ID NO: 448857 - DNA, 122 bp, Homo sapiens
ccttttttctctaaaccctgtaacacttcataggagtccctcccaatgaaagccacaccccgcctggtgtctcacaccccaaagcagactgtaagcttcctgaagactgtcctgctcctcaa

SEQ ID NO: 448858 - DNA, 122 bp, Homo sapiens
aaaacctttcatacgaattagcttctctgtgacatattcattattttcctagtaatgaaacgggaactgtgagacaccatgtgaaaaggcggcttttattgtttctctaggttctatactag

SEQ ID NO: 448859 - DNA, 122 bp, Homo sapiens
ttcaagctggtgtccacctacaagaattactactcattggtgctggacagcgctctggaccgcgagagggtgtcggcctatgagctggtggtgaccgcgcgggacgggggctcgcctccgct

SEQ ID NO: 448860 - DNA, 122 bp, Homo sapiens
ctctggcggagctgcctcctggagtccctagtgcgccaggagcctcgctctgttctgattcgtatgggctccaccgagttccgcttgcgtcaggcgccttcgcccctatagcggggcggcca

SEQ ID NO: 448861 - DNA, 122 bp, Homo sapiens
tcaactcctgacctcgtgatccacctgtcttggccctgggattacaggtgtgagccaccacgcctggccaggagtttcttaactgttctatacatgacacatgctcctgaggaagtgaggta

SEQ ID NO: 448862 - DNA, 122 bp, Homo sapiens
ggggcccagccctggggggctgagcttgtagaaggagttctgcacagagtactggcacaccggggccttcatctccggaaactgagccagcggcgtgttgttcagcaggaacgtcccctgca

SEQ ID NO: 448863 - DNA, 122 bp, Homo sapiens
cccctatttttgcttttaaactatgtgactttgagaaaggcacttgacctctatgggccccggtgatcttacctgagaaaatgaaagggcaagaaggggtgggtaaggcaacccagatggac

SEQ ID NO: 448864 - DNA, 122 bp, Homo sapiens
tctgcaggccccgggctggcacatcacagcgagaggagagacaggagaggggccctgctgcgcgtgggcgttgggtcaaaaactccccctgtacattcaggactgacgttgtctttggcggc

SEQ ID NO: 448865 - DNA, 122 bp, Homo sapiens
gcagctccttcgttgcagaaaccgcatcggagcacatcgcgtagtgcaggacacacggggcgtgggacggtgtctgtgtgagagcagcatctgtgtgtatgcagtgttatctaaggacacac

SEQ ID NO: 448866 - DNA, 122 bp, Homo sapiens
cccgacacccacgcgcaggaatagggagggcgcatcgcggctcccgcgccccggccaggccggcaaggaccccaccgccccgctctcgggtggaggcgcccctccccacccctcccccgcgc

SEQ ID NO: 448867 - DNA, 122 bp, Homo sapiens
cctacagaggatcagggaaggagcatttgatctacataaggtgtgagatgtcccccgcgccggtttttgcacacctgagtgtgtaaggtggtgctgtcagcatggtgcataccggaggaggt

SEQ ID NO: 448868 - DNA, 122 bp, Homo sapiens
agtggagccttagctggagcaccatgggcacggccatcttagaggaaggcagcagccgtacggcagagaagatgctcatatccaggacaatttggaaaaataaacaaggtttgaagaagtca

SEQ ID NO: 448869 - DNA, 122 bp, Homo sapiens
aagctgcttacaggcagatgtcaggctcagtgagttttccaaggggtggtatttgggccccgccaaggctgattatcaagaggtcactgggagcctccggagctcggcaagaaggagcctcc

SEQ ID NO: 448870 - DNA, 122 bp, Homo sapiens
agtatttaatgacgcccgttggctgctggcgtggggagtccggttccccgacacagggaacgcgatctcatctgtaacaccaattaaggaggttcattgactgtgccattcgacttcctgcc

SEQ ID NO: 448871 - DNA, 122 bp, Homo sapiens
atggatgtagaggactccttggagctgttatcctctcattacaccaacccaactgtgaggcgttatgctgttgcccggttgcgacaggccgatgatgaggtgcattattatttattattctg

SEQ ID NO: 448872 - DNA, 122 bp, Homo sapiens
gctagccaaaccctaacacctaatgaccgcgccgctagcttttcttgttcacccctaagacgctttcatgtccttaagtcacatagcctggaaaagaaggaaaggtgggagaaaacaacagc

SEQ ID NO: 448873 - DNA, 122 bp, Homo sapiens
acctagggacagggaagtctccaaactccaggggtctttatgccctatactctgcccctccgacccctggcccctccaccattccttcctttaaagcggtacattaatgactaaattttagt

SEQ ID NO: 448874 - DNA, 122 bp, Homo sapiens
cctgcagtggagggagatgagctgctgagacggagccacaagctctgtggcctcagcgggcgtcctgcccctgccgggctgagggggactgatggacggtgtgggtggcatgagatggagac

SEQ ID NO: 448875 - DNA, 122 bp, Homo sapiens
ccgactcactcaaagtctccagtaggcatcgcaaaaagtattctccacgcagcccaagcccggccagagagcggaagcgggcgaaaacgagacttccggtgccgccgtcgccgcctagaggg

SEQ ID NO: 448876 - DNA, 122 bp, Homo sapiens
caggctggcagctgacttggatgcctaatgggtgggtttccatttctatgggtacatcatcgcataacaatgcccaatggcatcatcaacatgaaataagctaagaactaacttcagggaca

SEQ ID NO: 448877 - DNA, 122 bp, Homo sapiens
gtcagcctaagtaacatggtgaaaccccatgtcaacaaaaactacaaaaaattagcctggcgtggttgcatgcatctgtagtcccagctacttgggaggctgagatgggaggatcacttgag

SEQ ID NO: 448878 - DNA, 122 bp, Homo sapiens
ggaacatcgggggttgagcctcttcctggactgggcagagggagggaagagggctcatgccgagaaccatgtaagtattataactgagggccatgagttaaggaaggaatgtcaggagtaac

SEQ ID NO: 448879 - DNA, 122 bp, Homo sapiens
acacacacctttccccaggccaggtctccttccagggagcaggcctctaagaggcaggagcgagcctgtgggccaaagtggtaccccagctgtgaaagcagggtactccaatgctctctgcc

SEQ ID NO: 448880 - DNA, 122 bp, Homo sapiens
gtagagacgtgttagccaggtttcaccgtgttaccgtgttaccgtattccagccgggctccgcccctggattcggtggacagaccagctttacctccagagactccccctgtcttccctgca

SEQ ID NO: 448881 - DNA, 122 bp, Homo sapiens
taggaggaggggaggggtggagagaaaagaggggagggatggggggaggggaaacaggagcgaggtgtctccctagctcgctgcctctggcaagtggagtttttaaaaagctccagcagatc

SEQ ID NO: 448882 - DNA, 122 bp, Homo sapiens
aaatcctctagactccagccagatatcaaatttcctctgccttcagctttgcttgactaacgccttgccagtttttttttctcatacatattcccaaccagaggctcactcggcagaggttt

SEQ ID NO: 448883 - DNA, 122 bp, Homo sapiens
ccacaggccacggagggggagccgcccgggaaagtgggtgcggccgagttcgcgcaggggcggggccgggcgccgggagctgggcggtgtccccggggggctctgggttcctggagggcctc

SEQ ID NO: 448884 - DNA, 122 bp, Homo sapiens
ttgctcatggaaataacattttcatgagcaaaggctaaccccaaatgctttcctcctaaacgttcttctcatctacaaatccatgtttgaggaactattattttgtcatttcttacaaaagg

SEQ ID NO: 448885 - DNA, 122 bp, Homo sapiens
gcaggtacgtgcgtgtacacatgcacacaaacatgaatattcagtgaatggcaaagcacacgtgtgtgtgtatatatatatgtgtgtgtatatatgtcagattgtcataactggaatgctta

SEQ ID NO: 448886 - DNA, 122 bp, Homo sapiens
aattccatgtttcattgacaacctgtaaggctctcctccagcccaatgtgggggcaggaccgggaggccagtggagagaggggagaggagtaggaaaatgtgggggagcggggtgggggaag

SEQ ID NO: 448887 - DNA, 122 bp, Homo sapiens
aaagccaaggtccttgcccttgtgggagttcacagtctaatggggactattttaaccctgcgtggtttttagtccagtgtgtcccagagtctacctcttttgttgtaactgctgctagtgac

SEQ ID NO: 448888 - DNA, 122 bp, Homo sapiens
tcctggttctgtgccagcgcagtgcagggtggggacgcaggtgccaggcactctagggggcggatagcagaggccaggccaggtgcccggctctgatgggaataaggccctggaacttgggt

SEQ ID NO: 448889 - DNA, 122 bp, Homo sapiens
cgtctctgctgttacgatgatagtgcacactctgtgcagaaaagacggctccactttacacgtacccaggcagaatactacagtgggcctgttgccgggcaaccacagctagaacactttgt

SEQ ID NO: 448890 - DNA, 122 bp, Homo sapiens
tattgaaatgtgtatgtgtttttatttcttaggaatttaccttatagaaaaccacacacacgtgcaaacatatctctaaatatgttaattatagcactatgatagcaacaacaaaaaaacac

SEQ ID NO: 448891 - DNA, 122 bp, Homo sapiens
gcggccgccgaggcccgtgccccgcggggggaacagatgaagcacatctggacagctgtgcggcctcctcgcgggccgacgtcagccgagcacgtcccccacgtcctctccttctcgccact

SEQ ID NO: 448892 - DNA, 122 bp, Homo sapiens
ggacctgctgcggtgagcggggcctgggaagcgagcgcagccttggtgcggggtccggtccgcgggcgccggcgcccccacgtggtccccgagggctcgcgtgttaggaaacctgtcttgcc

SEQ ID NO: 448893 - DNA, 122 bp, Homo sapiens
gaagggctgaatgcaggcaccactggtcacgagggcgtgactgggcaattcctccttcggcgggcgcccacctcctggcacccgtggcacagctccgggaacggctgcgggcccagccgctg

SEQ ID NO: 448894 - DNA, 122 bp, Homo sapiens
tgactgttactgcagctgtgatttcaacacagagccagtgctctttctgtcacatggtagcgttgccttcaaataactgacggtcatatccgccagtgttgtaatttggctggaatgcagta

SEQ ID NO: 448895 - DNA, 122 bp, Homo sapiens
ggtgggtcgggggctgagggctggggactggggcagggtaccccaaatatctctcggtggcgatcgctcagtccgtgcagtccatccagctcctgcattgtccgtcctaccaataacctctc

SEQ ID NO: 448896 - DNA, 122 bp, Homo sapiens
taataaagagaaagggatagtccattcctcaagggaataattgtgtgtgaaaacctgagtcgggactttatagagtacatccaggccatgattagcaggtctctttgttggaatggaagctt

SEQ ID NO: 448897 - DNA, 122 bp, Homo sapiens
ccttgcacacgctctctgtgtcttagtgtccttcagaattagctgttggcagggaagagccggcgtcaggagtcaggaactcggacacaagaaagaaaccagggggcgggacagggagctgc

SEQ ID NO: 448898 - DNA, 122 bp, Homo sapiens
aaacagcattggctgaaattggcctttatcctcagcacggctccaaaccacttcattttgcgcttactccttgctaatggcctccctccctccttttcagcacagaatgcagtgttgggagg

SEQ ID NO: 448899 - DNA, 122 bp, Homo sapiens
gcgagccgctgctgggagttttctgcaaataccccccaaagcctgaaggcgggcttcaaacgcaggcgccggggaccatgggagccttcaaatagctgcgctggcgcaatgataccttaatg

SEQ ID NO: 448900 - DNA, 122 bp, Homo sapiens
tctcggtgtgtggccctgggtgcccctgtgctgctctcctgcctggccccacagcaggagcgtacctgtcagtcaggtgtgcatttaagaagtcggcctcccagggcagccttctgccctct

SEQ ID NO: 448901 - DNA, 122 bp, Homo sapiens
tttccatctctaattttagccgtctagggcagaaacagtcccgggtaaacaccaaggcctcgtgggaggcacctaggaggtgaggaggggctacgtctgccgggtctccaagcaggagtgag

SEQ ID NO: 448902 - DNA, 122 bp, Homo sapiens
ctgaacttgcacccaacgtcagggcgcgatggagtgaagcggcgacgaaggtggtacttccgcgttgcgctgcccgagccgagagcgcggccaaggccgctcccccacccccgggggcactt

SEQ ID NO: 448903 - DNA, 122 bp, Homo sapiens
aaaagaatttgaatgtgcattaaatgccatgcctgccctaaagagctttgtctctagaagcggagaggatgcttgaggttgcatgctcatgctaagctgtgaatgtagttactaaaaggaca

SEQ ID NO: 448904 - DNA, 122 bp, Homo sapiens
cgggcccgacgcagcccccaccccgccgcaggcccgcgtcccccccacccaagcggtctgcgccccccccagccccaggcccgcccccgccgcgcaccgtcgttgcagcaaacgccgaaggc

SEQ ID NO: 448905 - DNA, 122 bp, Homo sapiens
tcacacgcgggtttttaaggccgaaccctaggcaggctctgcagaggcagcggttggaggcgcggtgggtgtctgcgggggtctcgcggggcggctgcggtgtttcaccgggaaaggctcga

SEQ ID NO: 448906 - DNA, 122 bp, Homo sapiens
accatggcaaaaatagtttgatgacaagtaattataatctctctctctggccatcattggcgagtgcagtgttgagctaaaagtgacccagaggaggtgaactataatttacttgagttaag

SEQ ID NO: 448907 - DNA, 122 bp, Homo sapiens
gaccaggagggtcaggggtgcgggtggtgagcatctcacgatgctcagcgcttgaccctgcgtccggccgagttgcgcccgctgcggcggtagagggactgctggccaccgttaagcgggca

SEQ ID NO: 448908 - DNA, 122 bp, Homo sapiens
taacaccagccccagagctaaacacacaggctgggactggtggaagcaccaccacagcagcggcaaagactgggattagagctgagtctctcctcccagatcaagggattctctttaagcac

SEQ ID NO: 448909 - DNA, 122 bp, Homo sapiens
ggtttataaattaacagctgttttaactttagggcctcttcttcagggaatggaagcagccgactggaccgggattggagtgtgtgtaaggctggtggagggagtgggaggcggggggctcc

SEQ ID NO: 448910 - DNA, 122 bp, Homo sapiens
aaaaaataaataaataaataacctggtgtaatctgaacttaacttttttataatttgcctcgttagactaaaagcagccttcccagcatctccctgcgaggaggtaaagtaagggccttgga

SEQ ID NO: 448911 - DNA, 122 bp, Homo sapiens
aggccagaggaggctgcggagccatgatgcctaaatataacgtggcatcctgaaggcatccggaaggagcagaaagggcattaagtaacaactaccaaaatcagcatcaagtgtggtcagaa

SEQ ID NO: 448912 - DNA, 122 bp, Homo sapiens
tgccccatctttgtctcttcttactcagcccggagaacagctaaaaacgccaccacttaacgtgcatttgtgtaagagtttgttcccccaaaaagcctattgagcattacttgtggtttata

SEQ ID NO: 448913 - DNA, 122 bp, Homo sapiens
ccctagtgattagaccagcacatacagaaggcagaaatagatgtctgtagaatgaatacacgaacaacaagatcttcggaagagtacagcatatgcccatggtgactctttagattttgaat

SEQ ID NO: 448914 - DNA, 122 bp, Homo sapiens
agaaatatgaatgaggcattgcctctgctttcagagatcacatgaacaacaacaatagaccgtgacaaatattatattgaaagtagcagtggtacactggagctggcttctgtcagctggta

SEQ ID NO: 448915 - DNA, 122 bp, Homo sapiens
tttgataaggagatggggccaaaaccagttaagacgaggtttgtttacagcaattccccccgtgcctgcaaaggcaaatataggactggctctgagctcccttcacgtgccaatatactaat

SEQ ID NO: 448916 - DNA, 122 bp, Homo sapiens
cacccgagtactgagcttttccgacgggcttaaaagacggtgcaccacgagactatatcccgcacctggctcggagggtcctacgcccacggagtcttgctgattgctagcacagcagtctg

SEQ ID NO: 448917 - DNA, 122 bp, Homo sapiens
aaaacattacagccccacaggcagggctgctccggccttcgtttagcagcttgattgaggcgtcattggcacacggcgaactgcgcgtcattaacgtgggcggttcagtgagttctgaggaa

SEQ ID NO: 448918 - DNA, 122 bp, Homo sapiens
cacagcccctgccatcctggggcttacattctagtgtctgttgaaagaataaatgaatggcggtgtgtgtgctgaacaagctcagaaaaagtgatgttaggaaaggggtttgaggtcgtcag

SEQ ID NO: 448919 - DNA, 122 bp, Homo sapiens
tagcaaaatcacactggcacttatgctggcagccggccaatgtccaacctatgtgaggaacgacagaatagcagaatgaccagacatacagaaagaagggaaaagaacgtgtgcaacagaat

SEQ ID NO: 448920 - DNA, 122 bp, Homo sapiens
gcaaaagggatctcccctgaaaggattaaggggacacaagcataccctacagggcctgaacggagcagcctccagcagtgattggcggggttctcattattcctctcgcgtgtgctgctaga

SEQ ID NO: 448921 - DNA, 122 bp, Homo sapiens
aagaaaagcaaagacaaggcgaggaggatgctgagggtgggcaggtgggcacccccaccccgctgcgccggccacgccccttgccgctccctcgccccggggcccactttaaactcccgccc

SEQ ID NO: 448922 - DNA, 122 bp, Homo sapiens
cccgctccgccgcccgccggctgccgccgaccgcctccgctctagcgcccgccggccgcccggaacgtccgcgcccaataaagcgttcctccaaagcttgtttgtgccgttgtctgtattcc

SEQ ID NO: 448923 - DNA, 122 bp, Homo sapiens
caggggtcctcgccccatcccggtccaggccgtttgtgtatctttgtaaactggcaagcgcggtaacttccttccctgaattaaatgcagggcccaataaacatttcgtggcggaggtacac

SEQ ID NO: 448924 - DNA, 122 bp, Homo sapiens
agcagcgacactggcagcctccgacctctcagaccgagtaagccaagcgaagcctgtaggcgcacgcttgcagctcagcgcccgcggggactccggaagcctctcccaagtggcgcggtccg

SEQ ID NO: 448925 - DNA, 122 bp, Homo sapiens
tctaagaaagggaggtcacagaatgggaatcaagaacttagaggagttcagactataaaacgaagaaatactacaagtcatgtatttgtttgttttataggctgaactcctacaccagaagt

SEQ ID NO: 448926 - DNA, 122 bp, Homo sapiens
gagagtctgtgaccccgcgcagcaccgccaggctgggcccgcctccctcccacgcctctgcggatgcaaccagatgtcttccttgcccggattcccagaagctggagaaaggtaaaagtttc

SEQ ID NO: 448927 - DNA, 122 bp, Homo sapiens
agcagggccgcgcggttgtagacgcactcgaaggctggggccagcgggatctcctcgatgcggaaggtgacgccggagaagctgagctggcgtgcgatgtacatgccgctgaccttcatgtc

SEQ ID NO: 448928 - DNA, 122 bp, Homo sapiens
agaaatacttactgagtaccttcaataagtacctttcagtaccttactgaaatacttctgcgtgctttattccaggcactgggaatgcaacactgaacaaaatccttgcactcacggaagtt

SEQ ID NO: 448929 - DNA, 122 bp, Homo sapiens
gcctcgcagcctgggctgcaaactttagcgtcctttaagttacagacgtgcgtggggctccgtgaggaggtgggcgaagagaaaggctctgagtaaataggcaaggcccggggtgagcaggg

SEQ ID NO: 448930 - DNA, 122 bp, Homo sapiens
ggcgccgcgacgccaggccggtcccgcgctctcgccccacgctccggagccgcccagccgcggtctctcagctccggccgcgctccagccccaacggccccgcgcccgtccgccgcaggtgg

SEQ ID NO: 448931 - DNA, 122 bp, Homo sapiens
ggcggcgagtggtccctctgcacacggtatctgggccgagtctggattcattagagtccccggcgcccagcactgagtggcatgcataagtattggtgtcacgaacaacggtcagcccccgg

SEQ ID NO: 448932 - DNA, 122 bp, Homo sapiens
attgattttcagtaactgaatttgtgcacaaaacattctaaacactagtgaagcctgtttcgttgaactaattctggctctggaaatgtttttgttttatagttatttacgatttcgtttgt

SEQ ID NO: 448933 - DNA, 122 bp, Homo sapiens
gacccccaagtctttgagcagtagtgaaaggaatctcaggagaatatgggaaggcttgatcggatggtactttggaaactgttatttcattcagcatcccacactgcctctgggcttcacga

SEQ ID NO: 448934 - DNA, 122 bp, Homo sapiens
aaacagagcactcagggaactttgttttcctctcctcttgactttgtttctgtttctgaccgccccagccttaaataaatagtctttgatgttgagtgtgataaccccttaccacgaagcat

SEQ ID NO: 448935 - DNA, 122 bp, Homo sapiens
ctgcggggtgtgggggacgggtgagcacaggaccgccaagttgtcccacgcccacccacgcgctccaacaacccaccctggcccacagccacccctgcctagctctggtcccccgtgagtgt

SEQ ID NO: 448936 - DNA, 122 bp, Homo sapiens
aaagtaggtatctgtgagcacgcacctgaacacatttaggaagtgcctccatttaaacaacgctttgcagtagatttctgttcaatgtaactgatcattcctgatcttacctatttcaaaag

SEQ ID NO: 448937 - DNA, 122 bp, Homo sapiens
attccccgcattggccccagttattaagcatttctcagatttaccttgagaaatgcccatcggcctgtatattcacatcttcacccttgtcccttcctcctagaaaggagaaagtcagttgg

SEQ ID NO: 448938 - DNA, 122 bp, Homo sapiens
cttccttcaaaagtgattcaacgtgtggcctgagaagcggcagcatcagcctcacctgggcgttggtgagaacggcagcatcttggcctctcctgctgaatcagagcgcgctgcttaacacg

SEQ ID NO: 448939 - DNA, 122 bp, Homo sapiens
gtgaggagagccagcggcttattggacagcagggcttggtagacgggtaaggggcagggccgggcaacagacccagggataagagagactggggtccaggtggcagccatggtccttgggta

SEQ ID NO: 448940 - DNA, 122 bp, Homo sapiens
cctggctggcccctgccagccccgggctgtgcggctccactctttgcctttaggtactcccggatggcttccgcaatgtcccggtccacggaatcatcattgaatctagcaccaacgggcca

SEQ ID NO: 448941 - DNA, 122 bp, Homo sapiens
ggcagggcttggctgagaactagggtctttccttcaatatccgggcagccaggggctgcacgtgcaagacagaggagggtatgggccccgctgcccctcactttcggccccatctcctccgg

SEQ ID NO: 448942 - DNA, 122 bp, Homo sapiens
ggcagctgctctgttctccctgctcgtcaccattggatttttttttttttgccatggtggcggcactctcattggtcctggggctcattcgtcactcagccgcgattggctgagtcggcacc

SEQ ID NO: 448943 - DNA, 122 bp, Homo sapiens
tttgtaattgcagaaaccagaaacaacgcaaacgcccccatcagtgagcgcagaacgagtcgccatgcataggtgcagtggacgccgctcagcagggagacgggcagggcaggccgtgggtg

SEQ ID NO: 448944 - DNA, 122 bp, Homo sapiens
tgtgcgcatgcgcatgggcaccttattgttttcccccccaccagcacagcttctgggcggcggccacaactaaaaatggttggggaaggggcgataatttcgtctcccctccccacataaat

SEQ ID NO: 448945 - DNA, 122 bp, Homo sapiens
tgaggggcgcagcatgggttacagccccagctctaagacttcggctgtgggattggagcacgggacttcctgtttttagatatgaaatgagggtaaagggaatgtagagggggacaatccag

SEQ ID NO: 448946 - DNA, 122 bp, Homo sapiens
tgaaatcttgcactttctgtgttttaaactgatctatatcatctgtgaaaactgcccattcggaataattgctcacagattcctcaaaagtagagaaagcaaacatcaataatgctaagaat

SEQ ID NO: 448947 - DNA, 122 bp, Homo sapiens
aaaggcaggaaaacacaatctctcatagagtctccagaagaaacagccacactgacacctcgactttagcccagtgaaaccgatttcagacttctgacctccacaacttcaagataatacat

SEQ ID NO: 448948 - DNA, 122 bp, Homo sapiens
gaagaacatgccaggcaggcgaaggactgagcaggggtgtccacacgctgctgaatggagcggctagagccgggtgcctcgctgggagccggtgaggacggtgtgcaggctggaaatgtccc

SEQ ID NO: 448949 - DNA, 122 bp, Homo sapiens
gcttgtacactgttggtgggaatacgcagtaaaatggtgcagccattatggagcacagcacggaggttcctcaagaaattgaaaataaaactaccatatgatcccgcaatctcactactggg

SEQ ID NO: 448950 - DNA, 122 bp, Homo sapiens
ttgtgggtgtagttcattggtaggtggataaacagtagcagggcttcgtgacaatgtgctcgtaggcgctgtgacatgaggcctcttggctgtagggtcctttcacgcaggccagaatttac

SEQ ID NO: 448951 - DNA, 122 bp, Homo sapiens
atgtgaaagagagcaagttattccagttaaggtcggcgggaactcggcctgaaaaccttccgtctccatccgccttcttcagacaggaggatatgggcgaaggaactttttcatgcggggtc

SEQ ID NO: 448952 - DNA, 122 bp, Homo sapiens
ctcccagctcctgcctgacaagttactgcctaacccgtgacttatttcgggaatccctgacgcatttctttaccgtccctcatttcaaagcacaccatgccggcagcacttggaggtggtat

SEQ ID NO: 448953 - DNA, 122 bp, Homo sapiens
agacttcatgcagctctgtgggcctcaggcgcaggacgagcacctggcagccatcgtggacgctgtgggcaccatgttgccctgcttctgccccaccgagcaggctctggcgctggtgtgag

SEQ ID NO: 448954 - DNA, 122 bp, Homo sapiens
gagggtcgcacgcgggttccagttgtgattgctggagttgtgtattgccaggaggctctccgagattggggtcgggtcactgcctcatccaccggagcgatggcgtttctccgaagcatgtg

SEQ ID NO: 448955 - DNA, 122 bp, Homo sapiens
acagcctattcattttgagcacaggctttggagtcacaagttccctttggaggacctggtcgctgacactacggttgtacgctgacttttgtcaaatgacttaacctccttgagctttggtt

SEQ ID NO: 448956 - DNA, 122 bp, Homo sapiens
agtcagaatgccactgccttatctaccctaaatcagccaaactagcggcaagatgcagtacgtggcccatctccaatcaccagagccatccaccaaacctaggttagaaaaatgtaatccaa

SEQ ID NO: 448957 - DNA, 122 bp, Homo sapiens
gtgtgctcatggccaaggccaggaccgtagggcagaggtgggctggagcaggagggtggccggcagtcaccccaacatcttccaacccagcctgactgaggatcagttcatcaggaccccca

SEQ ID NO: 448958 - DNA, 122 bp, Homo sapiens
ctgacgctcctgttctctccactctccacagccttagccccgtgggccccacggagtgagcggcatgcagcacccccgggcctgtccagtgtcctctggcctgctgccctgcacccccagaa

SEQ ID NO: 448959 - DNA, 122 bp, Homo sapiens
ccggcctaggtccacccgccgcccgtcccggagcctcctaaggccgcaggcgacgcgccccgccctccggggacaactaggccccggccttttccgcagactccgcgctccgagccgcggcg

SEQ ID NO: 448960 - DNA, 122 bp, Homo sapiens
gttgttaggggccatcctggatgctggctaccacacgtggtgctaaaataagaattctcacgcctttctagtagtcagtaggaaagtaaagcatgtaaatttgttgcttaccttcccaaaga

SEQ ID NO: 448961 - DNA, 122 bp, Homo sapiens
accttcactgggggcggggctgtagcagactccgccctttatcagacaagaagagttgggcgtgtccggccccggcgtacccccggcgcatgcgctctggtgggctcgtctaccggcggctg
